United States Patent Application Publication US 2025/0084491 A1 - sequence listing, part 22

SEQ ID NO: 411692 - DNA, 75 bp, synthetic construct
  source 1..75: mol_type = other DNA
caaggtgtggatgccgttcgtcaggagctggctcgctctaatgattgcgctggtgctggcattctggttattggc

SEQ ID NO: 411693 - DNA, 75 bp, synthetic construct
  source 1..75: mol_type = other DNA
aagagagcaacatttctgtatgttaaaaaaggtagtaatacagatgtatttaaaacacatggctttggcgttgtg

SEQ ID NO: 411694 - DNA, 75 bp, synthetic construct
  source 1..75: mol_type = other DNA
agtaatttcgctattacccatgaatatgctttatggaccttaccagaaaataaagatgtaatatcgagacaagtt

SEQ ID NO: 411695 - DNA, 75 bp, synthetic construct
  source 1..75: mol_type = other DNA
tgctactggtgtttataaatctgacgatgccaatgaacaaatggaattactaaaaaaagcaataattgactatag

SEQ ID NO: 411696 - DNA, 75 bp, synthetic construct
  source 1..75: mol_type = other DNA
atcccgcacagtttcagtaatacgtcggcaggtatttgccgaattatcagcgcccatacgcccaccacgttttaa

SEQ ID NO: 411697 - DNA, 75 bp, synthetic construct
  source 1..75: mol_type = other DNA
tcagtcctgaacccatcggtcccaaatttgtcccagtcaaaaaaaaggaaggtactaattatgtgtaacttattg

SEQ ID NO: 411698 - DNA, 75 bp, synthetic construct
  source 1..75: mol_type = other DNA
gccgggacggcggttcaccctgacggggcatccggtacagggagcgaacccgaaccgtgagtggcaggtggtgag

SEQ ID NO: 411699 - DNA, 75 bp, synthetic construct
  source 1..75: mol_type = other DNA
cagtaaccgaaatggctgaagcatttaagcgggtatttgcaaatgcagataatgtgaatattgtcggaaagccat

SEQ ID NO: 411700 - DNA, 75 bp, synthetic construct
  source 1..75: mol_type = other DNA
tcagctacaggcccgcgttcagaatcatattcttcgtgaatatctcggcgagcagcctgtaggttctgcatttgt

SEQ ID NO: 411701 - DNA, 75 bp, synthetic construct
  source 1..75: mol_type = other DNA
aaaagcagcagctgaaaaagccgctgcagcaaaagctgccgctgaggcagatgatattttcggtgagctaagctc

SEQ ID NO: 411702 - DNA, 75 bp, synthetic construct
  source 1..75: mol_type = other DNA
ttgaaaagggatatgaatggaaattttcaaacttgtctattgtggctcctttcgatcagtcaatagactctacag

SEQ ID NO: 411703 - DNA, 75 bp, synthetic construct
  source 1..75: mol_type = other DNA
atggcattcgaatacgaaagcaaaaccccacaggatgtattggtttataccgattcaccgatctttcataagcgc

SEQ ID NO: 411704 - DNA, 75 bp, synthetic construct
  source 1..75: mol_type = other DNA
gttatgaactcaccaccgcttacacccctgccgggcagttacagagccagcacctgaacagcctgcagtatgacc

SEQ ID NO: 411705 - DNA, 75 bp, synthetic construct
  source 1..75: mol_type = other DNA
ggattttcaaaacacaccgccgttatgatgtggtcaacctggagagtgtggatgagatcttacgtcttctcgtct

SEQ ID NO: 411706 - DNA, 75 bp, synthetic construct
  source 1..75: mol_type = other DNA
tcctgcaggcgggtcatcaggggactggcggcatggtcgggaagcgctgtcatgagcgcactgaccagcgtatcc

SEQ ID NO: 411707 - DNA, 75 bp, synthetic construct
  source 1..75: mol_type = other DNA
agtcggagaaatcggcctccgagttcgatgccattgttgcgcaaacggagcagttccttgccgacaatggtcgtc

SEQ ID NO: 411708 - DNA, 75 bp, synthetic construct
  source 1..75: mol_type = other DNA
ctgatcccggaactggtcgaagcgctgaaaaaatggggacgcgaagatatctgcgtagtcgccggtggcgtcatt

SEQ ID NO: 411709 - DNA, 75 bp, synthetic construct
  source 1..75: mol_type = other DNA
gcattatctgaacataaaacactatcaataagttggagtcattacccaacgttagatgactatattgttgaaatg

SEQ ID NO: 411710 - DNA, 75 bp, synthetic construct
  source 1..75: mol_type = other DNA
aaaaccactaaaagagaagttttatctcttttagggcgtcctaattacccatatgattataacgacaaaaataca

SEQ ID NO: 411711 - DNA, 75 bp, synthetic construct
  source 1..75: mol_type = other DNA
ttgatttaaattttggtgatgattggttaattcatgagtttataaatcaatatcataaagataacgtaatattag

SEQ ID NO: 411712 - DNA, 75 bp, synthetic construct
  source 1..75: mol_type = other DNA
ccagacgatttatcagccggggagcttcacgccactcatcagggttgaaaccgccaccggtgagcaggcgaaaac

SEQ ID NO: 411713 - DNA, 75 bp, synthetic construct
  source 1..75: mol_type = other DNA
gtggaatggttcggtgaattcaccccggtgaatgtgacgaacgaagaggccgaggcgctgtttaccggcatctat

SEQ ID NO: 411714 - DNA, 75 bp, synthetic construct
  source 1..75: mol_type = other DNA
caaacccacaacctgtcgtttctcacaaccgacttacgaaataagaatgccggaaacaacgataagtgagatgca

SEQ ID NO: 411715 - DNA, 75 bp, synthetic construct
  source 1..75: mol_type = other DNA
catgagcgcactgaccagcgtatccagttcctagccggtgcgggccgatacggcaacaaccggatgtacgggccg

SEQ ID NO: 411716 - DNA, 75 bp, synthetic construct
  source 1..75: mol_type = other DNA
tccagatgtattaatggttggtgaaattcgagatcccatatcatctaatgctcttgcaggtgcagtagaaagtgg

SEQ ID NO: 411717 - DNA, 75 bp, synthetic construct
  source 1..75: mol_type = other DNA
gtgcatgttatcactggttcatgatggaatttggggcaattccggatacagatatggaggtattacttgaaaaaa

SEQ ID NO: 411718 - DNA, 75 bp, synthetic construct
  source 1..75: mol_type = other DNA
aacgaagttatcgtttcagatatgagcattatcctatctttggtgaaggtgatggatgttatcattgtgttctgc

SEQ ID NO: 411719 - DNA, 75 bp, synthetic construct
  source 1..75: mol_type = other DNA
acaacctcaataagatcagataccaatctttttgccgtagagccttatgtggcagatggaaggatatatttcagg

SEQ ID NO: 411720 - DNA, 75 bp, synthetic construct
  source 1..75: mol_type = other DNA
tatttatcaggggtgatgctttttattaaatggggactaaataatcaacggataataataaactttgttgccatc

SEQ ID NO: 411721 - DNA, 75 bp, synthetic construct
  source 1..75: mol_type = other DNA
atacttggccgtgattttaatgtatgcaaagcaaatgaggatggatgtgtaaattgcagatttacaggcgttaaa

SEQ ID NO: 411722 - DNA, 75 bp, synthetic construct
  source 1..75: mol_type = other DNA
aaggcgcccaagtatgggcggagcgatttcgtcaggacactgcggcgacagcggtggtgtgtggagaggtgtcga

SEQ ID NO: 411723 - DNA, 75 bp, synthetic construct
  source 1..75: mol_type = other DNA
cccggcaagatcgccgcgctcgcaggtgctacgctggcgctcggggtgacttactggctgctgcgcgagcgcgat

SEQ ID NO: 411724 - DNA, 75 bp, synthetic construct
  source 1..75: mol_type = other DNA
gggtatgcgacgtcttgcaagctatttagatctccattcaggctatccctgtattcattttacagggggctgtga

SEQ ID NO: 411725 - DNA, 75 bp, synthetic construct
  source 1..75: mol_type = other DNA
ttcaatgcttccgttattaacaatattcaagagtacacaaatcagaaagtaattgttattggaaaccacccggca

SEQ ID NO: 411726 - DNA, 75 bp, synthetic construct
  source 1..75: mol_type = other DNA
ggcgtgaagattggaaccaaagcgatagattactcgaaaaataataagataccacttgtttatgctcagtcatgg

SEQ ID NO: 411727 - DNA, 75 bp, synthetic construct
  source 1..75: mol_type = other DNA
gcccaatgggcagtgatgacgttctacgagcgctttgaacaggtgatcgcgctcgcgctgtccgcaatcattgcc

SEQ ID NO: 411728 - DNA, 75 bp, synthetic construct
  source 1..75: mol_type = other DNA
gacgatgaattcagcggcgatgaaactcaaaaaaatgggagtggagtcgctactatgcctggcgggcgttaccat

SEQ ID NO: 411729 - DNA, 75 bp, synthetic construct
  source 1..75: mol_type = other DNA
ggagtgatgggaaaaaacccgacagatgtgacgtacttcaggaactaattgattgtggtgatattagtgctaaag

SEQ ID NO: 411730 - DNA, 75 bp, synthetic construct
  source 1..75: mol_type = other DNA
tctcgcaaaaatttatggaatagtctcaaaagctgctgcggcggaaggaattacaagctcatttggccttttggg

SEQ ID NO: 411731 - DNA, 75 bp, synthetic construct
  source 1..75: mol_type = other DNA
gagctatcttgaaactgcattaaagattaaggcaggccatacgctaggcgtcattgatgccatgttggttcatga

SEQ ID NO: 411732 - DNA, 75 bp, synthetic construct
  source 1..75: mol_type = other DNA
gcgaggattacctcagatccgatattttgatggttttaactatgttggtggcagtgtcagtactgacgatcaaat

SEQ ID NO: 411733 - DNA, 75 bp, synthetic construct
  source 1..75: mol_type = other DNA
ctatcaacatactcgcagtaatgatgacgatgaattcagcggcgatgaaactcaaaaaaaatgggagtggagtcg

SEQ ID NO: 411734 - DNA, 75 bp, synthetic construct
  source 1..75: mol_type = other DNA
tctggtaaagcgtgggatttttattcagagcgggcggaatatcggtattaataatgtggtcagcgaatgggaaac

SEQ ID NO: 411735 - DNA, 75 bp, synthetic construct
  source 1..75: mol_type = other DNA
tttggcaaattatttattggccttgtttatggcaacagctatgaattaacttggtatgttctactaattttctca

SEQ ID NO: 411736 - DNA, 75 bp, synthetic construct
  source 1..75: mol_type = other DNA
gattaaagcgggctgcatgattgggtatctgtcagcctcttttaatgcagtagaccttggcgcaccatttgtttc

SEQ ID NO: 411737 - DNA, 75 bp, synthetic construct
  source 1..75: mol_type = other DNA
tctcgcaaaaatttatggaatagcctcaaaagctgctgcggcggaaggtattacaagcttatctggtcttcctgg

SEQ ID NO: 411738 - DNA, 75 bp, synthetic construct
  source 1..75: mol_type = other DNA
aattttttagaggattttgctgatgacataggtggaattgatgaattatctccaataatgaagcggacattgaac

SEQ ID NO: 411739 - DNA, 75 bp, synthetic construct
  source 1..75: mol_type = other DNA
ctggtcttcatggcagtaatgcgcaaaacatacggtttcaacaaaaaggcagactgggtaagcaatgatcagtta

SEQ ID NO: 411740 - DNA, 75 bp, synthetic construct
  source 1..75: mol_type = other DNA
tatgggattatgccaaccgctcacaggcattattccgcgaactgtatctggcgctaaaacaaattcaatcgaact

SEQ ID NO: 411741 - DNA, 75 bp, synthetic construct
  source 1..75: mol_type = other DNA
gaaaggtgttgagtggttcttccaaaaaatcaaaacaggggaaatcagcgcagatgaattttctgctgaaatcct

SEQ ID NO: 411742 - DNA, 75 bp, synthetic construct
  source 1..75: mol_type = other DNA
aaaaagcgctctttgcacaactggcagaagtttgcccgccacaaacgctattgaccactaacacttcgtcaatct

SEQ ID NO: 411743 - DNA, 75 bp, synthetic construct
  source 1..75: mol_type = other DNA
ctgcatttttttaacccggcaccggtgatgaagttggtggaggtggtcagtgggctggcaacggcggcggaagtt

SEQ ID NO: 411744 - DNA, 75 bp, synthetic construct
  source 1..75: mol_type = other DNA
atgagtgaatacgataccggcaatcctgtgccgtctgcatccatgcctgatgcatgggataatatgcagtctatt

SEQ ID NO: 411745 - DNA, 75 bp, synthetic construct
  source 1..75: mol_type = other DNA
gggtggggccattcaatggttgataacccccgtatgctgacacgcctgcaggagctaaccggctacacggcctat

SEQ ID NO: 411746 - DNA, 75 bp, synthetic construct
  source 1..75: mol_type = other DNA
gcgttgatgatgataaggttatctggcaatcggacagggagactaatcgcgcaccgggtgggcagtattattgct

SEQ ID NO: 411747 - DNA, 75 bp, synthetic construct
  source 1..75: mol_type = other DNA
tttcaactggcaatagcttttgaaggtctcgcgtttagtaaagacataccaaggacaattgatcttccattcgaa

SEQ ID NO: 411748 - DNA, 75 bp, synthetic construct
  source 1..75: mol_type = other DNA
gtaaaaatgcttcgtgaaacaaatgatgaagttaaaaatgtttacaatagcgcagttgagcattgcagaaatatt

SEQ ID NO: 411749 - DNA, 75 bp, synthetic construct
  source 1..75: mol_type = other DNA
tcacaatgcctcactggttaatactcccgcagagaggctggaaaccggcttccacgagctgtttaacgtcaacgt

SEQ ID NO: 411750 - DNA, 75 bp, synthetic construct
  source 1..75: mol_type = other DNA
tgggcaagaaaagtgggctgggcgtgtacgactggcgcgcggaacgtgaggcagttgttggcctggaagcggtaa

SEQ ID NO: 411751 - DNA, 75 bp, synthetic construct
  source 1..75: mol_type = other DNA
attgacgctgcacttcgcgatggcgctggtttcccgatggggccgctggaattaaccgatctgattggtcaggac

SEQ ID NO: 411752 - DNA, 75 bp, synthetic construct
  source 1..75: mol_type = other DNA
acgcctggcgcgccctgccgtcattaaaagccaaacttgcgctcggcgaagattacctcaactccgatattttcg

SEQ ID NO: 411753 - DNA, 75 bp, synthetic construct
  source 1..75: mol_type = other DNA
accttctcaataaacacccggcaaaagtcatggtgcatatcgatggcctggccgcttctatggcgtcagttatag

SEQ ID NO: 411754 - DNA, 75 bp, synthetic construct
  source 1..75: mol_type = other DNA
gataccagcggatgcaccggtgagttaccgatcagcgctggtaatagtgtcggcctgttcatggtggtcgggggc

SEQ ID NO: 411755 - DNA, 75 bp, synthetic construct
  source 1..75: mol_type = other DNA
aacgctggcctgggatgccttcgcatttactgaagtgttactgactcagccggtgatggtagtagttggtgaaaa

SEQ ID NO: 411756 - DNA, 75 bp, synthetic construct
  source 1..75: mol_type = other DNA
ggcgtctttttcgggaaggtttcagcaattacgatccgattggcgcattgaatgcaatggcgtcgcaacgaacca

SEQ ID NO: 411757 - DNA, 75 bp, synthetic construct
  source 1..75: mol_type = other DNA
gtggtcagcaagccgataatgattgacgataaacccttcccgcttaccttgagtattggcatcagctacgacgtg

SEQ ID NO: 411758 - DNA, 75 bp, synthetic construct
  source 1..75: mol_type = other DNA
cctcgatgaccttgtcgacaaagccgtctctccggtggtgtatctcatcggtgttgaccatattcaggatgtgat

SEQ ID NO: 411759 - DNA, 75 bp, synthetic construct
  source 1..75: mol_type = other DNA
aagatgagtggaccggacttgtcgaacaagcagatccactcattcgtgctaaagccgcggaaattgccgttgcgc

SEQ ID NO: 411760 - DNA, 75 bp, synthetic construct
  source 1..75: mol_type = other DNA
attactgctcaagttaaacaaatgcctactttagaacagttaaaatcctgggttcgtaataatggcgaggcgtga

SEQ ID NO: 411761 - DNA, 75 bp, synthetic construct
  source 1..75: mol_type = other DNA
tgtcggcgttctttatcacagcttgcgatcaaaaaaccgaacccagccagattgattgcagtaagtcagtatcaa

SEQ ID NO: 411762 - DNA, 75 bp, synthetic construct
  source 1..75: mol_type = other DNA
atggtgccaacacatttcgccaaaccgtggcttaatgaggggaagtgggtagcacttgaattggaaaaccccttc

SEQ ID NO: 411763 - DNA, 75 bp, synthetic construct
  source 1..75: mol_type = other DNA
atggaagatttagcagatgttatttgccgagccttgggtatcccttcaattgataccgatgatcaagcaatcatg

SEQ ID NO: 411764 - DNA, 75 bp, synthetic construct
  source 1..75: mol_type = other DNA
gattgaatttctctctggcggcaatcagcaaaaagtgttgctttcacgttggctactgacccgaccgcaatttct

SEQ ID NO: 411765 - DNA, 75 bp, synthetic construct
  source 1..75: mol_type = other DNA
gcaacccatgttgttcatatgctggcaaagaggtccctggagcaaaacagcgtacttatgccgcttttaaccctg

SEQ ID NO: 411766 - DNA, 75 bp, synthetic construct
  source 1..75: mol_type = other DNA
agatcctgcgtgatatgggcgtgggcttatcggtagatgattttggtacgggcttttccggattatcccgcttag

SEQ ID NO: 411767 - DNA, 75 bp, synthetic construct
  source 1..75: mol_type = other DNA
ctggcgctgctggaaaccctcgacaccggcaaaccgattcgtcacagcctgcgtgatgatattcccggcgcggcg

SEQ ID NO: 411768 - DNA, 75 bp, synthetic construct
  source 1..75: mol_type = other DNA
caccttaatcgactgcgcccacgccgactcggtccatagctttattcgtgaaggcgaaggcaaagggcaactgct

SEQ ID NO: 411769 - DNA, 75 bp, synthetic construct
  source 1..75: mol_type = other DNA
cacttgatcccgcaaccaccatgggcaccttaatcgactgcgcccacgctgattcggtgcatagatttattcgtg

SEQ ID NO: 411770 - DNA, 75 bp, synthetic construct
  source 1..75: mol_type = other DNA
caattgaaaaaccgctctcctccctgccttacgtaagcgtacagcctgaaccgtctggtcagaatctgatgaatt

SEQ ID NO: 411771 - DNA, 60 bp, synthetic construct
  source 1..60: mol_type = other DNA
atgaatccgtctgatgccattgaggcaattgaaaaaccgctctcctccctgccttactca

SEQ ID NO: 411772 - DNA, 75 bp, synthetic construct
  source 1..75: mol_type = other DNA
gcaacatgaaacgcgtctggctggaagcaggtggtaaaagcgccaacatcgttttcgccgactgcccggatttgc

SEQ ID NO: 411773 - DNA, 75 bp, synthetic construct
  source 1..75: mol_type = other DNA
atgaataacgtaaacgaaaagcaggaatgcccgacctgcggtaatgaagcccctgaatatctgaaagagtgtccc

SEQ ID NO: 411774 - DNA, 75 bp, synthetic construct
  source 1..75: mol_type = other DNA
atatagtttaatgtatgcagcaatctacaaaatatttaatagaaaggggaaggtagtaattaaatgcgatggttc

SEQ ID NO: 411775 - DNA, 75 bp, synthetic construct
  source 1..75: mol_type = other DNA
aaaaaattaaaaatagttcctatttattctagtggttgtaacactaaagtttcaataaatataattaaaaagttg

SEQ ID NO: 411776 - DNA, 75 bp, synthetic construct
  source 1..75: mol_type = other DNA
aggtatcttctacaaccagggccaggtgtgtatcgctggaacgcgcctgttactggaagagagcattgccgatga

SEQ ID NO: 411777 - DNA, 75 bp, synthetic construct
  source 1..75: mol_type = other DNA
aggtttgtcgcataacatcaaacaggccgaagggattgcgatggatgcctctggtaatatttatatcgttagcga

SEQ ID NO: 411778 - DNA, 75 bp, synthetic construct
  source 1..75: mol_type = other DNA
tccccattgtggcggacagaaatgcaaccactgcgatatgggcgatgacacggcgtgcatgaattgtgaaggtga

SEQ ID NO: 411779 - DNA, 75 bp, synthetic construct
  source 1..75: mol_type = other DNA
gctgatgagtctcatcgaactaagataggtgaaggccgaaataatgatacgaaagctcagttccaacaagcagct

SEQ ID NO: 411780 - DNA, 75 bp, synthetic construct
  source 1..75: mol_type = other DNA
ggatctcccttagtaagagatctgtctttctccgacgtaggcggtgttgctaaaagtctttctctaaatggcatc

SEQ ID NO: 411781 - DNA, 75 bp, synthetic construct
  source 1..75: mol_type = other DNA
agcacggttttttctattcggagcatgaggttgtcatggatatctggcagcaaacgggccttggcgtaccaggta

SEQ ID NO: 411782 - DNA, 75 bp, synthetic construct
  source 1..75: mol_type = other DNA
tgccctgaacagattaaagccggatattttagtgatactcggggaccgttttgaagctcttgcagcggcacagac

SEQ ID NO: 411783 - DNA, 75 bp, synthetic construct
  source 1..75: mol_type = other DNA
tgcggttacgcgcagttataaaaaccgcgatgaagacattgcgaatccttatggccagggtgatgcaagttcgaa

SEQ ID NO: 411784 - DNA, 75 bp, synthetic construct
  source 1..75: mol_type = other DNA
ttgatgagagttttcgtcatgcgatcactaagctctcacagctacattttacagcaatggatgaatatactcaac

SEQ ID NO: 411785 - DNA, 75 bp, synthetic construct
  source 1..75: mol_type = other DNA
gcgacaaggagactaaaccgccgaggatagcccagggcagcagcaacgtttttatcaacaatcagcccgccgcgc

SEQ ID NO: 411786 - DNA, 75 bp, synthetic construct
  source 1..75: mol_type = other DNA
gggacgttcatcaacacggtccggaaaatatcgaaggcgattgcctttgccaaagcgccccaggagctgcatccg

SEQ ID NO: 411787 - DNA, 75 bp, synthetic construct
  source 1..75: mol_type = other DNA
acgcgaaggtccgatgaagccatcaagggataccaggaacggcttcagcagattttcatggaatgcaaccgagtg

SEQ ID NO: 411788 - DNA, 75 bp, synthetic construct
  source 1..75: mol_type = other DNA
gaccagacatttaccctaacccaaccgacggtttacccgttggatgtaaggctaacacatcaaatgcaccggagt

SEQ ID NO: 411789 - DNA, 75 bp, synthetic construct
  source 1..75: mol_type = other DNA
tgcaacgttatccgacagtgcctactgtgattgatggactgggctccgttcgatggcgacagcgatcttattcag

SEQ ID NO: 411790 - DNA, 75 bp, synthetic construct
  source 1..75: mol_type = other DNA
attcaacgccttgtgcaggaaggattactaactgtaaaaccaaaatcaggaacatttgttacaagactggatagt

SEQ ID NO: 411791 - DNA, 75 bp, synthetic construct
  source 1..75: mol_type = other DNA
tgcatccattatcaatccggcggtcttaaaggaacatgcagcggatgatgctcgcggcttcctcgcgcaaaatac

SEQ ID NO: 411792 - DNA, 75 bp, synthetic construct
  source 1..75: mol_type = other DNA
attattggggaaataggaaattaccattttactgatgttaactctggtattgaacaatttattgaatggttacat

SEQ ID NO: 411793 - DNA, 75 bp, synthetic construct
  source 1..75: mol_type = other DNA
caattatactggaagatttgactcatattcgtgaccggataaaagctggtaaacgggtccgttcccgcctgcacc

SEQ ID NO: 411794 - DNA, 75 bp, synthetic construct
  source 1..75: mol_type = other DNA
ggtgagcgtcaatataattgccgcctgttgccaacgcccagtaatctcttcttaagacgctttcttcctaccact

SEQ ID NO: 411795 - DNA, 75 bp, synthetic construct
  source 1..75: mol_type = other DNA
aatatcctgcgactgtttatgcaggaccatttattaaacgagtagatcttgaaagaaaacctgtagaagctacct

SEQ ID NO: 411796 - DNA, 75 bp, synthetic construct
  source 1..75: mol_type = other DNA
caacctttctgatagcatcaggttgcttgattaatatggatgttatcaaacatattggatatatgcttgaggatc

SEQ ID NO: 411797 - DNA, 75 bp, synthetic construct
  source 1..75: mol_type = other DNA
aaataaactattaataaatgaggtatttgatatcgtagaacgttttatttttttttcttctggcggtagagttta

SEQ ID NO: 411798 - DNA, 75 bp, synthetic construct
  source 1..75: mol_type = other DNA
atgtttatcgcagaaaatccagaagacatcgcattacaggccgctgcatatttcttcgctaaggagcaggaggaa

SEQ ID NO: 411799 - DNA, 75 bp, synthetic construct
  source 1..75: mol_type = other DNA
ctcccggtaaatgggtatccgaagaacagctaattgcgctgaaaggaataaaaaagggaacactaaaaaaagcca

SEQ ID NO: 411800 - DNA, 75 bp, synthetic construct
  source 1..75: mol_type = other DNA
cgggtatcggtaaaaattattggtgaagtgcctcccgtcgcctgcagctctcccgtggcgacattgacattgccg

SEQ ID NO: 411801 - DNA, 75 bp, synthetic construct
  source 1..75: mol_type = other DNA
ttatcctggaacaactattgtccatgcctttaataaaggttcgtataaaagcaaattattactttggtaccatat

SEQ ID NO: 411802 - DNA, 75 bp, synthetic construct
  source 1..75: mol_type = other DNA
acattcctgatgtaatgcttttgccaagaagttttcctatggaaatattaaacttcacgaatattaggtttatta

SEQ ID NO: 411803 - DNA, 75 bp, synthetic construct
  source 1..75: mol_type = other DNA
atgggagaagtttttatggatgataaaatcatcgcctattttgtcgtcctgtctgatgaggctatttctgttatt

SEQ ID NO: 411804 - DNA, 75 bp, synthetic construct
  source 1..75: mol_type = other DNA
taccactggtgattacgcacctaaacctggtgacactgttcgcacggcagaggctctatatctgtatcaaaaact

SEQ ID NO: 411805 - DNA, 75 bp, synthetic construct
  source 1..75: mol_type = other DNA
cccttcagcgccagcgagcgccgcgccgccgaacacgcgatgcgcaatctggatcccgacctctgccagcaggtg

SEQ ID NO: 411806 - DNA, 75 bp, synthetic construct
  source 1..75: mol_type = other DNA
cccgctggctgagcctgtgccagcggctgcgcgacgagcaaagcggcaggatcaccggcaacctctacgccctgc

SEQ ID NO: 411807 - DNA, 75 bp, synthetic construct
  source 1..75: mol_type = other DNA
ccgcgacgacggcagcggcgtcttcccctcctacaacgaactgcagggctggctctctgaccagcctgaaggcga

SEQ ID NO: 411808 - DNA, 75 bp, synthetic construct
  source 1..75: mol_type = other DNA
ttattcattctgagaatacattaatcagggcgcttgaattaaaaacggtactggatgaattaaccgaaaataaca

SEQ ID NO: 411809 - DNA, 75 bp, synthetic construct
  source 1..75: mol_type = other DNA
tcgggcactggaaatgaaagcggtattaattaaattaaccgaagttcatgccgaacagggggggatttattttct

SEQ ID NO: 411810 - DNA, 75 bp, synthetic construct
  source 1..75: mol_type = other DNA
tggtccggtggtaaacctggtgcgagtagcggatggagaagaggcgttacaactggcaaacgacacggaatatgg

SEQ ID NO: 411811 - DNA, 75 bp, synthetic construct
  source 1..75: mol_type = other DNA
tctgctgacgggtacactgccctcgcccatgaatccatagccccggatgaaatgccggtccttattaaggacgta

SEQ ID NO: 411812 - DNA, 75 bp, synthetic construct
  source 1..75: mol_type = other DNA
ccgtgtcaggggagaacaaataaattacagacaatatcttctagataacaaggcatatttcaggttcctgcccta

SEQ ID NO: 411813 - DNA, 75 bp, synthetic construct
  source 1..75: mol_type = other DNA
acggtaataaaatacgtgatcgagatcattcaagcatttgacggacatgtccatcgtattatgggagatgctgta

SEQ ID NO: 411814 - DNA, 75 bp, synthetic construct
  source 1..75: mol_type = other DNA
agtctctttgggaaccactttaagtatcagctgtcttattcttgcattattgtcaatattcgtaactattatagg

SEQ ID NO: 411815 - DNA, 75 bp, synthetic construct
  source 1..75: mol_type = other DNA
atccgagctgagttccctcaaagggggttactattctgcgcagctatttgaatgccatactaatgtaagtttaag

SEQ ID NO: 411816 - DNA, 75 bp, synthetic construct
  source 1..75: mol_type = other DNA
caatatataacgtttattgcatgttttttttcacatgaaaacatgaaatattcgacatttcatgatattaacctt

SEQ ID NO: 411817 - DNA, 75 bp, synthetic construct
  source 1..75: mol_type = other DNA
caaaaggatgcaaatatatgatgttaggcggaggaagaacatcttctcaggaagatggtttattcaaatttaaat

SEQ ID NO: 411818 - DNA, 75 bp, synthetic construct
  source 1..75: mol_type = other DNA
attaattctgctgctgctattgaagataaaaaattaaaagcaactataattaccgcagaaagacttcgttggctt

SEQ ID NO: 411819 - DNA, 75 bp, synthetic construct
  source 1..75: mol_type = other DNA
caggcgctgctattggtgcatatttgttatatcgaggcacaaacgaacaaattaattctgctgctgctattgaag

SEQ ID NO: 411820 - DNA, 75 bp, synthetic construct
  source 1..75: mol_type = other DNA
cgctggcgttcgaagaaaagcatggttcccaggttgatttaatttttcgttttcttgatcacgcctttgcgactg

SEQ ID NO: 411821 - DNA, 75 bp, synthetic construct
  source 1..75: mol_type = other DNA
tattagctgcagctatattctattcattaccggggatggcatcctcaacgtcctctgaaggcggtgcatttacag

SEQ ID NO: 411822 - DNA, 75 bp, synthetic construct
  source 1..75: mol_type = other DNA
aggtaacctcagtattgctcccactgagcatgaaattcatatttatgtagaatatttcaaaacaactttgaaccg

SEQ ID NO: 411823 - DNA, 75 bp, synthetic construct
  source 1..75: mol_type = other DNA
cgtgtgaaaaatggtacgaacatgactcagatagcctcttataaacgcaatgattttaatatgacagtcgagaac

SEQ ID NO: 411824 - DNA, 75 bp, synthetic construct
  source 1..75: mol_type = other DNA
ttcatgcaggagaatctcatttcccgcgctgcaaaaaatacaaaaaggaataatgaaaaaaaaccggagcaacgt

SEQ ID NO: 411825 - DNA, 75 bp, synthetic construct
  source 1..75: mol_type = other DNA
tggggactattttcagttagccctgtaactggtgatatatgggaagaggattcatgcaggagaatctcatttccc

SEQ ID NO: 411826 - DNA, 75 bp, synthetic construct
  source 1..75: mol_type = other DNA
aacctgtcagttaacgctttcctggttaacctgatagagaactcactaaacaacattgctaatgatggaacacag

SEQ ID NO: 411827 - DNA, 75 bp, synthetic construct
  source 1..75: mol_type = other DNA
agcgaatagctcagatagcaaatcctggcgcatgggtgaagtgtacgcacgaagaggtgcaggaactagcccgca

SEQ ID NO: 411828 - DNA, 75 bp, synthetic construct
  source 1..75: mol_type = other DNA
tggctgattttacttacgtcagcacatggcagggcttcgtctatgtggcgttcatcattgatgtgtttgccggat

SEQ ID NO: 411829 - DNA, 75 bp, synthetic construct
  source 1..75: mol_type = other DNA
agcatcaatggtctttacaaagcggagggaatacatcgtaagagctggaaaaaacgtgcaaaagtggaactggcc

SEQ ID NO: 411830 - DNA, 75 bp, synthetic construct
  source 1..75: mol_type = other DNA
gcgctcagtctgtttgccaccacgtcaatcggcatttttatggggacgatagcgcgttcaatgccgcaactgggg

SEQ ID NO: 411831 - DNA, 75 bp, synthetic construct
  source 1..75: mol_type = other DNA
gtctggccgcagttcctgacgctgatggcaattggcggcgcgtttttcaccatcgcactgctgcgattcaggaag

SEQ ID NO: 411832 - DNA, 75 bp, synthetic construct
  source 1..75: mol_type = other DNA
acctacgccatgatggaacggcaccgcgctgatccccctgatggcggcgcaatcatcacctgcgtcaattacgtt

SEQ ID NO: 411833 - DNA, 75 bp, synthetic construct
  source 1..75: mol_type = other DNA
aattttttaatattctattaatacctcttcaaataagcttaattagtaaagtcatcacgtcatttaaaatcctgt

SEQ ID NO: 411834 - DNA, 75 bp, synthetic construct
  source 1..75: mol_type = other DNA
ggatgtcacccaggtcgacaagctgctgcacggcgacgagaacgtcgtctgcgccgatgccggctacaccggcgt

SEQ ID NO: 411835 - DNA, 75 bp, synthetic construct
  source 1..75: mol_type = other DNA
gggaaatgctggttggttcacgacggatatcccaggacatcagcacccgtgatgaaggcggtgacgggaaggtgg

SEQ ID NO: 411836 - DNA, 75 bp, synthetic construct
  source 1..75: mol_type = other DNA
gcactgcgtaaaatggaaaaacgtggagccctggagaaaatgcgcaaggtacgccagcgctgtggtgaggtgttc

SEQ ID NO: 411837 - DNA, 75 bp, synthetic construct
  source 1..75: mol_type = other DNA
ccgcttcgtcggtaaagaaaagatgctttctattggtgtataccccgatgtttcactggccgacgcgcgcgaaaa

SEQ ID NO: 411838 - DNA, 75 bp, synthetic construct
  source 1..75: mol_type = other DNA
ccacgcacagtatctcgatggtcgccgtgaaatgatgcaatggtatgctgactacattgattcactttctgagca

SEQ ID NO: 411839 - DNA, 75 bp, synthetic construct
  source 1..75: mol_type = other DNA
ggctttaccggtgttgaggcgcagagcgccagtctgagtgtaaactgcaataacattgatgcgggaatcaccagt

SEQ ID NO: 411840 - DNA, 75 bp, synthetic construct
  source 1..75: mol_type = other DNA
tcagcaaagaaagcattaatcaggttattgaactgctcggatataaaggcaggttgacggggcatggattccgcc

SEQ ID NO: 411841 - DNA, 75 bp, synthetic construct
  source 1..75: mol_type = other DNA
ccaatgaacttccttatttccttaacgatctggcgggctataccggcagtattatcactaaaactgccactcaga

SEQ ID NO: 411842 - DNA, 75 bp, synthetic construct
  source 1..75: mol_type = other DNA
tattattggtgcctgttgtctgcgataatctgatgcagcttttgcaattaaatgcttatccggtattaatcacag

SEQ ID NO: 411843 - DNA, 75 bp, synthetic construct
  source 1..75: mol_type = other DNA
aaaatttaacttcttgcagtgcatgaatcacttgtccaagctaactcgctggcgaccccaggccggtggtggtgg

SEQ ID NO: 411844 - DNA, 75 bp, synthetic construct
  source 1..75: mol_type = other DNA
ggatgttcgaggctcgcggtgtgccgatggactatgacgaaacaatgtctttcatcctcctgaatgccgccgatg

SEQ ID NO: 411845 - DNA, 75 bp, synthetic construct
  source 1..75: mol_type = other DNA
gcagctgcagaacgacgcgttgaagtaaccaaggaggccagcaatgttcagcagacagttagccatatgcctgat

SEQ ID NO: 411846 - DNA, 75 bp, synthetic construct
  source 1..75: mol_type = other DNA
gtaaggtattccggagttcataattcagtaattggttttggtgattttaatattgcgggttcagattacgctgag

SEQ ID NO: 411847 - DNA, 75 bp, synthetic construct
  source 1..75: mol_type = other DNA
cgaagacattaccctggattaggtcaggttaaacaattgtcaatgcaacatcatattgaaacgatctgtaacttc

SEQ ID NO: 411848 - DNA, 75 bp, synthetic construct
  source 1..75: mol_type = other DNA
acccagttagagcaacaggatctatcgaaaatatcttggctgctcagcacaaccactgtggaatcagcgagaatg

SEQ ID NO: 411849 - DNA, 75 bp, synthetic construct
  source 1..75: mol_type = other DNA
tggtgacaaatcagtcctttaccgtttcgcaaaacagaaagctcgctatctagccgctgccctgaacaaactgga

SEQ ID NO: 411850 - DNA, 75 bp, synthetic construct
  source 1..75: mol_type = other DNA
cagcgactagtatcatgtctacaaaaccaagagacgaacctggacttgtctgaattaggcctgacaacattacct

SEQ ID NO: 411851 - DNA, 75 bp, synthetic construct
  source 1..75: mol_type = other DNA
gtttctgataggcttcatgcacccaaaaatatatttggagtatctttaaaaaaaattgtcaaaaaagaaaatgta

SEQ ID NO: 411852 - DNA, 75 bp, synthetic construct
  source 1..75: mol_type = other DNA
tggtggtcgtcatcctgggcgctatagctggcgcgttcggcattggtcatgctcgcgggaccagtaaggcgcaag

SEQ ID NO: 411853 - DNA, 75 bp, synthetic construct
  source 1..75: mol_type = other DNA
ggagttcagtgaagctatgggcgtaaaagcatccgagctggatgcgcttatctggtatgaaatgcaggcctcttc

SEQ ID NO: 411854 - DNA, 75 bp, synthetic construct
  source 1..75: mol_type = other DNA
aaagatttaactgttgagcgcgattatttgaaacttgaacaactattcattcagtttagtaaatcaatgggagta

SEQ ID NO: 411855 - DNA, 75 bp, synthetic construct
  source 1..75: mol_type = other DNA
aaacagcaaaaccaaaagaaaagccctataagctgtctgatggtggcggtatgtatctactcattaacactaatg

SEQ ID NO: 411856 - DNA, 75 bp, synthetic construct
  source 1..75: mol_type = other DNA
gtcgcaggagatgttgcgggggctatagtggaatcatcatctgaaaataccattaaacaaataattaaggatggt

SEQ ID NO: 411857 - DNA, 75 bp, synthetic construct
  source 1..75: mol_type = other DNA
atgcagcccgcctgaccgggggacgaatcacggagcctgatgaggtggcacggacggtgcgcagtgtggcggagg

SEQ ID NO: 411858 - DNA, 75 bp, synthetic construct
  source 1..75: mol_type = other DNA
acgatctggcaaacggaaaacaaccggcagatgccacgctcactgctctggcaggacttgccactgcagcagatc

SEQ ID NO: 411859 - DNA, 75 bp, synthetic construct
  source 1..75: mol_type = other DNA
ctgaatacaatcctgcgcctgatttagccatcgctctggccgttcctaaacaaaaacatctgatcctacccacgt

SEQ ID NO: 411860 - DNA, 75 bp, synthetic construct
  source 1..75: mol_type = other DNA
ctttctattggcgtataccccgatgtttcgctggccgacgcacgcgaaaaacgcagcgaagccagaaaaatcctc

SEQ ID NO: 411861 - DNA, 75 bp, synthetic construct
  source 1..75: mol_type = other DNA
ggcaggaatgatcctcgcaagccgatcagcaaggaaagcattaatcaggttatcgaattgctgggatataaaggc

SEQ ID NO: 411862 - DNA, 75 bp, synthetic construct
  source 1..75: mol_type = other DNA
agggactggtgaatgtgccgttacggctgccacaggccactctggatgataaacagcagagtgccctgacaaaaa

SEQ ID NO: 411863 - DNA, 75 bp, synthetic construct
  source 1..75: mol_type = other DNA
tttgttagcgcgtgtcaaatcggcgatcaacagggctggttgcatcgtaaaggtgccacgccggatgacaacggt

SEQ ID NO: 411864 - DNA, 75 bp, synthetic construct
  source 1..75: mol_type = other DNA
ctactatttattacggcccatttattaaacaagttaaggttttttctgagccagttgaagctacatatttaatcg

SEQ ID NO: 411865 - DNA, 75 bp, synthetic construct
  source 1..75: mol_type = other DNA
caggacactacgggaacctcggggatagtcggcatgggattcaacaatgaagattccattacagaccttcgtgag

SEQ ID NO: 411866 - DNA, 75 bp, synthetic construct
  source 1..75: mol_type = other DNA
catatatgagtaacggaaatagtattgattacggtggcgataaaacattttcaacgaattaccggagtgattatt

SEQ ID NO: 411867 - DNA, 75 bp, synthetic construct
  source 1..75: mol_type = other DNA
ctcttgcggaagcgcagctccgggggacgcagatagcaaccgccagggcgcgtgcggcggtttatcgtgcgcaac

SEQ ID NO: 411868 - DNA, 75 bp, synthetic construct
  source 1..75: mol_type = other DNA
ggatctcgaagcgtataccggtagcatcataacgaaaaatgcaacaaagatagttatgctcaccggtgtgagaac

SEQ ID NO: 411869 - DNA, 75 bp, synthetic construct
  source 1..75: mol_type = other DNA
tttgggagataccagcagaacgaatgaagatgcgtcgacctcatttagtgccgctttcagcacaggtaatcgatt

SEQ ID NO: 411870 - DNA, 75 bp, synthetic construct
  source 1..75: mol_type = other DNA
gcagggctttaactcagcgtggattgaaacgcagcttgcccatgtcgataagaatgcgattcgcggcacgtataa

SEQ ID NO: 411871 - DNA, 75 bp, synthetic construct
  source 1..75: mol_type = other DNA
gaagatgaaacgtcctcatattgtgccgctttcagaacaagtcattactctatttaagctgcttgagccaatatc

SEQ ID NO: 411872 - DNA, 75 bp, synthetic construct
  source 1..75: mol_type = other DNA
cggccccggctggaaaatgcccgcggatatccgcttacagctgcgcgataacacactgatactcagtgataacgg

SEQ ID NO: 411873 - DNA, 75 bp, synthetic construct
  source 1..75: mol_type = other DNA
gcactacgtaagatggagaaacgtggagcactggagaaaatgcgcaaggtccgccaacgttgtggtgaggtgttt

SEQ ID NO: 411874 - DNA, 75 bp, synthetic construct
  source 1..75: mol_type = other DNA
caggcgcatatttgatgcagccagcgaagacaacagccgtgtggccggtatttatgttcgtttactgttactcac

SEQ ID NO: 411875 - DNA, 75 bp, synthetic construct
  source 1..75: mol_type = other DNA
tttctctcgctcaagcacgcgaaaagcgtgatgctgcgaaaaagctgctgtctgttggaagcgatcccggtgaag

SEQ ID NO: 411876 - DNA, 75 bp, synthetic construct
  source 1..75: mol_type = other DNA
gtgaaaaatctcatatccattatgggaaatcaatagagcccggagctgcaagattaaaagattttctgataaaaa

SEQ ID NO: 411877 - DNA, 75 bp, synthetic construct
  source 1..75: mol_type = other DNA
cctttatcgactcaggtagttgatctttttaaacagctcaaacctattaccggccactacccttacatctttatt

SEQ ID NO: 411878 - DNA, 75 bp, synthetic construct
  source 1..75: mol_type = other DNA
tttctcttgctgacgcccgtgaaaaacgtgatgcggctaagaagattctggcggcaggtggagatcctggagaaa

SEQ ID NO: 411879 - DNA, 75 bp, synthetic construct
  source 1..75: mol_type = other DNA
agaacgcgatacgtgggacatataaccatgcgcagtacttggaggggcgtaaggtgatgatgcagtggtatggga

SEQ ID NO: 411880 - DNA, 75 bp, synthetic construct
  source 1..75: mol_type = other DNA
atgaagctaacagtcagacaaattgatacagccaaacccaaagagaagccgtataagctatctgatagtggcggc

SEQ ID NO: 411881 - DNA, 75 bp, synthetic construct
  source 1..75: mol_type = other DNA
tggtggatttgcccctatatttccagacatctgttatcacttaacccattacaagcccgctgccgcagatattcc

SEQ ID NO: 411882 - DNA, 75 bp, synthetic construct
  source 1..75: mol_type = other DNA
aaaaaactttaaatcttggtagaaggagatattttggactcgcgaataaggccaagactctttatctgagtaatt

SEQ ID NO: 411883 - DNA, 75 bp, synthetic construct
  source 1..75: mol_type = other DNA
tggctgcaggatacatgaggcctgctctttgacgctacaggactggcagatcagtggatttcgcaacacattcat

SEQ ID NO: 411884 - DNA, 75 bp, synthetic construct
  source 1..75: mol_type = other DNA
tcttaagtcggacgatattaactgtactctttcctccaaaagggactctcgtagggtaaaaagtatgaactctat

SEQ ID NO: 411885 - DNA, 75 bp, synthetic construct
  source 1..75: mol_type = other DNA
gttgtcgaacgtaagctactcacacaggaagaatgggagaagacattcaatctggataatctgattgctccgaag

SEQ ID NO: 411886 - DNA, 75 bp, synthetic construct
  source 1..75: mol_type = other DNA
ccggataatgagcgaaaatagcctgttaccatcacgacagcagcgggaacataaaggccgaatatcggtgaagga

SEQ ID NO: 411887 - DNA, 75 bp, synthetic construct
  source 1..75: mol_type = other DNA
ccttcggacaaggaatagccccagtaagccgtgttctgggcgtgtcacgtgcgcagttaacattacggatgaagt

SEQ ID NO: 411888 - DNA, 75 bp, synthetic construct
  source 1..75: mol_type = other DNA
gtcaatattgcgcccgataccagcaacgcgcaggtcacgctgaacatccctgctcaacaggtggtgacgaataac

SEQ ID NO: 411889 - DNA, 75 bp, synthetic construct
  source 1..75: mol_type = other DNA
ctttgcgggccgatgtttctgacctgaaaacagccagcaacgaactggataaactcggccaggcggcggccggtg

SEQ ID NO: 411890 - DNA, 75 bp, synthetic construct
  source 1..75: mol_type = other DNA
agcgcagcaatgcgcacgcttccggcgcaattcaccgatatcgccacgcagctggctggcggtcagtcgccgttc

SEQ ID NO: 411891 - DNA, 75 bp, synthetic construct
  source 1..75: mol_type = other DNA
caccgccgtgcagcatgtaccggaaaaagaggccatcgtggatattgagaacacccctgacggcatgcagagtca

SEQ ID NO: 411892 - DNA, 75 bp, synthetic construct
  source 1..75: mol_type = other DNA
gtgatactcaaacttgagagacttgatgtgaaacgggagttacagacgcttcttgaagaagaagcaaaacactta

SEQ ID NO: 411893 - DNA, 75 bp, synthetic construct
  source 1..75: mol_type = other DNA
tttaataaaaaacataaagaacacatggatgatcctctattccatctaatccgaagcaatactttgaaacccaca

SEQ ID NO: 411894 - DNA, 75 bp, synthetic construct
  source 1..75: mol_type = other DNA
cacgaataacaccggggcgcatacccatagtattagcgggaccgcaaatagtgccggtgcgcaccaacacaagag

SEQ ID NO: 411895 - DNA, 75 bp, synthetic construct
  source 1..75: mol_type = other DNA
gtattgtctcaggaacaggacggcattaaatcgcaaacccacagcgccagcgcatccagtaccgatttggggacg

SEQ ID NO: 411896 - DNA, 75 bp, synthetic construct
  source 1..75: mol_type = other DNA
gtattctctcaggaacaggacggcattaaatcgcaaacccacagcgccagcgcatccagtacggatttggggacg

SEQ ID NO: 411897 - DNA, 75 bp, synthetic construct
  source 1..75: mol_type = other DNA
gtattttctcaggaacaggacggcattaaatcgcagacccacagcgccagcgcatccagtactgatttggggacg

SEQ ID NO: 411898 - DNA, 75 bp, synthetic construct
  source 1..75: mol_type = other DNA
tttactccgcgtacagccattaacgctgatggtgcacagacgccgctggcaaccatggtgcgggtttaccagctc

SEQ ID NO: 411899 - DNA, 75 bp, synthetic construct
  source 1..75: mol_type = other DNA
gcgccattgagcttttttgtcgggataaaacggaaagccgctggccagccagctgttgtttactcgtcacgcgac

SEQ ID NO: 411900 - DNA, 75 bp, synthetic construct
  source 1..75: mol_type = other DNA
ctgataaggttaatatcggttttatttcaaaaagatatggtcgcaaagttaagggggaagcttatctttatgaga

SEQ ID NO: 411901 - DNA, 75 bp, synthetic construct
  source 1..75: mol_type = other DNA
gggcaaccctgccagtggtcgggccgtattctctcaggaacaggacggcattaaatcgcacacccacagcgccag

SEQ ID NO: 411902 - DNA, 75 bp, synthetic construct
  source 1..75: mol_type = other DNA
gggcaaccctgccagtggtcgggccgtattatctcaggaacaggacggcattaaatcgcaaacccacagcgccag

SEQ ID NO: 411903 - DNA, 75 bp, synthetic construct
  source 1..75: mol_type = other DNA
gggcaaacctgccagtggtcgggccgtattctctcaggaacaggacggcattaaatcgcaaacccacagcgccag

SEQ ID NO: 411904 - DNA, 75 bp, synthetic construct
  source 1..75: mol_type = other DNA
gtattttctcaggaacaggacggcattaaatcgcatacccacagcgccagcgcatccagtacagatttggggacg

SEQ ID NO: 411905 - DNA, 75 bp, synthetic construct
  source 1..75: mol_type = other DNA
gggcaagcctgccagtggtcgggccgtattctctcaggaacaggacggcattaaatcgcagacccacagcgccag

SEQ ID NO: 411906 - DNA, 75 bp, synthetic construct
  source 1..75: mol_type = other DNA
gggcaaccctgccagtggtcgggccgtattgtctcaggaacaggacggcattaaatcgcagacccacagcgccag

SEQ ID NO: 411907 - DNA, 75 bp, synthetic construct
  source 1..75: mol_type = other DNA
gcggggaaaacggcagcgtgaaagaagattcgttgctggtcattcggcgagcattcaccaaagtggagtttttcg

SEQ ID NO: 411908 - DNA, 75 bp, synthetic construct
  source 1..75: mol_type = other DNA
cagattattgtattgcggtaggagtacctgcgaaagtaatcaaaagaagattaccagtaaatgttactgaaaaaa

SEQ ID NO: 411909 - DNA, 75 bp, synthetic construct
  source 1..75: mol_type = other DNA
atgagaatattaaaaattattataagtgtattgttgtttataaaaaagaaaagaaaaaaaataccggactcagca

SEQ ID NO: 411910 - DNA, 75 bp, synthetic construct
  source 1..75: mol_type = other DNA
tgcgaacaccaaccggaatcattcctgcattttgtcagcataggcgcaccttctcttagtctggtagtgcctaca

SEQ ID NO: 411911 - DNA, 75 bp, synthetic construct
  source 1..75: mol_type = other DNA
ttgtttctgattttgcgaactatggtcttgctatatctagaggcccggtaccgaaaaaagcatttaaggatatga

SEQ ID NO: 411912 - DNA, 75 bp, synthetic construct
  source 1..75: mol_type = other DNA
cgcgctataacggggcagaagataaattcgaaagttatatatgttgaagattcttttgcaaaagagtgggttgaa

SEQ ID NO: 411913 - DNA, 75 bp, synthetic construct
  source 1..75: mol_type = other DNA
gttaccagccagacggcgggagtcagtgcagtcactgcaaccatcaacagcagtactcagagtcagaacgtgaca

SEQ ID NO: 411914 - DNA, 75 bp, synthetic construct
  source 1..75: mol_type = other DNA
tgaacggcgggcgctgggttaattttaactgggagagctggcgtccgaatgttagccattcgagggttgttaagt

SEQ ID NO: 411915 - DNA, 75 bp, synthetic construct
  source 1..75: mol_type = other DNA
aaagagtttcgtaagcgaagatttatcagattcaccagtattatttgttaatacctcagaacacaatcgatatga

SEQ ID NO: 411916 - DNA, 75 bp, synthetic construct
  source 1..75: mol_type = other DNA
acatcgttttactggtttgttgatgggttgcgttttgaaagcgccggagccgcagcgaatcattttggtgtgaaa

SEQ ID NO: 411917 - DNA, 75 bp, synthetic construct
  source 1..75: mol_type = other DNA
tgacctgctcttacgaaagcattcagttttcgcgcgacaatattgatatcgacattcgtcacggcctttcgcaat

SEQ ID NO: 411918 - DNA, 75 bp, synthetic construct
  source 1..75: mol_type = other DNA
cgctgccagttccttcgctgcgtaacattcaggcatttatagaggtagctgataccggcaacctgaatattgctg

SEQ ID NO: 411919 - DNA, 75 bp, synthetic construct
  source 1..75: mol_type = other DNA
ggttttttttataatcactctaaattacggcgaacccattttctcaaagggtttgccgcagggttaaaatttaaa

SEQ ID NO: 411920 - DNA, 75 bp, synthetic construct
  source 1..75: mol_type = other DNA
gtgattacatgaaaaaacatccacaaatgtcagagcgttttgcgcttttctcacttttcaggccacaaatcattc

SEQ ID NO: 411921 - DNA, 75 bp, synthetic construct
  source 1..75: mol_type = other DNA
cgctgaatgattttctcggtgccatgacggaggatgatgcccgtccggaggcactgcgccgttttgagctgatgg

SEQ ID NO: 411922 - DNA, 75 bp, synthetic construct
  source 1..75: mol_type = other DNA
cgggccattgcgcatagtggctccgcgttctgttgtacagaatattattcaccctgtgctgattgaatattgtcg

SEQ ID NO: 411923 - DNA, 75 bp, synthetic construct
  source 1..75: mol_type = other DNA
gccggaagcggatgaggtgctgcctgcgccgctgccgtcgtaccgggcaccgggtggcggtgcattacaggtatg

SEQ ID NO: 411924 - DNA, 75 bp, synthetic construct
  source 1..75: mol_type = other DNA
caggtcagccatattccgacaacgccggaactggcagagctgaagcaggtgctgtgctatgacggttatctcacg

SEQ ID NO: 411925 - DNA, 75 bp, synthetic construct
  source 1..75: mol_type = other DNA
ttttcaaaacttgatgaatcttataaaaaagttgctgcatacgatcccaaaaataatgttaatccaaatgtaatt

SEQ ID NO: 411926 - DNA, 75 bp, synthetic construct
  source 1..75: mol_type = other DNA
acgtttgaatggaacggccgcacgtggaacgctgacgcctcgtcagtggcccgcctgtccccggtggtcatgctg

SEQ ID NO: 411927 - DNA, 75 bp, synthetic construct
  source 1..75: mol_type = other DNA
gcaaagaagtggaaaaataccagaacccgcgcggcggctacttcacgccgggatcgtataccgtttctgctcacg

SEQ ID NO: 411928 - DNA, 75 bp, synthetic construct
  source 1..75: mol_type = other DNA
cctctgtcgcccgatacctcggcggcgatatcaaaaccgcgctggcgcaaaagcccacttccctgcctcagcagt

SEQ ID NO: 411929 - DNA, 75 bp, synthetic construct
  source 1..75: mol_type = other DNA
cttcgccgcactggtgcaactgctacccgcatcccaaagtcatcaccattccattcccggtgggctactggatca

SEQ ID NO: 411930 - DNA, 75 bp, synthetic construct
  source 1..75: mol_type = other DNA
ccgggtgagcgaggaaagccgccgctggctggcatcgtgcggcctgaccgtggagcagatgcaaaaccagatgga

SEQ ID NO: 411931 - DNA, 75 bp, synthetic construct
  source 1..75: mol_type = other DNA
atgagcggaaaaccagcggcgcgtcagggagatatgactcagtatggcggccccattgtccagggttcggcaggt

SEQ ID NO: 411932 - DNA, 75 bp, synthetic construct
  source 1..75: mol_type = other DNA
ttgaacggattgttgccggatgtccggtacccattgttattgctggcggtaaaaaattaccggagcgcgaggcgc

SEQ ID NO: 411933 - DNA, 75 bp, synthetic construct
  source 1..75: mol_type = other DNA
actgacgatgcgcaaattaaaattgaagtctcgccagttgcccgggggacactatatcctccgcaagaacgcgat

SEQ ID NO: 411934 - DNA, 75 bp, synthetic construct
  source 1..75: mol_type = other DNA
cgaccgtaaattatgacgggaaaaaattcacgtatccggtcgctgatgagtggccgggatttttgttatccattt

SEQ ID NO: 411935 - DNA, 75 bp, synthetic construct
  source 1..75: mol_type = other DNA
tattgggagcttgaagctctcgctcgcggagctgttttggattttgggcataagcgttttaaatttgataacgat

SEQ ID NO: 411936 - DNA, 75 bp, synthetic construct
  source 1..75: mol_type = other DNA
gccagggcggccggtcatcttttctgtggttcgggcagttatgacgcatgttccggaataattcattattgtggt

SEQ ID NO: 411937 - DNA, 75 bp, synthetic construct
  source 1..75: mol_type = other DNA
cccgcaatttaaaacggttggcctgccgacaatgggagcttaccgtgagctacgtaaattgccgcgcggcgtcag

SEQ ID NO: 411938 - DNA, 75 bp, synthetic construct
  source 1..75: mol_type = other DNA
acaccacgacggaacgccgcactggcatatgatgcttttttgtcatccacgccagcgtaaccagattatcgaaat

SEQ ID NO: 411939 - DNA, 75 bp, synthetic construct
  source 1..75: mol_type = other DNA
tttattcagtacgatgaatataaacatgctgtggcaataaaagatggagaagtaaaagatattgataatgcgggt

SEQ ID NO: 411940 - DNA, 75 bp, synthetic construct
  source 1..75: mol_type = other DNA
ggatgtgcagcaggcggtgacacaggccattgccggattaagtgaacgaaaagtgcagttcacgtacacggacgt

SEQ ID NO: 411941 - DNA, 75 bp, synthetic construct
  source 1..75: mol_type = other DNA
atcagcggcgaggcgggcctgctgccgtccacgtcgagcaaagagggtcgtcgcctgcgtgcacggctggcatca

SEQ ID NO: 411942 - DNA, 75 bp, synthetic construct
  source 1..75: mol_type = other DNA
atctcaagccatttgatatagatgttgattatttatgtgtgatggcagatgatttaaataatgtaaaagatgaag

SEQ ID NO: 411943 - DNA, 75 bp, synthetic construct
  source 1..75: mol_type = other DNA
gacgtcatgaaggtgcttaatggcgcgttaaaaactggcatccctcgcaaaaatcgccagcaaagaagcaatgag

SEQ ID NO: 411944 - DNA, 75 bp, synthetic construct
  source 1..75: mol_type = other DNA
atgttaccgataaataataacttttcattgccccaaaattctttttataacactatttccggtacatatgctgat

SEQ ID NO: 411945 - DNA, 75 bp, synthetic construct
  source 1..75: mol_type = other DNA
gtcagtttaggccatgagattgttacattcctttttatcctggagatatgggggaacgcaggagatgattttttc

SEQ ID NO: 411946 - DNA, 75 bp, synthetic construct
  source 1..75: mol_type = other DNA
gattatcagtggtacaaaggatatgcagatgtcattgataaactggttacaaagtgctggcaggaagaagcatat

SEQ ID NO: 411947 - DNA, 75 bp, synthetic construct
  source 1..75: mol_type = other DNA
gatggcgatcagattttcccgctgggatgggcaatggttttacagcgcgcagctggcactcactacattgcggat

SEQ ID NO: 411948 - DNA, 75 bp, synthetic construct
  source 1..75: mol_type = other DNA
gcgacggctgaaagctacgtcgaaacctatgacgggatgaagactgtagcggcatcaatgacgcctttgttgggg

SEQ ID NO: 411949 - DNA, 75 bp, synthetic construct
  source 1..75: mol_type = other DNA
atgcctatgtatttacttagattgttttttgctgttactttgattacgcagatgtcgatggctacggctggtatt

SEQ ID NO: 411950 - DNA, 75 bp, synthetic construct
  source 1..75: mol_type = other DNA
acccggcggtaacccgcacgctggatcgcggagccaatacgattttcgtcaccgtgacagatgctgcaggcaata

SEQ ID NO: 411951 - DNA, 75 bp, synthetic construct
  source 1..75: mol_type = other DNA
acgacgagcaacttgccgcagggaacagaactcagcgtcacgctaaacggtaaaacctacacgaccagcgtaggt

SEQ ID NO: 411952 - DNA, 75 bp, synthetic construct
  source 1..75: mol_type = other DNA
agtcggctcaggaaagaatgcccggggctgacagtccacaggaacttatgaaaagggcaaaggaatatcaggata

SEQ ID NO: 411953 - DNA, 75 bp, synthetic construct
  source 1..75: mol_type = other DNA
atcgtgcaataactgcgggtgtaaatgtgttactgcctcgtataagatatacagaagaagtggtcaattctctta

SEQ ID NO: 411954 - DNA, 75 bp, synthetic construct
  source 1..75: mol_type = other DNA
tgattttaaagaacgcatcaaatttaaatttgggtactataatgaacaacaacttcagcaagagctcaatcaatg

SEQ ID NO: 411955 - DNA, 75 bp, synthetic construct
  source 1..75: mol_type = other DNA
ggcggtaatctctgcatgcagtaatggacaggcagccagcgcggcttgtgccggtgaaagactgaaagctattgc

SEQ ID NO: 411956 - DNA, 75 bp, synthetic construct
  source 1..75: mol_type = other DNA
attccgtgaacaggtcgctgcatggctggaaaaactcagtgcctctgcggagcttcgacagcagtctttcgctat

SEQ ID NO: 411957 - DNA, 75 bp, synthetic construct
  source 1..75: mol_type = other DNA
gccggaaaatttaaggaacggttattttgacataaatcggataagttatctcccggaaagtattcttaatctggg

SEQ ID NO: 411958 - DNA, 75 bp, synthetic construct
  source 1..75: mol_type = other DNA
tacccagaatatcctatcaactgggttagcgttatttccttaggtgttaatataaatcaaattgcatttgattat

SEQ ID NO: 411959 - DNA, 75 bp, synthetic construct
  source 1..75: mol_type = other DNA
cactagcaccaggtatagaaaaactaaaacagacctctattcaaatggtcactttggtgatgctgccaacttact

SEQ ID NO: 411960 - DNA, 75 bp, synthetic construct
  source 1..75: mol_type = other DNA
aacaaattgctgaaattttacagcagtcaaaaaagggtgcacctaataaggatttatgtgaacactatcaattta

SEQ ID NO: 411961 - DNA, 75 bp, synthetic construct
  source 1..75: mol_type = other DNA
agcgaattaaaaaaaaacagaatccaaagcacaaatcgtctttctggttttctttgctatcgctattctactgac

SEQ ID NO: 411962 - DNA, 75 bp, synthetic construct
  source 1..75: mol_type = other DNA
tggttcccggtggtgtactggctgttgagcctgtttaccacgttggtgtcattcccgaaagtgatgctcaaacgc

SEQ ID NO: 411963 - DNA, 75 bp, synthetic construct
  source 1..75: mol_type = other DNA
atgaccgatcgcattattgctttcctgatactttgcctgatgttcagcctgccgtttggcgtggctgtcatcttt

SEQ ID NO: 411964 - DNA, 75 bp, synthetic construct
  source 1..75: mol_type = other DNA
atatttacttattgctgttttttgaagagaaataccattaaggctgctattataatattggctactgtgattacg

SEQ ID NO: 411965 - DNA, 75 bp, synthetic construct
  source 1..75: mol_type = other DNA
ttataactgtggtatgtgcaacgtccagcgttatggcagctgatgataatgctatcacggatggcaaagtaacat

SEQ ID NO: 411966 - DNA, 75 bp, synthetic construct
  source 1..75: mol_type = other DNA
ctaaccaggcctcatctgatgctgctacaaacgtggccctgcaaatgtatatgaatgatggtacaacggccatca

SEQ ID NO: 411967 - DNA, 75 bp, synthetic construct
  source 1..75: mol_type = other DNA
gttaattggcgagatatattaatactaattaaatcaaaagaagatattctttatacactatcaatagtatttgtt

SEQ ID NO: 411968 - DNA, 75 bp, synthetic construct
  source 1..75: mol_type = other DNA
atgctggaccgtattcacacaaaaccggaaggaacaaacccctggcctgaactggtggatatggtcctgccaaaa

SEQ ID NO: 411969 - DNA, 75 bp, synthetic construct
  source 1..75: mol_type = other DNA
gttagaagatgctgtaaaagataagttgtttaataaggtttttgcctacatttttatttcgtttttaatttctaa

SEQ ID NO: 411970 - DNA, 75 bp, synthetic construct
  source 1..75: mol_type = other DNA
ggtggttgaggtcggtgagggcgtgaccagtgtgaaacggggtctgacgctcagtggaacgaaaactcacgttaa

SEQ ID NO: 411971 - DNA, 75 bp, synthetic construct
  source 1..75: mol_type = other DNA
cctgatgacgcccccggcacaccagctcagccattaacaccgctggtagcagaagcccagagtaaagcggaagtc

SEQ ID NO: 411972 - DNA, 75 bp, synthetic construct
  source 1..75: mol_type = other DNA
agtggcggtggagaaattacagtaggcgggcagacggtccgtatcacatatagtgaaacggatggtcgctttctg

SEQ ID NO: 411973 - DNA, 75 bp, synthetic construct
  source 1..75: mol_type = other DNA
tggtatgtcggcgcgacctgtgccgatctggtcggctactggctttatgatgtggaaggcggctggcgctggcgc

SEQ ID NO: 411974 - DNA, 75 bp, synthetic construct
  source 1..75: mol_type = other DNA
gcatggcattatcacctttggttataagcattccttcaaaaggtaaagaaggttttagatctcatcctgaaaacc

SEQ ID NO: 411975 - DNA, 75 bp, synthetic construct
  source 1..75: mol_type = other DNA
caaaaggagttgcaacgggcattgttaatatgtgttgtgattttaaggctcttgaggatgcaatgaaaacgtatg

SEQ ID NO: 411976 - DNA, 75 bp, synthetic construct
  source 1..75: mol_type = other DNA
ttagctgccgccctgctggatattaaccgccttactggttcgccggtgatcctgtccaatagcgacaccccagtc

SEQ ID NO: 411977 - DNA, 75 bp, synthetic construct
  source 1..75: mol_type = other DNA
gcgtgacaagctcgataactggctcaaaaaaaccgtcctgccgctcggtggtgcgggggccaagttcgatgtggt

SEQ ID NO: 411978 - DNA, 75 bp, synthetic construct
  source 1..75: mol_type = other DNA
ttagctgcaggtgtgcagaataaaatccttgaatatatggctttaggcattcctacaattacatcttctactgga

SEQ ID NO: 411979 - DNA, 75 bp, synthetic construct
  source 1..75: mol_type = other DNA
cagacaatttttgtatctcaacatgataagaactacctttttagaaatttaccagacttatatcataagtcatta

SEQ ID NO: 411980 - DNA, 75 bp, synthetic construct
  source 1..75: mol_type = other DNA
acctcatgagtttgtatcaacaatattgaaattgtttaatgatccaagttttggaaaaaccatttcaaaaaatgg

SEQ ID NO: 411981 - DNA, 75 bp, synthetic construct
  source 1..75: mol_type = other DNA
aaacacgtttcgctggaacatattgaacgtaatctgatgaaaggtcgtaaactgcgcgaaataggcgctcacgat

SEQ ID NO: 411982 - DNA, 75 bp, synthetic construct
  source 1..75: mol_type = other DNA
ctttacccgattcgttattgactatgaatatcagctataacgaaatagtctccttaccatcgctcccacaggctc

SEQ ID NO: 411983 - DNA, 75 bp, synthetic construct
  source 1..75: mol_type = other DNA
atattgagtcctcatcttatatcaaaaataatgatggcagtgaaataatgcagtttgttatgaataatcctgaag

SEQ ID NO: 411984 - DNA, 75 bp, synthetic construct
  source 1..75: mol_type = other DNA
gagcaaaccttcggtaaatcagacgtttacaagggttactatgctcatattgaatttgatgagaatagtttcaga

SEQ ID NO: 411985 - DNA, 75 bp, synthetic construct
  source 1..75: mol_type = other DNA
aagcttacaggttggggagaagctggagttccacaatatcatactcaattcatcggaatttctggtgttgttatt

SEQ ID NO: 411986 - DNA, 75 bp, synthetic construct
  source 1..75: mol_type = other DNA
tggtaattctgatatctatttggctactaaagatttcatgcgtgaaggcttgaaaatatttacagattttactaa

SEQ ID NO: 411987 - DNA, 75 bp, synthetic construct
  source 1..75: mol_type = other DNA
tcgcccacaatcaatatccccatcaatggtaacccttccgatgcaacgttggcgctggtccgtaaagctgcagat

SEQ ID NO: 411988 - DNA, 75 bp, synthetic construct
  source 1..75: mol_type = other DNA
aggaagagcttttaaatcaatttcagtctggagatattgaaaaaagtctatacgataaaaagaaagaagcgcttc

SEQ ID NO: 411989 - DNA, 75 bp, synthetic construct
  source 1..75: mol_type = other DNA
ctgctcaggcgctggatactttggggctttcagctcagaagctggctcagcaatccccagataagcagctgatgg

SEQ ID NO: 411990 - DNA, 75 bp, synthetic construct
  source 1..75: mol_type = other DNA
actattgcagctaatgccgtatatcaaagttattatcctggtgatgcatatgtatcattacttggtgtagttaat

SEQ ID NO: 411991 - DNA, 75 bp, synthetic construct
  source 1..75: mol_type = other DNA
atgatcaccaatgatattctatcaaataaagatttagttgattactttaatctatgccgtggtacatctaagact

SEQ ID NO: 411992 - DNA, 75 bp, synthetic construct
  source 1..75: mol_type = other DNA
atataaagcactagatgtacagatgcgtacattagcagccaattctatctaccaaagctattttcccggtgataa

SEQ ID NO: 411993 - DNA, 75 bp, synthetic construct
  source 1..75: mol_type = other DNA
atgaggcgttcccggtcaatacaccggtggtggtggcaggggccattactcaggcagggaaactgggtacagccg

SEQ ID NO: 411994 - DNA, 75 bp, synthetic construct
  source 1..75: mol_type = other DNA
attattggtgtggtgggaaccgcaccgcaggctgccggggctgttgcagcaacactgacagcgggaacgccgctg

SEQ ID NO: 411995 - DNA, 75 bp, synthetic construct
  source 1..75: mol_type = other DNA
taatgagtatttataaaaatgacaagttagaacatataaattctgctatcttaagtatccttcagcaaactgata

SEQ ID NO: 411996 - DNA, 75 bp, synthetic construct
  source 1..75: mol_type = other DNA
gggactctttaagtttgcccaggaaaatccagcgtttgttgcgcaggcacaacaggcgttttccggtcttaatga

SEQ ID NO: 411997 - DNA, 75 bp, synthetic construct
  source 1..75: mol_type = other DNA
tacagcgtcagcacctgaacagcctgcagtatgaccgcgattacacctggaacgacaacggcgaactcatccgca

SEQ ID NO: 411998 - DNA, 75 bp, synthetic construct
  source 1..75: mol_type = other DNA
aaaatacgcacaactaccaggaacttatcaggttgatatctggctgaataaaagtaagcgtcaacggagcaccgt

SEQ ID NO: 411999 - DNA, 75 bp, synthetic construct
  source 1..75: mol_type = other DNA
acgattttaaagtagtaaatgattttttcacatcacgggttcaacaaacatttaacgtgaacaccaccaaatggg

SEQ ID NO: 412000 - DNA, 75 bp, synthetic construct
  source 1..75: mol_type = other DNA
tacattattatgtgtgtggggttttatctgagaaagaaattctaacccttaaaggagaattaggctatgcgaaat

SEQ ID NO: 412001 - DNA, 75 bp, synthetic construct
  source 1..75: mol_type = other DNA
tggaagaaatgctgaaactggttcgtcaacagcgcttcggtaaaaaatgtgaaacgctggctggtatgcaacgct

SEQ ID NO: 412002 - DNA, 75 bp, synthetic construct
  source 1..75: mol_type = other DNA
cgccggcgcgaaaaatccacctgtaccactgcgaccatcgcggcctgccgctggcccttatcagtaaggaagggg

SEQ ID NO: 412003 - DNA, 75 bp, synthetic construct
  source 1..75: mol_type = other DNA
ataataatttagtaactacaaattcatcattgatggaaagagtgtcacagatggaaattccatattatcgatacg

SEQ ID NO: 412004 - DNA, 75 bp, synthetic construct
  source 1..75: mol_type = other DNA
tttctcagggaccggaagcctacagtaaattcattactgacaacaaggacaggttaaatcgcgtgggtgcgaatg

SEQ ID NO: 412005 - DNA, 75 bp, synthetic construct
  source 1..75: mol_type = other DNA
ggaattgcaggaatatccattaaatcagatgttgaggattttgaaataatcccatttgaacaaactgtaactgat

SEQ ID NO: 412006 - DNA, 75 bp, synthetic construct
  source 1..75: mol_type = other DNA
gttcgctggcgtaaacgaccacccagcgtcactattcgcaaagttgaagatgttattgcgttactcaaaaaattt

SEQ ID NO: 412007 - DNA, 75 bp, synthetic construct
  source 1..75: mol_type = other DNA
ggacgaagtttcctttcctgtaacaagcggccgtcaactacgcgctttgaacttgccatttgtgaagatggtgag

SEQ ID NO: 412008 - DNA, 75 bp, synthetic construct
  source 1..75: mol_type = other DNA
ttatatcaatgattttggtggcttaagtttttatgaaataaactgcccaacagtgaataattcttgtaatgtttc

SEQ ID NO: 412009 - DNA, 75 bp, synthetic construct
  source 1..75: mol_type = other DNA
tcaatttttctggcacggcagcgcaacgaaacagcatcttttccggcggttcttatggtgcctcggcccagacgg

SEQ ID NO: 412010 - DNA, 75 bp, synthetic construct
  source 1..75: mol_type = other DNA
aggggatttattgaatatcagcggaagtagtgctggtaatcacgtattggctatccgcaaccagggcagcgaggc

SEQ ID NO: 412011 - DNA, 75 bp, synthetic construct
  source 1..75: mol_type = other DNA
attgaatgctgaatatgagctgagagaaaaagagaaaactcttgaagttgatctagaggttcgtcgcgttcgcga

SEQ ID NO: 412012 - DNA, 75 bp, synthetic construct
  source 1..75: mol_type = other DNA
actcatcaccggaagccctggacacactgaacgagctggcagcggcgctgggcggcgacccgaactttgcgacaa

SEQ ID NO: 412013 - DNA, 75 bp, synthetic construct
  source 1..75: mol_type = other DNA
ccccaccagtgcttaaactggcagccgaacaagcgccaaccggccgcgtggagcgggaaaaaacgacgcgcagca

SEQ ID NO: 412014 - DNA, 75 bp, synthetic construct
  source 1..75: mol_type = other DNA
cgccatccgcagtgacccgattaagtgtggttgccaaaagtgaaccgcaagatgagcagagtcgcagtcagtcgc

SEQ ID NO: 412015 - DNA, 75 bp, synthetic construct
  source 1..75: mol_type = other DNA
ggcggcgtactgaccgaagcgattcgccagaaaccgtactcggtggtgctgcttgatgaagtggaaaaagcgcac

SEQ ID NO: 412016 - DNA, 75 bp, synthetic construct
  source 1..75: mol_type = other DNA
gagtcagagtcagagtcagagtcagagtcagagtcagagtcagaacaggataataccggtgccgtaccggctgat

SEQ ID NO: 412017 - DNA, 75 bp, synthetic construct
  source 1..75: mol_type = other DNA
cgctggatgaactggaagcggcctggcaccagcagcagacgctggtccgggagattatcgcgctgcgccagcagt

SEQ ID NO: 412018 - DNA, 75 bp, synthetic construct
  source 1..75: mol_type = other DNA
cataaacagcctcatggtcaacggtatgggcatatccatgcaactccaggggattgatattgccgaaaggcccgg

SEQ ID NO: 412019 - DNA, 75 bp, synthetic construct
  source 1..75: mol_type = other DNA
cccgctctcgctgctgctgttgcagaaaatggcggccaacacggcgattgcccgcatccgcctgtcggcggcaga

SEQ ID NO: 412020 - DNA, 75 bp, synthetic construct
  source 1..75: mol_type = other DNA
gaacactgtattcactatatgcagtaccggtacaacgacagcgataacagctggaacatgtcatcgcgggtagtt

SEQ ID NO: 412021 - DNA, 75 bp, synthetic construct
  source 1..75: mol_type = other DNA
cttatatgttacaagaaaaacgttatcaggaactagatgaaatttataaccaggtattacaggagagtttcactt

SEQ ID NO: 412022 - DNA, 75 bp, synthetic construct
  source 1..75: mol_type = other DNA
ttgctctcaaatgtattacttggtagattattttttaggataaaccccatatatttaattaagggacgacaacaa

SEQ ID NO: 412023 - DNA, 75 bp, synthetic construct
  source 1..75: mol_type = other DNA
ataccctttaagattatttctataatacccaaaataaaaactgactttcttgacagccttggattgtcgaaatac

SEQ ID NO: 412024 - DNA, 75 bp, synthetic construct
  source 1..75: mol_type = other DNA
tgtctgggatcacccagaactcaccattcctgctggctcctaccgcagcgctagcgaagcgggtaactgggtaca

SEQ ID NO: 412025 - DNA, 75 bp, synthetic construct
  source 1..75: mol_type = other DNA
gtaacaccagccttacttagccagttacgtaaggcccctgtagttggtaaagcaaatcctgaattaaacagccaa

SEQ ID NO: 412026 - DNA, 75 bp, synthetic construct
  source 1..75: mol_type = other DNA
gttggtttgacctttctgattatttcattccgcttgcgacaattggtaagcaaagaaatattcctgccgcattaa

SEQ ID NO: 412027 - DNA, 75 bp, synthetic construct
  source 1..75: mol_type = other DNA
gcagctacagttttccggggcgttatatggcgctgtccggttacagcggcgtggctaccaacggggctttaacat

SEQ ID NO: 412028 - DNA, 75 bp, synthetic construct
  source 1..75: mol_type = other DNA
aggctcatattacaaatatccggcggttggtgtgccaatactggcggcatatcagggaactgagacgggtgatac

SEQ ID NO: 412029 - DNA, 75 bp, synthetic construct
  source 1..75: mol_type = other DNA
gaggcttcactccgggcactgattgaaacccgcgcgccactgaacagcccggcactgaccggaacgccgtccacg

SEQ ID NO: 412030 - DNA, 75 bp, synthetic construct
  source 1..75: mol_type = other DNA
tgtctgaataataaccggattgtccggtacggatacctgccgtttcagggggacctgttttttaccgacacggag

SEQ ID NO: 412031 - DNA, 75 bp, synthetic construct
  source 1..75: mol_type = other DNA
agtacattccggcttttcaacagctgttgcagtggtttcgtgcaggttgtggtacaggctcgcaattctgattaa

SEQ ID NO: 412032 - DNA, 75 bp, synthetic construct
  source 1..75: mol_type = other DNA
ttactggcactggacacacctgaagccatgcgcacggagcttgagctgaaagcggctgcaacgatggaaccccag

SEQ ID NO: 412033 - DNA, 75 bp, synthetic construct
  source 1..75: mol_type = other DNA
ctatattctggcgatatcaaatggagaggttatagaaggaacagatatttacgtaaacagtgctctttttgaaaa

SEQ ID NO: 412034 - DNA, 75 bp, synthetic construct
  source 1..75: mol_type = other DNA
atcttaacaatgcgttgtttgagaggtataggaaacaattacaatgtgaagaatacgcatctctacaatggaact

SEQ ID NO: 412035 - DNA, 75 bp, synthetic construct
  source 1..75: mol_type = other DNA
tcagaaaaaaaactatgtcttggatacagtcctgatacatcttcccaggctcaaccttttgctctttatattcgc

SEQ ID NO: 412036 - DNA, 75 bp, synthetic construct
  source 1..75: mol_type = other DNA
ggatattcgcgggatttggcggaaagggcgcttgctcacacgctgaaaaataaggttgaggcggcatatcaccgg

SEQ ID NO: 412037 - DNA, 75 bp, synthetic construct
  source 1..75: mol_type = other DNA
ccatcgtgggtcgagattaatttcaaagcatacaatttagcaaccgttgaattgcataatgaattatatggttat

SEQ ID NO: 412038 - DNA, 75 bp, synthetic construct
  source 1..75: mol_type = other DNA
gccctatcattacttcaggtgtacgctgagataacgtgtaatgcgcatggtgcggggattagtaaaccattttat

SEQ ID NO: 412039 - DNA, 75 bp, synthetic construct
  source 1..75: mol_type = other DNA
tgaagttctggaaccagtggctctcctttggccaggttccgcagtggtgggggcctggttatgaaggcagcctga

SEQ ID NO: 412040 - DNA, 75 bp, synthetic construct
  source 1..75: mol_type = other DNA
ggacgaactacagctataaccatcatatttatagagatggttattaccaacaaggatatccactgggggacgcga

SEQ ID NO: 412041 - DNA, 75 bp, synthetic construct
  source 1..75: mol_type = other DNA
ttggtcagacacagccggcggataactcgttaggcctggcattcaacaacagcggcgagtggtgggatatccatc

SEQ ID NO: 412042 - DNA, 75 bp, synthetic construct
  source 1..75: mol_type = other DNA
ataacgttatgccggtcccatcctgcgataacgtgaatgagtgggaagcagcagcgcagaagcagcagagcgagg

SEQ ID NO: 412043 - DNA, 75 bp, synthetic construct
  source 1..75: mol_type = other DNA
gcgctatccagacgatcactatgagcaaggatgaatataagtcagcacggcaggagatgatggaggatgacgact

SEQ ID NO: 412044 - DNA, 75 bp, synthetic construct
  source 1..75: mol_type = other DNA
atgataaaaattgcgcgcattgccgtgacgctgggcttgctttcctcactgggagcccaggcttacgcagccggg

SEQ ID NO: 412045 - DNA, 75 bp, synthetic construct
  source 1..75: mol_type = other DNA
cggtaactcagaacggatataccgtttattctcgtatggttcctgcaggaccataccatctggatgatttgcgtc

SEQ ID NO: 412046 - DNA, 75 bp, synthetic construct
  source 1..75: mol_type = other DNA
attattagagggattaactgctgtacatattactaatatcgcctatgctaaggcagaaattttccctgtagaaat

SEQ ID NO: 412047 - DNA, 75 bp, synthetic construct
  source 1..75: mol_type = other DNA
tttcaactaacgggatttgaatggtcgattcggatgccaacacttacaacggcgaagatcgaacattctggtgaa

SEQ ID NO: 412048 - DNA, 75 bp, synthetic construct
  source 1..75: mol_type = other DNA
gatgaacaagtccttgaaagtatttggcaacatgaactacgacaactccaaagattaaaaggatatcctggcgta

SEQ ID NO: 412049 - DNA, 75 bp, synthetic construct
  source 1..75: mol_type = other DNA
ctacaattgatgacgattacgaaggtttatacttcactgattcatatctgaatggtgacgttaccaaatatacta

SEQ ID NO: 412050 - DNA, 75 bp, synthetic construct
  source 1..75: mol_type = other DNA
atgaatacaaccaatcaaagcttaattcgtttaccagaagtcttgaaacgaactggtttcggcaaggcctggatc

SEQ ID NO: 412051 - DNA, 75 bp, synthetic construct
  source 1..75: mol_type = other DNA
agatctttatattgttccagattctctagaaggtacattgcgtcaaataacacgacatgcaaatacattagacat

SEQ ID NO: 412052 - DNA, 75 bp, synthetic construct
  source 1..75: mol_type = other DNA
cacagataaaacactctccaggaaacccggggcggttcaaatcattgatggcagcctgcactggtccctactctc

SEQ ID NO: 412053 - DNA, 75 bp, synthetic construct
  source 1..75: mol_type = other DNA
tctgtgaaggggaaatgtatctgctcggtacggtgctttcgcattttctgtcgctgtacgccagcgttaactcat

SEQ ID NO: 412054 - DNA, 75 bp, synthetic construct
  source 1..75: mol_type = other DNA
ccaaccgtgagcttccgtcacaaattcgttccggcgatatcaccggcacaaccggtaaaaatgcagctgttgctt

SEQ ID NO: 412055 - DNA, 75 bp, synthetic construct
  source 1..75: mol_type = other DNA
tgattcaggggaaatcggtgcgtctgatcctcaaaaaaagaggccacaccagacgatattcgccatgccgacgga

SEQ ID NO: 412056 - DNA, 75 bp, synthetic construct
  source 1..75: mol_type = other DNA
atgcgtcaccacgaaagacttatacagctggaaccgcgtttatttgttggtagtgttgtgggtgctgtcggaact

SEQ ID NO: 412057 - DNA, 75 bp, synthetic construct
  source 1..75: mol_type = other DNA
gatgaacttatcgataatgtctggaagagaagtattgtcaccaatcatgttgtgacgcagagtatctcagaacta

SEQ ID NO: 412058 - DNA, 75 bp, synthetic construct
  source 1..75: mol_type = other DNA
agagcaaacaattaacaaagcatttcctcattctgacacgcttaaaggtgttcagctcggttggagtggagacgt

SEQ ID NO: 412059 - DNA, 75 bp, synthetic construct
  source 1..75: mol_type = other DNA
ccaaagtctgattatacaaacgacaggatgtattggcgagggtgctttggatacgatagagaggaaacgccaaaa

SEQ ID NO: 412060 - DNA, 75 bp, synthetic construct
  source 1..75: mol_type = other DNA
aaaaacgcgctgaggaatcgggcgtcactttgatttacacgccttttgcccgtgaagcgtttgttttcatcgtca

SEQ ID NO: 412061 - DNA, 75 bp, synthetic construct
  source 1..75: mol_type = other DNA
cggtggcggtgctgctggcattcctcgtactggccgcgctgtatgaaagctggaccctgccgctggcggtgatcc

SEQ ID NO: 412062 - DNA, 75 bp, synthetic construct
  source 1..75: mol_type = other DNA
tggtagtcatgtacaaattctgggcgataatatctaccatcaaaatgaaaacaatgaatggatacaagaagattc

SEQ ID NO: 412063 - DNA, 75 bp, synthetic construct
  source 1..75: mol_type = other DNA
gcgctaccgggtttatcggtaaatatattatcgataacctgctcgcccgcggctttcacgttcgcgcattgacgc

SEQ ID NO: 412064 - DNA, 75 bp, synthetic construct
  source 1..75: mol_type = other DNA
atggaaaagcctagcttcccacctcttcttacagcaggatttcatgatatggatagtgatggcatcaagtctctt

SEQ ID NO: 412065 - DNA, 75 bp, synthetic construct
  source 1..75: mol_type = other DNA
ctcggaagtcgggctggtcctgaatgcagggaaaacgaatatcgcctacattgacacgtttaaaaggagaaacgt

SEQ ID NO: 412066 - DNA, 75 bp, synthetic construct
  source 1..75: mol_type = other DNA
ctatcgggaatagagtacagtccgggagtcggtgttgattactggatatggagtctccagctatccggtataggt

SEQ ID NO: 412067 - DNA, 75 bp, synthetic construct
  source 1..75: mol_type = other DNA
tctgctaccggagccggaagagaaaaaagcccgtcctgcccgcaaaccgctgccggcgcacctgccacgcgaaga

SEQ ID NO: 412068 - DNA, 75 bp, synthetic construct
  source 1..75: mol_type = other DNA
gcacttcccgatctcgacttaccaggctaacgtgccgcagctggacgtgcaggtcgatcgcgataaggcgaaagc

SEQ ID NO: 412069 - DNA, 75 bp, synthetic construct
  source 1..75: mol_type = other DNA
tttacttccaggtggcgctattaaccactatcggcttgtcgtcgaaaaacgccattctgattgtggaatttgctg

SEQ ID NO: 412070 - DNA, 75 bp, synthetic construct
  source 1..75: mol_type = other DNA
ttctggaagatggcagcgttaagtccagagtcattaatcatagcccggtaacattgagcgcgcagcagattgaag

SEQ ID NO: 412071 - DNA, 75 bp, synthetic construct
  source 1..75: mol_type = other DNA
atgccgttatcttcttttgctcaggagctgctggctccctggtattctcttcgttctgtctgtcggcgcattctt

SEQ ID NO: 412072 - DNA, 75 bp, synthetic construct
  source 1..75: mol_type = other DNA
gataaccagcgctggagcacgcggctagtatacgccaaagttaacccagaaaatcaaccgattaatcaagccttc

SEQ ID NO: 412073 - DNA, 75 bp, synthetic construct
  source 1..75: mol_type = other DNA
gcccgggcgctaaaaaaggttcttctgagcaagtagttctggcccgtatcaaccagagactatctgccttaaaag

SEQ ID NO: 412074 - DNA, 75 bp, synthetic construct
  source 1..75: mol_type = other DNA
ggcccgatcaagaccgagacgaccaacctcaccgcagatcaggccgcagagatttaccgcaagatgatggggtga

SEQ ID NO: 412075 - DNA, 75 bp, synthetic construct
  source 1..75: mol_type = other DNA
tgcgataaactggtatcttgaagcacatgatacgcgcactaatatgagtcgaaccaattacagctaccgtcacca

SEQ ID NO: 412076 - DNA, 75 bp, synthetic construct
  source 1..75: mol_type = other DNA
tgggcggggatggtcaactcgttgccggtaaagttgagcttattacggaggataaccagcgctggagcacgcgtt

SEQ ID NO: 412077 - DNA, 75 bp, synthetic construct
  source 1..75: mol_type = other DNA
ggccgatgaccggcttcctgatgcagcgggcagagcaggcggcgccagagacctggtggttacgctgggtggggc

SEQ ID NO: 412078 - DNA, 75 bp, synthetic construct
  source 1..75: mol_type = other DNA
gcactacaaaaaaacattgaagacccttcaaaaaactatattttaaatgaaattactagagacgctggatttaaa

SEQ ID NO: 412079 - DNA, 75 bp, synthetic construct
  source 1..75: mol_type = other DNA
aaacagaaatataaaggttattataatttagataatatatcactatattcggctaaatccattgatggacggaga

SEQ ID NO: 412080 - DNA, 75 bp, synthetic construct
  source 1..75: mol_type = other DNA
tcgatctgtctgtcggcgcattcttgtggcttttccgcaactgcgggcaactgtattgcgtacccgctggtatct

SEQ ID NO: 412081 - DNA, 69 bp, synthetic construct
  source 1..69: mol_type = other DNA
acctgctttacactttcgcccgcggtcagtgatggctgcgggcgaatcgtaccagatgttgtcaattaa

SEQ ID NO: 412082 - DNA, 75 bp, synthetic construct
  source 1..75: mol_type = other DNA
aagaaatccgggcagaccgcgtgagtgacgaaagccgggcgtggcttgcgcagtgcgggctgacggtggagcaac

SEQ ID NO: 412083 - DNA, 75 bp, synthetic construct
  source 1..75: mol_type = other DNA
cgacagacgcgggaatacggctacagtgccacgggcaggctggagagcgtgcgcaccctcgcaccgggcctggac

SEQ ID NO: 412084 - DNA, 75 bp, synthetic construct
  source 1..75: mol_type = other DNA
tttatgtacccgcctgacggataccactgccgctgccgcattcgtgcccgaagtcaggcggatgcagaccgcatg

SEQ ID NO: 412085 - DNA, 75 bp, synthetic construct
  source 1..75: mol_type = other DNA
tgccccactcgggttactggaatgttgtattagcactccctcccggtcatcgagccaatatcagatactccatta

SEQ ID NO: 412086 - DNA, 75 bp, synthetic construct
  source 1..75: mol_type = other DNA
gaacgattccctgccaatattaccgtgccccactcgggttactggaatgttgtattagcactccctcccggtcat

SEQ ID NO: 412087 - DNA, 75 bp, synthetic construct
  source 1..75: mol_type = other DNA
atacgtctatttttttgactctgatgatgctttgagtccaatgtttataagggatattaatgaaatattgactaa

SEQ ID NO: 412088 - DNA, 75 bp, synthetic construct
  source 1..75: mol_type = other DNA
tacagaacttcccgttgtcggtgatggccgggcagttaagtccggggcagcacgagttcagtgtggcagccggtt

SEQ ID NO: 412089 - DNA, 75 bp, synthetic construct
  source 1..75: mol_type = other DNA
ccgccagtcttctggaaagtgagttattcggtcatgacaaaggggcgtttactggtgcgattaatacccatcgtg

SEQ ID NO: 412090 - DNA, 75 bp, synthetic construct
  source 1..75: mol_type = other DNA
ggatctcaccgcgccggttatcagcattaacaccgtttcgacggacgaccgcctcaacgccgccgaacagcagca

SEQ ID NO: 412091 - DNA, 75 bp, synthetic construct
  source 1..75: mol_type = other DNA
aaaaagaaatactggagcgtcattatatagcgccatttggctcttatgaatatcctattgatatgaattggaagg

SEQ ID NO: 412092 - DNA, 75 bp, synthetic construct
  source 1..75: mol_type = other DNA
ttccgtttttacaccgcgttcaagcaaccttactctatctgttatagccaggataatgttgttcgaaacagtatt

SEQ ID NO: 412093 - DNA, 75 bp, synthetic construct
  source 1..75: mol_type = other DNA
acatgaatgatggtgaccttgtcagggttcaatgttcacaccagattaatgttttattaatggatgattcaaatt

SEQ ID NO: 412094 - DNA, 75 bp, synthetic construct
  source 1..75: mol_type = other DNA
tggtggatctggcggggaacgttgggcagaccgcaacgcaaaacgtggtggtcgacaccaccagcccggaagcgg

SEQ ID NO: 412095 - DNA, 75 bp, synthetic construct
  source 1..75: mol_type = other DNA
acaacggcaagttcgtcggcaccggctataacgacaccttcttcgccaccgcaggcaccgacacttacgacggtt

SEQ ID NO: 412096 - DNA, 75 bp, synthetic construct
  source 1..75: mol_type = other DNA
attacagtggggagtcgtttatatggtgaggccggaaagataaaacctggaaacctgtcaggttctatgacaatg

SEQ ID NO: 412097 - DNA, 75 bp, synthetic construct
  source 1..75: mol_type = other DNA
acgacgtgaagcgcggtttgcgaaacggcgttgctccttacatacccgcggccttttgcggggatgcccggagcg

SEQ ID NO: 412098 - DNA, 75 bp, synthetic construct
  source 1..75: mol_type = other DNA
acgacgtgaagcgcggtttgcgaaacggcgttgctccttacatacccgcggccttttgccgggatgccgggagcg

SEQ ID NO: 412099 - DNA, 75 bp, synthetic construct
  source 1..75: mol_type = other DNA
acgacgtgaagcgcggtttgcgaaacggcgttgctccttacatacctgcggccttttgctgggatgccgggagcg

SEQ ID NO: 412100 - DNA, 75 bp, synthetic construct
  source 1..75: mol_type = other DNA
gcagcctcaaaacttagtaaaggtggcggtgtgagcaaccgtagcatccgcgaccgtctggccagcgcagcaaac

SEQ ID NO: 412101 - DNA, 75 bp, synthetic construct
  source 1..75: mol_type = other DNA
ttataatggaagctcaattgcatttttactggaaacagatgacaaaaaaatgctttttttaggagacgccaatga

SEQ ID NO: 412102 - DNA, 75 bp, synthetic construct
  source 1..75: mol_type = other DNA
acgacgtgaagcgcggtttgcgaaacggcgttgctccttacataccggcggccttttgcggggatgccgggagcg

SEQ ID NO: 412103 - DNA, 75 bp, synthetic construct
  source 1..75: mol_type = other DNA
ttttgtgggctgttcatttaccctggacagtcagtgcggcaggttgtggctgtatcagcccccggcgacagggtc

SEQ ID NO: 412104 - DNA, 75 bp, synthetic construct
  source 1..75: mol_type = other DNA
gtcagtgcggcaggttgtggctgtatcagcccccggcgacagggactcatacgggtgtgtggcacccggcaggca

SEQ ID NO: 412105 - DNA, 75 bp, synthetic construct
  source 1..75: mol_type = other DNA
cagtcaatataaccgccaggacggtgtaaaaaccaccgatggccgtaagaagcacagccaggtgatgggcgggtt

SEQ ID NO: 412106 - DNA, 75 bp, synthetic construct
  source 1..75: mol_type = other DNA
acgacgtgaagcgcggtttgcgaaacggcgttgctccttacataccagcggccttttgcggggatgccaggagcg

SEQ ID NO: 412107 - DNA, 75 bp, synthetic construct
  source 1..75: mol_type = other DNA
acgacgtgaagcgcggtttgcgaaacggcgttgctccttacataccagcggccttttgcagggatgccgggagcg

SEQ ID NO: 412108 - DNA, 75 bp, synthetic construct
  source 1..75: mol_type = other DNA
ttttgtgggctgttcatttaccctggacagtcagtgcggcaggttgtggctgtttcagcccccggcgacagggac

SEQ ID NO: 412109 - DNA, 75 bp, synthetic construct
  source 1..75: mol_type = other DNA
cctttaatgatgtcgtgacctaccaggccgacgctaattttgcagtgaaaacagtcaacatcccaaacctggccg

SEQ ID NO: 412110 - DNA, 75 bp, synthetic construct
  source 1..75: mol_type = other DNA
tttgattcattaatgaattatggatttgcccctatatttccagacacctgttatcacttaccccatcactggccc

SEQ ID NO: 412111 - DNA, 75 bp, synthetic construct
  source 1..75: mol_type = other DNA
taacatatgggattattgattattttgcgttacaggatacaacaaaacaagaatttatgacatccgttacacgtt

SEQ ID NO: 412112 - DNA, 75 bp, synthetic construct
  source 1..75: mol_type = other DNA
tttctgtaacggcagacctgaaatatccccagaaggggtagaaccgtggggcagtacaccgacttcattcaactt

SEQ ID NO: 412113 - DNA, 75 bp, synthetic construct
  source 1..75: mol_type = other DNA
gatagaatggctggattctcctgtggtctatcaacaagatgaagaaacgataacggcgcttaaggcaatggtgcc

SEQ ID NO: 412114 - DNA, 75 bp, synthetic construct
  source 1..75: mol_type = other DNA
ttgatgagagttacagcggcgaaaattatatcgccagcgtcagcccgatcccgcttttactcattcacggtaaag

SEQ ID NO: 412115 - DNA, 75 bp, synthetic construct
  source 1..75: mol_type = other DNA
attaacgagcatgctttccagccagggcttcgttttttcacgatagccaccaatctgctacgaggcacaactgac

SEQ ID NO: 412116 - DNA, 75 bp, synthetic construct
  source 1..75: mol_type = other DNA
ttgttgagaacgtcagggcgttcttgggaattgataatcctgttaacgcatcgattgctgagacaattaaaaata

SEQ ID NO: 412117 - DNA, 75 bp, synthetic construct
  source 1..75: mol_type = other DNA
ctacgataaattgctcacgatgcgcgaacgtgaagtacggtctgcgtcttcactggcaacgcgactgcgtatcac

SEQ ID NO: 412118 - DNA, 75 bp, synthetic construct
  source 1..75: mol_type = other DNA
tttttaaaacaatctatggtatgtcggtcaatttgcttgatattttccatatcaaagcattttcagagttggatc

SEQ ID NO: 412119 - DNA, 75 bp, synthetic construct
  source 1..75: mol_type = other DNA
agacctggcatgagtggaagcgggacgaacagcacaggcaacaacaacgccggcccggacactaccggggcatga

SEQ ID NO: 412120 - DNA, 75 bp, synthetic construct
  source 1..75: mol_type = other DNA
acaaaaagcctttcctccgactggcagtcccgaattatcgacctttaccaaaaaatgcaggcctgggtggaggcc

SEQ ID NO: 412121 - DNA, 75 bp, synthetic construct
  source 1..75: mol_type = other DNA
acaatgttaaatatagagtaataattaataatctttatggtagtgaaattcggataagaggtataaataaagatt

SEQ ID NO: 412122 - DNA, 75 bp, synthetic construct
  source 1..75: mol_type = other DNA
acagattcgccagagaacacttttaatccgatggattataaaaaggtaggttttgacacaaccgttatccttgaa

SEQ ID NO: 412123 - DNA, 75 bp, synthetic construct
  source 1..75: mol_type = other DNA
tccgtttttctcgtgcaaccagtgccgcaccttatgtgtttttcagtcatctgccaatgaataaaacaagaccac

SEQ ID NO: 412124 - DNA, 75 bp, synthetic construct
  source 1..75: mol_type = other DNA
gacacaacaggcgcaaaaagcacttctaccatttaacgcttctttattatccgtatacaatacttatattagtga

SEQ ID NO: 412125 - DNA, 75 bp, synthetic construct
  source 1..75: mol_type = other DNA
gtgatgaggatgctagccttaaatgtagaacgaaacctagttatgacgccagaaacagaaaagtggttgagacga

SEQ ID NO: 412126 - DNA, 75 bp, synthetic construct
  source 1..75: mol_type = other DNA
gatagtaaagttgcaaacgaaacaatttcaaatgaaattggttttgaacccagcaaaactgattggtctacaaac

SEQ ID NO: 412127 - DNA, 66 bp, synthetic construct
  source 1..66: mol_type = other DNA
ctggcgtatggtgtcctgttgcgtctgcaacagtgcccgcaggcgggcgttctcatgagcaagtga

SEQ ID NO: 412128 - DNA, 75 bp, synthetic construct
  source 1..75: mol_type = other DNA
aacattgccgactgggtgatgatgtcgccaggcgcggcgctgccggtgaacaaagcggttgtcactacttccacc

SEQ ID NO: 412129 - DNA, 75 bp, synthetic construct
  source 1..75: mol_type = other DNA
ttaatgagaattttgttgggatggattttacctgtgaattccgacccgaaaaaatgacgaatttgatcaatataa

SEQ ID NO: 412130 - DNA, 75 bp, synthetic construct
  source 1..75: mol_type = other DNA
cactcactttctttatatcaacgggtcaatgtgcctgcgatgaaatagcagaatcaaactttaattatatgattg

SEQ ID NO: 412131 - DNA, 75 bp, synthetic construct
  source 1..75: mol_type = other DNA
attctgaaatgattgaagataataaaaaagacttggctgtaaatgaccatgggttgacatgtccatcaacaacag

SEQ ID NO: 412132 - DNA, 75 bp, synthetic construct
  source 1..75: mol_type = other DNA
aggataagaggtattaatgagaattttgttgggatggattttacttgtgaattccgaccagaaaaaatgaccaat

SEQ ID NO: 412133 - DNA, 75 bp, synthetic construct
  source 1..75: mol_type = other DNA
gtccgcggtggcacagaacacggcagccgcgaagaagtcagccggcgatgccggcacatctgccagtgaggcggc

SEQ ID NO: 412134 - DNA, 75 bp, synthetic construct
  source 1..75: mol_type = other DNA
tgctgttgtgggtgacagcgctaacgtcgcttctgttgcgctgcatatccgcgcaggatttactgaaataggcac

SEQ ID NO: 412135 - DNA, 75 bp, synthetic construct
  source 1..75: mol_type = other DNA
gcttatcggtttacggttgaaaattcgatatatattgatccggcttatcagcgacagggcgtcggaaaagcactg

SEQ ID NO: 412136 - DNA, 75 bp, synthetic construct
  source 1..75: mol_type = other DNA
tttacgatgatgctgaaatggatgagccagaatgggtcatcaaaggcatggataagtttgaaagcgctgagtgtg

SEQ ID NO: 412137 - DNA, 75 bp, synthetic construct
  source 1..75: mol_type = other DNA
gtgaatgcaaagcgcgtttaccggataatgagagaaaatagcctgttgttgttacatgacaaaccatcacgaccg

SEQ ID NO: 412138 - DNA, 75 bp, synthetic construct
  source 1..75: mol_type = other DNA
gacgttacatgtggtgacgagtatacatttgtacctggcgttaaacttctaccgtggattgggatgaaaactgct

SEQ ID NO: 412139 - DNA, 75 bp, synthetic construct
  source 1..75: mol_type = other DNA
atataataaaaattaatgaaatgcgtacaggtaatcagtatcaacgaaaatttgatcgtgccgcttgtggaataa

SEQ ID NO: 412140 - DNA, 75 bp, synthetic construct
  source 1..75: mol_type = other DNA
cccgcatgaagttgttgaggctatggagcaagtaaaagaaacaggcgagagcactgcgcaatttatcgttacagc

SEQ ID NO: 412141 - DNA, 75 bp, synthetic construct
  source 1..75: mol_type = other DNA
gtttttttaactatgaaaatgaaatatctgatggattaaggcgaaccggtgccaccgttgattatttcgatgaga

SEQ ID NO: 412142 - DNA, 75 bp, synthetic construct
  source 1..75: mol_type = other DNA
tgagatgaatcttccatcggcggatggtaaaagtacagaaaaattaggaccaataacatataacttatacaaaga

SEQ ID NO: 412143 - DNA, 75 bp, synthetic construct
  source 1..75: mol_type = other DNA
cttaatggtccatcaacacaaatgtgccgtaaatttaatcatggtgcagccggtctgtattggtttaaccaggat

SEQ ID NO: 412144 - DNA, 75 bp, synthetic construct
  source 1..75: mol_type = other DNA
ctggttcgctgggaacggacacacacaccagacccggaaaagcatgaactttatcaggattcacgcgataagtgg

SEQ ID NO: 412145 - DNA, 75 bp, synthetic construct
  source 1..75: mol_type = other DNA
gttgataaaaacgtcattcttaaattcgacagcgatctttactcgctttataagtcgctgaagtttgaaggtgaa

SEQ ID NO: 412146 - DNA, 75 bp, synthetic construct
  source 1..75: mol_type = other DNA
cgataaagtgccggaacagtccatccagtggctgacagataacggttcagcgtacagagcgcatgaaacacggca

SEQ ID NO: 412147 - DNA, 75 bp, synthetic construct
  source 1..75: mol_type = other DNA
gtgggtgataaagaccgaactgctggaaacgcagacggtggatttcacgctcgggtcacaggggctgcgtcacac

SEQ ID NO: 412148 - DNA, 75 bp, synthetic construct
  source 1..75: mol_type = other DNA
tacattgttggctcgtacaaaaatttccgaattatgtccagttgcataccgacttattaaaatcactgattttca

SEQ ID NO: 412149 - DNA, 75 bp, synthetic construct
  source 1..75: mol_type = other DNA
tttgccatcgcttatgtagcaggttccatggctgtgaaatatggtgttttgccctttacaaagcaggagatcatg

SEQ ID NO: 412150 - DNA, 75 bp, synthetic construct
  source 1..75: mol_type = other DNA
cgcagcaagagagaaaaaagacctgttaaaagaaatgaagccagagatcccccgttcatctgtacgaaaaagact

SEQ ID NO: 412151 - DNA, 75 bp, synthetic construct
  source 1..75: mol_type = other DNA
ttaagtggtagccagcaaacttactggcatacggatcaacaggatcggctattacagtttggctacaacacgcaa

SEQ ID NO: 412152 - DNA, 75 bp, synthetic construct
  source 1..75: mol_type = other DNA
gctgtacaccggagactctgcgtgtctggggacgccagcatgagcgggataccgggagcggtgatggtgggctca

SEQ ID NO: 412153 - DNA, 75 bp, synthetic construct
  source 1..75: mol_type = other DNA
cttcccggaaacggtagccacccaagactataacaataacaatattaaaagatcatcgtcagagaattctggcga

SEQ ID NO: 412154 - DNA, 75 bp, synthetic construct
  source 1..75: mol_type = other DNA
atttcccccacagaaccgaacaaccgggaggtcgtatggccgaactgtcgaacgggtataccaaggtcgcaaacg

SEQ ID NO: 412155 - DNA, 75 bp, synthetic construct
  source 1..75: mol_type = other DNA
agccccggacatgacctcctggtctaacactgttcgcctgatgcgccagatagacgaccggtcgcaccaggacat

SEQ ID NO: 412156 - DNA, 75 bp, synthetic construct
  source 1..75: mol_type = other DNA
tacgtctgcaaaagctccacgagctgggatggtccagggaggagacagcgcaaatccgggcacccgtcgggatat

SEQ ID NO: 412157 - DNA, 75 bp, synthetic construct
  source 1..75: mol_type = other DNA
caatggctttgaggtggggttcaggccatgcgtcaggctgatgatttacggacgttctcttgaggcgcaggcaac

SEQ ID NO: 412158 - DNA, 75 bp, synthetic construct
  source 1..75: mol_type = other DNA
ttatttacacccccaacttcaccaagtggggaacagttgctgaccagcaatgcgccgagtggatcctcactctgc

SEQ ID NO: 412159 - DNA, 75 bp, synthetic construct
  source 1..75: mol_type = other DNA
ggtcactaaggaaatacaactcttgttagagcatttttttaaaagaggtgagaaagatattgtaattgaaattgt

SEQ ID NO: 412160 - DNA, 75 bp, synthetic construct
  source 1..75: mol_type = other DNA
acctgaataaattcactactatatgcacagacgttctatccccccgcgtcaccagacataataaagaaaaaaaaa

SEQ ID NO: 412161 - DNA, 75 bp, synthetic construct
  source 1..75: mol_type = other DNA
caataacattataaaaatgattgatacattgccagataatgcaatgatattgaaatccgttactggcagtaaaac

SEQ ID NO: 412162 - DNA, 75 bp, synthetic construct
  source 1..75: mol_type = other DNA
gtgagcatttcacgttaacaggtcgtattgatgaatactccacaattgaagccaaaggtcgtgcattaaacgagg

SEQ ID NO: 412163 - DNA, 75 bp, synthetic construct
  source 1..75: mol_type = other DNA
tatcgctactctatggaggggttctacaccctcaatgaatgggtgtcgcgacaggataatgattctgatttctgg

SEQ ID NO: 412164 - DNA, 75 bp, synthetic construct
  source 1..75: mol_type = other DNA
aatgaagagaaatccgttaatccagataaaattacaatggggtctggtttaaattatattgaacaagaatctctt

SEQ ID NO: 412165 - DNA, 75 bp, synthetic construct
  source 1..75: mol_type = other DNA
ttcgcaaaaatcccctttttaattttcatcgaaaaaatggaaattgataatatgaatcaaggtcatgcatattaa

SEQ ID NO: 412166 - DNA, 75 bp, synthetic construct
  source 1..75: mol_type = other DNA
cgggacaaaacatccaaagcccttagcaaaagaggtgtgctgcccgttcaagaaataccaggcccgaaaaacagc

SEQ ID NO: 412167 - DNA, 75 bp, synthetic construct
  source 1..75: mol_type = other DNA
gaacgagtcgaactggacgatgtggtgaagtacatcacccaaactacctcaagttttcggggccgggcaggacaa

SEQ ID NO: 412168 - DNA, 75 bp, synthetic construct
  source 1..75: mol_type = other DNA
gagttagaattaacaaaagaatcaaactctaacatttactcaggtacatttaccgataacggtaaaaattcatta

SEQ ID NO: 412169 - DNA, 75 bp, synthetic construct
  source 1..75: mol_type = other DNA
gcaggtgaacttgttgaacttgatgatattgtagaacacatagcccaatcctcatcagagcttcgggggcgtgcg

SEQ ID NO: 412170 - DNA, 75 bp, synthetic construct
  source 1..75: mol_type = other DNA
aaagatagataacgctgatatcagcagacgtctacgcgataaagggttgccggattattttcttggcattcgcta

SEQ ID NO: 412171 - DNA, 75 bp, synthetic construct
  source 1..75: mol_type = other DNA
ctggagagataaaagtggaaggtgaaattcgtactttagctcaattatttgccattgagcaccataaaaacaaag

SEQ ID NO: 412172 - DNA, 75 bp, synthetic construct
  source 1..75: mol_type = other DNA
taaacattattgtgatacaaataatgacagggttgaaaaggtattaaaagtaatcctttctaatttctattgcgt

SEQ ID NO: 412173 - DNA, 75 bp, synthetic construct
  source 1..75: mol_type = other DNA
gcgacgattttgttacccatacggcaaaattttccggcgaaacggtcgaacgtgcaatagagagggccatagcca

SEQ ID NO: 412174 - DNA, 75 bp, synthetic construct
  source 1..75: mol_type = other DNA
gataaaaacaacctcagcggcattaagctgggaaagcaccaatgaacggtataataaggacaaagaggcgggaaa

SEQ ID NO: 412175 - DNA, 75 bp, synthetic construct
  source 1..75: mol_type = other DNA
ccgatttaccacgcgggcaggccacgcatgtgcttcggcatacgttcgcaagctggttcatgatgaacgggggaa

SEQ ID NO: 412176 - DNA, 75 bp, synthetic construct
  source 1..75: mol_type = other DNA
tggttagcaagtaaaaacgttagtgggatcgttactgcgacatatctcgatgataatggtgcacagataaagcaa

SEQ ID NO: 412177 - DNA, 75 bp, synthetic construct
  source 1..75: mol_type = other DNA
aatacgcaacttaaaatcttttacaggccaaaatctgtaactatgacgcctgaagaagctatgcgtaaaataagt

SEQ ID NO: 412178 - DNA, 75 bp, synthetic construct
  source 1..75: mol_type = other DNA
taccaatgactatccggtactggtgcaaagttgggtagataatggtgaaggttccccagaagctgcttctccccc

SEQ ID NO: 412179 - DNA, 75 bp, synthetic construct
  source 1..75: mol_type = other DNA
gttaaccgtaaaaggtaattatgtcggtaataatggtcagcttaatatccgcaccgtattaggtgatgataaatc

SEQ ID NO: 412180 - DNA, 75 bp, synthetic construct
  source 1..75: mol_type = other DNA
aagtcgatcagagagccaagcaagcatcatccggtatgcgtaagctggagcttgtacttgatgctcaggaaattg

SEQ ID NO: 412181 - DNA, 75 bp, synthetic construct
  source 1..75: mol_type = other DNA
catctatgcgatgaaacactctgttatgcctgagatcgccaaattaagaatgaaagcactgcacttctgggaatg

SEQ ID NO: 412182 - DNA, 75 bp, synthetic construct
  source 1..75: mol_type = other DNA
tcaaaacaaagaaatccggccttttgtttgacgtcaattatgaggaatatcgcaaggtgcttcgcagtgttaagc

SEQ ID NO: 412183 - DNA, 75 bp, synthetic construct
  source 1..75: mol_type = other DNA
agttgggttgggtgccgaaaggatggtgtattaaagacttttccgtcattgcgaaattaataaaagacaatgtta

SEQ ID NO: 412184 - DNA, 75 bp, synthetic construct
  source 1..75: mol_type = other DNA
ttttaatggaattatattggctgcgcatattgatattctattcgatcagggatggatttcgtttgagaacgatgg

SEQ ID NO: 412185 - DNA, 75 bp, synthetic construct
  source 1..75: mol_type = other DNA
tcagctcattgggtatgctattcggcaccatcgcgctaataatgggcattatccacttttcattcggcccattct

SEQ ID NO: 412186 - DNA, 75 bp, synthetic construct
  source 1..75: mol_type = other DNA
gctggctttccataccttactttttggcatcggcatcatctgcagccttctgctgatattcctgattttttcttt

SEQ ID NO: 412187 - DNA, 75 bp, synthetic construct
  source 1..75: mol_type = other DNA
gctggctttccataccttgctttttggtatcggcatcatctgcggtcttctgctgatattcctgatcttttcctt

SEQ ID NO: 412188 - DNA, 75 bp, synthetic construct
  source 1..75: mol_type = other DNA
acaggcaagacccacaaggggcgcattgactcattggggctggatgaaaacaacacgccagtgattatcgaatat

SEQ ID NO: 412189 - DNA, 75 bp, synthetic construct
  source 1..75: mol_type = other DNA
ataccagcaatgaggacaccagcggctacgcgacgttaaccagtgccgaggaaatggtacgccacatgaacgaga

SEQ ID NO: 412190 - DNA, 75 bp, synthetic construct
  source 1..75: mol_type = other DNA
tgccgatcccagccagatcaaagtgccgtttaccgcaaccccgcctgtttcacgcgtggagccaaaacgcggtca

SEQ ID NO: 412191 - DNA, 75 bp, synthetic construct
  source 1..75: mol_type = other DNA
aacggtaaaagtcatgtttactggtacaacacaacttcctgcggaccgggaaagtgtcttctggtttaacgtgct

SEQ ID NO: 412192 - DNA, 75 bp, synthetic construct
  source 1..75: mol_type = other DNA
taaaaggtgaacccgctgaagcaccagccaaactgacgtggaagttaaataatgcgcagcttcaggtaaatagac

SEQ ID NO: 412193 - DNA, 75 bp, synthetic construct
  source 1..75: mol_type = other DNA
acaagcacttttaaagacacctatcagtatggttctacagctgtcggaagtaactcataccaggtacaaggggcg

SEQ ID NO: 412194 - DNA, 75 bp, synthetic construct
  source 1..75: mol_type = other DNA
ggagaaaaaagaggacgtagatgtcgataaaatcctcgatcaaagcggtatcgcactggccattgctgcgctact

SEQ ID NO: 412195 - DNA, 75 bp, synthetic construct
  source 1..75: mol_type = other DNA
attaaaagaggtcttctcgctggaataaaaggtgaaaaaattacgacagtggagaaaaaagagacgcctgatatc

SEQ ID NO: 412196 - DNA, 75 bp, synthetic construct
  source 1..75: mol_type = other DNA
atgtttcccattataaaaaaaaccgtcagcgcattattcattagtacgttattaaccagtgcacctgcattcgcc

SEQ ID NO: 412197 - DNA, 75 bp, synthetic construct
  source 1..75: mol_type = other DNA
tggaagccagtcttcaatttgtggttcatgaattcttattcttatcacatcaaaatcttcttgatgtgatgctat

SEQ ID NO: 412198 - DNA, 75 bp, synthetic construct
  source 1..75: mol_type = other DNA
tggggtaccggtgatattgaggtcgttgtccataatcaggccgatttggcaaaagctaagttactgattgagcaa

SEQ ID NO: 412199 - DNA, 75 bp, synthetic construct
  source 1..75: mol_type = other DNA
acggccagactattgaggcaacttttgataatcctgtgaattcaacaattcactggactgctccgttgcatattg

SEQ ID NO: 412200 - DNA, 75 bp, synthetic construct
  source 1..75: mol_type = other DNA
ctgtagttatgtctgcagctgtgtctggttctgctatggcatggcaggcctcttcttttaatggtgttgtgaatt

SEQ ID NO: 412201 - DNA, 75 bp, synthetic construct
  source 1..75: mol_type = other DNA
ttaacgtttttttttatacaggttgtcgttttttcattttttgaaaaaatccgcatggataaaaaaatattatat

SEQ ID NO: 412202 - DNA, 75 bp, synthetic construct
  source 1..75: mol_type = other DNA
caaagtattgttcgaggactatgccagagcgtatttcagttgaagaaattaatgaggttaaaatttatccagagt

SEQ ID NO: 412203 - DNA, 75 bp, synthetic construct
  source 1..75: mol_type = other DNA
accagacggtttaaatgagccggttaccgctattgtaattaaaaataaaaacggaaatgattacttatctctcgg

SEQ ID NO: 412204 - DNA, 75 bp, synthetic construct
  source 1..75: mol_type = other DNA
tttttagatgaatggttagatgcaaagtcgggattagaaacctgtgggcaccatgcattatcgatgctttcgtct

SEQ ID NO: 412205 - DNA, 75 bp, synthetic construct
  source 1..75: mol_type = other DNA
atatgatattccggaatgaaaataatgataaaaaatggaatggaagaagcggaactattactctcaatatgatgg

SEQ ID NO: 412206 - DNA, 75 bp, synthetic construct
  source 1..75: mol_type = other DNA
attatttgtgatgatggttcttcagatgatacgcagcatgttttattagatttggctagtaaagatggaagaatt

SEQ ID NO: 412207 - DNA, 75 bp, synthetic construct
  source 1..75: mol_type = other DNA
tagatatcagcaaaatggctgtatcggtggatggcgtcagtgcttcagcatctgatctgatctatcaccagggta

SEQ ID NO: 412208 - DNA, 75 bp, synthetic construct
  source 1..75: mol_type = other DNA
tgggagtgccgcagcggcgcgcacaaagttgtttggaagtctatcaagaaatgatattctcggacagattcaaag

SEQ ID NO: 412209 - DNA, 75 bp, synthetic construct
  source 1..75: mol_type = other DNA
gtaaaggtgaatcttgggcggcagaggtgaatagttatttgcgcaaacacaacctagaaaagtatctggataaga

SEQ ID NO: 412210 - DNA, 75 bp, synthetic construct
  source 1..75: mol_type = other DNA
tccgtaaaacattcggcgttgtgcttgaaagaacggtacgggagttgcgcggcgaggcttgcttcagcctggaag

SEQ ID NO: 412211 - DNA, 75 bp, synthetic construct
  source 1..75: mol_type = other DNA
agcatagcgacagtaatgggaattacaggcgggatgtttgccacaatggcgctgatttgctgttgtattaatagg

SEQ ID NO: 412212 - DNA, 75 bp, synthetic construct
  source 1..75: mol_type = other DNA
gcctggatatttcagcacttgcattgggttgcttcactagaatctccaggcgcgtttgtcttcgctttatctgcg

SEQ ID NO: 412213 - DNA, 75 bp, synthetic construct
  source 1..75: mol_type = other DNA
attgggtagatggcgatattttcactctgaacatcgcgaactcaacaattgacgatgattttgatgcattctact

SEQ ID NO: 412214 - DNA, 75 bp, synthetic construct
  source 1..75: mol_type = other DNA
atatattacagagcaacaacaactttcaccttcatttttatttcgtatcgctgataacacttatattggtacagg

SEQ ID NO: 412215 - DNA, 75 bp, synthetic construct
  source 1..75: mol_type = other DNA
ttttgcctggcggtgggcaccgtaacaaaaagtggagtctggagctgaaacattatgccgacgatctggataacc

SEQ ID NO: 412216 - DNA, 75 bp, synthetic construct
  source 1..75: mol_type = other DNA
ggggcaataacaatatatttcagtattctggttgcctgttttagaattatcataataattgtcgatattattaat

SEQ ID NO: 412217 - DNA, 75 bp, synthetic construct
  source 1..75: mol_type = other DNA
gagggctggacttgtccagacaacgcaggggaagaacaggctttcaggatcagggggcctttgctacagatggcg

SEQ ID NO: 412218 - DNA, 75 bp, synthetic construct
  source 1..75: mol_type = other DNA
gtgaaacggcagaggtgacaggctatagtacttcccaagtttgtcgcattcaggctctctataaagaggttaaac

SEQ ID NO: 412219 - DNA, 75 bp, synthetic construct
  source 1..75: mol_type = other DNA
ttttatttttcctgtttttaggaatgcgtattggcggcattggtgtcggatttgctggtggggcaggtgtcatcg

SEQ ID NO: 412220 - DNA, 75 bp, synthetic construct
  source 1..75: mol_type = other DNA
gcaatggtagccaccagtaagactgagtggggacgggcgttccgcgaccgtctggcggctaatggcaagaaagga

SEQ ID NO: 412221 - DNA, 75 bp, synthetic construct
  source 1..75: mol_type = other DNA
tagtatcacaattagcattggcttgcactctggctatcacctctcagactaatgcagcaaactatgatacctgga

SEQ ID NO: 412222 - DNA, 75 bp, synthetic construct
  source 1..75: mol_type = other DNA
caggatcaacccgattgctggtgagcgggttacaaaaagctgtcggggggccggggatcatactggttgatgaag

SEQ ID NO: 412223 - DNA, 75 bp, synthetic construct
  source 1..75: mol_type = other DNA
tacgaaagcgcaaagaaaattattgtttaatctgcgtaaaactaagcaacgcctgggctggttgggggccgtttg

SEQ ID NO: 412224 - DNA, 75 bp, synthetic construct
  source 1..75: mol_type = other DNA
atggcattacaacatttggcgagacagtgcagtcagataaatatcaaagtattggacttggaagcactgtctctt

SEQ ID NO: 412225 - DNA, 75 bp, synthetic construct
  source 1..75: mol_type = other DNA
taaaagtagtttttataacacatatgctgaacgggatattagttctttgcgtgcttcattgcgccttggtgaggc

SEQ ID NO: 412226 - DNA, 75 bp, synthetic construct
  source 1..75: mol_type = other DNA
ctgacggcagtattctgccatttggcacagttgtttctctggacggtatgccgtcaggtaaggagaacaccggca

SEQ ID NO: 412227 - DNA, 75 bp, synthetic construct
  source 1..75: mol_type = other DNA
aaactgcgtggtgagcgacaatactgccgtgtcataaacgtctttatccgcaccagtccttatgcggtgcgtgaa

SEQ ID NO: 412228 - DNA, 75 bp, synthetic construct
  source 1..75: mol_type = other DNA
accgggatggataaccagatcctctcgttgtatgccaaagggatgaccacccgtgagatagccactgcgttcaaa

SEQ ID NO: 412229 - DNA, 75 bp, synthetic construct
  source 1..75: mol_type = other DNA
taattctgtattcacctattttggtatctgcgcagcaattggattattggttattctgtttctcgatgagccaaa

SEQ ID NO: 412230 - DNA, 75 bp, synthetic construct
  source 1..75: mol_type = other DNA
ttgtcaccacggtggcgtatggtcagccgggggaaaccggcagttacagtatggatgttgagccggggttgtacc

SEQ ID NO: 412231 - DNA, 75 bp, synthetic construct
  source 1..75: mol_type = other DNA
aggacctccgggaccaaaaggtgacactggccccagaggggagccggggcctcagggcccggcaggtccgagagg

SEQ ID NO: 412232 - DNA, 75 bp, synthetic construct
  source 1..75: mol_type = other DNA
gtggcattcccgcgttgctggttactcatgacgaacaagatattccaccggatggacgcgtgaaaaagcttgagg

SEQ ID NO: 412233 - DNA, 75 bp, synthetic construct
  source 1..75: mol_type = other DNA
cgttcgcccagcttagtttgtatcggtgtcacattgaggattaccctaccctgctaccgtctaatcagtatcagg

SEQ ID NO: 412234 - DNA, 75 bp, synthetic construct
  source 1..75: mol_type = other DNA
aaggggataaaggtgacaagggcgataagggggataccggtccgaaaggtgaacagggcgatccgggcggaccac

SEQ ID NO: 412235 - DNA, 75 bp, synthetic construct
  source 1..75: mol_type = other DNA
ccgtgggaccgcaaggagaggcgggtattcaggggcctgctggtcctgcgggcccgcgaggtgaaaccggagcca

SEQ ID NO: 412236 - DNA, 75 bp, synthetic construct
  source 1..75: mol_type = other DNA
gttcagattcaatatgtttatgccaatggagtcagaaacgatggtaaaggggtgtcttatattattcctccaatg

SEQ ID NO: 412237 - DNA, 75 bp, synthetic construct
  source 1..75: mol_type = other DNA
tgaaaccgggaaggacgtaaaaaatttgcaaaaaggcgaccgggtggtaattccgttcgtcattagactggcccc

SEQ ID NO: 412238 - DNA, 75 bp, synthetic construct
  source 1..75: mol_type = other DNA
cgtaagacgccgctgcctgatgacacatcatgcatgcaggtggtttctttaggactactcgctggcatgctgggc

SEQ ID NO: 412239 - DNA, 75 bp, synthetic construct
  source 1..75: mol_type = other DNA
tgatgatgcattcctgacggacttcgaagatgcctcgccggatgcgttagccgcctaccgcgctgcgggccttcc

SEQ ID NO: 412240 - DNA, 75 bp, synthetic construct
  source 1..75: mol_type = other DNA
ctcgcctgaaaagtaagatgctgatcgactttacccagcaactgacacgttcggtgcgtaatattcgcggcccgc

SEQ ID NO: 412241 - DNA, 75 bp, synthetic construct
  source 1..75: mol_type = other DNA
agtgaagcctggtttgcacaaaacctgaatgacttcctcaatacctatgactggactgcaccgatggcgatgcca

SEQ ID NO: 412242 - DNA, 75 bp, synthetic construct
  source 1..75: mol_type = other DNA
tgggcggcacctatgcgggtaacccgattgcctgcgtggctgcgctggaagtgttgaaggtgtttgagcaggaaa

SEQ ID NO: 412243 - DNA, 75 bp, synthetic construct
  source 1..75: mol_type = other DNA
aagaaaatgcaacttttttttgtgaatcttcagcatatggttttgaaaaagcattgaatatcgcttgtgatatta

SEQ ID NO: 412244 - DNA, 75 bp, synthetic construct
  source 1..75: mol_type = other DNA
aagtgaaaaagttgaggatatgtgtgaaagaatgagaggtggcatctctatgtttaatcacaccacaaaaacagc

SEQ ID NO: 412245 - DNA, 75 bp, synthetic construct
  source 1..75: mol_type = other DNA
tggatttttgcggtgtatcggcctcatttcgtgatgaacagtgggtggacgatattatgtcctctctcggcagtt

SEQ ID NO: 412246 - DNA, 75 bp, synthetic construct
  source 1..75: mol_type = other DNA
ttggacctgcggatgtttcccacatgatgaaagacatgcagcgtctttacgataaccaccctcaggttcgagctc

SEQ ID NO: 412247 - DNA, 75 bp, synthetic construct
  source 1..75: mol_type = other DNA
ggggcagaagttgaaagacggattgctggcgatagccgaaaaacacccggagatcggcgacgtacgcgggctggg

SEQ ID NO: 412248 - DNA, 75 bp, synthetic construct
  source 1..75: mol_type = other DNA
ttattgagcaggcctggcgatgcgaacaggaaaaggttcaggtgattgtccgcaacctggccagacaaaattgtt

SEQ ID NO: 412249 - DNA, 75 bp, synthetic construct
  source 1..75: mol_type = other DNA
ccgaaccaagttgttcaactgggtactgttcaggttggccaggagggtaagattgttgatttctctatgaaacct

SEQ ID NO: 412250 - DNA, 75 bp, synthetic construct
  source 1..75: mol_type = other DNA
gttattttggtgtttctccaagtcaatactctcagaggagttcagaaagtaaaattcttactcaccagggaatct

SEQ ID NO: 412251 - DNA, 75 bp, synthetic construct
  source 1..75: mol_type = other DNA
gcttggcagcaaaactcgcagggatcacgtacagctttaccgcacatgcgaaagatatttattttgattatcctg

SEQ ID NO: 412252 - DNA, 75 bp, synthetic construct
  source 1..75: mol_type = other DNA
tattccatttattaaaaacattgcttctttttcatttagtaaggcattaactatagactctgatgtctttagcat

SEQ ID NO: 412253 - DNA, 75 bp, synthetic construct
  source 1..75: mol_type = other DNA
aattttttcacacggttaaataaatatatatgctatttgtattgctttatttactctatccttattgtgaatagg

SEQ ID NO: 412254 - DNA, 75 bp, synthetic construct
  source 1..75: mol_type = other DNA
gaagtggccgtccaggcggtcaccgaactcgataataaagcggctcattgccatacgccagtcccgcagtggcat

SEQ ID NO: 412255 - DNA, 75 bp, synthetic construct
  source 1..75: mol_type = other DNA
aagaccgcctgctgatgcagtacgacaccatcattatcgatgaagcgcacgaacgtagcctgaatatcgattttc

SEQ ID NO: 412256 - DNA, 75 bp, synthetic construct
  source 1..75: mol_type = other DNA
ccgtctgggcatcgttttactgctcagcgaactgggagagttatgcgtctgcgatctctgcactgccctcgatca

SEQ ID NO: 412257 - DNA, 75 bp, synthetic construct
  source 1..75: mol_type = other DNA
atgtcaattctgttacccatccaactgttcaaaattcttgccgatgaaacgcgtttgagtatcgttttactgctc

SEQ ID NO: 412258 - DNA, 75 bp, synthetic construct
  source 1..75: mol_type = other DNA
aatgcgagaaaacgaattgaagatgcatttgatattgatcgtaacacccggcgactgcgtgaaatatttgaggat

SEQ ID NO: 412259 - DNA, 75 bp, synthetic construct
  source 1..75: mol_type = other DNA
aaactggtcattgcgctgaaatcgtgaactttaaaaagatgagtgctgaacttattcgggcaatggcatttgcca

SEQ ID NO: 412260 - DNA, 75 bp, synthetic construct
  source 1..75: mol_type = other DNA
gtgaaataccaacagatactaatacactgattctagcctatctatcacgaggattaggaatacttgcattgttct

SEQ ID NO: 412261 - DNA, 75 bp, synthetic construct
  source 1..75: mol_type = other DNA
ttttaacaatgcatgtacccggacatttttctttaatttcatcctcgctaccatttataaatcatgttataatcg

SEQ ID NO: 412262 - DNA, 75 bp, synthetic construct
  source 1..75: mol_type = other DNA
tcctgaaaaccagattcaggtttatgtagagagtgaagatggttctcacattcctgtttcacaaccaatcatcct

SEQ ID NO: 412263 - DNA, 75 bp, synthetic construct
  source 1..75: mol_type = other DNA
aaaaacgtcaacgataccatcactggtttattgcacaggacgtattgaaactgtgtgagaaattaggtgttgagt

SEQ ID NO: 412264 - DNA, 75 bp, synthetic construct
  source 1..75: mol_type = other DNA
tattgaaaaaacaagaattgtaccaaaaaaagtagaacgagatgttgatggaattactatatcagctattgagaa

SEQ ID NO: 412265 - DNA, 75 bp, synthetic construct
  source 1..75: mol_type = other DNA
aacgccctgaatcagggtattgatttccgccgtttctttgagtggtttcgcaatcgcgaagatgcagaaaatgaa

SEQ ID NO: 412266 - DNA, 75 bp, synthetic construct
  source 1..75: mol_type = other DNA
aatacacccagaatagcggggcatccttcccgcttatcgccttctatcccgtagaacgtgtcgtgctggatgtgc

SEQ ID NO: 412267 - DNA, 75 bp, synthetic construct
  source 1..75: mol_type = other DNA
gcatccagcgacggaggccgctacgccctaccgttggttgcttgccagaacggccagtgggaaaaaatcgaccac

SEQ ID NO: 412268 - DNA, 75 bp, synthetic construct
  source 1..75: mol_type = other DNA
aaaattaggtgtggaaccagataacatcgattcatctttcaaatcaaaatcgatagaatacagaaagtggcttag

SEQ ID NO: 412269 - DNA, 75 bp, synthetic construct
  source 1..75: mol_type = other DNA
ctggagaagctaagattttctgataaaaaaatcaagattgaactttatacctatgtattcaaagcattgcctgaa

SEQ ID NO: 412270 - DNA, 75 bp, synthetic construct
  source 1..75: mol_type = other DNA
catatttttctcattgtattataaagtgggcgtattaggcattaataaagatatcatagaagatgcaccaaagat

SEQ ID NO: 412271 - DNA, 75 bp, synthetic construct
  source 1..75: mol_type = other DNA
ctgcggaggcagcaggtacagggactgggcatgataatgttggcattggaatgttcgcaatgcgcaagaatcttg

SEQ ID NO: 412272 - DNA, 75 bp, synthetic construct
  source 1..75: mol_type = other DNA
attattttaaaaaataccgaggagttaatttccctattagagcatctgcccgaatactatgagatgattgagcaa

SEQ ID NO: 412273 - DNA, 75 bp, synthetic construct
  source 1..75: mol_type = other DNA
aaaaaaatggaaaaaaagtatccttatcatatgaatcactatattccaatttaatgaatacatttgaatctaatt

SEQ ID NO: 412274 - DNA, 75 bp, synthetic construct
  source 1..75: mol_type = other DNA
aaagaggatgtaccaccaggccagacgctggtatcaacgtattcagcccaggtgataagaaagacgggaatgaag

SEQ ID NO: 412275 - DNA, 75 bp, synthetic construct
  source 1..75: mol_type = other DNA
ctgttgtgaatgccaaaccaacacgtactccaggtgtatttcacgcatcatttcctggtgtcccttctctgacag

SEQ ID NO: 412276 - DNA, 75 bp, synthetic construct
  source 1..75: mol_type = other DNA
ggacacacgacagcatattgccgtagttgcaggtgtgcctatgagtgtgcctgttgtgaatgccaaaccaacacg

SEQ ID NO: 412277 - DNA, 75 bp, synthetic construct
  source 1..75: mol_type = other DNA
agtaattccggtggtggcagcaattcatccgtagcagcacctatggcatttggttttcctgctttggctgctcct

SEQ ID NO: 412278 - DNA, 75 bp, synthetic construct
  source 1..75: mol_type = other DNA
tatccgattgatgtgaaaatgattgcaccatttagtgatgaggtcatgaaagtcactggccttaatggcaaagca

SEQ ID NO: 412279 - DNA, 75 bp, synthetic construct
  source 1..75: mol_type = other DNA
aggactctaaggataaattagataaggagagtaaacggaataagccagggaaggcgacgggtaaaggaaaaccag

SEQ ID NO: 412280 - DNA, 75 bp, synthetic construct
  source 1..75: mol_type = other DNA
gcgggcacagacggatgtaaataataagaaggctgcatttgatgctgctgcaaaagataagtctgatgctgatgc

SEQ ID NO: 412281 - DNA, 75 bp, synthetic construct
  source 1..75: mol_type = other DNA
tggttatgaagtcaatgatatccatggtcataatattggcgttgtcggccagggaagtcagttatttattcgcac

SEQ ID NO: 412282 - DNA, 75 bp, synthetic construct
  source 1..75: mol_type = other DNA
taactacggctattatccggatgatttcatcagcgacaaacctgagatgtcagagattcgctcgacgttctcctc

SEQ ID NO: 412283 - DNA, 75 bp, synthetic construct
  source 1..75: mol_type = other DNA
actggcctgcgctatgggcgccggtgggaagctgggtggatgcccctgccaacaaaaaagtggattttggtggcc

SEQ ID NO: 412284 - DNA, 75 bp, synthetic construct
  source 1..75: mol_type = other DNA
ctggtgaggttactcagattagtgataagacagatccgggttgggtggacgattcgagaattcaatggggaaata

SEQ ID NO: 412285 - DNA, 75 bp, synthetic construct
  source 1..75: mol_type = other DNA
agcccaggtgttacaaataatactgataaggatgttcgcccggcagggtttactcaggggggtaataccagggat

SEQ ID NO: 412286 - DNA, 75 bp, synthetic construct
  source 1..75: mol_type = other DNA
tgaatggcagttatagtcagtcgagtacttatcgacaggctggagccagtgtttcagggggcattgtcgcctggt

SEQ ID NO: 412287 - DNA, 75 bp, synthetic construct
  source 1..75: mol_type = other DNA
gtaaaaggcgttaattacgatacggcgatgtggagttcggcaattaacacccgcaacaacgtgaccactgatgcg

SEQ ID NO: 412288 - DNA, 75 bp, synthetic construct
  source 1..75: mol_type = other DNA
tttcacaaataaccgcacgacctattttttggttcatgcttcctccgagcgaggatgaacaggttgtagtgcctg

SEQ ID NO: 412289 - DNA, 75 bp, synthetic construct
  source 1..75: mol_type = other DNA
ttttttggttcatgcttcctccgagcgaggatgaacaggttgtagtacctgatacaatgaaaataggaccgcgcc

SEQ ID NO: 412290 - DNA, 75 bp, synthetic construct
  source 1..75: mol_type = other DNA
ggccgtctttgtcgctatcgaaaagggaggactactggaggttaaagaggggggatttgcatttgcggtagatca

SEQ ID NO: 412291 - DNA, 75 bp, synthetic construct
  source 1..75: mol_type = other DNA
tggaacccgtggcgtttatcaggctgggataaggtcatcgtttaccccgacgttaagcggtcatttgtcagtcag

SEQ ID NO: 412292 - DNA, 75 bp, synthetic construct
  source 1..75: mol_type = other DNA
atagcattggcatcaactgttgagtatggtgagacagttgatggtgttgtcctggaaaaagatatccagctggtt

SEQ ID NO: 412293 - DNA, 75 bp, synthetic construct
  source 1..75: mol_type = other DNA
cggtgttgatggccttcgaaaaacactagccgggcctctgagccaagagaaagtggcaaggtatatcgcggacaa

SEQ ID NO: 412294 - DNA, 75 bp, synthetic construct
  source 1..75: mol_type = other DNA
caaaagatttttgtagacctggagaagaagtatcaagttctattgcaagtaaagtttttcacgcatttattgatt

SEQ ID NO: 412295 - DNA, 75 bp, synthetic construct
  source 1..75: mol_type = other DNA
tttgctgttttgccgaggtggctaaaagtgattattctcattacaggacatattcatttaaaattacgacacaat

SEQ ID NO: 412296 - DNA, 75 bp, synthetic construct
  source 1..75: mol_type = other DNA
gaattatccaaaacagcggagtattgttcttcaattggcaaaaaattatctgatgctggtcctgcgtattgtgtg

SEQ ID NO: 412297 - DNA, 75 bp, synthetic construct
  source 1..75: mol_type = other DNA
ataattggtcggtatttagtgatggtaaaacagcgaaaaatataagcttaacttttgaccctcctatcggggaat

SEQ ID NO: 412298 - DNA, 75 bp, synthetic construct
  source 1..75: mol_type = other DNA
acgtgagctggtaaaacatgctcccggcgattttggctaccagcgatcacgctggagctcagagcttctggcaat

SEQ ID NO: 412299 - DNA, 75 bp, synthetic construct
  source 1..75: mol_type = other DNA
tcgtttaccccgacgttaagcggtcatttgtcagtcagctatggcaatggcgcaggggtagaatcgccgtggaat

SEQ ID NO: 412300 - DNA, 75 bp, synthetic construct
  source 1..75: mol_type = other DNA
aagttaaccgcatgacacgtcacgggcgtgatatgagccactttcagcacctattaactgtcgccgtagatagca

SEQ ID NO: 412301 - DNA, 75 bp, synthetic construct
  source 1..75: mol_type = other DNA
actgtggttgagctgaacttcacccaaagtaaaaaaatactcgatctgctcaagcgtgaagcctttaagcacaaa

SEQ ID NO: 412302 - DNA, 75 bp, synthetic construct
  source 1..75: mol_type = other DNA
ctggcccaacatggagctggatgaatacatcaatctggaagcgcgtgtctcggggcgtatggtgttgctggatat

SEQ ID NO: 412303 - DNA, 75 bp, synthetic construct
  source 1..75: mol_type = other DNA
aaagtggatatggcgaacccggcgagctgtcagctttttgcgcaaaattggatcgcctgcgcaaccataccgccg

SEQ ID NO: 412304 - DNA, 75 bp, synthetic construct
  source 1..75: mol_type = other DNA
gtcagggcattgaagactttatggtggtgtcctacctgatattgacagccgttactcagggaacagaaggtcaag

SEQ ID NO: 412305 - DNA, 75 bp, synthetic construct
  source 1..75: mol_type = other DNA
catattcttggtggcattggtttagatatgaatcattactgtaaaagcacgccaccaacaaatgaaatatcattc

SEQ ID NO: 412306 - DNA, 75 bp, synthetic construct
  source 1..75: mol_type = other DNA
gaccgccggtgccatcgccattctgttcaaaaaaaatgcctctattctggggtctgaagttggatgtcaggggga

SEQ ID NO: 412307 - DNA, 75 bp, synthetic construct
  source 1..75: mol_type = other DNA
aaagaggtcaacaaaaccatccggcggctatccctagcgggttattctccgctgaaattcgtgcgcgaagctaaa

SEQ ID NO: 412308 - DNA, 75 bp, synthetic construct
  source 1..75: mol_type = other DNA
ttgccgggaagagcgaagaaaaaggcattgaaagcctatttgccaaaggcggtaccgtacttaccgccacctcca

SEQ ID NO: 412309 - DNA, 75 bp, synthetic construct
  source 1..75: mol_type = other DNA
tgccgcaaaaaaaataaaaaaaacacatcccaatgttgaatttattatacttggcgctatagataaggaaaaccc

SEQ ID NO: 412310 - DNA, 75 bp, synthetic construct
  source 1..75: mol_type = other DNA
gctagatacactaaataacaaagatatctcttatgccaaagatctctttttatatatagaaacacagttaaaaat

SEQ ID NO: 412311 - DNA, 75 bp, synthetic construct
  source 1..75: mol_type = other DNA
cagttgcagatgaaagccgaggttgaggcgctgacagacctgaaggcgatccgcagttatgctgtcggatggcct

SEQ ID NO: 412312 - DNA, 75 bp, synthetic construct
  source 1..75: mol_type = other DNA
ttgcagtacgaaatgcagccagcaacgaatatggcgggataaactgtgaggtgcagtttgaagacgcggtgaatg

SEQ ID NO: 412313 - DNA, 75 bp, synthetic construct
  source 1..75: mol_type = other DNA
cagcggtgtggcttcccagctttcccgctcacaattaggtgatatcgcagaaggcgctatcaatgctaaatactc

SEQ ID NO: 412314 - DNA, 75 bp, synthetic construct
  source 1..75: mol_type = other DNA
atgaagactgggcattgtttgaccagaataccagtatgcaggcggaatgcggtgtggggcatattccgtcgcaaa

SEQ ID NO: 412315 - DNA, 75 bp, synthetic construct
  source 1..75: mol_type = other DNA
atggccaacgctattacagccgaaccggagtagacggtaccgtgagctttacgttgcaccagaccgatgccggaa

SEQ ID NO: 412316 - DNA, 75 bp, synthetic construct
  source 1..75: mol_type = other DNA
ttgcagtacgaaatgcagcctacaacgaatacggcgggataaactgtgaggggcagtttgaagatgcggtcaatg

SEQ ID NO: 412317 - DNA, 75 bp, synthetic construct
  source 1..75: mol_type = other DNA
tgttgtttgctcatgcatcactggatgccaacatgatgtttgtgctgatcggtctgatgttgcagggattttgct

SEQ ID NO: 412318 - DNA, 75 bp, synthetic construct
  source 1..75: mol_type = other DNA
atgactacttccatgttcaacgcaaaactactaccaactgcgccatctgccgcagtggtcgtcgtgcgtgtggtg

SEQ ID NO: 412319 - DNA, 75 bp, synthetic construct
  source 1..75: mol_type = other DNA
agccacaagggggtgattatgacgatagcagagcaactggaagagaaaggtctggagaaaggtcgggcagaagag

SEQ ID NO: 412320 - DNA, 75 bp, synthetic construct
  source 1..75: mol_type = other DNA
ctgtttcatctaaacttcatcacttgcaaggtgtcggagttgatgagggcacgtttaaaatacttatccgctatg

SEQ ID NO: 412321 - DNA, 75 bp, synthetic construct
  source 1..75: mol_type = other DNA
ggaacagacgcaaagccacaggcacacagggtaatcagccaccagcgggaggtgatgacccttacggtgatgata

SEQ ID NO: 412322 - DNA, 75 bp, synthetic construct
  source 1..75: mol_type = other DNA
ctggtctggcgtcgtggtgcgaaaacacgtccgctcgaggcatttattcaactgctggatgtgcctgactcggca

SEQ ID NO: 412323 - DNA, 75 bp, synthetic construct
  source 1..75: mol_type = other DNA
actaacgcggcccagcgtgtgatgaaggatgtcactgtgaccagccgtgacgacaccaaccaggtgatcgccaaa

SEQ ID NO: 412324 - DNA, 75 bp, synthetic construct
  source 1..75: mol_type = other DNA
cgtttatcgaggtgcgcatcatgcaaatccattacaggcttgtgttgaggcactggatgcaaagaaaattgtgat

SEQ ID NO: 412325 - DNA, 75 bp, synthetic construct
  source 1..75: mol_type = other DNA
aaggcagccgtctggtgaccaccgccatcaccgcggatacagagcatcgttccagtggtctgccgctcggggaat

SEQ ID NO: 412326 - DNA, 75 bp, synthetic construct
  source 1..75: mol_type = other DNA
agcgaccccgggtattactttgttgtggttctggcagggcagtcaaacagcatggcatatggtgaaggccttccg

SEQ ID NO: 412327 - DNA, 75 bp, synthetic construct
  source 1..75: mol_type = other DNA
tattctcattacaggacctttttatttgatattggtaatcaatataaggttaaacttacacaaagcggaaaaaaa

SEQ ID NO: 412328 - DNA, 75 bp, synthetic construct
  source 1..75: mol_type = other DNA
atcaagtggagaactacttttatgcatactgttgctaagtaatataagtaaagtcaaaaatcaacatcttattta

SEQ ID NO: 412329 - DNA, 75 bp, synthetic construct
  source 1..75: mol_type = other DNA
ttggtactgatggcttatttccaggttgttattgattatggatttgcttacagttccagtcgagctatttcacaa

SEQ ID NO: 412330 - DNA, 75 bp, synthetic construct
  source 1..75: mol_type = other DNA
tttttcggtgttggtcgtgggtttattattggggatgtcatgttttctggtttgtctgccaataacttattaacg

SEQ ID NO: 412331 - DNA, 75 bp, synthetic construct
  source 1..75: mol_type = other DNA
cgtttatacttttagctgtagataatttattggtcaaaaagaataaaaagtttattttttatgtaatctgtgctg

SEQ ID NO: 412332 - DNA, 75 bp, synthetic construct
  source 1..75: mol_type = other DNA
gcaaacgcgccgcaacgtgtaatgaaagatatcaccgtgaccagccgcgacgattccaaccaggtgatcgctaaa

SEQ ID NO: 412333 - DNA, 75 bp, synthetic construct
  source 1..75: mol_type = other DNA
ttttgcattaaatcttaacagtcaaaacacctgtaacaatccaattattacctctattctggctatgttcatggc

SEQ ID NO: 412334 - DNA, 75 bp, synthetic construct
  source 1..75: mol_type = other DNA
gagcccaataaaatgggtataagtgttcttaaactaattatactttattacacatcatcactcgataacgcgata

SEQ ID NO: 412335 - DNA, 75 bp, synthetic construct
  source 1..75: mol_type = other DNA
tggtaaaaactggcgtttatttattgagttaatccatgccagaacgcataaattgattgatcatcaaagtattga

SEQ ID NO: 412336 - DNA, 75 bp, synthetic construct
  source 1..75: mol_type = other DNA
attaactgaacacagtgaatttaaaccggatatggcgcgtcaccagcgactgcaaaagagatggcaggagtggcg

SEQ ID NO: 412337 - DNA, 75 bp, synthetic construct
  source 1..75: mol_type = other DNA
caaccacgtgggggcagaaaatgtagcggctctggctatcagtaatcagcgtgaaacggctatcggctggtatcg

SEQ ID NO: 412338 - DNA, 75 bp, synthetic construct
  source 1..75: mol_type = other DNA
tagcccaagcacaattaaacacggtcaaccttcccccaaaagccaaagcgaagcttaaagggaaactcaccccag

SEQ ID NO: 412339 - DNA, 75 bp, synthetic construct
  source 1..75: mol_type = other DNA
gggctgattgcgctgatcatggccgggcaatttttcaccgacggcggcggcattaccctggtcaccgttctgatc

SEQ ID NO: 412340 - DNA, 75 bp, synthetic construct
  source 1..75: mol_type = other DNA
tctctgacgctggcgcgccatccttcagaaaacccaggagcgcatgatgctgcgcctgctggcgtggctaaaata

SEQ ID NO: 412341 - DNA, 75 bp, synthetic construct
  source 1..75: mol_type = other DNA
gcaccgttgcagatttaaaaacgttattaactgagcacagtgaatttaaaccggatatggcgcgtcaccagcgac

SEQ ID NO: 412342 - DNA, 75 bp, synthetic construct
  source 1..75: mol_type = other DNA
gctaaaattgcgtgctacaacaatgaactaccccaaggcagcccatgctccccagtaatcactaatctaatcatt

SEQ ID NO: 412343 - DNA, 75 bp, synthetic construct
  source 1..75: mol_type = other DNA
ttcttgttgttgctgccaccgcacgcaaaggctttgccggatacgatcacccaaaccagtatccacagaacgctg

SEQ ID NO: 412344 - DNA, 75 bp, synthetic construct
  source 1..75: mol_type = other DNA
atgcttcccccttctggccgtacggttgacagtatgaaatattatactttgacggaggaactggaggttgcgacg

SEQ ID NO: 412345 - DNA, 75 bp, synthetic construct
  source 1..75: mol_type = other DNA
aaaaatggtgtagtttacacaccacagtatttagcagattatgttgctgagaaaattataagttattcagatcta

SEQ ID NO: 412346 - DNA, 75 bp, synthetic construct
  source 1..75: mol_type = other DNA
aatattgtcccgaacacattgcaggttgattttattaatgattttggtcaaaccatttggatgactattaatcgt

SEQ ID NO: 412347 - DNA, 75 bp, synthetic construct
  source 1..75: mol_type = other DNA
gacaccgccgataaagtgacgtctttacagttaatgatgaatatggaaaatggttttctcccttatgtccgtatt

SEQ ID NO: 412348 - DNA, 75 bp, synthetic construct
  source 1..75: mol_type = other DNA
aaaaaatgcgtaagctacagattgaaaaatacgttaatgagaataaaaggctaatcgcggcacagataaaagaac

SEQ ID NO: 412349 - DNA, 75 bp, synthetic construct
  source 1..75: mol_type = other DNA
aaattaaccgtaagctggcgcagcgatacgccaatcatccggcggttctggggtggcatatcagtaatgagtatg

SEQ ID NO: 412350 - DNA, 75 bp, synthetic construct
  source 1..75: mol_type = other DNA
atttcctataagcgtgacggtgttttgccagatatatttggtcgcgatgcactcctacgacgactcgtttacctg

SEQ ID NO: 412351 - DNA, 75 bp, synthetic construct
  source 1..75: mol_type = other DNA
gactactcatataccacgcccgagcgccaggatagcctcattgcgccatgccagggaatcattcaaaaactcgaa

SEQ ID NO: 412352 - DNA, 75 bp, synthetic construct
  source 1..75: mol_type = other DNA
ttgtatgccgccggtatacatgtttttctggccacgccgagcggcgcgcgtccggcgtggatgtcgcaacgctat

SEQ ID NO: 412353 - DNA, 75 bp, synthetic construct
  source 1..75: mol_type = other DNA
tcattctgatggaatccacccccagccagacaagttggcagccaaccagcaaattgaaaaagccgggaatgaaca

SEQ ID NO: 412354 - DNA, 75 bp, synthetic construct
  source 1..75: mol_type = other DNA
cggaaacaggtaaagcttgttcacaagacttagaactggcgccgtggggatgcgaggtgctggaaagagaaataa

SEQ ID NO: 412355 - DNA, 75 bp, synthetic construct
  source 1..75: mol_type = other DNA
tttcaaaatctgaacagctaggtaacattgtaggaaaaagtaatgttgcaaatggcattcagacaagtgcaaata

SEQ ID NO: 412356 - DNA, 75 bp, synthetic construct
  source 1..75: mol_type = other DNA
cgaaggcgaaactacagaaaccattggtaaagacacccctattttgcctgcactggatacgaacattctattcgg

SEQ ID NO: 412357 - DNA, 75 bp, synthetic construct
  source 1..75: mol_type = other DNA
ggtatcgcaaacaagatattgtcgatttctttgcaaagtacccagcgcgtcgatatgggagtaaatataatggct

SEQ ID NO: 412358 - DNA, 75 bp, synthetic construct
  source 1..75: mol_type = other DNA
atgaataatggcttatccttgctggatctggacttgttcagaggtatttcgagtaattaccgcgtggttgttcaa

SEQ ID NO: 412359 - DNA, 75 bp, synthetic construct
  source 1..75: mol_type = other DNA
gattcgtcagagcgacgcgctgtgggagtttatcgagaatgatcacctgcgccgctatttaggtgagcgtttctg

SEQ ID NO: 412360 - DNA, 75 bp, synthetic construct
  source 1..75: mol_type = other DNA
aagggagggctggaatagacctgctcgacagtatcgaaaaggagatctacgagctttctagtgaacaccgcttga

SEQ ID NO: 412361 - DNA, 75 bp, synthetic construct
  source 1..75: mol_type = other DNA
aaaggcggcgtcagtcactggctggaaggtagacgcgagccaaactttgataccctggctgaactttgcgacatg

SEQ ID NO: 412362 - DNA, 75 bp, synthetic construct
  source 1..75: mol_type = other DNA
ccagcccacgcaatacgcgtttcagactgctcagtaactgtagtggcgtttcatccgcctgtagcaccggatgca

SEQ ID NO: 412363 - DNA, 75 bp, synthetic construct
  source 1..75: mol_type = other DNA
tggccaataaactcaaaacaccggctcaagaaagtcagcgtaatggctttttccgaccgcaacaggtaaaaaaaa

SEQ ID NO: 412364 - DNA, 75 bp, synthetic construct
  source 1..75: mol_type = other DNA
ttccgactgcaacaggtgcagaataaccagccccgcattaccggtatccccgtcaagcatcagggccccctgcct

SEQ ID NO: 412365 - DNA, 75 bp, synthetic construct
  source 1..75: mol_type = other DNA
aatggaactggtcaggctggctcttgaagaagaaggcagtattgccgcactggcccggagtaagcgtcgtctgag

SEQ ID NO: 412366 - DNA, 75 bp, synthetic construct
  source 1..75: mol_type = other DNA
tttcagtgccagtcgccaaagttactggaacacgtcacgcagcgactggatttgcccctatatttccagacacct

SEQ ID NO: 412367 - DNA, 75 bp, synthetic construct
  source 1..75: mol_type = other DNA
gtgtttaacggctttgagctgataagccagcagttcagccgggtacggcagccgcatccgtccgtggccccgcag

SEQ ID NO: 412368 - DNA, 75 bp, synthetic construct
  source 1..75: mol_type = other DNA
ttacagatgccagactttgcaaaggtttcagtgactgggctaattcagtcaaagaaggcgcatcgaatgacttca

SEQ ID NO: 412369 - DNA, 75 bp, synthetic construct
  source 1..75: mol_type = other DNA
tcagaatatttcgaatggggtgattatagtctctggtttcaagatttctcgatttataataagataggttttatc

SEQ ID NO: 412370 - DNA, 75 bp, synthetic construct
  source 1..75: mol_type = other DNA
cttgccggattacatgtctatatccaaacttcccgctacgaagggatgtgcctcgccgcacacgaagccatgaat

SEQ ID NO: 412371 - DNA, 75 bp, synthetic construct
  source 1..75: mol_type = other DNA
atggatgacaaaccattgcaggctctggctaataaattcaaaacaccggctcaagaaagtcagcgtaagggcttc

SEQ ID NO: 412372 - DNA, 75 bp, synthetic construct
  source 1..75: mol_type = other DNA
aaaacccagaatcaagaaatgagagtgcagttatactaaccgccctagcagtaggaaaaacatttccgtgcaaaa

SEQ ID NO: 412373 - DNA, 75 bp, synthetic construct
  source 1..75: mol_type = other DNA
tagcagttgtctcttcttccagtgctgagctgcgcgagcttcaaacgggtaatgaccttctttacaacattcaac

SEQ ID NO: 412374 - DNA, 75 bp, synthetic construct
  source 1..75: mol_type = other DNA
aacagaaaggcagcgtcggtgtgttctggcgcaataacgaaacgccttcttatgctttaagtcagtttctgcact

SEQ ID NO: 412375 - DNA, 75 bp, synthetic construct
  source 1..75: mol_type = other DNA
tatcgagaaaaggaattaaacacattctcttctttacgtcatcaatggtgaagtttttcagtaaacatggttgga

SEQ ID NO: 412376 - DNA, 75 bp, synthetic construct
  source 1..75: mol_type = other DNA
gactgctgtctacggacgtgtgcgtattgaggggaccgaaagtacggtgacgctcaatatgctgttacgccgcag

SEQ ID NO: 412377 - DNA, 75 bp, synthetic construct
  source 1..75: mol_type = other DNA
ccattacaagcccgctgccgcagatattcccgtggcgagcgataacccagcgcactatgcggatgccattcgtta

SEQ ID NO: 412378 - DNA, 75 bp, synthetic construct
  source 1..75: mol_type = other DNA
cgccggattgcaacagaaaatcacggcgctggataacgatggcaaccggaagccgattagtaacggtgcattcta

SEQ ID NO: 412379 - DNA, 75 bp, synthetic construct
  source 1..75: mol_type = other DNA
gtatccgggagataatggcgcggagatggaattacgcgaggctgtagcggaaagagatgccatcatcgacgaact

SEQ ID NO: 412380 - DNA, 75 bp, synthetic construct
  source 1..75: mol_type = other DNA
tgcgtggcggtaaatggattcgagttcacccggaagaccgtggagaaatggaattacgcgaggctgtagctgaac

SEQ ID NO: 412381 - DNA, 75 bp, synthetic construct
  source 1..75: mol_type = other DNA
ctttcaagagctttggagtggtatgtttttgacaagaatgaagtttcttttcaaggcagaaagtggcatacgttt

SEQ ID NO: 412382 - DNA, 75 bp, synthetic construct
  source 1..75: mol_type = other DNA
taaaggatttaactggaatagtaactttacagactacagtatatctcctactgatactgagcataagatacaaga

SEQ ID NO: 412383 - DNA, 75 bp, synthetic construct
  source 1..75: mol_type = other DNA
ctcgataaagaagaaatggggaaatcttgcgcccccgaacgcattaaatgctggaccgatgaaatagcgccccat

SEQ ID NO: 412384 - DNA, 75 bp, synthetic construct
  source 1..75: mol_type = other DNA
acactgccgaaggttatggcggggcgatatataccaatagcgtgacggctccctatcttattgatatttctgttg

SEQ ID NO: 412385 - DNA, 75 bp, synthetic construct
  source 1..75: mol_type = other DNA
gtaaataacactgcctttacaaataacactgccgaaggttatggcggggcgatatataccaatagcgtgacggct

SEQ ID NO: 412386 - DNA, 75 bp, synthetic construct
  source 1..75: mol_type = other DNA
agtgatggcgatggcggggcaatcgatgttaccgataataatagcgacagcaagcatccttcaggttatacgata

SEQ ID NO: 412387 - DNA, 75 bp, synthetic construct
  source 1..75: mol_type = other DNA
cagaccactgaaggtgcgctgaatgaaattaacaacaacctgcagcgtgtacgtgaactgactgttcaggcaact

SEQ ID NO: 412388 - DNA, 75 bp, synthetic construct
  source 1..75: mol_type = other DNA
gctactaataacacagtaaaaacgactgctgatgctaaaaatgtttatgttgatgctagtggtaaattaactact

SEQ ID NO: 412389 - DNA, 75 bp, synthetic construct
  source 1..75: mol_type = other DNA
aggcgcagtggaatagttcgcttaatgcggcaaagctgaaaaagggcgagacgttacaggtgaaggtgacggtca

SEQ ID NO: 412390 - DNA, 75 bp, synthetic construct
  source 1..75: mol_type = other DNA
gctaaccgtttcacctctaacattaaaggcctgactcaggctgcacgtaacgctaacgatggtatctctctggcg

SEQ ID NO: 412391 - DNA, 75 bp, synthetic construct
  source 1..75: mol_type = other DNA
cgatgcagctggtaaattcactaccgacgctgcaaccaaagccgcaaccaccaccgatccgctgaaagcccttga

SEQ ID NO: 412392 - DNA, 75 bp, synthetic construct
  source 1..75: mol_type = other DNA
gcgtgaacgtgctggcaaaaaatggctccatgaaaatccaggttggcgcaaatgataaccagactatcactatcg

SEQ ID NO: 412393 - DNA, 75 bp, synthetic construct
  source 1..75: mol_type = other DNA
ctgctgcaacagtaagtattggcaacggtacaacagctcaagagcaaaaagtcattattgctaaagatggttctt

SEQ ID NO: 412394 - DNA, 75 bp, synthetic construct
  source 1..75: mol_type = other DNA
accgggactaactctgattcggatctggactccattcaggacgaaatcaaatcccgtctggacgaaattgatcgc

SEQ ID NO: 412395 - DNA, 75 bp, synthetic construct
  source 1..75: mol_type = other DNA
ggcggcaggtggctgatctgcactcaaaaaccaccagcaagggaacaccaatggcaatggcgagtatggcagttc

SEQ ID NO: 412396 - DNA, 75 bp, synthetic construct
  source 1..75: mol_type = other DNA
gcgtgaacgtactggcaaaagacggttcgatgaaaattcaggttggcgcgaatgatggccagaccatcactatcg

SEQ ID NO: 412397 - DNA, 75 bp, synthetic construct
  source 1..75: mol_type = other DNA
acgattgctgttacaggcgctgtaattagttcagctgctctgcaatctgcaagcaaaacgactggtttcactgtt

SEQ ID NO: 412398 - DNA, 75 bp, synthetic construct
  source 1..75: mol_type = other DNA
catgtcgaaagcgcagattatccagcaggccggtaactccgtactggcaaaagccaaccaggtaccgcagcaggt

SEQ ID NO: 412399 - DNA, 75 bp, synthetic construct
  source 1..75: mol_type = other DNA
gtgcaggcactgcaaccaaagatcctttggctgccctggatgctgctatcagctccatcgacaaattccgttcct

SEQ ID NO: 412400 - DNA, 75 bp, synthetic construct
  source 1..75: mol_type = other DNA
tctggttccgccagccagggaaaaatggcaggtcggaaacatggatgcccgggtaaaagccctgctgcgtcactg

SEQ ID NO: 412401 - DNA, 75 bp, synthetic construct
  source 1..75: mol_type = other DNA
cggagagggagcaaggtcgctgttaaggtgtgttttggtcgttaccctgacctgggacttaagaccgcgcgagag

SEQ ID NO: 412402 - DNA, 75 bp, synthetic construct
  source 1..75: mol_type = other DNA
tgtgcggtttgccagtttatttgtccgcaagaggctattcgtggcgttaattcccctttacgttatttttgcaat

SEQ ID NO: 412403 - DNA, 75 bp, synthetic construct
  source 1..75: mol_type = other DNA
cacaatcaacctaaaccattttttgccgattacaaatcaatcgcagagataaaaggttgcaactttaatgttaca

SEQ ID NO: 412404 - DNA, 75 bp, synthetic construct
  source 1..75: mol_type = other DNA
cagagagtagtcacctgacagcagacaaagaactgagtaaccgggttagagcagcgttgcggaacctacgcccat

SEQ ID NO: 412405 - DNA, 75 bp, synthetic construct
  source 1..75: mol_type = other DNA
cacaacaccaacacatccgcaaagcgctgaaagagataacgggcgttaatcgctggtgggttgaggcaattgata

SEQ ID NO: 412406 - DNA, 75 bp, synthetic construct
  source 1..75: mol_type = other DNA
ctaacagatatctctttttcacggattgacatgaaataccgcaagtacattcagtccacactcgcatacatcatg

SEQ ID NO: 412407 - DNA, 75 bp, synthetic construct
  source 1..75: mol_type = other DNA
aattaattagaaaagaattgattttcaaaaatggtttgaatgccatattgggacctaaaaatggtgccaactcta

SEQ ID NO: 412408 - DNA, 75 bp, synthetic construct
  source 1..75: mol_type = other DNA
tgtcgaaagcgcagatcatccagcaggccggtaactccgtgttggcaaaagctaaccaggtaccgcagcaggttc

SEQ ID NO: 412409 - DNA, 75 bp, synthetic construct
  source 1..75: mol_type = other DNA
aagctggccgacagattcgctaacgacgccatgaaaaacgcggatgcgtcactggccacagccttcaaagatgcg

SEQ ID NO: 412410 - DNA, 75 bp, synthetic construct
  source 1..75: mol_type = other DNA
cgaagaaaaaaatcgaaaagacagatcgtcttctctaggccagataaacgacaggactcgtaatagaattcggaa

SEQ ID NO: 412411 - DNA, 75 bp, synthetic construct
  source 1..75: mol_type = other DNA
ccaactacagctcaacggctgcacgctcaaaaaacctcaagtcttatttggaacagctaaatattaaagcaacaa

SEQ ID NO: 412412 - DNA, 75 bp, synthetic construct
  source 1..75: mol_type = other DNA
gaaacccgatgtttggacgggtaagcccaaaacgaggaaggaagataactaatccagaaacgttagctaaaatgt

SEQ ID NO: 412413 - DNA, 75 bp, synthetic construct
  source 1..75: mol_type = other DNA
atatcaagctgaatgattgtgataccaatgtttccagtaatgcggctgttgcattcctggggactactgtcacca

SEQ ID NO: 412414 - DNA, 75 bp, synthetic construct
  source 1..75: mol_type = other DNA
ccaaatgcggcattgtctgggaacgaaaaggaagtttattcaacaaagttggcgattgtagattcaatcggcttt

SEQ ID NO: 412415 - DNA, 75 bp, synthetic construct
  source 1..75: mol_type = other DNA
aataatggaattcattctatggcatacgataatcacatggcctctggtaacattgcagaaactgaaatatctgaa

SEQ ID NO: 412416 - DNA, 75 bp, synthetic construct
  source 1..75: mol_type = other DNA
atgagcaagggtaataaagacgtcgtgttatcttatatatcaacgctgggtacttttgcaaaaaaaatattcttt

SEQ ID NO: 412417 - DNA, 75 bp, synthetic construct
  source 1..75: mol_type = other DNA
cgcctattaaggctaaccatttgcgaagcatactggattatattgagcaggaacagttaactgccgaagatcgta

SEQ ID NO: 412418 - DNA, 75 bp, synthetic construct
  source 1..75: mol_type = other DNA
gattaaacattactcctccgttgaatccatacagcagcatgtccccttagtccgggacgcggagttcagagcatt

SEQ ID NO: 412419 - DNA, 75 bp, synthetic construct
  source 1..75: mol_type = other DNA
tgtttattattctggtatgcggtgttttgcaagagatataaaagagttagctttagcattaacttattttgttgc

SEQ ID NO: 412420 - DNA, 75 bp, synthetic construct
  source 1..75: mol_type = other DNA
cagcgagacaaaaaccattttattcgcgtggatgctgacgagtggcaaaaggctctcgccgtgctggatgcgaac

SEQ ID NO: 412421 - DNA, 75 bp, synthetic construct
  source 1..75: mol_type = other DNA
gctgctggctgaactgtctacaaccaaaaaggggaacacatggctatcgaaggcgctgcggcgactgttccatta

SEQ ID NO: 412422 - DNA, 75 bp, synthetic construct
  source 1..75: mol_type = other DNA
cgctttgaaaataataaaagcaggcaataaatggcctgcttttatgctgggtagaataattattttaaataatta

SEQ ID NO: 412423 - DNA, 75 bp, synthetic construct
  source 1..75: mol_type = other DNA
aaatagttcgttatttatgccgcatccggcagatgcagggtctaaacgcgatcgaacacagcaactatttgcgta

SEQ ID NO: 412424 - DNA, 75 bp, synthetic construct
  source 1..75: mol_type = other DNA
atgaaatttaccttcagcaaggagatggcttttttttatgaacccctattttctctcttaattattctttccaat

SEQ ID NO: 412425 - DNA, 75 bp, synthetic construct
  source 1..75: mol_type = other DNA
ctttttaccattaactttgccacttcacccatccatgcagaaaatatactcattacattacactataaaaaagaa

SEQ ID NO: 412426 - DNA, 75 bp, synthetic construct
  source 1..75: mol_type = other DNA
gacccgctgatggcgctgttcaatgcggtctccctgatgtcccttaacccggaaccgaaaaagaaagaatatgcg

SEQ ID NO: 412427 - DNA, 75 bp, synthetic construct
  source 1..75: mol_type = other DNA
attatattaatgaaaatttcacttataaatttcaagatttagccaacctttctggcacaagagatgctcagctag

SEQ ID NO: 412428 - DNA, 75 bp, synthetic construct
  source 1..75: mol_type = other DNA
ggatctggtattaccgtaaagttaacgttttaccctgtggtaaacgccgtgagtttcgtcgttcgttaggcactc

SEQ ID NO: 412429 - DNA, 75 bp, synthetic construct
  source 1..75: mol_type = other DNA
cccccgttatggtaaacctgtatcagaagaaacacgcgaaaagattagaaaagcacatctagggcgcaagcgacc

SEQ ID NO: 412430 - DNA, 75 bp, synthetic construct
  source 1..75: mol_type = other DNA
tcaacgctgctaaatagccagtatcgggagttgattaacaacggcgttcagctgacaggtcgggtgggatatacg

SEQ ID NO: 412431 - DNA, 75 bp, synthetic construct
  source 1..75: mol_type = other DNA
cgcagtttggcgcacatctcaaaaaactcagacttcagtcaggtctgtctcaggaagcatttgcggataagtgtg

SEQ ID NO: 412432 - DNA, 75 bp, synthetic construct
  source 1..75: mol_type = other DNA
aatttaccgcaaactgtcgaaaaatatcacaaaattgttattccactgccctttttatcattaactttgccactt

SEQ ID NO: 412433 - DNA, 75 bp, synthetic construct
  source 1..75: mol_type = other DNA
tgaccacagaaaaacatataaatgctgtatctaaaagagttggatatagcagtccctcttacttcataaaatcat

SEQ ID NO: 412434 - DNA, 75 bp, synthetic construct
  source 1..75: mol_type = other DNA
acgtgatggtgagccaggattatatgccgcaatggaaaataatcaccctttgtgtgtcacacggttcctctctaa

SEQ ID NO: 412435 - DNA, 75 bp, synthetic construct
  source 1..75: mol_type = other DNA
cgttttaccctgtggtaaacgccgtgagtttcgtcgttcgttaggtactcgttcaaagactgaagcgacgaagcg

SEQ ID NO: 412436 - DNA, 75 bp, synthetic construct
  source 1..75: mol_type = other DNA
acgatttacctcttaatctccaggaaattgataagacaaccggtgaagttgttaagctggatgtcaacagcgcca

SEQ ID NO: 412437 - DNA, 75 bp, synthetic construct
  source 1..75: mol_type = other DNA
ctattttttgtcgccatctgtcattgcaatacgcccttgattcattgagaaatggaaaaggcaaagtcaacctga

SEQ ID NO: 412438 - DNA, 75 bp, synthetic construct
  source 1..75: mol_type = other DNA
agccaaagaattggagctatttgaaagggtaaaacaaatcatacaaacagaagataatatagaatataaagatac

SEQ ID NO: 412439 - DNA, 75 bp, synthetic construct
  source 1..75: mol_type = other DNA
acacgataccggagaatgccaccctggtgggcagccaggcgatgacggcgttgctggggcgggtgcccattgacg

SEQ ID NO: 412440 - DNA, 75 bp, synthetic construct
  source 1..75: mol_type = other DNA
ccaggggagctgaagtcactcgggattgagggggataccccggccgatacactgaggacgctgattggcactatg

SEQ ID NO: 412441 - DNA, 75 bp, synthetic construct
  source 1..75: mol_type = other DNA
gatgggaaatacacaataacagtaacaataagatcagagaattggtatctgagttcaaaaagaataaattaataa

SEQ ID NO: 412442 - DNA, 75 bp, synthetic construct
  source 1..75: mol_type = other DNA
ggagtcccatctctagcaacagatgtaggcgctattagtgaggtcgtaaaaaatgaaaacactggtcttgtagtc

SEQ ID NO: 412443 - DNA, 75 bp, synthetic construct
  source 1..75: mol_type = other DNA
gcgtggcgaatatgtggggacatatgggggaaacgctgacagcggcggatggctctgtatttgtgcgaccaaaaa

SEQ ID NO: 412444 - DNA, 75 bp, synthetic construct
  source 1..75: mol_type = other DNA
gatatgtgaaagatgttcgacttggttcacagcaatattatggagtgaacaactggcaaacatggaatttccagt

SEQ ID NO: 412445 - DNA, 75 bp, synthetic construct
  source 1..75: mol_type = other DNA
tggctcacagcaatattatggtgtgaacaactggcaaacatggaacttccagtgcccttcaggtcatgtattgtc

SEQ ID NO: 412446 - DNA, 75 bp, synthetic construct
  source 1..75: mol_type = other DNA
acggagctgattatgcgccgggctggcgacgtgactacaatacgaaaaataagcaaccggcttttgcattaggga

SEQ ID NO: 412447 - DNA, 75 bp, synthetic construct
  source 1..75: mol_type = other DNA
agtgagacctggattatgccgacggtgcagcaaagggaaagaagcggcacgcaggcgtgtgaggatgcgcgctat

SEQ ID NO: 412448 - DNA, 75 bp, synthetic construct
  source 1..75: mol_type = other DNA
aaatcttgcctacgcgcacaaggtgaaggccgcactggaaaaaggcgcatcgccgggcgacttcccgcgcgagga

SEQ ID NO: 412449 - DNA, 75 bp, synthetic construct
  source 1..75: mol_type = other DNA
cgcaggtctatacgtcaaaagattcaattcccggcgtcaatgccaaagggaatcaggacacctctggtaatgcgg

SEQ ID NO: 412450 - DNA, 75 bp, synthetic construct
  source 1..75: mol_type = other DNA
gaacagactacagcaataccggggatcaaatcaccatgacggtgaccactcgcgacgcccagggaaatcctaaag

SEQ ID NO: 412451 - DNA, 75 bp, synthetic construct
  source 1..75: mol_type = other DNA
tgccgttaccaggaagcgtagtggtatccgtaagtccggatgagctgctgaaaacattgccgaggcgaaaagggt

SEQ ID NO: 412452 - DNA, 75 bp, synthetic construct
  source 1..75: mol_type = other DNA
ggtgaggcgtctattattcggttttgtaaaaagctgggatacaagggcttttcagaattaaagacgactcttcgc

SEQ ID NO: 412453 - DNA, 75 bp, synthetic construct
  source 1..75: mol_type = other DNA
taactcgcgagcttgaggatggcgcaaagcttttaagagggtatcttactttcactgttatgggtagtaatgcca

SEQ ID NO: 412454 - DNA, 75 bp, synthetic construct
  source 1..75: mol_type = other DNA
gtttgctttatgttcttgtggctatattagaacgtaaagtgaatgactttaaattgtcttcgtcggaacttcctg

SEQ ID NO: 412455 - DNA, 75 bp, synthetic construct
  source 1..75: mol_type = other DNA
aattcaccacagtacaaagaattagcagatgatgcctactttattgctgatgccatgctcaaagctcgcgaataa

SEQ ID NO: 412456 - DNA, 75 bp, synthetic construct
  source 1..75: mol_type = other DNA
tcaaacgcccagaaatggcaagtgatgcgacattacgtgattacttcgctgctaaggctatggcagcaatagtgc

SEQ ID NO: 412457 - DNA, 75 bp, synthetic construct
  source 1..75: mol_type = other DNA
agacattattgctcaaacaatcatggttctgaatcaactaaaactaatggcttcaagtaatggtaacattagttc

SEQ ID NO: 412458 - DNA, 75 bp, synthetic construct
  source 1..75: mol_type = other DNA
tatgataaccaacaaaacctattgacggatctgtttaaaatggattttcctgcggagtccatcatgcaaatgaca

SEQ ID NO: 412459 - DNA, 75 bp, synthetic construct
  source 1..75: mol_type = other DNA
ggtatttcggaacaatatactaatagtcagtttatagactttgggaaaaagcctgattttacgctaaatccattc

SEQ ID NO: 412460 - DNA, 75 bp, synthetic construct
  source 1..75: mol_type = other DNA
cctggccgcgtgaatttgattggtgaacacaccgactacaacgacggtttcgttctgccctgcgcgattgattat

SEQ ID NO: 412461 - DNA, 75 bp, synthetic construct
  source 1..75: mol_type = other DNA
ttttgagaacgtgcaacaaatcgtccgtctttatgttgatcgtaaaatggagctttgttttactacagacccggc

SEQ ID NO: 412462 - DNA, 75 bp, synthetic construct
  source 1..75: mol_type = other DNA
cagcatggcgtcgtttccgtaaaacaaactgtgcagggatctgtattacacagagcttcgaagacttctacaagt

SEQ ID NO: 412463 - DNA, 75 bp, synthetic construct
  source 1..75: mol_type = other DNA
gtaaatcaggcttctggcgcattacaaaaaaaccagaacggcgcggatattcctgataaggatcgcttcctgagt

SEQ ID NO: 412464 - DNA, 75 bp, synthetic construct
  source 1..75: mol_type = other DNA
ataaagtagaatttcagcaattaagagaacagattgtttcgggtgaacatttaggatggcttaagcatgttgcat

SEQ ID NO: 412465 - DNA, 75 bp, synthetic construct
  source 1..75: mol_type = other DNA
ctgcgtatgcttattctcgaatctctatctgtcgcaaccccaatattgtcattgaatgaggatttaattgatgtt

SEQ ID NO: 412466 - DNA, 75 bp, synthetic construct
  source 1..75: mol_type = other DNA
gagtatttagcagcgaaatggttagcgagtatcgttgagaagggattacccttgggacgtttgagaagccttctg

SEQ ID NO: 412467 - DNA, 75 bp, synthetic construct
  source 1..75: mol_type = other DNA
tttatcgaggtttcttaagaataaatattcttaccttattttacttttattatttccatttgtattaatctcgat

SEQ ID NO: 412468 - DNA, 75 bp, synthetic construct
  source 1..75: mol_type = other DNA
actcgcgttcgggttgataacattggcggcgtcggtgcacaaacggtcaacggtattgaactcattgaggttggc

SEQ ID NO: 412469 - DNA, 75 bp, synthetic construct
  source 1..75: mol_type = other DNA
tttctgtaacggcagacctgaaatatccccagaaggggtagaaccgtggggcagtacactgatcttacccagcaa

SEQ ID NO: 412470 - DNA, 75 bp, synthetic construct
  source 1..75: mol_type = other DNA
gctgcttagagtacgactccatcctttacaaataacctgcgagccagaaggctacatggtttcgggtaaaagggc

SEQ ID NO: 412471 - DNA, 75 bp, synthetic construct
  source 1..75: mol_type = other DNA
aaataccctgtttaatacccaactgcatgaccgtctgggggaaacacaatacaccgacctgctgaccggcgagca

SEQ ID NO: 412472 - DNA, 75 bp, synthetic construct
  source 1..75: mol_type = other DNA
ccagtcaatggtatatcagaaaatcttaatagttatggaaatatcctggttgacggtaaaaattcaacattgaat

SEQ ID NO: 412473 - DNA, 75 bp, synthetic construct
  source 1..75: mol_type = other DNA
atcatcgtgatgtctggactgcacttaatgggcaattggacaagctttatactaaaaaccccgatgctgctggtc

SEQ ID NO: 412474 - DNA, 75 bp, synthetic construct
  source 1..75: mol_type = other DNA
agatgacatagtccagaggcttttttcccaaactccgcaaaaggtcagaatttcttgccgctctcaggactggtt

SEQ ID NO: 412475 - DNA, 75 bp, synthetic construct
  source 1..75: mol_type = other DNA
ttcacccccaagaggataaagatagccaaacgatgacatttggcgattattcggagtttcctaacattgttctgc

SEQ ID NO: 412476 - DNA, 75 bp, synthetic construct
  source 1..75: mol_type = other DNA
tcgtcaataatgaaatctgggcgctggcgcatacggttgacagcagtaaatgggatctggcgaaacaatgcggca

SEQ ID NO: 412477 - DNA, 75 bp, synthetic construct
  source 1..75: mol_type = other DNA
cattaaacagcccggcactgaccggaacgccaacaacaccaactgcacgacagggaacgaataatacccaaatcg

SEQ ID NO: 412478 - DNA, 75 bp, synthetic construct
  source 1..75: mol_type = other DNA
ggacgcctcgctgaccgccaaaggttttactcagttaagcagtgcgaccaacagcacgtctgaaacactcgccgc

SEQ ID NO: 412479 - DNA, 75 bp, synthetic construct
  source 1..75: mol_type = other DNA
ccgcgcgaaaaggccttgttcagctcagtagtgccaccaacagcgattctgaaacgctggccgcaacgccaaagg

SEQ ID NO: 412480 - DNA, 75 bp, synthetic construct
  source 1..75: mol_type = other DNA
gcccggcgctgaccggaacgccaacaacaccaactgcgcgacagggaacgaataatacccaaatcgcaagcacgg

SEQ ID NO: 412481 - DNA, 75 bp, synthetic construct
  source 1..75: mol_type = other DNA
attgatggctgataccggctggccggtggagtcatcggggtatgcctggtgggctgtggactcaacgtgtgatac

SEQ ID NO: 412482 - DNA, 75 bp, synthetic construct
  source 1..75: mol_type = other DNA
gcttggtgatgattcaggctggcatttctatagtcagcgaaatacagataactcggtgatatttgctgtaaacgg

SEQ ID NO: 412483 - DNA, 75 bp, synthetic construct
  source 1..75: mol_type = other DNA
accgcgcattatcaggagatgattaatgccagactggcggctcaaaatgaggctaatcagcgcactaccacggaa

SEQ ID NO: 412484 - DNA, 75 bp, synthetic construct
  source 1..75: mol_type = other DNA
gactgaacatcactacatcccttctgaaacacctgataccactcagactcccactgtccagacagatcctgacgc

SEQ ID NO: 412485 - DNA, 75 bp, synthetic construct
  source 1..75: mol_type = other DNA
acgcaaaaaacggtttccgcacttggcgatgcccagaccaacgcacattatcaagagatgattaacgccggactg

SEQ ID NO: 412486 - DNA, 75 bp, synthetic construct
  source 1..75: mol_type = other DNA
ccgcagccgccagcacaggagcagaaagcgccggaagaaccggaagccatgcgggataaagagacacaataccaa

SEQ ID NO: 412487 - DNA, 75 bp, synthetic construct
  source 1..75: mol_type = other DNA
tgcaacgccaaaacaggctgggcgcgtgtatcaccgatttcatcacctgccgatgcagaacctgaatcaccagaa

SEQ ID NO: 412488 - DNA, 75 bp, synthetic construct
  source 1..75: mol_type = other DNA
tcttgcaacaaggcgaatcactgggcaaatacgatttaaagaaaatcgattccatccctgaagaagtacagaacg

SEQ ID NO: 412489 - DNA, 75 bp, synthetic construct
  source 1..75: mol_type = other DNA
aatttcacccaccgtttatggatgcttacaagcactcacgggcggtgatgaacaaacctatccctcgttttggct

SEQ ID NO: 412490 - DNA, 75 bp, synthetic construct
  source 1..75: mol_type = other DNA
ttcagaaaacacttctgttataaaaccaaagggtatcccagaagagttaacagtagagcattggttcaagaaaaa

SEQ ID NO: 412491 - DNA, 75 bp, synthetic construct
  source 1..75: mol_type = other DNA
gtggatatggctcgtaacgcgatgattgattttgttgatggtgaagttgggccaaacaagaacgttccggggctg

SEQ ID NO: 412492 - DNA, 75 bp, synthetic construct
  source 1..75: mol_type = other DNA
catcaatataattgttgagatgaagcctgacttctttttgttcgagaacgtcaaaggtctttatcgcacgctcaa

SEQ ID NO: 412493 - DNA, 75 bp, synthetic construct
  source 1..75: mol_type = other DNA
gagccggattagttcgcttcaaggctgttgcagaaggtgacgatagtaaaaaatcttacaagcgcctccaccgct

SEQ ID NO: 412494 - DNA, 75 bp, synthetic construct
  source 1..75: mol_type = other DNA
taatgaagtacatttgcacccatataagccacgtagaataactgttgcagaagcacttgccattcagtctttacc

SEQ ID NO: 412495 - DNA, 75 bp, synthetic construct
  source 1..75: mol_type = other DNA
cccaataacaccacgcaccgccccgccacccttcagcacttgcgtatcggtgccgaccagagcgggaaaatcacc

SEQ ID NO: 412496 - DNA, 75 bp, synthetic construct
  source 1..75: mol_type = other DNA
gttaaagtgatgctcccccgcccctctattcccaataacaccacgcaccgccccgccacccttcagcacttgcgt

SEQ ID NO: 412497 - DNA, 75 bp, synthetic construct
  source 1..75: mol_type = other DNA
atacgatgaagcagcttatcaatgctactaagaatctgacagtatcacgtgatgttgatgtatttgaacaaattg

SEQ ID NO: 412498 - DNA, 75 bp, synthetic construct
  source 1..75: mol_type = other DNA
ttgcaatgacgcatggctaaacaccgaaggtgatgacatctccggctcatacgttaagtacaaagaccatcagga

SEQ ID NO: 412499 - DNA, 75 bp, synthetic construct
  source 1..75: mol_type = other DNA
ccatgtctatcacgcctgtaaaaatgatgagctgttgcagtttgagccctcatcacagaaacagaaattgagtgg

SEQ ID NO: 412500 - DNA, 75 bp, synthetic construct
  source 1..75: mol_type = other DNA
cgtgcggcgaccgtcataatcaccgcgtggaatatcgcgtggcgggtgccgatgccaacccgtatctggtgatgg

SEQ ID NO: 412501 - DNA, 75 bp, synthetic construct
  source 1..75: mol_type = other DNA
tattatccgcttgcaaccgttgcatttttcttacgaaaaaggccgcagagtttcacccctgcggcctggtccggg

SEQ ID NO: 412502 - DNA, 75 bp, synthetic construct
  source 1..75: mol_type = other DNA
tttagttttctgagctgtttgcctgtttggaaaacatattgtaagggtgttgcttcgttaggggtgcaggcaaat

SEQ ID NO: 412503 - DNA, 75 bp, synthetic construct
  source 1..75: mol_type = other DNA
ctgaacatggtccggagtggggcggagagctcgggaaactcatgaaggcaaacgattttgacgcccgcaaaagcc

SEQ ID NO: 412504 - DNA, 75 bp, synthetic construct
  source 1..75: mol_type = other DNA
atgttttgaaaaaaaataaacaaaaagccgcagcatcggcaaatgcagcggctggcacaaaaaccgaattgtcat

SEQ ID NO: 412505 - DNA, 75 bp, synthetic construct
  source 1..75: mol_type = other DNA
ctataaccgcgattgctgcggaggtaaaaaatcctgaacgtgttgcggggctgcattttttaacccggcaccggt

SEQ ID NO: 412506 - DNA, 75 bp, synthetic construct
  source 1..75: mol_type = other DNA
ccggcggcgttagtgcgacgaacggcctcaagggcggtgatagctcgttcggatcggtaatagcccctggtggtg

SEQ ID NO: 412507 - DNA, 75 bp, synthetic construct
  source 1..75: mol_type = other DNA
taacgggcggcggtggcggagggggcggctgcaaggctatatccaataatgaaacgtttttcggtgctggcggcg

SEQ ID NO: 412508 - DNA, 75 bp, synthetic construct
  source 1..75: mol_type = other DNA
tctgggatgcctgcgctgtttctggtgtcaaggggacgcggctaatggttatggtacgcctggctgattattcca

SEQ ID NO: 412509 - DNA, 75 bp, synthetic construct
  source 1..75: mol_type = other DNA
gccatccttgatgtggcggagctggacggtttattgacggcggtgttgagttctccgcaagagattgaaccggaa

SEQ ID NO: 412510 - DNA, 75 bp, synthetic construct
  source 1..75: mol_type = other DNA
gatgccaacccgtatctggtgatggcggcgattttcgccggtattctgcacggtcttgataacgagctgccgttg

SEQ ID NO: 412511 - DNA, 75 bp, synthetic construct
  source 1..75: mol_type = other DNA
gattttgctggcgtggatcagcaacgagttatgcattgtcgtaaagcatttagtgatgcgaaggtattcaaatga

SEQ ID NO: 412512 - DNA, 75 bp, synthetic construct
  source 1..75: mol_type = other DNA
ccgtacacactgatgcaggcggtggctattgaaggagagccacaggtcggcccttcatctgagccggattggtac

SEQ ID NO: 412513 - DNA, 75 bp, synthetic construct
  source 1..75: mol_type = other DNA
atccgtttggcgatatcaaatcagatggcacggtgaaaacggctctcgaaaaccttggtttgggagaagcggcta

SEQ ID NO: 412514 - DNA, 75 bp, synthetic construct
  source 1..75: mol_type = other DNA
gatgcagatgtatttgaacagatagcatttgattactcattgtcttcaatttcttttggagggcagagacaagca

SEQ ID NO: 412515 - DNA, 75 bp, synthetic construct
  source 1..75: mol_type = other DNA
cggcgggtaacggcaataacgccaatattagcaacggcacggtgacggttaatgcggcgattgattacacaccga

SEQ ID NO: 412516 - DNA, 75 bp, synthetic construct
  source 1..75: mol_type = other DNA
gtcaacggcaacagcgccacggcaacgcatgaatacagcgtcgatagcgccgcgccaacggtcaccatcaacacc

SEQ ID NO: 412517 - DNA, 75 bp, synthetic construct
  source 1..75: mol_type = other DNA
agccggatatggcgggaaatggtggcccagggggggacaggcagtgaaaccatcgtcagggatactgttgccaaa

SEQ ID NO: 412518 - DNA, 75 bp, synthetic construct
  source 1..75: mol_type = other DNA
gatggcaccttttccagcgctattcaggtcaccgtcggcaccctgacgtggtacggctcgattgtggcatttgat

SEQ ID NO: 412519 - DNA, 75 bp, synthetic construct
  source 1..75: mol_type = other DNA
ctgttaggcgcggtaacgatggtaggcgcactgaactggacctacagcgacagcgggctggtgagcggtgcctac

SEQ ID NO: 412520 - DNA, 75 bp, synthetic construct
  source 1..75: mol_type = other DNA
gcggatggcaccagctacacggttagcgcctccgcccaggacagcgccggaaacagcgccacggcctcgcgcagt

SEQ ID NO: 412521 - DNA, 75 bp, synthetic construct
  source 1..75: mol_type = other DNA
gccaccagctccatcgccgattacgaccgtaacggcacgggcgatctgtttatcacccgtgatgactacggtaca

SEQ ID NO: 412522 - DNA, 75 bp, synthetic construct
  source 1..75: mol_type = other DNA
tgaagtggtgatcaatggcaaaacctacacctctgaaccgggcggtgcggtggtagtcgatccggcgcacaacac

SEQ ID NO: 412523 - DNA, 75 bp, synthetic construct
  source 1..75: mol_type = other DNA
aggcactgccgacaccgatcgcattgatatccgcgagttgttgcagggcagcggctacaccggcaacggcaaagc

SEQ ID NO: 412524 - DNA, 75 bp, synthetic construct
  source 1..75: mol_type = other DNA
acgagaaagtggtaattataatgccagccggatatggcgggaaatggtggcccagggggggacaggcagtgaaac

SEQ ID NO: 412525 - DNA, 75 bp, synthetic construct
  source 1..75: mol_type = other DNA
gtgtatgttgtttctgaaacaaaagcagagcccacaccctcccttcagaaatccccgcccacgtttctgaaaccg

SEQ ID NO: 412526 - DNA, 75 bp, synthetic construct
  source 1..75: mol_type = other DNA
tcacccgcctggagaaacagcctgtgcagggtgaagtatcgtctccggtaacccttccggctcaggcactccggt

SEQ ID NO: 412527 - DNA, 75 bp, synthetic construct
  source 1..75: mol_type = other DNA
tgatagcgttacatggggattatgttagcgccaatagaggtaaaaactacgttttcgatacaaaatcagcctatg

SEQ ID NO: 412528 - DNA, 75 bp, synthetic construct
  source 1..75: mol_type = other DNA
ctaattttaaaataacgcaccagcaagacatttatcttgcggataatttaattaaggatggtttgctggagttaa

SEQ ID NO: 412529 - DNA, 75 bp, synthetic construct
  source 1..75: mol_type = other DNA
tcatcatctaaagcagctgtggtgaatttaacacaggccttatcagaagagtggttaaatttgggaattaaagtt

SEQ ID NO: 412530 - DNA, 75 bp, synthetic construct
  source 1..75: mol_type = other DNA
cctgtggcaacagctacgccagcgcggattgttcccggtcgtagcggtagagctggagttctatttactggatcg

SEQ ID NO: 412531 - DNA, 75 bp, synthetic construct
  source 1..75: mol_type = other DNA
aaacaatgaagcaactgattaatgcttcaaagaacctgacggcttctcgtgaaaaggatgtgtttacacaaattg

SEQ ID NO: 412532 - DNA, 75 bp, synthetic construct
  source 1..75: mol_type = other DNA
gtaaatttgatagtactgcagatgctgcgttagatgctttgaaagaaacgcagaatagatctctatgtaatgata

SEQ ID NO: 412533 - DNA, 75 bp, synthetic construct
  source 1..75: mol_type = other DNA
tcacccaggatccaatcgggctgagtggcgggtggaatttataccaatatcctctcaatccggttcataaagtgg

SEQ ID NO: 412534 - DNA, 75 bp, synthetic construct
  source 1..75: mol_type = other DNA
atgccaggagggtgcaacaagcaagagaaactctcgaatcggcaaaagtaaagcttgagaaagccaagatattac

SEQ ID NO: 412535 - DNA, 75 bp, synthetic construct
  source 1..75: mol_type = other DNA
gccttccaggtcgatggtgaaggcggcttaaacaaccagccaaacagcaacttccgcgcttatgtttccgggctt

SEQ ID NO: 412536 - DNA, 75 bp, synthetic construct
  source 1..75: mol_type = other DNA
cggagaaatacttgaagaattaacagataaacctttgaacaagaagaaaataaaatataaatatgatacagcatt

SEQ ID NO: 412537 - DNA, 75 bp, synthetic construct
  source 1..75: mol_type = other DNA
ttgaaacctaaaattcgtggtggaacatttgttaatgacgattttaaaaaactaattgaacttcttcagacacat

SEQ ID NO: 412538 - DNA, 75 bp, synthetic construct
  source 1..75: mol_type = other DNA
gcagtagcttatccctctggtgtgctccctgatatgcgtggctggacaatcaaaggaaaacccgccactggtcgg

SEQ ID NO: 412539 - DNA, 75 bp, synthetic construct
  source 1..75: mol_type = other DNA
atatcagtatgcaaaataaccgtggcgagaacgtgctttctgacgcggaaggcgaagattcgccgctgctgaaaa

SEQ ID NO: 412540 - DNA, 75 bp, synthetic construct
  source 1..75: mol_type = other DNA
caaagcaacgcggctttgattgggaagagctaaaaaccgcctacaacgggcggtcagtgcggtctcgcggtctgc

SEQ ID NO: 412541 - DNA, 75 bp, synthetic construct
  source 1..75: mol_type = other DNA
tcaaaaagcgcctgctgcatatcgcacagggcggcatctttactggcactagtcagcagttagataagctgctgc

SEQ ID NO: 412542 - DNA, 75 bp, synthetic construct
  source 1..75: mol_type = other DNA
aaataattttctctaacgaaagtgcagtctatgatgaacttataattcatttcccaagccagccattaccttata

SEQ ID NO: 412543 - DNA, 75 bp, synthetic construct
  source 1..75: mol_type = other DNA
attgctgggaaggctggatcatatccctccggcagaagcagaaaaagcttattatgcttccatcagaaacgatga

SEQ ID NO: 412544 - DNA, 75 bp, synthetic construct
  source 1..75: mol_type = other DNA
acatcgtcctgataaacgcagtacccgtgcgcagcgcgatgactggctgaagaaagagatactgcgcgtatacga

SEQ ID NO: 412545 - DNA, 75 bp, synthetic construct
  source 1..75: mol_type = other DNA
gcggtggatgatgtcagcctgaccatctacaaaggtgaaatcttcgcgctgctgggcgcatccggctgtggctag

SEQ ID NO: 412546 - DNA, 75 bp, synthetic construct
  source 1..75: mol_type = other DNA
ccagccagtaaatgctatggatgatttgccagcccgactggaagcgatgcggcccggtggcaggttccagtcggt

SEQ ID NO: 412547 - DNA, 75 bp, synthetic construct
  source 1..75: mol_type = other DNA
ctgacggacgtcatgaccatatgggattccggctttaatatccttaagggacttctcgccagttccaccagcggc

SEQ ID NO: 412548 - DNA, 75 bp, synthetic construct
  source 1..75: mol_type = other DNA
cacggatgacccggtcacattccggctagccccatggcgctggcagcaaccgggcgtaatgccattgtactggca

SEQ ID NO: 412549 - DNA, 75 bp, synthetic construct
  source 1..75: mol_type = other DNA
tctgcataaagcgattggcgcagtcctgagtgaaagcaatccggcttccgcccttaatcatctcaaccatgcgtt

SEQ ID NO: 412550 - DNA, 75 bp, synthetic construct
  source 1..75: mol_type = other DNA
atcgcctgcgcgttcaggctgaacaggctgcccgcgagggcggcagtgttcgccacgcgtcgggctatgacctga

SEQ ID NO: 412551 - DNA, 75 bp, synthetic construct
  source 1..75: mol_type = other DNA
atgaccgccttatccttccgacaggtgcgcgaccgccttaacctttcctccgatgatgatttactctcgctgatt

SEQ ID NO: 412552 - DNA, 75 bp, synthetic construct
  source 1..75: mol_type = other DNA
agaccagcattccccctccctgatgctgctgattaacgcgctggaatcacgtctggcgcagtcgggcgggatgaa

SEQ ID NO: 412553 - DNA, 75 bp, synthetic construct
  source 1..75: mol_type = other DNA
ttatttcatttgccgtgccagtgggagcgtcatatcaaatcatctccagaccaacacaaaattacgcctgtggta

SEQ ID NO: 412554 - DNA, 75 bp, synthetic construct
  source 1..75: mol_type = other DNA
gcggtggaacgatccggtctgacggtcgtctttccacaggtgagtatttacagctggaaaaaacagccaccgcag

SEQ ID NO: 412555 - DNA, 75 bp, synthetic construct
  source 1..75: mol_type = other DNA
cttatattgcttagaaaatatcaataatgaattcaggatcgaactaaaagagaaaagtgagaatgaaaattaccg

SEQ ID NO: 412556 - DNA, 75 bp, synthetic construct
  source 1..75: mol_type = other DNA
accatccagaatggaaggaaagtactgcaagaactaaggcatcttcaatgcgaagagtattcaagaatggcgaca

SEQ ID NO: 412557 - DNA, 75 bp, synthetic construct
  source 1..75: mol_type = other DNA
ttgaaaataataaagagtatgaaaaatccatcaataaatggcgcgatgtgttcgggccgttctttcctgtttacg

SEQ ID NO: 412558 - DNA, 75 bp, synthetic construct
  source 1..75: mol_type = other DNA
aaacaacaaggggtggatgaacacgacgcacggaggcggtttcaccatgacggacagcgaatggatacgtgctgt

SEQ ID NO: 412559 - DNA, 75 bp, synthetic construct
  source 1..75: mol_type = other DNA
tagatggtggtagcactctatatacacagcaattatgggtctctgggaatgataatgacaagaccagcaatgtca

SEQ ID NO: 412560 - DNA, 75 bp, synthetic construct
  source 1..75: mol_type = other DNA
atattaagagagggacggtttctttgtccggtacgaatgactggaaggggcagataaatgtttatgacggaaccc

SEQ ID NO: 412561 - DNA, 75 bp, synthetic construct
  source 1..75: mol_type = other DNA
acccttcatacgccgatgctgagaaggatgatcgcaccttgagccgctgcatatcgtttgccaaaagctggggct

SEQ ID NO: 412562 - DNA, 75 bp, synthetic construct
  source 1..75: mol_type = other DNA
atggttttcgcctgacaggtgaggttggttatctaaaaaatataggtggcatacaaccaagcgatttctacgttg

SEQ ID NO: 412563 - DNA, 75 bp, synthetic construct
  source 1..75: mol_type = other DNA
ggtaaaggtacacaggctaatataaatatatcctcttcggagttaaatactggctcgctatcagttggtgagggg

SEQ ID NO: 412564 - DNA, 75 bp, synthetic construct
  source 1..75: mol_type = other DNA
taccttaactcactgattaagaatggtaaggagtataaggtgacaggtgactacattgatgtgggggcctgggag

SEQ ID NO: 412565 - DNA, 75 bp, synthetic construct
  source 1..75: mol_type = other DNA
gactatctggtggtgcagaaaaagaaattccgtaccgaactgtcgaaaatggtgttcaccgtcgaagaacgctgt

SEQ ID NO: 412566 - DNA, 75 bp, synthetic construct
  source 1..75: mol_type = other DNA
tcctttatatctactctaatatatcttgtttcaagaattgaacataatgaaaatataatagagtcactttacata

SEQ ID NO: 412567 - DNA, 75 bp, synthetic construct
  source 1..75: mol_type = other DNA
cttcaaatttgatatatcttatatcaaagatcgaaaataacagaaaaattatagagtcaatttatatatcggctg

SEQ ID NO: 412568 - DNA, 75 bp, synthetic construct
  source 1..75: mol_type = other DNA
gaaagaggggttaacttgtctgtcagaataaagaaaatagacatagctaaaaaaccatattttgttattcggcta

SEQ ID NO: 412569 - DNA, 75 bp, synthetic construct
  source 1..75: mol_type = other DNA
tttctcgtaatattaatttgagtgacttacctgagtggttatggatgaaagcgtcgcctgtcactaataaagatt

SEQ ID NO: 412570 - DNA, 75 bp, synthetic construct
  source 1..75: mol_type = other DNA
ttccgtggaaaacgtatccctgtttcaagcctgaagaagttggagaaagggtgttatttcccggcctcggtgttt

SEQ ID NO: 412571 - DNA, 75 bp, synthetic construct
  source 1..75: mol_type = other DNA
gtgttatttcccggcctcggtatttgcaatggatattctgggcaacgtagtagaagaagcgggtctgggtcagga

SEQ ID NO: 412572 - DNA, 75 bp, synthetic construct
  source 1..75: mol_type = other DNA
gggtcgacattgaggctccggaaggagtgacggagaaggattatcaattcctgccgtcgaaggctgaccatttct

SEQ ID NO: 412573 - DNA, 75 bp, synthetic construct
  source 1..75: mol_type = other DNA
atgtcaacggttgcgggggaacacagcatcacggcctcagtgaataatgctcagaagacggttacggtgaaattc

SEQ ID NO: 412574 - DNA, 75 bp, synthetic construct
  source 1..75: mol_type = other DNA
gtggtcgtctttaatctgcctcggggcgtcaaaccgcttgcagacggtaatatcatggtgaacgccgacaaggag

SEQ ID NO: 412575 - DNA, 75 bp, synthetic construct
  source 1..75: mol_type = other DNA
atgctggtgcgaagcgcccctgccggtgaaatgaaaactatcgtttataacgtcaatgacgacactctggatggc

SEQ ID NO: 412576 - DNA, 75 bp, synthetic construct
  source 1..75: mol_type = other DNA
ccaacttacatggagtaattaaaaaagttgatttgaacacaaatgaagcggaaattaaaataaaagagggggggg

SEQ ID NO: 412577 - DNA, 75 bp, synthetic construct
  source 1..75: mol_type = other DNA
acgttcacattcaacgcactgacgtatggcgggtacgaaatgacgcctgtgaaggtgacaattaacgccgttgct

SEQ ID NO: 412578 - DNA, 75 bp, synthetic construct
  source 1..75: mol_type = other DNA
cgcctttgctggctcatcagtaaaagacaaaaaatacttcggtgatggcaccggtgtagggctacgtaaagatga

SEQ ID NO: 412579 - DNA, 75 bp, synthetic construct
  source 1..75: mol_type = other DNA
gatgaggcgaaacgccttgaggccgtgctgaatgttgcgtgccggtcggtatttgaattcagtatcagtggtttt

SEQ ID NO: 412580 - DNA, 75 bp, synthetic construct
  source 1..75: mol_type = other DNA
tacttcgagttaccaggcagtggtcaggggttaagtagccagcccgaggcgtatgaacatgacggcgggattcaa

SEQ ID NO: 412581 - DNA, 75 bp, synthetic construct
  source 1..75: mol_type = other DNA
tgaccgcctggcacacagccccgcagaccggatgtatacagggaaagatcatcagaagtacactttttgtactaa

SEQ ID NO: 412582 - DNA, 75 bp, synthetic construct
  source 1..75: mol_type = other DNA
ggatattgtgcagggttcagcaggggtgctgataggcgcgccgacgggagtggcctgttcggtatgtcctaaaaa

SEQ ID NO: 412583 - DNA, 75 bp, synthetic construct
  source 1..75: mol_type = other DNA
tataaacggcctgatgtactcagggccgttgcaccgaatcaagtctggagttgggacatcagctatttgccgtcc

SEQ ID NO: 412584 - DNA, 75 bp, synthetic construct
  source 1..75: mol_type = other DNA
tatggccgctggtggggcaactacattcgtaagcatggcctgacacgggaaggcatcaagcctacccatagcttc

SEQ ID NO: 412585 - DNA, 75 bp, synthetic construct
  source 1..75: mol_type = other DNA
cgtacaacgaacaggggctggcaaaccgcgtcacgccggacagtctgccgccggtggagtggctgacctacggca

SEQ ID NO: 412586 - DNA, 75 bp, synthetic construct
  source 1..75: mol_type = other DNA
cactacggctatgacgataaaggccgcctgaccggcgaacgccagacggtggagaacccggagacgggggaactg

SEQ ID NO: 412587 - DNA, 75 bp, synthetic construct
  source 1..75: mol_type = other DNA
aagacaatgcagaaatctggcggctgtggcagaaatcaggcgttgaagaagtggaaagcccggacgggcttgacg

SEQ ID NO: 412588 - DNA, 75 bp, synthetic construct
  source 1..75: mol_type = other DNA
ccagccggggagcttcgcgccgctcatccgcatcgaaacagacaacggcgagcgggagaaagcgcagcgccgcag

SEQ ID NO: 412589 - DNA, 75 bp, synthetic construct
  source 1..75: mol_type = other DNA
cgtcgcgagcgtgacctgacgggatggatgtcgctgtcgcggaaaccggaggagacgtggtacggctgggacggc

SEQ ID NO: 412590 - DNA, 75 bp, synthetic construct
  source 1..75: mol_type = other DNA
gctgacctacggcagcggttacctggcgggcatgaagctgggcgggacgccgctggtcgagtatacgcgggacag

SEQ ID NO: 412591 - DNA, 75 bp, synthetic construct
  source 1..75: mol_type = other DNA
atgtatgccgttttaggagatattgaatttaaagttgtcacgttctgggatggctttaaaagcacaatgggcgtg

SEQ ID NO: 412592 - DNA, 75 bp, synthetic construct
  source 1..75: mol_type = other DNA
ttggcctgtgaaacgattacaggcatttaaattccagttaagacccggtggtcaacaggagcgtgaaatgaggcg

SEQ ID NO: 412593 - DNA, 75 bp, synthetic construct
  source 1..75: mol_type = other DNA
cagcctgccaggggggttcgcgcgggctgacaggcggcctccaccgcctgcccctgtatcacctgtttctgctgc

SEQ ID NO: 412594 - DNA, 75 bp, synthetic construct
  source 1..75: mol_type = other DNA
gccgccaccaaccgccccgaaatcctcgatcaggccttgcttcgtgccggtcgcttcgaccgtcaggtgctggtg

SEQ ID NO: 412595 - DNA, 75 bp, synthetic construct
  source 1..75: mol_type = other DNA
ctggctcccggaacacaggcccgtgtctggcatcatgaccgacgacggatcccgctgaaaacaccgctgaccatg

SEQ ID NO: 412596 - DNA, 75 bp, synthetic construct
  source 1..75: mol_type = other DNA
tgcttaccaggcgcatttcgcccaggggatcaccataataaaatgctgaggcctggcctttgcgtagtgcacgca

SEQ ID NO: 412597 - DNA, 75 bp, synthetic construct
  source 1..75: mol_type = other DNA
cgcctgtatggtaacaaagaagatgaaaaactgtttaacatgaaactcagtgcgcgctggacacattttgccgag

SEQ ID NO: 412598 - DNA, 75 bp, synthetic construct
  source 1..75: mol_type = other DNA
gctttggagtattttcgacgggcacttaaaatacttcaagatgacctaaatttccatagctcggtatcttatcca

SEQ ID NO: 412599 - DNA, 75 bp, synthetic construct
  source 1..75: mol_type = other DNA
ttaaaacgtctggtgcgtctgatggcagaaaagcataagatgcacgccacttttatggccaagccgtatgaagag

SEQ ID NO: 412600 - DNA, 75 bp, synthetic construct
  source 1..75: mol_type = other DNA
aaataacatcagaaaaaaacattccggacacatcacaaacgggaagggtaacgggcgacgcgccagcgtggcccg

SEQ ID NO: 412601 - DNA, 75 bp, synthetic construct
  source 1..75: mol_type = other DNA
tcattttttgagccatacggtggtgtcgatgatgcttgcgtgggcgatgtcggcagggcttgcgtgggtgttttt

SEQ ID NO: 412602 - DNA, 75 bp, synthetic construct
  source 1..75: mol_type = other DNA
gatcagcgaaagtgacgacccgtcctatatgcgcagtatcaatagtctggccaccttcgttattcaaaagaaaaa

SEQ ID NO: 412603 - DNA, 75 bp, synthetic construct
  source 1..75: mol_type = other DNA
caggctatttcttcgcaacaactcgctcactggatgagcctattacaactgaatggagtgaaaaactatggttat

SEQ ID NO: 412604 - DNA, 75 bp, synthetic construct
  source 1..75: mol_type = other DNA
tcgatcgtgatcataccctggggcacgcatacttctggccgctgaagactgccacaactgaggatgaaaagtgca

SEQ ID NO: 412605 - DNA, 75 bp, synthetic construct
  source 1..75: mol_type = other DNA
attacgtcgtcgctttgagtttgtagaaatcatgccgcagccagctttactgtccgacctctcagtatttggcgt

SEQ ID NO: 412606 - DNA, 75 bp, synthetic construct
  source 1..75: mol_type = other DNA
aatgcggaaactgttcaggcagttggaattgttacttcagactattcatttgatgaagacgccgctacttcgggt

SEQ ID NO: 412607 - DNA, 75 bp, synthetic construct
  source 1..75: mol_type = other DNA
agggtgacatgacgcagtatggcggtagcattgttcagggttcagccggggtgcgcattggtgcccccaccggcg

SEQ ID NO: 412608 - DNA, 75 bp, synthetic construct
  source 1..75: mol_type = other DNA
ggcaacgtatccaccgctgtgggtaatgctctgtattcaggtcgcctttgcgataacgacgattttaatgctgtg

SEQ ID NO: 412609 - DNA, 75 bp, synthetic construct
  source 1..75: mol_type = other DNA
taccggattaatcaaagtgctttctcaaatgcagccgcttaccaagggattttgcccaatgagggggctgtcaac

SEQ ID NO: 412610 - DNA, 75 bp, synthetic construct
  source 1..75: mol_type = other DNA
tggcagacggcgaaaaccgtcgagccggtgccctacagcgagttcgagaaggcgctggccgaggtgcgcgtggcc

SEQ ID NO: 412611 - DNA, 75 bp, synthetic construct
  source 1..75: mol_type = other DNA
aaatgtcgaaattaattaccgggaatagccgtaacaatcgctatttccgtaagatacacatgttcagaggtgcaa

SEQ ID NO: 412612 - DNA, 75 bp, synthetic construct
  source 1..75: mol_type = other DNA
aagataagcctgattttttcagattcgattcagtggaatggaactgctggatgaatattatccgctggattcgat

SEQ ID NO: 412613 - DNA, 75 bp, synthetic construct
  source 1..75: mol_type = other DNA
cacgctccaacccttgctcaggggaatgcagcatgggctgttgagattagtacgcttgagcaattaattacactg

SEQ ID NO: 412614 - DNA, 75 bp, synthetic construct
  source 1..75: mol_type = other DNA
gccgccaccaaccgccccgaaatcctcgaccaggcgctgctgcgcgccggtcgcttcgaccgtcaggtgctggtg

SEQ ID NO: 412615 - DNA, 75 bp, synthetic construct
  source 1..75: mol_type = other DNA
cgccgtgcgtccgccgtggaattgcaggacttcaccgcgaccatcgagcgcatcgtggcgggcctggaaaagaag

SEQ ID NO: 412616 - DNA, 75 bp, synthetic construct
  source 1..75: mol_type = other DNA
gttcatgcgtataccggaacccaggctcttgttgatggtcccagaggtaaagatttaagagcttcccgcgcagct

SEQ ID NO: 412617 - DNA, 75 bp, synthetic construct
  source 1..75: mol_type = other DNA
gtcaaatgatcatgttattaaccaatctgttgcaataattccagcacttccgaaagaacagctattgatgttaaa

SEQ ID NO: 412618 - DNA, 75 bp, synthetic construct
  source 1..75: mol_type = other DNA
agaactacatagaacagaaatgttgactgcctataatagtggacatatgaacgttattaatactatttttaacgc

SEQ ID NO: 412619 - DNA, 75 bp, synthetic construct
  source 1..75: mol_type = other DNA
aaattttacctcaacgctcagacactcttgataaacaagaattaaacctaaactcagttagaaaagaaaaagaat

SEQ ID NO: 412620 - DNA, 75 bp, synthetic construct
  source 1..75: mol_type = other DNA
tctgttggagcaggatttttactgccagtggcccgaaccagaagtggccaggagacatcacgtacttacgtacag

SEQ ID NO: 412621 - DNA, 75 bp, synthetic construct
  source 1..75: mol_type = other DNA
actgattacatagtcactggtgcgggagggtataacggcggcaatgtaattctgtcgaaggcgttggctaacggt

SEQ ID NO: 412622 - DNA, 75 bp, synthetic construct
  source 1..75: mol_type = other DNA
aatttctcacgcacttcaacaaaaaatgcaaaaaccagactttggcgttgatttccagccgtcctgaggggcgtt

SEQ ID NO: 412623 - DNA, 75 bp, synthetic construct
  source 1..75: mol_type = other DNA
gaaaggttaccggacgagcgactggtgacttctgttgattgtgatttcagtgcccgaaaaagtgatattgcagct

SEQ ID NO: 412624 - DNA, 75 bp, synthetic construct
  source 1..75: mol_type = other DNA
cttacgaacaaatatatctgctgaatcagcaactaatccttcatgcagatcaatttgagtatgccatcattactg

SEQ ID NO: 412625 - DNA, 75 bp, synthetic construct
  source 1..75: mol_type = other DNA
ttcaatggaaatgtagaacttattttcccagacgaaatgttatatgtgaatgactcaacatcacaactttttttc

SEQ ID NO: 412626 - DNA, 75 bp, synthetic construct
  source 1..75: mol_type = other DNA
gggaacagggaaattcactcgctgggaaatccaaagaggacgcacccaggacgaaattaatagcataatgctggc

SEQ ID NO: 412627 - DNA, 75 bp, synthetic construct
  source 1..75: mol_type = other DNA
tgatgcaaagatcaaacgcttcaacgctgatgatagcagcgtgaaactgggttatcgcactacgcgttcggactg

SEQ ID NO: 412628 - DNA, 75 bp, synthetic construct
  source 1..75: mol_type = other DNA
aatgtcataggtgaacaattattcgcttttgctaaacgtcaagataatgatgaattggcttgtttcaaaattaat

SEQ ID NO: 412629 - DNA, 75 bp, synthetic construct
  source 1..75: mol_type = other DNA
atggtgaattactgtcttatatcattggcgctgacaccgttcctgtaattcacgcggaactgtacagcagggcag

SEQ ID NO: 412630 - DNA, 75 bp, synthetic construct
  source 1..75: mol_type = other DNA
cgtttgcacgtaggtaaagtatttgatggtattgagccctgctcaaccactaataagaatatgaacaggggaatt

SEQ ID NO: 412631 - DNA, 75 bp, synthetic construct
  source 1..75: mol_type = other DNA
gggctttgctcgacgccttagccattgagatgttagataggcaccatactcacttttgccctttagaaggggaaa

SEQ ID NO: 412632 - DNA, 75 bp, synthetic construct
  source 1..75: mol_type = other DNA
cgccagcgatgcattttcaggtagtaacaatctcgacctggcgttagccagtggcaaaaatgacaatccgggcag

SEQ ID NO: 412633 - DNA, 75 bp, synthetic construct
  source 1..75: mol_type = other DNA
tatggcccctttaaagggacggtgtctcatgctgagaacgcaatcatcgttaatggtaagaccattaacgttttt

SEQ ID NO: 412634 - DNA, 75 bp, synthetic construct
  source 1..75: mol_type = other DNA
ttggccgtatcggccgactcgtattacgtcgtctccttgagacaggactggatattgatgtcgtcgcaataaacg

SEQ ID NO: 412635 - DNA, 75 bp, synthetic construct
  source 1..75: mol_type = other DNA
cgaaaacgtgttgtctgacgcggaaggcgaagattcgccgctgctgaaaaagatgctcgctggaatgatcgacct

SEQ ID NO: 412636 - DNA, 75 bp, synthetic construct
  source 1..75: mol_type = other DNA
ggttgcccaggactatacctggcgatgcaaaatggacatagcgatatcgtgaaagttattcttgaagcattgccc

SEQ ID NO: 412637 - DNA, 75 bp, synthetic construct
  source 1..75: mol_type = other DNA
gggtatccattgaccatttcaggttatcaaaaaatttttgagcaaataaggaaaaacagtaatgagttaagaaat

SEQ ID NO: 412638 - DNA, 75 bp, synthetic construct
  source 1..75: mol_type = other DNA
tgctgatgataatgattgtggccggcgtatatatattagcgccggtgaacaccggatatgcagataccatgaaag

SEQ ID NO: 412639 - DNA, 75 bp, synthetic construct
  source 1..75: mol_type = other DNA
cacaggaacagcatcaattagggaaggtgcgaataagcggggaaattcttctcggctgactcagtcatttcattt

SEQ ID NO: 412640 - DNA, 75 bp, synthetic construct
  source 1..75: mol_type = other DNA
tcctcctggcaaataattctaatgaatacccaggtttgttttcagcgatacagcataaacagcaaaacgttgtag

SEQ ID NO: 412641 - DNA, 75 bp, synthetic construct
  source 1..75: mol_type = other DNA
aaagataaaaatggtttttctggattatttttagcgatatcacgtaaggataaaaatgttgtaacctcgattctg

SEQ ID NO: 412642 - DNA, 75 bp, synthetic construct
  source 1..75: mol_type = other DNA
gtggcgattaatttcagccctaaggttggtgaaatacaggaatgcaactttggtaactatcctgttatccagaat

SEQ ID NO: 412643 - DNA, 75 bp, synthetic construct
  source 1..75: mol_type = other DNA
tacctaaacaaggtgatgaacataaagttcactggctaataaataaactattttctaatatcttattaaaaaaca

SEQ ID NO: 412644 - DNA, 75 bp, synthetic construct
  source 1..75: mol_type = other DNA
aatctttcgtggtggaacctgccgcgcctgttgctggaaaaccagacggcctacctgttgtggatattcctgtcg

SEQ ID NO: 412645 - DNA, 75 bp, synthetic construct
  source 1..75: mol_type = other DNA
caccatcgatgccagtctgcctggcctgcgggtggataccgtcgcgggtgatgatgtggtcaatatcatcgaaca

SEQ ID NO: 412646 - DNA, 75 bp, synthetic construct
  source 1..75: mol_type = other DNA
aggcagcgcgcaaactatcagcggccaggtaaccggggcggcggcgggcagcaccgtcaccgttgaactgggcgg

SEQ ID NO: 412647 - DNA, 75 bp, synthetic construct
  source 1..75: mol_type = other DNA
caatttaagcaattgccatttcaactgttctgttttaacaaaagcctggatgtttaatatccgtctctatcgtgt

SEQ ID NO: 412648 - DNA, 75 bp, synthetic construct
  source 1..75: mol_type = other DNA
gccgcaggatgttgcaaaagccgaaaaacgagccagagcacctgaaattattccagtttcagtgtctggcgctcc

SEQ ID NO: 412649 - DNA, 75 bp, synthetic construct
  source 1..75: mol_type = other DNA
aatggcgcgccatccgggaatattcgtttatcagccggggaacatgctgcacgcagtctggtctggccgaagtta

SEQ ID NO: 412650 - DNA, 75 bp, synthetic construct
  source 1..75: mol_type = other DNA
attgaggattataagaaaagagaaaaaaataatgaggagttttattttatcataaagagaactgataatgataaa

SEQ ID NO: 412651 - DNA, 75 bp, synthetic construct
  source 1..75: mol_type = other DNA
tcgtcttgatcgtattcgtgtcccggtcgtgtccgatattctggaactctgcatgccggataagtttggcgatac

SEQ ID NO: 412652 - DNA, 75 bp, synthetic construct
  source 1..75: mol_type = other DNA
gtcctgaagatttctgggcgctggggcgtggttgtgatgaaaatgagaaggagcggtttggtgcgttatttctgg

SEQ ID NO: 412653 - DNA, 75 bp, synthetic construct
  source 1..75: mol_type = other DNA
aactcaaagacagttaccgacattgattttcaggatgttttcatcccggaagtgatcagcggaaacaaagcaaaa

SEQ ID NO: 412654 - DNA, 75 bp, synthetic construct
  source 1..75: mol_type = other DNA
cagcgtcgatagcgccgcgccaacggtgaccatcaacaccattgccagcgataacatcatcaacgccagcgaagc

SEQ ID NO: 412655 - DNA, 75 bp, synthetic construct
  source 1..75: mol_type = other DNA
gtgacgttgaacgggcaaaattacactgccaccacagatgcttccggtaactggagcgccacggtgccagcctcg

SEQ ID NO: 412656 - DNA, 75 bp, synthetic construct
  source 1..75: mol_type = other DNA
atcgccatcagcgcgatcactaccgatacgggcctgatcgctaacgattttgtcaccagcgacacgacgcttgca

SEQ ID NO: 412657 - DNA, 75 bp, synthetic construct
  source 1..75: mol_type = other DNA
accgggcagacggtgaccgtcacccttaacggcgcaacctacaccggcaatgtgcaggcggacggtagctggagc

SEQ ID NO: 412658 - DNA, 75 bp, synthetic construct
  source 1..75: mol_type = other DNA
ataacgacaccttctttgccaccgcaggtactgacacttacgacggctccggcggctgggtgtacagctccggca

SEQ ID NO: 412659 - DNA, 75 bp, synthetic construct
  source 1..75: mol_type = other DNA
cggcgataacgtcctgaacgccgatgaaaaaggccagccgttgaccatcagcggcggcagtacggggctggcgac

SEQ ID NO: 412660 - DNA, 75 bp, synthetic construct
  source 1..75: mol_type = other DNA
cgccaacggtgaccattaataccattgcgggcgatgatattcttaacgccgcagaaaccggcgcggcgctgacca

SEQ ID NO: 412661 - DNA, 75 bp, synthetic construct
  source 1..75: mol_type = other DNA
agacggtcaacaccagctggggcggtttacaggccaccgatgccactcacgcttacgatctcagcgccgaagcgg

SEQ ID NO: 412662 - DNA, 75 bp, synthetic construct
  source 1..75: mol_type = other DNA
gcagcagccgttaacccttaacggctcgaccagcgcggaagtggggcagacggtcaccgtgacctttggcggcaa

SEQ ID NO: 412663 - DNA, 75 bp, synthetic construct
  source 1..75: mol_type = other DNA
ctacaccctcggcagcgccgatgtcaccgcgctggcggacggcaacgcctacgtgattaacgcctcggtgagcaa

SEQ ID NO: 412664 - DNA, 75 bp, synthetic construct
  source 1..75: mol_type = other DNA
gcattgaacacggacaggcgctggtgatcaccggcggcagtagtggcctgaatgcaggtgctgtgctgacggtta

SEQ ID NO: 412665 - DNA, 75 bp, synthetic construct
  source 1..75: mol_type = other DNA
caggtgcgggtgctggatctggccgggaacaccggtccggtggtgtcgaaaacggtggtggtcgatacgattaac

SEQ ID NO: 412666 - DNA, 75 bp, synthetic construct
  source 1..75: mol_type = other DNA
aatccggtggcgacggacgatattatcaatgccgccgaagcgggcagcgcacaaaccatcagcggccaggtaacc

SEQ ID NO: 412667 - DNA, 75 bp, synthetic construct
  source 1..75: mol_type = other DNA
cacggcgcgggtgattggcagcctgcgaagggtctttatctgacagcgcctgccatgaggtggatacatccaggc

SEQ ID NO: 412668 - DNA, 75 bp, synthetic construct
  source 1..75: mol_type = other DNA
cattgagtatcttcactccgagggtttttgatgttagagaagataatgattatgcagagtatacaatagaatatc

SEQ ID NO: 412669 - DNA, 75 bp, synthetic construct
  source 1..75: mol_type = other DNA
gaagccagaagtcaggggcgggtcggtgaaacgcttaatggttacctggtggcgctggaaacggatgctgaaaca

SEQ ID NO: 412670 - DNA, 75 bp, synthetic construct
  source 1..75: mol_type = other DNA
gttattgcttttgggaagcaggccgatgcgctggcaaagcaccagaaaggcgaccttgtgagcgtggcaggcaat

SEQ ID NO: 412671 - DNA, 75 bp, synthetic construct
  source 1..75: mol_type = other DNA
aaaccatgcaggaagtactgtatccggtgctggccgacttcttcaaacctgccctgctggcgcgtatggaagtgg

SEQ ID NO: 412672 - DNA, 75 bp, synthetic construct
  source 1..75: mol_type = other DNA
gggtgacaccatcaaaggccaggacctggcgattgccagcctgcataagcatctactgaccgcacgcgccgacct

SEQ ID NO: 412673 - DNA, 75 bp, synthetic construct
  source 1..75: mol_type = other DNA
accgctgaaacagtttccccggtacagcggctggcccagctcactgccgaactggacgccctgcataacgaccgg

SEQ ID NO: 412674 - DNA, 75 bp, synthetic construct
  source 1..75: mol_type = other DNA
ataccgcgtcaagccttgcgctgattcacacgttggttactgaccagatcaaatttgattcggagtttaatttat

SEQ ID NO: 412675 - DNA, 75 bp, synthetic construct
  source 1..75: mol_type = other DNA
ggttcgccaccctgcctgagaagtaccagaggcaggccaaagccatgtacgacaacgcccgacgcggcggcggtt

SEQ ID NO: 412676 - DNA, 75 bp, synthetic construct
  source 1..75: mol_type = other DNA
agcaggaatacgtcttcccggctcaggtggcgcgcgtgatgggtaatgaagttgggctgaaattaatgccgctca

SEQ ID NO: 412677 - DNA, 75 bp, synthetic construct
  source 1..75: mol_type = other DNA
atgacagcacaaatttcagcatacgggcgtttagtcgcagacccgcagacccgtaccacagcaaacggtacaagc

SEQ ID NO: 412678 - DNA, 75 bp, synthetic construct
  source 1..75: mol_type = other DNA
tcaggtagtagccgacagtgtgatcagcgccagaacggtacgccccggcgggaaggcaggacggcggggacaggc

SEQ ID NO: 412679 - DNA, 75 bp, synthetic construct
  source 1..75: mol_type = other DNA
atgcaggtaagccagtggacaggccagaacggggaaacgcggcagggctggcaggttatcgcagacagcgtaatc

SEQ ID NO: 412680 - DNA, 75 bp, synthetic construct
  source 1..75: mol_type = other DNA
gcacgccgcgtgaactggcaccgccggagcagttccgcgtaccgatgatggtctggatgtcagataaatatctgg

SEQ ID NO: 412681 - DNA, 75 bp, synthetic construct
  source 1..75: mol_type = other DNA
ctatgagccaacttaccatgagttcacccattaaaggtttttcactgtatgtagaaagcgaagacgtggctgtcg

SEQ ID NO: 412682 - DNA, 75 bp, synthetic construct
  source 1..75: mol_type = other DNA
tctgggccattttcaggatggtttccgtaacggtaaaaaaatattgtgtcgtattacggcaacctgttacggatt

SEQ ID NO: 412683 - DNA, 75 bp, synthetic construct
  source 1..75: mol_type = other DNA
tgaagaatatcataatatctataataaagcatgctccaaaggtcaatttgatccattcgctaaagaaaaactgat

SEQ ID NO: 412684 - DNA, 75 bp, synthetic construct
  source 1..75: mol_type = other DNA
gttaagttctgtatctggttttcagtagcctggagaaccatagaatttattatgagttcagagcgagatctggtt

SEQ ID NO: 412685 - DNA, 75 bp, synthetic construct
  source 1..75: mol_type = other DNA
agaaccatagaatttattatgagttcagagcgagatctggttaattttcttggcgatttttcaatggatgtggcc

SEQ ID NO: 412686 - DNA, 75 bp, synthetic construct
  source 1..75: mol_type = other DNA
acgggctgggggggcacattgaaaccgggatgcgatttaccgatggtaactggaacctgacgccgtatgcatcgt

SEQ ID NO: 412687 - DNA, 75 bp, synthetic construct
  source 1..75: mol_type = other DNA
tagggtgcgcctggagccccataacccgaagtctttcaagtccaggcagtaatgtgctgtcatctattcgaaatg

SEQ ID NO: 412688 - DNA, 75 bp, synthetic construct
  source 1..75: mol_type = other DNA
ttttgtctgatggtgagaaccagttgatattttatttggaatgtgggacgcatatccgaagtccggagaaagccg

SEQ ID NO: 412689 - DNA, 75 bp, synthetic construct
  source 1..75: mol_type = other DNA
gcaggagttgcgttaccagtccaggaaacgacgacacaggaagacatcaaaacagaaaccgtggaagacattgag

SEQ ID NO: 412690 - DNA, 75 bp, synthetic construct
  source 1..75: mol_type = other DNA
ttttattaaaattagaggctccaggacatgctatggctgcttgggctattaattatgatgatcataaaatatatg

SEQ ID NO: 412691 - DNA, 75 bp, synthetic construct
  source 1..75: mol_type = other DNA
aaaactccataaaaaaaaccccatgtacaatacatctgaaaaaatatggcaagagaaattaggtgaaaagccaat

SEQ ID NO: 412692 - DNA, 75 bp, synthetic construct
  source 1..75: mol_type = other DNA
tatcgtgttgttgtgtctgataaccaatttaaagtctcaagagaaagccatggagggtgtttttccagattgctt

SEQ ID NO: 412693 - DNA, 75 bp, synthetic construct
  source 1..75: mol_type = other DNA
acggaaaatgattatatattaaaacagaaaataattcatggagataattatgcatcatctaatcttccatttttt

SEQ ID NO: 412694 - DNA, 75 bp, synthetic construct
  source 1..75: mol_type = other DNA
attttccattggtaacaatactgacggtgttgctatttatattggcatatttttttaaacttggtgaggccgttt

SEQ ID NO: 412695 - DNA, 75 bp, synthetic construct
  source 1..75: mol_type = other DNA
tttagctttagagaggtaaatggtagcgaatttgttgaggttgtaaattatgtggaagggaagtttaatccaagg

SEQ ID NO: 412696 - DNA, 75 bp, synthetic construct
  source 1..75: mol_type = other DNA
aataatttatttgcatgacaattatgaaatgataagaaaaaataagtattacttatctgtatcatttattcctaa

SEQ ID NO: 412697 - DNA, 75 bp, synthetic construct
  source 1..75: mol_type = other DNA
catgtaaaaagagtctttgatgatattagtaataaagcaaacaggggatgcggactatattatgaaatatatcaa

SEQ ID NO: 412698 - DNA, 75 bp, synthetic construct
  source 1..75: mol_type = other DNA
ccaaaggaaaacgtacttattctatgaataacgatatgagtgatttatataatgtaatatcacgggctgttgaag

SEQ ID NO: 412699 - DNA, 75 bp, synthetic construct
  source 1..75: mol_type = other DNA
taagcagttaattgatcagttcgaaacgcatattttgcacgcagatgatgcagcagaaaaagttaaagcgtttgt

SEQ ID NO: 412700 - DNA, 75 bp, synthetic construct
  source 1..75: mol_type = other DNA
ttagaaggggtttctaaggccgaccccatcgaattcgacattcccgctaaagatggatacctagaaaaattaaac

SEQ ID NO: 412701 - DNA, 75 bp, synthetic construct
  source 1..75: mol_type = other DNA
atgattatgatttcccgacatgttgctatccccgatggtgagtttgagatcactgctattcgtgcacagggcgcg

SEQ ID NO: 412702 - DNA, 75 bp, synthetic construct
  source 1..75: mol_type = other DNA
cggtgacagtattacattgcttagggatcacactgctgctgattctggcactctgggtggtccaaactgccgctg

SEQ ID NO: 412703 - DNA, 75 bp, synthetic construct
  source 1..75: mol_type = other DNA
atgtatataaagcgcacaggaagtggtgttttatacaaaaagttaattttaagtaatgagtgtgtctcagatata

SEQ ID NO: 412704 - DNA, 75 bp, synthetic construct
  source 1..75: mol_type = other DNA
aattatattacagatataaacggtgcaatggctaaacaaaaaaccaaaattaaattaataagaaaagataatgaa

SEQ ID NO: 412705 - DNA, 75 bp, synthetic construct
  source 1..75: mol_type = other DNA
aagatggcaaggcgctgcctgtagcgaagcccatctcatggaaatgcgtcgggtatcttacagttatcgctatat

SEQ ID NO: 412706 - DNA, 75 bp, synthetic construct
  source 1..75: mol_type = other DNA
caatacgaaatactggaagctatcatcgaattcttacgtgaagagtgctgtgtaaacagtaaaacagatgttgcg

SEQ ID NO: 412707 - DNA, 75 bp, synthetic construct
  source 1..75: mol_type = other DNA
aatggatgagattaacattgcttcattgagtgatttgttacgggtagagctttcagatcgtcagattttgttgtc

SEQ ID NO: 412708 - DNA, 75 bp, synthetic construct
  source 1..75: mol_type = other DNA
tgatgcacgtcggaaccccggcaccgcttgacaggcgagtggaggacgctgagcgacagataatcacagaggcgc

SEQ ID NO: 412709 - DNA, 75 bp, synthetic construct
  source 1..75: mol_type = other DNA
atgactgaagaaattagcaatagcaatagcaatagcaatagcaactatcccaataaagaaaaaaaatggaaaata

SEQ ID NO: 412710 - DNA, 75 bp, synthetic construct
  source 1..75: mol_type = other DNA
atagcaatagcaactatcccaataaagaaaaaaaatggaaaataatcatcaaaaatatttttttctttattgcat

SEQ ID NO: 412711 - DNA, 75 bp, synthetic construct
  source 1..75: mol_type = other DNA
ttgcgcctgtgactatatgtggttttacacatcaaggagcgcaaaaggaggatgaatcaacatataacaacatct

SEQ ID NO: 412712 - DNA, 75 bp, synthetic construct
  source 1..75: mol_type = other DNA
tggcgacggggtggtggctctggactgcgatatcaatgacgccgggatgcaggagatcgtacgcaatattatcct

SEQ ID NO: 412713 - DNA, 75 bp, synthetic construct
  source 1..75: mol_type = other DNA
tgcctggcgataagtacggcgatggcattaccttaatcaagtacatcagcgccatttcccaagcctgtcgatcat

SEQ ID NO: 412714 - DNA, 75 bp, synthetic construct
  source 1..75: mol_type = other DNA
ctgcatggcaactgtattatattcttaaagccaatggatattcactcttatcactgtgaaggtttagtctggtaa

SEQ ID NO: 412715 - DNA, 75 bp, synthetic construct
  source 1..75: mol_type = other DNA
ctcagtgcaaagtaaatgtcttcattttgatgagatttatagaaaagaccttgataaaaatgacttgaaacacta

SEQ ID NO: 412716 - DNA, 75 bp, synthetic construct
  source 1..75: mol_type = other DNA
taaaccacacgagtaagaaacgggccagaaatacactggatggttatacctttatgttgacgggcaaacggatga

SEQ ID NO: 412717 - DNA, 75 bp, synthetic construct
  source 1..75: mol_type = other DNA
ttatgatattttaactgataagattgaatcaagttttgaattattaaaaaacaaccatcctaacaatgtaaaaaa

SEQ ID NO: 412718 - DNA, 75 bp, synthetic construct
  source 1..75: mol_type = other DNA
tggagtgattgtcattaaggcacaggaataccgcagccaggagctaaaccgtgaagcggcgctggcccggctggt

SEQ ID NO: 412719 - DNA, 75 bp, synthetic construct
  source 1..75: mol_type = other DNA
ccggtattgaggtgattggcaactatgcgctggcggacggcaaagccaaacaaacgtataaagttacggtgactg

SEQ ID NO: 412720 - DNA, 75 bp, synthetic construct
  source 1..75: mol_type = other DNA
acggcgaccgttgaggataaaaatggtaaccctgttccagggagcctggtgacctttaatctgccccggggtgtc

SEQ ID NO: 412721 - DNA, 75 bp, synthetic construct
  source 1..75: mol_type = other DNA
gcctttacgctgacggcaacggttaaggatcaatacggcaaccttctgcctggcgctgtggtcgtctttaatctg

SEQ ID NO: 412722 - DNA, 75 bp, synthetic construct
  source 1..75: mol_type = other DNA
caaaaacggctgccgcatcgtccgccagttcggcggcgtcatcggcatcatctgcgtctgcttcaaaagatgagg

SEQ ID NO: 412723 - DNA, 75 bp, synthetic construct
  source 1..75: mol_type = other DNA
atccagcggttttgatttgtcgggtacgcggtctgcacttgccggaaaaacatgtcacctggcgtggtgaggcaa

SEQ ID NO: 412724 - DNA, 75 bp, synthetic construct
  source 1..75: mol_type = other DNA
cgcattcagcagcagcaagatattgataacggaacgttgcctgattttatttcggaaacggcttccattcgcgat

SEQ ID NO: 412725 - DNA, 75 bp, synthetic construct
  source 1..75: mol_type = other DNA
acgacgatcaactgaacatcaacacattatatgtacatacgaccatgaacattcagatcaaaacactatctgtcc

SEQ ID NO: 412726 - DNA, 75 bp, synthetic construct
  source 1..75: mol_type = other DNA
acacaccatcaccgttaacgctgcgggcaatacggaaaacaccgtcaaaaacatcgcatttaactatattgtgag

SEQ ID NO: 412727 - DNA, 75 bp, synthetic construct
  source 1..75: mol_type = other DNA
ccgtcactgttaacgctactggtaacgcagaaaacaccgtcaaaaacatcgcatttaactatattgtgaggcttg

SEQ ID NO: 412728 - DNA, 75 bp, synthetic construct
  source 1..75: mol_type = other DNA
tcgaagaaagaaaatataaaaaagcacaacaagaagctatagcggcatttcagattggagccaaagatgaggccg

SEQ ID NO: 412729 - DNA, 75 bp, synthetic construct
  source 1..75: mol_type = other DNA
tgatcggggatattgttcatgggcctgacaggctggattggcggacccatcacattcacaggggagtaggctgtt

SEQ ID NO: 412730 - DNA, 75 bp, synthetic construct
  source 1..75: mol_type = other DNA
acatttagtgttcttagtgaaatagctagatgtgataaaaggattaaagtatttagaaatgaatcaaatttgggc

SEQ ID NO: 412731 - DNA, 75 bp, synthetic construct
  source 1..75: mol_type = other DNA
cttcaatcggttatactttccattactatatcacgcgtatgaatagtaatatgctcaagatgcgcaagcagatca

SEQ ID NO: 412732 - DNA, 75 bp, synthetic construct
  source 1..75: mol_type = other DNA
aatgtgataataataacgacatactgtaaagggttaagtaaaagcagaaatattttattggctactgcatttcaa

SEQ ID NO: 412733 - DNA, 75 bp, synthetic construct
  source 1..75: mol_type = other DNA
cctgcgggaaatatgccgagaaagaagtaccgtttcgcattggcgacaaagtgagttttgcctggcagcaagtat

SEQ ID NO: 412734 - DNA, 75 bp, synthetic construct
  source 1..75: mol_type = other DNA
acctggaaaatataaaaacatggggagtaatagcgttaacattattattaataatacccgaaaaattatcccccc

SEQ ID NO: 412735 - DNA, 75 bp, synthetic construct
  source 1..75: mol_type = other DNA
gacggtaattaaagaattgaccaccgtacaaaaagcccgccgaccaacacggcccacccgcgcatcaaaagaacg

SEQ ID NO: 412736 - DNA, 75 bp, synthetic construct
  source 1..75: mol_type = other DNA
aaaacagggaggtgattatttattcgctgtaaaaggaaaccaggggcggctaaataaagccttcgagaatttccg

SEQ ID NO: 412737 - DNA, 75 bp, synthetic construct
  source 1..75: mol_type = other DNA
atagattgtcagcatttaacatttcttcaatagaaatgtgccttaatgtgaatcaaatacaggaatgtaatgttt

SEQ ID NO: 412738 - DNA, 75 bp, synthetic construct
  source 1..75: mol_type = other DNA
gactggtttttaagcccgcagggacagcaattggtagaggatgtgggctatgtgccgattcatgacgcatcatac

SEQ ID NO: 412739 - DNA, 75 bp, synthetic construct
  source 1..75: mol_type = other DNA
cctatatggtgacgcgtgaaaatcccacgccggaaacgcagaaatttgttgactggtttataagtcagcaggggc

SEQ ID NO: 412740 - DNA, 75 bp, synthetic construct
  source 1..75: mol_type = other DNA
ccgcgacggttatttttgttgcacaaccgtcggaaggacagaaaaaacgtgcagaagaagcgggtgttaaactga

SEQ ID NO: 412741 - DNA, 75 bp, synthetic construct
  source 1..75: mol_type = other DNA
ttgctttttattttaatgaaaatacgaggtgtcagacttttgcattccgttatcgtttcgatatcggcatctctt

SEQ ID NO: 412742 - DNA, 75 bp, synthetic construct
  source 1..75: mol_type = other DNA
ctgcgtccatatcgtgagcagggcttgccgctgccggaagagtaccggattggttatcgtcgcaatgaaggtgcc

SEQ ID NO: 412743 - DNA, 75 bp, synthetic construct
  source 1..75: mol_type = other DNA
atgagctttttaaacagaaaaccagagcagagcaaagaggcaaaattattctcccgccagggcaaatccagcctg

SEQ ID NO: 412744 - DNA, 75 bp, synthetic construct
  source 1..75: mol_type = other DNA
aaaatggttggcacgacgaagcgtttctggcgcgttgcaccacaggttatgccgtcttcgcctcttattttgctg

SEQ ID NO: 412745 - DNA, 75 bp, synthetic construct
  source 1..75: mol_type = other DNA
tcggaaaccgtcgatttctttggcgataaaatggagtgggtggcaccgcacatgggtaccgatgttgcgctgatg

SEQ ID NO: 412746 - DNA, 75 bp, synthetic construct
  source 1..75: mol_type = other DNA
gtgatttctgttgcgccactgctgattgcctgtggcgatggcgcgctggaaatcgtcaccggacaggcgggcgac

SEQ ID NO: 412747 - DNA, 75 bp, synthetic construct
  source 1..75: mol_type = other DNA
gtgagcatctggagctctgctgtggtaaggcaaggctggtgctgacgaaggacggacaaatttttctcaacggca

SEQ ID NO: 412748 - DNA, 75 bp, synthetic construct
  source 1..75: mol_type = other DNA
aggggttcgttatctgtttgagtgccaggagcctgccagtaaagcacctaagtttgtgcagtttagcgatcatat

SEQ ID NO: 412749 - DNA, 75 bp, synthetic construct
  source 1..75: mol_type = other DNA
tctgtttcggtaacaaacaaccaggatactgaagaagctgcaaagcggattgcctcggcgatgggttttcatgtc

SEQ ID NO: 412750 - DNA, 75 bp, synthetic construct
  source 1..75: mol_type = other DNA
ccaaatgctagggcagcttttgattatggccttcgcaatatttatcttaggaaaaatgctaccttatatgaggtg

SEQ ID NO: 412751 - DNA, 75 bp, synthetic construct
  source 1..75: mol_type = other DNA
gcgttctcatatacctgttgtgtttagtaagtctcacataaaattattacacagaataaaaacaaactctttaaa

SEQ ID NO: 412752 - DNA, 75 bp, synthetic construct
  source 1..75: mol_type = other DNA
atgtacctggtgagtgatccgctggggttgctgggcggggagcagacttaccggtatgtgccgaatccttgtggg

SEQ ID NO: 412753 - DNA, 75 bp, synthetic construct
  source 1..75: mol_type = other DNA
gaacacttaaacttttcatcagactcaaccttcccttcatgcccagacatcaataacatcaataacatcaataac

SEQ ID NO: 412754 - DNA, 75 bp, synthetic construct
  source 1..75: mol_type = other DNA
tcattcctctcatcaagcctcttgtcgatgaggcgcaaaaaacgcgctatgagcaactggagctgaaggcaccga

SEQ ID NO: 412755 - DNA, 75 bp, synthetic construct
  source 1..75: mol_type = other DNA
tcattcccctcatcaagcctctggtcgatgaggcgcaaaaaacacgctatgagcaactggagctgaaggcgccga

SEQ ID NO: 412756 - DNA, 75 bp, synthetic construct
  source 1..75: mol_type = other DNA
cggttttggccacctggcgataccgcgtgtgggtcaggaggtgattgtggacttcctcaacggcgatccggacca

SEQ ID NO: 412757 - DNA, 75 bp, synthetic construct
  source 1..75: mol_type = other DNA
atcagcgtggtattgctggcctgggtactgtggcgtctgttgcgtatcatcagccgtcgtcgtcttaacccggat

SEQ ID NO: 412758 - DNA, 75 bp, synthetic construct
  source 1..75: mol_type = other DNA
tgttggcggaacatttatccggaatgaatatcagcgccagcgaaaacagcgttcgcgagttcgccactcagcttc

SEQ ID NO: 412759 - DNA, 75 bp, synthetic construct
  source 1..75: mol_type = other DNA
ttaaaaacgccagggtgaatgcagaatgtggtgagcacatgtcaccggcagaagttacgactctgcttaacgtgt

SEQ ID NO: 412760 - DNA, 75 bp, synthetic construct
  source 1..75: mol_type = other DNA
aatggctgtggcgattcggtatggcgaaaactacagtctgaacaccatgcgagatgcagtaattctgggactgac

SEQ ID NO: 412761 - DNA, 75 bp, synthetic construct
  source 1..75: mol_type = other DNA
tgttgccaagtattacattctggcgacgcctgcactggcactgattcgagccaaagcattgggtaccaatccggt

SEQ ID NO: 412762 - DNA, 75 bp, synthetic construct
  source 1..75: mol_type = other DNA
aggcgattaacgacgcttataagcctgaccgtggacgcgattatgaagattcgcgtgatgacggttggcagcgtg

SEQ ID NO: 412763 - DNA, 75 bp, synthetic construct
  source 1..75: mol_type = other DNA
acccgctgtacgtcaccgaaggaagctatggccagataaccagcgccatgctgcaagcctacgattccgacagca

SEQ ID NO: 412764 - DNA, 75 bp, synthetic construct
  source 1..75: mol_type = other DNA
ctgaccatgaccggcactgccagcgaagcgcaggcctggcttaacagcatcacctttacctccgctgacgtcgag

SEQ ID NO: 412765 - DNA, 75 bp, synthetic construct
  source 1..75: mol_type = other DNA
ccgacgccattacgcttggcaccgatgtgctgacggcggacaacctctcggcgtggtcttcacagctcagcgcta

SEQ ID NO: 412766 - DNA, 75 bp, synthetic construct
  source 1..75: mol_type = other DNA
aacggcacgccggtgctggaagacggcattctctttacccgctgggtaaacaccacgctgcaacgcagcgtggtg

SEQ ID NO: 412767 - DNA, 75 bp, synthetic construct
  source 1..75: mol_type = other DNA
ccagcgacccggacggcgatacgctgaaagtcagcgcatttacggtgggcgcaacgacgtgggccgctggccaga

SEQ ID NO: 412768 - DNA, 75 bp, synthetic construct
  source 1..75: mol_type = other DNA
tgacggtgaacctgccgaccaacgcgggcgtcaccgccgccgactggaacggcacctttaacgtcaccgtagtgg

SEQ ID NO: 412769 - DNA, 75 bp, synthetic construct
  source 1..75: mol_type = other DNA
ttcgaagctatcgagcaattgattatccgtggcctggtgactcaactacaggaagaaagcacgaccctggacagg

SEQ ID NO: 412770 - DNA, 75 bp, synthetic construct
  source 1..75: mol_type = other DNA
tgccgctatcttcgttagagctatcttattctgaaagaataggggacccaaaaatatggaatatggtgaaagggt

SEQ ID NO: 412771 - DNA, 75 bp, synthetic construct
  source 1..75: mol_type = other DNA
atgtcttctgtttatccggttaatgagcaatgtattaaaactgtttccttttgctatggtgatgtgctctgtggt

SEQ ID NO: 412772 - DNA, 75 bp, synthetic construct
  source 1..75: mol_type = other DNA
gaagcgtttctatagagacatgctcaaactcgctgattctgaataccgtaaacatcttgcaaaactggagaaata

SEQ ID NO: 412773 - DNA, 75 bp, synthetic construct
  source 1..75: mol_type = other DNA
tgggctgaatgtcggcaactacattgtcggtgcgatatttggtgatgatgaggtgcgggtgaactgcgcggcggc

SEQ ID NO: 412774 - DNA, 75 bp, synthetic construct
  source 1..75: mol_type = other DNA
aaactgttgatgaatgacgggctggtgagccgcaacctgatggagattgttgggctgaatgtcggcaactacatt

SEQ ID NO: 412775 - DNA, 75 bp, synthetic construct
  source 1..75: mol_type = other DNA
cgtgggacgtttaaaaatccgcaggctggagtgaaagccggaccgttgattgcccgtggtgctgttgctgcggca

SEQ ID NO: 412776 - DNA, 75 bp, synthetic construct
  source 1..75: mol_type = other DNA
ttactcttaatgaaagctcgcttctcagtcaggaagtaaaaaactgggctcagaagcagggttataagcttctgt

SEQ ID NO: 412777 - DNA, 75 bp, synthetic construct
  source 1..75: mol_type = other DNA
tcctattggcatcagtatctctggaaactgcggcatcaccagttgcacctgataaaatgaatggccccagaagcc

SEQ ID NO: 412778 - DNA, 75 bp, synthetic construct
  source 1..75: mol_type = other DNA
atgagccaccaggaaagaaacagcgtccgtgctgcctatattcacaaggctgaatatctggaggaacggatcgag

SEQ ID NO: 412779 - DNA, 75 bp, synthetic construct
  source 1..75: mol_type = other DNA
agaatatctggaggtgttgcaattatccagcgtggtggagaaagtaaatttcgatcagggaaagccagatatgtg

SEQ ID NO: 412780 - DNA, 75 bp, synthetic construct
  source 1..75: mol_type = other DNA
ttgttaactttatgaaagaccaagaagaatctttccggaaaacattcttcagtacccgtgaaattgccgatgcag

SEQ ID NO: 412781 - DNA, 75 bp, synthetic construct
  source 1..75: mol_type = other DNA
tggaaagaaccgactatggtttcaggggagttataggaaaacacagaaccaataatcttcctcatgttgctgtag

SEQ ID NO: 412782 - DNA, 75 bp, synthetic construct
  source 1..75: mol_type = other DNA
gcacggttcaaatgaatagcgaaggggggaaaccggggaatgtactgaccgttaacggcaactataccggaaaca

SEQ ID NO: 412783 - DNA, 75 bp, synthetic construct
  source 1..75: mol_type = other DNA
gacccgctgggccgcagggtggcaaaacgggtgtggcggcgtgaacgggacctgacgggctggatgtcgctgtca

SEQ ID NO: 412784 - DNA, 75 bp, synthetic construct
  source 1..75: mol_type = other DNA
gtatgaatagcacttatggagggccagcattttcacttccttctttacttcatcatttagaaaaaaactatcttg

SEQ ID NO: 412785 - DNA, 75 bp, synthetic construct
  source 1..75: mol_type = other DNA
cactgcgaccatcgcggcctgccgctggcgcttgtcagcacggaaggggcaacagaatggtgcgcagaatacgat

SEQ ID NO: 412786 - DNA, 75 bp, synthetic construct
  source 1..75: mol_type = other DNA
aaaccaaagaaatactatttgctttggttcagcagtttgtcgcagcacggcagcaagatgatagcgcactcgaga

SEQ ID NO: 412787 - DNA, 75 bp, synthetic construct
  source 1..75: mol_type = other DNA
gttgaaaccgccaccggtgagctggcgaaaacgcagcgccgcagcctggcggatacccttcagcagtccggcggc

SEQ ID NO: 412788 - DNA, 75 bp, synthetic construct
  source 1..75: mol_type = other DNA
ggtaccattacgacagtcagcaccggctggtgcactacacgcggacacaatatgcagagccgctggtcgaaagcc

SEQ ID NO: 412789 - DNA, 75 bp, synthetic construct
  source 1..75: mol_type = other DNA
caaaaatatcgacgggccgtacgagctgcacccggacgtaacgatgatgaccagctggcacctgccggagaaccc

SEQ ID NO: 412790 - DNA, 75 bp, synthetic construct
  source 1..75: mol_type = other DNA
aataaaatatcttactcaagatatgctgacgacttaactttttcaacaaatgaaagagatgttttagggttagct

SEQ ID NO: 412791 - DNA, 75 bp, synthetic construct
  source 1..75: mol_type = other DNA
tgatgacgattcgaacctcgaaagcctgtgctggccctgccatcgaacgaaaaccgggcgcgaacgcattaaatg

SEQ ID NO: 412792 - DNA, 75 bp, synthetic construct
  source 1..75: mol_type = other DNA
gccgtaagcgtggctgcgcaggcaaaacaacagacatctctggctactgcgataaacatcgtggtgaaggctggg

SEQ ID NO: 412793 - DNA, 75 bp, synthetic construct
  source 1..75: mol_type = other DNA
caacaggatgatagtgctctggaaaatacttttgctgtgctgaaaaagatggggctggataaggtcctctgggaa

SEQ ID NO: 412794 - DNA, 75 bp, synthetic construct
  source 1..75: mol_type = other DNA
tttttggtttatcggcagctcagcgttatggcggtatttttgtgcctccgcatattgcggtcatccatcaatata

SEQ ID NO: 412795 - DNA, 75 bp, synthetic construct
  source 1..75: mol_type = other DNA
tgggcggttctttaaaagtcaggaataagcagcatcttttaatgtctcaagaaattgaatattggaaaatgataa

SEQ ID NO: 412796 - DNA, 75 bp, synthetic construct
  source 1..75: mol_type = other DNA
cgcaggaagtaacccaactgatggtcgatagccagattgaacgtattcgctcttcattgatatcaccggcgatat

SEQ ID NO: 412797 - DNA, 75 bp, synthetic construct
  source 1..75: mol_type = other DNA
ggataaagtggaaaatggtcgcctgaaagtgcagcaggggattattgcgggttgctctggcggtaactatgaaaa

SEQ ID NO: 412798 - DNA, 75 bp, synthetic construct
  source 1..75: mol_type = other DNA
ctgccattccatccgagcaacgtctatgaaattgacacgctgaaccagaatctgactgacattctgcgtgagatt

SEQ ID NO: 412799 - DNA, 75 bp, synthetic construct
  source 1..75: mol_type = other DNA
ctttgtcgggattattcagaccgccaaagcctccgggatggagcgttttccgctgccgtatgtgctgaccaattg

SEQ ID NO: 412800 - DNA, 75 bp, synthetic construct
  source 1..75: mol_type = other DNA
tagatcacggtcatctacgtcagttattacatcgtgggcgtagtgtatcagatgcacttaattatctggtgagta

SEQ ID NO: 412801 - DNA, 75 bp, synthetic construct
  source 1..75: mol_type = other DNA
gtgaaacaaaacgagttcagacgttggctcgaatctcagggcgtagatgtgacgaatggcagcaaccatttgaaa

SEQ ID NO: 412802 - DNA, 75 bp, synthetic construct
  source 1..75: mol_type = other DNA
atgagtgaattaaccgcgctgcaggaacgccttgccggtctgattgccagcctgtcaccggcggcatgtcggcaa

SEQ ID NO: 412803 - DNA, 75 bp, synthetic construct
  source 1..75: mol_type = other DNA
gaagtttttaagtttctcctgcaaaggtatcccagcaaaattaattagacgagatagtgagactcaatttgttgt

SEQ ID NO: 412804 - DNA, 75 bp, synthetic construct
  source 1..75: mol_type = other DNA
ctccaccctggccgcacgaacgcggcgactcagtgagcgtaagaagtcttatccaacgggcagagaaagaagcac

SEQ ID NO: 412805 - DNA, 75 bp, synthetic construct
  source 1..75: mol_type = other DNA
aacgccagagcaaatactggtgccagacacaacctgagtattacgccatctatgacgcgctgcgccaggcagagc

SEQ ID NO: 412806 - DNA, 75 bp, synthetic construct
  source 1..75: mol_type = other DNA
tctaagccagccaatggccaaatgtcagcggtggcgttgatggacgctcgttctatcgccgcaactgccgcaaac

SEQ ID NO: 412807 - DNA, 75 bp, synthetic construct
  source 1..75: mol_type = other DNA
gttactgttggtgaggtggcacaattaatttatcgatttaaagaaagtcgccaaacattaatcatcgaagatgta

SEQ ID NO: 412808 - DNA, 75 bp, synthetic construct
  source 1..75: mol_type = other DNA
ggaaaatctagagtatctaacaacttaagcaaatctatttcagccatttcatacgaattgaaaaaagcttgtgag

SEQ ID NO: 412809 - DNA, 75 bp, synthetic construct
  source 1..75: mol_type = other DNA
tcgaacaaaaggatattgggtgttttgtttagaaaaatatggctgggatatgtattacagttaattatggtaact

SEQ ID NO: 412810 - DNA, 75 bp, synthetic construct
  source 1..75: mol_type = other DNA
atcggcatgctttattttcaggacttgatgcctgaaaaaataggctctgcgacaacgttatatgcaaatacttca

SEQ ID NO: 412811 - DNA, 75 bp, synthetic construct
  source 1..75: mol_type = other DNA
ctggctaaccgactggatgtggacgaacgcaccatccgtaagtggaaatcaggagagaccagtatggtgtacacc

SEQ ID NO: 412812 - DNA, 75 bp, synthetic construct
  source 1..75: mol_type = other DNA
ctggccaaccggctgactgtggacgaacgcaccatctgtaagtggaaatccggcgagaccagtatggtgtacacc

SEQ ID NO: 412813 - DNA, 75 bp, synthetic construct
  source 1..75: mol_type = other DNA
tccaacattagaatgtttacagagctagaaaatttaagcctgtcattaaatgtgactatgacagtctatgttgat

SEQ ID NO: 412814 - DNA, 75 bp, synthetic construct
  source 1..75: mol_type = other DNA
taaagccaaactctcgctgctggataaagtggaaaatggtcgcctgaaagtgcagcaggggattatcgcgggctg

SEQ ID NO: 412815 - DNA, 75 bp, synthetic construct
  source 1..75: mol_type = other DNA
ctctatatggagaacctgactgccgaagagcgcgaaattatcaaggcggggagtttgattaacttcaataaaaac

SEQ ID NO: 412816 - DNA, 75 bp, synthetic construct
  source 1..75: mol_type = other DNA
aatcatttgtccagatgggctgggaaaaaaaatataagcgattatttaaaaaatatgtgcagttatcttggtatt

SEQ ID NO: 412817 - DNA, 75 bp, synthetic construct
  source 1..75: mol_type = other DNA
ttcacgcatagaggggggactgcaaatggaacaatcattgatggtggaggccagtcagtatcaactcaggggcat

SEQ ID NO: 412818 - DNA, 75 bp, synthetic construct
  source 1..75: mol_type = other DNA
atgccgatggcatagcttctggtacaagaataaatcaaagtggttatgtgaatatttcatcaggaggctatgcgg

SEQ ID NO: 412819 - DNA, 75 bp, synthetic construct
  source 1..75: mol_type = other DNA
aaaaacccacttaatgattttggaatatggttaagaacatcactggtaaatgtatgtaacaatgttatttattat

SEQ ID NO: 412820 - DNA, 75 bp, synthetic construct
  source 1..75: mol_type = other DNA
gaggtgaaacagaaattcaaaacccctttagaaggtgtattatacgatgttataaaaaataatttctggcttgat

SEQ ID NO: 412821 - DNA, 75 bp, synthetic construct
  source 1..75: mol_type = other DNA
gagtcatcgttgacgccctatatgattgaccccattaatacattatcagcccgtgaatatgacgcggtggtgttt

SEQ ID NO: 412822 - DNA, 75 bp, synthetic construct
  source 1..75: mol_type = other DNA
agtttattgagttataccggtacgccaaccgccgctggtgtagctcagcaggcgcgagcatggctgactccagta

SEQ ID NO: 412823 - DNA, 75 bp, synthetic construct
  source 1..75: mol_type = other DNA
ctttgtctgtagcaccggagaggcaacgattgaaacgctcagagcctacgttcagagtcagtcaacacctgattg

SEQ ID NO: 412824 - DNA, 75 bp, synthetic construct
  source 1..75: mol_type = other DNA
ggcaacggtggggcaatgcaaaacctgggtcaggacttcgccacaaaggttaattccggtgggcaatataccctt

SEQ ID NO: 412825 - DNA, 75 bp, synthetic construct
  source 1..75: mol_type = other DNA
aatgtcagttttaacgaatgctaaagctgatgcgacccgaatagataatggcggcgttatggatgttgccggaaa

SEQ ID NO: 412826 - DNA, 75 bp, synthetic construct
  source 1..75: mol_type = other DNA
ctgaaaaattaagaagcgaaattggttttgttccacctgattgggatgaacttattgaatacatgaatgctgatt

SEQ ID NO: 412827 - DNA, 75 bp, synthetic construct
  source 1..75: mol_type = other DNA
tattactataaattcattgctgccacatcgattagctgagatctgttcgcataataattcaaaattaattcattt

SEQ ID NO: 412828 - DNA, 75 bp, synthetic construct
  source 1..75: mol_type = other DNA
gatgaatactccctcttggaaagatttgatagagaagatgtacaatgaatatagaacatatttccaaaaagctta

SEQ ID NO: 412829 - DNA, 75 bp, synthetic construct
  source 1..75: mol_type = other DNA
ccaccgaggaaaatcaaggttcaaatctatcggggccttttttacccggccagtcacggacgttcagttaccggc

SEQ ID NO: 412830 - DNA, 75 bp, synthetic construct
  source 1..75: mol_type = other DNA
ggcgaattttatgttgattttcctgaagatacaatctcattaaatggtttaattgaaaatgtcatctcacgaaaa

SEQ ID NO: 412831 - DNA, 75 bp, synthetic construct
  source 1..75: mol_type = other DNA
gttccatggctccagatgacaaacatgatctcatatcagggacttgttcgcaccttcctaaggccgccacagctt

SEQ ID NO: 412832 - DNA, 75 bp, synthetic construct
  source 1..75: mol_type = other DNA
gcgaaaattgctgtagtctcctatgttgttttgtatggcaattctcgagcaagaaccgatatctatcagagcctt

SEQ ID NO: 412833 - DNA, 75 bp, synthetic construct
  source 1..75: mol_type = other DNA
tgatgattcttggcaacacgactgcatccgtcgacattggaactcctcgcaagtcaatgttccacataacgaata

SEQ ID NO: 412834 - DNA, 75 bp, synthetic construct
  source 1..75: mol_type = other DNA
actttaccttctccacataaaagtaaccggtggggtaaaaaacaactacgctacatatatcatgtcttctggtgc

SEQ ID NO: 412835 - DNA, 75 bp, synthetic construct
  source 1..75: mol_type = other DNA
gtagctaatggaaaaatttacatcggaataattgacactgacccggtaaatccagaaaaccagattcaggtttat

SEQ ID NO: 412836 - DNA, 75 bp, synthetic construct
  source 1..75: mol_type = other DNA
tgatgattcttggtaatacgacagaatccgtcgatattggaacgcctcgcaagtcaatgttccatgtgaccaata

SEQ ID NO: 412837 - DNA, 75 bp, synthetic construct
  source 1..75: mol_type = other DNA
atcagcggttaaatccaggagacacatccatagcaaacctgcaaagttgcttcaaagcagggtacaacgggagtg

SEQ ID NO: 412838 - DNA, 75 bp, synthetic construct
  source 1..75: mol_type = other DNA
catgcaaatggttcttgatcctggtgttaacaaagacctaagactccaatgcatcaacactaccgatatgtcagg

SEQ ID NO: 412839 - DNA, 75 bp, synthetic construct
  source 1..75: mol_type = other DNA
cagaagagcagtacgaaattgattttcaacatcgactggtaaacagaaattgttatttagataaatatggcgatg

SEQ ID NO: 412840 - DNA, 75 bp, synthetic construct
  source 1..75: mol_type = other DNA
gtgcttgatgttagtggtggtacggcaacaaatgttacccagcacgatggtgcaattttaaaaacaaacactaac

SEQ ID NO: 412841 - DNA, 75 bp, synthetic construct
  source 1..75: mol_type = other DNA
taacggtacgacggtgagcggtacgaatagtgaaggtgcattctccatccgcaatcacgtggcagacaatgtgtt

SEQ ID NO: 412842 - DNA, 75 bp, synthetic construct
  source 1..75: mol_type = other DNA
acttaagcgtatcattaatagttttaattctgaactcatgggagaaatgtcgaataataatataaaagttcattt

SEQ ID NO: 412843 - DNA, 75 bp, synthetic construct
  source 1..75: mol_type = other DNA
aatgataccctatcgattatcaagcttataaaaaatgcctgtttaaaattatataatttggcacataccgcaacc

SEQ ID NO: 412844 - DNA, 75 bp, synthetic construct
  source 1..75: mol_type = other DNA
agtcaattatcctactggtctctacgtcccctactccaccagaactcacctggaagacgctctcaatgaaaatat

SEQ ID NO: 412845 - DNA, 75 bp, synthetic construct
  source 1..75: mol_type = other DNA
taagtgtaattcattctaaacttcagttgctcatacaacaccaataccttaaccctggatatacacttcatgaac

SEQ ID NO: 412846 - DNA, 75 bp, synthetic construct
  source 1..75: mol_type = other DNA
agcatgagaccagacatgcgtacaacgcgcagggactggcgaaccgctgtataccggacagcctgcccgccgtgg

SEQ ID NO: 412847 - DNA, 75 bp, synthetic construct
  source 1..75: mol_type = other DNA
ggtgggacggtgacaggctgaccactgtacagacccaacagacaagaatccagacggtataccagccgggaagct

SEQ ID NO: 412848 - DNA, 75 bp, synthetic construct
  source 1..75: mol_type = other DNA
gagaatatgacatcaggtggactaatttatgccgtattgcgtattttcatgaaaggagatcactcaataacttcc

SEQ ID NO: 412849 - DNA, 75 bp, synthetic construct
  source 1..75: mol_type = other DNA
tgactaagacatttggatcaacaatagctgacgtgataggtaaaaatcatgaggcggcagggaatagacaaggtc

SEQ ID NO: 412850 - DNA, 75 bp, synthetic construct
  source 1..75: mol_type = other DNA
ctgacggcctgcaaactccgattcggcgaaaataacgaactctcgtttggtggcttcccgggcacgtctttgatc

SEQ ID NO: 412851 - DNA, 75 bp, synthetic construct
  source 1..75: mol_type = other DNA
ttgcgctccggcagtacccgggcatggtgggaagtgccgctgccgacggtgtacgctttcagcttttatattttt

SEQ ID NO: 412852 - DNA, 75 bp, synthetic construct
  source 1..75: mol_type = other DNA
ggaagatgaactgggttacgtgatgaacgcggtgcgtaccattcgtcgcgaactgaaaggcgaagtgccgctgat

SEQ ID NO: 412853 - DNA, 75 bp, synthetic construct
  source 1..75: mol_type = other DNA
gcagcagcaaagcgttcaccgtgatcaaaaaaaatgatgtatgccgatccacaggcgctgcacgcgctactcgat

SEQ ID NO: 412854 - DNA, 75 bp, synthetic construct
  source 1..75: mol_type = other DNA
gtagcacgttacgggggggccttgttggttacttttatttgttatcttatgtttttcgttatagttaacatgtta

SEQ ID NO: 412855 - DNA, 75 bp, synthetic construct
  source 1..75: mol_type = other DNA
gccggacttgatgccagacgagctgccagcgttttacaggcgaagggtatcaccaaaccagatcgtcgatatctg

SEQ ID NO: 412856 - DNA, 75 bp, synthetic construct
  source 1..75: mol_type = other DNA
ggcgatgcctgcgacttcactttacgcaaatggaggagctgaagccattagcattctggttaacggcggcctgcg

SEQ ID NO: 412857 - DNA, 75 bp, synthetic construct
  source 1..75: mol_type = other DNA
gattcagctattccgcaccatgaaacccgcctcacgggataagctgctgctgcaggctctggcgcaggttgcacg

SEQ ID NO: 412858 - DNA, 75 bp, synthetic construct
  source 1..75: mol_type = other DNA
gcatggaatttacttcttcatcatgcaaaggattactctattgtaaatgcgtttaatttggggcttttagctgaa

SEQ ID NO: 412859 - DNA, 75 bp, synthetic construct
  source 1..75: mol_type = other DNA
ccatcaggtcattgtcacaaaggttttttagatgcatttaatttagttggaaaaaaattcagggaccaactcaaa

SEQ ID NO: 412860 - DNA, 75 bp, synthetic construct
  source 1..75: mol_type = other DNA
gaaatctgttgtttgatatcgacgtcgaagaattgcgggatattgcggcgcaggctggcgcaacgcagcaccagt

SEQ ID NO: 412861 - DNA, 75 bp, synthetic construct
  source 1..75: mol_type = other DNA
ggacacaccatcaccgttaatgctgccggtaacgcagagaacaccgtcaaaaacatcgcatttaactatatcgtg

SEQ ID NO: 412862 - DNA, 75 bp, synthetic construct
  source 1..75: mol_type = other DNA
atttgcggaagcgatggagatttttatgcatcactttgaaaccgacattcgcgggcgcgtaaaagcccgtatttc

SEQ ID NO: 412863 - DNA, 75 bp, synthetic construct
  source 1..75: mol_type = other DNA
gggatttaccgatcgatattgatgtggatgctatctggcagattgcggacagtatcggtgccacacaaaaacagt

SEQ ID NO: 412864 - DNA, 75 bp, synthetic construct
  source 1..75: mol_type = other DNA
ctaacgcctttattgacaaggctaagcggggagagatcaaagatttaactccgatgaagctacaaaaattgttgt

SEQ ID NO: 412865 - DNA, 75 bp, synthetic construct
  source 1..75: mol_type = other DNA
tggactaatttatgccgtatctggtgtacctggattgattgctgcaaacagcattactaacagtgcttaccagtt

SEQ ID NO: 412866 - DNA, 75 bp, synthetic construct
  source 1..75: mol_type = other DNA
ggccgtgaaacgcggtatgaatacaacgccgcaggcgacctgactgccgtcattaccccggacggcaaccggagc

SEQ ID NO: 412867 - DNA, 75 bp, synthetic construct
  source 1..75: mol_type = other DNA
gagtgcctggagatttttatgaaagagttcgaatcggacatccggcgccgcgcgaagtacggcattaccgtggct

SEQ ID NO: 412868 - DNA, 75 bp, synthetic construct
  source 1..75: mol_type = other DNA
gactggttattgagtggcagttactgacaatttgccgaccaggtgaagcagctggcgcgcgctggtgtgagattg

SEQ ID NO: 412869 - DNA, 75 bp, synthetic construct
  source 1..75: mol_type = other DNA
atgcgcaattgtcaaccagggggctgtctgaatatcgaaaattattgtacaccaggtccactttttaatcagttg

SEQ ID NO: 412870 - DNA, 75 bp, synthetic construct
  source 1..75: mol_type = other DNA
agaccagcaattagatcgtcttgaggctactgtactcggctttgatgagaagaacatttatgtacttggtcatga

SEQ ID NO: 412871 - DNA, 75 bp, synthetic construct
  source 1..75: mol_type = other DNA
gatggaattgagtacatcaaagctgcactttctgctggcctgaaaattgacgactttgccccgcgcctgtcgttc

SEQ ID NO: 412872 - DNA, 75 bp, synthetic construct
  source 1..75: mol_type = other DNA
aagagcgcggcgtggcagcgatctatggccctggcacccccatgctcgacagcgtgcgcgatgtgctgacccgca

SEQ ID NO: 412873 - DNA, 75 bp, synthetic construct
  source 1..75: mol_type = other DNA
cgaccagatcccgctggatcaaatgtcggtatcgatgactatgaacggggcggtgttgccggtcctggcgtttta

SEQ ID NO: 412874 - DNA, 75 bp, synthetic construct
  source 1..75: mol_type = other DNA
aataaaagaaaatgaactcgactatcagtatataacaatacactacgaatatatctactgtaagcatcttacagc

SEQ ID NO: 412875 - DNA, 75 bp, synthetic construct
  source 1..75: mol_type = other DNA
tctggtaccgagtcagtgtgttaccggcgtgattgcgcaaagttatcaccagtcggaaaaatcagcctgcgaatt

SEQ ID NO: 412876 - DNA, 75 bp, synthetic construct
  source 1..75: mol_type = other DNA
tatcgtggccgctgaagagcaaggagttccccccgataaacttactggcaccatccagaacgacatcctgaaaga

SEQ ID NO: 412877 - DNA, 75 bp, synthetic construct
  source 1..75: mol_type = other DNA
aaaaactttgaatcaatctttcagaaattaactgatgctgctaaacgcggagttcaagttgatatcttatggggc

SEQ ID NO: 412878 - DNA, 75 bp, synthetic construct
  source 1..75: mol_type = other DNA
tattaatgatcattgctatcgtgagtggtatgtgtttttacgccagcgtactcatggcgacaactccggcagttg

SEQ ID NO: 412879 - DNA, 75 bp, synthetic construct
  source 1..75: mol_type = other DNA
ctcaccgctgccatcgcatttgttgtttgcggactgatagtctggttgtttttgccatcaatacaaagaaatatt

SEQ ID NO: 412880 - DNA, 75 bp, synthetic construct
  source 1..75: mol_type = other DNA
caatctccgctgggctgaagattgatgacttcgcaccgcgtctgtcattcttctttggcattggcatggatctgt

SEQ ID NO: 412881 - DNA, 75 bp, synthetic construct
  source 1..75: mol_type = other DNA
cgatgtccttgagatagacaacgtgatggtacgtaacgagcagattgcttcactggagcatattcgcgccacccg

SEQ ID NO: 412882 - DNA, 75 bp, synthetic construct
  source 1..75: mol_type = other DNA
cgcgggtggcgtcattccgccgcaggattacgccttcctgcaagagcgcggcgtggcggcgatttatggtccagg

SEQ ID NO: 412883 - DNA, 75 bp, synthetic construct
  source 1..75: mol_type = other DNA
cagggtaaaacgggatccggagtacagagctatttgaattactatacgaatattcattggttgaataagttgtat

SEQ ID NO: 412884 - DNA, 75 bp, synthetic construct
  source 1..75: mol_type = other DNA
tctccagccacaggatgctgggcttgcacaagccgtacgtgcgacgatcgccaaacatcgtgaacatttgctgga

SEQ ID NO: 412885 - DNA, 75 bp, synthetic construct
  source 1..75: mol_type = other DNA
cgccgatacggccgttcccgtcagttaacggtgacgattgattcctggcgcgataaatccgggaaattatgggag

SEQ ID NO: 412886 - DNA, 75 bp, synthetic construct
  source 1..75: mol_type = other DNA
cctatgggtggaacgccaatgcttaaccctattaaaggtataccaattccaccttcggttgggatggtaaaaaaa

SEQ ID NO: 412887 - DNA, 75 bp, synthetic construct
  source 1..75: mol_type = other DNA
aagagttagatcaattctccaggcaaaatttccgcacggtagaagggcgtttagtaccaactctagcggtattcg

SEQ ID NO: 412888 - DNA, 75 bp, synthetic construct
  source 1..75: mol_type = other DNA
gtttctcaagacaccatttaaaacaccaagcggtagagtagtaccaacacttgcatgttttgtagactctggtaa

SEQ ID NO: 412889 - DNA, 75 bp, synthetic construct
  source 1..75: mol_type = other DNA
tcaaaaatgttattagctcatcgaataaagtttttgttcgaaactctggtagtgcttcgtatatcaagactacta

SEQ ID NO: 412890 - DNA, 75 bp, synthetic construct
  source 1..75: mol_type = other DNA
gctgcgcgctggccagagcacatcaaaaagcacaaacaatgggagttgaaggtacgccttgctagtagatgggta

SEQ ID NO: 412891 - DNA, 75 bp, synthetic construct
  source 1..75: mol_type = other DNA
tgaatatgaaactgcaattaacatcatcaatgaacatgttacaaaagaaaatatccacaacacggtccagtcact

SEQ ID NO: 412892 - DNA, 75 bp, synthetic construct
  source 1..75: mol_type = other DNA
atatccacaacacggaccagacactgacagaaaaagacatttcaaaaacaaacgactctgataaacatcataaga

SEQ ID NO: 412893 - DNA, 75 bp, synthetic construct
  source 1..75: mol_type = other DNA
cgcaggtgaagtcggcggatttaccgactgggcggatatttttgctatttccaaaaaattactcgatgtggttag

SEQ ID NO: 412894 - DNA, 75 bp, synthetic construct
  source 1..75: mol_type = other DNA
aaaaaagcgctgaccaaatatgatttcaaagttgaaatggaacataccgccgcaggtgaagtcggcggatttacc

SEQ ID NO: 412895 - DNA, 75 bp, synthetic construct
  source 1..75: mol_type = other DNA
gccacactcgcagtggcgcacacattattcggcaaacaggtacatgctgttatggcagacacggataatgagcat

SEQ ID NO: 412896 - DNA, 75 bp, synthetic construct
  source 1..75: mol_type = other DNA
aataagcgattcatagcagcagccaatccggctaccgtgctggcactgctggatgaacgggaagcagcaaaaaag

SEQ ID NO: 412897 - DNA, 75 bp, synthetic construct
  source 1..75: mol_type = other DNA
ttcccgccggtgctggtgcagatgctcgaccggctggaaagtgaaatccaggctgaccgggtgagtgaggaaagc

SEQ ID NO: 412898 - DNA, 75 bp, synthetic construct
  source 1..75: mol_type = other DNA
ccacacgcggatacagcatggcgagccactggtcgagagccgctacctctacgacccgctgggacggcgaatggc

SEQ ID NO: 412899 - DNA, 75 bp, synthetic construct
  source 1..75: mol_type = other DNA
ctgataacgtcgatttagataacgcggttgctaacgttgttcccactcgtggggcgatcgtgcgagcagagttta

SEQ ID NO: 412900 - DNA, 75 bp, synthetic construct
  source 1..75: mol_type = other DNA
tcgcgcacctatttggccaattggttggcgaggaagtatttctcatacagaaacattggctattgctgttcttac

SEQ ID NO: 412901 - DNA, 75 bp, synthetic construct
  source 1..75: mol_type = other DNA
tgagatgtataaaccaacagtgcgcatcgtggaagttaatgtgccacgcgccgcaggtattcgcatcaaaggaga

SEQ ID NO: 412902 - DNA, 75 bp, synthetic construct
  source 1..75: mol_type = other DNA
tcataaagaaacctataagctttcaatttcttaaggatttcttgatattaaattacggtgatgtgttgttgctta

SEQ ID NO: 412903 - DNA, 75 bp, synthetic construct
  source 1..75: mol_type = other DNA
ctatcttttcagacaacactttaatataacaccacgacaattcaccatgaaatgctcgtccggaaaaacagattc

SEQ ID NO: 412904 - DNA, 75 bp, synthetic construct
  source 1..75: mol_type = other DNA
ttgccagacatagcgaaacaattaagactgccatatcctattgaccaggccagtagtgcgcctaatgttttcaaa

SEQ ID NO: 412905 - DNA, 75 bp, synthetic construct
  source 1..75: mol_type = other DNA
acgaacaggggctggcaaaccgcgtcacgccggacagcctgccgccggtggagtggctgacctacggcagcggtt

SEQ ID NO: 412906 - DNA, 75 bp, synthetic construct
  source 1..75: mol_type = other DNA
gtgaatttattgaatggctcagacatggactggattcgggagagatcccggtgaatcagcctgatgccagagttc

SEQ ID NO: 412907 - DNA, 75 bp, synthetic construct
  source 1..75: mol_type = other DNA
tgacaaacatgatctcatatcagggacttgttcgcaccttccataaatatatcgaattcgaacttaatgatagtg

SEQ ID NO: 412908 - DNA, 75 bp, synthetic construct
  source 1..75: mol_type = other DNA
tcgtcaaagagtaccatcgcctacttgactctcgacatgcatttgctcatgcaaggcaagcgagcattaccattc

SEQ ID NO: 412909 - DNA, 75 bp, synthetic construct
  source 1..75: mol_type = other DNA
cgaagcttttccagatgtggtcgcccagcaggactttttctccagagtctgggaagaagaaggtatgcgtgtacc

SEQ ID NO: 412910 - DNA, 75 bp, synthetic construct
  source 1..75: mol_type = other DNA
tgaagcttttccagatgtggtcgcccaacaagattttttctccagagtctgggaagaagaaggtatgcgtgtacc

SEQ ID NO: 412911 - DNA, 75 bp, synthetic construct
  source 1..75: mol_type = other DNA
ttatattttgaaagttgatttctgcgacttttttaatagcataaacccttgcgaccttgagttatgtttaaaaaa

SEQ ID NO: 412912 - DNA, 75 bp, synthetic construct
  source 1..75: mol_type = other DNA
cctggagaatcagcctaatatctgcagtcgaaagtttccttctatcccattgggatgaatccgaagatggtttat

SEQ ID NO: 412913 - DNA, 75 bp, synthetic construct
  source 1..75: mol_type = other DNA
tggagcgcatcaaggttcgtgatttccacaatcttattggtagagcgggtcgagccggaatgcataccgaaggca

SEQ ID NO: 412914 - DNA, 75 bp, synthetic construct
  source 1..75: mol_type = other DNA
caaatctagatggagccgggctggaatttttattgctgtggttgcttgaaggagattcaagcattcattttgaga

SEQ ID NO: 412915 - DNA, 75 bp, synthetic construct
  source 1..75: mol_type = other DNA
atatatgtaataaggactttgctgcctgttttgttcttttttgctctgagtggtaccgcagggattatgaacggc

SEQ ID NO: 412916 - DNA, 75 bp, synthetic construct
  source 1..75: mol_type = other DNA
atgaaattagctttgatcggtactggcaacatgccgctgatgcagtggattctggacggtaaaggcgatgatgcg

SEQ ID NO: 412917 - DNA, 75 bp, synthetic construct
  source 1..75: mol_type = other DNA
tggaagatgtaggtcgtgaaattggcctcacccgtgaacgtgttcgccagattcaggttgaaggcctgcgccgtt

SEQ ID NO: 412918 - DNA, 75 bp, synthetic construct
  source 1..75: mol_type = other DNA
ttaaagtttatgcaaaggattgttattgctgaactagagaaagtacttaaggttcatgaaaacgcatatgcttat

SEQ ID NO: 412919 - DNA, 75 bp, synthetic construct
  source 1..75: mol_type = other DNA
catcaactgaatatcttgctgtgggtgtcggtatcccggcatgttcctgtttagatgctcctggctcatataaag

SEQ ID NO: 412920 - DNA, 75 bp, synthetic construct
  source 1..75: mol_type = other DNA
cgagaaggttcactccacaaaatatcatttcactattatctttaacccgccgccactctttagcttctacagact

SEQ ID NO: 412921 - DNA, 75 bp, synthetic construct
  source 1..75: mol_type = other DNA
tgacggtggcgcagatgcaaagccagatggacccggtatacacgccggcgagaaaaattcacctgtaccactgcg

SEQ ID NO: 412922 - DNA, 75 bp, synthetic construct
  source 1..75: mol_type = other DNA
gatatatttaaaagtgaaagtgaaagagaaattgcgatcaatattctacgagagcttgtcacaagtgcatacaag

SEQ ID NO: 412923 - DNA, 75 bp, synthetic construct
  source 1..75: mol_type = other DNA
agatcactgcaactgacggcatgaccactcattacggtcaaattactcatctacaaggtcgacgtatattccctg

SEQ ID NO: 412924 - DNA, 75 bp, synthetic construct
  source 1..75: mol_type = other DNA
agcggttgttcatgcagactggtgtttcatggtcagatccgtcacgcgcacagtatttttctgtgcagttttctg

SEQ ID NO: 412925 - DNA, 75 bp, synthetic construct
  source 1..75: mol_type = other DNA
cagacagtaacagcccgttgcctgcagagctgataatccggcatgcagaaagccgcccggcttccggcggactgg

SEQ ID NO: 412926 - DNA, 75 bp, synthetic construct
  source 1..75: mol_type = other DNA
aaaaggctgtactgaatgccagtcagcagggcgaggatgttctgataacggtgccggacgcacaaaaacaggttg

SEQ ID NO: 412927 - DNA, 75 bp, synthetic construct
  source 1..75: mol_type = other DNA
atattctgggtttcctggctgtaagaaatgcgaatggcatgacggggatggcgcatgctatgtcttatggtcatg

SEQ ID NO: 412928 - DNA, 75 bp, synthetic construct
  source 1..75: mol_type = other DNA
tacggcctcacaaggcacaaatagcacgcagatcgcaaatacagcctttgttaaggcagctataacggcacttat

SEQ ID NO: 412929 - DNA, 75 bp, synthetic construct
  source 1..75: mol_type = other DNA
cacatttgacctgccggatgagccaacaggcaatgccgcgccttcatggctgactgagccgacgccacagattaa

SEQ ID NO: 412930 - DNA, 75 bp, synthetic construct
  source 1..75: mol_type = other DNA
gattaatgcgatgtcggagttgaatgttacggacaagatggaattcagtggcacagcggaaatcacactgaaata

SEQ ID NO: 412931 - DNA, 75 bp, synthetic construct
  source 1..75: mol_type = other DNA
cagcaaaaaaaactagatttaaaatattaaataaactggcatcaaatattgatctggatgaaaacgaaataactt

SEQ ID NO: 412932 - DNA, 75 bp, synthetic construct
  source 1..75: mol_type = other DNA
aagcaagtaaaacatctggtcgtggtttatcttttcaacgtactcgagctgtgcaacgtcttttgaggcttataa

SEQ ID NO: 412933 - DNA, 75 bp, synthetic construct
  source 1..75: mol_type = other DNA
agtgcgcgccagacttcaatggcgggatcaccggggcgctggcggggaacgccgataccgcgacgaattaaaaac

SEQ ID NO: 412934 - DNA, 75 bp, synthetic construct
  source 1..75: mol_type = other DNA
cagcgtggtgaaggtgacccgtacaccgacagacccggtgctgtaccggagtggtgccgccactcttcctgagag

SEQ ID NO: 412935 - DNA, 75 bp, synthetic construct
  source 1..75: mol_type = other DNA
gtacgcttgattccatccctttatccatgcaacgacagtttcctgatttaacaccgcgccatcttgaccgatctg

SEQ ID NO: 412936 - DNA, 75 bp, synthetic construct
  source 1..75: mol_type = other DNA
gggttctgtatttttgccctcagtaagctggcaatggcgttatccagtacgcttgattccatccctttatccatg

SEQ ID NO: 412937 - DNA, 75 bp, synthetic construct
  source 1..75: mol_type = other DNA
caacaacaggggcaggtactgtcagtactgaatgcaaccggtgtggtttgcacatcgtaccgacaaaaccgggcg

SEQ ID NO: 412938 - DNA, 75 bp, synthetic construct
  source 1..75: mol_type = other DNA
cgtatcgcccgtgacgcgcactatctttaccggtatgaccgttacggcaggctgacggagaaaaccgacctcatc

SEQ ID NO: 412939 - DNA, 75 bp, synthetic construct
  source 1..75: mol_type = other DNA
atgtctgcattgactccgtgggaccccttccgggaactggatgaattgcaaaaccgcctggcgacgatgttcgga

SEQ ID NO: 412940 - DNA, 75 bp, synthetic construct
  source 1..75: mol_type = other DNA
atggctgtgccaaaacatcttcgcttttttacgctgtttgtggatggtgaaaacgaagtgggtaaggtgacgtcc

SEQ ID NO: 412941 - DNA, 75 bp, synthetic construct
  source 1..75: mol_type = other DNA
tctttctgtaagaaaattttgtatacattgacatctagggatggcgtaattaaaggcgcggctttagatttttta

SEQ ID NO: 412942 - DNA, 75 bp, synthetic construct
  source 1..75: mol_type = other DNA
catgattactccgccacgcaacagtgccccgcgtgataccacagtgacaatccctgcaccggcggtaacagaacc

SEQ ID NO: 412943 - DNA, 75 bp, synthetic construct
  source 1..75: mol_type = other DNA
atatcacggtgaagcaggcactgccggataacggggaagcccgcatcaccctgaagacggccctgatggttgacg

SEQ ID NO: 412944 - DNA, 75 bp, synthetic construct
  source 1..75: mol_type = other DNA
gcctttttccgcgcctgccggtttgcccgggaagcgtcggaatttttactgcagccactgaaccgacaaccggaa

SEQ ID NO: 412945 - DNA, 75 bp, synthetic construct
  source 1..75: mol_type = other DNA
ttatagttgttggatatgcaattttccccagagtaagctatttatttaaaaaaaatcccttagaagctaatgttt

SEQ ID NO: 412946 - DNA, 75 bp, synthetic construct
  source 1..75: mol_type = other DNA
atctagtgttgatgcaagcggttaattatattgctcctcttgttttagtaccatatttaacgcgaatccttggag

SEQ ID NO: 412947 - DNA, 75 bp, synthetic construct
  source 1..75: mol_type = other DNA
aattagaaagttagagcataatattatttttgaaattattggtgactatgtaggtgagacaagagtagtagcaat

SEQ ID NO: 412948 - DNA, 75 bp, synthetic construct
  source 1..75: mol_type = other DNA
ggcgcaaggtgctggtgggggccatgattttggccaaggtgaacagcagcgagtggccggaggatcggctcatgg

SEQ ID NO: 412949 - DNA, 75 bp, synthetic construct
  source 1..75: mol_type = other DNA
cagttcggcgggtttaagaccgcgactgtgcctgtgtggttggctggcatccttgatggtgcataccaatatcgc

SEQ ID NO: 412950 - DNA, 75 bp, synthetic construct
  source 1..75: mol_type = other DNA
cagatgaaattattgagttgcatgaacgaatattgaatagtctgttcaacaaggcaaaaaaacacaggctgaacg

SEQ ID NO: 412951 - DNA, 75 bp, synthetic construct
  source 1..75: mol_type = other DNA
cgacggttgcccagaacccggcagatattggcgcaacgggtctgaagctgatggttgacgctgagaaatccggca

SEQ ID NO: 412952 - DNA, 75 bp, synthetic construct
  source 1..75: mol_type = other DNA
cgggcgctgccggacaagtcaggaacttaagaggtggagactccattcttgctgatggcacaacaatattaaccg

SEQ ID NO: 412953 - DNA, 75 bp, synthetic construct
  source 1..75: mol_type = other DNA
cccaactgaaaataatatctataatagaccgcttacgtgtcttgtcgaggtcaatagaaattggggcgatattcc

SEQ ID NO: 412954 - DNA, 75 bp, synthetic construct
  source 1..75: mol_type = other DNA
ttgggtgaggttcgtggttatcgcgcaagcgacccgaaccgccagacaaccattgcgttccagctgtgtccggat

SEQ ID NO: 412955 - DNA, 75 bp, synthetic construct
  source 1..75: mol_type = other DNA
cagcagttgatggtggcgctctttcgcttttaaatgatttgctggaatatgcgaatgatgatattgataatgaat

SEQ ID NO: 412956 - DNA, 75 bp, synthetic construct
  source 1..75: mol_type = other DNA
tattcatcatccttgcattgataacatatttggctagagattctaatttcataaaagctaatcactttattccag

SEQ ID NO: 412957 - DNA, 75 bp, synthetic construct
  source 1..75: mol_type = other DNA
atatcaaaagtaataatgcaaataactggtatctgaccattatcgatgaccacggcaactatattagtgacaaaa

SEQ ID NO: 412958 - DNA, 75 bp, synthetic construct
  source 1..75: mol_type = other DNA
gctttactgtttttatcttctcctttagtggtgcaacatttgcggccccaaaaggtatctgcacctcagataatg

SEQ ID NO: 412959 - DNA, 75 bp, synthetic construct
  source 1..75: mol_type = other DNA
atggatgtttattgcaattccccttaactactggctgataggtatcggctggtacggcatgtttgtggtgtttat

SEQ ID NO: 412960 - DNA, 75 bp, synthetic construct
  source 1..75: mol_type = other DNA
aacgaaacctacactaccgaatctcatacttgggataacaatatctctgtaaaagattccacagtgacttcgggt

SEQ ID NO: 412961 - DNA, 75 bp, synthetic construct
  source 1..75: mol_type = other DNA
ggggcaaagaaggggtgcaaattttgccgttccagcagatcaccgcaaaggatgagttcatgaatgttaaggcgg

SEQ ID NO: 412962 - DNA, 75 bp, synthetic construct
  source 1..75: mol_type = other DNA
cagtaacccgtccccgaccgaattcatcctgccgctggcgctattctcaccacccggttcgcgcctgctgcaaca

SEQ ID NO: 412963 - DNA, 75 bp, synthetic construct
  source 1..75: mol_type = other DNA
gcgtcgcgagcgaacaaaagacgacgattggcatgctgaaaaatcagctcagtgttgccggtcagcttgccagac

SEQ ID NO: 412964 - DNA, 75 bp, synthetic construct
  source 1..75: mol_type = other DNA
tacaggtcgttccatcgttgataccttgacagtagactggccccctgaatctccagacaaccaatatcacttaaa

SEQ ID NO: 412965 - DNA, 75 bp, synthetic construct
  source 1..75: mol_type = other DNA
acgtgttgttgatgacaaggtcttccagagcggtgtatttaacgtagcgttgaataacggttctgaatgggatac

SEQ ID NO: 412966 - DNA, 75 bp, synthetic construct
  source 1..75: mol_type = other DNA
atgaccgatgaaatcgaccgcatcagtgaagtggttctgaacgagcgtcagtgcgtcgttaaagcctggcagacg

SEQ ID NO: 412967 - DNA, 75 bp, synthetic construct
  source 1..75: mol_type = other DNA
tgaaatggggcatgcaaagggaatgaaagacgatggaactgactcgatggctaatgttgataaatatgaaaaccc

SEQ ID NO: 412968 - DNA, 75 bp, synthetic construct
  source 1..75: mol_type = other DNA
tctaattgcaaaaaaagaagaaaaaataatttcttcaatcatattagaaaattcagataaagctaaaaaaataaa

SEQ ID NO: 412969 - DNA, 75 bp, synthetic construct
  source 1..75: mol_type = other DNA
cgcccggttcacgcctgctgcagcagttgattgattacgatctgctggtccgccgaaccctactcgcctggcacc

SEQ ID NO: 412970 - DNA, 75 bp, synthetic construct
  source 1..75: mol_type = other DNA
acgtattaccactgtcagcaacagcgacatcatccggataaacgcagtgcccgtgcgcagcgcgataactggctg

SEQ ID NO: 412971 - DNA, 75 bp, synthetic construct
  source 1..75: mol_type = other DNA
agcagccgggagcggatgcagtccggtgcggaaatggcgcaggcggaaatccgcatctgggtacgcggtcagtct

SEQ ID NO: 412972 - DNA, 75 bp, synthetic construct
  source 1..75: mol_type = other DNA
taataaaatttaattcatgttttattgatcattgcttagtgcaaactgagtggatgagaaaagctgttattgata

SEQ ID NO: 412973 - DNA, 75 bp, synthetic construct
  source 1..75: mol_type = other DNA
agctcgcgctgtttaaagagatgcagggcgtgaaaagcaataaaggactgaatgagcaggacaagctggcaaaaa

SEQ ID NO: 412974 - DNA, 75 bp, synthetic construct
  source 1..75: mol_type = other DNA
ttgaccaggtttttgttcgagatattcacaaacaacctgtctcgcagtcactggttcgggcaatcgtcgctgtgg

SEQ ID NO: 412975 - DNA, 75 bp, synthetic construct
  source 1..75: mol_type = other DNA
tgaactggcactgtctgttattcaacaatttagccaactaggtgcgcaagtgcatctggatgattttggtaccgc

SEQ ID NO: 412976 - DNA, 75 bp, synthetic construct
  source 1..75: mol_type = other DNA
ggctaacagctttgctaatgctgaaacagaaggggagctaatccaacgtgcaaggcttggtggagttgattacaa

SEQ ID NO: 412977 - DNA, 75 bp, synthetic construct
  source 1..75: mol_type = other DNA
cgctggcgtcactcaagctgccgaaaccggaaaaagggccggaaaccattaacaaggttaccgagcataagatgt

SEQ ID NO: 412978 - DNA, 75 bp, synthetic construct
  source 1..75: mol_type = other DNA
atgaatgatttctacggtcgtaatgatgaagacggtaagcaccggatgtttacctataaaaacttgacgggccac

SEQ ID NO: 412979 - DNA, 75 bp, synthetic construct
  source 1..75: mol_type = other DNA
gcgtgaaaacctcgtgcggttcgttgtttgcacctccacactggcgcagggcgtaaatctcccaattcggtacct

SEQ ID NO: 412980 - DNA, 75 bp, synthetic construct
  source 1..75: mol_type = other DNA
gtcttttgggtgttactcgatcaaaagcaaagatgatcgagtaccatgtacctgaagaatatcaggagatagatt

SEQ ID NO: 412981 - DNA, 75 bp, synthetic construct
  source 1..75: mol_type = other DNA
tgctcaatctattgagaaatgggtccaatccaacactgacagccttctttctattgttgatgaaaaagaaatact

SEQ ID NO: 412982 - DNA, 75 bp, synthetic construct
  source 1..75: mol_type = other DNA
gaaagaaaaaaatcaccacaggcccgattattgccactccgccagtacagcgtctggaacccggctcaaagagta

SEQ ID NO: 412983 - DNA, 75 bp, synthetic construct
  source 1..75: mol_type = other DNA
tgcgtgactgcctcgcgtttggcgagccgggtaatgactccaacttattgatagtgttttatgttcagataatgc

SEQ ID NO: 412984 - DNA, 75 bp, synthetic construct
  source 1..75: mol_type = other DNA
acccttgcatcaaaaccgggttccacaatctcaagtatcccatcagaaagacggatattgattaacattaaccac

SEQ ID NO: 412985 - DNA, 75 bp, synthetic construct
  source 1..75: mol_type = other DNA
gggctgacgctcggtatcgatagccgtttctcccgtgaagaaaccagcacaattcgcggcttgttctttggttac

SEQ ID NO: 412986 - DNA, 75 bp, synthetic construct
  source 1..75: mol_type = other DNA
ctcctgctcgttatatgcgttcctatgcacctgcacagcaaagtgttgcggcagggagcgaatggaccaggatgc

SEQ ID NO: 412987 - DNA, 75 bp, synthetic construct
  source 1..75: mol_type = other DNA
tgggcgaactggcctatatggtgccggtgaaagaactgacgggaacggtcactttccgccatttgctgcgcttct

SEQ ID NO: 412988 - DNA, 75 bp, synthetic construct
  source 1..75: mol_type = other DNA
atgcgaggaaaatagacgacatttttggtgataatgtcccaaatatgtcccactctggaattatggaggatataa

SEQ ID NO: 412989 - DNA, 75 bp, synthetic construct
  source 1..75: mol_type = other DNA
cttgcggatgatgagattcgggcgcgtatacagtcggcgacgacgcctgatgagttgctctcggcgctggatgac

SEQ ID NO: 412990 - DNA, 75 bp, synthetic construct
  source 1..75: mol_type = other DNA
ttgtactcatacgcaagtctgaatatctaagcaggcagcaacttgctgatttaacaggaattccttacggaacct

SEQ ID NO: 412991 - DNA, 75 bp, synthetic construct
  source 1..75: mol_type = other DNA
tgcccataataaaaaacgtgttagagctatccacgcaaaaatcaaaaatcgccgtaaagatgcacaccataagtt

SEQ ID NO: 412992 - DNA, 75 bp, synthetic construct
  source 1..75: mol_type = other DNA
ggtcgagcgtccgcaacgcggggaagtcgtcagcagctccggggttctccccccactggacccaggcgaatacta

SEQ ID NO: 412993 - DNA, 75 bp, synthetic construct
  source 1..75: mol_type = other DNA
aggcgtgaaataaaggaagaactgggaaaagaactgcatatcactgacgtaaaaccctgggcctttcgtgatgat

SEQ ID NO: 412994 - DNA, 75 bp, synthetic construct
  source 1..75: mol_type = other DNA
gcgctggacagacctataacagttctctttggggagtcggccagtgggttcagtagtggcgaggaagacaacaaa

SEQ ID NO: 412995 - DNA, 75 bp, synthetic construct
  source 1..75: mol_type = other DNA
atcatgagaatatacttaaaataattaagtctattccatatgttggtgcaatttttatcattgccaacttttatg

SEQ ID NO: 412996 - DNA, 75 bp, synthetic construct
  source 1..75: mol_type = other DNA
cgccgaattcattgaaaccgtattaacgcacttgcaaaccgtgttaagtccagaagcccctgtggtcatgacctt

SEQ ID NO: 412997 - DNA, 75 bp, synthetic construct
  source 1..75: mol_type = other DNA
ggcaacttctttaagggcttggtaaacaaaaacaacattctggtattaacgggcgataaatcctctattgccagt

SEQ ID NO: 412998 - DNA, 75 bp, synthetic construct
  source 1..75: mol_type = other DNA
tttttatttaagcgagattcaaagtggatatttatagatgacgacatgtgggaaagtattaagtttaacaagaag

SEQ ID NO: 412999 - DNA, 75 bp, synthetic construct
  source 1..75: mol_type = other DNA
aaacgcattcgaacacatgaccgatgaagcgggccgcatcatgcgtgacgaagcggaaagccacgcatccgccct

SEQ ID NO: 413000 - DNA, 75 bp, synthetic construct
  source 1..75: mol_type = other DNA
tgttcttcaccctaatgatacccattctgtttataaagcctatgtcgatacagctgacacgtcgaatggcattat

SEQ ID NO: 413001 - DNA, 75 bp, synthetic construct
  source 1..75: mol_type = other DNA
atgaatatctttgaagagctatgggagacgttacgcaatctcttccagtcagataaacattcccagactgcggca

SEQ ID NO: 413002 - DNA, 75 bp, synthetic construct
  source 1..75: mol_type = other DNA
ttcaatccacatctgtcactaccagaaaacatctttatgatttttatgtcgcctataaccagtggttaaaaaatg

SEQ ID NO: 413003 - DNA, 75 bp, synthetic construct
  source 1..75: mol_type = other DNA
atttgttcaatattcaggattatgtgcaaatgcttgtcgttattttgacgaaatcggagtggataccgaagatat

SEQ ID NO: 413004 - DNA, 75 bp, synthetic construct
  source 1..75: mol_type = other DNA
ccgtcaggcgtgatccctgatatgcgtggctggacgattaagggcaaacctgccagtggtcgtgccgtattgtct

SEQ ID NO: 413005 - DNA, 75 bp, synthetic construct
  source 1..75: mol_type = other DNA
ccacatcgtcgtttgattacggcactaaatccacgaataacaccggggcgcatacgcacagtctgagcggctcta

SEQ ID NO: 413006 - DNA, 75 bp, synthetic construct
  source 1..75: mol_type = other DNA
gaagactgggcagaagtttatacctcgaaaaatcttccaccagaaagctacccagtcggcgcaccaatcccgtgg

SEQ ID NO: 413007 - DNA, 75 bp, synthetic construct
  source 1..75: mol_type = other DNA
ctgacccttggtggcttagtctctcaaatggacatcgacttatataacgacgcaacctttgaccccgatgccagc

SEQ ID NO: 413008 - DNA, 75 bp, synthetic construct
  source 1..75: mol_type = other DNA
atatgccagcaagaataagagtctaacgaaagatgctcggcgagcagagggtagtgaacttgcgctattgataaa

SEQ ID NO: 413009 - DNA, 75 bp, synthetic construct
  source 1..75: mol_type = other DNA
tttggggacgaaaaccacatcgtcgtttgattacggcactaaatccacgaataacactggtgcgcatacccatag

SEQ ID NO: 413010 - DNA, 75 bp, synthetic construct
  source 1..75: mol_type = other DNA
gccccggatatttatctggcggatgacggcggcgtggcagtggatatgtcccgcgaggcatcactggaaatgcag

SEQ ID NO: 413011 - DNA, 75 bp, synthetic construct
  source 1..75: mol_type = other DNA
ggtgaggggggaagtgcaagtgctacgactataaatgatggttttcagttcatcagcagtggaggaaatgccaca

SEQ ID NO: 413012 - DNA, 75 bp, synthetic construct
  source 1..75: mol_type = other DNA
gcaggattttactattcggcatggtgtttctgctgttatctggttgtgataataatcaggaagaattaaaactgg

SEQ ID NO: 413013 - DNA, 75 bp, synthetic construct
  source 1..75: mol_type = other DNA
gcttcagaagcaattcggctggtgattgatgaacgtcattccattcgctgcagtacacttacagcaactattacg

SEQ ID NO: 413014 - DNA, 75 bp, synthetic construct
  source 1..75: mol_type = other DNA
tcctgcttccaaaagcggctcaacgcttccacttcgttggtggtgccaagtttgtgcacggcggagcgatgctac

SEQ ID NO: 413015 - DNA, 75 bp, synthetic construct
  source 1..75: mol_type = other DNA
tgagcacggtctcgggcgttaccgtgaatacctgagccggtattccgataaggagcttgtggcgttttttgagga

SEQ ID NO: 413016 - DNA, 75 bp, synthetic construct
  source 1..75: mol_type = other DNA
ttatagatgaagctactatggaatgtgagaaatcatattgttttaataagtcatatagggtttttcgcgctcaga

SEQ ID NO: 413017 - DNA, 75 bp, synthetic construct
  source 1..75: mol_type = other DNA
agttgttttagttaataaaccaacttttcgtatccttcataagctcagaactattgcccgaccatttaatgctgc

SEQ ID NO: 413018 - DNA, 75 bp, synthetic construct
  source 1..75: mol_type = other DNA
ggattcagcctattgtaataagccttatttctgggctgaaggctagatttagtttatgcgaccatgatattattt

SEQ ID NO: 413019 - DNA, 75 bp, synthetic construct
  source 1..75: mol_type = other DNA
tctgagccgggcggcgacagtaccacgccgtccccggtggagctggtttccatgttccagacaggcagcgtggcc

SEQ ID NO: 413020 - DNA, 75 bp, synthetic construct
  source 1..75: mol_type = other DNA
ggttccgcaggctttgtctacagtggggtacattgttatgagcgtagagaatcatgtaagtaccagaagtttgtg

SEQ ID NO: 413021 - DNA, 75 bp, synthetic construct
  source 1..75: mol_type = other DNA
cagaagctgaatggatatgtggtgatgctcttcagtactcaccagatcgattctatcgtgttgcctatggcaatc

SEQ ID NO: 413022 - DNA, 75 bp, synthetic construct
  source 1..75: mol_type = other DNA
agcgaacccgggcgctgatgttttttttgccgaagtctggctcgcaactcaccattccgcagcaactgattttgc

SEQ ID NO: 413023 - DNA, 75 bp, synthetic construct
  source 1..75: mol_type = other DNA
aggtctgttctaccgttcctcaagagatggctatggttttgaggaaggctgggcagaagtttatacctcgaaaaa

SEQ ID NO: 413024 - DNA, 75 bp, synthetic construct
  source 1..75: mol_type = other DNA
tactcctgctcacgccgctgcttttttcgctgctctgttttgcctgccggaaacgggggctctctgcgacttgta

SEQ ID NO: 413025 - DNA, 75 bp, synthetic construct
  source 1..75: mol_type = other DNA
aagagcgcctgcacattacgcttgattccatcggtgaagccgtggtctgtattgatatggcgatgaaaattacct

SEQ ID NO: 413026 - DNA, 75 bp, synthetic construct
  source 1..75: mol_type = other DNA
cagcggagcgtgctgccctgccgggtgaaatcctggcagccattgaaggcgtggcgatgtatacccgccacggtg

SEQ ID NO: 413027 - DNA, 75 bp, synthetic construct
  source 1..75: mol_type = other DNA
tttagaatatattctcatgcttgttaatattcgtataatgcatttaaacaacgttcaataccaagagcaaatgct

SEQ ID NO: 413028 - DNA, 75 bp, synthetic construct
  source 1..75: mol_type = other DNA
cgatggataaccgaaatgttgttgatacatacaaaataggtattgataaagcaattgaagcggtaatgactccaa

SEQ ID NO: 413029 - DNA, 75 bp, synthetic construct
  source 1..75: mol_type = other DNA
atgcaggagaaatattcgctgcgggactgtggcttcatattgatggtctggcggtttgttcctcgccattcttgg

SEQ ID NO: 413030 - DNA, 75 bp, synthetic construct
  source 1..75: mol_type = other DNA
catcctacaaaaagtaggtggtatggcagtgagttctaaggaactgatgagctggagtaaccaggaggggcgtga

SEQ ID NO: 413031 - DNA, 75 bp, synthetic construct
  source 1..75: mol_type = other DNA
gcaataataaaattaccattccggcgctgacattgggggcacttaatcaattacgattcaattttgagtacgtta

SEQ ID NO: 413032 - DNA, 75 bp, synthetic construct
  source 1..75: mol_type = other DNA
tctatttatgagaaagtgccatcccgccagttaaagttcccatttacgcaaatagcagcagtgccaggtaatatt

SEQ ID NO: 413033 - DNA, 75 bp, synthetic construct
  source 1..75: mol_type = other DNA
atgggatatggcgcttggctggattatctggtgtcaccgcgccgccatgcttcaggctggaaactttcgggaaaa

SEQ ID NO: 413034 - DNA, 75 bp, synthetic construct
  source 1..75: mol_type = other DNA
tacaaaccagaaatgttaaatggttcttttgttcatatcgacaactgggatagtgtatatatattaacggctttg

SEQ ID NO: 413035 - DNA, 75 bp, synthetic construct
  source 1..75: mol_type = other DNA
accaacctgaaaacaggtgagggtcttgtcattcttggtgaaccgccccggttttcctggagagtgttttatctg

SEQ ID NO: 413036 - DNA, 75 bp, synthetic construct
  source 1..75: mol_type = other DNA
ttggtcagttaggctcgaccttcaaagatgggaagggcggggtcagtacctggattaaacacacgatgggacccg

SEQ ID NO: 413037 - DNA, 75 bp, synthetic construct
  source 1..75: mol_type = other DNA
aaaatgatagacatgtatcatgcattttatgccagtaataaaaaccaaattgagacgctaaagaatcctgaaatc

SEQ ID NO: 413038 - DNA, 75 bp, synthetic construct
  source 1..75: mol_type = other DNA
atctgtttttatcagctccaacgaaaaaatgatagacatgtatcatgcattttatgccagtaataaaaaccaaat

SEQ ID NO: 413039 - DNA, 75 bp, synthetic construct
  source 1..75: mol_type = other DNA
tctgaacgacgtaattttctcggaacattattcagtgaaggtggtttacctttccggctactcaaagaatcagac

SEQ ID NO: 413040 - DNA, 75 bp, synthetic construct
  source 1..75: mol_type = other DNA
gaaagcgaagaactatcagcgttataacgaacggataaaaggaaaacgtcaggaatgggggatactatgcaacaa

SEQ ID NO: 413041 - DNA, 75 bp, synthetic construct
  source 1..75: mol_type = other DNA
cgcgattggttgctagacgtgcgtttgtatagcgagcagttttttgctgatcacagctcaatgctgcttaatgag

SEQ ID NO: 413042 - DNA, 75 bp, synthetic construct
  source 1..75: mol_type = other DNA
gcaccaatcccgtggccatcagataccgttccgtctggttatgccctgatgcaggggcagacttttgacaaatct

SEQ ID NO: 413043 - DNA, 75 bp, synthetic construct
  source 1..75: mol_type = other DNA
gctgggagtaacaacatgcttgaggctagggttgcacggttagaggcagatgttgaaaacattaagaccaatcta

SEQ ID NO: 413044 - DNA, 75 bp, synthetic construct
  source 1..75: mol_type = other DNA
ctggtggcgatcctgattatgctaccgactctcggcatcggtgatatgaacaatctctataaatggctgttgaat

SEQ ID NO: 413045 - DNA, 75 bp, synthetic construct
  source 1..75: mol_type = other DNA
cgtcggaatttggtgttttgcctttaccgcttttgcctgcctgactggtattttcccgaaaatggaagccttcac

SEQ ID NO: 413046 - DNA, 75 bp, synthetic construct
  source 1..75: mol_type = other DNA
cttgataaggttcaccctacctggcgaagcgagtttccaataccgttagatgatgaaacaggtgaggtgtactgg

SEQ ID NO: 413047 - DNA, 75 bp, synthetic construct
  source 1..75: mol_type = other DNA
cgatatgggaaagtgcagttacattcagtaccaaaagaatcttatgagggtgataactctgggcaattaacacct

SEQ ID NO: 413048 - DNA, 75 bp, synthetic construct
  source 1..75: mol_type = other DNA
cgttacgctattgtcacaggtagggcaaaatataacccagcacctgaccttgctgacgccatgaagggataccgc

SEQ ID NO: 413049 - DNA, 75 bp, synthetic construct
  source 1..75: mol_type = other DNA
ttgagtatattttgagcgaacgtcttgggcagcaaggtttttccatccctgataaagatagttttattaagtatt

SEQ ID NO: 413050 - DNA, 75 bp, synthetic construct
  source 1..75: mol_type = other DNA
cggtctggcaaatatttccggcattattggtccattggtaaccggttttattgtccagttcagtggtaaatatga

SEQ ID NO: 413051 - DNA, 75 bp, synthetic construct
  source 1..75: mol_type = other DNA
ttatctgaacataaaacactatcaataagttggagtcattaccatctaactggacctatttattgggctgttatt

SEQ ID NO: 413052 - DNA, 75 bp, synthetic construct
  source 1..75: mol_type = other DNA
ctacgccgaggttgagactaacagcgaggattttccggcacagttggcacttgccaaagcacgagcggcaacgct

SEQ ID NO: 413053 - DNA, 75 bp, synthetic construct
  source 1..75: mol_type = other DNA
tttcattctgaccatgatgattgagaccgccgatccccgactgaaaaaggacggtctgaacatcacccaggtgat

SEQ ID NO: 413054 - DNA, 75 bp, synthetic construct
  source 1..75: mol_type = other DNA
gcagacctggagaatctgacgctgctaatcgccctgacctgcgcgattaccgcgccgctggcgctgactgctgat

SEQ ID NO: 413055 - DNA, 75 bp, synthetic construct
  source 1..75: mol_type = other DNA
ggtaaagcatttatgcttagaggcggaactctaaatatcaatattcctgggcgtagcgctcttcttttagggaaa

SEQ ID NO: 413056 - DNA, 75 bp, synthetic construct
  source 1..75: mol_type = other DNA
ggcaactgcccgcattatgggcgttggcctcaacacgattttacgtcacttaaaaaatgtcagcgccagtgatat

SEQ ID NO: 413057 - DNA, 75 bp, synthetic construct
  source 1..75: mol_type = other DNA
gctgacggaacagggcatgtcgcagctgctgaccgataaccgccatgattttctgctgcgtctggcccataccct

SEQ ID NO: 413058 - DNA, 75 bp, synthetic construct
  source 1..75: mol_type = other DNA
cacagcatcattgatgaacaccacaaattatggaagatccagagattaatacgtcttgtgattctattaatcatt

SEQ ID NO: 413059 - DNA, 75 bp, synthetic construct
  source 1..75: mol_type = other DNA
gcgtctgaaagagctggaacgtgaaaaccgtgaactgcgccgcagtaacgatatccttcgccaggcttccgctta

SEQ ID NO: 413060 - DNA, 75 bp, synthetic construct
  source 1..75: mol_type = other DNA
ggtttgcttgcctgtggctcgctacgtcgtgcgttcaggcggcgagcacagataataaggcgctggagataattc

SEQ ID NO: 413061 - DNA, 75 bp, synthetic construct
  source 1..75: mol_type = other DNA
gaagatatcgccgctgcccatctgctgggtaaaaccgaagccgagttcctgaaaatgaaagaggaaatgcaataa

SEQ ID NO: 413062 - DNA, 75 bp, synthetic construct
  source 1..75: mol_type = other DNA
ggtgacgaatttacgccggagctgggcacggcggcgctgtctgccctcacagggatcaaaacccgcgcggatgca

SEQ ID NO: 413063 - DNA, 75 bp, synthetic construct
  source 1..75: mol_type = other DNA
caatcagccggtgaaaattgactacaaccaccagaccctgattaaggggcatccggcaccggctgccggttttgt

SEQ ID NO: 413064 - DNA, 75 bp, synthetic construct
  source 1..75: mol_type = other DNA
atggaacatttggctgtattaggcgtagtgattgatacagaaatgaataatcgatctaactcttttggagagcga

SEQ ID NO: 413065 - DNA, 75 bp, synthetic construct
  source 1..75: mol_type = other DNA
cacgtaatcacgttattcgggggctttatctgctggatattgcccttcaggcaagtccttttctcgccagcatat

SEQ ID NO: 413066 - DNA, 75 bp, synthetic construct
  source 1..75: mol_type = other DNA
agcacgtatcccacaaccaacagattctatgcctgttgttatcaactatgctgattcggtaatgttggattccag

SEQ ID NO: 413067 - DNA, 75 bp, synthetic construct
  source 1..75: mol_type = other DNA
ctgggtattgggagtgctgcttttatccaatatcggcaatatgtttcgtatgttcaccccgtggcaatatacatt

SEQ ID NO: 413068 - DNA, 75 bp, synthetic construct
  source 1..75: mol_type = other DNA
cctcgatccagccagcgagaacatccaggcggaactagccattgccaaggcgaaagcggcaacgctactcggcat

SEQ ID NO: 413069 - DNA, 75 bp, synthetic construct
  source 1..75: mol_type = other DNA
agcagtgttacaagctggcgctggtgcgtaaatcggcggatatcacctggccgaaggttatctattacgttgaaa

SEQ ID NO: 413070 - DNA, 75 bp, synthetic construct
  source 1..75: mol_type = other DNA
atgccgtgctggtcagtgctgaaagtctggatgatagaacaccctgagctacgtcgtactatcgaggcgctccgc

SEQ ID NO: 413071 - DNA, 75 bp, synthetic construct
  source 1..75: mol_type = other DNA
aaccatcagtgtttatcttgaagacacccccagggctgtggggatcattgcattaatggagccagatacggcaga

SEQ ID NO: 413072 - DNA, 75 bp, synthetic construct
  source 1..75: mol_type = other DNA
tggagccagatacggcagataaatatcgccaacaggcgatggagattatgttgtctgctaaaaatacagtgaagt

SEQ ID NO: 413073 - DNA, 75 bp, synthetic construct
  source 1..75: mol_type = other DNA
ctctcaggcgtcttactcggcttaccgttcgggcgacaggttagttcgatgtatgacgatttacacgccgggcgt

SEQ ID NO: 413074 - DNA, 75 bp, synthetic construct
  source 1..75: mol_type = other DNA
tttgacctgccggaggagccaacaggctatggcgcgccttcatggctgactgagccgacgccacagattaacggg

SEQ ID NO: 413075 - DNA, 75 bp, synthetic construct
  source 1..75: mol_type = other DNA
tttgacctgccggacgagccaacaggccatgtcgcgccttcatggctgactgagccgacgccacagattaacggg

SEQ ID NO: 413076 - DNA, 75 bp, synthetic construct
  source 1..75: mol_type = other DNA
tttgacctgccggacgagccaacaggctatgccgcgccttcatggctgactgagccgacgccacagattaacggg

SEQ ID NO: 413077 - DNA, 75 bp, synthetic construct
  source 1..75: mol_type = other DNA
tttataatgagaatgtgcttttaatttgtaatttatattatatacataattcatatgttcatggtcttttattta

SEQ ID NO: 413078 - DNA, 75 bp, synthetic construct
  source 1..75: mol_type = other DNA
atgaagcataaaaattttattccgaaatggtatgattcaactcttgagtcaattccccatcaagatgttaacacg

SEQ ID NO: 413079 - DNA, 75 bp, synthetic construct
  source 1..75: mol_type = other DNA
tttgacctgccggaggagccaacaggcgatgtcgcgccttcatggctgactgagccgacgccacagattaacggg

SEQ ID NO: 413080 - DNA, 75 bp, synthetic construct
  source 1..75: mol_type = other DNA
tttgacctgccggaagagccaacaggctatgacgcgccttcatggctgactgagccgacgccacagattaacggg

SEQ ID NO: 413081 - DNA, 75 bp, synthetic construct
  source 1..75: mol_type = other DNA
tttgacctgccggaagagccaacaggcaatgtcgcgccttcatggctgactgagccgacgccacagattaacggg

SEQ ID NO: 413082 - DNA, 75 bp, synthetic construct
  source 1..75: mol_type = other DNA
agaagtgaccgcattatccactgaggcggaatctgccatcactgtccgcctgttcagcgccttcgagatcctgag

SEQ ID NO: 413083 - DNA, 75 bp, synthetic construct
  source 1..75: mol_type = other DNA
tttgacctgccggatgagccaacaggcgatgacgcgccttcatggctgactgagccgacgccacagattaacggg

SEQ ID NO: 413084 - DNA, 75 bp, synthetic construct
  source 1..75: mol_type = other DNA
tttgacctgccggatgagccaacaggctatgtcgcgccttcatggctgactgagccgacgccacagattaacggg

SEQ ID NO: 413085 - DNA, 75 bp, synthetic construct
  source 1..75: mol_type = other DNA
tttgacctgccggatgagccaacaggcaatggcgcgccttcatggctgactgagccgacgccacagattaacggg

SEQ ID NO: 413086 - DNA, 75 bp, synthetic construct
  source 1..75: mol_type = other DNA
attgcgcgccagaatgaaaagcagtggcgtcagcacagccggaacatcagtgcagagctgcgcaacatggttgac

SEQ ID NO: 413087 - DNA, 75 bp, synthetic construct
  source 1..75: mol_type = other DNA
aagcatcctcggcacgattttgcaggaaaacggggtgaccgaatggagtccgctgttcagcgagccacatccttc

SEQ ID NO: 413088 - DNA, 75 bp, synthetic construct
  source 1..75: mol_type = other DNA
gtttgagttgggccatgtgcggtttcgcggaaatactggaatacctccaggcattgcccgcagaaaaatggcaaa

SEQ ID NO: 413089 - DNA, 75 bp, synthetic construct
  source 1..75: mol_type = other DNA
ctttcacaaccaacaccgtcaccacgccccgcgtcatcatcaacccacacagcacaacagcaccttcccggtgtg

SEQ ID NO: 413090 - DNA, 75 bp, synthetic construct
  source 1..75: mol_type = other DNA
cttcacccgggagggggacgcgttaacgttggttaaccacgtactgaccccaaccaccacccatcatctggcgaa

SEQ ID NO: 413091 - DNA, 75 bp, synthetic construct
  source 1..75: mol_type = other DNA
aagcatcctcggcacgattttgcaggaaaacggggtgaccgactggagaccgctgttcagcgagcctcatccttc

SEQ ID NO: 413092 - DNA, 75 bp, synthetic construct
  source 1..75: mol_type = other DNA
aagcatcctcggcacgattttgcaggaaaacggggtgaccgattggagaccgctgttcagcgagccccatccttc

SEQ ID NO: 413093 - DNA, 75 bp, synthetic construct
  source 1..75: mol_type = other DNA
gagaaggcaaaagcgaaagggctgacctcgacggtctgcttcccgacgggcaacatcgctccggaaggttcggtg

SEQ ID NO: 413094 - DNA, 75 bp, synthetic construct
  source 1..75: mol_type = other DNA
gtaccaactccgacccgatccacatctcaaccggtctgctgtattccggcatcgccgccaatggtgagtcgaagg

SEQ ID NO: 413095 - DNA, 75 bp, synthetic construct
  source 1..75: mol_type = other DNA
gtgctgcttgatgagccgggcgctggcactcctgaggagggcgtgggcatcttcgttaacgctgagggtgatgag

SEQ ID NO: 413096 - DNA, 75 bp, synthetic construct
  source 1..75: mol_type = other DNA
atggaattgttattcagaataccatatggcatagaaaaatcatgaaaaatccagctcattttgctgctcaggagc

SEQ ID NO: 413097 - DNA, 75 bp, synthetic construct
  source 1..75: mol_type = other DNA
tgtcagatgtggacttcaagcgcggcgtggtgaacgtgcgccagggcaaggggaagaaggatcgggtcgttccgg

SEQ ID NO: 413098 - DNA, 75 bp, synthetic construct
  source 1..75: mol_type = other DNA
ggtcattgcacgttatccggcatttgaagagtttacggcatggaagacgcgattgaacagattgtctcttatctg

SEQ ID NO: 413099 - DNA, 75 bp, synthetic construct
  source 1..75: mol_type = other DNA
gtctcatattgttctggtattcgccgagaaggctttgcccttaataataatattgctgccgaaaaagtattacac

SEQ ID NO: 413100 - DNA, 75 bp, synthetic construct
  source 1..75: mol_type = other DNA
gtaaattccattataccgtgttcaccatttatacctgagcaaaaaaatattaataaaataaaatttattagtgca

SEQ ID NO: 413101 - DNA, 75 bp, synthetic construct
  source 1..75: mol_type = other DNA
cacgccataaaacttgacaaattattttatcaggaaaacataggcaaaccatattttaagggagctattaataat

SEQ ID NO: 413102 - DNA, 75 bp, synthetic construct
  source 1..75: mol_type = other DNA
cgatgctgaattccccagacctgtcaggcttggagctgcatccgtgggctggccgtcaacggacgtagaagcgtg

SEQ ID NO: 413103 - DNA, 75 bp, synthetic construct
  source 1..75: mol_type = other DNA
agaacaaaaaaagataaggaaatgcatattggacaatcttatggttttaaatattcaaaaaataagattgacacg

SEQ ID NO: 413104 - DNA, 75 bp, synthetic construct
  source 1..75: mol_type = other DNA
tggacaaacgcacgctgacgttgggttatgcgattgtcattatcgacattctgctggcaccgtttacaccgtcca

SEQ ID NO: 413105 - DNA, 75 bp, synthetic construct
  source 1..75: mol_type = other DNA
gagccaattccggcaacagcgatcagttttattgcggttactatttgcgttattggcagtaattacctgctcttt

SEQ ID NO: 413106 - DNA, 75 bp, synthetic construct
  source 1..75: mol_type = other DNA
aacgtctcgacacggtagcggctatcaagtccgttcccgctggtaatcacctgatctctgatctgggtatcttca

SEQ ID NO: 413107 - DNA, 75 bp, synthetic construct
  source 1..75: mol_type = other DNA
atctacttaagtctcaaataaaagaaataattaatcacaggggttttttcgaacatcatggaatactgtgttctg

SEQ ID NO: 413108 - DNA, 75 bp, synthetic construct
  source 1..75: mol_type = other DNA
tttttcaagagcatatgattaagcctcattttgatgtcattattagcaatttaaaaaagttatgtccgaatatca

SEQ ID NO: 413109 - DNA, 75 bp, synthetic construct
  source 1..75: mol_type = other DNA
ctgggtctggagttcgtcagcaaaattgccggtatccagattagctggttgcagtggttcctctgcttcctgccg

SEQ ID NO: 413110 - DNA, 75 bp, synthetic construct
  source 1..75: mol_type = other DNA
atgtcatctgtttacaccagacaatcagagccacaacagcgcattctgcgcatgagagaactgacgaagatagtc

SEQ ID NO: 413111 - DNA, 75 bp, synthetic construct
  source 1..75: mol_type = other DNA
aggccaaaaattggcaggagtggacacagcaggcagcgaaacaagcactgaccatcaactggtactatgctgatg

SEQ ID NO: 413112 - DNA, 75 bp, synthetic construct
  source 1..75: mol_type = other DNA
tgccatttgataagtggtacagcgccagtggctacgaaacaacccaggacggcccaactggttcgctgaatataa

SEQ ID NO: 413113 - DNA, 75 bp, synthetic construct
  source 1..75: mol_type = other DNA
taaagttcagcgcgtgaaaattttcgtctatgccttctgcggcttactaacggggatagcgggtgtcattctggc

SEQ ID NO: 413114 - DNA, 75 bp, synthetic construct
  source 1..75: mol_type = other DNA
gggaagatggtattcccggcctgattgccgactacagcattaacgcccagacccgccacgatgaacagagcggcg

SEQ ID NO: 413115 - DNA, 75 bp, synthetic construct
  source 1..75: mol_type = other DNA
cgggaggttttactggatgaggtgtctcagcgaaatatcccgctctctcataaaaaactcagccgggcgctgaaa

SEQ ID NO: 413116 - DNA, 75 bp, synthetic construct
  source 1..75: mol_type = other DNA
taaaaaaagcggatggctcaaacttaccgtttgggacagtagtttctcttgcgggaacaaataatacgaatactg

SEQ ID NO: 413117 - DNA, 75 bp, synthetic construct
  source 1..75: mol_type = other DNA
ctcctgggtcgatgttgatgctaccggtaaagtgacatttaaaaatatcggcagcaattgggaaaggattacggc

SEQ ID NO: 413118 - DNA, 75 bp, synthetic construct
  source 1..75: mol_type = other DNA
agactgagcaaagagcatatcattgatgttcacctcagagagtatggcagaacagaaaacaaaaatgcacctttg

SEQ ID NO: 413119 - DNA, 75 bp, synthetic construct
  source 1..75: mol_type = other DNA
cttgccatggaatcattgcgtagcctacgtactagcctccacttcgccatgatagaagcgaagaataatattatt

SEQ ID NO: 413120 - DNA, 75 bp, synthetic construct
  source 1..75: mol_type = other DNA
acaaaaaatattgctggtcgactccagtaagtttgaacagtatgcatttagtaaaatatgcacgctggatgaaat

SEQ ID NO: 413121 - DNA, 75 bp, synthetic construct
  source 1..75: mol_type = other DNA
cgtagctttggtggcgcggtcgctctggattcatctgatagcgctccggttatgctcgccgataatgcgtggcaa

SEQ ID NO: 413122 - DNA, 75 bp, synthetic construct
  source 1..75: mol_type = other DNA
tacttataatcatattactttgattcagagcaactactcacaatcaattaatccagtagatatggttgctcctta

SEQ ID NO: 413123 - DNA, 75 bp, synthetic construct
  source 1..75: mol_type = other DNA
ctgcattcaggcaaatttacgttgattacgaactgcttccccctttccaacagctcgaacgtggtagttaccacc

SEQ ID NO: 413124 - DNA, 75 bp, synthetic construct
  source 1..75: mol_type = other DNA
agtcacttattgaacaaaaaattctatcttggctgtcgataaccccctcagaacaaaaactggctgatatattac

SEQ ID NO: 413125 - DNA, 75 bp, synthetic construct
  source 1..75: mol_type = other DNA
ctacgagcatcttatggtagaaataaaacatgcgacttatcgtttaatatgaataataaatctgataagagaaca

SEQ ID NO: 413126 - DNA, 75 bp, synthetic construct
  source 1..75: mol_type = other DNA
cggatgcaatatcctctgcccgttttgccgctgtctcggcgcgcgttgccgcggattccgccgtacttttgctct

SEQ ID NO: 413127 - DNA, 75 bp, synthetic construct
  source 1..75: mol_type = other DNA
ggaaagctacatcgacggcatctggaacaaacaagactccgcagagtggatgactgaaatacagttccctgtaga

SEQ ID NO: 413128 - DNA, 75 bp, synthetic construct
  source 1..75: mol_type = other DNA
atgtatcaaatagggctgttttcaaagatctgccgtgtgacgataaaaacgcttcattactataatgaaatcggt

SEQ ID NO: 413129 - DNA, 75 bp, synthetic construct
  source 1..75: mol_type = other DNA
atgacacgaattgcggttgagctttcgttacttacttttgtgcgttccagcgagttacgtttcgcgcgttggggt

SEQ ID NO: 413130 - DNA, 75 bp, synthetic construct
  source 1..75: mol_type = other DNA
cgatatcttttttgacggcgaagccctgttcgtgtcgggcggtgcgcctgacgcggcggcgaaggacgcgatact

SEQ ID NO: 413131 - DNA, 75 bp, synthetic construct
  source 1..75: mol_type = other DNA
aggggaacctgccgcttctggtcagtatgccccacccgggaacgttattaacacccgaagtcgcccaggggctca

SEQ ID NO: 413132 - DNA, 75 bp, synthetic construct
  source 1..75: mol_type = other DNA
ggaaaaatattgagtctgagatgataagacaaaaagaagaaggaaaaatgtggtttggtgtaaatggtgacgcta

SEQ ID NO: 413133 - DNA, 75 bp, synthetic construct
  source 1..75: mol_type = other DNA
ggcagtctggatgggagttaaatccgacaagcatagggaagccggggggacgttcgtcagcagcgatggagacgg

SEQ ID NO: 413134 - DNA, 75 bp, synthetic construct
  source 1..75: mol_type = other DNA
aattaatacaaaaattactgaatataattgacaacatcaaccaatcaaggaattctacagccagtcagattgctg

SEQ ID NO: 413135 - DNA, 75 bp, synthetic construct
  source 1..75: mol_type = other DNA
aattaatacaaaaattattgaatataattgacagcatcacccaatcaaagaattcgacagccagtcagattgctg

SEQ ID NO: 413136 - DNA, 75 bp, synthetic construct
  source 1..75: mol_type = other DNA
cgcgggacacgcaatgctgctgggtgctactggtgcggggaaaaccacatttgaaatgatggctgccgcgtttct

SEQ ID NO: 413137 - DNA, 75 bp, synthetic construct
  source 1..75: mol_type = other DNA
ggatatggcgcgagaaaaacttgtgcaacttcttggcgatgttccccggatagaactgttcgcccgccacacctc

SEQ ID NO: 413138 - DNA, 75 bp, synthetic construct
  source 1..75: mol_type = other DNA
gtcacaatgcccttatggatgctcctcattttatcgattttattattggcaattttacctactgttggatttgta

SEQ ID NO: 413139 - DNA, 75 bp, synthetic construct
  source 1..75: mol_type = other DNA
aacgtaaacccgcctctcaaagaagcaaacctccccgctatgtcgtgaagcttcacgaagatgatttttttgatg

SEQ ID NO: 413140 - DNA, 75 bp, synthetic construct
  source 1..75: mol_type = other DNA
atgcatacaaaaacaaatacgacacacgcgcggagctatatcctcgccgtcgttaaagcagcggaagggcaatgg

SEQ ID NO: 413141 - DNA, 75 bp, synthetic construct
  source 1..75: mol_type = other DNA
tgaaaccacacaatttgaaattcaatccgtgattgctcgttgccgcttttatcaggaaaaaggcggtgtgcgatg

SEQ ID NO: 413142 - DNA, 75 bp, synthetic construct
  source 1..75: mol_type = other DNA
tgtagcaaagcactacatcttggcgacaccggccttggccttgatacgcgctaaagcactaggttctaaccccgt

SEQ ID NO: 413143 - DNA, 75 bp, synthetic construct
  source 1..75: mol_type = other DNA
agaaaagagcaaccatcaatggagaatggaattttgacaatgattttttaagcaggttttcaaaaaaataccttg

SEQ ID NO: 413144 - DNA, 75 bp, synthetic construct
  source 1..75: mol_type = other DNA
tcgcagattggtcagtggaattttctgttatccctgccatttgagtttatcctgacgcaatcctttattcccgat

SEQ ID NO: 413145 - DNA, 75 bp, synthetic construct
  source 1..75: mol_type = other DNA
gagaaaataccgttatctgcaacgaagatttcagagagtattaagaacagcaaattctatttcagttttgatact

SEQ ID NO: 413146 - DNA, 75 bp, synthetic construct
  source 1..75: mol_type = other DNA
aaacagaaatataaaggttattataatttagataatatatcactatattcagctaaacccattgatggacgggta

SEQ ID NO: 413147 - DNA, 75 bp, synthetic construct
  source 1..75: mol_type = other DNA
aagtcggaaataacgttaccttcaccgttggtaaaacgaaaaaggatgataccgggcagaccgcgatttactccg

SEQ ID NO: 413148 - DNA, 75 bp, synthetic construct
  source 1..75: mol_type = other DNA
gctgcaatccgtggcaactggcagaaggcccggaatcgcccgtctggcacagacttctcgcatttctgaaacgct

SEQ ID NO: 413149 - DNA, 75 bp, synthetic construct
  source 1..75: mol_type = other DNA
gacataatttataaagttaatggcctttctatcatacctgaaaatttctttactcttcttagcggtaattttaaa

SEQ ID NO: 413150 - DNA, 75 bp, synthetic construct
  source 1..75: mol_type = other DNA
aatacgaaaactcaattccgatacattactacccattgcattttcagagcagatgtttttcacatgtatttcagc

SEQ ID NO: 413151 - DNA, 66 bp, synthetic construct
  source 1..66: mol_type = other DNA
atggaggctcttatgaacgtacagttcttcgaccacgcacaccacaagctcaaaattcgcggcctg

SEQ ID NO: 413152 - DNA, 75 bp, synthetic construct
  source 1..75: mol_type = other DNA
gtgacggagcaggtcaacccggaggggctggactaccgctttgagtacggagagagccgggtaatcatcacggac

SEQ ID NO: 413153 - DNA, 75 bp, synthetic construct
  source 1..75: mol_type = other DNA
attggatacatgagtttattgttttattagatattgagattatagatgggattttgaatgagtataatactgacg

SEQ ID NO: 413154 - DNA, 75 bp, synthetic construct
  source 1..75: mol_type = other DNA
agtgttcccacaaagaggcggcaggggcggcgacggggtttgtcggcttgtttgcttatctgggggcgtcgcttg

SEQ ID NO: 413155 - DNA, 75 bp, synthetic construct
  source 1..75: mol_type = other DNA
tgctgacacggtggcatttatcagcacagaagaaaatgccagggaagctggattacgacgcgttgccatgaagat

SEQ ID NO: 413156 - DNA, 75 bp, synthetic construct
  source 1..75: mol_type = other DNA
attttgtccagcatctcaaacgcgtacttacggcggataacgatgctatcctctggcggcaaaaccagccgttct

SEQ ID NO: 413157 - DNA, 75 bp, synthetic construct
  source 1..75: mol_type = other DNA
actgggacgcgataggagcgtacaatgctggtttttcaaagacaccacggcagaaaaaacgacgttatcaatatg

SEQ ID NO: 413158 - DNA, 75 bp, synthetic construct
  source 1..75: mol_type = other DNA
gcgccgcctgatccgtcggctggactcagaaatggaacgcagcggcaacagccaggttttcggtgatgctgccaa

SEQ ID NO: 413159 - DNA, 75 bp, synthetic construct
  source 1..75: mol_type = other DNA
ttaccagctattccttaacctgctggaagcgcaggggtatgccgtcgtaccgatggaaaacgacgtgctgaaggt

SEQ ID NO: 413160 - DNA, 75 bp, synthetic construct
  source 1..75: mol_type = other DNA
ctgaaacaggtcagcggcacgctcaccgccgctaaagaagaggcggaaggcacggtcggtagcgggcgtgaggtt

SEQ ID NO: 413161 - DNA, 75 bp, synthetic construct
  source 1..75: mol_type = other DNA
ccggcaccttctttacaggctcctcttaaccatgatgaacgagaggaacttgaacaactgcgtgttgaagtggct

SEQ ID NO: 413162 - DNA, 75 bp, synthetic construct
  source 1..75: mol_type = other DNA
cgaagagtctgacagtctctcaggacggtgaggtttatcgcggatatggtgggaatgcggatatgacgaccatga

SEQ ID NO: 413163 - DNA, 75 bp, synthetic construct
  source 1..75: mol_type = other DNA
gataatgaatctggtgatggggacgatgtttctcgtcttgccggcagtgtggctgggtgcgttgtcctgggctgg

SEQ ID NO: 413164 - DNA, 75 bp, synthetic construct
  source 1..75: mol_type = other DNA
tatagaaaacagggcacttgctgatgagctgcaggactttacgaacgactgttattcactggcactgtatatgtg

SEQ ID NO: 413165 - DNA, 75 bp, synthetic construct
  source 1..75: mol_type = other DNA
gagatcggctttgctactatatgtgtaaatgtccctgatgcggtttcagttaactacgagtgccctgaactggcg

SEQ ID NO: 413166 - DNA, 75 bp, synthetic construct
  source 1..75: mol_type = other DNA
cggggctgtactacaaccggaaccggtactatgatccgttgcaggggaggtatatcacccaggatcccattgggc

SEQ ID NO: 413167 - DNA, 75 bp, synthetic construct
  source 1..75: mol_type = other DNA
tgttctttacggtgcttttttcgtcatgattgtctgttgtgttcctctggttcaggtcagccttgacagcattaa

SEQ ID NO: 413168 - DNA, 75 bp, synthetic construct
  source 1..75: mol_type = other DNA
cttccgttgccccagacaacgtagttcaacagtatccgtccgtccaacacaccttcccgacaccgccgccgaagg

SEQ ID NO: 413169 - DNA, 75 bp, synthetic construct
  source 1..75: mol_type = other DNA
atgccagaacgccctgaaaataacccggcaccttctttacaggctcctcttaaccatcgatgaacgagaggaact

SEQ ID NO: 413170 - DNA, 75 bp, synthetic construct
  source 1..75: mol_type = other DNA
gccggtttgtatgcgcagcgccttgctgagcatggctatattactgttaccgccgatgcagcttatcagggggct

SEQ ID NO: 413171 - DNA, 75 bp, synthetic construct
  source 1..75: mol_type = other DNA
gtgggccagataaatatatccttgactcaatgtcgagaggcactgatcccttgcccttccctggaagaacaacac

SEQ ID NO: 413172 - DNA, 75 bp, synthetic construct
  source 1..75: mol_type = other DNA
ctggtccgcgcccagttgcagcaccaaggtcggccgcagcgatgaagcgggtcttgatgccgcactgcgccgccc

SEQ ID NO: 413173 - DNA, 75 bp, synthetic construct
  source 1..75: mol_type = other DNA
gaacttttccaccttgtcgtcgccggcctgcggtcagtcaggcaagcccaggtgctcgttttcctgcttgatcgc

SEQ ID NO: 413174 - DNA, 75 bp, synthetic construct
  source 1..75: mol_type = other DNA
agggagatatgactcagtatggcggtcctattgtccagggttcggcaggtgtaagaattggcgcgccaactggcg

SEQ ID NO: 413175 - DNA, 75 bp, synthetic construct
  source 1..75: mol_type = other DNA
agttcaaccggatatgtatggtggcgaagactcatacagcggtgattgcggagaggatgcgaccggtgcgtcaac

SEQ ID NO: 413176 - DNA, 75 bp, synthetic construct
  source 1..75: mol_type = other DNA
taaggctgtgggtgggcttctgggggggcttaggtttgtactcacagtgggaccgatggtttctgacagaaaaat

SEQ ID NO: 413177 - DNA, 75 bp, synthetic construct
  source 1..75: mol_type = other DNA
atgcaaaaccagatggacccggtatacacgccggcgcgaaaaattcacctgtaccactgcgaccatcgcggcctg

SEQ ID NO: 413178 - DNA, 75 bp, synthetic construct
  source 1..75: mol_type = other DNA
gtatatcgccaagtcgatgggatgaagttgttggttctgttgcgaaaaaagattatcaaattggggagttaattt

SEQ ID NO: 413179 - DNA, 75 bp, synthetic construct
  source 1..75: mol_type = other DNA
gtgagttcggcatgacgccagccagtcgctcgaaagtgaatgcaaaaggccctgatgcggttgacccgctggccg

SEQ ID NO: 413180 - DNA, 75 bp, synthetic construct
  source 1..75: mol_type = other DNA
gcgatgcttgcagagtttggtatgtcaccggcaagccgggcgaaagtaaatatcgccggaccggatgatgttgat

SEQ ID NO: 413181 - DNA, 75 bp, synthetic construct
  source 1..75: mol_type = other DNA
tctttttatccgaatcgattaattaatactatcgatggtggtgcaatttctgtccgaagtgtagaagactatatt

SEQ ID NO: 413182 - DNA, 75 bp, synthetic construct
  source 1..75: mol_type = other DNA
gcggcccttcagattattggcaaagtgcgcgttgttcatgtcggatgcggcgtgaacgccttatccgacctacaa

SEQ ID NO: 413183 - DNA, 75 bp, synthetic construct
  source 1..75: mol_type = other DNA
gccttcatctggaagtcattggtaaaagtaggaaattcacatggcgtaaagtcattgtaagggcgatgaaacatc

SEQ ID NO: 413184 - DNA, 75 bp, synthetic construct
  source 1..75: mol_type = other DNA
ggtgaaaataatacgcaagtgatgattaaatataaaacagaacgtggggaggaaaaaaatataaaagtagttgtt

SEQ ID NO: 413185 - DNA, 75 bp, synthetic construct
  source 1..75: mol_type = other DNA
ggaggatacataaccaactcacataccattactgggaatagtggtgatgatattatctatgtcgctacaaatata

SEQ ID NO: 413186 - DNA, 75 bp, synthetic construct
  source 1..75: mol_type = other DNA
agcgctaggagctaaagtcatcgaaaaacatttcacattagacaaaatgatgtgcggtcccgaccataaagctag

SEQ ID NO: 413187 - DNA, 75 bp, synthetic construct
  source 1..75: mol_type = other DNA
gctattgctggcaaactggtggcgtttatgcaggggatcggttttatcatcgccgggcttgccccgtggttttct

SEQ ID NO: 413188 - DNA, 75 bp, synthetic construct
  source 1..75: mol_type = other DNA
tcattcaggcggtgatgccttcggtgattaaacggcggtttcagcagcgcacgccactggtgatggggctgtggt

SEQ ID NO: 413189 - DNA, 75 bp, synthetic construct
  source 1..75: mol_type = other DNA
tgcaggggatcggttttatcatcgccgggcttgccccgtggttttctggcgtgctgcgtagtatcagcggcaatt

SEQ ID NO: 413190 - DNA, 75 bp, synthetic construct
  source 1..75: mol_type = other DNA
attgacaaaatggtggaacgatacagcatcacaaagaatatttgactctctaatattgaataatccgggactagc

SEQ ID NO: 413191 - DNA, 75 bp, synthetic construct
  source 1..75: mol_type = other DNA
ggggggatggaatttttatcagtatccgttgaatccagttacgaatacagatcctctggggttagaagtttttcc

SEQ ID NO: 413192 - DNA, 75 bp, synthetic construct
  source 1..75: mol_type = other DNA
cttcgcagcctcgatgatgcagtaaccgctgctaaagtgcgcatggggggcctggctggtcagcttgatggattt

SEQ ID NO: 413193 - DNA, 75 bp, synthetic construct
  source 1..75: mol_type = other DNA
gcagctgtcttaacgcacgatgttgtcgaacgtgaaccgcaagatcccggcgttgtacgtttaaaacgtgcggtt

SEQ ID NO: 413194 - DNA, 75 bp, synthetic construct
  source 1..75: mol_type = other DNA
ttggtgggagcatttatagcaacgatgatatgcttaatgataaattaagaaactatacaccaacaataagaggga

SEQ ID NO: 413195 - DNA, 75 bp, synthetic construct
  source 1..75: mol_type = other DNA
tcggcaatgagcttccggcgtctccagtggagtggctgacggataatggttcatgctaccgggctaatgaaacac

SEQ ID NO: 413196 - DNA, 75 bp, synthetic construct
  source 1..75: mol_type = other DNA
taacacgacaatcattccggttcgtgtggtattcactcctcgcgcctggacgctggggctttacttcggtctgat

SEQ ID NO: 413197 - DNA, 75 bp, synthetic construct
  source 1..75: mol_type = other DNA
ttgctaccgatccttttggctatgcagtggttccttatctcacaacttatcaggaaaaccgtctctcggtagata

SEQ ID NO: 413198 - DNA, 75 bp, synthetic construct
  source 1..75: mol_type = other DNA
aggattactcgccttgcggctcgcccttcgggccgttgctaaagcaacgttatcctccctggtgcctgcggttat

SEQ ID NO: 413199 - DNA, 75 bp, synthetic construct
  source 1..75: mol_type = other DNA
aatgccttattagtgtcggtgataaggactactttttccgtccgtcactattcgcgatgtccagaattggcgatc

SEQ ID NO: 413200 - DNA, 75 bp, synthetic construct
  source 1..75: mol_type = other DNA
aagatgcttgaagcggcgcgagagattcacagtgcgataccagagcatcagcgcagattttacgctcattacttc

SEQ ID NO: 413201 - DNA, 75 bp, synthetic construct
  source 1..75: mol_type = other DNA
agtgcatgataggcgctggagagcgggaatatttcttccgtccgtctttccgtagcatgacgcgcattggcgagc

SEQ ID NO: 413202 - DNA, 75 bp, synthetic construct
  source 1..75: mol_type = other DNA
taccaccaggaaaaccgcgcacccggcagcctgccggggacgaagacgcagatgaccattcgttcgaaaacctat

SEQ ID NO: 413203 - DNA, 75 bp, synthetic construct
  source 1..75: mol_type = other DNA
atatcacccacattaatctccatatcaattcaccgggtggcgatgtctttgaaggcatcgccattttaatgccct

SEQ ID NO: 413204 - DNA, 75 bp, synthetic construct
  source 1..75: mol_type = other DNA
gtggcacaggcgtgggcaggcaccggctttggcaacctggcgataccgcgagtgggtcaggaggtgattgtggac

SEQ ID NO: 413205 - DNA, 75 bp, synthetic construct
  source 1..75: mol_type = other DNA
ttgcaacagcaataaactctaaaataataagaaaaattccagttcttgttcctgatggagacatattagaaaaat

SEQ ID NO: 413206 - DNA, 75 bp, synthetic construct
  source 1..75: mol_type = other DNA
atgcccttccagatttacttcgcaatgtaccgcttgatgctaaaaaatcttttctgaatgtaaaaaagctagaaa

SEQ ID NO: 413207 - DNA, 75 bp, synthetic construct
  source 1..75: mol_type = other DNA
tccacgactgcgctgggctgagcacctatgaacaggaaacaattatatctttcattaaccagcggcgaggtgact

SEQ ID NO: 413208 - DNA, 75 bp, synthetic construct
  source 1..75: mol_type = other DNA
gtttgtgcgtgatgcattactctcggctattaacgtcattcagtcctgctgtgacgaggacgtttctgaactgac

SEQ ID NO: 413209 - DNA, 75 bp, synthetic construct
  source 1..75: mol_type = other DNA
tcctgaaaaccagatccctgtatatctggaacgagaagatggctctcatgttcaggtggcgcagccaatagttat

SEQ ID NO: 413210 - DNA, 75 bp, synthetic construct
  source 1..75: mol_type = other DNA
aagtgcatggtcatttcatggacataataaatgtcaaaatattcagtatcaccagattttaaatttgttatctaa

SEQ ID NO: 413211 - DNA, 75 bp, synthetic construct
  source 1..75: mol_type = other DNA
ttgatgccgcagagtttattcaactgattggagaaccgtttgtctttccgatgcgtttcatatgggttgccgggt

SEQ ID NO: 413212 - DNA, 75 bp, synthetic construct
  source 1..75: mol_type = other DNA
cgaagcgaagcacaaagcggagattgaagccgcagcgcgccgtgaagccgaagagaaagcccgcgctgaactggc

SEQ ID NO: 413213 - DNA, 75 bp, synthetic construct
  source 1..75: mol_type = other DNA
tggtcttggaaaagaccttgttgctgaactgaaggaaattccaaagctaattgatgccaaccgcaagacagtgcg

SEQ ID NO: 413214 - DNA, 75 bp, synthetic construct
  source 1..75: mol_type = other DNA
aagcaatgcaggatttaatgttaatagcatccctttgactcaattaaaaaatagttggaatgaagaaaagcaatt

SEQ ID NO: 413215 - DNA, 75 bp, synthetic construct
  source 1..75: mol_type = other DNA
aaaagccgcggcagtggaagctgagcgcctcaaggcaaaacaggcagaagagaaacgtctggccgaagagaagcg

SEQ ID NO: 413216 - DNA, 75 bp, synthetic construct
  source 1..75: mol_type = other DNA
gctcaccagccaaaccagcttaacccgcgagcaggctatcgaagtgcttaccgctctgaaagatgacctgatccc

SEQ ID NO: 413217 - DNA, 75 bp, synthetic construct
  source 1..75: mol_type = other DNA
aaaagccgcggcggttgaagccgagcgcctgaaggccaaacaggccgaagatgcccgcctggccgaagagaagcg

SEQ ID NO: 413218 - DNA, 75 bp, synthetic construct
  source 1..75: mol_type = other DNA
ttttcagctaccagaagaatggaaaaataaaatagccaaaaaacaattaaaaaaacaaagttggttctttgccgg

SEQ ID NO: 413219 - DNA, 75 bp, synthetic construct
  source 1..75: mol_type = other DNA
aactcaaaacataaattatgcgaatgcaatataaaagatactgacgcagaaaaatttattgcatggattttcgct

SEQ ID NO: 413220 - DNA, 75 bp, synthetic construct
  source 1..75: mol_type = other DNA
atctgctcccggtgatgctgggtaatattatcggcggtgcagtgctggtgagtatgtgttatcgggctatttatt

SEQ ID NO: 413221 - DNA, 75 bp, synthetic construct
  source 1..75: mol_type = other DNA
cctggcgataccgcgtgtgggtcaggaggtgattgtagacttcctcaacggcgatccggaccagccgatcattat

SEQ ID NO: 413222 - DNA, 75 bp, synthetic construct
  source 1..75: mol_type = other DNA
tttgcccgctggcagatggacggctggcgaaacaatgcagaaaccgcgcggggaatgagtcgctcgccggagata

SEQ ID NO: 413223 - DNA, 75 bp, synthetic construct
  source 1..75: mol_type = other DNA
acacctttaaacgacccggctgggcagggcgttttgatcaggaaggccagtaccaggattaccagcgcacgcagt

SEQ ID NO: 413224 - DNA, 75 bp, synthetic construct
  source 1..75: mol_type = other DNA
atggcctatctcgacccgtaccaacgccccgcgccggaccgcttcgtccggcgcgggctcttcatcaccgcctgc

SEQ ID NO: 413225 - DNA, 75 bp, synthetic construct
  source 1..75: mol_type = other DNA
gattaataccggagagcccattaaaacctggcggggcatcatggcgctgtcgggtatgcaccagcttggcgagat

SEQ ID NO: 413226 - DNA, 75 bp, synthetic construct
  source 1..75: mol_type = other DNA
cttgcaaccgcacagaaacaacggcgttttccccgctctgtggcaccggatattgacagtctgctctgtcttggg

SEQ ID NO: 413227 - DNA, 75 bp, synthetic construct
  source 1..75: mol_type = other DNA
cacctgaccagaccatcaccgaccttgcgcactttgcctggtgcgcactggtgggattacgtctggcgcagcagg

SEQ ID NO: 413228 - DNA, 75 bp, synthetic construct
  source 1..75: mol_type = other DNA
tcacacacactgacagcagtgcctccgccgatgttttcagcggtaaaacgaagtctgtgggggctggcctgtatg

SEQ ID NO: 413229 - DNA, 75 bp, synthetic construct
  source 1..75: mol_type = other DNA
caacaacctcaacaaacgtatgggtgatctgcgtgacattaacggtgaggccggtgcatgggcccgtatcatgag

SEQ ID NO: 413230 - DNA, 75 bp, synthetic construct
  source 1..75: mol_type = other DNA
ggtctctatgcctctgccatgtttgagtccggagcatatatcgacctcatcggtaagtacgttcaccatgacaac

SEQ ID NO: 413231 - DNA, 75 bp, synthetic construct
  source 1..75: mol_type = other DNA
ttagcgttgctgaccgatttagccgtggacattacttagttatcgtcaaagcaaaagttaaatatcttacaagag

SEQ ID NO: 413232 - DNA, 75 bp, synthetic construct
  source 1..75: mol_type = other DNA
cgacgaattgtgctgacggggcatccgcaggcgaacctgaaccgggaatggcaggtggtggcaagtgaactgcac

SEQ ID NO: 413233 - DNA, 75 bp, synthetic construct
  source 1..75: mol_type = other DNA
cttttaaagctgactaagaaaaaaataaatcatatttcaatggatttgaatttttcgacacaacaaacatttact

SEQ ID NO: 413234 - DNA, 75 bp, synthetic construct
  source 1..75: mol_type = other DNA
aggttcaaattctggatttaacaacagtgatagtgattctgcgcacgcgcatcagtgagttgcggggtaggcgga

SEQ ID NO: 413235 - DNA, 75 bp, synthetic construct
  source 1..75: mol_type = other DNA
aaacaataaagattatctagacaaaaagatagatcataaaacttatgagataatgaattcagttttcaatgactc

SEQ ID NO: 413236 - DNA, 75 bp, synthetic construct
  source 1..75: mol_type = other DNA
gtacagggaccgtcgggatcacgcgatctggacattctggtcggaaaaaaaattctccaggatttggtacaggta

SEQ ID NO: 413237 - DNA, 75 bp, synthetic construct
  source 1..75: mol_type = other DNA
ataaacggtcagggatttacatttaaaggagcaggaattgatatcggaaaagaaagcattgtaaactggaatgca

SEQ ID NO: 413238 - DNA, 75 bp, synthetic construct
  source 1..75: mol_type = other DNA
aatgatatcatagctaatgcaggtaacggtgatgctagcgcttttattcgctttactcgctgggttactttgata

SEQ ID NO: 413239 - DNA, 75 bp, synthetic construct
  source 1..75: mol_type = other DNA
gtttggatgtggtgatgaatgaagaagactgcaaaacaagaagaggaaacgcagcagaattatttcagggatacg

SEQ ID NO: 413240 - DNA, 75 bp, synthetic construct
  source 1..75: mol_type = other DNA
acgtgaacaaatgatacaaataacaagtctctacatcccttcaaaaatccacttaaggtcagctgatgtttttga

SEQ ID NO: 413241 - DNA, 75 bp, synthetic construct
  source 1..75: mol_type = other DNA
cgtcgacgacgtcaccacattacaggcccggctagacgacaagaacgttggagatgttgtggtcttgttagtgga

SEQ ID NO: 413242 - DNA, 75 bp, synthetic construct
  source 1..75: mol_type = other DNA
cactgtggtgtacaggatgtaatacctgtctcgctgcctgttcggacgtgcataaaacgcaaggtttacagcaac

SEQ ID NO: 413243 - DNA, 75 bp, synthetic construct
  source 1..75: mol_type = other DNA
tatcttcggcttccatctggaaaatcctgttattatgcgaataatttttatgaatttttatgtaaacgaattgag

SEQ ID NO: 413244 - DNA, 75 bp, synthetic construct
  source 1..75: mol_type = other DNA
acttgagtttatgctcagtaaatttggaagcttcgaaaacatgcagaagttcatggaggaacaatcagctaagaa

SEQ ID NO: 413245 - DNA, 75 bp, synthetic construct
  source 1..75: mol_type = other DNA
acccttcatggcctatgactcctatcaacgggaactgcaagattatcggtgttgtcgtggaagcgagggtaaaat

SEQ ID NO: 413246 - DNA, 75 bp, synthetic construct
  source 1..75: mol_type = other DNA
cggaaccgggtctgccggcggtggattcagtgacaactacacccacgttcaggtcggtgcggataacaaacatga

SEQ ID NO: 413247 - DNA, 75 bp, synthetic construct
  source 1..75: mol_type = other DNA
aaaatccggagacactgaatcgcaggagtatgtggtgttgaaagggaattgcattcgtcatgacggggagatgta

SEQ ID NO: 413248 - DNA, 75 bp, synthetic construct
  source 1..75: mol_type = other DNA
ttctttgcagcgtgatgcgttgattgctgccggagtggatccccggcatttacatcaggatcatgcttcaggtgc

SEQ ID NO: 413249 - DNA, 75 bp, synthetic construct
  source 1..75: mol_type = other DNA
gacctacttctggattcatatccgctgacccagaactttcgaagcaaaattctaaaaagcaagagcgttacttgg

SEQ ID NO: 413250 - DNA, 75 bp, synthetic construct
  source 1..75: mol_type = other DNA
agaaaatacgacagccttcctgaccttgtgctccatcccgagcaggagacaataaaatgcaaagaaaaacattac

SEQ ID NO: 413251 - DNA, 75 bp, synthetic construct
  source 1..75: mol_type = other DNA
tatctggtgcatcccgtatattggtggctttatattgttcgttatgtactgtatcccgtcagaaaaaggggataa

SEQ ID NO: 413252 - DNA, 75 bp, synthetic construct
  source 1..75: mol_type = other DNA
tatgatttgcattttacggcgcaatacgcaaaagcaggtgctgacgtgagtaagggtggggttaattctacgata

SEQ ID NO: 413253 - DNA, 75 bp, synthetic construct
  source 1..75: mol_type = other DNA
agacctctatttataaaccccagaaaaaatgcttatgcgattgattcaaagcgttgggatgaggcttataacatg

SEQ ID NO: 413254 - DNA, 75 bp, synthetic construct
  source 1..75: mol_type = other DNA
cgcagtcttgaaaaacgcttctctacgcggctgaaaattgatgacgatgccctcgctcgcctggtttcttgtgca

SEQ ID NO: 413255 - DNA, 75 bp, synthetic construct
  source 1..75: mol_type = other DNA
aaaagggatgataagtttatcaccaccgactatttgcaacagtgccgcctggcgttttgtccgtgagcgtttccg

SEQ ID NO: 413256 - DNA, 75 bp, synthetic construct
  source 1..75: mol_type = other DNA
gctggaatgacgtgattgatgctggcgcaacgctacgctgggaaaaacgaccttatgacggtgacagagaacaca

SEQ ID NO: 413257 - DNA, 75 bp, synthetic construct
  source 1..75: mol_type = other DNA
gcacagcagcaagcagatgataatgctgcaaaagcattgacaaaatggtggaacgatacagcatcacaaagaata

SEQ ID NO: 413258 - DNA, 75 bp, synthetic construct
  source 1..75: mol_type = other DNA
ttaaaaatttcaaactacctataccctatgcaagtgatccccaaaaatcacttaaggaacaagctcgcattgtcg

SEQ ID NO: 413259 - DNA, 75 bp, synthetic construct
  source 1..75: mol_type = other DNA
ctgtattagcatctctttttatgagcgcaggatcatttgcagcagaagggagtacagagggtcagttaactatta

SEQ ID NO: 413260 - DNA, 75 bp, synthetic construct
  source 1..75: mol_type = other DNA
ttaaagaaactgggttaccgatagttagaatcacaaatatagatgggtttaatgttaacttagatgaggtgaaat

SEQ ID NO: 413261 - DNA, 75 bp, synthetic construct
  source 1..75: mol_type = other DNA
cgtgaaatagaactacgccagaagcagtacgagtactatcgtgatttactgttcagtttcccaaaacctgaaact

SEQ ID NO: 413262 - DNA, 75 bp, synthetic construct
  source 1..75: mol_type = other DNA
tctcgagttgaaaacgacacgcttaaaacttcgattaagcgctgtattattgatcaggcatcaagggtgtcaact

SEQ ID NO: 413263 - DNA, 75 bp, synthetic construct
  source 1..75: mol_type = other DNA
tttttgttgcgcaaaataaagcttggttagagtatgtatttagattaatcagtttggaaacaaattatgcaaatt

SEQ ID NO: 413264 - DNA, 75 bp, synthetic construct
  source 1..75: mol_type = other DNA
taataatgatatattggttgatgttatcgtacccgtttatggtggtttacaggaaactcaggaatgtatagagtc

SEQ ID NO: 413265 - DNA, 75 bp, synthetic construct
  source 1..75: mol_type = other DNA
gatgaatccagccagacagcaaaccgtcttcatatcggctatgtattaaccgatttattaaacaattcattaaac

SEQ ID NO: 413266 - DNA, 75 bp, synthetic construct
  source 1..75: mol_type = other DNA
aacgtaaaaaaggcccattatgacggcgtcctgggtattaacatcggcaaaataaagatacgccagtggagcagg

SEQ ID NO: 413267 - DNA, 75 bp, synthetic construct
  source 1..75: mol_type = other DNA
gaaaaacctgaaagcgattgcggttgaagggacgaaaggggtcaacattgccgatcgtcaggagatgaagcgtct

SEQ ID NO: 413268 - DNA, 75 bp, synthetic construct
  source 1..75: mol_type = other DNA
accatctttcagcaatactgaattttgttcgcccagctaaatttgcattggtccaagatcttgagtctgattttt

SEQ ID NO: 413269 - DNA, 75 bp, synthetic construct
  source 1..75: mol_type = other DNA
ccaagaaaaaatacatttctatctgaaattaagaggaacgactggcttactcggcgaactcaatggtgataaaaa

SEQ ID NO: 413270 - DNA, 75 bp, synthetic construct
  source 1..75: mol_type = other DNA
acgcttagatgaaatcactaataatatatgtactctattgatagagatcattgaggtatggttcaatatcaacat

SEQ ID NO: 413271 - DNA, 75 bp, synthetic construct
  source 1..75: mol_type = other DNA
caagggatgacatgatcgatgagtatttagagcctgagatcgcaaagcacgttttggagcttatagatgcgtcca

SEQ ID NO: 413272 - DNA, 75 bp, synthetic construct
  source 1..75: mol_type = other DNA
gtgcatccggtgtatatgttaaacccaatgaaaatgaatattgggcacccgatgaatccagccagacagcaaacc

SEQ ID NO: 413273 - DNA, 75 bp, synthetic construct
  source 1..75: mol_type = other DNA
gagcttgatgtgagaagaaactggctggacagcctgccggtcctgcccgacgggttgaagcatctttatgtgtgt

SEQ ID NO: 413274 - DNA, 75 bp, synthetic construct
  source 1..75: mol_type = other DNA
gatatcgcagccagcaagaccagcaagaacagcaagaccagcaagatagaaaactgggatgatttatcctcatca

SEQ ID NO: 413275 - DNA, 75 bp, synthetic construct
  source 1..75: mol_type = other DNA
agaaacggcgggatgaaatcaacctgctctatgtggctgccacgcgggcccggaatacgcttgttctgaacagtg

SEQ ID NO: 413276 - DNA, 75 bp, synthetic construct
  source 1..75: mol_type = other DNA
aaattacaggaataaacactgcgattggcggtattcaatcaggtatttccactaggcttgctatttttggcgtta

SEQ ID NO: 413277 - DNA, 75 bp, synthetic construct
  source 1..75: mol_type = other DNA
gatgggggaaataaaatgtcatcagttagtcgagaagaaattcaagcacttttagctgccaataaagcagaaatg

SEQ ID NO: 413278 - DNA, 75 bp, synthetic construct
  source 1..75: mol_type = other DNA
tgctggttttaaattcacaggaacaaaacagcaatatatacactttataaaccacatatatatgaatgtacttgg

SEQ ID NO: 413279 - DNA, 75 bp, synthetic construct
  source 1..75: mol_type = other DNA
tatatcgcgcaggcgatcgtgtcgatgttaaagtgatcggccgcgagttccacgatccgttgcattcatccccca

SEQ ID NO: 413280 - DNA, 75 bp, synthetic construct
  source 1..75: mol_type = other DNA
caccaacagtttgcaccttccttctattattgctttacggcgactgattgtggcattccgtccggatattgtggt

SEQ ID NO: 413281 - DNA, 75 bp, synthetic construct
  source 1..75: mol_type = other DNA
aacatattgcctcacactctcgaccggattgggtacgtttcttacaatacgcatcatacaggggctttctatatc

SEQ ID NO: 413282 - DNA, 75 bp, synthetic construct
  source 1..75: mol_type = other DNA
ctggaggttcaggacggtggtgaggctaagcatgttgagcaacaatccggcggcgcattaattgcttccacgact

SEQ ID NO: 413283 - DNA, 75 bp, synthetic construct
  source 1..75: mol_type = other DNA
tctcgcagacagcctggactgtgggaagcaggtcaacttcgcagacggcccggactgtgggaagcaggtcaactt

SEQ ID NO: 413284 - DNA, 75 bp, synthetic construct
  source 1..75: mol_type = other DNA
gaagccgcagcgcgtcgcgaagttgaagagaaagctcgcgcagatgccgcagagcgtaagcgcaaagaagacgct

SEQ ID NO: 413285 - DNA, 75 bp, synthetic construct
  source 1..75: mol_type = other DNA
tgacatgctgatggtcataccctcccgtctggctacagagctgaatggttcaggtggactgctgcagggtatttc

SEQ ID NO: 413286 - DNA, 75 bp, synthetic construct
  source 1..75: mol_type = other DNA
aaacacttccacagccccggctgtatctggtggaggagtgtgctgaagaacagacagaagccgcgcctttaccgg

SEQ ID NO: 413287 - DNA, 75 bp, synthetic construct
  source 1..75: mol_type = other DNA
acaggtcaacttcgtggacggccagggccgcgggaaacaccacatgtataggcacacacagatagcgtgttcagg

SEQ ID NO: 413288 - DNA, 75 bp, synthetic construct
  source 1..75: mol_type = other DNA
tctgtttcagaacgacaaacgggcgtgaaagaaaaaaaagtaacggtgtgtaaagtggaaagaaaatcccgtccg

SEQ ID NO: 413289 - DNA, 75 bp, synthetic construct
  source 1..75: mol_type = other DNA
gcggcacgctggtacataaaatgggtaccctgcggccatattccggtatgaccggttatgacggtctgactgccc

SEQ ID NO: 413290 - DNA, 75 bp, synthetic construct
  source 1..75: mol_type = other DNA
gacggtggagcaggcgaaagcgtttctggcggcagcccctgctgccagtgctgcaggcacaggcgatcagattat

SEQ ID NO: 413291 - DNA, 75 bp, synthetic construct
  source 1..75: mol_type = other DNA
caacagtattcaggcattgccggcaggtgtgcgtgcagattttcagcgccgtattgatgaggcccgccggatgtt

SEQ ID NO: 413292 - DNA, 75 bp, synthetic construct
  source 1..75: mol_type = other DNA
atggtggaaaattattttctacgccatttacaaatcagtgctatggcattgttttcggacaaacatatgtagcca

SEQ ID NO: 413293 - DNA, 75 bp, synthetic construct
  source 1..75: mol_type = other DNA
ttcagcttctgcagttgtctcagccctccagcaatctttccggcattatcaatgcccgcactctggtcgaaagcc

SEQ ID NO: 413294 - DNA, 75 bp, synthetic construct
  source 1..75: mol_type = other DNA
ttcagcttctgcagctttctcagccttccggcaagcttcccggcattatcaacgcccacaatctggtcgaaagcc

SEQ ID NO: 413295 - DNA, 75 bp, synthetic construct
  source 1..75: mol_type = other DNA
cggaatactggcagcatatgctcgacagttacgcggagcaggcggacaacatgccgttattgcatcgggcgttgg

SEQ ID NO: 413296 - DNA, 75 bp, synthetic construct
  source 1..75: mol_type = other DNA
gtaacattccggtgaccgttgaacgccagttgtatcggcttatccctggtgaagaagagatgagctttactctgc

SEQ ID NO: 413297 - DNA, 75 bp, synthetic construct
  source 1..75: mol_type = other DNA
ccatcgttcaccgaaacgcgagcgaatggcctgattttaccatcgctgcatatggcaagccgcgaacttcgccgg

SEQ ID NO: 413298 - DNA, 75 bp, synthetic construct
  source 1..75: mol_type = other DNA
acaaaatgggcaagtgcaggacagcattagcacaaaactgtcttttgtggataacagctggcccgttgaacagca

SEQ ID NO: 413299 - DNA, 75 bp, synthetic construct
  source 1..75: mol_type = other DNA
ttagggcgaaatacagatgtccccgctcttaaggagaaatcaaggcattctgatggccattgggctgttccttta

SEQ ID NO: 413300 - DNA, 75 bp, synthetic construct
  source 1..75: mol_type = other DNA
cgttgataaaagcgtatacacctggcgtgtggctggtgaaggtgaatccggggtagccgaagagcagccagcaca

SEQ ID NO: 413301 - DNA, 75 bp, synthetic construct
  source 1..75: mol_type = other DNA
ggttagagaaatatcttggtaccgattgttcaagagatgataacagttgtatttctataatagatctatctctag

SEQ ID NO: 413302 - DNA, 75 bp, synthetic construct
  source 1..75: mol_type = other DNA
cgaccgagcgcgctaaacgcaacctgatggtatttatccgcccgacgattatccgtgacgatgatgtttatcgct

SEQ ID NO: 413303 - DNA, 75 bp, synthetic construct
  source 1..75: mol_type = other DNA
gctattgaaaccagttcagtactaaagccgttagtaaccgataagaatgtggatttgcccctatatttccagaca

SEQ ID NO: 413304 - DNA, 75 bp, synthetic construct
  source 1..75: mol_type = other DNA
ataaagcaccttgatgatgaacaagttaacaaattaatagatttgctaaaagatgaaaaaatagaagagtctgat

SEQ ID NO: 413305 - DNA, 75 bp, synthetic construct
  source 1..75: mol_type = other DNA
acattgccacaacaattttctgagcagatgttttttgcctgcctttccattttttccacacacagagtttcatgt

SEQ ID NO: 413306 - DNA, 75 bp, synthetic construct
  source 1..75: mol_type = other DNA
atcaggagcaagttcataaaatggtacctgataatttgcgaggattactccgtgaactaccttcattaccatccc

SEQ ID NO: 413307 - DNA, 75 bp, synthetic construct
  source 1..75: mol_type = other DNA
atatgcagacggtaacatccctttcattctcattcccacttggcggcaatggacctcgtgtaccaagtcttagca

SEQ ID NO: 413308 - DNA, 75 bp, synthetic construct
  source 1..75: mol_type = other DNA
gccaactattacaacgttgcctattcagggcagaatgctcatagccagcgttcgctatgggcatcatttaatggt

SEQ ID NO: 413309 - DNA, 75 bp, synthetic construct
  source 1..75: mol_type = other DNA
tgatgaatttttttcaagtagcgataaaaatcttgtaagaagtaaagataataatcttgaagcattttatctcgc

SEQ ID NO: 413310 - DNA, 75 bp, synthetic construct
  source 1..75: mol_type = other DNA
tactatgcgtgaagatgctattcataatttacaaaatgatgggcgggtttattttaatcctatatcaaatcattt

SEQ ID NO: 413311 - DNA, 75 bp, synthetic construct
  source 1..75: mol_type = other DNA
gcgagaaatatttttacgagtgattacgataggaaactacttggtcatttgtattctaaaataagggagatttac

SEQ ID NO: 413312 - DNA, 75 bp, synthetic construct
  source 1..75: mol_type = other DNA
aaggtaactttttctgttatctgaacgatcataacgagaacaccattgttgacccttcggtgatctatttcgatt

SEQ ID NO: 413313 - DNA, 75 bp, synthetic construct
  source 1..75: mol_type = other DNA
gccagaagtaagcgagtcgagaaaaagctttggatatatttttaggaacggtagcaggatacctatccacgtttc

SEQ ID NO: 413314 - DNA, 75 bp, synthetic construct
  source 1..75: mol_type = other DNA
ctacatagcggtaaggtgccattaactttttatgcgcaattgcgacctgtcaatagcgatgtgcagtcgggtaaa

SEQ ID NO: 413315 - DNA, 75 bp, synthetic construct
  source 1..75: mol_type = other DNA
tctggtttaccagtgaaggagtgatgttgaaacggataatcttgattctgtgcttgctgggattaacgggaggcg

SEQ ID NO: 413316 - DNA, 75 bp, synthetic construct
  source 1..75: mol_type = other DNA
aatctttcatcattaatttgcaggattgcggaacagatgtcagcacggttgacgtcaccttttcaggaacccccg

SEQ ID NO: 413317 - DNA, 75 bp, synthetic construct
  source 1..75: mol_type = other DNA
aaattgactcagaaaagattaaccaactgcttgagtctactgaaaaacctttgatggataatatacatgacacgc

SEQ ID NO: 413318 - DNA, 75 bp, synthetic construct
  source 1..75: mol_type = other DNA
tgtcgcgactttactgcttggtttgctcgcgggatttttcaacggtgtcctggtcgcgtggctaaaaatccctgc

SEQ ID NO: 413319 - DNA, 75 bp, synthetic construct
  source 1..75: mol_type = other DNA
atatgcgtatccgttatattaaacgtgcaaatgctctatgggctagtatgaacgatctaccagtaaatggtaatg

SEQ ID NO: 413320 - DNA, 75 bp, synthetic construct
  source 1..75: mol_type = other DNA
aatacagctacttacatagcataaacggctctctgattgaagcagaacttgacgacgtttctgtgggtgaagtat

SEQ ID NO: 413321 - DNA, 75 bp, synthetic construct
  source 1..75: mol_type = other DNA
gtgtaggttaccagttacaaaattatttttcacattactgtcagcttctgaattatgtgttacaaggaaatccag

SEQ ID NO: 413322 - DNA, 75 bp, synthetic construct
  source 1..75: mol_type = other DNA
gaaattaactcaggacgaagtatcgattttatgccccaaggaatttatccggcaaaaatgatcggtaatgagttt

SEQ ID NO: 413323 - DNA, 75 bp, synthetic construct
  source 1..75: mol_type = other DNA
atgcgacggcggttctctattttgatctggtttaccagtgaaggagtgatgttgaaacggataatctggattctg

SEQ ID NO: 413324 - DNA, 75 bp, synthetic construct
  source 1..75: mol_type = other DNA
agtttctttcgatgttttttatggccatattattttcccctgcattcaatgcttctttgtttttaccggagttaa

SEQ ID NO: 413325 - DNA, 75 bp, synthetic construct
  source 1..75: mol_type = other DNA
acatcaataaaagttgcagctatggatgttcctattcaaattacaggtgagatattggtgccaccttgtcaaatc

SEQ ID NO: 413326 - DNA, 75 bp, synthetic construct
  source 1..75: mol_type = other DNA
acctaaccgaggagaaagaaaaggatcatatccattcaatagcccttgccctaatggtactgagaaagtatcagc

SEQ ID NO: 413327 - DNA, 75 bp, synthetic construct
  source 1..75: mol_type = other DNA
atcaaacatcatcttttcaaatggagaaataaacaacctcttcattaaaaaagcaacatatttggagcatcattc

SEQ ID NO: 413328 - DNA, 75 bp, synthetic construct
  source 1..75: mol_type = other DNA
atgcgctacgcttatcaggcctacgagtgcagtgctctacgtaggccggataaggcgttcacgccgcatccggca

SEQ ID NO: 413329 - DNA, 75 bp, synthetic construct
  source 1..75: mol_type = other DNA
cgcaggtaagttgcagtatttcttcgacaagctgatgaccaacctgaaaaacggcaatctcgccactgcttccac

SEQ ID NO: 413330 - DNA, 75 bp, synthetic construct
  source 1..75: mol_type = other DNA
actttagttcgcgacaatgtaaagctaaataatgatgtgtataaagaacttaataagtttatgcacgattacgac

SEQ ID NO: 413331 - DNA, 75 bp, synthetic construct
  source 1..75: mol_type = other DNA
taacaatagaaaagagcaacctttcatatgggtattattttggttgtgtattatccaatatatcatgttttgaaa

SEQ ID NO: 413332 - DNA, 75 bp, synthetic construct
  source 1..75: mol_type = other DNA
atatattcctgagatattttatgacgcctgcaaacatctccagtcatttttttatcatcaggagaagtcacaaaa

SEQ ID NO: 413333 - DNA, 75 bp, synthetic construct
  source 1..75: mol_type = other DNA
tgatgtgtataaagaactgaaaaagtttatgcacgattacgacaaaacatccccagaaatgagaaaataccttca

SEQ ID NO: 413334 - DNA, 75 bp, synthetic construct
  source 1..75: mol_type = other DNA
atgaggcctgcagaaatctccagtcattttatgctcatcaggatgacgtcacaaaacgctaaatatagtgcaata

SEQ ID NO: 413335 - DNA, 75 bp, synthetic construct
  source 1..75: mol_type = other DNA
ccattctttcaacctagggttgactctggtgctatatctcgctttaccagtgcgttaaaagcaaagcttgaacac

SEQ ID NO: 413336 - DNA, 75 bp, synthetic construct
  source 1..75: mol_type = other DNA
gcgacttcaacaatgtgctgccagtggatttggttgatccgcagcaggtgcaggagtttgtcgaccacgcctggt

SEQ ID NO: 413337 - DNA, 75 bp, synthetic construct
  source 1..75: mol_type = other DNA
aatatgatgaatggggcaaccagcttaatgaggagaacccgcatcatgtgtatcagccgtaccgtctgccagggc

SEQ ID NO: 413338 - DNA, 75 bp, synthetic construct
  source 1..75: mol_type = other DNA
ttcttactgcggagataatataaaggaatttatacttttattaccctataataaatctctggagatgcatgaact

SEQ ID NO: 413339 - DNA, 75 bp, synthetic construct
  source 1..75: mol_type = other DNA
ataataagaaagctactgacaatgaaattaatgacatcaaagttaacctgtctcatattcttattgattccttag

SEQ ID NO: 413340 - DNA, 75 bp, synthetic construct
  source 1..75: mol_type = other DNA
accactgtttccgctcatagagatccccgcattctgggatgatgatgagggcattgaacttataaaacacctttc

SEQ ID NO: 413341 - DNA, 75 bp, synthetic construct
  source 1..75: mol_type = other DNA
ctttttaactgatggtgatattgacttttcaagatgcaccgctaagccatgttggttatcatatttggttaccca

SEQ ID NO: 413342 - DNA, 75 bp, synthetic construct
  source 1..75: mol_type = other DNA
caaataatagaaatgcatttccgatcattgttatgactcgcaacgaaggcgccgacttacaacgttgcgttgatt

SEQ ID NO: 413343 - DNA, 75 bp, synthetic construct
  source 1..75: mol_type = other DNA
gatatcaattgaatccgatatcagacatcgaccccctgggtttatctatgtgggaggatgcaaaatcgggggcat

SEQ ID NO: 413344 - DNA, 75 bp, synthetic construct
  source 1..75: mol_type = other DNA
gatgctgttcgttatgaattggccacaggtgaaaaagttggtggtagaggacatgtattgaaagcacaggattat

SEQ ID NO: 413345 - DNA, 75 bp, synthetic construct
  source 1..75: mol_type = other DNA
gctaatgatgggcgtgccgggaaggctctgagcgatgggcagttaataaattctcaggctgaaatgtgttactgg

SEQ ID NO: 413346 - DNA, 75 bp, synthetic construct
  source 1..75: mol_type = other DNA
aaaacaccgcccggacggtagcgtatggcgctatgcgcgggacagggaaagatcatcagaagttcactttttgta

SEQ ID NO: 413347 - DNA, 75 bp, synthetic construct
  source 1..75: mol_type = other DNA
cccggcgctacgggagcagtggcactaccggggcggatttgacctgctggcgaaggaaagccgggcagcgaatga

SEQ ID NO: 413348 - DNA, 75 bp, synthetic construct
  source 1..75: mol_type = other DNA
atgatgcaaaagttaaccttacaccggtcatcgattcgattctggagatttttttaaaattcccatatattaatg

SEQ ID NO: 413349 - DNA, 75 bp, synthetic construct
  source 1..75: mol_type = other DNA
gttacgtacgatgtttaatgtcaaattactgccacattttttcatcggtttcattttaacaacgtattttaaatt

SEQ ID NO: 413350 - DNA, 75 bp, synthetic construct
  source 1..75: mol_type = other DNA
cagtggaggacactaccaaaaaattaattagagagagtgagcaattcaagattttagagaaggaaacaattgaaa

SEQ ID NO: 413351 - DNA, 75 bp, synthetic construct
  source 1..75: mol_type = other DNA
aacacagagagaatacgatgcttcgggcattctcatgggctaccgcagcaacggccaccggatggacttcggtca

SEQ ID NO: 413352 - DNA, 75 bp, synthetic construct
  source 1..75: mol_type = other DNA
cggcggcatgattgtgccttacggtgatcctgatatggctggtactttaaagcgtatctggactctggtgactac

SEQ ID NO: 413353 - DNA, 75 bp, synthetic construct
  source 1..75: mol_type = other DNA
atgaaagacaataaagcctgggtttctgacacctttattaacgatgttttccagtccgggctggatcaaaccttt

SEQ ID NO: 413354 - DNA, 75 bp, synthetic construct
  source 1..75: mol_type = other DNA
caaacagcaattgttaatggtcagcctctggcactgcaagtgccggtagtgatgaaagacaataaagcctgggtt

SEQ ID NO: 413355 - DNA, 75 bp, synthetic construct
  source 1..75: mol_type = other DNA
tttccaaatgtgtaagaacctcagattactattcgacaggaactgaccttaatgtattgagagacccgataatgg

SEQ ID NO: 413356 - DNA, 75 bp, synthetic construct
  source 1..75: mol_type = other DNA
ccggggcagcagtatgatgaggagtccggcctgtattacaaccgccaccgctattatgacccgctgcaggggagg

SEQ ID NO: 413357 - DNA, 75 bp, synthetic construct
  source 1..75: mol_type = other DNA
attcaaagaatatctatcttgagaaacaggtttttcacgatctgataatatatctaagagaaaaaagtgaaatat

SEQ ID NO: 413358 - DNA, 75 bp, synthetic construct
  source 1..75: mol_type = other DNA
ttacaaccgccaccgctattatgacccgctgcaggggaggtatatcactcaggatccgattgggctgaagggggg

SEQ ID NO: 413359 - DNA, 75 bp, synthetic construct
  source 1..75: mol_type = other DNA
agaacgcagcgccgcagcctggcggatgcgcttcagcagtccggcggcgaagacggtggcagtgtggtgttcccg

SEQ ID NO: 413360 - DNA, 75 bp, synthetic construct
  source 1..75: mol_type = other DNA
actcgccacagtgtgagctgcatcttaaatcaggtgtggtaaaactgtttgcccccctcactccggaacttctta

SEQ ID NO: 413361 - DNA, 75 bp, synthetic construct
  source 1..75: mol_type = other DNA
gtataagcatcaggaaatgggccagcccaacgtcagtaccgaacgccgggagttggtggtgcgctggatcagtac

SEQ ID NO: 413362 - DNA, 75 bp, synthetic construct
  source 1..75: mol_type = other DNA
attttcacctcagcatgaactcgcgcgtcggacctatgatctccaccgtgacttataacgacaatggcaccaaac

SEQ ID NO: 413363 - DNA, 75 bp, synthetic construct
  source 1..75: mol_type = other DNA
cgcggtattactgatgcgaaaaaagtgattaccacgccgctgaccgtaggttatttcgatggtaaagatggcctg

SEQ ID NO: 413364 - DNA, 75 bp, synthetic construct
  source 1..75: mol_type = other DNA
cagagcaataggaaccattaagcataacttcaccagtattaatattaataactataaatccaaacctatgcactg

SEQ ID NO: 413365 - DNA, 75 bp, synthetic construct
  source 1..75: mol_type = other DNA
ttcagttgcaccaatgatgatgcttggtttatgtgcttctctcgtgctttatatcagtatcattaaaacaaatag

SEQ ID NO: 413366 - DNA, 75 bp, synthetic construct
  source 1..75: mol_type = other DNA
ttggaacactctaacaggaatcgagactataatatttactggcagagttttcgtcgtcaggaggtatgcggagat

SEQ ID NO: 413367 - DNA, 75 bp, synthetic construct
  source 1..75: mol_type = other DNA
atctggataatattgcatggagaataaaatatgacgcaataaagacaaaacatcaatcaagccatgataagaaag

SEQ ID NO: 413368 - DNA, 75 bp, synthetic construct
  source 1..75: mol_type = other DNA
gtggtgaatgttcctccggcatgggtttatatctgtacaccgcatcagaaatgtaatattcggggaaatactggt

SEQ ID NO: 413369 - DNA, 75 bp, synthetic construct
  source 1..75: mol_type = other DNA
tgaaaggatatgctgatgacctgatgaaaaaacatgttgaggccgccaatccacacaagcagtacccgttaatcg

SEQ ID NO: 413370 - DNA, 75 bp, synthetic construct
  source 1..75: mol_type = other DNA
gggctgttggttatattgcctgtgcaggttttagtcccgacccggttaaatttatatccagagccagtactcctg

SEQ ID NO: 413371 - DNA, 75 bp, synthetic construct
  source 1..75: mol_type = other DNA
ggcagcaagtcagtttcagcaacgaacacacgccgcccccgtcattacacgagatacccaacgtcaggcagcggc

SEQ ID NO: 413372 - DNA, 75 bp, synthetic construct
  source 1..75: mol_type = other DNA
gatcgttttgaagcccatattgaaggcataggttcagttgctgcgacattttcaagcgcagccccaaaaggaagt

SEQ ID NO: 413373 - DNA, 75 bp, synthetic construct
  source 1..75: mol_type = other DNA
gactatcagaatatttggtgaaaggggttgattttgattcgtttcagcaattggtcaacattacgagatttgtca

SEQ ID NO: 413374 - DNA, 75 bp, synthetic construct
  source 1..75: mol_type = other DNA
atgaataatgatgagctggccaccagacgtgcgcaggcgattgccgaagacagatgtttctcaaaaggacgtctg

SEQ ID NO: 413375 - DNA, 75 bp, synthetic construct
  source 1..75: mol_type = other DNA
gccctactaattattttggttatactgataagggtacttttatctctgactcaggtgtaattacaggcacccctc

SEQ ID NO: 413376 - DNA, 75 bp, synthetic construct
  source 1..75: mol_type = other DNA
aagatttcatgaactattacagattttcgctttggccagcaatccctgaaaatgcgctattgcaatacaaaccca

SEQ ID NO: 413377 - DNA, 75 bp, synthetic construct
  source 1..75: mol_type = other DNA
atcaggctggtaaaacaggcattacagcctggtgcagtcgttgcacggatcgccagagagcacaatattaatgac

SEQ ID NO: 413378 - DNA, 75 bp, synthetic construct
  source 1..75: mol_type = other DNA
agaggcagacacactcagtttgaccccacaccgccgcccccacctgtcggtgtcactgacagtcagggtctggta

SEQ ID NO: 413379 - DNA, 75 bp, synthetic construct
  source 1..75: mol_type = other DNA
gtaagcagcggatgcactggctggcgctgcagttcgtggatgagaacaacaacccagtttccggtctcaacgtgc

SEQ ID NO: 413380 - DNA, 75 bp, synthetic construct
  source 1..75: mol_type = other DNA
tttgcgcatccgttattacaacatggtcgtatgatgccctgggtgcgggggcggagatggttctgtcgctgagcg

SEQ ID NO: 413381 - DNA, 75 bp, synthetic construct
  source 1..75: mol_type = other DNA
agtacaccgccaaaaagctcaacgataacgagtggcagctgacgtcggtatctgcaccgcgtgaaaagttggtac

SEQ ID NO: 413382 - DNA, 75 bp, synthetic construct
  source 1..75: mol_type = other DNA
acccgattcatatcagtgtgatggatgtcattgttgatggccatgatgtgcctctcaacatgatccgtcctttcg

SEQ ID NO: 413383 - DNA, 75 bp, synthetic construct
  source 1..75: mol_type = other DNA
taacttatgcaggtgttgtcattggtggtacacgagttgtttacttgagtaataactcagataaatctatttctg

SEQ ID NO: 413384 - DNA, 75 bp, synthetic construct
  source 1..75: mol_type = other DNA
gctgatgagtacgcggctagcgatgaggctgacatcccccgccaactgagcgacttgttgccaccggaggaaata

SEQ ID NO: 413385 - DNA, 75 bp, synthetic construct
  source 1..75: mol_type = other DNA
gaacatttaacttcggcactcttcatcttgaaaatgcggattttgctgttgcacgcaatgctgacgtgaaaggta

SEQ ID NO: 413386 - DNA, 75 bp, synthetic construct
  source 1..75: mol_type = other DNA
agatagccactttatctataaataatacagatgcctatatttaccatggcaatatcacgggcaatacaaaaatta

SEQ ID NO: 413387 - DNA, 75 bp, synthetic construct
  source 1..75: mol_type = other DNA
tctatgagggtaaatagctgggggaggggagcgtttgataaatcattccctgatagtcattttattattgtcacg

SEQ ID NO: 413388 - DNA, 75 bp, synthetic construct
  source 1..75: mol_type = other DNA
caggattctatcctcagcgccccgcatgtattgcgcaatttactgacctacaaaatttaccacagccattttccg

SEQ ID NO: 413389 - DNA, 75 bp, synthetic construct
  source 1..75: mol_type = other DNA
ctgcagtcgccatcgttgaacgttgaagagaatctgatagcgctggcacagtttatggtttacctacagcgcatt

SEQ ID NO: 413390 - DNA, 75 bp, synthetic construct
  source 1..75: mol_type = other DNA
tcggcaccgcgtgaaaagctggtgcttaaccgctggcagatgaagctggctggactcctggaacaggttgaggtg

SEQ ID NO: 413391 - DNA, 75 bp, synthetic construct
  source 1..75: mol_type = other DNA
gctcgaaaaccggccagatgggcatcgccatcagttcctccagcatcgctgtgggcgcgcgctgcccctggctgc

SEQ ID NO: 413392 - DNA, 75 bp, synthetic construct
  source 1..75: mol_type = other DNA
tgtaataattttatttcctgaaagtccggggtctttcacagagcttggtgcgttctctaataatgaaaacttaag

SEQ ID NO: 413393 - DNA, 75 bp, synthetic construct
  source 1..75: mol_type = other DNA
agaaagacacttgaccgattgcggcttgagattatgaattttgaaaaccgtagaaaatcaacatttaactatgat

SEQ ID NO: 413394 - DNA, 75 bp, synthetic construct
  source 1..75: mol_type = other DNA
ggcaggtcgctgaaaacatccagcgcgccgcgcgcggcgaaccggtgactaatcaggtgttcccggagcgtggct

SEQ ID NO: 413395 - DNA, 75 bp, synthetic construct
  source 1..75: mol_type = other DNA
atgggctggttcatcgtgttcatcatggtcatcacgaccaccggcaatttctggttcaccagtcagctctcccgc

SEQ ID NO: 413396 - DNA, 75 bp, synthetic construct
  source 1..75: mol_type = other DNA
agaacaaaccgcgcaagcatgatttgtttatgacgaggattggcgatgtcggtacttgtgctattgtggaggatg

SEQ ID NO: 413397 - DNA, 75 bp, synthetic construct
  source 1..75: mol_type = other DNA
cgagggggatataagtcaatggcggtataaagaaagagtgattgatgttgttttgacgtctttactctatgagaa

SEQ ID NO: 413398 - DNA, 75 bp, synthetic construct
  source 1..75: mol_type = other DNA
ttgttttctgatataactaagcgttacaattttagcttagaggttattcaggaaatatctaataggccattgagt

SEQ ID NO: 413399 - DNA, 75 bp, synthetic construct
  source 1..75: mol_type = other DNA
cctgtcgaagttctgaatgttatgacaaccgattttttactgaccttgagaactcctgaaggcggacttcgatag

SEQ ID NO: 413400 - DNA, 75 bp, synthetic construct
  source 1..75: mol_type = other DNA
tatctgccacagttaccctgtgaaataacatcagttacaatagaaaactgcaataacctaaccaaccttacaggg

SEQ ID NO: 413401 - DNA, 75 bp, synthetic construct
  source 1..75: mol_type = other DNA
cgccagagttcgcctttgaagcgctgatgcacgacgctgcggaggcatattgccaggatattccggcccagctca

SEQ ID NO: 413402 - DNA, 75 bp, synthetic construct
  source 1..75: mol_type = other DNA
gtaaaaaatttaactacctgaccgccacaatcgacgatatcgatgttgaggatatcgcgactgctctttccaaca

SEQ ID NO: 413403 - DNA, 75 bp, synthetic construct
  source 1..75: mol_type = other DNA
cccagccagagcgagatgcaagttttgagcgtcggtaatgactccaacttattgatagtgttttatgttcagata

SEQ ID NO: 413404 - DNA, 75 bp, synthetic construct
  source 1..75: mol_type = other DNA
tcaattatcatgatctcctctgaattgccggaagtgttaggaatgtgcgaccgtattttagtgatgcgtagtggc

SEQ ID NO: 413405 - DNA, 75 bp, synthetic construct
  source 1..75: mol_type = other DNA
ttattgcgcgctgggtatgtaaagatactgatattttaatcttcgacgaacctactcgcggtattgatgttggtg

SEQ ID NO: 413406 - DNA, 75 bp, synthetic construct
  source 1..75: mol_type = other DNA
tggtcaggtttatctgagcggaatgcctctgtcaggacaggttagtgtgaaatgggggagtcagaccacggacca

SEQ ID NO: 413407 - DNA, 75 bp, synthetic construct
  source 1..75: mol_type = other DNA
tttcgccttaaaaaatgcacaaggtgtagttgttccgtgggttccttctgtaggcgacttactggcatgtgactg

SEQ ID NO: 413408 - DNA, 75 bp, synthetic construct
  source 1..75: mol_type = other DNA
acccagcaagaagaaatcgaccttgaagcagccgacttttcagacgcgctgatgtggctgaaggaaggcaagaaa

SEQ ID NO: 413409 - DNA, 75 bp, synthetic construct
  source 1..75: mol_type = other DNA
atatcctctgaaaagaaaatgtcccacaggtacagatagagttgctgcttatcatactcacggtgcagatagtca

SEQ ID NO: 413410 - DNA, 75 bp, synthetic construct
  source 1..75: mol_type = other DNA
gggcggtatatcacccaggatccgatagggttgaaggggggaataaatctatacacgtatccactggcaccaata

SEQ ID NO: 413411 - DNA, 75 bp, synthetic construct
  source 1..75: mol_type = other DNA
tagatgagttgtgtaagaaagtgacaagttggatgtattcgcatcctggagagagaattagatatgaacgtttta

SEQ ID NO: 413412 - DNA, 75 bp, synthetic construct
  source 1..75: mol_type = other DNA
cgaccttacagtagctcagcagcagatggtagaaattgccaaggccatttcagttaacgcaaagattctcattat

SEQ ID NO: 413413 - DNA, 75 bp, synthetic construct
  source 1..75: mol_type = other DNA
tacaactgtcttatcgaagggaataaaaataacaaacgaacagcaacgggtctaagtaccagtattgtcggcgca

SEQ ID NO: 413414 - DNA, 75 bp, synthetic construct
  source 1..75: mol_type = other DNA
gagataccattcttgcatctgtgggtatcatcgtcgctgtattttcgctctactttactcaggagcaaagtaagg

SEQ ID NO: 413415 - DNA, 75 bp, synthetic construct
  source 1..75: mol_type = other DNA
cactcgcgcctttggtaagggttattggtaacctaaaaaccggaggcgcgctattggctggggaaacagggattg

SEQ ID NO: 413416 - DNA, 75 bp, synthetic construct
  source 1..75: mol_type = other DNA
tcattcagcatcatatagaaccgggcatcccatttattcttttgcagctattggatatcgggcaaaggattttca

SEQ ID NO: 413417 - DNA, 75 bp, synthetic construct
  source 1..75: mol_type = other DNA
caagctcttgaaatacttaacaatcgcgtacattaatgagaactcggcaagtgttgctgataaatttgctcagtt

SEQ ID NO: 413418 - DNA, 75 bp, synthetic construct
  source 1..75: mol_type = other DNA
caccaatgacatctgatgttatcccgccgaaaaatgctttcactcgtggtcttactcaggatgctgagggggcca

SEQ ID NO: 413419 - DNA, 75 bp, synthetic construct
  source 1..75: mol_type = other DNA
acatcattgttcgcacctgcggcaacaaaattggctaaatccacggcccaatggacaacaatccttgagaagaat

SEQ ID NO: 413420 - DNA, 75 bp, synthetic construct
  source 1..75: mol_type = other DNA
gctttctcttcgccagcctttataccttttcgagcatagcgacggtaatgggaattacgggagggatgtttgccg

SEQ ID NO: 413421 - DNA, 75 bp, synthetic construct
  source 1..75: mol_type = other DNA
cgccgggacgcctgattcgtgatcctgacacgatgtgcccgctggcacaggagggggaggaaaagcccttcacgc

SEQ ID NO: 413422 - DNA, 75 bp, synthetic construct
  source 1..75: mol_type = other DNA
gttgacggagtttccatcactggaaacacagtcgattcatgtaatgggatattccttagagggaattacattgct

SEQ ID NO: 413423 - DNA, 75 bp, synthetic construct
  source 1..75: mol_type = other DNA
gctggccttcagcaatgagaagcaaagcctgactgatggtttcagtgaaaaagaacggcagtgggatcaggagag

SEQ ID NO: 413424 - DNA, 75 bp, synthetic construct
  source 1..75: mol_type = other DNA
gccgaaggctcgacagattttacagataattcgcagtcagaacgttagtgcagaaaagctgctgtcttatatccg

SEQ ID NO: 413425 - DNA, 75 bp, synthetic construct
  source 1..75: mol_type = other DNA
tttcactcgcggccttactcaggatgccgagggggctttgctcgggacaggctcaaagcgagcggagcaatatgc

SEQ ID NO: 413426 - DNA, 75 bp, synthetic construct
  source 1..75: mol_type = other DNA
tctgattaatgcaatcagccaggggcttggtggacccaaggttttggatgatgtttatcgtccagtagacagacc

SEQ ID NO: 413427 - DNA, 75 bp, synthetic construct
  source 1..75: mol_type = other DNA
gtactataaccgtcaccggtactacgatccgttgcaggggcggtatattactcaggacccgatggggttgaaagg

SEQ ID NO: 413428 - DNA, 75 bp, synthetic construct
  source 1..75: mol_type = other DNA
gccgctgggctatctgattgaggttaaggagtggtgggaactcaacgaaaagcccggaactttccggattgttgt

SEQ ID NO: 413429 - DNA, 75 bp, synthetic construct
  source 1..75: mol_type = other DNA
tccggaatggcctgatggcacttccgttactgatacccccgtttgcgctgcatgctgacgaactgatgaagtggg

SEQ ID NO: 413430 - DNA, 75 bp, synthetic construct
  source 1..75: mol_type = other DNA
tcagacgcgggtgcagttgcaggatgtggaaagcggtgaggttattcttctcgatgtcaccgccggtgaaaaagg

SEQ ID NO: 413431 - DNA, 75 bp, synthetic construct
  source 1..75: mol_type = other DNA
gccgagcggtttatgacagcgaggattatcaggaaggtatgaatgctttcctggaaaaacgtaaacctaatttcg

SEQ ID NO: 413432 - DNA, 75 bp, synthetic construct
  source 1..75: mol_type = other DNA
gtgttcattttcccaccgttttcggcagaaacaactaacagttttgcccgaggctggctggatttctccgccact

SEQ ID NO: 413433 - DNA, 75 bp, synthetic construct
  source 1..75: mol_type = other DNA
tccccgtcagttgcaggggcagtttgtcagcgccacgttccagcatcagtggctggacgcgaagggcacaccgga

SEQ ID NO: 413434 - DNA, 75 bp, synthetic construct
  source 1..75: mol_type = other DNA
ccgggctgatggcgctgtccttcgccctgctgcccctggcgacgctggtatcacgtcctgccggcgcagatgagc

SEQ ID NO: 413435 - DNA, 75 bp, synthetic construct
  source 1..75: mol_type = other DNA
acacttgagcgtaaatctcttactgctgttcagaaatcacaatgtgaaatcatcacccccaaaaaacctggcgaa

SEQ ID NO: 413436 - DNA, 75 bp, synthetic construct
  source 1..75: mol_type = other DNA
tgggtagttgacgcatcctatgagtacaccaaattgggcgatgtgaaagtaggtacttggatgaccggtattggt

SEQ ID NO: 413437 - DNA, 75 bp, synthetic construct
  source 1..75: mol_type = other DNA
gaatacgattattattttgcaggctctaaaattggaaatggagaactggattactattcactagctgccggtcca

SEQ ID NO: 413438 - DNA, 75 bp, synthetic construct
  source 1..75: mol_type = other DNA
tcaacctgggcgtaccatataacctggttggcattcacaacctgacccgcgatgcaggtttccacatcgtcaaag

SEQ ID NO: 413439 - DNA, 75 bp, synthetic construct
  source 1..75: mol_type = other DNA
ttccgatctgatcatcgccgccagtacctcaaccttctcaatgacgcctgtaaacctcggcgtcccgtataacct

SEQ ID NO: 413440 - DNA, 75 bp, synthetic construct
  source 1..75: mol_type = other DNA
ccagggatcttaatgggtcttgcggtaatgatagtctgcggcattattgaaccgccccgggaatcctggagacta

SEQ ID NO: 413441 - DNA, 75 bp, synthetic construct
  source 1..75: mol_type = other DNA
gtgcctcctgggctgccaactgggcacttagcccagtggtgatgtgcattatctgtatggtgatgtcggcgctga

SEQ ID NO: 413442 - DNA, 75 bp, synthetic construct
  source 1..75: mol_type = other DNA
gctcatcaccgctggaggttgctgccgcagccgcgctcgcagagattaagcgtgtgccggtaccgctgcgcaccc

SEQ ID NO: 413443 - DNA, 75 bp, synthetic construct
  source 1..75: mol_type = other DNA
ggcacctgaaccttccgcagcttgaccgtgactacgactggaacgacaacggacagctaatccgcatcagcggcc

SEQ ID NO: 413444 - DNA, 75 bp, synthetic construct
  source 1..75: mol_type = other DNA
tgggacaccagactactgcccaaaatgccgtagccgcagaatatcaacatctccgattggataaaggagaccact

SEQ ID NO: 413445 - DNA, 75 bp, synthetic construct
  source 1..75: mol_type = other DNA
tacatctatgagtgatgacagaatcaaaaaaggaagtgatctgacaataaaacaattagctagcgacataagagc

SEQ ID NO: 413446 - DNA, 75 bp, synthetic construct
  source 1..75: mol_type = other DNA
gaaatgtatcaggaacttgagcgcctgattgaagacgccaaaccggcaagtcgccacctgaccgggctggctatc

SEQ ID NO: 413447 - DNA, 75 bp, synthetic construct
  source 1..75: mol_type = other DNA
tgtggaactggcgcacctgcccggtaagcctgttgccgtatctggcgtgggcgctgtcggtcgacaggtgggatg

SEQ ID NO: 413448 - DNA, 75 bp, synthetic construct
  source 1..75: mol_type = other DNA
ggaatagccggaagtattgttgaaatctggatgggtctgacgggcggtaaagcaacgctggtggagctaccaaaa

SEQ ID NO: 413449 - DNA, 75 bp, synthetic construct
  source 1..75: mol_type = other DNA
tctggcaaaggagcgcgggaagtatcagacgggaaaaggagacaaggttcattcgacctcgcaacttcgcaacaa

SEQ ID NO: 413450 - DNA, 75 bp, synthetic construct
  source 1..75: mol_type = other DNA
aggcggaatacatcccggagaggaaacttcatctttaccactgtgaccaccgtgggctgccgcaggcgcttatca

SEQ ID NO: 413451 - DNA, 75 bp, synthetic construct
  source 1..75: mol_type = other DNA
actcttaaagggttacggttttatctggtatgaccacctagcagagaaaagctgttatagttcaagcgttgctgc

SEQ ID NO: 413452 - DNA, 75 bp, synthetic construct
  source 1..75: mol_type = other DNA
gtgatactgaatgaacctgccgcccagaaagaagcctttaatctggctggcatgttgtcaaaagttgacatctgc

SEQ ID NO: 413453 - DNA, 75 bp, synthetic construct
  source 1..75: mol_type = other DNA
cagtaaaattcttgaattgaatggcgcagtgcccagcagccagttgatctacttccatatttccgcggccagcgc

SEQ ID NO: 413454 - DNA, 75 bp, synthetic construct
  source 1..75: mol_type = other DNA
atgttccaggaattgccagtgaaattttgcgcgggcgcgacgttcatcaccggcttcaatggcagtggctacagt

SEQ ID NO: 413455 - DNA, 75 bp, synthetic construct
  source 1..75: mol_type = other DNA
cctgcgagccttactggagctcgcccatccccggggcaatttactgcaacagcgacgataactgttgagattgtg

SEQ ID NO: 413456 - DNA, 75 bp, synthetic construct
  source 1..75: mol_type = other DNA
ttacctctataaacccggacaacacagtgcctgtttatctggcaggttatgtcccggaatttgttatttatcgca

SEQ ID NO: 413457 - DNA, 75 bp, synthetic construct
  source 1..75: mol_type = other DNA
gcattatttttctaaagacaatggtgtaaacagttacggcgggaaacggcgacaaaacttatgcccgtcttggtt

SEQ ID NO: 413458 - DNA, 75 bp, synthetic construct
  source 1..75: mol_type = other DNA
atggacgttgagtacggtcagtacagcgttattctgttggtggaaggcttcccgccatcgcatgccgggaccatc

SEQ ID NO: 413459 - DNA, 75 bp, synthetic construct
  source 1..75: mol_type = other DNA
tgttgttactggccggatgcagcacctcgcaggaggaactgatgcctgtcgaccccaatgccagcatgctgacgc

SEQ ID NO: 413460 - DNA, 75 bp, synthetic construct
  source 1..75: mol_type = other DNA
tgcggtggttgatgctccagtactggacgatgccgatgatgatatctgggttgacctggaaattgccaaagaatt

SEQ ID NO: 413461 - DNA, 75 bp, synthetic construct
  source 1..75: mol_type = other DNA
aatttatctcagccgtaatgacgctcagattaggggcgatggtcgccttgattgacgattctcttgatcaagctg

SEQ ID NO: 413462 - DNA, 75 bp, synthetic construct
  source 1..75: mol_type = other DNA
acacctcaaagtcagcaggtgcactagctcgatgggtacttccgggtgagatgataactgtagctggtgtagcaa

SEQ ID NO: 413463 - DNA, 75 bp, synthetic construct
  source 1..75: mol_type = other DNA
tacgacaccgccgttatttccggtactgttgagtcactcaataccgtctttgttgctccacaaaacttaaatgaa

SEQ ID NO: 413464 - DNA, 75 bp, synthetic construct
  source 1..75: mol_type = other DNA
catcatcggctattagcacagcgtcagagagagtccgcaacccagcacttggggcatttgtgttttcgtggtgtt

SEQ ID NO: 413465 - DNA, 75 bp, synthetic construct
  source 1..75: mol_type = other DNA
atccaacagcatctccaggggatcgagcagcagcagaaaacgttcttcaggatttacagaatgctttgggaggca

SEQ ID NO: 413466 - DNA, 75 bp, synthetic construct
  source 1..75: mol_type = other DNA
ggcttaggtaggaacaacagccctcaacttaacagtctatttcttgatagatatagtgattcgaccaatacatac

SEQ ID NO: 413467 - DNA, 75 bp, synthetic construct
  source 1..75: mol_type = other DNA
ttaagtttgattcattgaatccagtaaatggcttaaagcgtatatttggcttaaaaaccgtaaaagaatttgtta

SEQ ID NO: 413468 - DNA, 75 bp, synthetic construct
  source 1..75: mol_type = other DNA
tcatggctgatgcaacaggtttcccgtctattgcatccggtgaaagcagtcttacggggtttattagtcaggtag

SEQ ID NO: 413469 - DNA, 75 bp, synthetic construct
  source 1..75: mol_type = other DNA
cggcaactgttgatggtgccagaacgaatcttggcttaggtaggaacaacagccctcaacttaacagtctatttc

SEQ ID NO: 413470 - DNA, 75 bp, synthetic construct
  source 1..75: mol_type = other DNA
tgcgttaaaagcaaagcttaaacatgataagcatattaaaactcaacggaaagactggcctgatagtcgacattc

SEQ ID NO: 413471 - DNA, 75 bp, synthetic construct
  source 1..75: mol_type = other DNA
catttctttattatcagattggggagagatgctattccttctcatactgtattgtctcggcagtatgataattgt

SEQ ID NO: 413472 - DNA, 75 bp, synthetic construct
  source 1..75: mol_type = other DNA
acaacctgttccagatgaacagttctcttcagaagataaattcattgagggtgaagacacagaaatcgagaataa

SEQ ID NO: 413473 - DNA, 75 bp, synthetic construct
  source 1..75: mol_type = other DNA
cgaaacatggatatataaccatgataaatccatgcgcctgggtttaaccggatcaacgtgggggtgttacagcga

SEQ ID NO: 413474 - DNA, 75 bp, synthetic construct
  source 1..75: mol_type = other DNA
gttaggtttagcccagggcggtactggtggaagaactatcgagcaagcacgtgcgaacttgcgggtaatgtatga

SEQ ID NO: 413475 - DNA, 75 bp, synthetic construct
  source 1..75: mol_type = other DNA
cagggaccaacggttgacggcaatgaattacgtgaagaaacacgttatctgaatgttgactacgccgccgtgacg

SEQ ID NO: 413476 - DNA, 75 bp, synthetic construct
  source 1..75: mol_type = other DNA
ttgggttcatcagtcggcgtaagtaagatgctgtcgctaaaaaatttctttagcggagctgagatactgctaaat

SEQ ID NO: 413477 - DNA, 75 bp, synthetic construct
  source 1..75: mol_type = other DNA
ttatgagtaatgcaaaaggctttccatcgattgcatccggtgaaagcagtcttacggggtttattagtcaggtag

SEQ ID NO: 413478 - DNA, 75 bp, synthetic construct
  source 1..75: mol_type = other DNA
gcagccaaaaaatcagaaaccaacgcgaaaactagcgaggcagcagcaaagagcagcgaaaccaacgctaaagcc

SEQ ID NO: 413479 - DNA, 75 bp, synthetic construct
  source 1..75: mol_type = other DNA
tatattggtttcatggtttcaaagtaaaatgaaacttgcaacagaagctatcaaattaaaatttgattctcttaa

SEQ ID NO: 413480 - DNA, 75 bp, synthetic construct
  source 1..75: mol_type = other DNA
gcgctggggcaaggcagcattgcaagcaaagtgaactcaatcgcgttgggcagtaacagttcgtctgcaggagaa

SEQ ID NO: 413481 - DNA, 75 bp, synthetic construct
  source 1..75: mol_type = other DNA
attagttaaagattcaggggggggctgtcattttgtaaaaaaatacttaattcaaataacattgatggtgttttc

SEQ ID NO: 413482 - DNA, 75 bp, synthetic construct
  source 1..75: mol_type = other DNA
ggccggtattatttttagaattttttgtgcgagaagttgccgttaagggtaagggaattgttcgttctacattac

SEQ ID NO: 413483 - DNA, 75 bp, synthetic construct
  source 1..75: mol_type = other DNA
acgacttgcctgacggcgttaccgtttccgaaaacgtggtgaaagaaacctggaccgaaggcgccatcggcttta

SEQ ID NO: 413484 - DNA, 75 bp, synthetic construct
  source 1..75: mol_type = other DNA
cgtgcactggggcgaccagaaaacgtgtgccattcatctgccggaacatctggaagatgtgactaagcgcctgat

SEQ ID NO: 413485 - DNA, 75 bp, synthetic construct
  source 1..75: mol_type = other DNA
atgaaatgtattggcaggatgcgccagttgaaggcagcagcaaagcggctgcatacgctacaggctggaacgcct

SEQ ID NO: 413486 - DNA, 75 bp, synthetic construct
  source 1..75: mol_type = other DNA
tatgggaagcggtaatgatactgttttagccttggggtatgagtcaggtggaactgctgttattaacgcaacaat

SEQ ID NO: 413487 - DNA, 75 bp, synthetic construct
  source 1..75: mol_type = other DNA
cggcagtggcagcggccacggcggcagtggaagcagcggaagcagcggaccaggccgcgaaggacaagctggcag

SEQ ID NO: 413488 - DNA, 75 bp, synthetic construct
  source 1..75: mol_type = other DNA
ctggaacgagggcgatataacttacactagttatactcatgaatcggcacctggtatcagtgtgttaattgaaga

SEQ ID NO: 413489 - DNA, 75 bp, synthetic construct
  source 1..75: mol_type = other DNA
acaggggatcttcgacaaatgggaagcgattaagcagggcgtgctggatctgggcagcaatatttccaactggtt

SEQ ID NO: 413490 - DNA, 75 bp, synthetic construct
  source 1..75: mol_type = other DNA
tctggaacaacatcaccacgaccacgcgcaccgtatgggaggggataaagtcctttctctctgccgtgtgggacg

SEQ ID NO: 413491 - DNA, 75 bp, synthetic construct
  source 1..75: mol_type = other DNA
tttggctgggccgcgcaatgatggctaacccgattctggcggtcattgcattgattgccgccgccgcaatctgga

SEQ ID NO: 413492 - DNA, 75 bp, synthetic construct
  source 1..75: mol_type = other DNA
tcgtcattttcacagctacgccaactatctggatcacaaatacaacgacagcgatgcgcaggacgaaaaacagac

SEQ ID NO: 413493 - DNA, 75 bp, synthetic construct
  source 1..75: mol_type = other DNA
aggtttaatcctgactattatgtaactggcagagttgaaaaaaaagagggattaaataccttatatattgaaata

SEQ ID NO: 413494 - DNA, 75 bp, synthetic construct
  source 1..75: mol_type = other DNA
taggagaaattgaatctgaaatatcgaatctaaaacatttgaatgtgaatgtcagtgcatttgatgagttgaaac

SEQ ID NO: 413495 - DNA, 75 bp, synthetic construct
  source 1..75: mol_type = other DNA
gaaacaatacatcattccagtagtgacctcagtatcattacgggcgggttacagcgtgctcataacgagagtaaa

SEQ ID NO: 413496 - DNA, 75 bp, synthetic construct
  source 1..75: mol_type = other DNA
atgggcggaaaaccggcggcgcggcagggcgacatgacccgcaagggactggatattgtgcagggttcagcgggg

SEQ ID NO: 413497 - DNA, 75 bp, synthetic construct
  source 1..75: mol_type = other DNA
gccgcggcgaagccgtttttccataggcttcgcccccctgacaagcatcacagaatctgacgctcaaatcagtgg

SEQ ID NO: 413498 - DNA, 75 bp, synthetic construct
  source 1..75: mol_type = other DNA
cttgtataggctaaaggctcttatctcaaataagaggtttgatgggaagtattcaaaattacgctggcatattct

SEQ ID NO: 413499 - DNA, 75 bp, synthetic construct
  source 1..75: mol_type = other DNA
ctacaccaaccattttggcattgcggtggtgccgttgatttccagttaccagccttccaccgtggcggtgaacat

SEQ ID NO: 413500 - DNA, 75 bp, synthetic construct
  source 1..75: mol_type = other DNA
acgccaacctgctacatcaaacctggtggaatgcagacgcctccacgaccgccaacatcacagcaggttttaatg

SEQ ID NO: 413501 - DNA, 75 bp, synthetic construct
  source 1..75: mol_type = other DNA
gtgggccaaccgattaccccactaaacctcaatctttacgccaacctgctacatcaaacctggtggaatgcagac

SEQ ID NO: 413502 - DNA, 75 bp, synthetic construct
  source 1..75: mol_type = other DNA
tcgccagcggcgagcacctgcaactggccgcagtgaaaaacctccagataaatgcgggaaacaacgccgatatcg

SEQ ID NO: 413503 - DNA, 75 bp, synthetic construct
  source 1..75: mol_type = other DNA
acaaacctgacattaaatgataagtcgtcagtaaatgtgagcggcgagatgtcagtggcccagggaagttctgct

SEQ ID NO: 413504 - DNA, 75 bp, synthetic construct
  source 1..75: mol_type = other DNA
gctacttgtaatagtcaatctagcacctgccctgcaggtgggttaaatgcatctgcaaatattgataaatcagca

SEQ ID NO: 413505 - DNA, 75 bp, synthetic construct
  source 1..75: mol_type = other DNA
gaccagcgatggagtatctcgatccagtttgtggatggtggtatcgtgatttccatctataaggggcgtcggaag

SEQ ID NO: 413506 - DNA, 75 bp, synthetic construct
  source 1..75: mol_type = other DNA
gttaggatatgaaccactattcactctaaaggatggactagttccatctattcaatggtattattctaatcatta

SEQ ID NO: 413507 - DNA, 75 bp, synthetic construct
  source 1..75: mol_type = other DNA
catgtgcatgggatgtggcaagcctgatggattttgctgtgctggtgatggtgtgtctgctgatctggctgttta

SEQ ID NO: 413508 - DNA, 75 bp, synthetic construct
  source 1..75: mol_type = other DNA
gaagtctggctgggtaaagtaccggaaaccggcaagagacatgagcaggattatcgtcttatctggaaatcggag

SEQ ID NO: 413509 - DNA, 75 bp, synthetic construct
  source 1..75: mol_type = other DNA
gtggtcggcgatgctgatgttatcaaccgtattcgcgccacgctttactccggcggtagccagatccagggcgca

SEQ ID NO: 413510 - DNA, 75 bp, synthetic construct
  source 1..75: mol_type = other DNA
aaaaaggcccgggaaaaatcgtttatggaaggaagggaatataagcatgtcgctcatgacggtatgccatgggat

SEQ ID NO: 413511 - DNA, 75 bp, synthetic construct
  source 1..75: mol_type = other DNA
aaagttttacttatgctgcatcaagctcaacttatggagatcatcccgcactaccaaaagtagaggaaaacattg

SEQ ID NO: 413512 - DNA, 75 bp, synthetic construct
  source 1..75: mol_type = other DNA
taactaaagcaaaaatcctccgtgccgttgccagttcaactgcaatcgaaacgggtgtttctatcccaaaaattg

SEQ ID NO: 413513 - DNA, 75 bp, synthetic construct
  source 1..75: mol_type = other DNA
cgcaattgaaaccggtgtttctgtgcaaaaaattgagcaacaactcaaacaaaatcaggcacaggcgaaagccgt

SEQ ID NO: 413514 - DNA, 75 bp, synthetic construct
  source 1..75: mol_type = other DNA
gaaacgggtgtttctgtgcaaaaaattgagcagcaactcaaacaaaaccaggcacaggcgaaagctgttggcctc

SEQ ID NO: 413515 - DNA, 75 bp, synthetic construct
  source 1..75: mol_type = other DNA
caatgagattacagctatcccagaacttcttaacatgctggatattaaaggaaaaatcatcacaactgatgcgat

SEQ ID NO: 413516 - DNA, 75 bp, synthetic construct
  source 1..75: mol_type = other DNA
acacctaaaggctgtgaggagatatctggttatttcccccctatcatccctgagactgatttctacaaagtccag

SEQ ID NO: 413517 - DNA, 75 bp, synthetic construct
  source 1..75: mol_type = other DNA
acgggtgtttctatcccaaaaattgagcagcaactgaaacaaaatcaggcacaggcgaaagccgttggcctcgcc

SEQ ID NO: 413518 - DNA, 75 bp, synthetic construct
  source 1..75: mol_type = other DNA
gctgggagcgggctttcgtaatctttccctgattgcggtcccttatggtagcggaaccttacgtgaaatgagatt

SEQ ID NO: 413519 - DNA, 75 bp, synthetic construct
  source 1..75: mol_type = other DNA
aatgtttattattattctctaacatttgtcctcttctgtgcttataatttcatgactggcacgagggcagcaatt

SEQ ID NO: 413520 - DNA, 75 bp, synthetic construct
  source 1..75: mol_type = other DNA
tttagttggagtaatattgttttttttgttatatggaaccgtatgtacaatactttataatcatgggcctggcat

SEQ ID NO: 413521 - DNA, 75 bp, synthetic construct
  source 1..75: mol_type = other DNA
atgaactggagtttaattattttcttccggtaacggctcagtccgggattgaaacagtaccttttacagatgaat

SEQ ID NO: 413522 - DNA, 75 bp, synthetic construct
  source 1..75: mol_type = other DNA
agtacagcgccgcaggcgacctgacagcaacgatatcaccggacggtaaacgcagcaccatcgcatatgataaac

SEQ ID NO: 413523 - DNA, 75 bp, synthetic construct
  source 1..75: mol_type = other DNA
agaacgatcccggcgacagcacctggcagcaatttactccggacggaccgcgtgcgtttctgccgttgtttgata

SEQ ID NO: 413524 - DNA, 75 bp, synthetic construct
  source 1..75: mol_type = other DNA
cgcgcgttcgctcagcaattagctcagaacgcgaaatcaagtagcgaagcgaaagagcgtttgtggcagctacag

SEQ ID NO: 413525 - DNA, 75 bp, synthetic construct
  source 1..75: mol_type = other DNA
ccaacaccgaagttctgcgcgctaaagcgttagagaaggatctaacgctgcatgatggcgatgggcttttcctga

SEQ ID NO: 413526 - DNA, 75 bp, synthetic construct
  source 1..75: mol_type = other DNA
tgaagttgcagaggaacagcagcaaatcgctctggacagtattttttcgacggtcgccgctaactggttccagct

SEQ ID NO: 413527 - DNA, 75 bp, synthetic construct
  source 1..75: mol_type = other DNA
tggaagtttcgtcatcgcgtttattcaggcttccttttcagaatggttttttagtaacacgtcatccatttcgct

SEQ ID NO: 413528 - DNA, 75 bp, synthetic construct
  source 1..75: mol_type = other DNA
acgcggttaataccggtctgattgatgcaaatccggcatcaggtgttggaatggcatttgagaaacccaaaaaac

SEQ ID NO: 413529 - DNA, 75 bp, synthetic construct
  source 1..75: mol_type = other DNA
ctgaaatccgtaatttagtcagcagtaaactggctacctatattgaatccccacaagtggatgtcagtattgcgg

SEQ ID NO: 413530 - DNA, 75 bp, synthetic construct
  source 1..75: mol_type = other DNA
tggagaaagatgtatttcctgccattggtgagattcccgttcagcaaatcaaagcccgagcattggttgaagcac

SEQ ID NO: 413531 - DNA, 75 bp, synthetic construct
  source 1..75: mol_type = other DNA
gatgctgctgcgttagatgaattaggttataaagtaatagctgttgaaccaagtgaaaagatgcgaaatttggca

SEQ ID NO: 413532 - DNA, 75 bp, synthetic construct
  source 1..75: mol_type = other DNA
cgggacccttcacccgacagcaggctgaagcggttacccgccggtataaaaatatcgctattgaagatgaccagc

SEQ ID NO: 413533 - DNA, 75 bp, synthetic construct
  source 1..75: mol_type = other DNA
atggatatgattttttggagagaattaaggtttatgaataaagtattaacagcgatgctccttactgctttaggc

SEQ ID NO: 413534 - DNA, 75 bp, synthetic construct
  source 1..75: mol_type = other DNA
ttacgcgaagttggcgcagattgcgacactgtttctgcaggattatcagcagcaacaggcactaaatcctccaac

SEQ ID NO: 413535 - DNA, 75 bp, synthetic construct
  source 1..75: mol_type = other DNA
ggtgcactacacgcggacacaatatgcagagccgctggtcgaaagtcgctatctttacgacccgctgggccgcag

SEQ ID NO: 413536 - DNA, 75 bp, synthetic construct
  source 1..75: mol_type = other DNA
atgcacaacatctgcaactgttggttcatagcggctctgcggggggggtgcccctattaagttgtcaagcatgtt

SEQ ID NO: 413537 - DNA, 75 bp, synthetic construct
  source 1..75: mol_type = other DNA
gtcagcatttgcacagcatccgtggcgcagctcgcttggctctatcggtggcggcaatcatttcgctgaactgca

SEQ ID NO: 413538 - DNA, 75 bp, synthetic construct
  source 1..75: mol_type = other DNA
aatttaagggtatcaaccttgttaactcaacagacgctgatttagcggcgtcagggattgtaagtggttatctga

SEQ ID NO: 413539 - DNA, 75 bp, synthetic construct
  source 1..75: mol_type = other DNA
tttcttgatagcagtggtaacttccagtgcggcgggcaaatacttccagctaactatagtaattttgactcgcgc

SEQ ID NO: 413540 - DNA, 75 bp, synthetic construct
  source 1..75: mol_type = other DNA
cgaaggaattagatcctgcagatgaaacgtcagaatttggtgtgatgatgggagaacttaacagtgtattaagcg

SEQ ID NO: 413541 - DNA, 75 bp, synthetic construct
  source 1..75: mol_type = other DNA
tttatagataaggtgtcagataaaactatttgtgatggaaagattttaggaatcatgggattgataactggtctt

SEQ ID NO: 413542 - DNA, 75 bp, synthetic construct
  source 1..75: mol_type = other DNA
atcgatgcaaaaagtttttatcttgttgccagcactcatcttcaggctgatgatatacaaaaaatatcacaattt

SEQ ID NO: 413543 - DNA, 75 bp, synthetic construct
  source 1..75: mol_type = other DNA
gtatcaaaagatatgatcatcgaatccgtgtggaaaaatgtaattgtaagtgatgagtcccttacacgttgtata

SEQ ID NO: 413544 - DNA, 75 bp, synthetic construct
  source 1..75: mol_type = other DNA
gcgcagaatacgatgaatggggcaacctgctgaatgaagagaacccgcatcagctgcagcagctcatccgcctgc

SEQ ID NO: 413545 - DNA, 75 bp, synthetic construct
  source 1..75: mol_type = other DNA
agttgcgtgctgtggaaattgatgatttagaattgttaaataaatgggctaacgatccggaaatttggtatatgc

SEQ ID NO: 413546 - DNA, 75 bp, synthetic construct
  source 1..75: mol_type = other DNA
gacaaattggccaacaactcaattaccaccaggatatacttgtgcagaaccctatttattcccagacattaataa

SEQ ID NO: 413547 - DNA, 75 bp, synthetic construct
  source 1..75: mol_type = other DNA
agattcgggaattatcactgcggggatgaaagaaacaggcacaggcaacattactgttaaggataagtggatttg

SEQ ID NO: 413548 - DNA, 75 bp, synthetic construct
  source 1..75: mol_type = other DNA
ttagcgatggcggtaagttcgtatcgcaaaatattacttttttgggcgataaagcaagcggtatcagcacactga

SEQ ID NO: 413549 - DNA, 75 bp, synthetic construct
  source 1..75: mol_type = other DNA
gcgcgtgatacacagatagctctcaatgacaaaagtaagggcgacgtgagggtggatgtggatttgcccctatat

SEQ ID NO: 413550 - DNA, 75 bp, synthetic construct
  source 1..75: mol_type = other DNA
gatgctattgttggcggagctcataatggggccgccgatgcaacgagacattgttacttgatgtgtcgaatgact

SEQ ID NO: 413551 - DNA, 75 bp, synthetic construct
  source 1..75: mol_type = other DNA
tctagagcttgcgctcctcagatgctgagaaaagaaatattgagacggtacgagataaatttggcgtgcgcttcg

SEQ ID NO: 413552 - DNA, 75 bp, synthetic construct
  source 1..75: mol_type = other DNA
atttttgctttttctatttgggccctttctgctgaggggtcaattatttataacatgataaagatattatcatag

SEQ ID NO: 413553 - DNA, 75 bp, synthetic construct
  source 1..75: mol_type = other DNA
gggagcgtgacctgacggggtggatgtcgctgtcgcgtaaaccggaggagacatggtacggctgggacggcgaca

SEQ ID NO: 413554 - DNA, 75 bp, synthetic construct
  source 1..75: mol_type = other DNA
cgagccgtgcgcgtcgtgaacgatcaactcgatggcaaaattaacggtgatggcgagtttatacccactccgcgc

SEQ ID NO: 413555 - DNA, 75 bp, synthetic construct
  source 1..75: mol_type = other DNA
gtgatgctaacttcctgtatatcaacgggcatcgtattgctgagaccaatagtttccgcgtgctggcgcaaaagt

SEQ ID NO: 413556 - DNA, 75 bp, synthetic construct
  source 1..75: mol_type = other DNA
tgacgaggtctggagtacggcgattctgttatatccggaaaacagggacggaaaaaaggggaagaaacgccgggg

SEQ ID NO: 413557 - DNA, 75 bp, synthetic construct
  source 1..75: mol_type = other DNA
tttccggtatttcccgacgatactgtttatgttccccttgaacaagggggagttaattttgaaattacgactgat

SEQ ID NO: 413558 - DNA, 75 bp, synthetic construct
  source 1..75: mol_type = other DNA
tagcaatgaggagtatcagcaagaatactcgccgctttaccacaacgtggatgagagggatgaaaaactcaaggc

SEQ ID NO: 413559 - DNA, 75 bp, synthetic construct
  source 1..75: mol_type = other DNA
taaacccagatattataatggctgcattaggtaaagcttgtattaaaatcgctcagcatgatgttgaggttaaga

SEQ ID NO: 413560 - DNA, 75 bp, synthetic construct
  source 1..75: mol_type = other DNA
ccgtgtgtatatcctatccacttacgtaaagtccatgtaaatattggtctttataccaatcagtacggctatagc

SEQ ID NO: 413561 - DNA, 75 bp, synthetic construct
  source 1..75: mol_type = other DNA
atgcgggtgtcgaaccgggcattaaagataattactggttggtctccgatcgcatggcgcagttgccgcgccaca

SEQ ID NO: 413562 - DNA, 75 bp, synthetic construct
  source 1..75: mol_type = other DNA
ctggagaagcttgacctgctaacgggttatttgtatgaaatacagaatgctgatggcagttggcaacaatctgtg

SEQ ID NO: 413563 - DNA, 75 bp, synthetic construct
  source 1..75: mol_type = other DNA
cagagtatacgggcgggacattcatacgggggccggtgaatggaccacgagcgagtttgtggcctggctgaaaga

SEQ ID NO: 413564 - DNA, 75 bp, synthetic construct
  source 1..75: mol_type = other DNA
aactggttatgcagaaagatatcaggctatagcgtctcagtatagctcaaggattggtgtggattatgtatcaat

SEQ ID NO: 413565 - DNA, 75 bp, synthetic construct
  source 1..75: mol_type = other DNA
catctcccagtatacccatattaacaataaggttatttactcagccaggtataaacaatttgttctgtgtgtggg

SEQ ID NO: 413566 - DNA, 75 bp, synthetic construct
  source 1..75: mol_type = other DNA
agtgccagctgttctggaacgtttgcgagctattgtagcggacccacgcgcattacctcgcagaaaagaatgggt

SEQ ID NO: 413567 - DNA, 75 bp, synthetic construct
  source 1..75: mol_type = other DNA
gcagcagtacagttacgtacttctcgaaaacgtagaagctatggttgatgaagcctgccgcgccgccatgcttcg

SEQ ID NO: 413568 - DNA, 75 bp, synthetic construct
  source 1..75: mol_type = other DNA
cgttagatgttaaaaaaagacccaaatacactcaaaaagtagcgcaagtagtcgcggatgctatttatgatcgac

SEQ ID NO: 413569 - DNA, 75 bp, synthetic construct
  source 1..75: mol_type = other DNA
tgccgggataggcatgtaccaatattcagcaggattttattcgtatactggtgatacgcatgcctatatccaggt

SEQ ID NO: 413570 - DNA, 75 bp, synthetic construct
  source 1..75: mol_type = other DNA
gtcccggcgaacagctggatcgatgttcgtctggatatgccagcggatagcatctggaacaccaaagtttccggt

SEQ ID NO: 413571 - DNA, 75 bp, synthetic construct
  source 1..75: mol_type = other DNA
gtgctaacagtgacattaccagcctgagcggcctgactaccgcacttggtatcagtcagggtggaacaggtgcaa

SEQ ID NO: 413572 - DNA, 75 bp, synthetic construct
  source 1..75: mol_type = other DNA
gggcagcacccggcagatgacctggagccgctacgggcagttgctggcgttcaccgactgctcgggctaccagac

SEQ ID NO: 413573 - DNA, 75 bp, synthetic construct
  source 1..75: mol_type = other DNA
gatgctggcgattattttcctctttgactggctgatcggagaagcacgtatctcccgttctaaagccaaaaacca

SEQ ID NO: 413574 - DNA, 75 bp, synthetic construct
  source 1..75: mol_type = other DNA
tagcggatggtatagtaaaaatcaacacgctatatggaacagtaaatacaacaaaatccagcgatggcaccctta

SEQ ID NO: 413575 - DNA, 75 bp, synthetic construct
  source 1..75: mol_type = other DNA
gtcactttatccaaacacgcctttttatatttccgattcaggacttagtggtatatcatcaccgtttttgttatc

SEQ ID NO: 413576 - DNA, 75 bp, synthetic construct
  source 1..75: mol_type = other DNA
agcgtaaaagccaggaaagaattgttatatcgaatgctagaaaatgagggtgaactccatcttggaattgaggga

SEQ ID NO: 413577 - DNA, 75 bp, synthetic construct
  source 1..75: mol_type = other DNA
ccaagccgttgcacaatcacgtgcaaccatgcttggaacagattttagtcaactgaataaaattgctaatcttta

SEQ ID NO: 413578 - DNA, 75 bp, synthetic construct
  source 1..75: mol_type = other DNA
tcgataattgaaaatggagttgcagtttctacgcatcaggtaaaagcgctagcagatgataaaagagctgcctat

SEQ ID NO: 413579 - DNA, 75 bp, synthetic construct
  source 1..75: mol_type = other DNA
ggcgcttacaatgctggttttcgcaacacagaggaacaggatcggcgcaggaaaacttatgcagaaaaaatacag

SEQ ID NO: 413580 - DNA, 75 bp, synthetic construct
  source 1..75: mol_type = other DNA
aaatgcagatattgaaaatctggaaagtatttgtgactccttggaggaagaagtttccaatcatatagactcgcc

SEQ ID NO: 413581 - DNA, 75 bp, synthetic construct
  source 1..75: mol_type = other DNA
caccactaccactacgacagccagcaccggctggtgttttacacgcggatacagcatggtgagccgctggtcgag

SEQ ID NO: 413582 - DNA, 75 bp, synthetic construct
  source 1..75: mol_type = other DNA
atatatcatcggagtcacaacttgggatatttttgcaagatgtgcaaaaccgcaagtacggcgaaggtgacgcac

SEQ ID NO: 413583 - DNA, 75 bp, synthetic construct
  source 1..75: mol_type = other DNA
ccatgcaatggtacatcgtggaagcggtgtacttccaattgcagacttgaaaaaaaaaatgacattatggagcga

SEQ ID NO: 413584 - DNA, 75 bp, synthetic construct
  source 1..75: mol_type = other DNA
aaaaacaaccgggatacacccaggcactggaacacatccgtttagcccatgaaggctacgaactttacaccttca

SEQ ID NO: 413585 - DNA, 75 bp, synthetic construct
  source 1..75: mol_type = other DNA
aactaaaaatggtgtggctaaccgcatcaggaaagatgtaaccattgctcaagatgattacataactaatttgtt

SEQ ID NO: 413586 - DNA, 75 bp, synthetic construct
  source 1..75: mol_type = other DNA
atcatgtacgaactaagtatgttatttgtcgtaacagggaagaaaagaagatctgcgatgctaaatctatccagt

SEQ ID NO: 413587 - DNA, 75 bp, synthetic construct
  source 1..75: mol_type = other DNA
tttcaaaaattaatgatagaaagtactggcagtgaaacttcagtgctggatggtctgcatgaagagctatcatca

SEQ ID NO: 413588 - DNA, 75 bp, synthetic construct
  source 1..75: mol_type = other DNA
caacttgtttgcagcggtgcgccatatccagaaaaaagagcgctggggctggctgctgttcagcggcattgtcgg

SEQ ID NO: 413589 - DNA, 75 bp, synthetic construct
  source 1..75: mol_type = other DNA
tggctttttgtgctgcgcggtgtcttggcattgatttttgcagccctcgcgttctggatgccacaatcggctctg

SEQ ID NO: 413590 - DNA, 75 bp, synthetic construct
  source 1..75: mol_type = other DNA
tgacggagcaggtcaacccggaggggctggactaccgctttgagtacggagagcgccgggtaatcatcacggaca

SEQ ID NO: 413591 - DNA, 75 bp, synthetic construct
  source 1..75: mol_type = other DNA
gcaacgctccgatggaaagcttctggggaacgctgaaaaataaaagtctgagacactatcgttttaagagccggg

SEQ ID NO: 413592 - DNA, 75 bp, synthetic construct
  source 1..75: mol_type = other DNA
ttcgggctacagatgtgtggcacagtgtatgcgctgaacgcttaattacaggctataaattccagaagtcaattg

SEQ ID NO: 413593 - DNA, 75 bp, synthetic construct
  source 1..75: mol_type = other DNA
tacatctctctgaccttaatgatgcctttttagcggtagacagtgcaaagctggaatgcgatgggcatactttaa

SEQ ID NO: 413594 - DNA, 75 bp, synthetic construct
  source 1..75: mol_type = other DNA
aaagtggcaaatggttaaagtatcccgcctcatacgcgacaggaggttactgggtgagcataagcggtacaatga

SEQ ID NO: 413595 - DNA, 75 bp, synthetic construct
  source 1..75: mol_type = other DNA
tcacccgcgtcatgctggataaaagttttattcagcaacaaatcacgcaccgctccttcgaaccgtttattcgtg

SEQ ID NO: 413596 - DNA, 75 bp, synthetic construct
  source 1..75: mol_type = other DNA
tggcgcaaggtggcaaaaaaatgctggtctggcaggaaaaagaggaattactcgccccagaggttttccacgcgc

SEQ ID NO: 413597 - DNA, 75 bp, synthetic construct
  source 1..75: mol_type = other DNA
aatgtggtgtcaggcgatatcacggacatcaccacgccggacgggcgggagacgaaattttactataacgacggg

SEQ ID NO: 413598 - DNA, 75 bp, synthetic construct
  source 1..75: mol_type = other DNA
tttttgcgaaggcgatgccgccgcaggtgtttatgcaatggatggagcaattacccgcgcgggagttaacgcgcg

SEQ ID NO: 413599 - DNA, 75 bp, synthetic construct
  source 1..75: mol_type = other DNA
catgtgcttccttttgactcgatcgatatcataagtaaaagacgcgagtctttagggaaggtgcgaacaagttcc

SEQ ID NO: 413600 - DNA, 75 bp, synthetic construct
  source 1..75: mol_type = other DNA
tggttgctggtatatcctctccggttgtggtcattgctgtgccatctggcgcatcatccatacgaattcgggtgc

SEQ ID NO: 413601 - DNA, 75 bp, synthetic construct
  source 1..75: mol_type = other DNA
aggtggtgtctgtgataatattgaaatcgaaaattatttgaatgacacaataaaatcaaatcctagtgattttga

SEQ ID NO: 413602 - DNA, 75 bp, synthetic construct
  source 1..75: mol_type = other DNA
actaatgaacaagctggtgacggctacggtgataacgctgaagtgtggtcattagcagccaagtatgatgcaaat

SEQ ID NO: 413603 - DNA, 75 bp, synthetic construct
  source 1..75: mol_type = other DNA
tggcggaaaatatgctcgaccgctacggcatcatcagtcgtcaggcggtgatagccgaaaatatccctggcgggt

SEQ ID NO: 413604 - DNA, 75 bp, synthetic construct
  source 1..75: mol_type = other DNA
ttgattgatggcacgaatatactgccattccaggctcgttatattgctctcgggcagtcagtagctggtactgca

SEQ ID NO: 413605 - DNA, 75 bp, synthetic construct
  source 1..75: mol_type = other DNA
tgttattagtgacagttcgtctcagttgttccagttcccaacccagcaatatcagactctggttcgcacaatagc

SEQ ID NO: 413606 - DNA, 75 bp, synthetic construct
  source 1..75: mol_type = other DNA
ggctgtgttgatggaaattaaagagatcagcggtgaccatgaacttgtgttcattggcgaccatgatttcagaaa

SEQ ID NO: 413607 - DNA, 75 bp, synthetic construct
  source 1..75: mol_type = other DNA
gtaaaagaaaaatatccgagcttaataccagagatcttcttgcccctatcaaggctgttgaagcttctgggcgac

SEQ ID NO: 413608 - DNA, 75 bp, synthetic construct
  source 1..75: mol_type = other DNA
acgagatgaggctaaaaagttggtatctgatggtatcgacccttccgagaagaaaaaggcagacaagatcgagca

SEQ ID NO: 413609 - DNA, 75 bp, synthetic construct
  source 1..75: mol_type = other DNA
cctccaactcccgccagccgtgtgcgtcaggctgcggcttcccttgcgcccctgcatccccgcctgttcgcccgg

SEQ ID NO: 413610 - DNA, 75 bp, synthetic construct
  source 1..75: mol_type = other DNA
aggcaaatattcaagccaatgaagctgtacagtacaatgcattgttaatcgaaggaacactactaccagataatg

SEQ ID NO: 413611 - DNA, 75 bp, synthetic construct
  source 1..75: mol_type = other DNA
tagtgatagtgatatcagtataatagaatctaaggggatgatggataaaaaacacatcgatgatgtattgagata

SEQ ID NO: 413612 - DNA, 75 bp, synthetic construct
  source 1..75: mol_type = other DNA
tacccgggtactgattatggatgaaccgacatcggccctcagccagtcggaagtaaaagtccttttcaatgtgat

SEQ ID NO: 413613 - DNA, 75 bp, synthetic construct
  source 1..75: mol_type = other DNA
aggccgaaaaacatggaattagtatcatttttcaggagctgaatttattcccgaatatgaatgtcatggataata

SEQ ID NO: 413614 - DNA, 75 bp, synthetic construct
  source 1..75: mol_type = other DNA
tggacagaaactatctggcgtcagtccttgcggggagcgggctttcgtaatcttgccctgaatacaggactgagt

SEQ ID NO: 413615 - DNA, 75 bp, synthetic construct
  source 1..75: mol_type = other DNA
acgaaattggcagtgaaactcactctattggtattcatacgttcaagtgaactgcgttttgcaagatggcaagaa

SEQ ID NO: 413616 - DNA, 75 bp, synthetic construct
  source 1..75: mol_type = other DNA
gcggtacaaaatggtctaattgattataatccagctcaagatatggctggggcaatcgctgtagctaaacgagtg

SEQ ID NO: 413617 - DNA, 75 bp, synthetic construct
  source 1..75: mol_type = other DNA
caagtacatcgcaaagtctccgcaattacacgcaagaaaagccgcattgatgcggcgatggtaggtctggatatc

SEQ ID NO: 413618 - DNA, 75 bp, synthetic construct
  source 1..75: mol_type = other DNA
gccgtgtgcgtcaggctgcggcttcccttgcgccctgtgcatccccgccttatcgcccggcttttatggaggcac

SEQ ID NO: 413619 - DNA, 75 bp, synthetic construct
  source 1..75: mol_type = other DNA
tacgctgcattgcagttacgaagaattttgtgaaacctggccgcaggtgggctataccccaaatttggtcactat

SEQ ID NO: 413620 - DNA, 75 bp, synthetic construct
  source 1..75: mol_type = other DNA
ttattgcatttacagaatttattgtagaacgagttggcgaaactaaaaaatcagtagaaaagaaaacttatcccc

SEQ ID NO: 413621 - DNA, 75 bp, synthetic construct
  source 1..75: mol_type = other DNA
gctggctacatagtgtcagtcattaatcctgcgctgcagcctgggaagcgcctcacccgcttgaacgcgcgttgc

SEQ ID NO: 413622 - DNA, 75 bp, synthetic construct
  source 1..75: mol_type = other DNA
cactggagcggcgcttccagccggtgacggtgcccgagccgacggtggcccagaccatcatgattctgcgcggcc

SEQ ID NO: 413623 - DNA, 75 bp, synthetic construct
  source 1..75: mol_type = other DNA
cccgagttcatcaaccgcatcgacgagatcatcgtcttccatgcgctgggcaaggaggagatccgccatatcgtc

SEQ ID NO: 413624 - DNA, 75 bp, synthetic construct
  source 1..75: mol_type = other DNA
ggacgtgctgcgcggacacttccgccccgagttcatcaaccgcatcgacgagatcatcgtcttccatgcgctggg

SEQ ID NO: 413625 - DNA, 75 bp, synthetic construct
  source 1..75: mol_type = other DNA
cgagcgcatcctgtgcggcgaactgccagcaggtagcgtgctgcctggcgaaaatgaactggcaacagtttccag

SEQ ID NO: 413626 - DNA, 75 bp, synthetic construct
  source 1..75: mol_type = other DNA
ctagtccatagctatcgccattttgccgccactaccaaagaaaaaggggctacgttttcacgtaaccccttgttt

SEQ ID NO: 413627 - DNA, 75 bp, synthetic construct
  source 1..75: mol_type = other DNA
cgccctgtgcatcccgccttatcgcccggcttttatggaggcacggcaccgcccggtgccgcagaacatgtgact

SEQ ID NO: 413628 - DNA, 75 bp, synthetic construct
  source 1..75: mol_type = other DNA
gagttctgtcgtcagaagcgccctgcagcctgggaagcgcctcacccgcttgaacgcgcgttgcgtgccctggta

SEQ ID NO: 413629 - DNA, 75 bp, synthetic construct
  source 1..75: mol_type = other DNA
agcgcgctgggcgaagccacctacagcgtgacggcgagcgtcagcaatgctcagggtaacagcagcaccgccagc

SEQ ID NO: 413630 - DNA, 75 bp, synthetic construct
  source 1..75: mol_type = other DNA
cgcgatatcaccatcgatgccagtctacccggcctgcgggtggataccgtcgcgggcgatgatgtggtgaatatt

SEQ ID NO: 413631 - DNA, 75 bp, synthetic construct
  source 1..75: mol_type = other DNA
aaaggggatgataagtttatcaccaccgactatttgcaacagtgccctattaagtcatgtagctggttttatttc

SEQ ID NO: 413632 - DNA, 75 bp, synthetic construct
  source 1..75: mol_type = other DNA
ctaaatatttcgattccctggggaaccagtagaacattgagctatggtatgcaacgaaatcaggataacaagatt

SEQ ID NO: 413633 - DNA, 75 bp, synthetic construct
  source 1..75: mol_type = other DNA
atggcgatagcaaaccggatgtagatattaatgcaagtttagataaaataaaattcagagaaatattctctacta

SEQ ID NO: 413634 - DNA, 75 bp, synthetic construct
  source 1..75: mol_type = other DNA
aatacctcgaatgcctcccctaaaaaaacatttcatggaacagcttgatacaaccattaaggagataataacaat

SEQ ID NO: 413635 - DNA, 75 bp, synthetic construct
  source 1..75: mol_type = other DNA
gttattgatatccgccgctttagtcatggtaaccctgtgcctgagggcaggtattattctgatatttatgttaat

SEQ ID NO: 413636 - DNA, 75 bp, synthetic construct
  source 1..75: mol_type = other DNA
cagtcggcctgcttatcagcgctcacgcctgtgccgtaccgccgctgtatgcgcaaatcgcccgccagcagcagg

SEQ ID NO: 413637 - DNA, 75 bp, synthetic construct
  source 1..75: mol_type = other DNA
aatctcggctggaacggccactggtttccctcgctgtgtaccagcttcgatccagcggacaatctcaccgtcacc

SEQ ID NO: 413638 - DNA, 75 bp, synthetic construct
  source 1..75: mol_type = other DNA
caccaaaaacatgggagcatatgcaagccttgactacaccaaaggtgacgacattgagaatccgctacagggtgt

SEQ ID NO: 413639 - DNA, 75 bp, synthetic construct
  source 1..75: mol_type = other DNA
atgttgaaaaggatctattttggtttattattgatatttcagttattcgtagtgataagatgattaatgcattgc

SEQ ID NO: 413640 - DNA, 75 bp, synthetic construct
  source 1..75: mol_type = other DNA
ttcacgctgcaccgcgtcagtgctcgccgggctatatccagcaaaggcagtacccgcgaaacagcgagtgatgtc

SEQ ID NO: 413641 - DNA, 75 bp, synthetic construct
  source 1..75: mol_type = other DNA
gtgagcgatgctgcctcactgaattcggtgacggaagcgaatcagcaaaaacccctgcttggcctgtttgctgac

SEQ ID NO: 413642 - DNA, 75 bp, synthetic construct
  source 1..75: mol_type = other DNA
gatgtaaatcaggggtacctctctgtaaaaataaaagaaattcatcgtctatatgaaaaaacacaaagcattctc

SEQ ID NO: 413643 - DNA, 75 bp, synthetic construct
  source 1..75: mol_type = other DNA
cttaagtgataagctttatatgacctataaagataatccggcagaagttgcagataaggttcgtgcgcttttaaa

SEQ ID NO: 413644 - DNA, 75 bp, synthetic construct
  source 1..75: mol_type = other DNA
agaagatgtcaaaattactggcaatgcggaaaaactcaacgagctgttaggttatatggataattttgaattttg

SEQ ID NO: 413645 - DNA, 75 bp, synthetic construct
  source 1..75: mol_type = other DNA
ggagatgttgcgagcaagacgattaaagctgcggagacggcgttgaagaagggagatgttgttgaagcgtctaag

SEQ ID NO: 413646 - DNA, 75 bp, synthetic construct
  source 1..75: mol_type = other DNA
gctggcagccagagcaattgccggaatgctgtatccgggcgtgaaacagtcagacctcagtgaagagcagaagca

SEQ ID NO: 413647 - DNA, 75 bp, synthetic construct
  source 1..75: mol_type = other DNA
aagtgatgatcccattgaagccggaagtggatatcgacgctctttcgcctgaccttagtgcgctgaccgctatca

SEQ ID NO: 413648 - DNA, 75 bp, synthetic construct
  source 1..75: mol_type = other DNA
aaacaatgtggtgtgattaacccacaaaatgccaacacggcttattttggcgatacagatggaagagtaggcgct

SEQ ID NO: 413649 - DNA, 75 bp, synthetic construct
  source 1..75: mol_type = other DNA
gaggcgagaaaaaatacagagtcgctatcacggtttcgtactcaatattggtttttttggggctctattttgctt

SEQ ID NO: 413650 - DNA, 75 bp, synthetic construct
  source 1..75: mol_type = other DNA
tgtgaaggagaccaccaccgccagtgatggtcatactgcgcgtcatctgtcgccggcctggaatgccgggattca

SEQ ID NO: 413651 - DNA, 75 bp, synthetic construct
  source 1..75: mol_type = other DNA
atggtttcgaaagaaaactctctggaagatgttgtttctttaggtgaaatgattcagaaggaaatttatgggcat

SEQ ID NO: 413652 - DNA, 75 bp, synthetic construct
  source 1..75: mol_type = other DNA
aatatcaacttcgttataagtccacaaaggcgggagcaacgggcggtaatgcgacggcggttctctattttgatc

SEQ ID NO: 413653 - DNA, 75 bp, synthetic construct
  source 1..75: mol_type = other DNA
atgagatattatgatattgagataaccattcctgctgaaggtgcctctccggaaagaacgataaaatacagtagc

SEQ ID NO: 413654 - DNA, 75 bp, synthetic construct
  source 1..75: mol_type = other DNA
attgaccttgcttatgaaggttccggcagtggcgactggcgcactgacgggttcatcgtgggtgttggctataaa

SEQ ID NO: 413655 - DNA, 75 bp, synthetic construct
  source 1..75: mol_type = other DNA
ctgatggccggccctgtctggcagctcagtgagcgggtcagtctctatggcatggccgggatggcgtacacccgc

SEQ ID NO: 413656 - DNA, 75 bp, synthetic construct
  source 1..75: mol_type = other DNA
cttaccttggatttgatgccatagaaatgaacgatgaatacggcacaagttacctcattgtgaatccacaaatta

SEQ ID NO: 413657 - DNA, 75 bp, synthetic construct
  source 1..75: mol_type = other DNA
cactctcatgtatacatatatatgaaattacaatttcaatgatatatatcataaaaaaaccatgtcagattaagt

SEQ ID NO: 413658 - DNA, 75 bp, synthetic construct
  source 1..75: mol_type = other DNA
aaccgagcgggttagtgtgggcgaatacgctggcctggcaagaagcgcgtaaagctcgcattatccttggtaaga

SEQ ID NO: 413659 - DNA, 75 bp, synthetic construct
  source 1..75: mol_type = other DNA
gaaaacgacgtggagaaggtgctgtttgaagggcgtccggataaattcgcggaaagggtatggcagttgtgggag

SEQ ID NO: 413660 - DNA, 75 bp, synthetic construct
  source 1..75: mol_type = other DNA
tacacaagccggagccgggtcgccagaaaccggtactggcagtggtgctggagtggtttacctgccagcatagca

SEQ ID NO: 413661 - DNA, 75 bp, synthetic construct
  source 1..75: mol_type = other DNA
tgaccaaggaagatgtttttatttacggtctgtatcttacaattttctttgctattatttttacaataagcgatc

SEQ ID NO: 413662 - DNA, 75 bp, synthetic construct
  source 1..75: mol_type = other DNA
aatcaagaaatcgttagacaacattgcgataaagtaccgcagttaaataaaaaaatagtaaaagatccgtaccca

SEQ ID NO: 413663 - DNA, 75 bp, synthetic construct
  source 1..75: mol_type = other DNA
tggaagattcattgttgcggatggtttctcccacgcgacgagcgggctatctggctgtgatggagttaatgtcat

SEQ ID NO: 413664 - DNA, 75 bp, synthetic construct
  source 1..75: mol_type = other DNA
atgtctggaaatataggggcaaatccatcaggtaataaaaccctgacgcgttatcagaatttgaaaacgccttat

SEQ ID NO: 413665 - DNA, 75 bp, synthetic construct
  source 1..75: mol_type = other DNA
gagaaatgagaatgctgtctcttttatctgggatgcaatgaatagtgaagagctcacaatcatttttaattgcgt

SEQ ID NO: 413666 - DNA, 75 bp, synthetic construct
  source 1..75: mol_type = other DNA
ggaattctgcctctctcattgataagttttttaaggagtattctataccaagttctaaatattatgatttcactc

SEQ ID NO: 413667 - DNA, 75 bp, synthetic construct
  source 1..75: mol_type = other DNA
ctacctgggggacccggcatgcttcagcgagacggtctgtgccgtcccgaaggatgcgataccgtatattccgcc

SEQ ID NO: 413668 - DNA, 75 bp, synthetic construct
  source 1..75: mol_type = other DNA
attgtccatatgttaccaaccgatttgttgctgaatatggggtcaacccacggtctggcgatggtcttttccatg

SEQ ID NO: 413669 - DNA, 75 bp, synthetic construct
  source 1..75: mol_type = other DNA
aacatcatgatatcaaacagaaatgaggccatgctatctgactttggattgtctcagttagtcaatgaggaatcg

SEQ ID NO: 413670 - DNA, 75 bp, synthetic construct
  source 1..75: mol_type = other DNA
aggccatgctatctgactttggattgtctcagttagtcaatgaggaatcgagagctgcgcctgagtttggatatc

SEQ ID NO: 413671 - DNA, 75 bp, synthetic construct
  source 1..75: mol_type = other DNA
ttaaaaacagttgctcggtttgacggtaaaaccttaagagatgccttttcgagaaaaatagcgtcttttgatggc

SEQ ID NO: 413672 - DNA, 75 bp, synthetic construct
  source 1..75: mol_type = other DNA
aacttgggttattggctgaatatgcacttttttttctgtgccatgtgttgcgttggttggcaattttcttgcaga

SEQ ID NO: 413673 - DNA, 75 bp, synthetic construct
  source 1..75: mol_type = other DNA
aaaggcaaacgtaaaccgccattctggacgcgtattgcgctgattgtttccgctgcgggcgtggcgttttcgcac

SEQ ID NO: 413674 - DNA, 75 bp, synthetic construct
  source 1..75: mol_type = other DNA
tgtccggactggtatcagatgcgcagaatgcgcaactggaagaactgttactggttcctgaaggtgcacgaaact

SEQ ID NO: 413675 - DNA, 75 bp, synthetic construct
  source 1..75: mol_type = other DNA
tctggagaaaacggcctgcatcgctcttttcagaccgcgaaatccacccagtccatggcgaaaagactgaagttg

SEQ ID NO: 413676 - DNA, 75 bp, synthetic construct
  source 1..75: mol_type = other DNA
aaagagcgacccagacctgatttattcattaccagatggagaaatacgccgctatgacaggcgtcagaacataat

SEQ ID NO: 413677 - DNA, 75 bp, synthetic construct
  source 1..75: mol_type = other DNA
tccaaatattgtgcaagttcagtatgctgctcaatgtgagagcaatatctatatagccatgccattttatcataa

SEQ ID NO: 413678 - DNA, 75 bp, synthetic construct
  source 1..75: mol_type = other DNA
gcgaggaaggcctgagccagtaccacgcatacgacagccgtggacagttaattgccgtgaaagacacgcagggcc

SEQ ID NO: 413679 - DNA, 75 bp, synthetic construct
  source 1..75: mol_type = other DNA
tttaaccaggcagttgcgcgttatctgaaacttaaagcatacgggatacagtcgattgattttaccggtatacct

SEQ ID NO: 413680 - DNA, 75 bp, synthetic construct
  source 1..75: mol_type = other DNA
tgttgttgcaagacgtcagggatggcttgatgcactgaatgagcatgaactggaagatacatggctgcggctggt

SEQ ID NO: 413681 - DNA, 75 bp, synthetic construct
  source 1..75: mol_type = other DNA
aatggcgttggcaacacgggcagcggctcgcgcgatatcacgatcgacgccaatctgcctggcctgcgggtcgat

SEQ ID NO: 413682 - DNA, 75 bp, synthetic construct
  source 1..75: mol_type = other DNA
gccgaggcagggcagattgttacgataacgctcaatagcccgaccgtgcagacgtatcaggcaacggtacaggcc

SEQ ID NO: 413683 - DNA, 75 bp, synthetic construct
  source 1..75: mol_type = other DNA
acgctaaacagtaaaacctacaccacgacgctggatgcctccggcaactggagcgtcggcgttccggcggcggat

SEQ ID NO: 413684 - DNA, 75 bp, synthetic construct
  source 1..75: mol_type = other DNA
gcgggcaacagcgacagcacgactcacgatgtgaccgttgatctcagtggcccgacgctgaccattaacactgtc

SEQ ID NO: 413685 - DNA, 75 bp, synthetic construct
  source 1..75: mol_type = other DNA
cactgtggaaaccaacggtagctggacggtgaatgtgccgcctgccgatctcgctgcgttgccggacggcgcggg

SEQ ID NO: 413686 - DNA, 75 bp, synthetic construct
  source 1..75: mol_type = other DNA
tacaccgctaccgtgcaggggaatttaagctggagcgtggacgttccggcggcggatattcaggccatcggcaat

SEQ ID NO: 413687 - DNA, 75 bp, synthetic construct
  source 1..75: mol_type = other DNA
ggctgacggcaacgctacggtcaccgccagcgtgaacgatgtcgccggtaacccgaccagcgtttcacgcgtggc

SEQ ID NO: 413688 - DNA, 75 bp, synthetic construct
  source 1..75: mol_type = other DNA
accgctacatcaccgtacgctttttgcctgacaaggccatcgacctgctcgaccaggcggccgcacgcgtgaagc

SEQ ID NO: 413689 - DNA, 75 bp, synthetic construct
  source 1..75: mol_type = other DNA
ttacgccgcaagcgctgcgccagcaggtaagcaaggtggtcggcaaaggggccgaggatggccgcgccgagacgc

SEQ ID NO: 413690 - DNA, 75 bp, synthetic construct
  source 1..75: mol_type = other DNA
aagtaacaaaagaaaatgatgtttatgatagtctaaatttttcaagcaaagatttaacgaattcttatatgaatg

SEQ ID NO: 413691 - DNA, 75 bp, synthetic construct
  source 1..75: mol_type = other DNA
cggtaatggcgagctgacggttaatgcctcggtaaccaacggtgttggcaatactggcagcggttcgcgcgatat

SEQ ID NO: 413692 - DNA, 75 bp, synthetic construct
  source 1..75: mol_type = other DNA
cggcgacgccacggtgcaggcgagcgtcagcactattaacggcaacacggcttcggcaacccacgcctacagcgt

SEQ ID NO: 413693 - DNA, 75 bp, synthetic construct
  source 1..75: mol_type = other DNA
acgccgccggtggtaaccattaatccggtggcgaccgataacgtcatcaacacgccggaacatgctcaggcgcaa

SEQ ID NO: 413694 - DNA, 75 bp, synthetic construct
  source 1..75: mol_type = other DNA
gagcgtaagcgggctgtagctcacctgacactgtctgagcgcgaggagatacgagctggtttgtcagcccaaatg

SEQ ID NO: 413695 - DNA, 75 bp, synthetic construct
  source 1..75: mol_type = other DNA
ggagatgatccgatcacttgttgatggtaggcataacgaacaatttcttcaagagttttataatataactgaaaa

SEQ ID NO: 413696 - DNA, 75 bp, synthetic construct
  source 1..75: mol_type = other DNA
atcactgtattaaacggcggtgattatcggttattagcgggccatgagtataataaagataaccgccttactgca

SEQ ID NO: 413697 - DNA, 75 bp, synthetic construct
  source 1..75: mol_type = other DNA
tctggtctgccctgtgcgtggtttgactttgataatcatgccgggactggacaggcaacccagaaactgattgct

SEQ ID NO: 413698 - DNA, 75 bp, synthetic construct
  source 1..75: mol_type = other DNA
ccgcgctggtatatcacggtgccggattcggctgacctggtgtatctgatgctgtggattaacgggcttgacgta

SEQ ID NO: 413699 - DNA, 75 bp, synthetic construct
  source 1..75: mol_type = other DNA
ctgggaaagttgcgtcgtgttgtatgccagccccagcgggttggcatgaacagcagcgtggcggtgacgctggaa

SEQ ID NO: 413700 - DNA, 75 bp, synthetic construct
  source 1..75: mol_type = other DNA
gcaacagcgacagcacgactcacgatgtgaccgttgatcttagcggcccgacgctgaccattaacaccgtctccg

SEQ ID NO: 413701 - DNA, 75 bp, synthetic construct
  source 1..75: mol_type = other DNA
tccgtccaggcggacggcagctggagcgtcagcttaccgacggcggatctcagcaatctgaccgccagccagtac

SEQ ID NO: 413702 - DNA, 75 bp, synthetic construct
  source 1..75: mol_type = other DNA
taacgccaccgaacacgggcaggcgctggtgatttccggttccagcaccggcggagaagcgggggatgtcgtcac

SEQ ID NO: 413703 - DNA, 75 bp, synthetic construct
  source 1..75: mol_type = other DNA
ccaactggcgatttagccaacctcactgtcagtccctatacggtgagcgcggcggtcagcgacaaagccggaaat

SEQ ID NO: 413704 - DNA, 75 bp, synthetic construct
  source 1..75: mol_type = other DNA
aaaagaccgcatcaccatcaccgacagcctgaaccgccgtgaagtgctgcacacgcagggcgaagccgggctgaa

SEQ ID NO: 413705 - DNA, 75 bp, synthetic construct
  source 1..75: mol_type = other DNA
cccgacgctgagcatcaataccgtctccggcgatgatattattaataatgcggagaaaactcaggatctgaccat

SEQ ID NO: 413706 - DNA, 75 bp, synthetic construct
  source 1..75: mol_type = other DNA
agtatttctgatgagaatatttccttagttaaggggttgtataatttcaaggatgaaaatccattgatgtacgcg

SEQ ID NO: 413707 - DNA, 75 bp, synthetic construct
  source 1..75: mol_type = other DNA
atcaataaagaacaacgtaagttaaatattttccaaaataatcaaaatgtcattattaatgatttttgtccaatt

SEQ ID NO: 413708 - DNA, 75 bp, synthetic construct
  source 1..75: mol_type = other DNA
atcatcaaaggaaataacttaattgcccttaattcattaataaccccccataaaggcgaggtaaagttaatatat

SEQ ID NO: 413709 - DNA, 75 bp, synthetic construct
  source 1..75: mol_type = other DNA
cacagggcgcggctggaaaaagcgcaacgacgccgcaatgaactgatagcacaaatccttgcgcagtcagaatcg

SEQ ID NO: 413710 - DNA, 75 bp, synthetic construct
  source 1..75: mol_type = other DNA
tttacgaccacatcaccttctcgatgtcactcatggttacaggcatcggtgtgatgacggtcagcgagaagatag

SEQ ID NO: 413711 - DNA, 75 bp, synthetic construct
  source 1..75: mol_type = other DNA
acaaatccttgcgcagtcagaatcgcgccctctgaacgcatcagaaaaacaggcgctgaagcaactggaggatca

SEQ ID NO: 413712 - DNA, 75 bp, synthetic construct
  source 1..75: mol_type = other DNA
cagagatttatggttttctgggccgctcgatgctcaaaaatagcaatattacatcaacggatattattgagttta

SEQ ID NO: 413713 - DNA, 75 bp, synthetic construct
  source 1..75: mol_type = other DNA
agagagactttgaatatttagccaaaaacgatatgaaatggaacacgctaacttatcgaaagattaataaaaaaa

SEQ ID NO: 413714 - DNA, 75 bp, synthetic construct
  source 1..75: mol_type = other DNA
caaaggacgtaatacttacgactttactgtttgggaaaaaatggtagaggataagtctctcacatctcataaggt

SEQ ID NO: 413715 - DNA, 75 bp, synthetic construct
  source 1..75: mol_type = other DNA
aatcagctctatgtgaacgcttccgatatggatgacagtgacctgaacatttcagagagcgataaagcctttacc

SEQ ID NO: 413716 - DNA, 75 bp, synthetic construct
  source 1..75: mol_type = other DNA
aacataagcacagcgggatcaaatacgtcacgccagccgagcgtcatcaaggtaatgacatgaaaatactggcag

SEQ ID NO: 413717 - DNA, 75 bp, synthetic construct
  source 1..75: mol_type = other DNA
tgttttaatattgggggtgtctggttgtttatttctaccaatttataaactattttcaaaatcaaagattattgt

SEQ ID NO: 413718 - DNA, 75 bp, synthetic construct
  source 1..75: mol_type = other DNA
tacaccgcccgtttgtcgtgggataacttcccgtttcgcaagtattcgccggggctgatttatgccctggtgctg

SEQ ID NO: 413719 - DNA, 75 bp, synthetic construct
  source 1..75: mol_type = other DNA
agagaaattatcatagggctgtttattgcatgcttattagcatccccgttttggattttccttgctataggtagc

SEQ ID NO: 413720 - DNA, 75 bp, synthetic construct
  source 1..75: mol_type = other DNA
gtgcactaatgagcaattaggtgatcgtgactatatttctgcatttgtagaacgggcgatttttcattatgcgat

SEQ ID NO: 413721 - DNA, 75 bp, synthetic construct
  source 1..75: mol_type = other DNA
gtgatatttttaagtattggttcgagtcaaaaataaaatcgaaatacactgttttatcacaaaatattgctttct

SEQ ID NO: 413722 - DNA, 75 bp, synthetic construct
  source 1..75: mol_type = other DNA
agtattaagacgacaaaatcacaaaatgaccagtgcaccgacggatttaaggtcagctcctccttttataccgaa

SEQ ID NO: 413723 - DNA, 75 bp, synthetic construct
  source 1..75: mol_type = other DNA
ctgaatacgccgatttcaccagcgacatgttggtctacgaaaaaacctatacggctgaactttcgtccattgcag

SEQ ID NO: 413724 - DNA, 75 bp, synthetic construct
  source 1..75: mol_type = other DNA
caaaacctgaaatatcatattaccggtctggaaaacattcgcgtgctggattgcagcgtcaatttttccatttca

SEQ ID NO: 413725 - DNA, 75 bp, synthetic construct
  source 1..75: mol_type = other DNA
tggtatctaatcatgtgccattatcaactgtggtaatttctccaaatgaatatgaaggtcattttgcatttgact

SEQ ID NO: 413726 - DNA, 75 bp, synthetic construct
  source 1..75: mol_type = other DNA
tcagaccgtagtattggaatactacgtgatgtgaatgacaaattcattcgtccagaaacaacaggaatggccaac

SEQ ID NO: 413727 - DNA, 75 bp, synthetic construct
  source 1..75: mol_type = other DNA
gatctgaagctttatgctagtactgctaaacacattgtaattggcataggcaataataagctcagaaagtcattt

SEQ ID NO: 413728 - DNA, 75 bp, synthetic construct
  source 1..75: mol_type = other DNA
tgtcttttattttttaagttctgctagtggtcgttggtacataaacgaaggattgcaaaaatatgcacttaatag

SEQ ID NO: 413729 - DNA, 75 bp, synthetic construct
  source 1..75: mol_type = other DNA
gatgtacttttgatgtagcaagcccgaatggactcccatcaactattcaactattttatgaaaaatctattgatg

SEQ ID NO: 413730 - DNA, 75 bp, synthetic construct
  source 1..75: mol_type = other DNA
atacaatggctattcaatcgaagacatatgagcaacgctttactcaatgggctgtaaagcttcgggatgtgaaaa

SEQ ID NO: 413731 - DNA, 75 bp, synthetic construct
  source 1..75: mol_type = other DNA
ggcaaagaacccgaaaaatgtgctgcttgccgtggtgtggatgcagggggaatttgactttgacggaacgccagc

SEQ ID NO: 413732 - DNA, 75 bp, synthetic construct
  source 1..75: mol_type = other DNA
cggcagggaggcgatgtgaaacaaagcgagttcagacgttggctcgaatctcagggcgtcgatgtagcgaatggc

SEQ ID NO: 413733 - DNA, 75 bp, synthetic construct
  source 1..75: mol_type = other DNA
gccgcatctgaaggtggcccccgctacaacaaggaaatgcaaaaagatcaaagatgctcttttgacaacggtatt

SEQ ID NO: 413734 - DNA, 75 bp, synthetic construct
  source 1..75: mol_type = other DNA
caggacatttaccttaagattattgtagcaatgtacaacatttaccgacgaattgtaacatacaaaacagaagga

SEQ ID NO: 413735 - DNA, 75 bp, synthetic construct
  source 1..75: mol_type = other DNA
gagtgtctggaaactaccgacggcccaaccatttgggaagatcatttctatcctgaaattgttaatcctcatgac

SEQ ID NO: 413736 - DNA, 75 bp, synthetic construct
  source 1..75: mol_type = other DNA
tcacagcaagttaagccgcgcactaaccaaagcaggggttgatatcggtgccacaccaacatgcataggtaagtg

SEQ ID NO: 413737 - DNA, 75 bp, synthetic construct
  source 1..75: mol_type = other DNA
tcctcatcttttggtgaaaaaataataaccgatgaagaacagctaacggaaaagatattttttaattgctgtggc

SEQ ID NO: 413738 - DNA, 75 bp, synthetic construct
  source 1..75: mol_type = other DNA
acttacgcgtggtggagctttttaccgacgctgacggggagttaattacgtcgctggtggtggttgataagccgc

SEQ ID NO: 413739 - DNA, 75 bp, synthetic construct
  source 1..75: mol_type = other DNA
gctgctcttgaaactttacaaaaaataatgtctgaatgtatatatcaagaaggcaacgcctttgtcattatggga

SEQ ID NO: 413740 - DNA, 75 bp, synthetic construct
  source 1..75: mol_type = other DNA
ctggaatgacaatggcgacctggtgcgcatcagcggcccgcgacagacgtgggaatatggctacagtgccacggg

SEQ ID NO: 413741 - DNA, 75 bp, synthetic construct
  source 1..75: mol_type = other DNA
tgctgttgtgcagcattctcggcagcacgacgctgatttccggctgtgccctggtacgtaaggattctgcgcctc

SEQ ID NO: 413742 - DNA, 75 bp, synthetic construct
  source 1..75: mol_type = other DNA
tgttagtgagcaagaagcaaataaatggcttacagaattaggtggaacaatcggcacggtatctgcaaaaaacgg

SEQ ID NO: 413743 - DNA, 75 bp, synthetic construct
  source 1..75: mol_type = other DNA
gtatttccacctcatcattcagcccaaacaataccaacggttcatcaaccgaaacagttaattctgatataaaaa

SEQ ID NO: 413744 - DNA, 75 bp, synthetic construct
  source 1..75: mol_type = other DNA
ttgcctatggttacggcctgtttactggtgggctgggtgcgcactatggtgccgaacgtctgggcgctacggtga

SEQ ID NO: 413745 - DNA, 75 bp, synthetic construct
  source 1..75: mol_type = other DNA
aatcagtatgctgatgccaataatctcaccccggaacagaagcaggcaggactggataaaattgccaaaggtgag

SEQ ID NO: 413746 - DNA, 75 bp, synthetic construct
  source 1..75: mol_type = other DNA
gcatctttattttgttcaactgaattaaactcgaaatcacaatcgcctgcattaggtttgggacatgagtttgct

SEQ ID NO: 413747 - DNA, 75 bp, synthetic construct
  source 1..75: mol_type = other DNA
atggctgatattgcaattgtatgggatcagggatgcggttcgctgcaactgaacggtgccgacctgctgacggat

SEQ ID NO: 413748 - DNA, 75 bp, synthetic construct
  source 1..75: mol_type = other DNA
atagtcagagcgggaacgatgttgacgatctacggactgccaatcgacatgctggagcaaagcgtgaatttgcag

SEQ ID NO: 413749 - DNA, 75 bp, synthetic construct
  source 1..75: mol_type = other DNA
aagtggctgctcgtcttcaacagcgcactatgaggtgtactggcaatagcggacactaccatttgttcttttttt

SEQ ID NO: 413750 - DNA, 75 bp, synthetic construct
  source 1..75: mol_type = other DNA
tcactggccggggctggtattggtgctggtctgggtggggcatttgggaagtatgcccccacagccgtggggaaa

SEQ ID NO: 413751 - DNA, 75 bp, synthetic construct
  source 1..75: mol_type = other DNA
taacaaacaacatccaggctaacaacggctggactgaggaagactcaaaagcgttgcagcgaaccatagaaaaca

SEQ ID NO: 413752 - DNA, 75 bp, synthetic construct
  source 1..75: mol_type = other DNA
gcaaggcagtcagttattgagtgccttcggtggctgggggattgctcttggtgcggcacttacggttggtgtatc

SEQ ID NO: 413753 - DNA, 75 bp, synthetic construct
  source 1..75: mol_type = other DNA
ccctgctcgggtgctaaaggtggtatttcacactgtacgtcagacggacgttttgtctgcaatgacggaagtctg

SEQ ID NO: 413754 - DNA, 75 bp, synthetic construct
  source 1..75: mol_type = other DNA
aacatcttctgacaagcgagtcatgcactcaggtactacaggattagggtatagcttgcagtggtcacgcgccag

SEQ ID NO: 413755 - DNA, 75 bp, synthetic construct
  source 1..75: mol_type = other DNA
gttgagaataattatcttagcgtgtctgaaaagacagagcttgagatagcaaaacagaagcttaaaaacagtaaa

SEQ ID NO: 413756 - DNA, 75 bp, synthetic construct
  source 1..75: mol_type = other DNA
agcaatcaaagattacgaagacaaatataatcgacttgaacaagagaaagatgcgaaacgtcaggcactggcaga

SEQ ID NO: 413757 - DNA, 75 bp, synthetic construct
  source 1..75: mol_type = other DNA
ctgaaaaacaaagcatcattaatcaaataaaaaacacacaaagtaacagtgcgttaaaatatagaacaattcatg

SEQ ID NO: 413758 - DNA, 75 bp, synthetic construct
  source 1..75: mol_type = other DNA
aacattacaaaacgcagatgttggtattaaatttaaggttatatataaaactgggcagcatgcaaaaaaagatga

SEQ ID NO: 413759 - DNA, 75 bp, synthetic construct
  source 1..75: mol_type = other DNA
gccgctattgatgagtatttcaacggtcccaaagaatttcgcgataagttagacgattatttttacatgggggaa

SEQ ID NO: 413760 - DNA, 75 bp, synthetic construct
  source 1..75: mol_type = other DNA
gtctctttcggaaggattgcgcttcagaaagtggatggacggaattatgcacaacccacaaccgtggaagtcagt

SEQ ID NO: 413761 - DNA, 75 bp, synthetic construct
  source 1..75: mol_type = other DNA
tggtttttcattttcgcctattatgtcactgatgcgcttttccttaacagttgcttttacttcctctatttggat

SEQ ID NO: 413762 - DNA, 75 bp, synthetic construct
  source 1..75: mol_type = other DNA
taacgccacgctgaaacgggaaattccggcggggtgggtggttaacacgctgtctcaaatagcgaatatcacaat

SEQ ID NO: 413763 - DNA, 75 bp, synthetic construct
  source 1..75: mol_type = other DNA
agttcaattcgctgaccggtattttcagtcttgctggtttcttgctgatatacgccagaatttgtacaaccactg

SEQ ID NO: 413764 - DNA, 75 bp, synthetic construct
  source 1..75: mol_type = other DNA
tctatcaacctgaggcttacgttcgaacccaaacaattcgaatgttagtctcttctttgcagggaggcaagacat

SEQ ID NO: 413765 - DNA, 75 bp, synthetic construct
  source 1..75: mol_type = other DNA
gactggtctttcgccgttggcgttcagtgcgaagtctgctggtgtggccatagcgatggaagataaccagcgtga

SEQ ID NO: 413766 - DNA, 75 bp, synthetic construct
  source 1..75: mol_type = other DNA
ggagcagtttacccgtgactttgatggcaagccattctctcatgtggtaaataacggggatgatatacatatggg

SEQ ID NO: 413767 - DNA, 75 bp, synthetic construct
  source 1..75: mol_type = other DNA
agctggcgcaagaaattatcaacatgaataaacccatgattaacagaattgtcacggctgaagtcgataaaatta

SEQ ID NO: 413768 - DNA, 75 bp, synthetic construct
  source 1..75: mol_type = other DNA
aataaaaatatccgtgaatatttcgatggcagcgacgagtttaatcgccgcttagatgactatttccacatgggg

SEQ ID NO: 413769 - DNA, 75 bp, synthetic construct
  source 1..75: mol_type = other DNA
cgccggcggtcaaaccggcgattcaggaacagacacagcgggtgacgccaacggaacccccgacttcaatttcag

SEQ ID NO: 413770 - DNA, 75 bp, synthetic construct
  source 1..75: mol_type = other DNA
ccaccttcacccagtcagaagagcaactgcagaaaatgttttccaccatcgtgaatattgcacagaaggtggaaa

SEQ ID NO: 413771 - DNA, 75 bp, synthetic construct
  source 1..75: mol_type = other DNA
taacagccagacaccgcttggcgagattttcactgaaaaaggcatcaagccgacattaattatcgatgcggcttg

SEQ ID NO: 413772 - DNA, 75 bp, synthetic construct
  source 1..75: mol_type = other DNA
gggctgacggatattgtgcggggtgacttaccggaaagtgcggacattatcaaagcgattctggaaaataatcca

SEQ ID NO: 413773 - DNA, 75 bp, synthetic construct
  source 1..75: mol_type = other DNA
acagtggggcttatcagtgacataggcagtcaggtggcggatatcgcgctgacgcagggggaactgaatgcgttg

SEQ ID NO: 413774 - DNA, 75 bp, synthetic construct
  source 1..75: mol_type = other DNA
gcactgcaattcttaagaaactccgaaatcgccgccaaaggcgtgctgccgacctgccaggataccggcaccgcg

SEQ ID NO: 413775 - DNA, 75 bp, synthetic construct
  source 1..75: mol_type = other DNA
tcgtcagggtgcaaaaagtcatagatgacctgcgggatcagattgccatgaaggttgagctggcagagtcgccag

SEQ ID NO: 413776 - DNA, 75 bp, synthetic construct
  source 1..75: mol_type = other DNA
cgcaaaacgcctggtgatgtggaatgtatttgccagcgttattacgctggctgctgcagctgttgcgtttgtcac

SEQ ID NO: 413777 - DNA, 75 bp, synthetic construct
  source 1..75: mol_type = other DNA
gacagccgcagccagacagtaaatctggggcaattccgcagtaatcagtttaatggtgtgggaagccttacctct

SEQ ID NO: 413778 - DNA, 75 bp, synthetic construct
  source 1..75: mol_type = other DNA
ttgttatcgactggttaagtaaagggttaattaaaccagaaaaattaattacccatacgtttgatttccagcatg

SEQ ID NO: 413779 - DNA, 75 bp, synthetic construct
  source 1..75: mol_type = other DNA
tctaataaaatgtagatgcctaattttaggcgtctacataattaatgatgatttattacaattattttctagata

SEQ ID NO: 413780 - DNA, 75 bp, synthetic construct
  source 1..75: mol_type = other DNA
tgacggtggccatgaagaaaagcgccctgtcggtcgcgaaaatactggccggtgtgctcgccggagttgtggtca

SEQ ID NO: 413781 - DNA, 75 bp, synthetic construct
  source 1..75: mol_type = other DNA
cgcgtaaatttcaggtcgccgaactggcgcgattttacggcgtgcctccacatctggtcggcgatgtggacaaaa

SEQ ID NO: 413782 - DNA, 75 bp, synthetic construct
  source 1..75: mol_type = other DNA
ctgacggtggagcggctggcggcacagatagagccggtttatttgcctgagcgaaaaatacatctttatcactgt

SEQ ID NO: 413783 - DNA, 75 bp, synthetic construct
  source 1..75: mol_type = other DNA
cgatgcgtggggaaaggcggtcagcaccacgcagggcgggctgacgcgcagtatggagtacgatgctgccggacg

SEQ ID NO: 413784 - DNA, 75 bp, synthetic construct
  source 1..75: mol_type = other DNA
gtaagaatggatgaagccggacggcggattactgaatatcagggggatccgaataactggcttagtgctttcaaa

SEQ ID NO: 413785 - DNA, 75 bp, synthetic construct
  source 1..75: mol_type = other DNA
ctaaagggaatgttaaactatctacagctggaaaaaatgcgtttgccatctccgtttcaaataactcatccctga

SEQ ID NO: 413786 - DNA, 75 bp, synthetic construct
  source 1..75: mol_type = other DNA
tgtgttttgttttttgtgaattatggtgataatttttcattgcgctatgattgtacacaaagttctgatggaata

SEQ ID NO: 413787 - DNA, 75 bp, synthetic construct
  source 1..75: mol_type = other DNA
tttcaacctaaaaccaagtttaatagttatcaaaatgaattgcttaatttaattaaagaaaatgatacttgttca

SEQ ID NO: 413788 - DNA, 75 bp, synthetic construct
  source 1..75: mol_type = other DNA
acggctgaactttcgtctattcccggcactcccattgaggctggctccttcgataccgtggtgctttttaagatt

SEQ ID NO: 413789 - DNA, 75 bp, synthetic construct
  source 1..75: mol_type = other DNA
caaaatttgctctggtgatcccaataatattcatatgtcgcgtacgtttctcgctcgcatgcggttatacgtcaa

SEQ ID NO: 413790 - DNA, 75 bp, synthetic construct
  source 1..75: mol_type = other DNA
atgagtgctggcaagggattgttgttcgttatctgtctgttatttctgccgttgaagtctgcgctggcgctgaac

SEQ ID NO: 413791 - DNA, 75 bp, synthetic construct
  source 1..75: mol_type = other DNA
agattatcgcgatgggctggcagaacaaaatatgttcgggtgaccccgctaatattcacatgtcgcgaacctttc

SEQ ID NO: 413792 - DNA, 75 bp, synthetic construct
  source 1..75: mol_type = other DNA
accgacggatttaaagtcagttcctccttttataccgaagaaacgttggttgaagaagataaagcattgttgatt

SEQ ID NO: 413793 - DNA, 75 bp, synthetic construct
  source 1..75: mol_type = other DNA
aaacccggcgataaaatctgggagtctgatgatattagaattcccgtctattgcgacaacaatactaacggcaac

SEQ ID NO: 413794 - DNA, 75 bp, synthetic construct
  source 1..75: mol_type = other DNA
gtatagctgccggtgcttatgactacacgctgggacgtggtcagggaagcaacagtggtaactggtatctgacca

SEQ ID NO: 413795 - DNA, 75 bp, synthetic construct
  source 1..75: mol_type = other DNA
cattacgactctgacacataccgtcagcccggataatggttttacgaccagtctggagcttgaagtgaggattga

SEQ ID NO: 413796 - DNA, 75 bp, synthetic construct
  source 1..75: mol_type = other DNA
tatatgatggagatcctggttttatcttcgataagatatcacacaaactcagacatacggtaacggaatttgatg

SEQ ID NO: 413797 - DNA, 75 bp, synthetic construct
  source 1..75: mol_type = other DNA
cggaggagaagcaaggggattacctggtcggtacggatgaaaacgtgctggtactcagtcggacctatgcgaacc

SEQ ID NO: 413798 - DNA, 75 bp, synthetic construct
  source 1..75: mol_type = other DNA
acttcgctctatcagcgtgtgacccggctttctgagtaccgtttttggggcggcagcggtaatacggcaaatttt

SEQ ID NO: 413799 - DNA, 75 bp, synthetic construct
  source 1..75: mol_type = other DNA
gcgtggggaaaagcggtcagcaccacgcagggcgggctgacgcgcagtatggagtatgacctcgccggacgcatc

SEQ ID NO: 413800 - DNA, 75 bp, synthetic construct
  source 1..75: mol_type = other DNA
tactgtcagcccggataacggttttacgaccagtctggagcttgaagtgaagattgatgatttcgaaatggaatg

SEQ ID NO: 413801 - DNA, 75 bp, synthetic construct
  source 1..75: mol_type = other DNA
gaccctatagtaaaaatagaacccgttgacatcaaaggatttgatggtgcattaattgccaatgaagcccgaagc

SEQ ID NO: 413802 - DNA, 75 bp, synthetic construct
  source 1..75: mol_type = other DNA
tcagcctcgataatacgcaggggttaggcagaggaaatattgccaatgacggtctgttaacgctaaaaaatgtga

SEQ ID NO: 413803 - DNA, 75 bp, synthetic construct
  source 1..75: mol_type = other DNA
accaacaccgacgcctgacccggactctaaacctgaacctgcaccgggtggttatgataatgatcttcgtccgga

SEQ ID NO: 413804 - DNA, 75 bp, synthetic construct
  source 1..75: mol_type = other DNA
ttccccgcaaatatcacctcatcagaactgcttatgaaatcaacgaagaaccgaccgcatatggcgatcacggta

SEQ ID NO: 413805 - DNA, 75 bp, synthetic construct
  source 1..75: mol_type = other DNA
gaaacaatacctcatgaagtagtatccatcatgattgatgatgatgtgtcattgttggcagcatggcggatttac

SEQ ID NO: 413806 - DNA, 75 bp, synthetic construct
  source 1..75: mol_type = other DNA
aaatcgaattggcacgcttgaaaattaagtgttttccaaataaaaaagcaaaaatcattttaataactttttcta

SEQ ID NO: 413807 - DNA, 75 bp, synthetic construct
  source 1..75: mol_type = other DNA
caaacacgtaacaatgtccatggtttagcccgttggttagggggagcaacaacgttacggttgcgtattggttat

SEQ ID NO: 413808 - DNA, 75 bp, synthetic construct
  source 1..75: mol_type = other DNA
ttgattttcttgttctccatcctgtatatggtgttttggcgttagaggtaaagagtggaatatatcgcgtagaag

SEQ ID NO: 413809 - DNA, 75 bp, synthetic construct
  source 1..75: mol_type = other DNA
atgaaatgcacgagcgctcccatgcctatcacccttccgtcccgcccgccgctcagcgcaatcggctgttgctga

SEQ ID NO: 413810 - DNA, 75 bp, synthetic construct
  source 1..75: mol_type = other DNA
atcgaatcgaagacatttgttgattcatctgttaatggtcgcgaccaggcaatgttatcccctgagtcagtcagt

SEQ ID NO: 413811 - DNA, 75 bp, synthetic construct
  source 1..75: mol_type = other DNA
ctcattaaagttgcaaaagggaaatatttacctgttgacgacaaggaactacttccttgcgatagttcagttaat

SEQ ID NO: 413812 - DNA, 75 bp, synthetic construct
  source 1..75: mol_type = other DNA
acaggcgttacattcttcgtggctggagactttatcttgttggttcgaaaataaaaggattatcgcattttgtga

SEQ ID NO: 413813 - DNA, 75 bp, synthetic construct
  source 1..75: mol_type = other DNA
aaaccacggtattacaagatttacgtaaaatttgcacgccacaggcgtcattatcagatgaagcgtgggaaaaat

SEQ ID NO: 413814 - DNA, 75 bp, synthetic construct
  source 1..75: mol_type = other DNA
ttatcagatgaagcgtgggaaaagttaatgttgtcagatgaaaacaataaacaacatatacgcgaggccatcgtg

SEQ ID NO: 413815 - DNA, 75 bp, synthetic construct
  source 1..75: mol_type = other DNA
atcacctgcaccagccgtaccggctgccggggcagcagtatgataaggagtcggggctgtactataaccgtcacc

SEQ ID NO: 413816 - DNA, 75 bp, synthetic construct
  source 1..75: mol_type = other DNA
acacaaggatgcgattaccgcgctggcgaaaagtatcagtatcgcccagctgtcaggcttacaactggtgattta

SEQ ID NO: 413817 - DNA, 75 bp, synthetic construct
  source 1..75: mol_type = other DNA
ggacaaaagtcatgcctgcctccaaaaaaaagactcttcaataaattatcactcaagttcagataaagttaaaaa

SEQ ID NO: 413818 - DNA, 75 bp, synthetic construct
  source 1..75: mol_type = other DNA
acaaggtcagccagctaaagaaagaatcatggatcttaaaaataacactgtcggtattgcttgtggcgatttttc

SEQ ID NO: 413819 - DNA, 75 bp, synthetic construct
  source 1..75: mol_type = other DNA
taaaagcgtgcctattgaagagctggttgatacggtgcgcgaacgaattgcagagactgagggcgcgaaagagga

SEQ ID NO: 413820 - DNA, 75 bp, synthetic construct
  source 1..75: mol_type = other DNA
tgatgcttctaaagttacgccgcaagatgggcttaaaggtgtcgataaactcgacagtaatatccgcctgctgtt

SEQ ID NO: 413821 - DNA, 75 bp, synthetic construct
  source 1..75: mol_type = other DNA
tccgcgtcggtcactctgtccgtcactaacccgctgaacaacaacatcggaaaattatacgacccccgcgaatat

SEQ ID NO: 413822 - DNA, 75 bp, synthetic construct
  source 1..75: mol_type = other DNA
agcaacggccgacgcgtgggctgtacgataccattactttctaccatccatcctttggctacatccacctggtcg

SEQ ID NO: 413823 - DNA, 75 bp, synthetic construct
  source 1..75: mol_type = other DNA
gatggatactcttctggataccaaactggtgatcctctgggggcataacccaacggaaaccatattcggtcacac

SEQ ID NO: 413824 - DNA, 75 bp, synthetic construct
  source 1..75: mol_type = other DNA
ctgcaaaaaacacgtcgacatcttttcaaaagcgcgccgcacatcgctttcgaagcaaatattcgcgatccgcag

SEQ ID NO: 413825 - DNA, 75 bp, synthetic construct
  source 1..75: mol_type = other DNA
ccggtggctgataaagtcgtgcccacctgtagcacatttgactgcggtggtaagtgcgatattcgggcgcatatg

SEQ ID NO: 413826 - DNA, 75 bp, synthetic construct
  source 1..75: mol_type = other DNA
agaatcagagatggtgtcaggcctaccgctggcggtacttttcttaatctcgatgcatccgaagctgagatgatt

SEQ ID NO: 413827 - DNA, 75 bp, synthetic construct
  source 1..75: mol_type = other DNA
cgtaggtgtacccggagtggtagggcagacagggtctggaaggacagtttatacagccatggcaaatgtaggcct

SEQ ID NO: 413828 - DNA, 75 bp, synthetic construct
  source 1..75: mol_type = other DNA
aaaacaggtttttatatgaccggtaaggcggggccttccgttttatctctttccaaccagcgtcttatcgatggt

SEQ ID NO: 413829 - DNA, 75 bp, synthetic construct
  source 1..75: mol_type = other DNA
agtggaagggggcggcccggctgacggccatcacggccacaaggcagatcttcgatagcggggacgtgtctgtgc

SEQ ID NO: 413830 - DNA, 75 bp, synthetic construct
  source 1..75: mol_type = other DNA
tggtggccagacgtacacgcccgcgcgttttgaaatcgaagagagccagcagagcggtacgccggtgatcgacgc

SEQ ID NO: 413831 - DNA, 75 bp, synthetic construct
  source 1..75: mol_type = other DNA
attcattttttgtaaggttaatatttttatggttgccagataccccgatgataatgcgatttcggggttatgttt

SEQ ID NO: 413832 - DNA, 75 bp, synthetic construct
  source 1..75: mol_type = other DNA
gatgcgcactatgtctaccgctacgatgaatacggcaggctggcggagaagacggaccgcatcccggaaggggtg

SEQ ID NO: 413833 - DNA, 75 bp, synthetic construct
  source 1..75: mol_type = other DNA
ttaaatactggtaagttaactataacgacgccatgttatccttattacgcaataagaggtgtatacgaggctgct

SEQ ID NO: 413834 - DNA, 75 bp, synthetic construct
  source 1..75: mol_type = other DNA
cgacgcggttgatgaaaagctggtccgagaaatgatggttgtgctgatggaccaactggagcgccgatttgctgg

SEQ ID NO: 413835 - DNA, 75 bp, synthetic construct
  source 1..75: mol_type = other DNA
gaaatgatggtagtgctgatggaccaactggagcgccgatttggtggtaaacagcctgaagagcaagcagaacag

SEQ ID NO: 413836 - DNA, 75 bp, synthetic construct
  source 1..75: mol_type = other DNA
gcgctggagcgggcccggggggccgctgggcagtccggcgcgtctgagccaccccgttacttctttgattatccc

SEQ ID NO: 413837 - DNA, 75 bp, synthetic construct
  source 1..75: mol_type = other DNA
taatgttggctgtagagatattgttgatgatggggtgaatggttttttatgccagccaaaaaacaagcaagattt

SEQ ID NO: 413838 - DNA, 75 bp, synthetic construct
  source 1..75: mol_type = other DNA
aaaaatatggagaaaaaatggaatttaatatgctcggattcttggacgatgaaaatccaaattatgtaaaaatgt

SEQ ID NO: 413839 - DNA, 75 bp, synthetic construct
  source 1..75: mol_type = other DNA
ttacgagcacaactcctatgtcgagattaaggtttatccttcattagaaattcggtttaccacagggcttagtta

SEQ ID NO: 413840 - DNA, 75 bp, synthetic construct
  source 1..75: mol_type = other DNA
attagtgattttccagaggccggcgagaaacatttctggtcaaaagaaggaatggcgcgttttaagctactggac

SEQ ID NO: 413841 - DNA, 75 bp, synthetic construct
  source 1..75: mol_type = other DNA
aaagatggtacgcgtaaatatgcgttattcagtgcaaaaatagaacctgtcacactggggatttcttatgcttat

SEQ ID NO: 413842 - DNA, 75 bp, synthetic construct
  source 1..75: mol_type = other DNA
gcgggcctaaaacgccggatctggaatcgtacttctccacgccgacccggaaaactgatacccggacaccggata

SEQ ID NO: 413843 - DNA, 75 bp, synthetic construct
  source 1..75: mol_type = other DNA
cggctttgatacaaaagagtacgaccggatcaaacgccagtacgaatcaaagtttgaggaaatcacgaaatacga

SEQ ID NO: 413844 - DNA, 75 bp, synthetic construct
  source 1..75: mol_type = other DNA
ttaaggttgacatatctcgcggtgataaagatagaaaagagaatagtgagaaacccgaaaaagaaaatgaactta

SEQ ID NO: 413845 - DNA, 75 bp, synthetic construct
  source 1..75: mol_type = other DNA
ctcgggtatatccagagtaaggggttgtcctcccgaacctggtttgaacacattctgacccagctcaccacacaa

SEQ ID NO: 413846 - DNA, 75 bp, synthetic construct
  source 1..75: mol_type = other DNA
tcgcgaatttgcacaggttactacagttccagcttataaagagatgagtatgtatcaattgcttatcatttcaca

SEQ ID NO: 413847 - DNA, 75 bp, synthetic construct
  source 1..75: mol_type = other DNA
tcccagggattcaataactggctggatgacactaaggatatcagtgagcagataaaatcaaccacgactcagatg

SEQ ID NO: 413848 - DNA, 75 bp, synthetic construct
  source 1..75: mol_type = other DNA
gtgactatgcagataaatcccgtggaatgtcaaatcatgtttttcaggagaaaatgcaggctctgaatgatgctc

SEQ ID NO: 413849 - DNA, 75 bp, synthetic construct
  source 1..75: mol_type = other DNA
atgtcaaccggattacgtttcacgctggaagtggacggcctgccaccggatgcttttgcggtggtttcctttcat

SEQ ID NO: 413850 - DNA, 75 bp, synthetic construct
  source 1..75: mol_type = other DNA
tatttgtttgatggtttgatagatattggaagtaattgtggaaattctgactgggcacgatctggtgataataat

SEQ ID NO: 413851 - DNA, 75 bp, synthetic construct
  source 1..75: mol_type = other DNA
gacattattggtgctattgcgttgtggacgcttatcaaagttaaagatgaagaaccacaagtacagttagctacc

SEQ ID NO: 413852 - DNA, 75 bp, synthetic construct
  source 1..75: mol_type = other DNA
ttcgtcctcaccggtattgaacggcggggggggatagcctttgctgcgatagcgccgcagtcggcaacacagctc

SEQ ID NO: 413853 - DNA, 75 bp, synthetic construct
  source 1..75: mol_type = other DNA
gatgccagcgtttatctggctccggttacgctgacggaagtcagagaatcccacaaatacatgatgaaaccaaaa

SEQ ID NO: 413854 - DNA, 75 bp, synthetic construct
  source 1..75: mol_type = other DNA
aaatagaagaatgtacttttgtattgacaatatccccctggctcgacgggagcaacacaagtctggtggcatcgt

SEQ ID NO: 413855 - DNA, 75 bp, synthetic construct
  source 1..75: mol_type = other DNA
gggcctgctgttcctttaccagagctgggaaagtgtgtcgattgcgatccaccgtaagcttcacccattagcgga

SEQ ID NO: 413856 - DNA, 75 bp, synthetic construct
  source 1..75: mol_type = other DNA
atcatcaaaaaaattataccgtggctttactgaggccatgtctaattctgtcgagcatgcttatgttgatgattt

SEQ ID NO: 413857 - DNA, 75 bp, synthetic construct
  source 1..75: mol_type = other DNA
tattgggttcagctatcaggggtacttccgctcaggctggggtaccggaaatcatggctcactaatgaaaatgac

SEQ ID NO: 413858 - DNA, 75 bp, synthetic construct
  source 1..75: mol_type = other DNA
ctggggagctattctcttaaaaatggcgaaaaactggcgggaagatcggtactgggcaactttgttctgggtaca

SEQ ID NO: 413859 - DNA, 75 bp, synthetic construct
  source 1..75: mol_type = other DNA
cgggaaaaggtgcgttagttcgtgcagagtttgctgctcatatcggtattcgtggtttgttcacagttcgttatc

SEQ ID NO: 413860 - DNA, 75 bp, synthetic construct
  source 1..75: mol_type = other DNA
gaaaaactgtctgccgagctgtctcgtctggaagctctgcgggcagtgaacccgaacattcgtgacgacgaactg

SEQ ID NO: 413861 - DNA, 75 bp, synthetic construct
  source 1..75: mol_type = other DNA
tcattgaccgaagccaaattgaggtaactgcagggaaagtaatttatcatccacttcgcattgatatcctgagta

SEQ ID NO: 413862 - DNA, 75 bp, synthetic construct
  source 1..75: mol_type = other DNA
gccgaaggtgttgatacgggtatatattcctcttcgtcttatatacttaaggcggttcctttagtgtcgtggacc

SEQ ID NO: 413863 - DNA, 75 bp, synthetic construct
  source 1..75: mol_type = other DNA
gacgcgacggaaagtcttcttttgaagacctgattgcgtacacctcagtgcgggatgatgtgccggaagatgaac

SEQ ID NO: 413864 - DNA, 75 bp, synthetic construct
  source 1..75: mol_type = other DNA
tcaccctatactttcaacaaatacagtgagtatgccgattttaccagcgacctgttagtgtatgaaaaaacctac

SEQ ID NO: 413865 - DNA, 75 bp, synthetic construct
  source 1..75: mol_type = other DNA
tgaagtggagcttcggctaccctggcgcgattatctttatgatcctcgcgggcctggcaccgtatctgtacttta

SEQ ID NO: 413866 - DNA, 75 bp, synthetic construct
  source 1..75: mol_type = other DNA
aggcgaatccaactcgcattatccggaagtggtgctcaaaccaaacgacgcctcctcaatctataaagcatatgg

SEQ ID NO: 413867 - DNA, 75 bp, synthetic construct
  source 1..75: mol_type = other DNA
cgggacgcgaactcgccgagcaaaatgcattagcgcaaatccctgatcttattacacaagtatttaatcattatc

SEQ ID NO: 413868 - DNA, 75 bp, synthetic construct
  source 1..75: mol_type = other DNA
aagccacaattattcatcgcgacgttggcctgacgcccccaccccatttgcgtgaagaaacctttctggcgcttt

SEQ ID NO: 413869 - DNA, 75 bp, synthetic construct
  source 1..75: mol_type = other DNA
cgtgaagaaacttttctggcactttgcgataaagcagagtgcgggagcgcaaaaattcagcaggaagtgaatgga

SEQ ID NO: 413870 - DNA, 75 bp, synthetic construct
  source 1..75: mol_type = other DNA
ataatgctaacgaaatattatttagacatctaaggaaaacagagtgttataagctcgttcgttatttattatctc

SEQ ID NO: 413871 - DNA, 75 bp, synthetic construct
  source 1..75: mol_type = other DNA
ttgtacgccggacgtggaataaacagcgtggagaaaattatctctacctgggcgcctgcgtctgataataacaac

SEQ ID NO: 413872 - DNA, 75 bp, synthetic construct
  source 1..75: mol_type = other DNA
tgctggtcaggcaggggcttctcttgaacgcccgggcgggcgatttgccagatttgaaactgcctttgatggatt

SEQ ID NO: 413873 - DNA, 75 bp, synthetic construct
  source 1..75: mol_type = other DNA
gagcgtcgatttgcccacgcaaagcgcgggcgaacatacctggtcagtggtgcaaatcgtcggcagtaccatcac

SEQ ID NO: 413874 - DNA, 75 bp, synthetic construct
  source 1..75: mol_type = other DNA
tttgcccgcgccattatcgacggcggcaatatcccgcatgtgattggcggcgttggcatggtcatggcactggtc

SEQ ID NO: 413875 - DNA, 75 bp, synthetic construct
  source 1..75: mol_type = other DNA
cattaaaagtgcactggcattctttatattgatagtttactttgggccgattttagctgaaagagtgatgccact

SEQ ID NO: 413876 - DNA, 75 bp, synthetic construct
  source 1..75: mol_type = other DNA
ggcggagatccgcacgctgtcggtaatgaggttgcacgtcggcaacagtctgcaaatgctcaggtcatgcgaagt

SEQ ID NO: 413877 - DNA, 75 bp, synthetic construct
  source 1..75: mol_type = other DNA
ctgtcgtttaacaataaaggcgataaaattcatgtggttgccggctttgtcttcattccggtgccagggattttt

SEQ ID NO: 413878 - DNA, 75 bp, synthetic construct
  source 1..75: mol_type = other DNA
gtccggcaatgctgcagagtctgttcaggaacaaccagagatgcggcaacaacaggctgagaaaccgacgacacc

SEQ ID NO: 413879 - DNA, 75 bp, synthetic construct
  source 1..75: mol_type = other DNA
aaaatcagcttgcccaggattacaggcgtatgatgatcgatctcctgtaattggctgggggtgtgtcgagttgga

SEQ ID NO: 413880 - DNA, 75 bp, synthetic construct
  source 1..75: mol_type = other DNA
tatgtggtcaatttatttttggttttggcgttctggctagcattattgggattgttaaattcatttggacccaca

SEQ ID NO: 413881 - DNA, 75 bp, synthetic construct
  source 1..75: mol_type = other DNA
aatccataacagcctccatgattataggaagagatgagtgttattttgactctattaaggagaactttatattaa

SEQ ID NO: 413882 - DNA, 75 bp, synthetic construct
  source 1..75: mol_type = other DNA
aggaggcggcccgccaggctgaaagtccgttgttaaacggtggaattgttgccacagccagtcatattgcttcag

SEQ ID NO: 413883 - DNA, 75 bp, synthetic construct
  source 1..75: mol_type = other DNA
aaggacactacaatgcgaagtggctgcaattaaagctgttgcaaaaactgaaactggtagttccggtagctattt

SEQ ID NO: 413884 - DNA, 75 bp, synthetic construct
  source 1..75: mol_type = other DNA
ggcgtaatcaaatcatgtaaaaaaattgatgtaatctcattgataaaagaagaaaacactattgaacttgaagag

SEQ ID NO: 413885 - DNA, 75 bp, synthetic construct
  source 1..75: mol_type = other DNA
atagcagaagatcatcagaaaaacataaggctattaaaaaatgagttacaacatctggagtgggagcttgaaaaa

SEQ ID NO: 413886 - DNA, 75 bp, synthetic construct
  source 1..75: mol_type = other DNA
atggtatggcatactgagaggggactctgttataagttataaaagccctgttaacgggattatagaatatttgaa

SEQ ID NO: 413887 - DNA, 75 bp, synthetic construct
  source 1..75: mol_type = other DNA
gtaggcgctaatacaacacgttcaatacaagatattaggcgtcagcttttatctgatgacgatgcttattgttta

SEQ ID NO: 413888 - DNA, 75 bp, synthetic construct
  source 1..75: mol_type = other DNA
aatgcaggatatcaacgccgttcgtcaggtaaaagcggcattgttgtcatcccgggatttatctgtttattctat

SEQ ID NO: 413889 - DNA, 75 bp, synthetic construct
  source 1..75: mol_type = other DNA
cgacatctattaatttaaatattccgttaagtgggttgctgaaactaaacacaaaaaaagaaaagtattcactaa

SEQ ID NO: 413890 - DNA, 75 bp, synthetic construct
  source 1..75: mol_type = other DNA
atttatttcaccaaatgactatgaagatggtttaaacaaactgatgccgctattaaatgatcaggcgattggtgc

SEQ ID NO: 413891 - DNA, 75 bp, synthetic construct
  source 1..75: mol_type = other DNA
tttattgatacaattaaaaaagatggacgtgctatagttctaaaaggttgggcagtagataatgataaaaaacca

SEQ ID NO: 413892 - DNA, 75 bp, synthetic construct
  source 1..75: mol_type = other DNA
gaaaatggcatcccgaaagaatacatgacggatgccatggaatattcactcgaactggtacgaattactcctgat

SEQ ID NO: 413893 - DNA, 75 bp, synthetic construct
  source 1..75: mol_type = other DNA
tccgcgcgcgctggcagcgccttcgcatttatcgctaccggggatcggtgctggtggattatcgcattcttcgta

SEQ ID NO: 413894 - DNA, 75 bp, synthetic construct
  source 1..75: mol_type = other DNA
tcggatgccagtggctttaaacactattccgtgaccgcgtacgtcggtaaaaagctgattagtcagggcaccatt

SEQ ID NO: 413895 - DNA, 75 bp, synthetic construct
  source 1..75: mol_type = other DNA
agcttctatgaacatcagtggaacttttttgaatttagttccgtatatggaaaagctgaaagttgatatccgcac

SEQ ID NO: 413896 - DNA, 75 bp, synthetic construct
  source 1..75: mol_type = other DNA
aagttgcactttgtcagtgcaacatggtgatctgcatggggaaaatatattaataaatgttgataagcctagtac

SEQ ID NO: 413897 - DNA, 75 bp, synthetic construct
  source 1..75: mol_type = other DNA
tgtcgatattgttgatggtcgttttgatgccgggatacgcctgggtgaaattgtagataatgatatggttgcagt

SEQ ID NO: 413898 - DNA, 75 bp, synthetic construct
  source 1..75: mol_type = other DNA
tgtcgatattgttgaaggtcgttttgatgccgggatacgcctgggtgaaattgtcgataaagatatggttgcagt

SEQ ID NO: 413899 - DNA, 75 bp, synthetic construct
  source 1..75: mol_type = other DNA
ggaacgcgtgcagaaaactcaccgggccgagtgccttgctgaccgccagtggttggcaatcgacggggatgttcc

SEQ ID NO: 413900 - DNA, 75 bp, synthetic construct
  source 1..75: mol_type = other DNA
catcaataacgtaacgtggataaacctgcgaattatcgccagggctacgagtactactggaaaacccacgcacac

SEQ ID NO: 413901 - DNA, 75 bp, synthetic construct
  source 1..75: mol_type = other DNA
tgtcgatattgttgagggtcgttttgatgccgggatacgcctgggtgaaattgttgataatgatatggttgcagt

SEQ ID NO: 413902 - DNA, 75 bp, synthetic construct
  source 1..75: mol_type = other DNA
tgtcgatattgttgacggtcgttttgatgccgggatacgcctgggtgaaattgtggataacgatatggttgcagt

SEQ ID NO: 413903 - DNA, 75 bp, synthetic construct
  source 1..75: mol_type = other DNA
atgttcttcggcttgtcgctctccatcttcggctcgcggctggcgctggagggtagcatcgcctacatcgtcaac

SEQ ID NO: 413904 - DNA, 75 bp, synthetic construct
  source 1..75: mol_type = other DNA
taaattacggaaacttcgatgcccgctataaacatcgaactgagggggtacaggatgtgcggtatggtcatgaaa

SEQ ID NO: 413905 - DNA, 75 bp, synthetic construct
  source 1..75: mol_type = other DNA
aaattcacgttatccagcgccaacaactccacgaaaaatgcagcgttttatttgtggggtaatccatccaggcct

SEQ ID NO: 413906 - DNA, 75 bp, synthetic construct
  source 1..75: mol_type = other DNA
cgtgccctgaatatccgtccggcctttatgctggtaccggtggcactggagacggtggcgaaccagaccatcaaa

SEQ ID NO: 413907 - DNA, 75 bp, synthetic construct
  source 1..75: mol_type = other DNA
tttctccatcacccgccaggccattatcaatgatgatctgaatatgctggtggacgtgccgatgaagatggggcg

SEQ ID NO: 413908 - DNA, 75 bp, synthetic construct
  source 1..75: mol_type = other DNA
ggggctggcagttggatgtgattatttaagtgagtttatatcacgattttgggaaaactgttggccatctattga

SEQ ID NO: 413909 - DNA, 75 bp, synthetic construct
  source 1..75: mol_type = other DNA
gcagaaacactaagtattgtaactaaaacaatagaagttctaaatttaaactgcagcaggctaaataatgccaga

SEQ ID NO: 413910 - DNA, 75 bp, synthetic construct
  source 1..75: mol_type = other DNA
gcaaaatcctgttacctttaacgcttccggatgcacacaatttttttactttcgagaaagttacaggtaagttgc

SEQ ID NO: 413911 - DNA, 75 bp, synthetic construct
  source 1..75: mol_type = other DNA
acagttatacttggttacagttctcagattaaagcaaatacagaagttattcgtactgcatggaataattttcag

SEQ ID NO: 413912 - DNA, 75 bp, synthetic construct
  source 1..75: mol_type = other DNA
cgtcgtctcgaactacttcacgaaaactttcgagagccaccagaaaaatggcggcgcgttgctgtgaaagatatt

SEQ ID NO: 413913 - DNA, 75 bp, synthetic construct
  source 1..75: mol_type = other DNA
atatatatgtctaactcaacgacgtttgatgatcaggggtttgcctcaaataatacgggattatcaggaaccgtt

SEQ ID NO: 413914 - DNA, 75 bp, synthetic construct
  source 1..75: mol_type = other DNA
aaagctccataatctattattacaatggaatcaaggtgagcctaaatttttccaaacgacacgagatataataat

SEQ ID NO: 413915 - DNA, 75 bp, synthetic construct
  source 1..75: mol_type = other DNA
cgcgcgcttgagggaatatcgaagcgctttaaaggcaaaaaggggccgccacgcccttcgttcattgacacagga

SEQ ID NO: 413916 - DNA, 75 bp, synthetic construct
  source 1..75: mol_type = other DNA
aaagatattacattaagtatagttaataatcgtttttcaatgggagctaactattcaagaaatcaagggattgat

SEQ ID NO: 413917 - DNA, 75 bp, synthetic construct
  source 1..75: mol_type = other DNA
agcggtcatttgtcagtcagctatggcaatggcgcaggggtagaatcgccgtggaatactcaggcgggtgtggtc

SEQ ID NO: 413918 - DNA, 75 bp, synthetic construct
  source 1..75: mol_type = other DNA
aaattcagaatattaagagcttaaaaggtgctggtaggtatagagacattgaatatttatggaatagatatgtcg

SEQ ID NO: 413919 - DNA, 75 bp, synthetic construct
  source 1..75: mol_type = other DNA
gagttcatcttgatatttatcccagcagtgcaaaatccactcaatatatacagctcggttgtggtatagataaac

SEQ ID NO: 413920 - DNA, 75 bp, synthetic construct
  source 1..75: mol_type = other DNA
aagattacaaggatatatggaagctatctaaaaaaatatggagcaaccttacagatgatgaaatcaagatattta

SEQ ID NO: 413921 - DNA, 75 bp, synthetic construct
  source 1..75: mol_type = other DNA
gggaaactgcgtgttgagcttgaggaagcaaaatcaaaactcaacgagcaacgcgagtattacgaaggtgttatc

SEQ ID NO: 413922 - DNA, 75 bp, synthetic construct
  source 1..75: mol_type = other DNA
ggaataaaaaataaactccctgaacaagacagaaaacgtctctctgttatcatcgacaagataaaacaacttgac

SEQ ID NO: 413923 - DNA, 75 bp, synthetic construct
  source 1..75: mol_type = other DNA
ttccgatgattttatttctgcagactattttgacatacttattaatgacgatgcttgtaattatgatattatcca

SEQ ID NO: 413924 - DNA, 75 bp, synthetic construct
  source 1..75: mol_type = other DNA
ctgcagcagctcatccgcctgccggggcagcagtatgatgaggagtccggcctgtattataaccgccaccgctat

SEQ ID NO: 413925 - DNA, 75 bp, synthetic construct
  source 1..75: mol_type = other DNA
atcgtgccactgggtgctggcgtgattgctccaattgtaggtcaggcgttcggcaccgttgcggatcctcgccag

SEQ ID NO: 413926 - DNA, 75 bp, synthetic construct
  source 1..75: mol_type = other DNA
agcccggcgtcagcgtcagatcctcggcgaggcaaagccgcgcctgaaaacccgcaaagaaatcacaaaagccct

SEQ ID NO: 413927 - DNA, 75 bp, synthetic construct
  source 1..75: mol_type = other DNA
tagcctataaaaagcttcttgaggtaagagagaagttacgagatacaggcaacatagcacaacaacattcagata

SEQ ID NO: 413928 - DNA, 75 bp, synthetic construct
  source 1..75: mol_type = other DNA
gcattcgcatcaaaggagtgaaccgccccgggtttcctggagagtgttttatctgtgaactcaggctgccagatc

SEQ ID NO: 413929 - DNA, 75 bp, synthetic construct
  source 1..75: mol_type = other DNA
attaccgccagcgaaattcgtgcaggatcgctccggtagccacgggatgacccttaactcactggtatccggcgg

SEQ ID NO: 413930 - DNA, 75 bp, synthetic construct
  source 1..75: mol_type = other DNA
aactttcgagagccaccagaaaaatggcggcgcgttgctgtgaaagatattgatgaattcgttacctgctgtttc

SEQ ID NO: 413931 - DNA, 75 bp, synthetic construct
  source 1..75: mol_type = other DNA
atgttttgcaactggcgattttatcgcgcatgaaattatttctccgtccaattcaattacaagaattacccgcag

SEQ ID NO: 413932 - DNA, 75 bp, synthetic construct
  source 1..75: mol_type = other DNA
aactgacagggatgccggtcaggctgattatcctggatacactggcccgttgttttggcagttcagacgagaata

SEQ ID NO: 413933 - DNA, 75 bp, synthetic construct
  source 1..75: mol_type = other DNA
tggctatagctttaatgggaagtagtgtatcaatctttgctgctccaggggaaacaattggttctggttctggtt

SEQ ID NO: 413934 - DNA, 75 bp, synthetic construct
  source 1..75: mol_type = other DNA
ccaggtgaaagttaatgacgatggcaaatttaataatgatgtggctggaaccagtggcgtttatctggctgggat

SEQ ID NO: 413935 - DNA, 75 bp, synthetic construct
  source 1..75: mol_type = other DNA
ggatgtcaacacgcttggaatgcagccgtacaactggcggactttgctcatgccttgcaacaaccacagggactg

SEQ ID NO: 413936 - DNA, 75 bp, synthetic construct
  source 1..75: mol_type = other DNA
tcaccggatgccggagtcgcattaaccgccagattaaaagtgctgggaaacctggatattgcggaacatcgcctg

SEQ ID NO: 413937 - DNA, 75 bp, synthetic construct
  source 1..75: mol_type = other DNA
tgactagtcgggatattacttttattgcagatgataataacgcagaactcatcccatgcctgagtacagatcttc

SEQ ID NO: 413938 - DNA, 75 bp, synthetic construct
  source 1..75: mol_type = other DNA
atgaagaattggctagtgattacttaaagagattgcacccaaatatcgttcagcaaatagatagaatgaataatt

SEQ ID NO: 413939 - DNA, 75 bp, synthetic construct
  source 1..75: mol_type = other DNA
gcttgtttttgctggataaaaacaacaagccgctcggtaacgccattttgtcctcggatcgccgggcgatggaaa

SEQ ID NO: 413940 - DNA, 75 bp, synthetic construct
  source 1..75: mol_type = other DNA
cgaagatttttggcgtcgatccgcgcacgattgaacgatggcaaacgcaagggcttccccatgtatctggtgggg

SEQ ID NO: 413941 - DNA, 75 bp, synthetic construct
  source 1..75: mol_type = other DNA
tattactccatctattaatgggaaagtatcggttacacttatattatcactactggagatgaagttgattgattt

SEQ ID NO: 413942 - DNA, 75 bp, synthetic construct
  source 1..75: mol_type = other DNA
tggccccggctggaaagcgccttctgatacccggagagcctgcccgctgcgccactggtgcggtacacgtatacg

SEQ ID NO: 413943 - DNA, 75 bp, synthetic construct
  source 1..75: mol_type = other DNA
gaaaaggcgggggagttattttttgaacgcagtaatgaagttaaatttcagatttccaggtcagagatatgtcat

SEQ ID NO: 413944 - DNA, 75 bp, synthetic construct
  source 1..75: mol_type = other DNA
cgtcactattgatgagaaggaatatctgcggctgggaatgttgctggaacaaatatttccggaagctaacgtgca

SEQ ID NO: 413945 - DNA, 75 bp, synthetic construct
  source 1..75: mol_type = other DNA
gcgtcggcacgaggtaagccaaaaggcggtacggctcaattttatccgatctacgtaaacagcaatggagaaatt

SEQ ID NO: 413946 - DNA, 75 bp, synthetic construct
  source 1..75: mol_type = other DNA
acaaaaactgcttgaccttctcgataacaccaggtgcaaccccagaacctggatcagttttttagaagcagcggt

SEQ ID NO: 413947 - DNA, 75 bp, synthetic construct
  source 1..75: mol_type = other DNA
aacgatctcgaacatcaggcgacctggcttgaaagtaatcaactttcggatttcctcactgcgccggtgcaggga

SEQ ID NO: 413948 - DNA, 75 bp, synthetic construct
  source 1..75: mol_type = other DNA
aacggaaaaaagggattttctgttacggttgcagaacctgattttactgcggcagtatactgggttaaggtctat

SEQ ID NO: 413949 - DNA, 75 bp, synthetic construct
  source 1..75: mol_type = other DNA
aaggccggacatccaccacgttcttcaggaggtagtggatgtccggcgaaaatcaaagaacatacacgtcaggtg

SEQ ID NO: 413950 - DNA, 75 bp, synthetic construct
  source 1..75: mol_type = other DNA
ttgcatagcggcggcctgaccttcagcaatgacagttttagcgactccgatacactggcgatagttcaggcacca

SEQ ID NO: 413951 - DNA, 75 bp, synthetic construct
  source 1..75: mol_type = other DNA
gaaaaagtgatttcccacacacgttataaacttccccctgtggagctggaaaccttcaactctgcggtcgatcat

SEQ ID NO: 413952 - DNA, 75 bp, synthetic construct
  source 1..75: mol_type = other DNA
gcatccgatgtttgtatatccctgctattgttgctagccggctagcaacaatagcagagggggcatgcatgtctg

SEQ ID NO: 413953 - DNA, 75 bp, synthetic construct
  source 1..75: mol_type = other DNA
ttcagacttaagcagaaggtttctccgtcaggaaaagtggaatggacggtggtgaatgataatggtggttaccag

SEQ ID NO: 413954 - DNA, 75 bp, synthetic construct
  source 1..75: mol_type = other DNA
ggccgcaccgttttcttctgtcactttcagacttaagcagaaggtttctccgtcaggaaaagtggaatggacggt

SEQ ID NO: 413955 - DNA, 75 bp, synthetic construct
  source 1..75: mol_type = other DNA
atggaaacgattaacatgtttcttgaaagcacgggcgtacagccctttcttgaggcggaggggcttacggaaatt

SEQ ID NO: 413956 - DNA, 75 bp, synthetic construct
  source 1..75: mol_type = other DNA
gctgccgtcatggctgatacaggagtgcttgatttacaggacagttctctggtttcaaaacaatatgcagcactg

SEQ ID NO: 413957 - DNA, 75 bp, synthetic construct
  source 1..75: mol_type = other DNA
cgactcttccctgcacggaaatactgcagctatcctggccacaaattctgttggtcagattgacatgataaattc

SEQ ID NO: 413958 - DNA, 75 bp, synthetic construct
  source 1..75: mol_type = other DNA
agagcaacgtaatgagaaaacctcatcagaaaacgtacctaatagttctgaaaagttaccttgggactcttggca

SEQ ID NO: 413959 - DNA, 75 bp, synthetic construct
  source 1..75: mol_type = other DNA
aaatccatttttctgcctggtgtttgctgttttttttggcatcatttttggtttgataaacgctattcttattta

SEQ ID NO: 413960 - DNA, 75 bp, synthetic construct
  source 1..75: mol_type = other DNA
cggcctgaccgtggagcagatgcaaaaccagatggacccggtgtacacgccggcgcgaaaaatccacctgtacca

SEQ ID NO: 413961 - DNA, 75 bp, synthetic construct
  source 1..75: mol_type = other DNA
tatgaactcaccaccgcttacacccctgccgggcagttacagcgtcagcacctgaacagcctgcagtatgaccgc

SEQ ID NO: 413962 - DNA, 75 bp, synthetic construct
  source 1..75: mol_type = other DNA
gcgtggtcaagacattttagtcttttcccccggccatttaaatggattgacttaagcgaagaagataatattttc

SEQ ID NO: 413963 - DNA, 75 bp, synthetic construct
  source 1..75: mol_type = other DNA
attctgtcggcgtaagatacaacattacacttgcagatacagcagatgaatggctaccccaagccagcacaaata

SEQ ID NO: 413964 - DNA, 75 bp, synthetic construct
  source 1..75: mol_type = other DNA
atgccgaaattgacgacgatcgttggtatcaacgtcatgacggcggcgtgttgctgccggtggagttgttggacg

SEQ ID NO: 413965 - DNA, 75 bp, synthetic construct
  source 1..75: mol_type = other DNA
aatgcaatgaaaagcaaagattcaaaaatgattgatttttttattaaaaaatggagcggtatcaggcaaacgatt

SEQ ID NO: 413966 - DNA, 75 bp, synthetic construct
  source 1..75: mol_type = other DNA
cctaatgacattgaatgcttgtgggaaatgttctcgcaggcaatgacctttgcggataaccagaatactaactct

SEQ ID NO: 413967 - DNA, 75 bp, synthetic construct
  source 1..75: mol_type = other DNA
atctgccctttgctcgccgaatattggttcgatgctccaaataaagtcgatgaagccagaaaagtgttattagca

SEQ ID NO: 413968 - DNA, 75 bp, synthetic construct
  source 1..75: mol_type = other DNA
ggattgatggcgataccgaatacgccgccaacaacattcgccagctggccccggcaatcatgtcggtcctgccgc

SEQ ID NO: 413969 - DNA, 75 bp, synthetic construct
  source 1..75: mol_type = other DNA
tgccaaaatatcaaccatcccaggaggctttagataaacgcgcatttaatgatgaaatgaataaaacagcagaac

SEQ ID NO: 413970 - DNA, 75 bp, synthetic construct
  source 1..75: mol_type = other DNA
ggtcactcgcgaccttttcgatgaaaaggcatgtcgccgtttccttgccgggaaggtagctaataaattgggccg

SEQ ID NO: 413971 - DNA, 75 bp, synthetic construct
  source 1..75: mol_type = other DNA
gtcatcttcaaaacagcaaaaagattttttgctggcaacgtttgacaactgggccggctggacaaatcaacagtt

SEQ ID NO: 413972 - DNA, 75 bp, synthetic construct
  source 1..75: mol_type = other DNA
tgcgagagtagggaactgccaggcatcaaataaaacgaaaggctcagtcgaaagactgggcctttcgttttatct

SEQ ID NO: 413973 - DNA, 75 bp, synthetic construct
  source 1..75: mol_type = other DNA
gcatctattatcagttcagaactctggcgagtactaatgccagtccaggaagtgttggacaatggagcgagaaag

SEQ ID NO: 413974 - DNA, 75 bp, synthetic construct
  source 1..75: mol_type = other DNA
gagtattggtgatacagggaaagaacgtcagctgcaaaatgttgcagccggacgaatatccgaaatcagtactga

SEQ ID NO: 413975 - DNA, 75 bp, synthetic construct
  source 1..75: mol_type = other DNA
tgaagccttaagttatgctggggctcattctaatttaaattactataatcttaaccctcatcttgataccggcat

SEQ ID NO: 413976 - DNA, 75 bp, synthetic construct
  source 1..75: mol_type = other DNA
tgcaatcgatattctcggtgttggaatggttaatgcaccgtttgaatatcagcctaataagccttctgccagtta

SEQ ID NO: 413977 - DNA, 75 bp, synthetic construct
  source 1..75: mol_type = other DNA
cacggtttttacgttaaagtggtaaccctgaacacgcagttcatccgtcaggcgtggttgtcaacgacggatgaa

SEQ ID NO: 413978 - DNA, 75 bp, synthetic construct
  source 1..75: mol_type = other DNA
ccggcgtgaagatcttcactacctttgactcggtggcccaggacgcggcagaaaaagccgccgtggaaggcattc

SEQ ID NO: 413979 - DNA, 75 bp, synthetic construct
  source 1..75: mol_type = other DNA
aagccctggatactatcgccagtagcctgaagaaaaccgtcgaacaatatggcaatgaggctgtatatattcagt

SEQ ID NO: 413980 - DNA, 75 bp, synthetic construct
  source 1..75: mol_type = other DNA
ggaatgctaattgctgacaacgttgctgaagaaatgatttcatggttattgcgcttactagacaccggagtaatt

SEQ ID NO: 413981 - DNA, 75 bp, synthetic construct
  source 1..75: mol_type = other DNA
accgaggaaaatcaaggttcaaatctatcggggccttttttacccggccagtcacggacgttcagttaccggctt

SEQ ID NO: 413982 - DNA, 75 bp, synthetic construct
  source 1..75: mol_type = other DNA
ccatcatccgtgctgctggtatgttctacaacaactatgccaccacttacagcgccggtaatctcgacgtttatg

SEQ ID NO: 413983 - DNA, 75 bp, synthetic construct
  source 1..75: mol_type = other DNA
gcggtgctggcaaacctgaccgccggacgcacggtacagggtgcgagtacgctgacgcaacagctggtgaaaaac

SEQ ID NO: 413984 - DNA, 75 bp, synthetic construct
  source 1..75: mol_type = other DNA
cctcatggcgtctgatactgctggttgccgtcattgcggtagtcgccgggctgtgtgtcctgcttgcaaacagcc

SEQ ID NO: 413985 - DNA, 75 bp, synthetic construct
  source 1..75: mol_type = other DNA
ccccaataacggggggaaacagcgttttgatcaaaatgataatgctagtgtgcttcttgcgtgccattccaggca

SEQ ID NO: 413986 - DNA, 75 bp, synthetic construct
  source 1..75: mol_type = other DNA
tcaggctgctacaacagttacttcagaatttgaaattactaataaaactatcgaaaaatatacaatatcaagtac

SEQ ID NO: 413987 - DNA, 75 bp, synthetic construct
  source 1..75: mol_type = other DNA
tttaccatgggcattaatgaaatgtaagcgttatctctatgctaatatggaagttaacggacaacgattttcggt

SEQ ID NO: 413988 - DNA, 75 bp, synthetic construct
  source 1..75: mol_type = other DNA
attggataatgacgatgcagaggtcggtattatttcttcgatgtgtggaaaaacatttgctattactacaaataa

SEQ ID NO: 413989 - DNA, 75 bp, synthetic construct
  source 1..75: mol_type = other DNA
gatgaaatcggtctgcgttacaacagccaccgtacaaaacgggaagaatatcttgtgatgagtggagatgagttc

SEQ ID NO: 413990 - DNA, 75 bp, synthetic construct
  source 1..75: mol_type = other DNA
gccgcggctggaatgtcaacatatccagggtgatggataacgccacacatgtggcggtgtacttcggctcttacc

SEQ ID NO: 413991 - DNA, 75 bp, synthetic construct
  source 1..75: mol_type = other DNA
aactatccacgcgcgttcgacagcatcggtctggcatacaccaaagagctgatgggtatccgcgaaaaaaactga

SEQ ID NO: 413992 - DNA, 75 bp, synthetic construct
  source 1..75: mol_type = other DNA
aactatcctcgcgcgttcgacagcatcggtctggcctacaccaaagagcttatgggtatccgcgaaaaaaactga

SEQ ID NO: 413993 - DNA, 75 bp, synthetic construct
  source 1..75: mol_type = other DNA
gccgctgtctcgctccgttcgtctggaagagtctgtgtacgagtacgctcgcactggcggtcgtggttgggcgca

SEQ ID NO: 413994 - DNA, 75 bp, synthetic construct
  source 1..75: mol_type = other DNA
gtccactcagaaagatatgcctgagccaggagagtttcgtgtacgcagccgcccggccactttcggcggtcgtga

SEQ ID NO: 413995 - DNA, 75 bp, synthetic construct
  source 1..75: mol_type = other DNA
tctgtgtatgcttaagtattctggtttgcgctgaggtgatgagctgtattaccaatgaatgtggggaaagaaagt

SEQ ID NO: 413996 - DNA, 75 bp, synthetic construct
  source 1..75: mol_type = other DNA
gagcagtctcgttacgattacgctcgtaccggcggccgcggctgggctcatacttccatgtccggtcaggttggt

SEQ ID NO: 413997 - DNA, 75 bp, synthetic construct
  source 1..75: mol_type = other DNA
atgaataatgttttttattttattcttttgttgtgctcttttttttccttcgctgatgaaagctatttttctata

SEQ ID NO: 413998 - DNA, 75 bp, synthetic construct
  source 1..75: mol_type = other DNA
aataaatgtaaaagatgttcgcggttgggatactcgatttgatattaattttcagatggaagaactgacagctga

SEQ ID NO: 413999 - DNA, 75 bp, synthetic construct
  source 1..75: mol_type = other DNA
ttctctcaaagtcttcaccgtatgcggtcagtaccgagagagagcactatcaagatcacctcgttggattcaaga

SEQ ID NO: 414000 - DNA, 75 bp, synthetic construct
  source 1..75: mol_type = other DNA
atgtgtcacgccaatggacgcgagacaatacgatagtagtcatctatgccgggaaaaatttaccgtcagagacgg

SEQ ID NO: 414001 - DNA, 75 bp, synthetic construct
  source 1..75: mol_type = other DNA
gtgccattaccaccagaacgttgacatattgccaggctgttctgtggattaacccactgttggcagccatcgaga

SEQ ID NO: 414002 - DNA, 75 bp, synthetic construct
  source 1..75: mol_type = other DNA
accgaaaaaaccgtaatcgaataccgggagattctccgccgtgaaaaaacctgtgatctgcctgttcctgctgat

SEQ ID NO: 414003 - DNA, 75 bp, synthetic construct
  source 1..75: mol_type = other DNA
cctggctgcagctcgggagaaagggcggataggcggcaggcgtccgaagcttactcaagaacaatgggaccaggc

SEQ ID NO: 414004 - DNA, 75 bp, synthetic construct
  source 1..75: mol_type = other DNA
agaatatgtcatataaaaacgctaacttcaccgagttcctatcattttactcatctcacgcaaagaaagttatta

SEQ ID NO: 414005 - DNA, 75 bp, synthetic construct
  source 1..75: mol_type = other DNA
gcgaagcagtaccggagagcctcaccacagtcacaatgccaccaccgctgacggagccagtgacatggggaaaaa

SEQ ID NO: 414006 - DNA, 75 bp, synthetic construct
  source 1..75: mol_type = other DNA
atccgcacgaaagaggaagtgaacaaggaagcggtcctggcggagccggatgcggtgaaagggattgccggtatt

SEQ ID NO: 414007 - DNA, 75 bp, synthetic construct
  source 1..75: mol_type = other DNA
caggatgcttgtttgtcattcccacggcagcagaaattccgattgtacaaacgatgatgctggcaggtatgggaa

SEQ ID NO: 414008 - DNA, 75 bp, synthetic construct
  source 1..75: mol_type = other DNA
cagatggtgactggagacgggcagcacgatacctcccgtacatgcgtgtcgggtaatgttttcatactgaagatt

SEQ ID NO: 414009 - DNA, 75 bp, synthetic construct
  source 1..75: mol_type = other DNA
tcccccggagactggcgcaacaatcccgaccacgcggtttatccccgctggcgcggggaactcggctggcaacat

SEQ ID NO: 414010 - DNA, 75 bp, synthetic construct
  source 1..75: mol_type = other DNA
tggcctgaagcgggtggtgaagaaggagcatgccgacgggagcatcacccgcagcgagtatgatgaggcggggag

SEQ ID NO: 414011 - DNA, 75 bp, synthetic construct
  source 1..75: mol_type = other DNA
gttggataagaatccaacagcatctccaggggatcgagcagcagcagaaaacgttcttcaggatttacagaatgc

SEQ ID NO: 414012 - DNA, 75 bp, synthetic construct
  source 1..75: mol_type = other DNA
ttagttcgactaaatagacggttcactgaggaatacatagagcggttgatcttcccggtactcattaagaacatc

SEQ ID NO: 414013 - DNA, 75 bp, synthetic construct
  source 1..75: mol_type = other DNA
tctctggaggaaaagcagcctcccggataccgttggctgcaacatgcggacttgatgctgcaaagaacatactca

SEQ ID NO: 414014 - DNA, 75 bp, synthetic construct
  source 1..75: mol_type = other DNA
atgatcgtgcaaaaagagctggttgctatttacgattatgagatccctgtacctgaaggccgttttccttcagac

SEQ ID NO: 414015 - DNA, 75 bp, synthetic construct
  source 1..75: mol_type = other DNA
aaacgccagttacagtatgtcaaacgatttgaaaggcggcatgaccaatctatcgggggtttatggcactctgct

SEQ ID NO: 414016 - DNA, 75 bp, synthetic construct
  source 1..75: mol_type = other DNA
agatttatttacatagagtcagttacccgcttcgcgacctctttctgcgctatctccggactcatgctctggtca

SEQ ID NO: 414017 - DNA, 75 bp, synthetic construct
  source 1..75: mol_type = other DNA
ttgtttgaaccagaaaagttgctgcaaattgtccgcgaggcggtaggcagctcggcacttttcgccgcccgtttt

SEQ ID NO: 414018 - DNA, 75 bp, synthetic construct
  source 1..75: mol_type = other DNA
ataacccagttatattcggtgtgattgtgtttgttctttctgctgtgatttacagtcccgcagcaactgctgtgg

SEQ ID NO: 414019 - DNA, 75 bp, synthetic construct
  source 1..75: mol_type = other DNA
tttagtcatcctgtcggcaagtgcgatagcggcgaagaacgtgaaacatgctgacatgacggtaagtgttgatat

SEQ ID NO: 414020 - DNA, 75 bp, synthetic construct
  source 1..75: mol_type = other DNA
gcactgcatctacaggaatatgctgcagaatcgttcactcccgccgaagcggatcaggcgaatcgttcggcgctg

SEQ ID NO: 414021 - DNA, 75 bp, synthetic construct
  source 1..75: mol_type = other DNA
tatctccggactcatgctctggtcacggctgaacaactggctcatgagtttagtctcggtattgccattgtcgaa

SEQ ID NO: 414022 - DNA, 75 bp, synthetic construct
  source 1..75: mol_type = other DNA
atttagtattattttttctcgtaatgcttactgtaatttcattaataatttttgccaggacaccaacaactcttg

SEQ ID NO: 414023 - DNA, 75 bp, synthetic construct
  source 1..75: mol_type = other DNA
ggtgaggaatcccgcattccatcgccgtttttttgcgctcctgaatctcgggtttgaatactgggaacctactgg

SEQ ID NO: 414024 - DNA, 75 bp, synthetic construct
  source 1..75: mol_type = other DNA
gtctggtcgtggacgtgcgccaaaaccgattaatgaagcgttgaaagcagggcgttctattgatgagtttctcat

SEQ ID NO: 414025 - DNA, 75 bp, synthetic construct
  source 1..75: mol_type = other DNA
aaaatcacgtaaaaaaacgttaccaaaagcgccacccaagtatcagtttgaagaaaatggtgaaacgaaatactg

SEQ ID NO: 414026 - DNA, 75 bp, synthetic construct
  source 1..75: mol_type = other DNA
cgcttatgggtttgacctgacgtcctttctgtcgtgggtagacgctcagcctgatgatggtcctctcttcgggat

SEQ ID NO: 414027 - DNA, 75 bp, synthetic construct
  source 1..75: mol_type = other DNA
tgggtcctgtcgcgttcatttcgcagccgtgacgaggccgaaaacgtcgccgcacagctgcttggctttgcgggg

SEQ ID NO: 414028 - DNA, 75 bp, synthetic construct
  source 1..75: mol_type = other DNA
tcctcgcggcatttggtggaaacgaaggcgcactgctggatgctgccgagcaatatctggaccgcatcgccgata

SEQ ID NO: 414029 - DNA, 75 bp, synthetic construct
  source 1..75: mol_type = other DNA
atgccaagaacaggggattcgccgaaagggctgaaaagcgggttacaggattatcagcctgaggagtgggttcaa

SEQ ID NO: 414030 - DNA, 75 bp, synthetic construct
  source 1..75: mol_type = other DNA
ttaaaatgtcacaaaagaataaagtcactgtgatttttacacataagcattgcctgtcaaaaatcgcaaaaaaaa

SEQ ID NO: 414031 - DNA, 75 bp, synthetic construct
  source 1..75: mol_type = other DNA
ttctgatcgactttaagttgacacgcccgatcgtgtttatgtgtggggtcgtctttattggtgttggtgttctag

SEQ ID NO: 414032 - DNA, 75 bp, synthetic construct
  source 1..75: mol_type = other DNA
cgtttctggatcgccataccgctatgcagcgccagaaagagctgggctggacaatcatggaggactcagggcgcg

SEQ ID NO: 414033 - DNA, 75 bp, synthetic construct
  source 1..75: mol_type = other DNA
aaaaactgtgcggttgaaattttctatccacctaaaaaagtggatgaaagtgtaaaagatgtgtcagaaacaatc

SEQ ID NO: 414034 - DNA, 75 bp, synthetic construct
  source 1..75: mol_type = other DNA
taggaatggaggactcaaaaggaaatcagtatcgatttataaattgtggattagaacaattacaacagtttcctc

SEQ ID NO: 414035 - DNA, 75 bp, synthetic construct
  source 1..75: mol_type = other DNA
tgactcaggatccgtttttaaggccggtctggttggagttgttgccatatttggtctttcatggatgatgagttc

SEQ ID NO: 414036 - DNA, 75 bp, synthetic construct
  source 1..75: mol_type = other DNA
ttcactggcgcaccttgagcaaccatttctcaatgcgtcttaaaagagatgacttgactaaattatgtatgcact

SEQ ID NO: 414037 - DNA, 75 bp, synthetic construct
  source 1..75: mol_type = other DNA
ggacgatgccaccggcagccggaaaaccatgacgtggagccgttacggtcagttgctgagcttcactgactgttc

SEQ ID NO: 414038 - DNA, 75 bp, synthetic construct
  source 1..75: mol_type = other DNA
ctcctgatactttagctatttatttgacgagactgctagacaaagaagataattcccctttaaaagggagaattg

SEQ ID NO: 414039 - DNA, 75 bp, synthetic construct
  source 1..75: mol_type = other DNA
aaattggtgttgcagctaactgggatatgccactgtctgcaggaaacgcagtgaaggcgaatcttaagctgagtt

SEQ ID NO: 414040 - DNA, 75 bp, synthetic construct
  source 1..75: mol_type = other DNA
gaagacgggcaaatggaccgtagcgttaattttctggattatgcctcccgtaaccatgctgtctggactggctat

SEQ ID NO: 414041 - DNA, 75 bp, synthetic construct
  source 1..75: mol_type = other DNA
gatcggtataaatgtgaaggagttacttgccgtatcattatcttcattacatgaagttaattattatgatgttca

SEQ ID NO: 414042 - DNA, 75 bp, synthetic construct
  source 1..75: mol_type = other DNA
aagacggaaccggggtgaggcggagaataacgcgaaaccggtacggtcagcttcaggcctttacggactgctcgg

SEQ ID NO: 414043 - DNA, 75 bp, synthetic construct
  source 1..75: mol_type = other DNA
acattctacctcgaagcggattacacgcagggtaacctctttgatcagaagcaagtcaacggaggatatcgcttc

SEQ ID NO: 414044 - DNA, 75 bp, synthetic construct
  source 1..75: mol_type = other DNA
ttgtatgtcggtctgtatattggctcaacacatgcatcgccggactatagcggaggcgacggtaccgcacgttca

SEQ ID NO: 414045 - DNA, 75 bp, synthetic construct
  source 1..75: mol_type = other DNA
cagcaatatcaatcaccgctgcccgagcgctaccgctggcgtaactgggctgcttatattgttgacgctgacggc

SEQ ID NO: 414046 - DNA, 75 bp, synthetic construct
  source 1..75: mol_type = other DNA
atgccaagatatactttaaaattacaggaaggcgatttcaaccgttcaataggtgaatggcgagggcattggata

SEQ ID NO: 414047 - DNA, 75 bp, synthetic construct
  source 1..75: mol_type = other DNA
cagcatcgataccagtacgccagcagggcgattcttcttccacgtcatgagcgccctggcggaaatggagcgcga

SEQ ID NO: 414048 - DNA, 75 bp, synthetic construct
  source 1..75: mol_type = other DNA
ctgcatcgataccagtacgccagcaggccgctttttcttccacgtcatgagcgccctggcagaaatggagcgcga

SEQ ID NO: 414049 - DNA, 75 bp, synthetic construct
  source 1..75: mol_type = other DNA
cagcatcgataccagtacgcctgcagggcgcttttttttccacgttatgagcgccctggcggaaatggaaagaga

SEQ ID NO: 414050 - DNA, 75 bp, synthetic construct
  source 1..75: mol_type = other DNA
cgaagatgcattaactgaaatgtttctcccggctgaaaacatcgttcaccgtcttctctgccggacagaacacat

SEQ ID NO: 414051 - DNA, 75 bp, synthetic construct
  source 1..75: mol_type = other DNA
acactatttccccggaacctgaactcaccgcacaggcgttctacataaaacgcttacgcttcattgttgactcgg

SEQ ID NO: 414052 - DNA, 75 bp, synthetic construct
  source 1..75: mol_type = other DNA
ccggcgctcctcgtcgtgctgttgccgatcatcgccagaggagtcatctatggcattccggggaatatcccaaca

SEQ ID NO: 414053 - DNA, 75 bp, synthetic construct
  source 1..75: mol_type = other DNA
ggtgacacggtgattgttttcgaccccaagggcgatgccgacctgctgcgtcgcgtctgggcggaggcgtaccgc

SEQ ID NO: 414054 - DNA, 75 bp, synthetic construct
  source 1..75: mol_type = other DNA
cctattttatggctgaacgacagcgaaaccacggagaaactgaccgatgacaccccggacacaccgccagctcgt

SEQ ID NO: 414055 - DNA, 75 bp, synthetic construct
  source 1..75: mol_type = other DNA
tgtttagtttatttaatttgctagggtatttattaccatttattaaaccaacagtttttgtttttgatatattca

SEQ ID NO: 414056 - DNA, 75 bp, synthetic construct
  source 1..75: mol_type = other DNA
tattgagctggcgcggcaactgcatcagcgcggtgtaccccgacgggaaattgccgaaaagttcggaatgaagtt

SEQ ID NO: 414057 - DNA, 75 bp, synthetic construct
  source 1..75: mol_type = other DNA
atgatgttacgtggtgattttcacccgtcggcaaaatattcacagcgtgatattgagctggcgcggcaactgcat

SEQ ID NO: 414058 - DNA, 75 bp, synthetic construct
  source 1..75: mol_type = other DNA
acatcatcacccgcgccctggtagcgctgggccagcgcccggactatgcccgcatcgcccgtcacgttatcaata

SEQ ID NO: 414059 - DNA, 75 bp, synthetic construct
  source 1..75: mol_type = other DNA
acgggcagtattgcgaattggagggcagggcactaatggggagtatcatctttttggtcatatccgtaatctgcg

SEQ ID NO: 414060 - DNA, 75 bp, synthetic construct
  source 1..75: mol_type = other DNA
aagatatcgggacgattgtgcgcgtcatccattcccatcctggcgatggagcaaggccgattccatccgatctgg

SEQ ID NO: 414061 - DNA, 75 bp, synthetic construct
  source 1..75: mol_type = other DNA
aatcaatgccggcattttactcgtggcatgtgcatcaaaaaatagtaattacgatttaaaagatgaatatacaag

SEQ ID NO: 414062 - DNA, 75 bp, synthetic construct
  source 1..75: mol_type = other DNA
atgggcaagaaagaacaaggatcattatctctccccagaggagtaactattcggcaacataaaactggtagcact

SEQ ID NO: 414063 - DNA, 75 bp, synthetic construct
  source 1..75: mol_type = other DNA
gcgctggacagatatagacttcatcggcaacacagcacatgtccagactgcaagcgtagtcggggtaatcaaaag

SEQ ID NO: 414064 - DNA, 75 bp, synthetic construct
  source 1..75: mol_type = other DNA
gtcatctattcggccatttgaggaatcttcgtctctggcataaagaattaactgatgcgcaaatgggggagagta

SEQ ID NO: 414065 - DNA, 75 bp, synthetic construct
  source 1..75: mol_type = other DNA
atgttgttgatacatgatattttacattgcaaggagatgtctaaaatgaaagatgttgatcaaaactttgatgct

SEQ ID NO: 414066 - DNA, 75 bp, synthetic construct
  source 1..75: mol_type = other DNA
tacatgatattttacattgcaaggagatgtctaaaatgaaagatgttgatcaaatctttgatgctttagggaagg

SEQ ID NO: 414067 - DNA, 75 bp, synthetic construct
  source 1..75: mol_type = other DNA
ctcctctaaaaagaatgcatgaaattaacctcaaaaaaaactataatatcgagttaaattttaaacagcgtgccc

SEQ ID NO: 414068 - DNA, 75 bp, synthetic construct
  source 1..75: mol_type = other DNA
aatagataaacctttagatataactgatgaagaatggtattatactcgtaggtatggtacaggtaataatcttta

SEQ ID NO: 414069 - DNA, 75 bp, synthetic construct
  source 1..75: mol_type = other DNA
ttaatagaccttaatggaattttttataacaatacgtctgaaaagagtatcatgcgttcatatggtgagggttct

SEQ ID NO: 414070 - DNA, 75 bp, synthetic construct
  source 1..75: mol_type = other DNA
tggcgctgacaggagatctttctgctgtctacgtacccggcattgaagatgaggcattccgggatttggcccggg

SEQ ID NO: 414071 - DNA, 75 bp, synthetic construct
  source 1..75: mol_type = other DNA
tcgtcactatggcagttaccttgctgcatatgacggacataccgctaaaaatactaatgatacaaaacaggcttg

SEQ ID NO: 414072 - DNA, 75 bp, synthetic construct
  source 1..75: mol_type = other DNA
actcagtgcaatttatgaatagatcattggcccaaataacaggcgagaatatgattggtgcaaatggcaggagcg

SEQ ID NO: 414073 - DNA, 75 bp, synthetic construct
  source 1..75: mol_type = other DNA
gataaaggttatgaaagaataacgttacagcttgatttagggggagaatcccctggttatctggaaaaagataaa

SEQ ID NO: 414074 - DNA, 75 bp, synthetic construct
  source 1..75: mol_type = other DNA
aaccgataccgatcaaaattcacatgtgaaaagagaaaagagcttcattccatcaacagaagcagaatggttttt

SEQ ID NO: 414075 - DNA, 75 bp, synthetic construct
  source 1..75: mol_type = other DNA
gcaaaaaaggttctgctcactctgtgggattatatgtctacgcccgaccagattaagcggatgcaggacgtcatt

SEQ ID NO: 414076 - DNA, 75 bp, synthetic construct
  source 1..75: mol_type = other DNA
agatgcccgattaaacacatcttccgttgcactggtgacctctggactggaacgtttgtcgaacttactctcgaa

SEQ ID NO: 414077 - DNA, 75 bp, synthetic construct
  source 1..75: mol_type = other DNA
atgttatggaagattccggagcatgggaagaagatggatttgcccctatatttccagacatctgttatcacttaa

SEQ ID NO: 414078 - DNA, 75 bp, synthetic construct
  source 1..75: mol_type = other DNA
ttgacctgacaccagcaatattaaaaaaatggatctcaaaaagaacaacaaaacttaagaccataagaaacaatc

SEQ ID NO: 414079 - DNA, 75 bp, synthetic construct
  source 1..75: mol_type = other DNA
gacataaaggaccagaaatgctatttaggcattatggaagatatttaaaagagtacgataacgaaaataccataa

SEQ ID NO: 414080 - DNA, 75 bp, synthetic construct
  source 1..75: mol_type = other DNA
ttgttttggttagccgctcaaatggggcataaaggaccagaaatgctatttaggcattacggccgttatcttaaa

SEQ ID NO: 414081 - DNA, 75 bp, synthetic construct
  source 1..75: mol_type = other DNA
aacagcgagcgcgggattgtcacgttcgcgttgcaagtcatcaaccagcaggacgttgttattcagcagggcgaa

SEQ ID NO: 414082 - DNA, 75 bp, synthetic construct
  source 1..75: mol_type = other DNA
tatcgcgacattaggctgggactggtcattttgtgaaccgctactgcccggcgaccgtatttccgcacgtatctg

SEQ ID NO: 414083 - DNA, 75 bp, synthetic construct
  source 1..75: mol_type = other DNA
actattaacccggtaactcttgtcagcgccagccggtatcacgtggtcgacagtaaaccgaacgccgacgattac

SEQ ID NO: 414084 - DNA, 75 bp, synthetic construct
  source 1..75: mol_type = other DNA
tgctgtatgcgggacagtggcaggatgtggaatccgggctgtgctataaccggttccggtattacgagccggaaa

SEQ ID NO: 414085 - DNA, 75 bp, synthetic construct
  source 1..75: mol_type = other DNA
ggaatacgggatgattacgtgagtgaactggcccttgctctgcatgagtctccctgtaacaataaactccatcag

SEQ ID NO: 414086 - DNA, 75 bp, synthetic construct
  source 1..75: mol_type = other DNA
atggcgcatttgtcagagcgcatgaaacgctgctcccggcacacatgcgctgggacgctgaaaaaatacgggcat

SEQ ID NO: 414087 - DNA, 75 bp, synthetic construct
  source 1..75: mol_type = other DNA
catcaaatgctgcgttgcagagtattgaaatattacgtgaagctgtcagacaaaatctggttacagatggcatta

SEQ ID NO: 414088 - DNA, 75 bp, synthetic construct
  source 1..75: mol_type = other DNA
ttactataaccaaacaattcgactgtttgttgcgccagaattgttagggaagagcgttggagagaattcatatct

SEQ ID NO: 414089 - DNA, 75 bp, synthetic construct
  source 1..75: mol_type = other DNA
gaaactggaactgacaacacctcatcgtgatttcgaccgtaacggacgtgtgatggtcgaaagtaaaaaagacct

SEQ ID NO: 414090 - DNA, 75 bp, synthetic construct
  source 1..75: mol_type = other DNA
taaaaattacattttgtcatgggcgtgggggataatttctgaagcatatcatgatttggagagcaatgactggtt

SEQ ID NO: 414091 - DNA, 75 bp, synthetic construct
  source 1..75: mol_type = other DNA
acagagcacctccggtctatggctgagcagttcctgacagacgctagtgacgattactggaatggacttgaggtc

SEQ ID NO: 414092 - DNA, 75 bp, synthetic construct
  source 1..75: mol_type = other DNA
ctactctagctggtttaactctagggtcctgactgaggcactgggagacgctgagaacgtttctcttcatagtct

SEQ ID NO: 414093 - DNA, 75 bp, synthetic construct
  source 1..75: mol_type = other DNA
cggttgttatcgctaaacctgaaaaaaggcgatcgcgtggcgctgattgccgaaaccagtagcgggtttgtcgag

SEQ ID NO: 414094 - DNA, 75 bp, synthetic construct
  source 1..75: mol_type = other DNA
ggtggactaatttatgccgtatctggtgtacctggattgattgctgcaaacagcattactaacagtgcttaccag

SEQ ID NO: 414095 - DNA, 75 bp, synthetic construct
  source 1..75: mol_type = other DNA
tatcagtgtgcctgtatataataaagtaatggtgaacagtgacacatctgggtcaaacttgatttttgaaaatta

SEQ ID NO: 414096 - DNA, 75 bp, synthetic construct
  source 1..75: mol_type = other DNA
gcaacggaagcccgtaattacgaaagccaaaataaccacagagcgtccattaacaaatggcaggatgtttttggt

SEQ ID NO: 414097 - DNA, 75 bp, synthetic construct
  source 1..75: mol_type = other DNA
gcggaagccttccgtaaacagcgcgccacgtctttatcttccccggccagtccccgttctgtttcctcttctcag

SEQ ID NO: 414098 - DNA, 75 bp, synthetic construct
  source 1..75: mol_type = other DNA
atcaccacataaagaattcaatgcatttaaaaaaggtcaatttgtcattccaccaattggcctaaagcaaatatt

SEQ ID NO: 414099 - DNA, 75 bp, synthetic construct
  source 1..75: mol_type = other DNA
aactggagactaaaggcctgtaccggagagcggcggcgcggtgggctgaggtcatgcagctggtgaacaccgata

SEQ ID NO: 414100 - DNA, 75 bp, synthetic construct
  source 1..75: mol_type = other DNA
ttttctggacgtcgcttgggatttcgcttccggtttccatcctgctgattttaggtgccctgctggccgacagta

SEQ ID NO: 414101 - DNA, 75 bp, synthetic construct
  source 1..75: mol_type = other DNA
tcgttcctgccgttttggttctatgtgccgttttcaatcgtgatcatcatctccctgctggcggcagccattaca

SEQ ID NO: 414102 - DNA, 75 bp, synthetic construct
  source 1..75: mol_type = other DNA
agtcgctggaaaaattctcccagcgtttcttagaagatcgcacgaaagccgggggggaaccccgcgacatccact

SEQ ID NO: 414103 - DNA, 75 bp, synthetic construct
  source 1..75: mol_type = other DNA
gggattcactcacgctgcgttcggagggggagcagtgttcgacatctgaaattaataaaaggaaatatgtaagca

SEQ ID NO: 414104 - DNA, 75 bp, synthetic construct
  source 1..75: mol_type = other DNA
gtaatggtgaacagtgacacatctgggtcaaacttgatttttgaaaattatcagaccaagaaaagtcgtagtttt

SEQ ID NO: 414105 - DNA, 75 bp, synthetic construct
  source 1..75: mol_type = other DNA
aatgctggtgtcataaatggtagcgatatcgatgatgaaacacttcaggcatattcaacatttcttcacgaaaca

SEQ ID NO: 414106 - DNA, 75 bp, synthetic construct
  source 1..75: mol_type = other DNA
agtatggaaagaaaaatcagttccggatattattagtacaatcttgaatgagtacaatataagagacataaaatt

SEQ ID NO: 414107 - DNA, 75 bp, synthetic construct
  source 1..75: mol_type = other DNA
tgacggaggccctgaattctattgttgaaaagtacgacctggtacgtacagaccagggtaatgccagctttatcc

SEQ ID NO: 414108 - DNA, 75 bp, synthetic construct
  source 1..75: mol_type = other DNA
gcgtaacgatcgtgtgccttatgacatatgggcgaagcagggctggctaaacacgacacctggtaaggctatcga

SEQ ID NO: 414109 - DNA, 75 bp, synthetic construct
  source 1..75: mol_type = other DNA
cggggttgaggatgcggcggcctgcatggctgaccttcaaattatggaaagcgaggctctcaaggtaatgcacaa

SEQ ID NO: 414110 - DNA, 75 bp, synthetic construct
  source 1..75: mol_type = other DNA
aacggacagattgccaagttcgtaactgtgcaaggccattctatggctgtatatgatgcgtatggtgcacagcag

SEQ ID NO: 414111 - DNA, 75 bp, synthetic construct
  source 1..75: mol_type = other DNA
aatccccagaaaacaagacaggcatagtgagatgtgatctaattgattgtgctaacaatttcaaggagatcacca

SEQ ID NO: 414112 - DNA, 75 bp, synthetic construct
  source 1..75: mol_type = other DNA
cctgctctcagggagctggaagccaaactgctcggtgcgcagctgaagcacggcaatcatccgatcctcgaaatg

SEQ ID NO: 414113 - DNA, 75 bp, synthetic construct
  source 1..75: mol_type = other DNA
tcagggcgctggcgtttgaccgctataacatgcgcttccttcgcccgcatctcatcgatgctggtttcacagatg

SEQ ID NO: 414114 - DNA, 75 bp, synthetic construct
  source 1..75: mol_type = other DNA
tgagtgtaccagaggagctcatagtggactgcctttttatcgggtggatggaccgttgcagacgatgaaaataac

SEQ ID NO: 414115 - DNA, 75 bp, synthetic construct
  source 1..75: mol_type = other DNA
ggggagaatcaaaaggagatggtctatgggggccaggtaaagcaagtaatgatacaaaagaagctgctggccgtt

SEQ ID NO: 414116 - DNA, 75 bp, synthetic construct
  source 1..75: mol_type = other DNA
cccgttctggaagctgtccccgtaaaaagtgtcagcgcgaacctcagcgaacagaatttcgaggcctgggcgacg

SEQ ID NO: 414117 - DNA, 75 bp, synthetic construct
  source 1..75: mol_type = other DNA
atgacagattcaataaatgccaatgttgtagtgagcatgccttcgcaactcttcactatggctcgttcttttaaa

SEQ ID NO: 414118 - DNA, 75 bp, synthetic construct
  source 1..75: mol_type = other DNA
tctttaccttgatctccttatacaagcaatcaacactggtactattaacgctgaagattggcaaaaaggtgaccg

SEQ ID NO: 414119 - DNA, 75 bp, synthetic construct
  source 1..75: mol_type = other DNA
cacaccaccgcagcgaaccttgatatccgcatcccgtatgccacagacccggcaggtaaccgcctgcccgacccg

SEQ ID NO: 414120 - DNA, 75 bp, synthetic construct
  source 1..75: mol_type = other DNA
gatgaggtgctgcctgcgccgctgccgccgtaccgggcactgaccgggctggtggaccgcttcgggcgcacacag

SEQ ID NO: 414121 - DNA, 75 bp, synthetic construct
  source 1..75: mol_type = other DNA
cgccgtaccgggcactgaccgggctggtggaccgcttcgggcgcacacagacgttccaccgcgaagccgccggtg

SEQ ID NO: 414122 - DNA, 75 bp, synthetic construct
  source 1..75: mol_type = other DNA
ccggcacatcggcccgtgaggcggcaacccatgcgactgatgctgcaggctcagcacgcgcagcctgcacgtcag

SEQ ID NO: 414123 - DNA, 75 bp, synthetic construct
  source 1..75: mol_type = other DNA
acgcaaatcgatggcaacaattacaggcagccgctggagtacaaaattacctgcgactcaagcatccgcgataat

SEQ ID NO: 414124 - DNA, 75 bp, synthetic construct
  source 1..75: mol_type = other DNA
gatgtctgtttttataatagtgtttttcttatgcgtatacaacattagattgagttattcacttttttcgaaaga

SEQ ID NO: 414125 - DNA, 75 bp, synthetic construct
  source 1..75: mol_type = other DNA
cttatggaaagcattattgttgctttattttcattgttaatgtcattgcttgtgtctttttttactttaataacc

SEQ ID NO: 414126 - DNA, 75 bp, synthetic construct
  source 1..75: mol_type = other DNA
atgtatgacttttataaacatcgtgaccatttggtaagatttgacggtagaatctggaaggacataacagaaacc

SEQ ID NO: 414127 - DNA, 75 bp, synthetic construct
  source 1..75: mol_type = other DNA
agtcagtggtacagtgccaggtctcctggcggacgataaatgattacggcggtttgagtgaaaagaaggagcaaa

SEQ ID NO: 414128 - DNA, 75 bp, synthetic construct
  source 1..75: mol_type = other DNA
ttgacgctctctatttttgccgttttatcgctgctggtggcgggtgaactgcaggctggcgtggtggttggagga

SEQ ID NO: 414129 - DNA, 75 bp, synthetic construct
  source 1..75: mol_type = other DNA
ttactgagcgatgttcagtaaacgatatcagtcatctgtaccgcgcattcatgtcggtggagaagctgaccctgt

SEQ ID NO: 414130 - DNA, 75 bp, synthetic construct
  source 1..75: mol_type = other DNA
ggaggccagtgatcgtatcaactataacgatatggtagtcgttgaacaccctttcagtcggcgcaaatttcaggc

SEQ ID NO: 414131 - DNA, 75 bp, synthetic construct
  source 1..75: mol_type = other DNA
ttgaaggggcagtcaggaaagcccatgctgctttgcacgctgttctggacaagatccagacagaaaatgctgaaa

SEQ ID NO: 414132 - DNA, 75 bp, synthetic construct
  source 1..75: mol_type = other DNA
aatggcagcattgtcgcagaaaacggtcaggtttatctgactggacttccacagtcagggaaattacaggtttca

SEQ ID NO: 414133 - DNA, 75 bp, synthetic construct
  source 1..75: mol_type = other DNA
aatgttgaactggatgaaaccgtggtcactgtcatcccaactcacggtgctattgccagagcaacatttaatgca

SEQ ID NO: 414134 - DNA, 75 bp, synthetic construct
  source 1..75: mol_type = other DNA
cgttccattcggtgcaattgtcacacacggagagaataaaaatggcagcattgtcgcggaaaacggtcaggttta

SEQ ID NO: 414135 - DNA, 75 bp, synthetic construct
  source 1..75: mol_type = other DNA
gctccgccacttattctcctgaagcccggtactacaggcacgttgcgcttgctgagaacggaaagcgacatcttg

SEQ ID NO: 414136 - DNA, 75 bp, synthetic construct
  source 1..75: mol_type = other DNA
gcttattacgtccaccaccatcggcgcggtggcggacctgccgttcttcctgctgtttgtttttattctgtggat

SEQ ID NO: 414137 - DNA, 75 bp, synthetic construct
  source 1..75: mol_type = other DNA
ttggcgtgatcacccgccgcgataaccacgacaatatcagcgttcagttcagcggtgacgaagggctggaaacca

SEQ ID NO: 414138 - DNA, 75 bp, synthetic construct
  source 1..75: mol_type = other DNA
gaacccagcgcctcgctggacgaaatggcggaagcgtatttaatcgaacaactgaaacagtggattgggcatcgc

SEQ ID NO: 414139 - DNA, 75 bp, synthetic construct
  source 1..75: mol_type = other DNA
ttttagccgcatgcagcctgtgtcatgccgataatctgacctttattggccacctggtgaccccgcctgtttgca

SEQ ID NO: 414140 - DNA, 75 bp, synthetic construct
  source 1..75: mol_type = other DNA
aatgattaatgttgcatgcaacaggatcattcagaatatcacgatgaaagctcccgaattgaaatatattgtgag

SEQ ID NO: 414141 - DNA, 75 bp, synthetic construct
  source 1..75: mol_type = other DNA
ttaatcgaacaactgaaacagtggattgggcatcgcacgctggttatcgccactcaccgcacggcgatgctgcaa

SEQ ID NO: 414142 - DNA, 75 bp, synthetic construct
  source 1..75: mol_type = other DNA
atgcgcgagtcggcggtacgcaacgcgacgctggtggaagccgtgcagtcgattgaagatatcaaactgctgcgc

SEQ ID NO: 414143 - DNA, 75 bp, synthetic construct
  source 1..75: mol_type = other DNA
taaaatcgttgaactggcgctactgcgcccgctcagcgccatccctgacgcgcgggtggatgactacattcgccc

SEQ ID NO: 414144 - DNA, 75 bp, synthetic construct
  source 1..75: mol_type = other DNA
tgaagtatattgaatctgattttgatctttccagattgactcaattacgacgtagctatcttaaaagtttcaata

SEQ ID NO: 414145 - DNA, 75 bp, synthetic construct
  source 1..75: mol_type = other DNA
gcgttttcagaatcagtggaatcacaccaacgacgtggcctcgtccatcagcatgaagcaacgttttctcaccgg

SEQ ID NO: 414146 - DNA, 75 bp, synthetic construct
  source 1..75: mol_type = other DNA
tgcgaaagaggccattttgcgtgagcagggcgaacccacggcgcgacgcgtggtgttacaggagaagaataaggg

SEQ ID NO: 414147 - DNA, 75 bp, synthetic construct
  source 1..75: mol_type = other DNA
gcgccgctgtcgcagatatccggcgtgctctcgcgctggcagcaggcgaaagtagcacgtaacggccttgatgaa

SEQ ID NO: 414148 - DNA, 75 bp, synthetic construct
  source 1..75: mol_type = other DNA
tcgtcttgctggaccgggtaaagcaggcagagcggtggctgtggtatttggtggctttactctggcgatggcaat

SEQ ID NO: 414149 - DNA, 75 bp, synthetic construct
  source 1..75: mol_type = other DNA
cgttaccgttatgacctgaccgggaaactcacgcagagcgaggatgaggggcttatcaccctctggcactacgat

SEQ ID NO: 414150 - DNA, 75 bp, synthetic construct
  source 1..75: mol_type = other DNA
cgatgttgcgaggaataattcttcattcttattcgcgattattatttgtggtttttttcaggaagttgataattt

SEQ ID NO: 414151 - DNA, 75 bp, synthetic construct
  source 1..75: mol_type = other DNA
gtggaaaacttaccgacagcatgggggtgaatcgtgccaatatactcattataagcggcattgttattgtcgtgc

SEQ ID NO: 414152 - DNA, 75 bp, synthetic construct
  source 1..75: mol_type = other DNA
tttaaccgtaagttgctggccggcgcgctggttacggtgctggcgtatgcaggctcgtttacggcttacaccttt

SEQ ID NO: 414153 - DNA, 75 bp, synthetic construct
  source 1..75: mol_type = other DNA
atgataaatggcatttctcaactgaggtctattcagtcaaattcagctcagtcaaattcagctcagtcaaattca

SEQ ID NO: 414154 - DNA, 75 bp, synthetic construct
  source 1..75: mol_type = other DNA
gggctatgtggagctcaagagtgggaaatttacaagaggttgaggggataattaaagggatgcttatgacattag

SEQ ID NO: 414155 - DNA, 75 bp, synthetic construct
  source 1..75: mol_type = other DNA
ccgcagcgccaacggcgaaatggtgccattctctgcctttaccacttcacattgggtgtatggctctccgcgact

SEQ ID NO: 414156 - DNA, 75 bp, synthetic construct
  source 1..75: mol_type = other DNA
gcaggttttacgtacccaccagtcgcccgatggctgcgaggatggcagttactactacctcgtggatatgcagga

SEQ ID NO: 414157 - DNA, 75 bp, synthetic construct
  source 1..75: mol_type = other DNA
gcaggtcttacgtacccgtgagtcgcccgatggttgcgagggtggcagttactactatctggtagatatggagga

SEQ ID NO: 414158 - DNA, 75 bp, synthetic construct
  source 1..75: mol_type = other DNA
ctgtgtattgccgacaacatcagcctggaataccacgagaaaactgactcgctcactcgggagcgtttccttgaa

SEQ ID NO: 414159 - DNA, 75 bp, synthetic construct
  source 1..75: mol_type = other DNA
tggttgtcgtcggccgtaaacagcgcggcgttgatgacgccatggctgcgattgcggcacaaactcccacggcgt

SEQ ID NO: 414160 - DNA, 75 bp, synthetic construct
  source 1..75: mol_type = other DNA
tcaattaaaacggctatatccgattttctgaatttatcgcaagaagagattaacttatttattaagaatggtact

SEQ ID NO: 414161 - DNA, 75 bp, synthetic construct
  source 1..75: mol_type = other DNA
atcatacttaatagttgtgaaagtaaaaatacaattatgaagttagtacaacaggcaatacatgatgaagccgga

SEQ ID NO: 414162 - DNA, 75 bp, synthetic construct
  source 1..75: mol_type = other DNA
gttaccgctggactatctgcaaggacacaaagacggcctggagtgggctgcacaattggcagaagccaatcatcc

SEQ ID NO: 414163 - DNA, 75 bp, synthetic construct
  source 1..75: mol_type = other DNA
ataaatatcttgagttaggtttgaaaaaattattgagcaggcattctattactattggtgctgattttttatacc

SEQ ID NO: 414164 - DNA, 75 bp, synthetic construct
  source 1..75: mol_type = other DNA
ttggtcgaactccggttgaagcacagttatataagctgccagtcctttccacttggaatacaggactgtgtgagg

SEQ ID NO: 414165 - DNA, 75 bp, synthetic construct
  source 1..75: mol_type = other DNA
atttttttatatgtagggtcacatgaaagcagaaaaaacactgagcttttggttagagtattttctcaattgccg

SEQ ID NO: 414166 - DNA, 75 bp, synthetic construct
  source 1..75: mol_type = other DNA
aactaaagaggctcaatccaatgatattaaatctataggggagttaattaaatctcaggtattaggaaagaaaaa

SEQ ID NO: 414167 - DNA, 75 bp, synthetic construct
  source 1..75: mol_type = other DNA
atcagtaatgggaacataacaccagaagcaaggaaaagtatcaaagtacaagattttgattttctggatgtactc

SEQ ID NO: 414168 - DNA, 75 bp, synthetic construct
  source 1..75: mol_type = other DNA
gggggcgtggtctcatggcgtccagttctcggcgctattgccgctttcggcgtgctcggattccttggactgttg

SEQ ID NO: 414169 - DNA, 75 bp, synthetic construct
  source 1..75: mol_type = other DNA
acgttttctttagtacaaaagcaatcattttgatgattattactaaacttacagttttcctggggcgttttcaat

SEQ ID NO: 414170 - DNA, 75 bp, synthetic construct
  source 1..75: mol_type = other DNA
ttatacggaagcttatacggaaggatttatatccatatcgcgaattgtttcatcgaaagttgtattaatatattt

SEQ ID NO: 414171 - DNA, 75 bp, synthetic construct
  source 1..75: mol_type = other DNA
aaatattctaatgttaaattttcaatctactgttccgtttttttgttagtttcatattatatgtggagtaatcct

SEQ ID NO: 414172 - DNA, 75 bp, synthetic construct
  source 1..75: mol_type = other DNA
gatgaaatgccaataaaaaagcctgagttcgatgagggacgaactcaggctagtgttaagttttacagtaacacg

SEQ ID NO: 414173 - DNA, 75 bp, synthetic construct
  source 1..75: mol_type = other DNA
gtgcagcttcctcggcaacggcggcagcaaattccgcaacggcggcaaaaacgtccgagacgaaggccaggtcat

SEQ ID NO: 414174 - DNA, 75 bp, synthetic construct
  source 1..75: mol_type = other DNA
gtgcagcttcctcggcaacggcggcagtaaattccgctacggcggcaaaaacgtccgagacgaaagccaggtcat

SEQ ID NO: 414175 - DNA, 75 bp, synthetic construct
  source 1..75: mol_type = other DNA
gtgcagcttcctcggcaacggcggcaggaaattccgcaacggcggcaaaaacgtccgagacgaacgccaggtcat

SEQ ID NO: 414176 - DNA, 75 bp, synthetic construct
  source 1..75: mol_type = other DNA
gccacgaatgcttcagaggcggctacctcagcccgggatgcggaggcctcaaaagacgcggcaaaatcatcagaa

SEQ ID NO: 414177 - DNA, 75 bp, synthetic construct
  source 1..75: mol_type = other DNA
gccacgaaagcttcagaggcggccacctcagcccgcgatgcggaggcctcaaaagacgcggcaaaatcatcagaa

SEQ ID NO: 414178 - DNA, 75 bp, synthetic construct
  source 1..75: mol_type = other DNA
gccacgaacgcttcagaggcggccacctcagcccgagatgcggaggcctcaaaagacgcggcaaaatcatcagaa

SEQ ID NO: 414179 - DNA, 75 bp, synthetic construct
  source 1..75: mol_type = other DNA
gccacgaacgcttcagaggcggcaacctcagcccgcgatgcggaggcctcaaaagacgcggcaaaatcatcagaa

SEQ ID NO: 414180 - DNA, 75 bp, synthetic construct
  source 1..75: mol_type = other DNA
gccacgaatgcttcagaggcggcgacctcagcccgtgatgcggaggcctcaaaagacgcggcaaaatcatcagaa

SEQ ID NO: 414181 - DNA, 75 bp, synthetic construct
  source 1..75: mol_type = other DNA
gcccgggcctccagtgttgtgctggttaatgaagccgcagttcctgcgttgctggcggacggtctggcagaaaaa

SEQ ID NO: 414182 - DNA, 75 bp, synthetic construct
  source 1..75: mol_type = other DNA
tttcgccacccttggttctggcacgtttttaggcatttatctaccaatctggctgatgattggctttttgatttt

SEQ ID NO: 414183 - DNA, 75 bp, synthetic construct
  source 1..75: mol_type = other DNA
ttccagcaaaaattgcaaaacaaagtcattttgatgcgtcgccatgaagaaaagatggccgccgcccctgccgta

SEQ ID NO: 414184 - DNA, 75 bp, synthetic construct
  source 1..75: mol_type = other DNA
aagagtagctggttgatgttattgtgccaggggggcggggtaaggtgctgtatcgatatgctttggcaattgcgt

SEQ ID NO: 414185 - DNA, 75 bp, synthetic construct
  source 1..75: mol_type = other DNA
tgatgctttatatgaggatgcattatcagttctatttccaaaaataaatgaaataaatgcagattcaagtattgt

SEQ ID NO: 414186 - DNA, 75 bp, synthetic construct
  source 1..75: mol_type = other DNA
tggcagagacgagcaagtttttaagttttgtcctccgacataaaccagaggcgattggcatcgtgctggaccgtg

SEQ ID NO: 414187 - DNA, 75 bp, synthetic construct
  source 1..75: mol_type = other DNA
atcaggtccagcctcttacgcccttaaaagccggggataacacactcaaatatcaacttcgttataagtccacaa

SEQ ID NO: 414188 - DNA, 75 bp, synthetic construct
  source 1..75: mol_type = other DNA
gccgtaaccgtcgtcgtcgctacagctcatattgcggagaaatcggaccggctccggataaccttatcgccagag

SEQ ID NO: 414189 - DNA, 75 bp, synthetic construct
  source 1..75: mol_type = other DNA
catgactcaacacgttgcgattaccgggctgctggcaatcggaatgacgctggtgatcctgaccggcggcatcga

SEQ ID NO: 414190 - DNA, 75 bp, synthetic construct
  source 1..75: mol_type = other DNA
atctacaaaacctccttgataaatataaggtaaaactacgattttctggtcattatcacaattcagttggcgaga

SEQ ID NO: 414191 - DNA, 75 bp, synthetic construct
  source 1..75: mol_type = other DNA
cgcttaatcaggttatgtcgctttaccctttaaaagcaggtgacaacacgttgaattaccaattgcgttacaaat

SEQ ID NO: 414192 - DNA, 75 bp, synthetic construct
  source 1..75: mol_type = other DNA
cggtaatatttataactacctcaatatgctgagttatggtgtcgctggcgtatcggcaaataaggttacgaatag

SEQ ID NO: 414193 - DNA, 75 bp, synthetic construct
  source 1..75: mol_type = other DNA
cggtaaagacgctgttctcggtggcttctacggtttagcgttagaagcaaacgaaactgataacaccggtactat

SEQ ID NO: 414194 - DNA, 75 bp, synthetic construct
  source 1..75: mol_type = other DNA
tggttattaacgctggcggcaacctcgaaaaccgcgacgggaataacttcctgcgtaataacggcgcgctgtttg

SEQ ID NO: 414195 - DNA, 75 bp, synthetic construct
  source 1..75: mol_type = other DNA
cacgtatagctgttgagtattcaatatataatctggagaaatttattggttgtgcgaaaatatggcttaattatt

SEQ ID NO: 414196 - DNA, 75 bp, synthetic construct
  source 1..75: mol_type = other DNA
aagaaaatggtttttttaccaatttaaataaagcaccttcagatgctgttgagataaccacggatgaatggctgt

SEQ ID NO: 414197 - DNA, 75 bp, synthetic construct
  source 1..75: mol_type = other DNA
aaggtccgcatcgctggaaaagatggttatccggaatggggtgaactaccagcactaactcatgatgagcaggta

SEQ ID NO: 414198 - DNA, 75 bp, synthetic construct
  source 1..75: mol_type = other DNA
gtcagaaaaatggcagagaacaaacctgacctgccggatggcaaaacagagcaggctgtcagggaaattgccggg

SEQ ID NO: 414199 - DNA, 75 bp, synthetic construct
  source 1..75: mol_type = other DNA
atgtcgcaacaaacgggcgggatggtcggtaatgaaggcatcgagctttctgggcagaacatctacaacaacaac

SEQ ID NO: 414200 - DNA, 75 bp, synthetic construct
  source 1..75: mol_type = other DNA
attgcggcttacgtcgggctggatgtgcataaagaaacgttagcggttgatcctacccacgtaatatggatacag

SEQ ID NO: 414201 - DNA, 75 bp, synthetic construct
  source 1..75: mol_type = other DNA
ccatcagagcagcgcagacagaaccaccgtttctgcgggtgacaacgtggcgctggttgccgggcgggatgttac

SEQ ID NO: 414202 - DNA, 75 bp, synthetic construct
  source 1..75: mol_type = other DNA
agccagggtgatttcgggctgaacgcgcccgcgctgactaaccacggcagcattctctcatcaggtgacatgtcg

SEQ ID NO: 414203 - DNA, 75 bp, synthetic construct
  source 1..75: mol_type = other DNA
ccggtggtaaagggttgacggtcaatgcgcagaccctgacctccggcaaaaattcggtgacgcacagcgacgccg

SEQ ID NO: 414204 - DNA, 75 bp, synthetic construct
  source 1..75: mol_type = other DNA
atgagcccggctaataaattcatgttcgccgggatgttgatgatgatgggagctggtttattgcttgagttgtac

SEQ ID NO: 414205 - DNA, 75 bp, synthetic construct
  source 1..75: mol_type = other DNA
gcactggcgcttgcaggcgacaccctctcacagggccgtaacggacgctggctgacggcgggcgacctctccctc

SEQ ID NO: 414206 - DNA, 75 bp, synthetic construct
  source 1..75: mol_type = other DNA
tagcatatctaattaaatttgatgggaattataaagatgggatgacagtttggttattttcttgtaatacaggta

SEQ ID NO: 414207 - DNA, 75 bp, synthetic construct
  source 1..75: mol_type = other DNA
gctggggctggtgccgggaagaacgttgttgaaaacaatatgctgaacgtgatagccactgaaacagcagctaat

SEQ ID NO: 414208 - DNA, 75 bp, synthetic construct
  source 1..75: mol_type = other DNA
ggcgaactcatccgcatcagcagcccgcgccagacccggagttacagctacagcaccaccggcaggctgaccggc

SEQ ID NO: 414209 - DNA, 75 bp, synthetic construct
  source 1..75: mol_type = other DNA
gctgcaggggcgatatatcactcaggatccgattggactgaaggggggatggaacctgtatggatatcaattgaa

SEQ ID NO: 414210 - DNA, 75 bp, synthetic construct
  source 1..75: mol_type = other DNA
ctgcaggggcgatatatcactcaggatccgattgggctgaaggggggatggaatttttatcagtatccgttgaat

SEQ ID NO: 414211 - DNA, 75 bp, synthetic construct
  source 1..75: mol_type = other DNA
atcagatgggcggagccattaatatcaccaccctgaagaagcaagtctgggatatcgccagggatggagccgtag

SEQ ID NO: 414212 - DNA, 75 bp, synthetic construct
  source 1..75: mol_type = other DNA
gcacagcattatcacttgcctttacccagcaggccgtagcggctcaggagagcgactcgctgaccgtatggtcca

SEQ ID NO: 414213 - DNA, 75 bp, synthetic construct
  source 1..75: mol_type = other DNA
taataatttacagccagtttattttgattttaaagaaataccagctgcggatttttcatctgttgcgggtagtac

SEQ ID NO: 414214 - DNA, 75 bp, synthetic construct
  source 1..75: mol_type = other DNA
atgaagaacgcaactcgccttctggtgatttcgctcgccctcatcctgagtggctgtgcatattccccgaagcag

SEQ ID NO: 414215 - DNA, 75 bp, synthetic construct
  source 1..75: mol_type = other DNA
gtgattaccggtaatgcacgcttttttgccgctggggccgatctcaacgaaatggcagaaaaagatctcgcggcc

SEQ ID NO: 414216 - DNA, 75 bp, synthetic construct
  source 1..75: mol_type = other DNA
aaccgtaccgttcctatttctgaaagcctgtttgaaaagatcaaaatacggggcgggaaactggtgtttccgacg

SEQ ID NO: 414217 - DNA, 75 bp, synthetic construct
  source 1..75: mol_type = other DNA
catttgaaatgaaaattcaggcgctgattgatgaggctaatgcggtcattaataaaaataactggccttcaaagt

SEQ ID NO: 414218 - DNA, 75 bp, synthetic construct
  source 1..75: mol_type = other DNA
aaaatagcctttctgccaatattatgcaacctttatccaataatctgggaaatgtatcattaagtgcgctttggc

SEQ ID NO: 414219 - DNA, 75 bp, synthetic construct
  source 1..75: mol_type = other DNA
ggggcgaagtggaaatgctaaagattaccaattcagttattccaatagctggcaacgcatcagttatactttctc

SEQ ID NO: 414220 - DNA, 75 bp, synthetic construct
  source 1..75: mol_type = other DNA
gaccaacgtaagccctggtatatacaggcactgcgtcccgatggttcgccattaacctttggctatgacgtactg

SEQ ID NO: 414221 - DNA, 75 bp, synthetic construct
  source 1..75: mol_type = other DNA
cgttatgcaggaaactatccaagaacatttatgaccagagttaacgtcaatgagtggagtctggatagtagagtg

SEQ ID NO: 414222 - DNA, 75 bp, synthetic construct
  source 1..75: mol_type = other DNA
tccaacagggcttggcgatcgcgccgaccgtggtattagtcctctggcgcaagaaggtctggtgaaatgggcatt

SEQ ID NO: 414223 - DNA, 75 bp, synthetic construct
  source 1..75: mol_type = other DNA
gacgaacgcgggcgggtgaatgtcaccactcagggccgacgggccattgaataccactaccccgatgaacacacc

SEQ ID NO: 414224 - DNA, 75 bp, synthetic construct
  source 1..75: mol_type = other DNA
gacttttgctggaaagttaattatccctgaaactctcgtggcaaaattgtacggaactataagccgtgacactcc

SEQ ID NO: 414225 - DNA, 75 bp, synthetic construct
  source 1..75: mol_type = other DNA
acagggaaagtgggggagtttccttatatttactatacagcgagaataaacgaggccttaagttatgcgggtgtt

SEQ ID NO: 414226 - DNA, 75 bp, synthetic construct
  source 1..75: mol_type = other DNA
aaacgatcagaacagtaatcctattattgacctaagtagccttaatgggctctcatgtgaagacgcaattgcaag

SEQ ID NO: 414227 - DNA, 75 bp, synthetic construct
  source 1..75: mol_type = other DNA
tttgcaattctggatgcgcctgggttagaaggtgcacatattaatggacaaaaatacaatcgaacaaacagcaaa

SEQ ID NO: 414228 - DNA, 75 bp, synthetic construct
  source 1..75: mol_type = other DNA
tgaagcattaagttatgcaggagttcgttctaatgttaattactataatctaaacccaaaccttgatgtaggcat

SEQ ID NO: 414229 - DNA, 75 bp, synthetic construct
  source 1..75: mol_type = other DNA
gttttactttttttctcctctcctttagtggtgcaacacttgcaacccctaaaggtatctgtacccctgataatg

SEQ ID NO: 414230 - DNA, 75 bp, synthetic construct
  source 1..75: mol_type = other DNA
cgctggcacttggcgtcaccctggtctctttgcgtggctccagtgtcgacctgctgcatgtgctgttcggttcca

SEQ ID NO: 414231 - DNA, 75 bp, synthetic construct
  source 1..75: mol_type = other DNA
tgcagcattggaatctattggtcattatcttcgttcaaaatttgggaccaatatccgggcaattgttcctatgat

SEQ ID NO: 414232 - DNA, 75 bp, synthetic construct
  source 1..75: mol_type = other DNA
gactatacatcattgctacatgcattcatttggtacgagtcctgctgcgaaaattattgaaaatcataatggcag

SEQ ID NO: 414233 - DNA, 75 bp, synthetic construct
  source 1..75: mol_type = other DNA
gctaccgatacggtcagaactattcagactgctaaatatttctccggaggagaaaagctgattattcctgatata

SEQ ID NO: 414234 - DNA, 75 bp, synthetic construct
  source 1..75: mol_type = other DNA
tagatcttcgcaatgccactgttttgggtctatgttacgtcacaggtggccgtccagttcagttagctaaattgg

SEQ ID NO: 414235 - DNA, 75 bp, synthetic construct
  source 1..75: mol_type = other DNA
tttgcggttaaccccattgttggcgcggcagtgtttgccgccagtaaagtgctggggccgctgtggagcaaagtc

SEQ ID NO: 414236 - DNA, 75 bp, synthetic construct
  source 1..75: mol_type = other DNA
atcaacattggtagttggcgactgcgcgataactcaacgtggagttataacagtgggagtagcaattcatctgac

SEQ ID NO: 414237 - DNA, 75 bp, synthetic construct
  source 1..75: mol_type = other DNA
gaaagatatttgaagaaatggacgaactgactcattactgctcaatgatggacgaaaaactggatgaagtgattt

SEQ ID NO: 414238 - DNA, 75 bp, synthetic construct
  source 1..75: mol_type = other DNA
gctgatttgcctgcaggccctgcggtcatcctcacgagcactctgtttttctgcttttcagttctgtttggctct

SEQ ID NO: 414239 - DNA, 75 bp, synthetic construct
  source 1..75: mol_type = other DNA
ggtactcaatctggtggctggtttccagctacttggcaccctgatgacagtcggtattatgatgttaccggctgc

SEQ ID NO: 414240 - DNA, 75 bp, synthetic construct
  source 1..75: mol_type = other DNA
atcctcgtttggatggtcagaactcctacaataattgatatgcattatgtttctacactaagtaaaaaataccct

SEQ ID NO: 414241 - DNA, 75 bp, synthetic construct
  source 1..75: mol_type = other DNA
atgatttatactatcttgacaagaaaaccatttaaatttatttgtacgcttgctattctgatattggcagtgatt

SEQ ID NO: 414242 - DNA, 75 bp, synthetic construct
  source 1..75: mol_type = other DNA
gatatcagtactgtcccgttcgggcgcatcagaccgtacgttcatttttccggcgactttcgcgagaatgtggtt

SEQ ID NO: 414243 - DNA, 75 bp, synthetic construct
  source 1..75: mol_type = other DNA
acatcacaataacggcatagtattccttaaagatatatatgcctataaatgttatggacctgcaataaatattaa

SEQ ID NO: 414244 - DNA, 75 bp, synthetic construct
  source 1..75: mol_type = other DNA
cctgaaggacacgtggctatctttgatgaggacgaaaacacctggcacctcatggaagatcaccggggtaaaacg

SEQ ID NO: 414245 - DNA, 75 bp, synthetic construct
  source 1..75: mol_type = other DNA
aagcggttatttctattcctgttgtcccacaggtgactggtaatgactctaacttattgatagtgttttatgttc

SEQ ID NO: 414246 - DNA, 75 bp, synthetic construct
  source 1..75: mol_type = other DNA
tgccaccggtgggcgggaatccggccctgcacggtattgaaccggatgagcaggatgtgacactggcactgggtg

SEQ ID NO: 414247 - DNA, 75 bp, synthetic construct
  source 1..75: mol_type = other DNA
cagggagaaccggacggcggaattgctgaccacacaactgccccaggtggagatttacacgaagacgctggtctc

SEQ ID NO: 414248 - DNA, 75 bp, synthetic construct
  source 1..75: mol_type = other DNA
caattgattttgttgacagagcgtataaatatttctatgacagattagaaggtaacgttgatcaaatagatgtaa

SEQ ID NO: 414249 - DNA, 75 bp, synthetic construct
  source 1..75: mol_type = other DNA
cgcgacagcaaagtggtgatgattgatagcgactcctttcagattaatgccaatggcacgaagtcggcgtgtcgc

SEQ ID NO: 414250 - DNA, 75 bp, synthetic construct
  source 1..75: mol_type = other DNA
tctggtctggtggcgctgccgctgatgacttccgcacaaggcatccttccggcaatggcggtttatgctggcggg

SEQ ID NO: 414251 - DNA, 75 bp, synthetic construct
  source 1..75: mol_type = other DNA
ctattaaagaggtcgttaaagagcgtctgaaaaatcctttatggggttacatagctttttcatggtgtggcttta

SEQ ID NO: 414252 - DNA, 75 bp, synthetic construct
  source 1..75: mol_type = other DNA
acaacgtttgggacaatccaatcgcctggcagcaaatttatgcacctcaaaaagaaaaacgcaggagtgcggaat

SEQ ID NO: 414253 - DNA, 75 bp, synthetic construct
  source 1..75: mol_type = other DNA
cactttccaccgccgctgaagcgttatgggacgtggtacgagaccagggcaatacgctaatggctgggcgggaag

SEQ ID NO: 414254 - DNA, 75 bp, synthetic construct
  source 1..75: mol_type = other DNA
accttgtgaaattagagggagactaatgtatgacggaatagaatggagttttgttatcaatgctgctgcaacagc

SEQ ID NO: 414255 - DNA, 75 bp, synthetic construct
  source 1..75: mol_type = other DNA
aggatatccggcggggagaagtgaccatcgtttttgatcccaagggggatgcagatctgctgctgcgggtctggg

SEQ ID NO: 414256 - DNA, 75 bp, synthetic construct
  source 1..75: mol_type = other DNA
caatggttcttacaggcaggtggatttgcccctatatttccagacatctgttatcacttaacccattacaagccc

SEQ ID NO: 414257 - DNA, 75 bp, synthetic construct
  source 1..75: mol_type = other DNA
tcacttccggctggtactgaccacgcaggcgcagcgggcagaagaagcccggcagcaggccatttccggcgggac

SEQ ID NO: 414258 - DNA, 75 bp, synthetic construct
  source 1..75: mol_type = other DNA
gggtgtcgttgttagcggtgctcaatagcattgaccaacatcttgccgaactgctggagcaacatcgtgatcgtt

SEQ ID NO: 414259 - DNA, 75 bp, synthetic construct
  source 1..75: mol_type = other DNA
caggaactggttgatgacggtattcttgaaggggcagtcaggaaagcccatgctgctttgcacgctgttctggac

SEQ ID NO: 414260 - DNA, 75 bp, synthetic construct
  source 1..75: mol_type = other DNA
tcgctgccgccgtcggcaactcaatgtttgccgacctagtgagcgtcgccggacatctctacaaatttggtctca

SEQ ID NO: 414261 - DNA, 75 bp, synthetic construct
  source 1..75: mol_type = other DNA
tctcggtaaaggctttcgctggctacccatccacacccaacggctgtacgactgcctgcaaccggaagccacacg

SEQ ID NO: 414262 - DNA, 75 bp, synthetic construct
  source 1..75: mol_type = other DNA
tgctgcgcccgcccgtggagttttacagcaccgtcactgctggctgtggtgcattaatctgtctgacgcaggccc

SEQ ID NO: 414263 - DNA, 75 bp, synthetic construct
  source 1..75: mol_type = other DNA
atgcgtcagcactatgtcgaggccggtgactggtgggaaaaccaggggctgcctggtttgcaggatgagcccctg

SEQ ID NO: 414264 - DNA, 75 bp, synthetic construct
  source 1..75: mol_type = other DNA
gacctcgctcatgagcggcgcgaccgacagttcggacattcgcggtcagacggatttcaccagcaacacgcagga

SEQ ID NO: 414265 - DNA, 75 bp, synthetic construct
  source 1..75: mol_type = other DNA
ggacagctttccggcgaaggcaactcggcggcctttcgcgagttcgcctggcgctttgtcaacattatcgcccga

SEQ ID NO: 414266 - DNA, 75 bp, synthetic construct
  source 1..75: mol_type = other DNA
cgcatagagcaaatcacaagtgctgaaaatttctatttgttgtatttagcagcacctatcacagtagggattgtg

SEQ ID NO: 414267 - DNA, 75 bp, synthetic construct
  source 1..75: mol_type = other DNA
tacctggcgggaatgaaactgggcgacacgccgctggtggagtacacacgggacagactgcaccgggaaacggtg

SEQ ID NO: 414268 - DNA, 75 bp, synthetic construct
  source 1..75: mol_type = other DNA
attgagccacaggctgagctggtttacggttctgtatccggtaaacagtttgcatggaaggaccagggaatgcat

SEQ ID NO: 414269 - DNA, 75 bp, synthetic construct
  source 1..75: mol_type = other DNA
tttttcatttaatggattctactttgatttaaatacgttcgcgacgacgaaagacctattagatcgcggagtcat

SEQ ID NO: 414270 - DNA, 75 bp, synthetic construct
  source 1..75: mol_type = other DNA
taatatcgttttctctggggaggaaggcgttataaacataaagaacgatattgctcagggggctggatttattca

SEQ ID NO: 414271 - DNA, 75 bp, synthetic construct
  source 1..75: mol_type = other DNA
ggaacctatcaggataccgaaagatttcctgtgttttatagagtcgggtcaggcactcagatatacaaaaaagat

SEQ ID NO: 414272 - DNA, 75 bp, synthetic construct
  source 1..75: mol_type = other DNA
gttaatggccaaaaaaacaactggttgttattacctgaagattatattaaaaatattattacagccgatttcgat

SEQ ID NO: 414273 - DNA, 75 bp, synthetic construct
  source 1..75: mol_type = other DNA
ttgatgaatatatcaaaccttatgagagtagttggttctggtcgatcgtgttacgtgactggaaacgatatatcg

SEQ ID NO: 414274 - DNA, 75 bp, synthetic construct
  source 1..75: mol_type = other DNA
acagtccgtcagcagggaacggaaatcgccagcggtggtgacaccaccgtcaacgcaggacgggatatcaccgct

SEQ ID NO: 414275 - DNA, 75 bp, synthetic construct
  source 1..75: mol_type = other DNA
agcacctgaacagcctgctgtctgaccgcgattacacctggaacgacaacggcgaactcatccgcatcagcagcc

SEQ ID NO: 414276 - DNA, 75 bp, synthetic construct
  source 1..75: mol_type = other DNA
gacggtcacggtgtggtgttcccggctgaactggtgcggctgctggacaggctggaggaagaaatccgggcagac

SEQ ID NO: 414277 - DNA, 75 bp, synthetic construct
  source 1..75: mol_type = other DNA
agttggaaggggtgcgggagctagtcacctcaacgacgattagcgccattgccgacttgccatttttctttttat

SEQ ID NO: 414278 - DNA, 75 bp, synthetic construct
  source 1..75: mol_type = other DNA
attgcacaaattacgggtgttttgggacgtttacagcaagccaaagtcgcaaaaagtagtcttgatgagttaatg

SEQ ID NO: 414279 - DNA, 75 bp, synthetic construct
  source 1..75: mol_type = other DNA
acagagccttaagactgctacttttggttacaataccgaatataaaatagttaataataatcatgctccatatga

SEQ ID NO: 414280 - DNA, 75 bp, synthetic construct
  source 1..75: mol_type = other DNA
gaaaaagagtcttagtttttattgatgctattaatgaaggtaatggaaataaattctggaatgacaatattaaca

SEQ ID NO: 414281 - DNA, 75 bp, synthetic construct
  source 1..75: mol_type = other DNA
tcactcatatcaagtcatcattatggtcgacaggagtttagtggagcattttattatgaagacagtcagctaaca

SEQ ID NO: 414282 - DNA, 75 bp, synthetic construct
  source 1..75: mol_type = other DNA
aactcagccttttttatgggatgttatcattaaaaatcaataattgttcgaagttaaaaaagctacatatcgaag

SEQ ID NO: 414283 - DNA, 75 bp, synthetic construct
  source 1..75: mol_type = other DNA
cctaatcttaatccagagtttaaaaaccctctatttcttaagttattgtgtgaaggcattaagaaaaatggttta

SEQ ID NO: 414284 - DNA, 75 bp, synthetic construct
  source 1..75: mol_type = other DNA
agcaagtttttaaaactttcaaatgtaaactaactgatcaacaaaaagatttgtatgatgccacagatcctttca

SEQ ID NO: 414285 - DNA, 75 bp, synthetic construct
  source 1..75: mol_type = other DNA
caacttatgtagcaactaaacttattgatcaattcatctctcaagaaggatatggttgtattaagaaagcattat

SEQ ID NO: 414286 - DNA, 75 bp, synthetic construct
  source 1..75: mol_type = other DNA
acaattagaagaacgaaacagcatattaactctacagttagagcattatactcaggatcttaatagaaaaaacgc

SEQ ID NO: 414287 - DNA, 75 bp, synthetic construct
  source 1..75: mol_type = other DNA
gcgctaattgaaaaatacataactaggccaccgatggatgaagaacccaatataaatgaaaataaagccaataaa

SEQ ID NO: 414288 - DNA, 75 bp, synthetic construct
  source 1..75: mol_type = other DNA
gtaaaaaacaagaaagaagatatcacctggagttttgataaaacgctgggcactggtgttattaatcttgaaaaa

SEQ ID NO: 414289 - DNA, 75 bp, synthetic construct
  source 1..75: mol_type = other DNA
aattaaataatcccaagcatgacagttacgcaattagtgaaaagagtcacggcagagaagaaacccgtcttcata

SEQ ID NO: 414290 - DNA, 75 bp, synthetic construct
  source 1..75: mol_type = other DNA
caggggagcgattcatgtcattagtgcgttctcaacaatgcacagtctggtcatcgggcagatcaagacggataa

SEQ ID NO: 414291 - DNA, 75 bp, synthetic construct
  source 1..75: mol_type = other DNA
tcgttgtttcaatgctgattgcgatatttgccgtagggtttgtcgcttcgacattcccgactggcgcgaatattc

SEQ ID NO: 414292 - DNA, 75 bp, synthetic construct
  source 1..75: mol_type = other DNA
cttaacggcgcaacctacaccggcactgtgcaggcggacggtagctggagcgtcagcgttcccacttcagccctg

SEQ ID NO: 414293 - DNA, 75 bp, synthetic construct
  source 1..75: mol_type = other DNA
ggcgacgggcgcgcaggtcaccgtcacgctcaacggtcacaactacagcgccaccaccgacgcatcgggcaactg

SEQ ID NO: 414294 - DNA, 75 bp, synthetic construct
  source 1..75: mol_type = other DNA
ggctgccgaccattacctttaacgccatcagcggcgataacatcctgaacgccgatgaaaaaggccagccgttga

SEQ ID NO: 414295 - DNA, 75 bp, synthetic construct
  source 1..75: mol_type = other DNA
gcctgcgggtggataccgtcgcgggtgatgatgtggtcaatatcatcgaacacgctcaggcgcaggtgatcaccg

SEQ ID NO: 414296 - DNA, 75 bp, synthetic construct
  source 1..75: mol_type = other DNA
gatatcaccatcgatgccagtctgcctggcctgcgggtggataccgtcgcgggtgatgatgtggtcaatatcatc

SEQ ID NO: 414297 - DNA, 75 bp, synthetic construct
  source 1..75: mol_type = other DNA
ggtaaaacttacaccgccaccgtccaggctgatttaagctggaatgtgagcgtacctgccgccgactggcaggct

SEQ ID NO: 414298 - DNA, 75 bp, synthetic construct
  source 1..75: mol_type = other DNA
ttggcggcaaccaatacaccgccaccgtacagccagatttaagctggagcgtcagcgtacctgcgaacgttttgc

SEQ ID NO: 414299 - DNA, 75 bp, synthetic construct
  source 1..75: mol_type = other DNA
ggaaaacctacaccgctaccgtagcgggcgatggtagctggacaaccaccgtacccgccgccgatctcagcgtgt

SEQ ID NO: 414300 - DNA, 75 bp, synthetic construct
  source 1..75: mol_type = other DNA
cgacggttctggcaactggagcgttaccgtgcctgcttcggcgctcggcgcactgggcgaggcggtgtaccagat

SEQ ID NO: 414301 - DNA, 75 bp, synthetic construct
  source 1..75: mol_type = other DNA
acagcccgaccgtgcagacctatcaggcaacggtgcaggcggacggcagctggagcatcaatattccggcggcag

SEQ ID NO: 414302 - DNA, 75 bp, synthetic construct
  source 1..75: mol_type = other DNA
cgaagcgggcgatgtcatcaccgtcacgttaaacagtaaaaactacaccaccacgctggatgccgccggcaactg

SEQ ID NO: 414303 - DNA, 75 bp, synthetic construct
  source 1..75: mol_type = other DNA
ctcggcgctaatgagttcgcgcaaatcagtaccgacaacggcgcaacctgggtgaacgtgaccgtcgccgcagac

SEQ ID NO: 414304 - DNA, 75 bp, synthetic construct
  source 1..75: mol_type = other DNA
gaaaaaggcgcggcgttaacgctctccggcagcacgtccggcgtcgaagcggggcaaaccgtcaccgtcaccttt

SEQ ID NO: 414305 - DNA, 75 bp, synthetic construct
  source 1..75: mol_type = other DNA
gatctcaccattaacaccgtcgcgggcgatgacatcatcaacgctatcgaacacgggcaggcgctggtggtgagc

SEQ ID NO: 414306 - DNA, 75 bp, synthetic construct
  source 1..75: mol_type = other DNA
ccgaccgccgacgcgcaagcgttaggcgaagggaatcaggcggtgctggtcagtgggaaagatgccacgggcaat

SEQ ID NO: 414307 - DNA, 75 bp, synthetic construct
  source 1..75: mol_type = other DNA
ccgccgggtttacgctttctggcacgacgagcaacctggcgcagggaacggaactcaccgtcacgctaaacggca

SEQ ID NO: 414308 - DNA, 75 bp, synthetic construct
  source 1..75: mol_type = other DNA
ccgatttagcgttattaaccgatggcagtgcctccgcgcaggccagcgtcagcaatatcaacggcaatagcgcct

SEQ ID NO: 414309 - DNA, 75 bp, synthetic construct
  source 1..75: mol_type = other DNA
attcaggctattggtaatggcgacctgacggttaatgcctcggtaaccaacggcgtgggtaataccggcagcggt

SEQ ID NO: 414310 - DNA, 75 bp, synthetic construct
  source 1..75: mol_type = other DNA
ccggcggtaactcgcactttagcgcgtggccctaacgatattatcgtcacggtgaccgatgccgccggaaatacc

SEQ ID NO: 414311 - DNA, 75 bp, synthetic construct
  source 1..75: mol_type = other DNA
agcgataccacgctcacgctgaccggttcgctgggagcggggcttgccagcggcgaagtggcgcagattagcctt

SEQ ID NO: 414312 - DNA, 75 bp, synthetic construct
  source 1..75: mol_type = other DNA
tgttaccgacacggcaggcaacagtaattccaccagccataatgtgctggtcaacagcgccttgcctgccgtcac

SEQ ID NO: 414313 - DNA, 75 bp, synthetic construct
  source 1..75: mol_type = other DNA
tatattaacggctttaccaataacggcgatggcaccttttccagcgctattcaggtcaccgtcggcaccctgacg

SEQ ID NO: 414314 - DNA, 75 bp, synthetic construct
  source 1..75: mol_type = other DNA
cctggcagcgggcagcaacgtcacgctgaccattaacgggcaaacctatgttgcggcggtactggcggatggctc

SEQ ID NO: 414315 - DNA, 75 bp, synthetic construct
  source 1..75: mol_type = other DNA
gccgccgatctcgcgaccttgccggacggcgcagcaaacatacaagccagcgtcagcaacgtcgcagggaacagc

SEQ ID NO: 414316 - DNA, 75 bp, synthetic construct
  source 1..75: mol_type = other DNA
cacaccattaccgtcgatctcagcgctccggcgatgggcattaatatcgattccctgcaagccgacactggcctt

SEQ ID NO: 414317 - DNA, 75 bp, synthetic construct
  source 1..75: mol_type = other DNA
gttccggcggcagacgtgagtaactggcctgcgggtacggtgaatatcacggtaagtggcactaacacagccgga

SEQ ID NO: 414318 - DNA, 75 bp, synthetic construct
  source 1..75: mol_type = other DNA
tatgactggacgggtatgtcgtatcaggaacgcttatcgggaaaccaggctcccgctctggtagcaatttccttt

SEQ ID NO: 414319 - DNA, 75 bp, synthetic construct
  source 1..75: mol_type = other DNA
ttggttagaaacatatattgggaaagatggtgatggtgatagctgcgtttcaattattgatctttctttagtacc

SEQ ID NO: 414320 - DNA, 75 bp, synthetic construct
  source 1..75: mol_type = other DNA
aaggtattgaacgcctgaacgatatttctgatccccgccgggtgcatggtaaagatatcaggcggaacagaaaag

SEQ ID NO: 414321 - DNA, 75 bp, synthetic construct
  source 1..75: mol_type = other DNA
aggcattactggcggggcttggcgtggcgacgatgccgtatccgatggtcgaaaaagatattgcggaagggcggt

SEQ ID NO: 414322 - DNA, 75 bp, synthetic construct
  source 1..75: mol_type = other DNA
tttataatttaaatacatatccagaaatgtcaggcggaagtgaaagatcatgcttagagttggcaaaggaattaa

SEQ ID NO: 414323 - DNA, 75 bp, synthetic construct
  source 1..75: mol_type = other DNA
tttttactttgtcaaaaaataatgatttaaattggattaaagattggattatattttacagagatcagtataata

SEQ ID NO: 414324 - DNA, 75 bp, synthetic construct
  source 1..75: mol_type = other DNA
ggggggggttatcaggcaggagagaatagtgcatatattctcactggtgatctggggattaaatataaattctga

SEQ ID NO: 414325 - DNA, 75 bp, synthetic construct
  source 1..75: mol_type = other DNA
aaaggtgaattctggttacagcctcatctgcaggctgtctggatgggggttactccggatacacatcaggaaaat

SEQ ID NO: 414326 - DNA, 75 bp, synthetic construct
  source 1..75: mol_type = other DNA
gctgacggaattgtcgccgggaataaaattcagaacgatggtgatcttattctcaatcttaccggaaactatgat

SEQ ID NO: 414327 - DNA, 75 bp, synthetic construct
  source 1..75: mol_type = other DNA
gcgagcggcccggcaagcgttggcaaattgctttatgccaaaaaaagaatactgtagaatatttggtgtttctat

SEQ ID NO: 414328 - DNA, 75 bp, synthetic construct
  source 1..75: mol_type = other DNA
actcgcaaaacagtcgccgaaatactgatgggtatagaacctgtagtatttgcacaatttaagcagaaccctgag

SEQ ID NO: 414329 - DNA, 75 bp, synthetic construct
  source 1..75: mol_type = other DNA
cggccttgcgtgagggctgggataacccgaacgtgtttgttatctgcatgctcaagcatagtgataacaccattt

SEQ ID NO: 414330 - DNA, 75 bp, synthetic construct
  source 1..75: mol_type = other DNA
ctcaggaacataatttgtctccggtgcatcagagtggtcgccaggagcaactggaaaatctggtaaatcattatc

SEQ ID NO: 414331 - DNA, 75 bp, synthetic construct
  source 1..75: mol_type = other DNA
aagagtattaagcgtgatcttaatgtagatttttctaacattgacgtaatgaaaaaaagtggtgtgattgacgat

SEQ ID NO: 414332 - DNA, 75 bp, synthetic construct
  source 1..75: mol_type = other DNA
gtgatctggtgagagattctttagtacaggatggtataaagccagaaaaaatagcaaaaattatttcttgtttat

SEQ ID NO: 414333 - DNA, 75 bp, synthetic construct
  source 1..75: mol_type = other DNA
aaagtaattaatcctaactggaaaaactgggaatggctcaatgttggtatggggatcagcaagcctctaccatta

SEQ ID NO: 414334 - DNA, 75 bp, synthetic construct
  source 1..75: mol_type = other DNA
cgccaactattgtgtcgtataccgatgatgtcgggcagcggcagggaacgttaagcagttcgcaggccactgacg

SEQ ID NO: 414335 - DNA, 75 bp, synthetic construct
  source 1..75: mol_type = other DNA
ggcgatgacattattaataatgcggagaaaacccaggatctgaccatcagcggcgtctccagcggcctggcgaca

SEQ ID NO: 414336 - DNA, 75 bp, synthetic construct
  source 1..75: mol_type = other DNA
gacacgtatattcagtcgattcgaggggctggtaagcgttcatccagggagaacctgccgggccttggggggaca

SEQ ID NO: 414337 - DNA, 75 bp, synthetic construct
  source 1..75: mol_type = other DNA
agcttaaagcacgggagattcagcgcaagagccgttggggccgacgaagtgatcgcacgattgttaatccctgtg

SEQ ID NO: 414338 - DNA, 75 bp, synthetic construct
  source 1..75: mol_type = other DNA
tttagggatgaaattaaaacagcaaacctagaaaatagagctccatatgttccttctttaaaacaattttcatac

SEQ ID NO: 414339 - DNA, 75 bp, synthetic construct
  source 1..75: mol_type = other DNA
acgcgcaatttagagcatgctttgatattggctatacttataacttcacatccccatggaatagttcttttattt

SEQ ID NO: 414340 - DNA, 75 bp, synthetic construct
  source 1..75: mol_type = other DNA
ttaacatacaagaacagctttcctgatgatgaaaaagccgctattctggaatgctataagttgaactacagtaat

SEQ ID NO: 414341 - DNA, 75 bp, synthetic construct
  source 1..75: mol_type = other DNA
tcgactatgagcgttcatttggcggtaaatacaatatcgataatgagctgaacttaaaagtacgctattcatttt

SEQ ID NO: 414342 - DNA, 75 bp, synthetic construct
  source 1..75: mol_type = other DNA
gccggtgggattcagtacaataatcttttttatgaatgtgatcctgaaattgcatcaggtgtcagagtattttga

SEQ ID NO: 414343 - DNA, 75 bp, synthetic construct
  source 1..75: mol_type = other DNA
ggggcagacatttcgaatattatttacctgtcaaagatgaaggtattaattttaaaccggagataaaacatttag

SEQ ID NO: 414344 - DNA, 75 bp, synthetic construct
  source 1..75: mol_type = other DNA
gcaccctgctgccggatatgaccgcccatcagctttaccaacaaaaataccaacgctatcagcatctcattgccg

SEQ ID NO: 414345 - DNA, 75 bp, synthetic construct
  source 1..75: mol_type = other DNA
tttcacggtttctatcaaaatattgtacctatatagcgttaaattctgagggctattctgaagtaaattgttatt

SEQ ID NO: 414346 - DNA, 75 bp, synthetic construct
  source 1..75: mol_type = other DNA
atagtaataaaaacgagtttgtcataaattctataatatggaagaaaaaagacttagatgctgagtatttaatgg

SEQ ID NO: 414347 - DNA, 75 bp, synthetic construct
  source 1..75: mol_type = other DNA
taacttcagtacctgaagtgcttaacaccgttcagtccggagatggtttctacaaagacggatcgtttatccagc

SEQ ID NO: 414348 - DNA, 75 bp, synthetic construct
  source 1..75: mol_type = other DNA
cgaattcaagaagcataccggtaacaccccactccaatatcggaaagataaaatatggacatttaaaaaccagac

SEQ ID NO: 414349 - DNA, 75 bp, synthetic construct
  source 1..75: mol_type = other DNA
tcggtgaaatatgaatcagatggaggcccaggcatcgcgcggatcatggcttttttgatggggtccagcgaggcg

SEQ ID NO: 414350 - DNA, 75 bp, synthetic construct
  source 1..75: mol_type = other DNA
atgcggtatttatacggagacattttattttttaccaccctgccggcagtaatgacttttcctgcacaggctgca

SEQ ID NO: 414351 - DNA, 75 bp, synthetic construct
  source 1..75: mol_type = other DNA
aggctcatcatgtatctatcctaaatttgcagaacaacctataaaagaagaatccctactttgtggttcattaga

SEQ ID NO: 414352 - DNA, 75 bp, synthetic construct
  source 1..75: mol_type = other DNA
actcttgagcttaaggattatggagagcatgttatcgagcgaaaattgaacgaatcatcagaaatacagcaaatt

SEQ ID NO: 414353 - DNA, 75 bp, synthetic construct
  source 1..75: mol_type = other DNA
tcctggcccgcaatgagttcggcgcagctattagcatggtggtgtggggcgcagcaacctttgcggtcgtaccgc

SEQ ID NO: 414354 - DNA, 75 bp, synthetic construct
  source 1..75: mol_type = other DNA
accatgctgagaccattggcaacaatcagatgattgcggttaccaacaatcagatacagacggtgggcgttaacc

SEQ ID NO: 414355 - DNA, 75 bp, synthetic construct
  source 1..75: mol_type = other DNA
aaggtctgaatgccagcttttcgcctgtgccgattaaacgcggcaagctggcgtttatttcacaatcggcagccg

SEQ ID NO: 414356 - DNA, 75 bp, synthetic construct
  source 1..75: mol_type = other DNA
ttaccgcagctcctgcaaccctttctggcacgttatcccgatgtcagcttaaatatcgtgccccaggaatcaccg

SEQ ID NO: 414357 - DNA, 75 bp, synthetic construct
  source 1..75: mol_type = other DNA
gaagtttgaatacaacgccgcactcggtcagttaagccgttacacggcggcagacgcgcggagtggctgtaccgc

SEQ ID NO: 414358 - DNA, 75 bp, synthetic construct
  source 1..75: mol_type = other DNA
tgcaggggatgggcattggctgttctgcctgtgcactgggcgttttttcgcccggaacgctggcgcgcaatccgg

SEQ ID NO: 414359 - DNA, 75 bp, synthetic construct
  source 1..75: mol_type = other DNA
aaaggactttatgcccgcccggcgtcgtctggctgcggcggctcgtgccgcgcaaaaaggccgcgcgtcactcgt

SEQ ID NO: 414360 - DNA, 75 bp, synthetic construct
  source 1..75: mol_type = other DNA
aagcgcagcatggtcctcagggggtcgtattctcttccaaatccggttcgctttcgggtcatttatttcagttgg

SEQ ID NO: 414361 - DNA, 75 bp, synthetic construct
  source 1..75: mol_type = other DNA
cagtatgataaggagtcggggctgtactataaccgtcaccggtactacgatccgttgcaggggcggtatatcacc

SEQ ID NO: 414362 - DNA, 75 bp, synthetic construct
  source 1..75: mol_type = other DNA
ggaagcgcaggcgctggcgcaatggatagaaaacacccgaatggtttatgaagcacattctaccgattaccagac

SEQ ID NO: 414363 - DNA, 75 bp, synthetic construct
  source 1..75: mol_type = other DNA
aggtattaaaagcccagctaaattcaaaaacaacggaatattatcacactcacttgccagaaaacttaacctcct

SEQ ID NO: 414364 - DNA, 75 bp, synthetic construct
  source 1..75: mol_type = other DNA
ataaggcgagtgattatgtggaggagaaacagaaccagcttgagtcatggataaacagtttttgtgacacggacg

SEQ ID NO: 414365 - DNA, 75 bp, synthetic construct
  source 1..75: mol_type = other DNA
cacagcataaatggaaagaattctataaattagttctggaaagtcaaaaaataacactaaataataacattgtgg

SEQ ID NO: 414366 - DNA, 75 bp, synthetic construct
  source 1..75: mol_type = other DNA
agagaacggcgagcgggagaaagcgcagcgccgcagcctggcggagaagttacagcaggaagggagcgaagacgg

SEQ ID NO: 414367 - DNA, 75 bp, synthetic construct
  source 1..75: mol_type = other DNA
ggcggcgggcgatacggttaccgtaacgcttggcgggaaaacctacaccgctaccgtgcaggggaatttaagctg

SEQ ID NO: 414368 - DNA, 75 bp, synthetic construct
  source 1..75: mol_type = other DNA
ggctaatttaactctttccggcaccaccactaacgtagaagcagggcaaaccgtcactgtcacctttggcggtaa

SEQ ID NO: 414369 - DNA, 75 bp, synthetic construct
  source 1..75: mol_type = other DNA
atattattaacgccgccgaagcgggcgtggcgcaaaccatcagcgggcaggtgactggagccgccgttggcgaca

SEQ ID NO: 414370 - DNA, 75 bp, synthetic construct
  source 1..75: mol_type = other DNA
caccgctgaagtgggccagacggtgaccgtcacctttaacggtcagagctggactgcaacggtcggcagcggcgg

SEQ ID NO: 414371 - DNA, 75 bp, synthetic construct
  source 1..75: mol_type = other DNA
cagcaccgcggaaactgggcagacactcaccgttacgcttaacggcactaactaccagaccacggtgcaggcgga

SEQ ID NO: 414372 - DNA, 75 bp, synthetic construct
  source 1..75: mol_type = other DNA
ccgccacggtgagcgacaaagcgggtaacccggcaagcgccgaccacgcgctggcggtagatatcactgcgccgg

SEQ ID NO: 414373 - DNA, 75 bp, synthetic construct
  source 1..75: mol_type = other DNA
acagccagcgccaccgatgtgaccggcaacactggcaccgcgcagagcaatttactggtcgatacggtgctgccg

SEQ ID NO: 414374 - DNA, 75 bp, synthetic construct
  source 1..75: mol_type = other DNA
gcgcggcggtcagcgacaaagcgggcaacccaacctcggcaacgcataacctgacggtggatcttgccgctccgg

SEQ ID NO: 414375 - DNA, 75 bp, synthetic construct
  source 1..75: mol_type = other DNA
accatcaacaccattgcgggcgacgatattattaacgccgccgaacacgggcaggcactggtgatttccggttcc

SEQ ID NO: 414376 - DNA, 75 bp, synthetic construct
  source 1..75: mol_type = other DNA
cgcaggtaaaaagctcggcgggcaacggcaataacgccaatattagcaacggcacggtgacggttaacgcggcga

SEQ ID NO: 414377 - DNA, 75 bp, synthetic construct
  source 1..75: mol_type = other DNA
gggctgcgcattgacaccatcgcgggcgatgatgtgatcaatgccgttgagcagcagcaaaacctgattatcacc

SEQ ID NO: 414378 - DNA, 75 bp, synthetic construct
  source 1..75: mol_type = other DNA
tttactggtcgatacggtgctgccgcaggtgatcatcaacacctttgcgggcgacaacattgtcaacaacgccga

SEQ ID NO: 414379 - DNA, 75 bp, synthetic construct
  source 1..75: mol_type = other DNA
caacacctttgcgggcgatgatgtggtgaatgcagcggagcacggctcgtcgctggtgatcagcggcaccaccac

SEQ ID NO: 414380 - DNA, 75 bp, synthetic construct
  source 1..75: mol_type = other DNA
actgtttaaaagggaagtttaaagaggtaaggccgcgttattctgtattgcctgatatattcacacctataaatt

SEQ ID NO: 414381 - DNA, 75 bp, synthetic construct
  source 1..75: mol_type = other DNA
gtactggcgactaatgccctgaaagatgcctgtggctttactaacccgatcctggtaactcatgaagaatttgtg

SEQ ID NO: 414382 - DNA, 75 bp, synthetic construct
  source 1..75: mol_type = other DNA
tcttatagtgaatgcaacagattagatgcttttattcattcattaatatcaaaaagtgatcttaattttattcga

SEQ ID NO: 414383 - DNA, 75 bp, synthetic construct
  source 1..75: mol_type = other DNA
cagaacgcagcgccgcagcctggcggatgcgcttcagcagtccggcggcgaagacggtggcagtgtggtgttccc

SEQ ID NO: 414384 - DNA, 75 bp, synthetic construct
  source 1..75: mol_type = other DNA
ataatctggcggtagacaccaccgcgccggttctcaccattaacaccgtggcgggcgatgacatcatcaacgacg

SEQ ID NO: 414385 - DNA, 75 bp, synthetic construct
  source 1..75: mol_type = other DNA
tccggcggcgatcaccatcaacaccatcgccacggacgacgtgattaacgccgcagaaaaaggggctaatttaac

SEQ ID NO: 414386 - DNA, 75 bp, synthetic construct
  source 1..75: mol_type = other DNA
gtggcaggcgatgatgtgatcaacgcgacggaacacgcccaggcacagatcatcagcggatccgccacgggtgcg

SEQ ID NO: 414387 - DNA, 75 bp, synthetic construct
  source 1..75: mol_type = other DNA
atatatcatcttatgatactgaggacaataataaatcagcatatgttaatataaacgtaattactaatagttgca

SEQ ID NO: 414388 - DNA, 75 bp, synthetic construct
  source 1..75: mol_type = other DNA
atggagccatacagcctcacactcgatgaggcctgttcatatctgatagagccgctatatggcggtttatttttg

SEQ ID NO: 414389 - DNA, 75 bp, synthetic construct
  source 1..75: mol_type = other DNA
gcctcggcggtgcacaactacagcgtcgacagcagcgcgccaaccatcattatcaataccgtcgccagcgacaat

SEQ ID NO: 414390 - DNA, 75 bp, synthetic construct
  source 1..75: mol_type = other DNA
ggatgccacagacagccattaaaaccctgtttgaggctgaagatgcccagcaaaactggcaattgcccatgagcc

SEQ ID NO: 414391 - DNA, 75 bp, synthetic construct
  source 1..75: mol_type = other DNA
tggttggcacactgtgcctccccttcattgggaacggctggctaatgccatggggtgaagtggtcagcaatccat

SEQ ID NO: 414392 - DNA, 75 bp, synthetic construct
  source 1..75: mol_type = other DNA
tggggtgaagtggtcagcaatccattaaaggagcagcggctcgctgaggaatatcgggaaaggcaggaggcggca

SEQ ID NO: 414393 - DNA, 75 bp, synthetic construct
  source 1..75: mol_type = other DNA
atcatgtcgaacggttgtggcaggcgcttcatgagacaataacccgaaatcaccagtgcctttcaatgtggcaac

SEQ ID NO: 414394 - DNA, 75 bp, synthetic construct
  source 1..75: mol_type = other DNA
cgaaatgcagtgcggaaaaccccgtgttttatgaagatgaagtggatattcacctcaatcccaaaattggcgcag

SEQ ID NO: 414395 - DNA, 75 bp, synthetic construct
  source 1..75: mol_type = other DNA
tgagcagcaagagatcataaaagaactaaggaacaaaaaagaggcaatggaggaccttgttgcacgttggttggc

SEQ ID NO: 414396 - DNA, 75 bp, synthetic construct
  source 1..75: mol_type = other DNA
ttattactttcgttggttttcctccaccttataaattactattagaatgtttatctactgaaaaaagatcttatg

SEQ ID NO: 414397 - DNA, 75 bp, synthetic construct
  source 1..75: mol_type = other DNA
ctatggaagcagatgctcttcgcggtcatctcattcatggggggcgtgttcttctccgttcccatggccaagatt

SEQ ID NO: 414398 - DNA, 75 bp, synthetic construct
  source 1..75: mol_type = other DNA
tcgcttacacgaccgtctgggtgagccgcagtatacagattcacggctttctcagggttcggcaagcagtatgtg

SEQ ID NO: 414399 - DNA, 75 bp, synthetic construct
  source 1..75: mol_type = other DNA
tcctgaaaaccagattcaggtttatgtggaaaacgaagacggttctcacgttcctgtttcgcaaccaatcatcat

SEQ ID NO: 414400 - DNA, 75 bp, synthetic construct
  source 1..75: mol_type = other DNA
atgacagacattacagccaatgtgatcgtatcgatgccttcgcaacttttcactatggcgcgttcttttaaagcg

SEQ ID NO: 414401 - DNA, 75 bp, synthetic construct
  source 1..75: mol_type = other DNA
aaagcttcgctattcaaaaatatcaaaagatgaattaaattatataattttaaatagaaacaatctttcatatcg

SEQ ID NO: 414402 - DNA, 75 bp, synthetic construct
  source 1..75: mol_type = other DNA
atgtcctccgggttcagttgcgattttatttacgggaacgccgcatctgatgccaacctgctggctctggatgat

SEQ ID NO: 414403 - DNA, 75 bp, synthetic construct
  source 1..75: mol_type = other DNA
ataggtgttttgcctataaccagaactgcgcaaatgcctaataaactatttgattatgtaggcggttgtatacct

SEQ ID NO: 414404 - DNA, 75 bp, synthetic construct
  source 1..75: mol_type = other DNA
ggaaatataagttacggcctttacatgtggcacttgctatgtttttcaatagtaagaaaaatgttttcatttgta

SEQ ID NO: 414405 - DNA, 75 bp, synthetic construct
  source 1..75: mol_type = other DNA
atgcttaaattatcttctgcttttattcttgctggtgtgctattctgctcatgcgcaggggctgcctcatttggc

SEQ ID NO: 414406 - DNA, 75 bp, synthetic construct
  source 1..75: mol_type = other DNA
ggaaaacgccaataaccaggcgcaaattgccgctgccgcaatgttggggctaccgcttccgcgactgccgccgcc

SEQ ID NO: 414407 - DNA, 75 bp, synthetic construct
  source 1..75: mol_type = other DNA
cgcaaatggatccagagcggcaaaacgtttgatgcgaaactgctgatagatgagaacatcgcgcttaaatcactg

SEQ ID NO: 414408 - DNA, 75 bp, synthetic construct
  source 1..75: mol_type = other DNA
ttggaatagtaaatgacaaaaaagaattattaagaattagttcaatcgaaataatatgtagcatgaatgtaatta

SEQ ID NO: 414409 - DNA, 75 bp, synthetic construct
  source 1..75: mol_type = other DNA
gggtatctacaaagatgtaatgggaaaatgtctttatatatcaatgtatttttattgtttgttttgttcctatta

SEQ ID NO: 414410 - DNA, 75 bp, synthetic construct
  source 1..75: mol_type = other DNA
cactggatgattattcaaatagtaacaaaaatattgagcgtagaaaaagacaactttatcgatatgttggtgtat

SEQ ID NO: 414411 - DNA, 75 bp, synthetic construct
  source 1..75: mol_type = other DNA
acaacgctccgatggaaagcttctggggaacgctgaaaaatgagagcctgagccactatcgttttaataaccggg

SEQ ID NO: 414412 - DNA, 75 bp, synthetic construct
  source 1..75: mol_type = other DNA
aataacctccgctcgcagacccaaatgcgtctggatgaaggatttcttggctacgagacgagtccactcagagaa

SEQ ID NO: 414413 - DNA, 75 bp, synthetic construct
  source 1..75: mol_type = other DNA
tggaattttggggcacacctggtctcttgcagtggaagaacaattttactggctttggcctctattcatattttt

SEQ ID NO: 414414 - DNA, 75 bp, synthetic construct
  source 1..75: mol_type = other DNA
agataagttatggtttgtatatgtggcatttgctgtgtttttcaattgcaaacaaaatgtcctccttgtttgggg

SEQ ID NO: 414415 - DNA, 75 bp, synthetic construct
  source 1..75: mol_type = other DNA
gaagcgagtcccggatctgcacgtcagaacgtggacccgtaactggaaaccgtttctggaggggcttgtcgacgt

SEQ ID NO: 414416 - DNA, 75 bp, synthetic construct
  source 1..75: mol_type = other DNA
atagcccctgctttaataatgaaaaagcttacagatgctgatgaaaaattcaataaaaatactattttagcatct

SEQ ID NO: 414417 - DNA, 75 bp, synthetic construct
  source 1..75: mol_type = other DNA
ggtgacgtccggccatccggtcaatcccctgctcggtgcaaaggtccttcccggtgaaaccgaccttgccctgcc

SEQ ID NO: 414418 - DNA, 75 bp, synthetic construct
  source 1..75: mol_type = other DNA
atgaaaaggctaattatctgcatagcgggcgctttaatgctgtctggttgcgctggtgtacttgagaaacagaaa

SEQ ID NO: 414419 - DNA, 75 bp, synthetic construct
  source 1..75: mol_type = other DNA
cacctggaagattagtgcacaaatagacaataaacaaggaaagataagatctaaacacattttatgttgtatagt

SEQ ID NO: 414420 - DNA, 75 bp, synthetic construct
  source 1..75: mol_type = other DNA
ctgggcggtttctggtttttctaattcggttatctggctgattttcgccgcctttatgtttggcacaggctatga

SEQ ID NO: 414421 - DNA, 75 bp, synthetic construct
  source 1..75: mol_type = other DNA
caactcacgatgtttgctcaagaacactttattgatagttttattcttaagtttatggatagtttatatgaaggt

SEQ ID NO: 414422 - DNA, 75 bp, synthetic construct
  source 1..75: mol_type = other DNA
gcagatgctgcgttagatgctttgaaagaaacgcagaatagatctctatgtaatgatatggaatactctggtatt

SEQ ID NO: 414423 - DNA, 75 bp, synthetic construct
  source 1..75: mol_type = other DNA
agcgagtatgatgaggcggggaggctgaaggcgcagacggatgcggtgggtcggcggacggagtaccgtctgcat

SEQ ID NO: 414424 - DNA, 75 bp, synthetic construct
  source 1..75: mol_type = other DNA
tctggctttacagtttgagccggtttattttcctgtgcgaaaatttcatttttatcactgtgaccaccggggcct

SEQ ID NO: 414425 - DNA, 75 bp, synthetic construct
  source 1..75: mol_type = other DNA
gtactggatgcagggcgaagcagaccagacgaaaggcaccaccaaagcagactatcaggctattttcgacaccat

SEQ ID NO: 414426 - DNA, 75 bp, synthetic construct
  source 1..75: mol_type = other DNA
cgccagcgggtatgtctcttgcctttatggatgaacgaaaaaattattcggtagggctggatgaggcgggccggt

SEQ ID NO: 414427 - DNA, 75 bp, synthetic construct
  source 1..75: mol_type = other DNA
acagtgctgaacgggaagtctggacgaaagccgtgcggcagggatgggaggaagggcgcaaaagcgcggatgaaa

SEQ ID NO: 414428 - DNA, 75 bp, synthetic construct
  source 1..75: mol_type = other DNA
gcttcactaccctccggcggggagctgtttatccctgcgagcaaccaagcggtggggtatattgttggatccact

SEQ ID NO: 414429 - DNA, 75 bp, synthetic construct
  source 1..75: mol_type = other DNA
tttataataaaagtcaatcaattgagtccacgattaaatctgttctaaatcaaacgcatactgatttcgaattaa

SEQ ID NO: 414430 - DNA, 75 bp, synthetic construct
  source 1..75: mol_type = other DNA
tgcttatacttacgatatatctattacagctgtaaactctgtagaacaagctgcaagtattattttaaacacagc

SEQ ID NO: 414431 - DNA, 75 bp, synthetic construct
  source 1..75: mol_type = other DNA
tagaagaaaattgtgcatccgtcttaattaggcagcatgtgcttgatttgctgtacttactgagtctacaacctg

SEQ ID NO: 414432 - DNA, 75 bp, synthetic construct
  source 1..75: mol_type = other DNA
gcattctttggtaagaccgggatcagcaaaagcgatgagcagttggctgtacaggctctggcgcgtcatgcaatg

SEQ ID NO: 414433 - DNA, 75 bp, synthetic construct
  source 1..75: mol_type = other DNA
tgataaaaaactccacgatatagtagtgcgagtagatacaagtagtatgcaaccgatagattcatcttgtcgctt

SEQ ID NO: 414434 - DNA, 75 bp, synthetic construct
  source 1..75: mol_type = other DNA
taccagtgtacaggcaagtgttacgtttggtagtgttgatgtgctgtatggcgcgagcggtcaatctgatcctac

SEQ ID NO: 414435 - DNA, 75 bp, synthetic construct
  source 1..75: mol_type = other DNA
tcgcctggtgctgaccgagctgtttagtggtcgtgtttccgcacgccttacggaactggaagaacgagtgtttga

SEQ ID NO: 414436 - DNA, 75 bp, synthetic construct
  source 1..75: mol_type = other DNA
ttatatcaaagccacctgcattaagcaattgcagggcgactgagattttttctatggccttgcagatgtatgccg

SEQ ID NO: 414437 - DNA, 75 bp, synthetic construct
  source 1..75: mol_type = other DNA
cctatgagcaagggcaggcggatgaatatcgccagtacctgatcgatcatgcaaaagagtttggtctgaatcctg

SEQ ID NO: 414438 - DNA, 75 bp, synthetic construct
  source 1..75: mol_type = other DNA
gcagcgtatcagacctattccggattcatgctggcaggtctgagcgggttatgtctttccggcttcatgctctgc

SEQ ID NO: 414439 - DNA, 75 bp, synthetic construct
  source 1..75: mol_type = other DNA
atcctggaaggaaggtaaatcctggaatggagcgatacgctgtctttcttgatggcgtagaagttaagcatgtct

SEQ ID NO: 414440 - DNA, 75 bp, synthetic construct
  source 1..75: mol_type = other DNA
atgagactaaccgttttagatgatgatcctggaagaaaaataaacctcagcaaagagcggtatagcgtttatctc

SEQ ID NO: 414441 - DNA, 75 bp, synthetic construct
  source 1..75: mol_type = other DNA
aaagatgcccagggtaactttattactgatggtgtcgcgcagcttaatgaggaaaacgtacaagtcaggaacgct

SEQ ID NO: 414442 - DNA, 75 bp, synthetic construct
  source 1..75: mol_type = other DNA
gctttagggctgacatcagaagtcatcgagtcttatatcgatagttttgcggtaggtggcgcaactcccgattct

SEQ ID NO: 414443 - DNA, 75 bp, synthetic construct
  source 1..75: mol_type = other DNA
aaaagacaaagagcgatgcagacattgtcttgctgaaattatgcaacaaaatgttgctatgttataccagcaata

SEQ ID NO: 414444 - DNA, 75 bp, synthetic construct
  source 1..75: mol_type = other DNA
ccggacggcacggtggaaattagtgtcatcagccagacggcaggcaccactgcggtcactgccagcattaacagc

SEQ ID NO: 414445 - DNA, 75 bp, synthetic construct
  source 1..75: mol_type = other DNA
ttatcgccgatgtcaggacggcgcagatcgctgatctggtggtcattaaggacggctcagaggcggacggtgcga

SEQ ID NO: 414446 - DNA, 75 bp, synthetic construct
  source 1..75: mol_type = other DNA
atcaacaacagcagtcagagccgggatgtgacatttatcgccgatgtcaggacggcgcagatcgctgatctggtg

SEQ ID NO: 414447 - DNA, 75 bp, synthetic construct
  source 1..75: mol_type = other DNA
cccttacagaaaaaaagagtttattgataaatttttctcaaagacgctaaaaataaacccaccatcatcttctcc

SEQ ID NO: 414448 - DNA, 75 bp, synthetic construct
  source 1..75: mol_type = other DNA
atcaagcctgtaaaagtcaaagctattttggaaaacttacgaagttccttagagtatctcgctaatgatacctat

SEQ ID NO: 414449 - DNA, 75 bp, synthetic construct
  source 1..75: mol_type = other DNA
atccccttaagagaagagagttctgttaaagacctaagtgtgagcgtagatggttttggtttaatcacagcagga

SEQ ID NO: 414450 - DNA, 75 bp, synthetic construct
  source 1..75: mol_type = other DNA
gcgtgacggcaggcaacagcgcaacggtcactccgacggtcaccacgcagtcggacggtacggtggagatcagtg

SEQ ID NO: 414451 - DNA, 75 bp, synthetic construct
  source 1..75: mol_type = other DNA
ttgaggctaaggtcaatcaaagcagcgatagtaaaacggtgaactttgttgctgatgtcagcacggcgcagatcg

SEQ ID NO: 414452 - DNA, 75 bp, synthetic construct
  source 1..75: mol_type = other DNA
agcggaagtaacgtgtcatgcgggcgtcaggctgccgtaatggcaatttgcgcccggaccaggccgcagggggga

SEQ ID NO: 414453 - DNA, 75 bp, synthetic construct
  source 1..75: mol_type = other DNA
tctagctggcctcaaggaatgtatacagttattattacagataagacacgtagtgttaaacagtttaatgtgatt

SEQ ID NO: 414454 - DNA, 75 bp, synthetic construct
  source 1..75: mol_type = other DNA
agctccggtggccaacagcgtgtcagtagtggtggcattacctcgaacacctttattaatagttcaggcgtacaa

SEQ ID NO: 414455 - DNA, 75 bp, synthetic construct
  source 1..75: mol_type = other DNA
tactgaattcagtggcatgcacccatatggaacttcatccacggtagttaactggagtggtaatggtacaacaac

SEQ ID NO: 414456 - DNA, 75 bp, synthetic construct
  source 1..75: mol_type = other DNA
tcaatatgctatagttgccaaaataattcaatctagcgaaggtacaattaatgcatttgtagttggcgatccaaa

SEQ ID NO: 414457 - DNA, 75 bp, synthetic construct
  source 1..75: mol_type = other DNA
aacttggaggggacatttataaataccacgctgaaaaactgggtgactttaccttgggcattatgggtggctatg

SEQ ID NO: 414458 - DNA, 75 bp, synthetic construct
  source 1..75: mol_type = other DNA
gtggtaaccagaatgtctcttctggtggcaaagccattgctgctgaagtgtactctggcggtaaacaaactgtct

SEQ ID NO: 414459 - DNA, 75 bp, synthetic construct
  source 1..75: mol_type = other DNA
ctggtggggttgctgatggaacagtactgaacagcggtgggttacaggcggtaagcggagggggaagtgcttctt

SEQ ID NO: 414460 - DNA, 75 bp, synthetic construct
  source 1..75: mol_type = other DNA
cataatatatgtttcggagcctgctggtgaaaataagatcgcgatttattctggcgccaatcaatatatcactga

SEQ ID NO: 414461 - DNA, 75 bp, synthetic construct
  source 1..75: mol_type = other DNA
gcgtttaacggtgcgtttgctgcggcgattgcgcagggccagccgttgctcagtgcagcaaaatttgcctctgcg

SEQ ID NO: 414462 - DNA, 75 bp, synthetic construct
  source 1..75: mol_type = other DNA
ccctgggggcaaaaaacatcattattacgatgggttctcaaggggcgctgatttatgacggtgaacaatttaccc

SEQ ID NO: 414463 - DNA, 75 bp, synthetic construct
  source 1..75: mol_type = other DNA
accgaccagcggtaataccgggattgcactggcctatgtagctgccgctcgcggttacaaactcaccctgaccat

SEQ ID NO: 414464 - DNA, 75 bp, synthetic construct
  source 1..75: mol_type = other DNA
acgttattctgggccacaattgcgaagaataaacttccggcgtggctgggtgtggtgttttgcctgaatagtatc

SEQ ID NO: 414465 - DNA, 75 bp, synthetic construct
  source 1..75: mol_type = other DNA
ggtgatattttgcctgaatggtattgtgcatttattacttgatacgctggttggggatatctggtggctaatgcc

SEQ ID NO: 414466 - DNA, 75 bp, synthetic construct
  source 1..75: mol_type = other DNA
atgaagttactgtgactaagatggatgacaaataccaaataacacaaaattggaggggctatgaagcctatatgg

SEQ ID NO: 414467 - DNA, 75 bp, synthetic construct
  source 1..75: mol_type = other DNA
tctaaaaacgcctggcaaagtggtggaagtattagtagtggattagttgtctggcccggtggtattaatatcact

SEQ ID NO: 414468 - DNA, 75 bp, synthetic construct
  source 1..75: mol_type = other DNA
atgttttctaaaggaaaaataaaggaaagtgattcgaccacgacaattatttcaaaaaatacttcgtttgttggc

SEQ ID NO: 414469 - DNA, 75 bp, synthetic construct
  source 1..75: mol_type = other DNA
agattaactttcgacagccagaagagggggaggagatttgcgaccattcctggaaaaatggaaccatacttaaaa

SEQ ID NO: 414470 - DNA, 75 bp, synthetic construct
  source 1..75: mol_type = other DNA
ccccaggaccatttactatcgcagatttgcaactttcgggcagcggctctgatctcgatgtcagcattaaggaag

SEQ ID NO: 414471 - DNA, 75 bp, synthetic construct
  source 1..75: mol_type = other DNA
gcgtatatcaatgaacttgaaagaggctacgttcccccagaaagttgggatcgcggcattgatgctttttatacc

SEQ ID NO: 414472 - DNA, 75 bp, synthetic construct
  source 1..75: mol_type = other DNA
ttctctgccagccaatcctatgatgaaaacgataaagaagaggagcgttttaatctgtttatctccattcctttc

SEQ ID NO: 414473 - DNA, 75 bp, synthetic construct
  source 1..75: mol_type = other DNA
tggtggcatatctgcatttgatgcaagtcagaaagataatgacattgtattctgcgaatccatcattaataggtt

SEQ ID NO: 414474 - DNA, 75 bp, synthetic construct
  source 1..75: mol_type = other DNA
ggggggggggggggggggggcccagcgcgcacattccctctcatcacgccaccccaatctccatcccatcaaacc

SEQ ID NO: 414475 - DNA, 75 bp, synthetic construct
  source 1..75: mol_type = other DNA
tttccgatgagcaacatcttccttatgaacgccctccgctctcgaaatccatgttgctggaagattccccacagt

SEQ ID NO: 414476 - DNA, 75 bp, synthetic construct
  source 1..75: mol_type = other DNA
cgacagcttaaaactggaatccgccagctttgtcgatgaaaaattgcgggcgctacattccgatatttctgtggt

SEQ ID NO: 414477 - DNA, 75 bp, synthetic construct
  source 1..75: mol_type = other DNA
aagcctttctgcgcaaagggatccaactttcccgcgccaacaatattgtttcattatctcgtccatcaggtgcca

SEQ ID NO: 414478 - DNA, 75 bp, synthetic construct
  source 1..75: mol_type = other DNA
tcgcccaacaggcttcagcgacagttcaatccggatgctccggatgagcgttgggtaacggacataacctacata

SEQ ID NO: 414479 - DNA, 75 bp, synthetic construct
  source 1..75: mol_type = other DNA
accgctgggtgccatctcttttgacgctacacgatcgagtagtaagttaaataatgatataacacacgaaggtac

SEQ ID NO: 414480 - DNA, 75 bp, synthetic construct
  source 1..75: mol_type = other DNA
cgatgaccattgaaacggcggtggaatacacctctgacgctggcgagctggtacagcttatcgcggagcgtctgg

SEQ ID NO: 414481 - DNA, 75 bp, synthetic construct
  source 1..75: mol_type = other DNA
gatccgtcgttatctgcaccaatcaccccggataccgttgacggtaaactgaagtgggacgacaaggacggacag

SEQ ID NO: 414482 - DNA, 75 bp, synthetic construct
  source 1..75: mol_type = other DNA
acggcgcagcccgtattggctgggcggcagagctgaacgtggcgtcagcactgacgctgaataagttccagaata

SEQ ID NO: 414483 - DNA, 75 bp, synthetic construct
  source 1..75: mol_type = other DNA
tcattaatttttgtttgttcctatttcttgttatttctcagatgaacataaattatgtaccatttttaatagcac

SEQ ID NO: 414484 - DNA, 75 bp, synthetic construct
  source 1..75: mol_type = other DNA
tggttggctcggaagatttgccggtgctggatgaaaacacgttcaacagtcacgcccctgcgccatcgtcacggt

SEQ ID NO: 414485 - DNA, 75 bp, synthetic construct
  source 1..75: mol_type = other DNA
actggggagtactgcttaccgcgctggccagtaacaataaaaatgacatcctcgccaccccaagcatcgtaacgc

SEQ ID NO: 414486 - DNA, 75 bp, synthetic construct
  source 1..75: mol_type = other DNA
tgctaaaactgatgtctgtaaatataatcctcctatcgtttttttacattagcttacattccattatttttatat

SEQ ID NO: 414487 - DNA, 75 bp, synthetic construct
  source 1..75: mol_type = other DNA
ccggcatcggtccgctcatcgtcaatggtcgagtccgcaaagtgattgcttcacatatcggcaccaaccaacagg

SEQ ID NO: 414488 - DNA, 75 bp, synthetic construct
  source 1..75: mol_type = other DNA
gcggtagtggcagatacgtcttcctggaaacagaaaaaatccgctggtacctggggggcgattattcgccagccg

SEQ ID NO: 414489 - DNA, 75 bp, synthetic construct
  source 1..75: mol_type = other DNA
ctaaaataaacaaaacagttcagagagaaatagatgaagctattcgggatataatttctcgccatctatcgtctt

SEQ ID NO: 414490 - DNA, 75 bp, synthetic construct
  source 1..75: mol_type = other DNA
ccgcagccagcgggaaatatggcattgtgctgcccggcgcgaaggactacctgaagccggagtttgcggagaatt

SEQ ID NO: 414491 - DNA, 75 bp, synthetic construct
  source 1..75: mol_type = other DNA
ctgcacccgctgcaaccgccagttgagcggcaatgccgttgaataccgcattcacctgattgaacgcattggcca

SEQ ID NO: 414492 - DNA, 75 bp, synthetic construct
  source 1..75: mol_type = other DNA
gcaaggtctgcaaagagaaattcaccgctaccttcgacaacgtctggtggtgctgtcctgagcatggcgccatct

SEQ ID NO: 414493 - DNA, 75 bp, synthetic construct
  source 1..75: mol_type = other DNA
tcaacagcagcagcctgagccggaacgtgacatttatcgccgatgtcaggacggcgcagatcgcggatctggtgg

SEQ ID NO: 414494 - DNA, 75 bp, synthetic construct
  source 1..75: mol_type = other DNA
caggcgtttgaccctgcctatggtcagaaagtggttggtgtgatgctgaaagagtccgaaggttttatcaataaa

SEQ ID NO: 414495 - DNA, 75 bp, synthetic construct
  source 1..75: mol_type = other DNA
caagcttttgacccagcatatggtcagcgcgtggttggcctaatgctgaaagaatcagaagggtttatcaataaa

SEQ ID NO: 414496 - DNA, 75 bp, synthetic construct
  source 1..75: mol_type = other DNA
gtacaggccagagttgatgcattaactgagcaactggcccaagagcagagccgacttacgggtacaagtaaagat

SEQ ID NO: 414497 - DNA, 75 bp, synthetic construct
  source 1..75: mol_type = other DNA
gcggggatcagtacagtcaccgcaaccatcaacagcagcagtcagagccgggatgtgacatttatcgcggatgtc

SEQ ID NO: 414498 - DNA, 75 bp, synthetic construct
  source 1..75: mol_type = other DNA
gaatgggtaatcaggtaatgagtgactctcttattacagatggtcttactgatgcttttaatcactatcatatgg

SEQ ID NO: 414499 - DNA, 75 bp, synthetic construct
  source 1..75: mol_type = other DNA
caaaaagaacgcctataggatgttttggcggttcgttatcaacagtgtcagcttcagatcttggagcaattgcga

SEQ ID NO: 414500 - DNA, 75 bp, synthetic construct
  source 1..75: mol_type = other DNA
ttcgcggtaggcggcgcaactcccgattctatgcagtgggtcgagcagaataatggtgaatataccattgtctgg

SEQ ID NO: 414501 - DNA, 75 bp, synthetic construct
  source 1..75: mol_type = other DNA
gtggagatcattgtcaccagtcagacggcaggcaccagtacagtcaccgccagcatcaacaacagcagccagagc

SEQ ID NO: 414502 - DNA, 75 bp, synthetic construct
  source 1..75: mol_type = other DNA
ggcgaacacgctgcgggtgagggtcaccgatgcgttcggtaatgcgcttgccgggcagacggtcagcgtgatggc

SEQ ID NO: 414503 - DNA, 75 bp, synthetic construct
  source 1..75: mol_type = other DNA
tcgtgtagaagcgtatcgcaagcttaagcacctgttagtcatcagccaaccaacattggcagaagacgcagagta

SEQ ID NO: 414504 - DNA, 75 bp, synthetic construct
  source 1..75: mol_type = other DNA
gtttttatttctgttcctattgctacctagaaaaagaatatttgagatatctttgaagttccgttctatatttat

SEQ ID NO: 414505 - DNA, 75 bp, synthetic construct
  source 1..75: mol_type = other DNA
gcatgcaaaaaggcgtgacgtatgagaaatccggccatgtcattacggggctttgtcttgtcggggatgctgatg

SEQ ID NO: 414506 - DNA, 75 bp, synthetic construct
  source 1..75: mol_type = other DNA
tttacctctttctcaggaagtttagtctccaggattcccggggcggttcattgcagggtggcctgttgctggctg

SEQ ID NO: 414507 - DNA, 75 bp, synthetic construct
  source 1..75: mol_type = other DNA
tttgtcaaagaagttaaaccgggcgtgcgaagagcaaccgaggggacgttaatcgacaccgcaacgttgctggcg

SEQ ID NO: 414508 - DNA, 75 bp, synthetic construct
  source 1..75: mol_type = other DNA
tgatgttctacaccaacgacaagaaatacgttcgcttcccgatggttccgctgatgagcgtgccgatccagtatc

SEQ ID NO: 414509 - DNA, 75 bp, synthetic construct
  source 1..75: mol_type = other DNA
caaaaaacagaagaaactgcatcaatttttgcagaaaaactatgtgaggcaaaagctatggtttcgcatggtcac

SEQ ID NO: 414510 - DNA, 75 bp, synthetic construct
  source 1..75: mol_type = other DNA
gcagtaaatgcccagacaggtaatttcagcggcaatgtgaatggtgtaaatggcactttcagcggtcaggtaaaa

SEQ ID NO: 414511 - DNA, 75 bp, synthetic construct
  source 1..75: mol_type = other DNA
cggcaaccctcgaaaatggcgattcgatgcaacaaacagtgacctatgtgccgaacgtcgcgaatgccgaaatta

SEQ ID NO: 414512 - DNA, 75 bp, synthetic construct
  source 1..75: mol_type = other DNA
atgactctgtttattcaccgcctggtagatgattatttcaaggaagacataacctgtctgcaccagcaaaagata

SEQ ID NO: 414513 - DNA, 75 bp, synthetic construct
  source 1..75: mol_type = other DNA
tagtgccatcaaagcgctggctgctgtaaacaacgcaattatccaactcatggtctatggtgtgccatcactgaa

SEQ ID NO: 414514 - DNA, 75 bp, synthetic construct
  source 1..75: mol_type = other DNA
agtaaacagcaaaatcagcagacgtcttctgaacgtgaactggagatgtctacccgagattgcacgtctcaaacg

SEQ ID NO: 414515 - DNA, 75 bp, synthetic construct
  source 1..75: mol_type = other DNA
tggtgctttttttatttatattgtcggataaaacagagaaaataaagatgaaaataacgcgtcattataaatccc

SEQ ID NO: 414516 - DNA, 75 bp, synthetic construct
  source 1..75: mol_type = other DNA
gcacgcgagcaaacgtatttcgtcgacaagacggcagatcatagagaaaaccgtctgtggatgatggccaacatg

SEQ ID NO: 414517 - DNA, 75 bp, synthetic construct
  source 1..75: mol_type = other DNA
gatccgttgcattcatcccccatcgtcagcgccccggcgaagctttcggtgctggacgccaacggcagtctgttg

SEQ ID NO: 414518 - DNA, 75 bp, synthetic construct
  source 1..75: mol_type = other DNA
attatttccgtaaagcacgcgccgccaaaatgatgatggaggtggttaatgatgtgtgtggtcgattccctgacc

SEQ ID NO: 414519 - DNA, 75 bp, synthetic construct
  source 1..75: mol_type = other DNA
cagttgtgcgggaggctcttcttcgtgagtttgacaacccgccctttaaaaaagtgccggcttactggtttcatc

SEQ ID NO: 414520 - DNA, 75 bp, synthetic construct
  source 1..75: mol_type = other DNA
ctgcaaggttggtgcaatcgttgtctgataaaatcagtactgcaagatctgaaattgtagatcatggacgcacat

SEQ ID NO: 414521 - DNA, 75 bp, synthetic construct
  source 1..75: mol_type = other DNA
ggtaaggatgctgaaggcggcgtttttgtctccgagaacttcttctacgaaagcgaaatctacaacacccgcttg

SEQ ID NO: 414522 - DNA, 75 bp, synthetic construct
  source 1..75: mol_type = other DNA
gcggcgtatcgtgtcaccaccaccaaagagatcctcattgaacgcggtctggcgcattactcattaagtactgcc

SEQ ID NO: 414523 - DNA, 75 bp, synthetic construct
  source 1..75: mol_type = other DNA
cggcagcacttctggtgtggaggccggacaaacggtcaccgtcacctttggcggcaaaacttacagcgccacggt

SEQ ID NO: 414524 - DNA, 75 bp, synthetic construct
  source 1..75: mol_type = other DNA
tgggtagcggcgcacagaccatcaccgccagcgtcagcgatcgggcaggcaacagcgacgacgccagccgcaccg

SEQ ID NO: 414525 - DNA, 75 bp, synthetic construct
  source 1..75: mol_type = other DNA
caacgcacgatatcgtgatagatgccaatctgccaggtctacgggtcgataccgtggcaggcgatgatgtgatta

SEQ ID NO: 414526 - DNA, 75 bp, synthetic construct
  source 1..75: mol_type = other DNA
cgatacggttaccgtcacgctgggcggcaatacttatactgcacaagttcaggccgatttaagctggagcgtcag

SEQ ID NO: 414527 - DNA, 75 bp, synthetic construct
  source 1..75: mol_type = other DNA
agcgggcgatgacatcatcaacgccacggaacatgctcaggcgcagattatcagcggctcggcaacgggcgcgac

SEQ ID NO: 414528 - DNA, 75 bp, synthetic construct
  source 1..75: mol_type = other DNA
cggtgactgtcgatctctcggcgattgccgtcagcatcaacgccattaccgccgatgatgtgattaacgctgctg

SEQ ID NO: 414529 - DNA, 75 bp, synthetic construct
  source 1..75: mol_type = other DNA
ggtaatgtgggcatcaaagtcaacaaacttgacgacgacaaaggcgtcggtgaagtggtcggggttggtcgctac

SEQ ID NO: 414530 - DNA, 75 bp, synthetic construct
  source 1..75: mol_type = other DNA
tattgctggtctggttcgcggcctttccagcaggttgtattaccgtagtaatgcaagcgcgtctcagcggagaca

SEQ ID NO: 414531 - DNA, 75 bp, synthetic construct
  source 1..75: mol_type = other DNA
ttaaaggcgctgttcctgatctacctgacggacaggcaactcacgctttcaggcacactttcgcctctcatttca

SEQ ID NO: 414532 - DNA, 75 bp, synthetic construct
  source 1..75: mol_type = other DNA
cacggcccacggatttacttctccatgagtgacggacaacagaatacactccatcgccccctggctgatgccgtg

SEQ ID NO: 414533 - DNA, 75 bp, synthetic construct
  source 1..75: mol_type = other DNA
gcacgcgagcaaacgtatttcgtcgacaacacggctgatcatagagaaaaccgcctgtggatgatggccaacatg

SEQ ID NO: 414534 - DNA, 75 bp, synthetic construct
  source 1..75: mol_type = other DNA
gcacgcgagcaaacgtatttcgtcgacaatacggcagatcatagagaaaaccggctgtggatgatggccaacatg

SEQ ID NO: 414535 - DNA, 75 bp, synthetic construct
  source 1..75: mol_type = other DNA
aaaccgatagatacctacattgaagagcatcagtcccacgcgcaaaaaattaagaaggacatcaaatggatgtag

SEQ ID NO: 414536 - DNA, 75 bp, synthetic construct
  source 1..75: mol_type = other DNA
gcgggcatggtaatatttgtttacacgatgattttaaatttcaacgccagtttcttaatgatcttcgggatacga

SEQ ID NO: 414537 - DNA, 75 bp, synthetic construct
  source 1..75: mol_type = other DNA
ggttcccgatttcgtgcaggatcaacccgccccggtgatcaccgcaggcgcatttgaagccacgggcacattctc

SEQ ID NO: 414538 - DNA, 75 bp, synthetic construct
  source 1..75: mol_type = other DNA
atttcagaaaattatttacaaaagttattgagattaaggtatctcaagataacggtgggcaaccaaacttacgca

SEQ ID NO: 414539 - DNA, 75 bp, synthetic construct
  source 1..75: mol_type = other DNA
actggcggcggcggtcgtcatattgtctgcgccgatcgtcgctcacttcacgctgccagccgtcgtcgcgcgaat

SEQ ID NO: 414540 - DNA, 75 bp, synthetic construct
  source 1..75: mol_type = other DNA
ctgtggatgtgaccagcagtatgagtatgggctggaattttcctttatatgaacaggttacaaccggcccggtcg

SEQ ID NO: 414541 - DNA, 75 bp, synthetic construct
  source 1..75: mol_type = other DNA
agcgcagtcgatttatcacgaactcgataacctgcgactgctggccgataacctgacgcgagatccgcgagccag

SEQ ID NO: 414542 - DNA, 75 bp, synthetic construct
  source 1..75: mol_type = other DNA
ttggcaattggatcagttcagaatgctctgtcctctggtatttcagatacccgcattgaacaaatcagagaagcg

SEQ ID NO: 414543 - DNA, 75 bp, synthetic construct
  source 1..75: mol_type = other DNA
ataaaaagacactttttatgtgtttatcacttattgcattaatccgatttgttaaaaattattattcaattgagt

SEQ ID NO: 414544 - DNA, 75 bp, synthetic construct
  source 1..75: mol_type = other DNA
aaaaataagctttttagcaaggagctatccccgcatgtgaacataaatgatatttcaggatcaaagtatagtggt

SEQ ID NO: 414545 - DNA, 75 bp, synthetic construct
  source 1..75: mol_type = other DNA
ccttacggcatcgaccagcaatttctcggttatcaattattgccgccgtcatggtcgcgctatggcgaagtttct

SEQ ID NO: 414546 - DNA, 75 bp, synthetic construct
  source 1..75: mol_type = other DNA
agtttcacttcttttagttttactctatgcgattttaatgaaaaataatcttattgcaagaaattggtttccttt

SEQ ID NO: 414547 - DNA, 75 bp, synthetic construct
  source 1..75: mol_type = other DNA
agtggtgaaatattcatttcccgtactctaacaaaaataggaactatatttaattctaatggtggggatgaatct

SEQ ID NO: 414548 - DNA, 75 bp, synthetic construct
  source 1..75: mol_type = other DNA
ttgcagtaagtactactgatccccggaataataaagagtttctttggattagttatagtatgaacaatctgagtc

SEQ ID NO: 414549 - DNA, 75 bp, synthetic construct
  source 1..75: mol_type = other DNA
tttctccttggtttcaacctttggtttctccttttacaaaagaagtaaagggactagaagttctggccagaagca

SEQ ID NO: 414550 - DNA, 75 bp, synthetic construct
  source 1..75: mol_type = other DNA
tgaaaaaataacatctgaacaaagaaataattaccgccacttcaatattttgataataggtgataaacaagataa

SEQ ID NO: 414551 - DNA, 75 bp, synthetic construct
  source 1..75: mol_type = other DNA
agatgatatcaacagagaactagaaataatacaacgtaacattaataagtttaattgtgaagttagtgaattaaa

SEQ ID NO: 414552 - DNA, 75 bp, synthetic construct
  source 1..75: mol_type = other DNA
tgatattaacagagaaattgaaataatacagcatcatattaataagttcaactgtgagattagtgaattaaaaat

SEQ ID NO: 414553 - DNA, 75 bp, synthetic construct
  source 1..75: mol_type = other DNA
aatgtgtacattgataaaaaggatataaaaagagaacttgaaataatagaatacaatgttaataaatttaattgt

SEQ ID NO: 414554 - DNA, 75 bp, synthetic construct
  source 1..75: mol_type = other DNA
cactcggtgacgccgtatacgcgcattgggctggatcgctggagtaactgggactggcaggatgatattgaacgt

SEQ ID NO: 414555 - DNA, 75 bp, synthetic construct
  source 1..75: mol_type = other DNA
gtcatatctgcgttactccctgcgggtattcattacacagcgtttcccccgccataaactggcagatgacggaac

SEQ ID NO: 414556 - DNA, 75 bp, synthetic construct
  source 1..75: mol_type = other DNA
aaaagcaccggagccggattatatctgggcagccaccctgtgcgccacctgtgcgccgtctttgtcagttgatcc

SEQ ID NO: 414557 - DNA, 75 bp, synthetic construct
  source 1..75: mol_type = other DNA
gtggcaggggcttacgccactgcgcgaggctgtggcaccactgggaccgctgtttgagtatgtcgggcagacaat

SEQ ID NO: 414558 - DNA, 75 bp, synthetic construct
  source 1..75: mol_type = other DNA
atgatctggcattacgacaaagatctgagtggctactcactcggtcagggcggttactacagtccgcaggaatac

SEQ ID NO: 414559 - DNA, 75 bp, synthetic construct
  source 1..75: mol_type = other DNA
tcgaggcagagcgtcagcaacaagtcgccggacagaaaccagaacaggagcaggaaaagagagcagagcaggtta

SEQ ID NO: 414560 - DNA, 75 bp, synthetic construct
  source 1..75: mol_type = other DNA
atggaacgacaattaagggcggtgcttcacgcgtagagggagggagtgcgaatggaacactcattgatggtggta

SEQ ID NO: 414561 - DNA, 75 bp, synthetic construct
  source 1..75: mol_type = other DNA
acattctttttcggatacagagagagtctctccggaagctggtgttttttacgtcagacatatgatatccgtaac

SEQ ID NO: 414562 - DNA, 75 bp, synthetic construct
  source 1..75: mol_type = other DNA
atgacaagccgcagccgtcaggctgcctactcgatgatcctgcccgttcaggcggcgcttgagcgtttgccgccg

SEQ ID NO: 414563 - DNA, 75 bp, synthetic construct
  source 1..75: mol_type = other DNA
gtaagttggcagcattaccagcgcggcttcaatatggacgacagccgcaataacggtgagttttccacgcaagaa

SEQ ID NO: 414564 - DNA, 75 bp, synthetic construct
  source 1..75: mol_type = other DNA
attggcgcaacatccctggctattggcttacttctggggccactggcaaaacttcaactcggctttgccctgcta

SEQ ID NO: 414565 - DNA, 75 bp, synthetic construct
  source 1..75: mol_type = other DNA
gcgcgcacggcgtctcgctggctggcggtgatcgcacaattcaaagcgccatcagacgcactgagcaatacaacc

SEQ ID NO: 414566 - DNA, 75 bp, synthetic construct
  source 1..75: mol_type = other DNA
gtcgttcagtcctttatgtaactcgttatggtaacaatccgttggtaatgggagagatgaactatcgcaagcgta

SEQ ID NO: 414567 - DNA, 75 bp, synthetic construct
  source 1..75: mol_type = other DNA
ttattgaatttaatgagattttactctttgaagatctggcgctatttaaccagaagctggcggaatatctggtgc

SEQ ID NO: 414568 - DNA, 75 bp, synthetic construct
  source 1..75: mol_type = other DNA
gtggttcccgtggtatgggtggcagtaagctaacggctggtgtgggtgtagggatggcaggcgcagcaggcgcag

SEQ ID NO: 414569 - DNA, 75 bp, synthetic construct
  source 1..75: mol_type = other DNA
ttgcgggcatcctcaatgcctccagcccacaggcgaagcgtaacgcccagcaggcagcaaaacaggccatgcgtg

SEQ ID NO: 414570 - DNA, 75 bp, synthetic construct
  source 1..75: mol_type = other DNA
tggcgcatcgggatgtggctgtctatgcgttggttttgtcgtcgcctggagccggtgagcaaaattactgctggt

SEQ ID NO: 414571 - DNA, 75 bp, synthetic construct
  source 1..75: mol_type = other DNA
gcagagatcgggcgtgttgctgcaggtgcggtaacaggtggcaggctgtcgttgctggcactggagcagatggca

SEQ ID NO: 414572 - DNA, 75 bp, synthetic construct
  source 1..75: mol_type = other DNA
ctcttgcccggttaaatgccaaagcacagggctggcaccgtaaacatagcctatattcggccacagagattcctt

SEQ ID NO: 414573 - DNA, 75 bp, synthetic construct
  source 1..75: mol_type = other DNA
ctgaagagtaaaagcctagcacatgcgtcgttttatctggatgacctgattgagcggggaagtgttgttcaggtg

SEQ ID NO: 414574 - DNA, 75 bp, synthetic construct
  source 1..75: mol_type = other DNA
gatgatgttgaacatctacaggacatcgcgtttcgcctggcgttcgaactggcggaggtgatggggattgaagat

SEQ ID NO: 414575 - DNA, 75 bp, synthetic construct
  source 1..75: mol_type = other DNA
tgtccagcatcatcgtttcatctgcgggaaaccagtccctgttgacgtaccttcagaccaacaccatcagctatc

SEQ ID NO: 414576 - DNA, 75 bp, synthetic construct
  source 1..75: mol_type = other DNA
atgccagagattaaaggcacggttactgaagagcttgtcaaacaggcactttattctgaagaagtgaaccgcgtg

SEQ ID NO: 414577 - DNA, 75 bp, synthetic construct
  source 1..75: mol_type = other DNA
agggcaagatcatctttttttttctaaacccttcttaaacgagttcatcttgcttgaggacggcttggcaaatta

SEQ ID NO: 414578 - DNA, 75 bp, synthetic construct
  source 1..75: mol_type = other DNA
gcttgttgatggcatcgtcttgcagcccggagaagagagaaaagcaacccaatctgtcgttttaaacgataaagg

SEQ ID NO: 414579 - DNA, 75 bp, synthetic construct
  source 1..75: mol_type = other DNA
atgtgtatgcggtgaaattcctgcgtttaatcagggtagtgcgccggttgcgagagctgcaacgccagacattca

SEQ ID NO: 414580 - DNA, 75 bp, synthetic construct
  source 1..75: mol_type = other DNA
attcattgtctgccatgtgtaccgattaatgaggtggcaaaagagaaactgccacattacgtcatgagtgcaacc

SEQ ID NO: 414581 - DNA, 75 bp, synthetic construct
  source 1..75: mol_type = other DNA
acggtcaacaaatcgccgttcaccgggaggaaggcatcagcacttacagcagttataacccgcgaggccaactgg

SEQ ID NO: 414582 - DNA, 75 bp, synthetic construct
  source 1..75: mol_type = other DNA
tgcgtatccactgaacccggtgcaacggctggatccgctgggattaagtgcggcgttgggcgcaggagcattaac

SEQ ID NO: 414583 - DNA, 75 bp, synthetic construct
  source 1..75: mol_type = other DNA
tgtggccaaagcagttatagccggtggtgttgcaaccgctattggaagcctggcttcttttgcctgtgttagctt

SEQ ID NO: 414584 - DNA, 75 bp, synthetic construct
  source 1..75: mol_type = other DNA
ggttttacctctcaacgtgcgggggttttctctttccagcaaccaatgccaccagggataaagccccgcaacatt

SEQ ID NO: 414585 - DNA, 75 bp, synthetic construct
  source 1..75: mol_type = other DNA
aatcagcgatggtgctctgacgggtttgagttccgctgtgataacggagaaaaactgcgggtcacgtgcgcgctg

SEQ ID NO: 414586 - DNA, 75 bp, synthetic construct
  source 1..75: mol_type = other DNA
ttgcggtgatcggcgtactggcaagcggcgtgcttaatgcattgttgattaccggatttccccccacgcttacga

SEQ ID NO: 414587 - DNA, 75 bp, synthetic construct
  source 1..75: mol_type = other DNA
ccggaagcgtacggtcgaattaaatttaacgacgacctgtacagagagactaacttcgccgtgcgctttcgtgtt

SEQ ID NO: 414588 - DNA, 75 bp, synthetic construct
  source 1..75: mol_type = other DNA
gcgctggcgctgacaaggggggatttttcgcttgcgcctccgtatccgtttgtgcagcttgcgaccctgaaacaa

SEQ ID NO: 414589 - DNA, 75 bp, synthetic construct
  source 1..75: mol_type = other DNA
cgctattgtgcttaagtatgggcagcgtacatgcacagatcgctaccgaaaatgtaaatctgccagtagtaaaat

SEQ ID NO: 414590 - DNA, 75 bp, synthetic construct
  source 1..75: mol_type = other DNA
ttgatcaaaccgttcagttgggccaggttcgtaccgctagcctgaagcaggctggagcaaccagctctgccgttg

SEQ ID NO: 414591 - DNA, 75 bp, synthetic construct
  source 1..75: mol_type = other DNA
aatcaatctaccacgcgtaattctcgttatggcaggttcactccagggtttaatcttggtgcctggaggtttcgt

SEQ ID NO: 414592 - DNA, 75 bp, synthetic construct
  source 1..75: mol_type = other DNA
tataacagccagcggcaggtgacgtcggtgacgtacccggacgggcttcgcagcagccgggagtatgatgagaag

SEQ ID NO: 414593 - DNA, 75 bp, synthetic construct
  source 1..75: mol_type = other DNA
agggaagagctaactacggctccctgttattcaacaccaacggcgtgctgggcagtccggtggcggtgggcgcaa

SEQ ID NO: 414594 - DNA, 75 bp, synthetic construct
  source 1..75: mol_type = other DNA
gtgtggtgaaaacggaactcgcggatggcagcatcacccgaagtaaatttgactatatggggcgactccagtcac

SEQ ID NO: 414595 - DNA, 75 bp, synthetic construct
  source 1..75: mol_type = other DNA
tacaccttaatggacatggaaaatagtggtgcatgcgagatagataaaagatgccgaactaaatttaacaataaa

SEQ ID NO: 414596 - DNA, 75 bp, synthetic construct
  source 1..75: mol_type = other DNA
cggagaaaggcgcggatctggcgatttctggcagcagcaaccagcctgcgggcacgcaggtaaccgttacgctca

SEQ ID NO: 414597 - DNA, 75 bp, synthetic construct
  source 1..75: mol_type = other DNA
ggcgggatggacgtggttgatttccgcctctcgacggtgggcgtgaccgcgaacttaagcagcaccgccgcgcag

SEQ ID NO: 414598 - DNA, 75 bp, synthetic construct
  source 1..75: mol_type = other DNA
ttacgttgggcggtaatacttatacggcgacggtgggcagcaatttcacctggagcgtgagcgttccggcggcag

SEQ ID NO: 414599 - DNA, 75 bp, synthetic construct
  source 1..75: mol_type = other DNA
tatctgatatgttccgcgaggccattgttgaaggacgtatatctcaaaatccagtaacgccaacaagagcaccga

SEQ ID NO: 414600 - DNA, 75 bp, synthetic construct
  source 1..75: mol_type = other DNA
gagacacgagccaaatcccattagggaagcactaaattataaaggtcgcctaaccgtcttatcgcgtaaagcatg

SEQ ID NO: 414601 - DNA, 75 bp, synthetic construct
  source 1..75: mol_type = other DNA
gtcaggtccattgtggggggaggtatttgcctgagctgtctgatgaaggcggcaatgaatggcgacacctttgtt

SEQ ID NO: 414602 - DNA, 75 bp, synthetic construct
  source 1..75: mol_type = other DNA
atgtcactcagttaccggagcgcgagttcatcgccgtcctagatggacagcagcggattactgctttgaatatcg

SEQ ID NO: 414603 - DNA, 75 bp, synthetic construct
  source 1..75: mol_type = other DNA
gttcattgccgtcctagatggacagcagcggattaccgctttgaacatcggcctacgcggctcatttgcgtggaa

SEQ ID NO: 414604 - DNA, 75 bp, synthetic construct
  source 1..75: mol_type = other DNA
acaaaacctcagagcaacaagtgccatcctcccgttagcctattacctgcaccaccgaaagttaacggcaagcta

SEQ ID NO: 414605 - DNA, 75 bp, synthetic construct
  source 1..75: mol_type = other DNA
ggtgaatgtcgaatcgctcctgccaggggtaatcattaataccgtggcgggcgatgacattatcaacgccgctga

SEQ ID NO: 414606 - DNA, 75 bp, synthetic construct
  source 1..75: mol_type = other DNA
caccagcgatcagcctgcgggtacggcgatcaccgtgacgctgaacggacaaaactacagcgccaccaccgacgc

SEQ ID NO: 414607 - DNA, 75 bp, synthetic construct
  source 1..75: mol_type = other DNA
cagcgccagcgccaccagtgcggcaggcaacaccgccagcagccaggcgaatttactggtcgacagcggcctgcc

SEQ ID NO: 414608 - DNA, 75 bp, synthetic construct
  source 1..75: mol_type = other DNA
tctgcaaattaccggcaccagtaatcagccggtgggcaccaccattacggtgacgctgaacgggcaaaattacac

SEQ ID NO: 414609 - DNA, 75 bp, synthetic construct
  source 1..75: mol_type = other DNA
aagctggtcggtgtttattccggcgcagcagtttgccggattaagcgacggcagctacaccattagcgcgacggt

SEQ ID NO: 414610 - DNA, 75 bp, synthetic construct
  source 1..75: mol_type = other DNA
agcacgttcaggcactggtagtcaccggtagcagtaccggactggcggcgggggcggcgttgacggtagtgatca

SEQ ID NO: 414611 - DNA, 75 bp, synthetic construct
  source 1..75: mol_type = other DNA
cgctccggtcgtcaccatcaacacggtagcgggcgatgacatcattaacgccacggaacacgctcaggcgcagat

SEQ ID NO: 414612 - DNA, 75 bp, synthetic construct
  source 1..75: mol_type = other DNA
cactgccagcgtggcgagcgatggtagctggagtgccaccgttcccgctgccgatttagcgttattaaccgatgg

SEQ ID NO: 414613 - DNA, 75 bp, synthetic construct
  source 1..75: mol_type = other DNA
attaacaccatcgccaccgacgatattctgaacgccgccgaggcgggcaatccgctaaccatcagcggcagcagt

SEQ ID NO: 414614 - DNA, 75 bp, synthetic construct
  source 1..75: mol_type = other DNA
accgcgcaggtaaaaagctcggcgggcaacggcaataacgccaatattagcaacggcacggtgacggttaacgcg

SEQ ID NO: 414615 - DNA, 75 bp, synthetic construct
  source 1..75: mol_type = other DNA
aacggcaacagcgccaccacgactcacgcttacagcgtcgatgccagcgtgccaacggtgaccattaacaccatt

SEQ ID NO: 414616 - DNA, 75 bp, synthetic construct
  source 1..75: mol_type = other DNA
gtggcgggcgatgacattatcaacgccgctgaaatcgttgtggcgcagaccatcagcggtcaggtcacgggaacg

SEQ ID NO: 414617 - DNA, 75 bp, synthetic construct
  source 1..75: mol_type = other DNA
gcggtggcgaccgacgatattattaacgctgctgaatccggaaacgcgcaaaccatcagcggccaggtcacgggc

SEQ ID NO: 414618 - DNA, 75 bp, synthetic construct
  source 1..75: mol_type = other DNA
gatatctcctttgccgggaaaaaacgtatcacgctgattggcgggggaagttatctgcgacttgaagccgggaag

SEQ ID NO: 414619 - DNA, 75 bp, synthetic construct
  source 1..75: mol_type = other DNA
tgtaatcgtcttttacggtgaccataaaccaccactaaataaatatttcgtcgaaaatggggtgctaccaagtaa

SEQ ID NO: 414620 - DNA, 75 bp, synthetic construct
  source 1..75: mol_type = other DNA
ttacgccttcctgcaagagcgcggcgtgcggcgatttatggtccaggtacacctatgctcgacagtgtgcgcgac

SEQ ID NO: 414621 - DNA, 75 bp, synthetic construct
  source 1..75: mol_type = other DNA
atcgacaacgtgatggtgcgtaacgagcaaattgcttcgctggaacgcattcgcgccacccgtgatgatgccgcc

SEQ ID NO: 414622 - DNA, 75 bp, synthetic construct
  source 1..75: mol_type = other DNA
cgcagaacggcgacagtgccggatgcgtggtggtggctccgccagccgtgccgggtggtaagttccgcattcttg

SEQ ID NO: 414623 - DNA, 75 bp, synthetic construct
  source 1..75: mol_type = other DNA
atcggatatgacccggcgaaaggtacgcagaacggcgacagcgccggatgcgtggtggtggcgccgccagccgtg

SEQ ID NO: 414624 - DNA, 75 bp, synthetic construct
  source 1..75: mol_type = other DNA
gtatcgactcaaccggcgttggtcacggggtttacgagaacgtgaaagcgttttttcctgccgtccgggagtttg

SEQ ID NO: 414625 - DNA, 75 bp, synthetic construct
  source 1..75: mol_type = other DNA
aacgccgggcacccggaagtgcagcgaattattgaaaccagtattcggcgaatccgtgctgcgggtaaagcggct

SEQ ID NO: 414626 - DNA, 75 bp, synthetic construct
  source 1..75: mol_type = other DNA
atttacttccgcacgttaccagcccggtttccggaacagtggtgcataccgcgggtgtcacgctcagccgcgcat

SEQ ID NO: 414627 - DNA, 75 bp, synthetic construct
  source 1..75: mol_type = other DNA
tacttatggcgaacagctgcgttttaaatccccgtcaggaaaaattgaactctgttcggaagtgctggaaggatt

SEQ ID NO: 414628 - DNA, 75 bp, synthetic construct
  source 1..75: mol_type = other DNA
ccgaaatttactcaacggaggctgccttatggctactaccctcaccacgtcacacctgcaatatacctggctgtt

SEQ ID NO: 414629 - DNA, 75 bp, synthetic construct
  source 1..75: mol_type = other DNA
gtgtcgaaatcactcactgtgcagtacgacaaagtgctttacctcattgaagacaatgagttcagtcgtcgggcg

SEQ ID NO: 414630 - DNA, 75 bp, synthetic construct
  source 1..75: mol_type = other DNA
atgcggttggggaagatagcgcaccggtgccttttgttattcatttacgggaatgtagcacggtggtgagtgaac

SEQ ID NO: 414631 - DNA, 75 bp, synthetic construct
  source 1..75: mol_type = other DNA
tgacttatatcggtatcgactcaaccggcgttggtcacggggtttacgagaacgtgaaagcattctttcctgccg

SEQ ID NO: 414632 - DNA, 75 bp, synthetic construct
  source 1..75: mol_type = other DNA
tgttaatgatggtgcgattaacggtctgattgataccaagataagggaaaacaaccaggcgcagaataacctcat

SEQ ID NO: 414633 - DNA, 75 bp, synthetic construct
  source 1..75: mol_type = other DNA
gtatgatattagccagcttgaatttaatgctatccatgacgttgtacagaagcgtacagggtacgacctgaccgt

SEQ ID NO: 414634 - DNA, 75 bp, synthetic construct
  source 1..75: mol_type = other DNA
tcagtgggtagaaaagcaaaataatgaaggcgtggagaaagccgggggagtcatgcaaaaagttgccaatatact

SEQ ID NO: 414635 - DNA, 75 bp, synthetic construct
  source 1..75: mol_type = other DNA
cagcgggcttacaggggagggtgacgaggttattgcccgtatgcagaaactttctgctgaaggttggacattatc

SEQ ID NO: 414636 - DNA, 75 bp, synthetic construct
  source 1..75: mol_type = other DNA
cagcgctagcgttgaatgttccaggtctaaactatcaaacaccccagcaaccaacgtttacggttccgacaattg

SEQ ID NO: 414637 - DNA, 75 bp, synthetic construct
  source 1..75: mol_type = other DNA
agaagtatgaaatttcacttcatttgtttggcggttttttaagttttacatttaaaaccatgcgagttgttgaca

SEQ ID NO: 414638 - DNA, 75 bp, synthetic construct
  source 1..75: mol_type = other DNA
atggctatctatatcgaaataacaaaacattatgaaactcatgaaaaggtcgcatatttatatagctgcgaccat

SEQ ID NO: 414639 - DNA, 75 bp, synthetic construct
  source 1..75: mol_type = other DNA
cagaaattttttatgttcagagcctggggaaaagtcagaagaacatatttaaccacgggagtatttccccaagaa

SEQ ID NO: 414640 - DNA, 75 bp, synthetic construct
  source 1..75: mol_type = other DNA
atgaagtacaattttgatgaaattatcgacagaaaagatactgatgccctgaactacgatgggtggcgacaatat

SEQ ID NO: 414641 - DNA, 75 bp, synthetic construct
  source 1..75: mol_type = other DNA
tctgttggtaatgaataaacaaacgtgggaaaaccttgataacagagatcgtgaggctattcaacgagcggccat

SEQ ID NO: 414642 - DNA, 75 bp, synthetic construct
  source 1..75: mol_type = other DNA
tacaaccgagaaagcactgggcaaggcattagataacaacctgatcagcatggtaaaaacgcttgagcaggaagg

SEQ ID NO: 414643 - DNA, 75 bp, synthetic construct
  source 1..75: mol_type = other DNA
ctctgatatcagggttacttctggtatctttccccaacattgctgctgaaaaaatacttcgctataccgctcatg

SEQ ID NO: 414644 - DNA, 75 bp, synthetic construct
  source 1..75: mol_type = other DNA
gccaggtctgcgcgtcgataccgtggcaggcgatgatgtgattaacagcatcgagcacactcaggcgctggtggt

SEQ ID NO: 414645 - DNA, 75 bp, synthetic construct
  source 1..75: mol_type = other DNA
gcgggtggataccgttgcaggcgatgatgtggtcaatatcatcgaacatgctcaggcgcaggtgattactggcac

SEQ ID NO: 414646 - DNA, 75 bp, synthetic construct
  source 1..75: mol_type = other DNA
cgccacggtacaggccagcgtcagcactattaacggcaacacggcttcggcaacccacgcctacagcgtcgacgc

SEQ ID NO: 414647 - DNA, 75 bp, synthetic construct
  source 1..75: mol_type = other DNA
ccggcggctgggtgtacagctccggcaccggaacgtggctggcgaacggcggcatggacgtggttgatttccggc

SEQ ID NO: 414648 - DNA, 75 bp, synthetic construct
  source 1..75: mol_type = other DNA
gccagccgttgaccatcagcggcggcagtaaggggctggcgacgggcgcgcaggtcaccgtcacgctcaacggtc

SEQ ID NO: 414649 - DNA, 75 bp, synthetic construct
  source 1..75: mol_type = other DNA
cgtcgacagccaggccccggccttaagcatcgactcgctgactgccgacaacatcatcaacgccgccgaaagcgg

SEQ ID NO: 414650 - DNA, 75 bp, synthetic construct
  source 1..75: mol_type = other DNA
gcgctgaccgtagtgataaataatcaaacttacgccgccacggtgctggcgaacggtagctggagcgtcggcgtt

SEQ ID NO: 414651 - DNA, 75 bp, synthetic construct
  source 1..75: mol_type = other DNA
gatgatgtgatcaacgcgacggaaaaaggatcggacttggcgctttctggcaccagcgatcagcctgcgggcacg

SEQ ID NO: 414652 - DNA, 75 bp, synthetic construct
  source 1..75: mol_type = other DNA
cgtcagcggaaccagcacgggcgcggcggcgggcgatgtggtcacggttaacctgaacggtaaaaactacaccac

SEQ ID NO: 414653 - DNA, 75 bp, synthetic construct
  source 1..75: mol_type = other DNA
gcggcaacacttacacagcgcaggttcagcccgatttaagttggagcgtcaccgttccggcagacgatttacagg

SEQ ID NO: 414654 - DNA, 75 bp, synthetic construct
  source 1..75: mol_type = other DNA
ccagggggtgaccgacagcaacggcaactggcaggtaggcgtgcctgcggcagatttacaggcgctgacgccggg

SEQ ID NO: 414655 - DNA, 75 bp, synthetic construct
  source 1..75: mol_type = other DNA
cggtcagcgtgaagttaggtgccactgttctgacaggcatagtgctggcggacggtacatggaatgtggcgctgg

SEQ ID NO: 414656 - DNA, 75 bp, synthetic construct
  source 1..75: mol_type = other DNA
gaccatttcggcctcggtgacaaacagcgtaggcaataccggcaacggcacgcgcgaaatcaccatagacgcgaa

SEQ ID NO: 414657 - DNA, 75 bp, synthetic construct
  source 1..75: mol_type = other DNA
cagatcttagcaatctgaccgccagccagtacaccgttagcgcctcggtaagcgataaagcgggtaaccctgcga

SEQ ID NO: 414658 - DNA, 75 bp, synthetic construct
  source 1..75: mol_type = other DNA
gattgattactaacgattttgtcaccagcgacacgacgcttgcggtgagcggctctctgggtgcggcgctttctg

SEQ ID NO: 414659 - DNA, 75 bp, synthetic construct
  source 1..75: mol_type = other DNA
gcaagcaattacaccgtcagcgccacggtcaacgacaaagcgggcaaccccggcagcgccagccataatctggcg

SEQ ID NO: 414660 - DNA, 75 bp, synthetic construct
  source 1..75: mol_type = other DNA
cgctcaataacaacacgtaccagaccaccgttcaggcggatggcacctggagcgtgaatgttccggcaacggatt

SEQ ID NO: 414661 - DNA, 75 bp, synthetic construct
  source 1..75: mol_type = other DNA
tgatcaacggcaaaacctacacctcgcagccgggcggcgcggtggtagtcgacccggcacacaatacctggtatg

SEQ ID NO: 414662 - DNA, 75 bp, synthetic construct
  source 1..75: mol_type = other DNA
aacacgcccaggcgcagatcatcagcggctccgccacgggtgcggcaaccggtagcaccgtgacggtgactatcg

SEQ ID NO: 414663 - DNA, 75 bp, synthetic construct
  source 1..75: mol_type = other DNA
gcgattgattacactccgacctggaccaccgccagcaaatctaccgcctggggattgacctacggcctcgacacg

SEQ ID NO: 414664 - DNA, 75 bp, synthetic construct
  source 1..75: mol_type = other DNA
gattgtggcatttgataaagagggcgacggctatctcgacttctggattggtgacgcgggcgggccggactccaa

SEQ ID NO: 414665 - DNA, 75 bp, synthetic construct
  source 1..75: mol_type = other DNA
gcgggcgatgacatcatcaatgccatcgaacacgggcaggcgctggttatcacaggtaccagcacaggtgcggaa

SEQ ID NO: 414666 - DNA, 75 bp, synthetic construct
  source 1..75: mol_type = other DNA
gctctcggtcagcaccatcagcggcgataatattattaacgccgccgaagcaggcagtgcgctgaccctgagcgg

SEQ ID NO: 414667 - DNA, 75 bp, synthetic construct
  source 1..75: mol_type = other DNA
ggtcaacggctcgctcaccgccgcgcttgccagtaacgagacggcgcaaatcagtatcgacggcggcgtaacctg

SEQ ID NO: 414668 - DNA, 75 bp, synthetic construct
  source 1..75: mol_type = other DNA
aactggagcgttaccgtgcctgcttcggcggtcggcgcactgggcgaggcggtgtaccagattagcgccagcgcc

SEQ ID NO: 414669 - DNA, 75 bp, synthetic construct
  source 1..75: mol_type = other DNA
ggcgatgatatcgtcaacagcattgaacatggtcaggcgctggtaatcatcggcggcagtagcggcctgaatgca

SEQ ID NO: 414670 - DNA, 75 bp, synthetic construct
  source 1..75: mol_type = other DNA
taccgtgaccgccacggtgagcgacaaagcgggcaacccggcaagcgcggatcatgcactggcggtggacgttac

SEQ ID NO: 414671 - DNA, 75 bp, synthetic construct
  source 1..75: mol_type = other DNA
cgggatatcaccattgatgccaacctgcctgggctgcgggtggataccgtggcgggcgatgatatcgtcaacagc

SEQ ID NO: 414672 - DNA, 75 bp, synthetic construct
  source 1..75: mol_type = other DNA
cgctggcgatacggtcaccgtgacgctgggcgggaacacttacacagcggaggttcagcccgatttaagctggag

SEQ ID NO: 414673 - DNA, 75 bp, synthetic construct
  source 1..75: mol_type = other DNA
tcaccgatcctaacggtattaacgtctattacggcaataccgtgaagctgtacaactcggcgggtgtgctggtgg

SEQ ID NO: 414674 - DNA, 75 bp, synthetic construct
  source 1..75: mol_type = other DNA
ggggctgacctacggcctcgacacacacgggatgtggacagtgctggccaaccagcaaattatgcaatccaccga

SEQ ID NO: 414675 - DNA, 75 bp, synthetic construct
  source 1..75: mol_type = other DNA
tgccgatgcttccgggaactggagcgtgactgttccggcgtctgcggttggtacgctcggtgaagcgacttatac

SEQ ID NO: 414676 - DNA, 75 bp, synthetic construct
  source 1..75: mol_type = other DNA
ggcaactggagcaccacagtgccagcttccgcagtcggtgcgctgggcgaagccagctacacggtgacggcgaac

SEQ ID NO: 414677 - DNA, 75 bp, synthetic construct
  source 1..75: mol_type = other DNA
gaaagtagcgccgaaaatccggtgagcattacgcatccggttacagtcgatctcactccagcggcgattaccatc

SEQ ID NO: 414678 - DNA, 75 bp, synthetic construct
  source 1..75: mol_type = other DNA
gccggattaagcgacggcagctacaccatcagcgcgtcggtcgccgatcaggccggaaaccccggcagcgccagc

SEQ ID NO: 414679 - DNA, 75 bp, synthetic construct
  source 1..75: mol_type = other DNA
cttaaccgtgccggtgagcgatctggcggcattaggtcaggccaactatacggtcagcgccagcgccaccagtgc

SEQ ID NO: 414680 - DNA, 75 bp, synthetic construct
  source 1..75: mol_type = other DNA
ggatatcacggtaagcggcaccaacagtgccggaacaacctccaccattacccatccggttaccgtcgatctggc

SEQ ID NO: 414681 - DNA, 75 bp, synthetic construct
  source 1..75: mol_type = other DNA
acgggcgcaaatcagcctcgacggcggcgttacctggaccacgttaaccgttatcggcaccagctggagctatgc

SEQ ID NO: 414682 - DNA, 75 bp, synthetic construct
  source 1..75: mol_type = other DNA
gcgggtggataccgtcgcaggcgatgatgtggtcaatatcatcgaacacgctcaggcgcaggtgatcaccgggag

SEQ ID NO: 414683 - DNA, 75 bp, synthetic construct
  source 1..75: mol_type = other DNA
cgcgccggatctcaccattaacaccgtcgcgggcgatgacattatcaacgctatcgaacacgggcaggcgctggt

SEQ ID NO: 414684 - DNA, 75 bp, synthetic construct
  source 1..75: mol_type = other DNA
tctcaccgtacacgcctcggtgaccaacgtcgtaggcaataccggcagcggttcgcgagacatcactatcgacgc

SEQ ID NO: 414685 - DNA, 75 bp, synthetic construct
  source 1..75: mol_type = other DNA
cagatctcagcaatctgaccgccagccagtacaccgtcagcgcctcagtcaacgataaagcgggtaacccggcgt

SEQ ID NO: 414686 - DNA, 75 bp, synthetic construct
  source 1..75: mol_type = other DNA
gcggtaaaacctacaccaccacggtggcggcaaacggtagctggagcaccaccgttccggcggcggatatggcgg

SEQ ID NO: 414687 - DNA, 75 bp, synthetic construct
  source 1..75: mol_type = other DNA
aaccggcagcagttctggtctggcagcgggtgccgtacttacggtttcgattaatagccagaactatagcgcaac

SEQ ID NO: 414688 - DNA, 75 bp, synthetic construct
  source 1..75: mol_type = other DNA
ggtaactggagcaccacggtgccagcctctgtcgtcggtgcgctgggcgaagccagctacacggtgaccgcgaac

SEQ ID NO: 414689 - DNA, 75 bp, synthetic construct
  source 1..75: mol_type = other DNA
ctacaccgccaccgtagcaggcgatggcagttggacaaccagcgtacctgccgccgatctcgccgcattacgcga

SEQ ID NO: 414690 - DNA, 75 bp, synthetic construct
  source 1..75: mol_type = other DNA
gatgtggtgagcgttgtgctcaacggcaaaacctacaccaccacgctggatgcctccggtaactggagcgttggc

SEQ ID NO: 414691 - DNA, 75 bp, synthetic construct
  source 1..75: mol_type = other DNA
ggccgccgggtttacgctttctggcaccagtagtcatctggcacagggaacagaactcaccgtcacacttaacgg

SEQ ID NO: 414692 - DNA, 75 bp, synthetic construct
  source 1..75: mol_type = other DNA
aacaccgtcgcgggcgatgacatcatcaacgctatcgaacacgggcaggcgctggtggtgagcggcaccagcacg

SEQ ID NO: 414693 - DNA, 75 bp, synthetic construct
  source 1..75: mol_type = other DNA
gctcgcgcgatatcacgatcgacgccaatctgcctggcttacgggtcgataccgtggcgggcgatgatgtgatta

SEQ ID NO: 414694 - DNA, 75 bp, synthetic construct
  source 1..75: mol_type = other DNA
acggtacaggctatatcaacggctttaccaataacggcgacggcaccttttccagcgctattcaggtcaccgtcg

SEQ ID NO: 414695 - DNA, 75 bp, synthetic construct
  source 1..75: mol_type = other DNA
gttgttcaaatgttacgccctggcgttggacgttgggatattagcggcggtcaggtcttaaaagatgatattcag

SEQ ID NO: 414696 - DNA, 75 bp, synthetic construct
  source 1..75: mol_type = other DNA
tgaaaaattaccaaaactatgttgatccatcgttatgggaaaatggcattaatgcggccatgttgtcatacaacc

SEQ ID NO: 414697 - DNA, 75 bp, synthetic construct
  source 1..75: mol_type = other DNA
cttctgaaaacaatagtgttgaatggtcagcaataaatgattacggcggtacgacaaataccataaagacccggt

SEQ ID NO: 414698 - DNA, 75 bp, synthetic construct
  source 1..75: mol_type = other DNA
acggtgttgctggaccgggtaacaactgggctgtaatgcctacaaactggatcaaagatacgataaattcggact

SEQ ID NO: 414699 - DNA, 75 bp, synthetic construct
  source 1..75: mol_type = other DNA
aaaaatggactagttctgctgtggttactcctgctgagtctgttcaatggagtgaattaaataaggagctttcta

SEQ ID NO: 414700 - DNA, 75 bp, synthetic construct
  source 1..75: mol_type = other DNA
cgctgaaaatggaccgcagcggtatgaccctggcggaagcgctgggtaacgctgagggtatgaatcaggatgtcg

SEQ ID NO: 414701 - DNA, 75 bp, synthetic construct
  source 1..75: mol_type = other DNA
ttggatctcgccagtgacgtctgtttctgctacagtgcccgttttacggcaaacggcttgggtatggcttcatta

SEQ ID NO: 414702 - DNA, 75 bp, synthetic construct
  source 1..75: mol_type = other DNA
gtggttgcgcaggagcagaaagatctgcgtatccgtcagattcaggaagcgttgcagtatgcgaatcaggcgcag

SEQ ID NO: 414703 - DNA, 75 bp, synthetic construct
  source 1..75: mol_type = other DNA
ctgaagatgaaggcgattgttgcccgtggcgcaggcgtggtgattgtcacgctgggtgaaaacggcagtattgcc

SEQ ID NO: 414704 - DNA, 75 bp, synthetic construct
  source 1..75: mol_type = other DNA
ttgtattatttgccaacattgcttacgggggagtggttattcggggaacaagaattatttacccgtccacggcgc

SEQ ID NO: 414705 - DNA, 75 bp, synthetic construct
  source 1..75: mol_type = other DNA
ggggtgtttggtcccggctggaaagcgcccttcgatatccgcttacagatacgcgatgaaggcctgatactcaac

SEQ ID NO: 414706 - DNA, 75 bp, synthetic construct
  source 1..75: mol_type = other DNA
cccagttccgcaataagatcgtcgaagcactgaaagattacggtggaattgccagtgtggcgcagattctgaata

SEQ ID NO: 414707 - DNA, 75 bp, synthetic construct
  source 1..75: mol_type = other DNA
tttacaaagcgccaatccaataagattgaatgattcaaaaataactttatccggaagcggaacgaatgaattata

SEQ ID NO: 414708 - DNA, 75 bp, synthetic construct
  source 1..75: mol_type = other DNA
gctttttgctgctggggcacttttagttgcagtacctatcacattgttatttgttttcacacagaagcatataac

SEQ ID NO: 414709 - DNA, 75 bp, synthetic construct
  source 1..75: mol_type = other DNA
caacactcttagtttatctttttttaatctgcaactccattcttgtgcttgggccagtgatatggacgataatgg

SEQ ID NO: 414710 - DNA, 75 bp, synthetic construct
  source 1..75: mol_type = other DNA
agctcggcggtgggtgtcgcgctcgcggcaaccggtggcggcgatggttctaataccgggaccaccacaaccacg

SEQ ID NO: 414711 - DNA, 75 bp, synthetic construct
  source 1..75: mol_type = other DNA
acctaattgattatgattcaattgtaaatattgaatttccctgtcttctatctgaaatagagatagagttattat

SEQ ID NO: 414712 - DNA, 75 bp, synthetic construct
  source 1..75: mol_type = other DNA
cattatgttgcccagtgaccctagagataccagtcaatggtgtttttggatttgcccctatatttccagacacct

SEQ ID NO: 414713 - DNA, 75 bp, synthetic construct
  source 1..75: mol_type = other DNA
acttcattttgccaacgttggtgcttcgtagtgaggataaaatgaccctggcgattggaatttttagttggattg

SEQ ID NO: 414714 - DNA, 75 bp, synthetic construct
  source 1..75: mol_type = other DNA
cacctgtaccactgcgaccatcgcggcctgccgctggcgcttgtcagcacggaaggggcaacagaatggtgcgca

SEQ ID NO: 414715 - DNA, 75 bp, synthetic construct
  source 1..75: mol_type = other DNA
cgggcgcggtgacgggggtgacggacggcgcgggccgccgttttcatctggcgctgaccacacaggcgcagcggg

SEQ ID NO: 414716 - DNA, 75 bp, synthetic construct
  source 1..75: mol_type = other DNA
tcaagtctcacaataaaagataattttgaaggaggtatatttgcattagggaatggaactgtaaaaatacaaagt

SEQ ID NO: 414717 - DNA, 75 bp, synthetic construct
  source 1..75: mol_type = other DNA
caggatgttatagatgctgaagtaggtatttatctggcgacaacatcagctgggaaaaagaatgactggagttca

SEQ ID NO: 414718 - DNA, 75 bp, synthetic construct
  source 1..75: mol_type = other DNA
atcaactcctctacgctaccgtccgccagcggttgctggatgatatcgcgcagggggtttaccaggccgggcaac

SEQ ID NO: 414719 - DNA, 75 bp, synthetic construct
  source 1..75: mol_type = other DNA
aaacaattaagactgccatatcctattgaccaggccagtagtgcgcctaatgttttcaaaacattcttcagagta

SEQ ID NO: 414720 - DNA, 75 bp, synthetic construct
  source 1..75: mol_type = other DNA
tggcgggtacgaaatgaagccagtgacggtgaccataaccgcggtggatgccgatacggcaaagggcgaggaggc

SEQ ID NO: 414721 - DNA, 75 bp, synthetic construct
  source 1..75: mol_type = other DNA
agagtggtacgacagggagtgaccgctgttacggtattggtttgctgtgtgtgcgtaaagatacgctgcacatct

SEQ ID NO: 414722 - DNA, 75 bp, synthetic construct
  source 1..75: mol_type = other DNA
gggattgcaggttgtggacatcctgactggggcagtgaactccgggtacttgaagtacctgaatccaaggctaga

SEQ ID NO: 414723 - DNA, 75 bp, synthetic construct
  source 1..75: mol_type = other DNA
acaacgcaaagttcggtcgagtcgtgcctaagaacaaaatatatgagcacagcgcggcaagcactgggttgaagt

SEQ ID NO: 414724 - DNA, 75 bp, synthetic construct
  source 1..75: mol_type = other DNA
tgaatgcgtttgccatttcattgacggtgaagagtctcttagcattatttatccttctgatttatttttcgcctg

SEQ ID NO: 414725 - DNA, 75 bp, synthetic construct
  source 1..75: mol_type = other DNA
ggatgataatctggaaatgatgttatctttaaatgatatgtatagtatgttatcttctgattcttcaacatactg

SEQ ID NO: 414726 - DNA, 75 bp, synthetic construct
  source 1..75: mol_type = other DNA
tatctgcaataccctaatgtaaataaaattgcacagcaaagcgatttcggtagaggtgatggctctgctaagcca

SEQ ID NO: 414727 - DNA, 75 bp, synthetic construct
  source 1..75: mol_type = other DNA
caggatgggggtatagagatttttctgatgaagtggatatgtatataggtgtgcctcagttgcaaacaaatattt

SEQ ID NO: 414728 - DNA, 75 bp, synthetic construct
  source 1..75: mol_type = other DNA
aatcagagtaccgctcaggttgtgacgggaacagtcatttccatgattccctttgtcgatcagatctgcgatgtt

SEQ ID NO: 414729 - DNA, 75 bp, synthetic construct
  source 1..75: mol_type = other DNA
cggaactgcaacgagcactggctttttaccaaccgccaccggaaagttggtattcaggtattcagcgaaaaattg

SEQ ID NO: 414730 - DNA, 75 bp, synthetic construct
  source 1..75: mol_type = other DNA
tgggggtacttcagtgattataaaagttaaggatgcatcaggggcagtcataaacccggcaacgttaagctacgc

SEQ ID NO: 414731 - DNA, 75 bp, synthetic construct
  source 1..75: mol_type = other DNA
ctgtcggtgcaggaagcgcttatggaagcaactcttcacaagtaaatcctgttggaatggatctgtgcagtttca

SEQ ID NO: 414732 - DNA, 75 bp, synthetic construct
  source 1..75: mol_type = other DNA
gaaaaaaattaccgctggcgttcatgctgaaaatggtcatatggccgtacagctgtggcacaccggacgcatttc

SEQ ID NO: 414733 - DNA, 75 bp, synthetic construct
  source 1..75: mol_type = other DNA
gttttgtcattccgctggtcaatgaagagaccggggaagttgtcatacgcagcgatggcagcggacgtccggtga

SEQ ID NO: 414734 - DNA, 75 bp, synthetic construct
  source 1..75: mol_type = other DNA
ccgtggccacagaaaatggcctgaaagcacgggtggcggaaaagctggcggggatccgtatcacgcatgtggatc

SEQ ID NO: 414735 - DNA, 75 bp, synthetic construct
  source 1..75: mol_type = other DNA
aggaaataaggagtatctcaatttttaaacataaaatgagaatcgtccagtacaaaaaagcagtgttacgtaatc

SEQ ID NO: 414736 - DNA, 75 bp, synthetic construct
  source 1..75: mol_type = other DNA
gattcttcccaccggacagcctgttgcccgatccggatgctttcaagtctcagcctgggacaatcgtcaaggaag

SEQ ID NO: 414737 - DNA, 75 bp, synthetic construct
  source 1..75: mol_type = other DNA
ctgggtgatgaccgacaccgggcgggagactaccggctacgtgaaatcggatggcgagtggttcatcaactgccc

SEQ ID NO: 414738 - DNA, 75 bp, synthetic construct
  source 1..75: mol_type = other DNA
aggttgatgcaggtacatgggaatactatctgaataaagaaaataccgactggtatctgaaagctgatgtcactg

SEQ ID NO: 414739 - DNA, 75 bp, synthetic construct
  source 1..75: mol_type = other DNA
acactgataacagtgtcagccataatcacggaggaaacagcaaggttggcagcacggggggggggctgtatgcaa

SEQ ID NO: 414740 - DNA, 75 bp, synthetic construct
  source 1..75: mol_type = other DNA
gcttataacgtccgtgcaaccattatatccccaggcgcagtctcgacagagttgcttgagcatattagcgataaa

SEQ ID NO: 414741 - DNA, 75 bp, synthetic construct
  source 1..75: mol_type = other DNA
taattataataaccggtgcttcaagcggtatgggtgaagcggcggctcggcacctggctgcaaagggtgccaaag

SEQ ID NO: 414742 - DNA, 75 bp, synthetic construct
  source 1..75: mol_type = other DNA
aaccccccctattgatacagttaataactggatacctaacaaaagcggaacagatatggcagctggtatcgctat

SEQ ID NO: 414743 - DNA, 75 bp, synthetic construct
  source 1..75: mol_type = other DNA
tgcgatcatctttcccggctggcctggctcaatcaagggcaggcggaacttctccgttcaaatggcattaccact

SEQ ID NO: 414744 - DNA, 75 bp, synthetic construct
  source 1..75: mol_type = other DNA
tgacatcaatgcgttcaggaacctggtccagctttatcaagccaagggagccgcagatcctgtttccgaggccct

SEQ ID NO: 414745 - DNA, 75 bp, synthetic construct
  source 1..75: mol_type = other DNA
ttgccctaacattcaaattcgattgtgaccggtttctccggtttcgtctggccagtgatgctgaaagggactcac

SEQ ID NO: 414746 - DNA, 75 bp, synthetic construct
  source 1..75: mol_type = other DNA
tcgatagcgcaacgctaactgcaacggtcaaagatcagttcgacaatgaggtgaacaatctgccggtaacattca

SEQ ID NO: 414747 - DNA, 75 bp, synthetic construct
  source 1..75: mol_type = other DNA
ggctctggttgttcttctgatatcaaaaaatgagatcacaggtaatggcgtcgatagcgcaacgctaactgcaac

SEQ ID NO: 414748 - DNA, 75 bp, synthetic construct
  source 1..75: mol_type = other DNA
cggaagccttccgtaaacagcgcgagtcttccttatcttcccctgccggtccccgttctgtttcctcttctcagg

SEQ ID NO: 414749 - DNA, 75 bp, synthetic construct
  source 1..75: mol_type = other DNA
gcaattgagttagcgctgcagagttcagcggcaggctctgcccaaaatgtcggtattcaaattttggaccgtacg

SEQ ID NO: 414750 - DNA, 75 bp, synthetic construct
  source 1..75: mol_type = other DNA
gaatgcaaacagtagatataacgctggtggcaggcccggcagacgcctcgcagtccgtccttaagaacaatcggt

SEQ ID NO: 414751 - DNA, 75 bp, synthetic construct
  source 1..75: mol_type = other DNA
atatatcaggcaatccgatcaaagtttctgaagggatggaatttgtgcaatcaggtactaacgtgccctatataa

SEQ ID NO: 414752 - DNA, 75 bp, synthetic construct
  source 1..75: mol_type = other DNA
tggttttcggctctacgaagacttgcaccagacgccaccaacaaacgaaattccgtatacgcagcttgacgaaaa

SEQ ID NO: 414753 - DNA, 75 bp, synthetic construct
  source 1..75: mol_type = other DNA
ctcgtatatgctagaactggaaatggaatggcagctagacgttcaggcttaaagtatgctaagtctgaatatttt

SEQ ID NO: 414754 - DNA, 75 bp, synthetic construct
  source 1..75: mol_type = other DNA
gtgttccgtccggaagatttacgtctggttgaaagcgtacagaaagggctgaaatcgcgtggctatcgtggtcag

SEQ ID NO: 414755 - DNA, 75 bp, synthetic construct
  source 1..75: mol_type = other DNA
cgcgtagtgcttttggtaagggccttcgcgccattacgcatgcagctttcaccctcgggctgcttgctttctgcc

SEQ ID NO: 414756 - DNA, 75 bp, synthetic construct
  source 1..75: mol_type = other DNA
ctcaagcactgtggcccatagttttgctaagactgttgaaggcatactgactggttggcacttcccagaggttgg

SEQ ID NO: 414757 - DNA, 75 bp, synthetic construct
  source 1..75: mol_type = other DNA
attgatggcaatcccaccgccaacacgccgaacttggccacattcaagttacttttaaccggagcagacgactcc

SEQ ID NO: 414758 - DNA, 75 bp, synthetic construct
  source 1..75: mol_type = other DNA
agtcagggcgcgttggttgcaaccaccagggcgacgcgggtcacagggacacgcgctgatggcgtcgcgttcagc

SEQ ID NO: 414759 - DNA, 75 bp, synthetic construct
  source 1..75: mol_type = other DNA
cggcgcgtttcaacgccaatatcggttatcgcgtacttgttacagtcagcgatcgcaacggtaaaccgttgccct

SEQ ID NO: 414760 - DNA, 75 bp, synthetic construct
  source 1..75: mol_type = other DNA
tttgagtcagtatattttgaagatgaatccggggaaactttctttacgcctaaaaaacggttgttgaactttggt

SEQ ID NO: 414761 - DNA, 75 bp, synthetic construct
  source 1..75: mol_type = other DNA
aagcggttcgttatatcagggatatcgtactggatagtgagaacgattatacagatatcatggtgcattaccgtt

SEQ ID NO: 414762 - DNA, 75 bp, synthetic construct
  source 1..75: mol_type = other DNA
ttggttcgtacgttctttcccttattgggccaattattattggtattgcggcggcagcattcactgcttatttcg

SEQ ID NO: 414763 - DNA, 75 bp, synthetic construct
  source 1..75: mol_type = other DNA
aagagttcgatagccgtgtaaccagcggtgaactcgacaacttgcaggtgaagtggtttactgaatttggcctcc

SEQ ID NO: 414764 - DNA, 75 bp, synthetic construct
  source 1..75: mol_type = other DNA
tgaaatgcgtcttgatggctcactgctggatgatggtcgcctgagctatagcctggaacaaagtctggatgacga

SEQ ID NO: 414765 - DNA, 75 bp, synthetic construct
  source 1..75: mol_type = other DNA
aatccaaatccaaatccaaatccagacccgactcccgatccaacgccgacacccgttccggagaaacgcatcacg

SEQ ID NO: 414766 - DNA, 75 bp, synthetic construct
  source 1..75: mol_type = other DNA
ctgtcgttaatgacgccacgggataatgttacgccagttaaacttgaaggggcggtccggattaccgatagcgcg

SEQ ID NO: 414767 - DNA, 75 bp, synthetic construct
  source 1..75: mol_type = other DNA
ggtaccgaagcccgcgattccagggttggcaacggtggggcaatgcaaaacctgggtcaggacttcgccacaaag

SEQ ID NO: 414768 - DNA, 75 bp, synthetic construct
  source 1..75: mol_type = other DNA
gtttatttatcagcacaaacagcagcgcctgccacaactaacggtatatacaatacgctgacaaccaatgaactt

SEQ ID NO: 414769 - DNA, 75 bp, synthetic construct
  source 1..75: mol_type = other DNA
ccattgccggcaatttagcgaccaatatgttgctggaaaatggcggtaatttattggtattagcaggtaccgaag

SEQ ID NO: 414770 - DNA, 75 bp, synthetic construct
  source 1..75: mol_type = other DNA
ggtggcgaacaaatcgtcgagggtgtggcgaatgagacaacgattaacgacggcggaatacaaacagtttcggct

SEQ ID NO: 414771 - DNA, 75 bp, synthetic construct
  source 1..75: mol_type = other DNA
aagacggaaccggggtgacgcggagaataacgcgaaaccggtacggtcagcttcaggcgtttacggactgctcgg

SEQ ID NO: 414772 - DNA, 75 bp, synthetic construct
  source 1..75: mol_type = other DNA
ggatagtcagtgtattaataggatgtaccgccggacctctgtgggctgcaacacatctcggaacatcagaagata

SEQ ID NO: 414773 - DNA, 75 bp, synthetic construct
  source 1..75: mol_type = other DNA
tacactgtcacggtatccaatggcagcggtatctgtggttcagccagcctgtcagtagaaggaaacggaacaaca

SEQ ID NO: 414774 - DNA, 75 bp, synthetic construct
  source 1..75: mol_type = other DNA
tatctgaaatgatgagcttctttgtctatcgaaccaactggatagcaacagagataagtggcacaggaacaacaa

SEQ ID NO: 414775 - DNA, 75 bp, synthetic construct
  source 1..75: mol_type = other DNA
tactgaatgcagataatgactatacagtacctattactaacgtaatgatgatcaaactaaaggcgacggagaatt

SEQ ID NO: 414776 - DNA, 75 bp, synthetic construct
  source 1..75: mol_type = other DNA
aaataacaaacttccagattaaaagtactgaacctgtttactcaaatcaaacatggacaggccaacgtatcatga

SEQ ID NO: 414777 - DNA, 75 bp, synthetic construct
  source 1..75: mol_type = other DNA
tactgaacctgtctattcaaatcagacatggacagggcaacgtatcatgagaagtacaggtattcaatactatga

SEQ ID NO: 414778 - DNA, 75 bp, synthetic construct
  source 1..75: mol_type = other DNA
atgcagcaaaggcttttctggaagcctccgcaccaccactctacttcctgctgtttttgctgttctgtgccggtt

SEQ ID NO: 414779 - DNA, 75 bp, synthetic construct
  source 1..75: mol_type = other DNA
gtctggccctgttgctgggtatcgtggcttccgctaatggacgctcgttctggggctggttcattctcggtctga

SEQ ID NO: 414780 - DNA, 75 bp, synthetic construct
  source 1..75: mol_type = other DNA
aaccatcgaaaaacgccattaccaagagcgcctagccgcactaaacgaacaacagatcctgagccagctcagtga

SEQ ID NO: 414781 - DNA, 75 bp, synthetic construct
  source 1..75: mol_type = other DNA
aagtaggtacagagatcggttcggtaggaggccctccggggatgttagtcggtgcggcagtcggtacggtggtta

SEQ ID NO: 414782 - DNA, 75 bp, synthetic construct
  source 1..75: mol_type = other DNA
ggatattgtgcagggttcagcaggggtgctgataggtgcgccaaccggtgtggcctgctcggtgtgtcccacagg

SEQ ID NO: 414783 - DNA, 75 bp, synthetic construct
  source 1..75: mol_type = other DNA
cacccatctgggaacaagtcaggaccggggaagccgggccgcttacggttacatctacctgatagacagcatgat

SEQ ID NO: 414784 - DNA, 75 bp, synthetic construct
  source 1..75: mol_type = other DNA
atttttcagtgtatctggatgacatagataaggtattgtcccctttgaaattgggtctcgttttaatgctggacg

SEQ ID NO: 414785 - DNA, 75 bp, synthetic construct
  source 1..75: mol_type = other DNA
taaatgcggtggattttttattaatatcaaagtatcaggtttttcttactgctgataataaattatatgtaactt

SEQ ID NO: 414786 - DNA, 75 bp, synthetic construct
  source 1..75: mol_type = other DNA
cttaggattgggtaaggttgctaattatagtgtcattgcttctggtatattgcaaataataatgttctgtatttt

SEQ ID NO: 414787 - DNA, 75 bp, synthetic construct
  source 1..75: mol_type = other DNA
gcttagctatagctcaaatatttagctatatagcaccattactgcaattcccttatctaagtaggattgtagggg

SEQ ID NO: 414788 - DNA, 75 bp, synthetic construct
  source 1..75: mol_type = other DNA
ccaccgggggctgccgcaggcgctcatcagcccggaaggggaaacggcgtggcagggggagtatgacgagtgggg

SEQ ID NO: 414789 - DNA, 75 bp, synthetic construct
  source 1..75: mol_type = other DNA
aaatatattaccttacctgttttgttaaagaaacaaaaattaaaagaaattgaaaaagacaattcagttctattt

SEQ ID NO: 414790 - DNA, 75 bp, synthetic construct
  source 1..75: mol_type = other DNA
tatcgcgagagttatcaaactgattcatccagagaaatgtataatagttcattctgataatgttgaatcagcatt

SEQ ID NO: 414791 - DNA, 75 bp, synthetic construct
  source 1..75: mol_type = other DNA
aaattttctggagtatagaaagaaaaaaataaaaaaaacaaataataaacttgatgactttattttttccgatgc

SEQ ID NO: 414792 - DNA, 75 bp, synthetic construct
  source 1..75: mol_type = other DNA
atgatctccgcttttgccaactatgctgtacaaactgaaaattggcagcaaaatgcgttacaagcattaaggtct

SEQ ID NO: 414793 - DNA, 75 bp, synthetic construct
  source 1..75: mol_type = other DNA
taaaaaggggttaactcctgaaaaattattagtcttgcaggatcatgtgcttaattataatgtcgaggtttcatt

SEQ ID NO: 414794 - DNA, 75 bp, synthetic construct
  source 1..75: mol_type = other DNA
tggcctctgccgtttcctttctctgattttgttgctgtttgtcacggcctatcgccagaaaaaactctcatgctt

SEQ ID NO: 414795 - DNA, 75 bp, synthetic construct
  source 1..75: mol_type = other DNA
ccggtaactcggcgatccggctcgtcaatacgcggtgagcatccctcgcgacggggtaataaagctctcaaacgg

SEQ ID NO: 414796 - DNA, 75 bp, synthetic construct
  source 1..75: mol_type = other DNA
atgctggcgtttacacctgtgaagtcaccgacgccgcgggcaaaaccatcacctcggctgcgtgtactgtcacga

SEQ ID NO: 414797 - DNA, 75 bp, synthetic construct
  source 1..75: mol_type = other DNA
aaggttttctgaatggtggaaattttcagaaaattctcactgaggctggcgaagggctggagaaacttggtaagt

SEQ ID NO: 414798 - DNA, 75 bp, synthetic construct
  source 1..75: mol_type = other DNA
taagggatgaaaaagggcgctttgttggaagcgggaaaacacctgattcgctggtgagcaactataaaggtcgcg

SEQ ID NO: 414799 - DNA, 75 bp, synthetic construct
  source 1..75: mol_type = other DNA
gggcctgaacacggggcgggcggcgcggaaaaaggcgcatttttgtgattttatcgtcatcatcatcatgatggt

SEQ ID NO: 414800 - DNA, 75 bp, synthetic construct
  source 1..75: mol_type = other DNA
ctttaatcagaatgtctgatggtaccacgaatgctgccctgaatttcatgaatggtgagaactttaaaaggattc

SEQ ID NO: 414801 - DNA, 75 bp, synthetic construct
  source 1..75: mol_type = other DNA
caacgccaggagagttaaaggcggcagaaagcacttattccccgtatttttccggtgttggcaatgtgctcaata

SEQ ID NO: 414802 - DNA, 75 bp, synthetic construct
  source 1..75: mol_type = other DNA
tgacgggcgcgcccttattcagcttgagattcttagaaaacctggagataacttcgatgcccaggttgtgggcca

SEQ ID NO: 414803 - DNA, 75 bp, synthetic construct
  source 1..75: mol_type = other DNA
agcgtgccgagctggcgggggctgacggtcacgatagccgttgtggtaggtttcgcgctcatcgctgcgctagtg

SEQ ID NO: 414804 - DNA, 75 bp, synthetic construct
  source 1..75: mol_type = other DNA
cggcgatccggctcgtcaatacgcggtgagcatccctcgcgacggggtaataaagctctcaaacgggcgttgttc

SEQ ID NO: 414805 - DNA, 75 bp, synthetic construct
  source 1..75: mol_type = other DNA
tcccggcacgaatgccgctgccgtagtactgccacgtctggcactccagctcatcacgctgcgtaagcaaagaga

SEQ ID NO: 414806 - DNA, 75 bp, synthetic construct
  source 1..75: mol_type = other DNA
gaattattaaaaaatacctatatagaagcattgtcttggctttttgcaatctgtgataaacttgaaatacaacca

SEQ ID NO: 414807 - DNA, 75 bp, synthetic construct
  source 1..75: mol_type = other DNA
agtgtcctaattcatggcgcgctagctctagagaaaaatgttactacagcagatagatgggcattgcagaatatg

SEQ ID NO: 414808 - DNA, 75 bp, synthetic construct
  source 1..75: mol_type = other DNA
tagctataaattcaggagacacgccgacgccattctgcacgggaatagcctcagatacggtgaagaacagttgct

SEQ ID NO: 414809 - DNA, 75 bp, synthetic construct
  source 1..75: mol_type = other DNA
cgtcctataaaagctatctttctcagtacaccggattaggtgttaaggagaaaattgatggttctaattttgagg

SEQ ID NO: 414810 - DNA, 75 bp, synthetic construct
  source 1..75: mol_type = other DNA
aaggcgacaccggagcaactggtccacagggacagaagggggacaagggcgatacaggcccggcagggccaccgg

SEQ ID NO: 414811 - DNA, 75 bp, synthetic construct
  source 1..75: mol_type = other DNA
cagttgcaacaaaccaagtggatactatccgcttacctttaatcaaggcacagagcgaagctatcaatcctccat

SEQ ID NO: 414812 - DNA, 75 bp, synthetic construct
  source 1..75: mol_type = other DNA
acggagacaaattgcccatccagatcgctacaatgcaaaatctggagataatttagttgatgagtacttttatca

SEQ ID NO: 414813 - DNA, 75 bp, synthetic construct
  source 1..75: mol_type = other DNA
tctatctctccgccctcttcccggaagtgccgccgtgggtgtgggtggtaaccttcgtcgccattttaaccgccg

SEQ ID NO: 414814 - DNA, 75 bp, synthetic construct
  source 1..75: mol_type = other DNA
gaacgtcattatggtcgggattgtcgcgttgtcggcgctgttcttcgatttagttaccgccacagcgttaattaa

SEQ ID NO: 414815 - DNA, 75 bp, synthetic construct
  source 1..75: mol_type = other DNA
gggggatacaggcccggcaggtccacaggggccgaaaggggatacgggagctgcaggcccggcagggcctcaggg

SEQ ID NO: 414816 - DNA, 75 bp, synthetic construct
  source 1..75: mol_type = other DNA
gtggatgtcactgtcgtgccagacgacgagattgtgcagcatcgcagagtcgccctgttggagttgatccaaaag

SEQ ID NO: 414817 - DNA, 75 bp, synthetic construct
  source 1..75: mol_type = other DNA
ttattaacaacaatttgctttctgaaattaaaatattctatagcaacttctgcaatgttcagacattaaacgctg

SEQ ID NO: 414818 - DNA, 75 bp, synthetic construct
  source 1..75: mol_type = other DNA
aatgatcagaacgttaagttggaaattgttcggaacgctggtgccgattacttcgcgcaactaattggtgctcaa

SEQ ID NO: 414819 - DNA, 75 bp, synthetic construct
  source 1..75: mol_type = other DNA
ggtcgatccgcgcaaagccgccgtcgaagccgctattgcccgcgccaaagcacgcaagctggaacagcaacaggc

SEQ ID NO: 414820 - DNA, 75 bp, synthetic construct
  source 1..75: mol_type = other DNA
ataacttctcattacgtgttgaagctattatcgcctcagaactggcaaagaaatggtatttgtctgatgtcgcat

SEQ ID NO: 414821 - DNA, 75 bp, synthetic construct
  source 1..75: mol_type = other DNA
tttattgatatacccagtcagtttgttagtgactacttgtatatcagactttcaaatgcagacgcttttcgtaag

SEQ ID NO: 414822 - DNA, 75 bp, synthetic construct
  source 1..75: mol_type = other DNA
agtttatttctgatttaaatgccagtttcattaatcatccttattctattgaaacctcggatggggacctatcga

SEQ ID NO: 414823 - DNA, 75 bp, synthetic construct
  source 1..75: mol_type = other DNA
tggagtgggatgcaacgaagtccccgctacgacaggatcaccgacagtactgaatagcaacgcaagctggtatgt

SEQ ID NO: 414824 - DNA, 75 bp, synthetic construct
  source 1..75: mol_type = other DNA
agtctggagttgcgctggtagcactggaggtgaggcctctgccgcccgttccacgttgcagctaccacatgatcg

SEQ ID NO: 414825 - DNA, 75 bp, synthetic construct
  source 1..75: mol_type = other DNA
ctgcaggcagagaaaactggccgattttctctgcactggagggataatacaaggcctgataagcgtagcgcatca

SEQ ID NO: 414826 - DNA, 75 bp, synthetic construct
  source 1..75: mol_type = other DNA
atggtgattacggatatcgaaaaagccatcgtggagcgccttcgtaaaggtatggggcgtatggtgaagaacgtg

SEQ ID NO: 414827 - DNA, 75 bp, synthetic construct
  source 1..75: mol_type = other DNA
tcctgtccctgtgccagtagagcagggggccgcaaacgatgatttcccggcatgtgtctggcgggggaaggctgc

SEQ ID NO: 414828 - DNA, 75 bp, synthetic construct
  source 1..75: mol_type = other DNA
catttaccgcaatcccgcatgaccttgcggacattgagctgatcggaggcaaggcgtttaccatgaacatggttt

SEQ ID NO: 414829 - DNA, 75 bp, synthetic construct
  source 1..75: mol_type = other DNA
acatggaaagaaggtgtccccggtgtcctgatggattacaacttgtttgccagcagctaccgctgtcagcgccaa

SEQ ID NO: 414830 - DNA, 75 bp, synthetic construct
  source 1..75: mol_type = other DNA
gagactgattacgatttcctgtgccggatggcggcggaggaaggcatcttcttttatgaggagcacgcgcaaaaa

SEQ ID NO: 414831 - DNA, 75 bp, synthetic construct
  source 1..75: mol_type = other DNA
agttgttattccagaccaatatattaaacctggagtttactctatgacagcccgtggtgttatggttttaccata

SEQ ID NO: 414832 - DNA, 75 bp, synthetic construct
  source 1..75: mol_type = other DNA
tcacagtgaacaaaactatcgtgcactggctgcattgtttggcataacagtgccggatttaccgccactggaagt

SEQ ID NO: 414833 - DNA, 75 bp, synthetic construct
  source 1..75: mol_type = other DNA
tttaaaacctgaagttcgtcagtcgttaccacggttaaaccagtgcgtcgattttagctcccggcctgaaattct

SEQ ID NO: 414834 - DNA, 75 bp, synthetic construct
  source 1..75: mol_type = other DNA
tatcctgcctggtcatggcgataccttccgcattggcggtcgaattcaacctgaatgtcctcgataaatcgatgc

SEQ ID NO: 414835 - DNA, 75 bp, synthetic construct
  source 1..75: mol_type = other DNA
ggcggggtccaaaaaaccgagccatacagcacagcacggcaacggtttgtcacgcacggtcgctttgtcgtggtg

SEQ ID NO: 414836 - DNA, 75 bp, synthetic construct
  source 1..75: mol_type = other DNA
tggccagaacgcagcgccgcagcctggcggatgcgcttcagcagtccggcggcgaagacggtggcagtgtggtgt

SEQ ID NO: 414837 - DNA, 75 bp, synthetic construct
  source 1..75: mol_type = other DNA
catatcgacacagggagtgattcactgctgcatattcacgcagctcacaacggactggtactaataccggattca

SEQ ID NO: 414838 - DNA, 75 bp, synthetic construct
  source 1..75: mol_type = other DNA
gaatgaaagaagctatagattttttatcaagctctgaagaaaccataaagatagagtatattgatgaaaccgacg

SEQ ID NO: 414839 - DNA, 75 bp, synthetic construct
  source 1..75: mol_type = other DNA
tggtgagttcataatggataatagtcgtgagttgtcagaaatcatccgcaaggatagctactctatagaatcggc

SEQ ID NO: 414840 - DNA, 75 bp, synthetic construct
  source 1..75: mol_type = other DNA
gcattgtatgattatcttgttcttggaacgccaagaaagaatatctgtgagcaatatggtgtaaataatggatat

SEQ ID NO: 414841 - DNA, 75 bp, synthetic construct
  source 1..75: mol_type = other DNA
ggcggatgcgcttcagcagtccggcggcgaagacggtggcagtgtggtgttcccgccggtgctggtgcagatgct

SEQ ID NO: 414842 - DNA, 75 bp, synthetic construct
  source 1..75: mol_type = other DNA
ggatcgcataaaaactagaacctgggaggggcgaaattatattgttcctatgattgcggaagatgagtttgagaa

SEQ ID NO: 414843 - DNA, 75 bp, synthetic construct
  source 1..75: mol_type = other DNA
tttgaagagatgcacgccgacctgttccgcgctgattactggcgcgcactacaaaaccgcatacgtgaagggcat

SEQ ID NO: 414844 - DNA, 75 bp, synthetic construct
  source 1..75: mol_type = other DNA
aaaactcctggcggatatggtggctattgggctgatcaacaagacggcgcagatcggcggcaagacttgccatta

SEQ ID NO: 414845 - DNA, 75 bp, synthetic construct
  source 1..75: mol_type = other DNA
ctcaaaatgcagcaggaaaggcagttgcttgatgtaaccaccgggaagcgtctttataccaatatggtgatccgc

SEQ ID NO: 414846 - DNA, 75 bp, synthetic construct
  source 1..75: mol_type = other DNA
tgtctacgccccttaacaacatggggcctaaggaagtctatgctgagctgctcaaaatgcagcaggaaaggcagt

SEQ ID NO: 414847 - DNA, 75 bp, synthetic construct
  source 1..75: mol_type = other DNA
aaatccactacaccgccaaacgaatccttgctgagccagctgggcggaagcgttacatcagcattcgggggatga

SEQ ID NO: 414848 - DNA, 75 bp, synthetic construct
  source 1..75: mol_type = other DNA
gtactacgatccgttgcaggggcggtatattactcaggacccgatggggttgaaagggggatggaatttatatca

SEQ ID NO: 414849 - DNA, 75 bp, synthetic construct
  source 1..75: mol_type = other DNA
ccggctgaactggtgcggctgctggacaggctggaggaagaaatccgggcagaccgcgtgagcagtgaaagccgg

SEQ ID NO: 414850 - DNA, 75 bp, synthetic construct
  source 1..75: mol_type = other DNA
caggtaaatggcaagcattatccttctaatatagaaagcaatcaacttactgatttttatattaaggttttcttt

SEQ ID NO: 414851 - DNA, 75 bp, synthetic construct
  source 1..75: mol_type = other DNA
gggtggctatgccattaatgccgcgctgacagaaaaacgaattaaagcagtagtgagtattacgggtgttaatat

SEQ ID NO: 414852 - DNA, 75 bp, synthetic construct
  source 1..75: mol_type = other DNA
atgcaggaattaaattatgagttaccagagttaaaggcagtaaaatctgaaatgattatcgcacgtgaaatggga

SEQ ID NO: 414853 - DNA, 75 bp, synthetic construct
  source 1..75: mol_type = other DNA
cagggctgtactataaccgtcaccggtactacgatccgttgcaggggcggtatattactcaggacccgatggggt

SEQ ID NO: 414854 - DNA, 75 bp, synthetic construct
  source 1..75: mol_type = other DNA
ttgtaggtaataataaaccagaactaagaccaacaagtgagaatacagctaatttaagctggagattgcgtttag

SEQ ID NO: 414855 - DNA, 75 bp, synthetic construct
  source 1..75: mol_type = other DNA
gatattgctcgttatttctgcaatcatcttttattaccattttacttttaccaaaagcgcggttcatacagaagg

SEQ ID NO: 414856 - DNA, 75 bp, synthetic construct
  source 1..75: mol_type = other DNA
gaaaaggcccagcgagcaacgtttatctgcgccagctttgatgaaacgctggcgatgttgaaggcgggggatgtg

SEQ ID NO: 414857 - DNA, 75 bp, synthetic construct
  source 1..75: mol_type = other DNA
attcctctacggaaccaactctttcctcgcctctgaagggcgggaaaatatttcggtttcccgcggcgatgttcg

SEQ ID NO: 414858 - DNA, 75 bp, synthetic construct
  source 1..75: mol_type = other DNA
aagctattgaagaatcccagcagaaaatgtcccagcttttcgatgcacagaaagcagaaatcgaaagcacgggta

SEQ ID NO: 414859 - DNA, 75 bp, synthetic construct
  source 1..75: mol_type = other DNA
tgctttgataatcacggtaaatctctttgcggattgtatgaacatgatgggatatggctgatatttgccattgac

SEQ ID NO: 414860 - DNA, 75 bp, synthetic construct
  source 1..75: mol_type = other DNA
tttgatgcttttagtcagggtttgcataatgttgctcgtaatggcagtccacggtatacaggtttactacatcaa

SEQ ID NO: 414861 - DNA, 75 bp, synthetic construct
  source 1..75: mol_type = other DNA
gataaaaaatctgaattgtactttgatgatggagtgcatttaaataaaaatggctatgccgtttggatgagagag

SEQ ID NO: 414862 - DNA, 75 bp, synthetic construct
  source 1..75: mol_type = other DNA
aggatactctatacatcagatcctaactctatcagaaaattatggggcgtctggatataaagctgcgataattga

SEQ ID NO: 414863 - DNA, 75 bp, synthetic construct
  source 1..75: mol_type = other DNA
cagcaatacatggcagcgagctttacgacttattgacacctgctaagaatacaaaagttactgctttgatggaaa

SEQ ID NO: 414864 - DNA, 75 bp, synthetic construct
  source 1..75: mol_type = other DNA
tatgcaattcggcgatgagcactaccgagatattccggagatgttgctggcgcatatcgaacaggggaaaccgcg

SEQ ID NO: 414865 - DNA, 75 bp, synthetic construct
  source 1..75: mol_type = other DNA
cggagatggtggtcagaaatcagggatcactacgctggctggtgggaaaggcggtgtttctattggtggctcggt

SEQ ID NO: 414866 - DNA, 75 bp, synthetic construct
  source 1..75: mol_type = other DNA
gggggtggttgtcagggaacttccggagctgaatcaatttcaggtggtggtggcggtgctggcggtacggccatt

SEQ ID NO: 414867 - DNA, 75 bp, synthetic construct
  source 1..75: mol_type = other DNA
cgcgcagcaccttcagcagtcactccgtctgccgggacagcagtatgatgaggagtcggggctgtactacaaccg

SEQ ID NO: 414868 - DNA, 75 bp, synthetic construct
  source 1..75: mol_type = other DNA
ttcaggcatgaattcagcacgattatgaacgagcacgaatggcctgctgacgctattgaagtgcaactggcacat

SEQ ID NO: 414869 - DNA, 75 bp, synthetic construct
  source 1..75: mol_type = other DNA
tttccgttacgctattgtcactggtagggctaaatataacccggcacctgaccttgcagacgccatgaaaggata

SEQ ID NO: 414870 - DNA, 75 bp, synthetic construct
  source 1..75: mol_type = other DNA
agtattgcctttggcaaaatgatccccgaatgcaatctacgccagtgggtaacgactatttacacacataattat

SEQ ID NO: 414871 - DNA, 75 bp, synthetic construct
  source 1..75: mol_type = other DNA
gaaaaaaaattggctgcgcttactattgaagttggacagttacatgaaaaaatccttagcaaggatagcgcatta

SEQ ID NO: 414872 - DNA, 75 bp, synthetic construct
  source 1..75: mol_type = other DNA
aaattttacttcacgaagctcaaattaaatatagaaacatcactcagcaggtatcaggctataaaaaagaaatta

SEQ ID NO: 414873 - DNA, 75 bp, synthetic construct
  source 1..75: mol_type = other DNA
ttacttatgatgcggagcacgccgggcggatggtggcacaccattatgcggggaggccggagagccgctaccggt

SEQ ID NO: 414874 - DNA, 75 bp, synthetic construct
  source 1..75: mol_type = other DNA
agtcgctcggaaagcgcagggagaaggttgaggttctctctgattcaaacggactgaatgtgcgtctaagcataa

SEQ ID NO: 414875 - DNA, 75 bp, synthetic construct
  source 1..75: mol_type = other DNA
gccggacgcaacgttaccagtatgacctgaccggaaaactcacgcagagtgaagatgaggggcttatcaccctct

SEQ ID NO: 414876 - DNA, 75 bp, synthetic construct
  source 1..75: mol_type = other DNA
ggcgtagcaacgctggatgcgcaggccggaaacatcggtgattttgtcaaagtcacccagagcggcagcgacacc

SEQ ID NO: 414877 - DNA, 75 bp, synthetic construct
  source 1..75: mol_type = other DNA
atttgtgtatagctcatcttcaaactaagtggcgggatatcttaaccaaaagattcgcctacttttttgataagt

SEQ ID NO: 414878 - DNA, 75 bp, synthetic construct
  source 1..75: mol_type = other DNA
cggggcgggcgcggtgacgggggggacggacggcgcgggccgccgttttcacctggcgctgaccacgcaggcgca

SEQ ID NO: 414879 - DNA, 75 bp, synthetic construct
  source 1..75: mol_type = other DNA
cgatatacagcagatgaaataaaagcgtataagaagctccacaatgatgtaaaaactaaagtgggaattacatcc

SEQ ID NO: 414880 - DNA, 75 bp, synthetic construct
  source 1..75: mol_type = other DNA
ggcggactccggcactgaacgtcattatggtcgggattgtcgcgttgtcagcgctgttctttgatttagtcaccg

SEQ ID NO: 414881 - DNA, 75 bp, synthetic construct
  source 1..75: mol_type = other DNA
acgttagcgtctggcctggcctcacatgccagcgtgtcacgtctgctgtatgtgatggggcgcgacaatgtgttt

SEQ ID NO: 414882 - DNA, 75 bp, synthetic construct
  source 1..75: mol_type = other DNA
gttcggcctatacctacgcgcaaaagtcgattaacccgcacgtcggatttatggtcggctggtcatcgctgctgg

SEQ ID NO: 414883 - DNA, 75 bp, synthetic construct
  source 1..75: mol_type = other DNA
aaacagtcgggcagcgtgttcctgatccgcaacaccaacacggtgagctacggcacttcgctacacctgcgcatc

SEQ ID NO: 414884 - DNA, 75 bp, synthetic construct
  source 1..75: mol_type = other DNA
taacgatctggaaattgacggtattggcggcggtaatccgctgaccagtaaagtcgccattattagccgttccag

SEQ ID NO: 414885 - DNA, 75 bp, synthetic construct
  source 1..75: mol_type = other DNA
ggatataggttctctggtttatgccatgtacgaaggcacagcagactatggcgacagtgttgcagccagccagtt

SEQ ID NO: 414886 - DNA, 75 bp, synthetic construct
  source 1..75: mol_type = other DNA
gcttttcgaacttaaaggatacctggttcaataagcaagtcatgctgcctgatacaggtgtatattcccagcgaa

SEQ ID NO: 414887 - DNA, 75 bp, synthetic construct
  source 1..75: mol_type = other DNA
acaaatgggttattaccagcgaccaatatcaattcatcctgaatgaaaagaaagtcgttaagtccggtaaaaaag

SEQ ID NO: 414888 - DNA, 75 bp, synthetic construct
  source 1..75: mol_type = other DNA
atattcagcagtcatcaattaccacgcttgacgcaatggcatctgaaattgagcgtatcggagaaatgtgcgcct

SEQ ID NO: 414889 - DNA, 75 bp, synthetic construct
  source 1..75: mol_type = other DNA
gtgagaagcaggaaatttcaggtcataaaaacgcctcgcaaacagcgagatataatcgaagaatttcagttgttc

SEQ ID NO: 414890 - DNA, 75 bp, synthetic construct
  source 1..75: mol_type = other DNA
cagcatcggcgtggcagctggtgagagtaaatctgcaacagaaatcattgctgtttccgggccgcgctgctgggt

SEQ ID NO: 414891 - DNA, 75 bp, synthetic construct
  source 1..75: mol_type = other DNA
cgggtggtgaaaaaagaactggcggacggcagcgtcacgcacagcgggtatgacgcggcaggaaggctaacggcg

SEQ ID NO: 414892 - DNA, 75 bp, synthetic construct
  source 1..75: mol_type = other DNA
atgacccggcgagtgagctgccgacagggatacaggacgcgacgggcagtacaaaacagatggcatggagccgtt

SEQ ID NO: 414893 - DNA, 75 bp, synthetic construct
  source 1..75: mol_type = other DNA
cccgcgcttttctcggtattggtctgatattgctcgttatttctgcaattatcttttattaccattttactttta

SEQ ID NO: 414894 - DNA, 75 bp, synthetic construct
  source 1..75: mol_type = other DNA
aaaaacctgttcctccatggctgtggcgaaaagaaaataaaaatgaccacacagaattacaaacaaacaacatct

SEQ ID NO: 414895 - DNA, 75 bp, synthetic construct
  source 1..75: mol_type = other DNA
aagatattgaaagaattgccgaggcctgtagaaggtattggggtttggggctgggaccgatatcttcaatggtta

SEQ ID NO: 414896 - DNA, 75 bp, synthetic construct
  source 1..75: mol_type = other DNA
gacattcttgacctcaaaaagagtcaattattgagcgaaggaattttaattcagcagagtaaaaccgcagttagc

SEQ ID NO: 414897 - DNA, 75 bp, synthetic construct
  source 1..75: mol_type = other DNA
tagcaagctcattatgtattactcctatatctgcattgtcaggtcctgtaatgcagtttttccaacccggattaa

SEQ ID NO: 414898 - DNA, 75 bp, synthetic construct
  source 1..75: mol_type = other DNA
gggtttggcactcgtttcattccttatgatgatgattttggctaacggcgaaaaaatcatcaccggattccttga

SEQ ID NO: 414899 - DNA, 75 bp, synthetic construct
  source 1..75: mol_type = other DNA
atggtttgcctggcgctgtggatgagttattgcgggcgttcattatgcgacaaaatcgtcgctatgattttgccc

SEQ ID NO: 414900 - DNA, 75 bp, synthetic construct
  source 1..75: mol_type = other DNA
tgcgccgagggcaaaatgcatcatacatttactgaatcagtcagcctcggcattatgtgcaatctgatggtttgc

SEQ ID NO: 414901 - DNA, 75 bp, synthetic construct
  source 1..75: mol_type = other DNA
tgaatggcgcacaggagcgtgaattatctctggctgaattatcctggtgggcggtccgcaatcaggtggcggacg

SEQ ID NO: 414902 - DNA, 75 bp, synthetic construct
  source 1..75: mol_type = other DNA
cttgataggctaaaaaataatgagctgagtagaaaacagcatttagaccctagggttgcctcagcttggcttcaa

SEQ ID NO: 414903 - DNA, 75 bp, synthetic construct
  source 1..75: mol_type = other DNA
cgcatcgaaacagacaacggcgagcgggagaaagcgcagcgccgcagcctggcggagaagctgcagcaggaaggg

SEQ ID NO: 414904 - DNA, 75 bp, synthetic construct
  source 1..75: mol_type = other DNA
tgtcgctgtcgcgtaaaccggagatgacgtggtacgggtgggacggcgaccggctgacgacggtacagaccgaca

SEQ ID NO: 414905 - DNA, 75 bp, synthetic construct
  source 1..75: mol_type = other DNA
tcagcctcgaagaaaggcgcgaaattttttacaaatacgagcaactatataacgcgctaatccatattccggtct

SEQ ID NO: 414906 - DNA, 75 bp, synthetic construct
  source 1..75: mol_type = other DNA
tctggcgaaacagatccacagcaccgccgccattgagagcgcaagctggggactgttccagattatgggctttca

SEQ ID NO: 414907 - DNA, 75 bp, synthetic construct
  source 1..75: mol_type = other DNA
gcatggttgcttcaaaataaggtattactgcccggagcaaccacactagtaggggttccgtgggaatttctgcga

SEQ ID NO: 414908 - DNA, 75 bp, synthetic construct
  source 1..75: mol_type = other DNA
ttctcaaaaggtgacaaaatatcaattgaagagaatgttattgctgaagaatattcaacaatgcctgtaaaaaat

SEQ ID NO: 414909 - DNA, 75 bp, synthetic construct
  source 1..75: mol_type = other DNA
aaaatggtggaattataactactcagatcttccggataataacaagtgtgatgatataaattattttgttgaaga

SEQ ID NO: 414910 - DNA, 75 bp, synthetic construct
  source 1..75: mol_type = other DNA
caaaatcccattaactaccttaccgattggttacctgccctcagccttttcagttatcaaactggcattaaaagt

SEQ ID NO: 414911 - DNA, 75 bp, synthetic construct
  source 1..75: mol_type = other DNA
gttttcttcatatatcttatgtctcttgcagtctacaatgaaactaatattatcatcgatggtactgatttttac

SEQ ID NO: 414912 - DNA, 75 bp, synthetic construct
  source 1..75: mol_type = other DNA
ccaaaaatctgtcgggctgagttactggatattgcgctgactgagcttatcccggcaggtctggtggaggatttc

SEQ ID NO: 414913 - DNA, 75 bp, synthetic construct
  source 1..75: mol_type = other DNA
ggacggcgtttcgtggcacgcacggggaaaccggcacgtttggtgaaacccgcaatgactggctgattagctgta

SEQ ID NO: 414914 - DNA, 75 bp, synthetic construct
  source 1..75: mol_type = other DNA
ggcgcaacggcagcgtatcaccttgccattgacccggcgcgtccgcttcagacgctggtcctgaccggcattctg

SEQ ID NO: 414915 - DNA, 75 bp, synthetic construct
  source 1..75: mol_type = other DNA
tgggggattgtgggctgctatatcgtccggcgatgtttttctgccttactacacaaacttactcaggatcaccac

SEQ ID NO: 414916 - DNA, 75 bp, synthetic construct
  source 1..75: mol_type = other DNA
atcaactctccagaggtgaactgacaattaaccatgatggtttatcgcgtgatgaaggtatggtcacgctggttc

SEQ ID NO: 414917 - DNA, 75 bp, synthetic construct
  source 1..75: mol_type = other DNA
aaagtatattatgttctcttcaattgtttaaatgttaacagggatagtattaggtactggctacagtactactat

SEQ ID NO: 414918 - DNA, 75 bp, synthetic construct
  source 1..75: mol_type = other DNA
ggtaaagaattttaccgccgtgagtggattactgtttttctggcgggaaaatcaggttcagcacaatggcagtga

SEQ ID NO: 414919 - DNA, 75 bp, synthetic construct
  source 1..75: mol_type = other DNA
gaccctggcggcgcgcgagcaggccgacgcggacattgaacaggccgaccaggaacgggatgaggcgctggcgag

SEQ ID NO: 414920 - DNA, 75 bp, synthetic construct
  source 1..75: mol_type = other DNA
tatttagcactgacaattcagtttaatcgttatgcaactaataccgcactgcctagtatgactcaagaacactta

SEQ ID NO: 414921 - DNA, 75 bp, synthetic construct
  source 1..75: mol_type = other DNA
gaggtgacgtggtacggatgggacggcgaccggctgacgacggtacagaccgacaccacgcgtatccagacggta

SEQ ID NO: 414922 - DNA, 75 bp, synthetic construct
  source 1..75: mol_type = other DNA
gggaagatttcttaaaaaaggtggttgatttctctccagaaaaaaagttaatgcttgggttaatctatattaaca

SEQ ID NO: 414923 - DNA, 75 bp, synthetic construct
  source 1..75: mol_type = other DNA
atgttcagattcagttattgaatagtgatggagcttcaagcattttattagggaaagatttcgctggacaggatg

SEQ ID NO: 414924 - DNA, 75 bp, synthetic construct
  source 1..75: mol_type = other DNA
aaaacaacatatatgaaaacgttgttgaaatatattcccgaaaacctgcgaataatcacgatcgaagacaacccg

SEQ ID NO: 414925 - DNA, 75 bp, synthetic construct
  source 1..75: mol_type = other DNA
agcggtggggtagtaccgcgaaaagtaggtacgttgtggggcgaatatggtaatttaaaaacgtatgggaacgct

SEQ ID NO: 414926 - DNA, 75 bp, synthetic construct
  source 1..75: mol_type = other DNA
ttggacggctgggatttatggaattaatgttgacagtaatggagaagtaacattatctgtgctgataagaagtga

SEQ ID NO: 414927 - DNA, 75 bp, synthetic construct
  source 1..75: mol_type = other DNA
cagaaaataacaatagaaatttaacacctactggtatcaaagaacatcctgaatctgtaagagaaaataatagtc

SEQ ID NO: 414928 - DNA, 75 bp, synthetic construct
  source 1..75: mol_type = other DNA
acggtataccagccgggaagcttcacgccgctcctgagaatcgaaacagagaatggtgaacaggcgaaggcgcgg

SEQ ID NO: 414929 - DNA, 75 bp, synthetic construct
  source 1..75: mol_type = other DNA
agccagacggcgggcaccagtacagtcaccaccagcatcaacaacagcagcctgagccggaacgtcacctttgta

SEQ ID NO: 414930 - DNA, 75 bp, synthetic construct
  source 1..75: mol_type = other DNA
aaagacagtatatggcacattttgcggaagcgaatttgaatgcgcaactgaagatggcgggttgggtcgatgcca

SEQ ID NO: 414931 - DNA, 75 bp, synthetic construct
  source 1..75: mol_type = other DNA
gcctgagttcacagataaaacactctccaggaaacccggggcggttcagggtgagggtggtgaaggccatctgag

SEQ ID NO: 414932 - DNA, 75 bp, synthetic construct
  source 1..75: mol_type = other DNA
atagagttaaagctttactttctcctacttttatagcacagcaacatattgtgctttatcaaaaattgacagtgg

SEQ ID NO: 414933 - DNA, 75 bp, synthetic construct
  source 1..75: mol_type = other DNA
cgcgtactgccgacgctgaatttcagccaggcacgcccgaattgcgatctggactatgtgccgaatgagtttcgc

SEQ ID NO: 414934 - DNA, 75 bp, synthetic construct
  source 1..75: mol_type = other DNA
agtaccgtaagccggatggctcaggcatcgtctctctgaaaatcgactggatcatagagcgttaccagctgcctc

SEQ ID NO: 414935 - DNA, 75 bp, synthetic construct
  source 1..75: mol_type = other DNA
catcagatccagcgacgggcagtaaggtgttatcgcttctggaaagcagtaaacgatacctctggtacggtaatg

SEQ ID NO: 414936 - DNA, 75 bp, synthetic construct
  source 1..75: mol_type = other DNA
atgcagtatgcaaagggactgcaggcatcagatccagcgacgggcagtaaggtgttatcgcttctggaaagcagt

SEQ ID NO: 414937 - DNA, 75 bp, synthetic construct
  source 1..75: mol_type = other DNA
cggagctggcggtgatgctggggaggctggagcgggaactgcggcagggcagcgtgagtgaagaaagccagcagt

SEQ ID NO: 414938 - DNA, 75 bp, synthetic construct
  source 1..75: mol_type = other DNA
taacgataatatcgaggatatcaaaccaggactttctgcaacccttgaatcaggagaacgatgtcaggttgtcgt

SEQ ID NO: 414939 - DNA, 75 bp, synthetic construct
  source 1..75: mol_type = other DNA
gaagatgcagaggaaatcaaattttttatccataaaaattatgtgcatcttttttacccttcggaatccggcagt

SEQ ID NO: 414940 - DNA, 75 bp, synthetic construct
  source 1..75: mol_type = other DNA
atccgttgaatccggtcataaatgtagatccgcaaggtttggttgatataaatttataccccgaaagtgatcggt

SEQ ID NO: 414941 - DNA, 75 bp, synthetic construct
  source 1..75: mol_type = other DNA
tcgctcttgaatatatgcgcaacagtatcctgggcgaatatttagatcgaccaggattaacagaaattgcgatta

SEQ ID NO: 414942 - DNA, 75 bp, synthetic construct
  source 1..75: mol_type = other DNA
gagcgtggacgttcacggcaacgtgcgccgcatgagcgacgtctattttaaacccctgcacatgcaggctatgaa

SEQ ID NO: 414943 - DNA, 75 bp, synthetic construct
  source 1..75: mol_type = other DNA
ccggttgacgtgctgctgcgcaaggtactgcactgcgtcgacgtcattgtgagcgtggacgttcacggcaacgtg

SEQ ID NO: 414944 - DNA, 75 bp, synthetic construct
  source 1..75: mol_type = other DNA
ctaatccgccgcatcgatcagtttgttgcggcgcaccccgaatacggcagtcgctccggttttctgtcccgcgtg

SEQ ID NO: 414945 - DNA, 75 bp, synthetic construct
  source 1..75: mol_type = other DNA
gatttgatctcgagggttcttccctttttatcgacgacagtgataattctgaaggcggaaaatatagcttaaaat

SEQ ID NO: 414946 - DNA, 75 bp, synthetic construct
  source 1..75: mol_type = other DNA
aggtgttgtgcaactgagaaattatctagacttgagcaactatgtttgctcttaaaatcattctcaattgccatt

SEQ ID NO: 414947 - DNA, 75 bp, synthetic construct
  source 1..75: mol_type = other DNA
gcagctttacttacgatgataaataccggggccggatggtggcgcaccgtcacacgggccgaccggaaatctgtt

SEQ ID NO: 414948 - DNA, 75 bp, synthetic construct
  source 1..75: mol_type = other DNA
ctcctgaactttggaatcatggtattgctggggcatttcttgactacaatttatatgcctctcattatgcaccac

SEQ ID NO: 414949 - DNA, 75 bp, synthetic construct
  source 1..75: mol_type = other DNA
gcgagtgaatataagatgcaactacctgatgaaaaacgactcgcggatgaactcgttcgaacacaggcggtgtta

SEQ ID NO: 414950 - DNA, 75 bp, synthetic construct
  source 1..75: mol_type = other DNA
ccggtgctgggtgcgaaggtgctgccgggtgagacggacctggcactgcccggcccgctgccgtttattctttcc

SEQ ID NO: 414951 - DNA, 75 bp, synthetic construct
  source 1..75: mol_type = other DNA
aaatggcgctgaaagacggcaatgccttctccaacccgcgtaaaggtaacgagaaagaaattgccgggatcttcc

SEQ ID NO: 414952 - DNA, 75 bp, synthetic construct
  source 1..75: mol_type = other DNA
gggattgaaaccctgaccaatccgctgccgccgatcgtcgcggtgaataccaccgccggtaccgccagcgaagtc

SEQ ID NO: 414953 - DNA, 75 bp, synthetic construct
  source 1..75: mol_type = other DNA
ctaccactacgacagccagcaccgtctggtgttctacacgcggatacagcacggtgagcctctggtggagagccg

SEQ ID NO: 414954 - DNA, 75 bp, synthetic construct
  source 1..75: mol_type = other DNA
ctgccggggcagcagtatgatgaggagtcggggctgtactataaccggaaccggtactatgatccgttgcagggg

SEQ ID NO: 414955 - DNA, 75 bp, synthetic construct
  source 1..75: mol_type = other DNA
attacaataattgaatcgcgtgcggcgaaaactttaggtgagtgtaccagaggagctcatagtggactgcctttt

SEQ ID NO: 414956 - DNA, 75 bp, synthetic construct
  source 1..75: mol_type = other DNA
ggcgggagacccgttatgagtacagtgccgcaggcgacctcaccgctatcgttgccccggacggcagccgcagtg

SEQ ID NO: 414957 - DNA, 75 bp, synthetic construct
  source 1..75: mol_type = other DNA
agcctgaaccgccgtgaagtgctgcacacgcagggcgaagccgggctgaagcgggtggtgaaaaaggaacacgcg

SEQ ID NO: 414958 - DNA, 75 bp, synthetic construct
  source 1..75: mol_type = other DNA
tgaagctgggcgggacgccgcgggtcgagtatacgcgggacaggctgcaccgggagacggtgcgcagcttcggca

SEQ ID NO: 414959 - DNA, 75 bp, synthetic construct
  source 1..75: mol_type = other DNA
taataaaggagaatatatttttatcagaaatagtgtcccgggattgagttcagtatgcataccgtatcatgatta

SEQ ID NO: 414960 - DNA, 75 bp, synthetic construct
  source 1..75: mol_type = other DNA
acgacaggagccgcatccagacgatttatcagccggggagcttcacgccactcatcagagttgaaaccgccaccg

SEQ ID NO: 414961 - DNA, 75 bp, synthetic construct
  source 1..75: mol_type = other DNA
tcagttgctgaccttcactgactgttccggttatgtaacccgctatgaccatgaccgttttggtcaggtgacggc

SEQ ID NO: 414962 - DNA, 75 bp, synthetic construct
  source 1..75: mol_type = other DNA
ctaccactacgacagccagcaccgtctggtgttctacacgcggatacagcacggtgagcctcgggttgagagccg

SEQ ID NO: 414963 - DNA, 75 bp, synthetic construct
  source 1..75: mol_type = other DNA
tcgcattaaaggagggtgagaaagtgaatcgaacaataatagtgacaacagtaatttcagtccctgccaatgctc

SEQ ID NO: 414964 - DNA, 75 bp, synthetic construct
  source 1..75: mol_type = other DNA
ccggtgaacccgctgctgggagcaaaggtgctgccgggcgagacggaccttgcgctgcccggcccgttgccgttt

SEQ ID NO: 414965 - DNA, 75 bp, synthetic construct
  source 1..75: mol_type = other DNA
ccggtgaacccggtgctgggtgcaaaggtgctgccgggcgagacggaccttgcgctgcccggcccgctgccgttt

SEQ ID NO: 414966 - DNA, 75 bp, synthetic construct
  source 1..75: mol_type = other DNA
ggaagccttccgtaaacagcgcgccacgtctttatcttcccctgccggtccccgttctgcttcctcttcttctgc

SEQ ID NO: 414967 - DNA, 75 bp, synthetic construct
  source 1..75: mol_type = other DNA
aggaatcagggctgtactataaccggaaccggtactatgacccgctacaggggaggtatattacacaagacccca

SEQ ID NO: 414968 - DNA, 75 bp, synthetic construct
  source 1..75: mol_type = other DNA
cgtttgtggcttgcgcagtgcgggctgacggtggagcttctggctttacagtttgagccggtttattttcctgtg

SEQ ID NO: 414969 - DNA, 75 bp, synthetic construct
  source 1..75: mol_type = other DNA
gggaggtatattacccaggatccgatagggctgaaggggggctggaacctgtatgcgtatccgctggatcctgtg

SEQ ID NO: 414970 - DNA, 75 bp, synthetic construct
  source 1..75: mol_type = other DNA
ctaccactacgacagccagcaccgtctggtgttctacacgcggatacagcacggtgagccgccggtcgagagccg

SEQ ID NO: 414971 - DNA, 75 bp, synthetic construct
  source 1..75: mol_type = other DNA
ctaccactacgacagccagcaccgtctggtgttctacacgcggatacagcacggtgagccccaggtagagagccg

SEQ ID NO: 414972 - DNA, 75 bp, synthetic construct
  source 1..75: mol_type = other DNA
tacacccggacagcacgctcacggcgtggccggataaccgcatcgcagaggatgcgcactatgtttaccactatg

SEQ ID NO: 414973 - DNA, 75 bp, synthetic construct
  source 1..75: mol_type = other DNA
ggctaccagacccgatatgaatacgaccgcttcggccagatgacggcggtccaccgcgaggaaggcatcagcctt

SEQ ID NO: 414974 - DNA, 75 bp, synthetic construct
  source 1..75: mol_type = other DNA
tacagtaccgcaggcgacctcaccgctatcattgccccggacggtagccgcagtgagacacagtatgatgcgtgg

SEQ ID NO: 414975 - DNA, 75 bp, synthetic construct
  source 1..75: mol_type = other DNA
ggaactgctgtggcagcatgagacgaaacacgcatacaacgagcaggggctggcaaaccgcgtcacgccggacag

SEQ ID NO: 414976 - DNA, 75 bp, synthetic construct
  source 1..75: mol_type = other DNA
cgttatgccctgaaacagtcgggctacacgctctgtgccaccggaccggccaacggggtgctttatcgtcaggcg

SEQ ID NO: 414977 - DNA, 75 bp, synthetic construct
  source 1..75: mol_type = other DNA
gaagtggatgatgtgcagagggtggtctgccacagtctgcgtgacggttaccagttaccggtcagccagctggct

SEQ ID NO: 414978 - DNA, 75 bp, synthetic construct
  source 1..75: mol_type = other DNA
tactaaagaaaatattagtatcactttacaaattaagtttcagacatattgaaagtcttatcttgcttaatgcgg

SEQ ID NO: 414979 - DNA, 75 bp, synthetic construct
  source 1..75: mol_type = other DNA
atattgcttcacctgatatcaataccgaagactttatggccgcagtcgattttattggactacaaccttatgtgg

SEQ ID NO: 414980 - DNA, 75 bp, synthetic construct
  source 1..75: mol_type = other DNA
cttaacgataatctggcaaaaatcgttggcgtcgcgttggcgtggttagcgttcgccattctgcgtccaggatcg

SEQ ID NO: 414981 - DNA, 75 bp, synthetic construct
  source 1..75: mol_type = other DNA
gcaggtgatggcgggaccggcctggcaactggaggtggatgacgttcagcgtgtggtctgccacagcctgcgggc

SEQ ID NO: 414982 - DNA, 75 bp, synthetic construct
  source 1..75: mol_type = other DNA
atatcttctatcttctgcttcatcaaaaaacgctatccagacactgcagaatttcttcctatgttcagcactgtt

SEQ ID NO: 414983 - DNA, 75 bp, synthetic construct
  source 1..75: mol_type = other DNA
atagcaagggtggggagaaaatcatcagacccgtgcctgaatctatacagccatttattttacagctacgccaaa

SEQ ID NO: 414984 - DNA, 75 bp, synthetic construct
  source 1..75: mol_type = other DNA
aacacatttacccttatattgggaaaatggcgctcgctgactgcgaaacccgttactggcttgactgctttgaca

SEQ ID NO: 414985 - DNA, 75 bp, synthetic construct
  source 1..75: mol_type = other DNA
gctataccagtacattattgtttcagtcgtacagggctaaatccattttctgatgttatcaacacctataaattg

SEQ ID NO: 414986 - DNA, 75 bp, synthetic construct
  source 1..75: mol_type = other DNA
attgtcaataatgctaatactagtataaaccaggcggttaatatagctaacagtttaaacgatacggtcagtaaa

SEQ ID NO: 414987 - DNA, 75 bp, synthetic construct
  source 1..75: mol_type = other DNA
gtggactatgcgaactattacatgaccaaacgcggctatcatccacgagccgtcaactctggtaactcatggtcc

SEQ ID NO: 414988 - DNA, 75 bp, synthetic construct
  source 1..75: mol_type = other DNA
gtatacgagccgggaagcttcacaccgctcatccgcatcgaaacagacaacggcgagcgggagaaaacgcagcgg

SEQ ID NO: 414989 - DNA, 75 bp, synthetic construct
  source 1..75: mol_type = other DNA
aactggtgcgcatcagcggcccgcaggagtgccgggagtaccgttacagcggcacgggaaggctgacgggcgtcc

SEQ ID NO: 414990 - DNA, 75 bp, synthetic construct
  source 1..75: mol_type = other DNA
agctggcggtgatgctggggaggctggagcgggaactgcggcagggcagcgtgagtgaagaaagccagcagtggc

SEQ ID NO: 414991 - DNA, 75 bp, synthetic construct
  source 1..75: mol_type = other DNA
gccgggcactgaggacgtactgccagcgccgctgccgccgtaccgggtgcttaccgggctggcggaccgcttcgg

SEQ ID NO: 414992 - DNA, 75 bp, synthetic construct
  source 1..75: mol_type = other DNA
cgtaccggctgccggggcagcagtatgataaggagtcggggctgtactacaaccggaaccggtactacgatccgt

SEQ ID NO: 414993 - DNA, 75 bp, synthetic construct
  source 1..75: mol_type = other DNA
agccagtccacgttccggtatgacccggtggacaggctgactgaacagcgcggttttgacggccggacgcaacgt

SEQ ID NO: 414994 - DNA, 75 bp, synthetic construct
  source 1..75: mol_type = other DNA
aagaccacatcaccatcaccgacagcctgaaccgccgtgaagtgctgcacacgcagggcgaagccgggctgaagc

SEQ ID NO: 414995 - DNA, 75 bp, synthetic construct
  source 1..75: mol_type = other DNA
cgcaacggcgatgtcacccgctacagttatgataatccacacagtgaattaccctctgtaacagaagatgcgacg

SEQ ID NO: 414996 - DNA, 75 bp, synthetic construct
  source 1..75: mol_type = other DNA
cgtgagttgtggctacctgcctgtacgactttcctgaacggcattgaaacctcactgagggtggcgatgaagctg

SEQ ID NO: 414997 - DNA, 75 bp, synthetic construct
  source 1..75: mol_type = other DNA
gctgggccgccggacgggtaaacgggtgtggcggcgggtacgtgacctgacggggtggatgtcgctgtcgcgtaa

SEQ ID NO: 414998 - DNA, 75 bp, synthetic construct
  source 1..75: mol_type = other DNA
gtcactccgtctgccggggcagcagtatgatgaggagtcggggctgtactataaccggaaccggtactacgatcc

SEQ ID NO: 414999 - DNA, 75 bp, synthetic construct
  source 1..75: mol_type = other DNA
gacgccgtgggcaggctcaggacacagacggatgccgcaggccggacaacagaatacagcccggatgtggtgacg

SEQ ID NO: 415000 - DNA, 75 bp, synthetic construct
  source 1..75: mol_type = other DNA
ctggcgcggcgtctcgagcaatcacgctggtcggtgtttctccgttgatcaccattaacaccgtctccggcgatg

SEQ ID NO: 415001 - DNA, 75 bp, synthetic construct
  source 1..75: mol_type = other DNA
cgataaccgcctgctgtacggcggcggcgtggtctacggcgcgcgcgacccggatgacgttgagcgtcttgtggt

SEQ ID NO: 415002 - DNA, 75 bp, synthetic construct
  source 1..75: mol_type = other DNA
cgcccgtatgctcggcagcatgatgttcgagggtggcgagatcatccgcgaacgtatcaaacgttatcagattga

SEQ ID NO: 415003 - DNA, 75 bp, synthetic construct
  source 1..75: mol_type = other DNA
tcaacgggcaaaattacaccaccacagccgatgcatccgggaactggagcgtgaccgttccggcgtcacgggtga

SEQ ID NO: 415004 - DNA, 75 bp, synthetic construct
  source 1..75: mol_type = other DNA
gcggcgggtgatgtggtcacggttaacctgaacggtaaaaactacaccaccacgctggacgcctccggtaactgg

SEQ ID NO: 415005 - DNA, 75 bp, synthetic construct
  source 1..75: mol_type = other DNA
cgccttgcctgccgtcaccattaacgcggtggcgactgacgatattatcaatgccgacgagtcggacaatgcgca

SEQ ID NO: 415006 - DNA, 75 bp, synthetic construct
  source 1..75: mol_type = other DNA
gggggcgttaaggatcgctacgcctggaccagcgtagacgatgacgggatgattaaaatgcagtcagagttttct

SEQ ID NO: 415007 - DNA, 75 bp, synthetic construct
  source 1..75: mol_type = other DNA
cctggatgcttccgccgaaagcctgtatcagcaactagccaaactgcgccgccaggtggcccaggctttaggcgg

SEQ ID NO: 415008 - DNA, 75 bp, synthetic construct
  source 1..75: mol_type = other DNA
cacaaatcacatgaaggcgtcgagcgctgttttccgtgatgcagagatccccgtgttccatgagaccggaatggt

SEQ ID NO: 415009 - DNA, 75 bp, synthetic construct
  source 1..75: mol_type = other DNA
cccggcgggcgcacgctgcgagtaccgtttaccgcgatgggcgcagcctattacagcctgcgcgatcgtctgggc

SEQ ID NO: 415010 - DNA, 75 bp, synthetic construct
  source 1..75: mol_type = other DNA
tactgtgtggaagactgtaactatctgcttgattactaccgtcttaccgccgataaccgcctgctgtacggcggc

SEQ ID NO: 415011 - DNA, 75 bp, synthetic construct
  source 1..75: mol_type = other DNA
tttgacgtggtggttcttgaagcctcacgcatcggctttggcgccagcggacgcaacggcgggcagcttgtgaac

SEQ ID NO: 415012 - DNA, 75 bp, synthetic construct
  source 1..75: mol_type = other DNA
agtgctggcggatggctcatggagcgtcggcattccggcggcagatgtcagcgcctggcctgcggggacggtcac

SEQ ID NO: 415013 - DNA, 75 bp, synthetic construct
  source 1..75: mol_type = other DNA
aacgtagaagcagggcaaaccgtcactgtcacctttggcggtaaaaattacaccgccagcgtggcgggcgatggt

SEQ ID NO: 415014 - DNA, 75 bp, synthetic construct
  source 1..75: mol_type = other DNA
cggatctcagcaatctgaccgccagccagtataccgtcagcgcctcggtaagcgataaagcaggcaacccggcat

SEQ ID NO: 415015 - DNA, 75 bp, synthetic construct
  source 1..75: mol_type = other DNA
ctacaccgccaccgtagcaggcgatggtagctggacaaccaccgtccctgccgccgatctcagcgcgttacgcga

SEQ ID NO: 415016 - DNA, 75 bp, synthetic construct
  source 1..75: mol_type = other DNA
atcgtttccggcgatgacattatcaacgccgcagaaaaaggctcgccgctgacgctgactggcaccaccctgggc

SEQ ID NO: 415017 - DNA, 75 bp, synthetic construct
  source 1..75: mol_type = other DNA
aaagcaggcaacccggcaagcgccgaccacgcgctggcggtggacgttaccgcgccggttctcaccattaacacc

SEQ ID NO: 415018 - DNA, 75 bp, synthetic construct
  source 1..75: mol_type = other DNA
atttactggtcgacagcggcctgccgggcgtcaccatcaacaccgtggcgggcgacgatattatcaacgccgcag

SEQ ID NO: 415019 - DNA, 75 bp, synthetic construct
  source 1..75: mol_type = other DNA
gagctatgccgatggtcgcacactgactgacggcacctggaactacacggtgcgggtggtggatctggcggggaa

SEQ ID NO: 415020 - DNA, 75 bp, synthetic construct
  source 1..75: mol_type = other DNA
cgctttctgccggtgagttcgcgcaaatcagcattgatggcggcaccacctggcagaatctttcggtaagcggtt

SEQ ID NO: 415021 - DNA, 75 bp, synthetic construct
  source 1..75: mol_type = other DNA
ggtgacgatattatcaacaacgccgagcagcttgccgggcagaccatcagcggcaccaccaccgccgaagtaggc

SEQ ID NO: 415022 - DNA, 75 bp, synthetic construct
  source 1..75: mol_type = other DNA
caatgtgcaggcagacgggagctggagcgtcagcgtaccaaccggcgatttagctagccttaccgccagctcgta

SEQ ID NO: 415023 - DNA, 75 bp, synthetic construct
  source 1..75: mol_type = other DNA
ctctgaactggacctacagcgacagcgggctggtgagcggtgcctatacctacagcgcgcgagtggtggatttgg

SEQ ID NO: 415024 - DNA, 75 bp, synthetic construct
  source 1..75: mol_type = other DNA
ccaacggcaccaccacctggcaggtgcgggtggtcgatctggcgggcaacgttggcgcaaccggcagccagtcgg

SEQ ID NO: 415025 - DNA, 75 bp, synthetic construct
  source 1..75: mol_type = other DNA
aacgcaggtacgctggtaggtaactccaccacgtcgaacagcggcggtagcgccacggtgggcggggcggtgacg

SEQ ID NO: 415026 - DNA, 75 bp, synthetic construct
  source 1..75: mol_type = other DNA
gccagtctgctggctgatgcggcgttgtgtttggttgagatttcagagattcaggccgtttcgctgttaatgggg

SEQ ID NO: 415027 - DNA, 75 bp, synthetic construct
  source 1..75: mol_type = other DNA
tgagatcgccagccgcatggctgaaatgctggggacggaatgcgaagccctgggacagaatgtttccgacatgaa

SEQ ID NO: 415028 - DNA, 75 bp, synthetic construct
  source 1..75: mol_type = other DNA
aaaggttttcggggtctggtcgccgcgtctgggggatgcctcccgtatttgcacccgtctggttaagtggaaaat

SEQ ID NO: 415029 - DNA, 75 bp, synthetic construct
  source 1..75: mol_type = other DNA
acggtgaccgatgctgctggtaataccggtacggcgactcataacatcactctggtgggcgtcgcgccgcaagtg

SEQ ID NO: 415030 - DNA, 75 bp, synthetic construct
  source 1..75: mol_type = other DNA
atgcaggagaaatattcgctgcgggactgtggcttcatattgatggtctggggcggtttgttcctcgccattctt

SEQ ID NO: 415031 - DNA, 75 bp, synthetic construct
  source 1..75: mol_type = other DNA
gctaaatacatttcgaagaatatcgacggccacgcgctggccggtgaactggacgacgaaagcggcaagccgctg

SEQ ID NO: 415032 - DNA, 75 bp, synthetic construct
  source 1..75: mol_type = other DNA
gatccgctgggattagcattttgccccagaatgcagaagacattgcaaaaattaactgacaaggctgttgctgat

SEQ ID NO: 415033 - DNA, 75 bp, synthetic construct
  source 1..75: mol_type = other DNA
aagagacccggctggcgtacacgccgcaggggctgctgtcggggatattccgccaggatgaacggcgtctgggca

SEQ ID NO: 415034 - DNA, 75 bp, synthetic construct
  source 1..75: mol_type = other DNA
ttttccggcagaagccacatggggcgggctggttccgtcactggtacgggagtaccgttacgacagcgcgggtaa

SEQ ID NO: 415035 - DNA, 75 bp, synthetic construct
  source 1..75: mol_type = other DNA
tccggcaagaaatggaagccgctaaagccacggcggcagcctgggccaatacgccagaaggtgtcgaagcacgtt

SEQ ID NO: 415036 - DNA, 75 bp, synthetic construct
  source 1..75: mol_type = other DNA
aatctttaccttgcaccctttcgtatgccggtttttttctttatctctggctatttgattcgccgctatatcgac

SEQ ID NO: 415037 - DNA, 75 bp, synthetic construct
  source 1..75: mol_type = other DNA
cgaatgaaacacagatggtcggccttgcccccaaacacacggcggtgcaaaatggaatggcagaaaacttcgtca

SEQ ID NO: 415038 - DNA, 75 bp, synthetic construct
  source 1..75: mol_type = other DNA
agctcggcgggcaacggcaacactgccaacgtcagcactggcacggtaacggtcaacgcggcgattgattacact

SEQ ID NO: 415039 - DNA, 75 bp, synthetic construct
  source 1..75: mol_type = other DNA
atcgcgggcgatgatgtgatcaacgcgacggaaaaaggatcgaatctggcgctttccggcaccagcgatcagcct

SEQ ID NO: 415040 - DNA, 75 bp, synthetic construct
  source 1..75: mol_type = other DNA
gtcaccgacagcgcaggtaacagcaattccgccagccataatgtgcaggtgaataccgcgctacctggtgtcacc

SEQ ID NO: 415041 - DNA, 75 bp, synthetic construct
  source 1..75: mol_type = other DNA
cggtgactgtgaaattgggcgctcatgtcctgacgggcgtcgtgctggcagacggtagctggaatgtggcgctgg

SEQ ID NO: 415042 - DNA, 75 bp, synthetic construct
  source 1..75: mol_type = other DNA
ggcgcaggtgctcaccatcgccagcattagcaccgacacggggagttcggcaactgactttatcaccagcgatac

SEQ ID NO: 415043 - DNA, 75 bp, synthetic construct
  source 1..75: mol_type = other DNA
cttgcggtgagcggcacgctgggggcgacgctttctgccggtgagttcgcgcaaatcagcattgatggcggcacc

SEQ ID NO: 415044 - DNA, 75 bp, synthetic construct
  source 1..75: mol_type = other DNA
gtgattaacgccgctgaaaaaggcgcggcgttaacactctccggcagcacctctggcgtcgaagccggacaaacg

SEQ ID NO: 415045 - DNA, 75 bp, synthetic construct
  source 1..75: mol_type = other DNA
gagcgtgaatgttccagcgggggatttggcaaccttgccagacggcgcggcgaacgtgcaggccagcgtcagcag

SEQ ID NO: 415046 - DNA, 75 bp, synthetic construct
  source 1..75: mol_type = other DNA
ggcgttaacgctcaccggcagcacttctggtgtcgaagccggacaaacggtcaccgtcacctttggcggcaaaac

SEQ ID NO: 415047 - DNA, 75 bp, synthetic construct
  source 1..75: mol_type = other DNA
aacacctttgcgggcgacaacattgtcaacaacgccgaagcggcggcagatcaaactctgagtggcgtcgtggtg

SEQ ID NO: 415048 - DNA, 75 bp, synthetic construct
  source 1..75: mol_type = other DNA
acaatcctacctttacaccaacgttggtggtgccagtaactggacgcagtcggctctcggcggtagccagagcgg

SEQ ID NO: 415049 - DNA, 75 bp, synthetic construct
  source 1..75: mol_type = other DNA
gaacagcagcagccgttaacccttaacggctcgaccagcgcggaagtagggcagacggtcaccgtcacctttggc

SEQ ID NO: 415050 - DNA, 75 bp, synthetic construct
  source 1..75: mol_type = other DNA
aacgtgcaggtcaataccgcgctgccgggcgtcaccattaatccggtggcgacggacgacattattaacgccgcc

SEQ ID NO: 415051 - DNA, 75 bp, synthetic construct
  source 1..75: mol_type = other DNA
acggcaaactgtgggaaggctggacggaaatgtccgtcagccgttccctgaaggcgattgccggtgaatttgaac

SEQ ID NO: 415052 - DNA, 75 bp, synthetic construct
  source 1..75: mol_type = other DNA
agaagatttagattctaaatatctctttgtagctgatggtggtaacttccgtttgaatttagataatactggtgc

SEQ ID NO: 415053 - DNA, 75 bp, synthetic construct
  source 1..75: mol_type = other DNA
cgcatgacatcactaataatggctcggatgagctagttgttatgctttgggcaaatgaaatatttaatcgttctg

SEQ ID NO: 415054 - DNA, 75 bp, synthetic construct
  source 1..75: mol_type = other DNA
gtcgccggaaacgtggttactatcaaggagaagaaaacgagcaagctgaaggtctttccgattaacaaccgggca

SEQ ID NO: 415055 - DNA, 75 bp, synthetic construct
  source 1..75: mol_type = other DNA
accgaaagtctgacccagcagcgccgcagcaaggccaccggcggtggcggagacgccctgatgacgaactgctga

SEQ ID NO: 415056 - DNA, 75 bp, synthetic construct
  source 1..75: mol_type = other DNA
ataacggttctggcgctggttccgcctgaatcactggatatgccggaaatgaaagcgaagacgaagaaaacaaag

SEQ ID NO: 415057 - DNA, 75 bp, synthetic construct
  source 1..75: mol_type = other DNA
tatttcgatgagagcgatcaacaaaagatacgagatgaactatctctctttacttggcattcaaaccaagaaaaa

SEQ ID NO: 415058 - DNA, 75 bp, synthetic construct
  source 1..75: mol_type = other DNA
accactgcgaacagggcaaaattgttattccccggatgcgctttgagccttccatcgacaacgaagagcagcata

SEQ ID NO: 415059 - DNA, 75 bp, synthetic construct
  source 1..75: mol_type = other DNA
aattaaggacaagaggttctgtgcattcagaccgatggactggctcagtcgctgatcttatcgatatgcatacta

SEQ ID NO: 415060 - DNA, 75 bp, synthetic construct
  source 1..75: mol_type = other DNA
tgcggacctgctgggtaaaggtggtcttgtcagttgtcgttttaaactcgatggcgcgcttacggctaatcagta

SEQ ID NO: 415061 - DNA, 75 bp, synthetic construct
  source 1..75: mol_type = other DNA
ggcgtcacactggaaggtaatgccggtcataacctgctggcgtcgttttacgtacagagcgatgccacagacctt

SEQ ID NO: 415062 - DNA, 75 bp, synthetic construct
  source 1..75: mol_type = other DNA
ctttaccttcttaaaaacaccttaagtacattagatgcagcatccagaacacttatacctacccttcctccaggc

SEQ ID NO: 415063 - DNA, 75 bp, synthetic construct
  source 1..75: mol_type = other DNA
tacaggactcgttttttccgttttaggtacatatatgttttttatcgcagataaaaacatatatgttatatcatt

SEQ ID NO: 415064 - DNA, 75 bp, synthetic construct
  source 1..75: mol_type = other DNA
atagcgaaattgggttatcttcgctaattgattacctggagttgataagcccttattccagattaacccaaagcc

SEQ ID NO: 415065 - DNA, 75 bp, synthetic construct
  source 1..75: mol_type = other DNA
atttagaatatataagagaatggagtatatggtttgatttaaaaataattttcttgacaatatttaagggtttta

SEQ ID NO: 415066 - DNA, 75 bp, synthetic construct
  source 1..75: mol_type = other DNA
tatatttggtatagcgctaatggcatattctactaatatgaagatgtcatttcatcttctttttgaatggtatat

SEQ ID NO: 415067 - DNA, 75 bp, synthetic construct
  source 1..75: mol_type = other DNA
atgcgatcccaacgttctgcgggatctctgaagggatcaaagggtataccactacgcttgcgacaggggaaaact

SEQ ID NO: 415068 - DNA, 75 bp, synthetic construct
  source 1..75: mol_type = other DNA
gaaacaggcatgatcgtcggtgtttcgtccgcgggaacagaggcctttttgccgctgttcgaacagcgcatggaa

SEQ ID NO: 415069 - DNA, 75 bp, synthetic construct
  source 1..75: mol_type = other DNA
ttattaccgggctggggattttgtcctcactggcggaaaatattcaggatttccgggaagcattattaaataaaa

SEQ ID NO: 415070 - DNA, 75 bp, synthetic construct
  source 1..75: mol_type = other DNA
atcatttattgctacctgattgtttagtatttactttgctgtggacaggactgttaataagttgcttagagttat

SEQ ID NO: 415071 - DNA, 75 bp, synthetic construct
  source 1..75: mol_type = other DNA
atcagcagccattggtagtaatttctgttctgtttctgttctcagttttactttgtctgacagttattgatcttg

SEQ ID NO: 415072 - DNA, 75 bp, synthetic construct
  source 1..75: mol_type = other DNA
tataaaaaactgccacgtgataccttttggcccggcaatttccatttctgggtttgttatatatttattcatcgc

SEQ ID NO: 415073 - DNA, 75 bp, synthetic construct
  source 1..75: mol_type = other DNA
ttcccacccgccaacaggagcaaatcctgtggtatctgctgcgcgctctgcggtgtttttccggggcgatggatg

SEQ ID NO: 415074 - DNA, 75 bp, synthetic construct
  source 1..75: mol_type = other DNA
aagatgagtggaccgggcttgtcgaacaagcagatccgctcattcgtgctaaagccgcggaaattgccgttgcgc

SEQ ID NO: 415075 - DNA, 75 bp, synthetic construct
  source 1..75: mol_type = other DNA
gcgaatatgtttgagcgtgaggtgaaaaatgcgatgcgcagatggcgttatgagccgggtaagccaggcagtggg

SEQ ID NO: 415076 - DNA, 75 bp, synthetic construct
  source 1..75: mol_type = other DNA
aatcggctaaagaaagcttattaaggatggttggttatggagtacctaatttaaatcgagcaatgcatagtgcgg

SEQ ID NO: 415077 - DNA, 75 bp, synthetic construct
  source 1..75: mol_type = other DNA
ttgcatttttctgcacggtatatgggaacgggacttagcgcaaccgcaggtcaggcaaatgctgatgctacgttt

SEQ ID NO: 415078 - DNA, 75 bp, synthetic construct
  source 1..75: mol_type = other DNA
attttctggtcaggcggatgcaatcaatgataatttattggccattgcatccagtactaatacaacaacagcaac

SEQ ID NO: 415079 - DNA, 75 bp, synthetic construct
  source 1..75: mol_type = other DNA
tgaccggcatcaacgaggcgttgtgtaccggcacgccctgattttacagataacaggacgcacctgccgctggta

SEQ ID NO: 415080 - DNA, 75 bp, synthetic construct
  source 1..75: mol_type = other DNA
ccacgcacgccctgaccgtcgataccgttgcgcccacggtgaccatcgccacggtggcgggtgacgatattatca

SEQ ID NO: 415081 - DNA, 75 bp, synthetic construct
  source 1..75: mol_type = other DNA
gcggaagtagggcagacggtcaccgtcacctttggcgacaaaacctataccgccacggttgccgccaatggcacc

SEQ ID NO: 415082 - DNA, 75 bp, synthetic construct
  source 1..75: mol_type = other DNA
agcgttccggcagccgatctccaggcgctgggcaatggcgatttgaccattaacgcctcggttaccaacgcgaat

SEQ ID NO: 415083 - DNA, 75 bp, synthetic construct
  source 1..75: mol_type = other DNA
ggtaaacgacaaggcgggtaacccggcgaccgcaattcacggtctggcggtggatctcactgttccggtattaac

SEQ ID NO: 415084 - DNA, 75 bp, synthetic construct
  source 1..75: mol_type = other DNA
tgacgccagcgcgccgacgctcaccattaacaccatcgccagcgacgatatccttaacgccacagaggcgggaaa

SEQ ID NO: 415085 - DNA, 75 bp, synthetic construct
  source 1..75: mol_type = other DNA
ggggaagcgggggatgtcgtcaccgtcacactaaacagtaaaacctataccacgacgctggacgcttccggcaac

SEQ ID NO: 415086 - DNA, 75 bp, synthetic construct
  source 1..75: mol_type = other DNA
catgggaaggcaccgccgacaccgatcgcattgatatccgcgagttgttacagggcagcggctacaccggcaacg

SEQ ID NO: 415087 - DNA, 75 bp, synthetic construct
  source 1..75: mol_type = other DNA
cgctggcggacggcaacgcctacgtgattaacgcctcggtgagcaatgccattggcaacaccggtagcagtaatc

SEQ ID NO: 415088 - DNA, 75 bp, synthetic construct
  source 1..75: mol_type = other DNA
atcaccgtcacgttaaacagtaaaacctacaccacgacgctggacgcttccggcaactggagcgtcggcgttccg

SEQ ID NO: 415089 - DNA, 75 bp, synthetic construct
  source 1..75: mol_type = other DNA
tacaccctcggcagcgccgatgtcaccgcgctggcggacggcaatgcctatgtgattaacgcctcggtgagcaac

SEQ ID NO: 415090 - DNA, 75 bp, synthetic construct
  source 1..75: mol_type = other DNA
caggcgatgatgtggtcaatattatcgagcatggtcaggctctggtggtcaccggtagcagtaccggactggcgg

SEQ ID NO: 415091 - DNA, 75 bp, synthetic construct
  source 1..75: mol_type = other DNA
ggcgcctggtcagtgtttatccccggacaacaattttccggcctgagcaacggcagctacaccatcggcgctacg

SEQ ID NO: 415092 - DNA, 75 bp, synthetic construct
  source 1..75: mol_type = other DNA
gatgtggtgaatggctttacggtagggacatgggaaggcaccgccgacaccgatcgcattgatattcgtgaactg

SEQ ID NO: 415093 - DNA, 75 bp, synthetic construct
  source 1..75: mol_type = other DNA
cgggtagctggcgtaccacttatctggcttcaccccgaaaaaagaacacttgatagcgacgagttctcaaagcgc

SEQ ID NO: 415094 - DNA, 75 bp, synthetic construct
  source 1..75: mol_type = other DNA
cagccagggaagagctaactacggctccctgttattcaacaccaacggcgtgctgggcagtccggtggcggtggg

SEQ ID NO: 415095 - DNA, 75 bp, synthetic construct
  source 1..75: mol_type = other DNA
ttgacggacgcacgctcaccaacggcaccaccacctggcaggtgcgggtggtcgatctggcgggcaacgttggcg

SEQ ID NO: 415096 - DNA, 75 bp, synthetic construct
  source 1..75: mol_type = other DNA
ttggcggtaaaacctacactgcaagcgtcgccgccaatggaagctggagcgtaacggttccggcggcagatctgg

SEQ ID NO: 415097 - DNA, 75 bp, synthetic construct
  source 1..75: mol_type = other DNA
aaaccatcgccattgctggcatcagcgatgacactgggttaagtagcagcgattttgttactcgcgacaccacgc

SEQ ID NO: 415098 - DNA, 75 bp, synthetic construct
  source 1..75: mol_type = other DNA
aataccgttgccagcgacaatatcgttaacgccagcgaagctgatacgggcgtgacggtgagcggcagcaccacc

SEQ ID NO: 415099 - DNA, 75 bp, synthetic construct
  source 1..75: mol_type = other DNA
gcaacggctcagacgtggtgaatggctttacggtagggacatgggaaggcaccgccgacaccgatcgcattgata

SEQ ID NO: 415100 - DNA, 75 bp, synthetic construct
  source 1..75: mol_type = other DNA
gatgatgtggtcaatatcatcgaacacagtcaggcgcaggtgatcaccggtagcagctccggctttgcggcgggc

SEQ ID NO: 415101 - DNA, 75 bp, synthetic construct
  source 1..75: mol_type = other DNA
cagcagatgtgggcaactggcctgcggggacggtgaatatcacggtttcaggtgctactagcgcaggaaacccgg

SEQ ID NO: 415102 - DNA, 75 bp, synthetic construct
  source 1..75: mol_type = other DNA
cagcctgagttcacagataaaacactctccaggaaaaccggggcggttcagccgttgtatgtcggtctgtatatt

SEQ ID NO: 415103 - DNA, 75 bp, synthetic construct
  source 1..75: mol_type = other DNA
gaacagaaaaaacattaaagcaaaaggttgcttttgctcagcttgaacttaaccgccttaagtctctggaaaaat

SEQ ID NO: 415104 - DNA, 75 bp, synthetic construct
  source 1..75: mol_type = other DNA
cagctatgacgaggcgcatgcttttgacagagaaatgacggcctgtcgtaaagcgggtggagactgcggcgatat

SEQ ID NO: 415105 - DNA, 75 bp, synthetic construct
  source 1..75: mol_type = other DNA
tgcgctctattacgctgttaattgatggtgaccggaatgaattgtcgaatctattagatactgcgtttgagatta

SEQ ID NO: 415106 - DNA, 75 bp, synthetic construct
  source 1..75: mol_type = other DNA
tatcgctaggatggatagtgatgatttgtctagaccaaatagaattgaaaagcaagtgttgtttatgacatcaaa

SEQ ID NO: 415107 - DNA, 75 bp, synthetic construct
  source 1..75: mol_type = other DNA
tcgaaaaggaatcaagaaggctttaagtgaaattaaagttagatttcataacatgatatcgttgaaacaagttag

SEQ ID NO: 415108 - DNA, 75 bp, synthetic construct
  source 1..75: mol_type = other DNA
gaacagaaaaaacattaaagcaaaaggtggcatttgctcaacttgaacttaaccgacttaagtctctggaaaaat

SEQ ID NO: 415109 - DNA, 75 bp, synthetic construct
  source 1..75: mol_type = other DNA
ttgttgatgctttaacaaatgaagttcgctatgaagtttcacaaaattggcttgatacaggaaacctggcctttc

SEQ ID NO: 415110 - DNA, 75 bp, synthetic construct
  source 1..75: mol_type = other DNA
aattcgttatgaccatcactactatcggtatcgatcttgctaaaaatgtgttcgctgttcatggggttgaccaaa

SEQ ID NO: 415111 - DNA, 75 bp, synthetic construct
  source 1..75: mol_type = other DNA
ccagacaacgcgcttattcggcttagggaaaacaaaagataataaaaatatcggtagttatgccgtgttaattga

SEQ ID NO: 415112 - DNA, 75 bp, synthetic construct
  source 1..75: mol_type = other DNA
atgaatcatgagtatactgcaaagaaagatattgtggcaataaaaaggaatatggaagagaaaaaactagctaga

SEQ ID NO: 415113 - DNA, 75 bp, synthetic construct
  source 1..75: mol_type = other DNA
tcggatatggaagaaggcgaaataaaacagaacgtcacattatttgatgtgttgaattatgagtataattccaag

SEQ ID NO: 415114 - DNA, 75 bp, synthetic construct
  source 1..75: mol_type = other DNA
tttgttcgccagagcccgggggtgcagggggcggcggcgattggccgccccctgcgcgctccttgcgccagtggc

SEQ ID NO: 415115 - DNA, 75 bp, synthetic construct
  source 1..75: mol_type = other DNA
tataaaagagttaatttattggcaaagcataatcaggttaatgttttagaaaacaaaataaatagaggtttggcc

SEQ ID NO: 415116 - DNA, 75 bp, synthetic construct
  source 1..75: mol_type = other DNA
gcctgtatgaatctcagctttatgcctggcgcagtaaacagcagcaacaaatgagttcgtcagagcgcgaaagcg

SEQ ID NO: 415117 - DNA, 75 bp, synthetic construct
  source 1..75: mol_type = other DNA
aatcagatatcagtgagagcagaaagagcaggtataaacctgttaacgcttccacaggacaataaccacctgaca

SEQ ID NO: 415118 - DNA, 75 bp, synthetic construct
  source 1..75: mol_type = other DNA
accacccgacagggcgtcctgtaaactggtttcatcagaaaaaaaacaaccgtccggactgggacggaatgtact

SEQ ID NO: 415119 - DNA, 75 bp, synthetic construct
  source 1..75: mol_type = other DNA
ctggttgtgcggtaacgcagtcggtgacttccctctgctagagcagtatctcaaccatattcacagtgacgagac

SEQ ID NO: 415120 - DNA, 75 bp, synthetic construct
  source 1..75: mol_type = other DNA
gcaattcagtaatgctattcgtcatgagattagcgcggagttggatgatgtgtcgctggtgagggaacttaggga

SEQ ID NO: 415121 - DNA, 75 bp, synthetic construct
  source 1..75: mol_type = other DNA
cgaaaatgaacgtggcaaatccagtgtaaaatacttgccactgttctcttttccactgccaaagtcattctttga

SEQ ID NO: 415122 - DNA, 75 bp, synthetic construct
  source 1..75: mol_type = other DNA
tgactcactgttgattaactggaactgtgcagcctcgaaatccccaccgaagacccctgatgaaaagcaggatac

SEQ ID NO: 415123 - DNA, 75 bp, synthetic construct
  source 1..75: mol_type = other DNA
cgtgcgggtgaaatttaactgggaccgttataacccgtcaaaccaggacagttcatgctggatccgtgtggcaca

SEQ ID NO: 415124 - DNA, 75 bp, synthetic construct
  source 1..75: mol_type = other DNA
aaattactttaaacacacctgctaaaggtggtgaggcattaaagtggtatgcctccctgcctgttgttgttagtt

SEQ ID NO: 415125 - DNA, 75 bp, synthetic construct
  source 1..75: mol_type = other DNA
ggttagatcccgataaccccttaattatggcagtggttgtatcaggtcgagtacttggggtgaatgaaagccatg

SEQ ID NO: 415126 - DNA, 75 bp, synthetic construct
  source 1..75: mol_type = other DNA
tcagtgtgaggatggcgatcatgtggagaacatgacaacagcgcggacaatgcagggatatgctgttcggttatg

SEQ ID NO: 415127 - DNA, 75 bp, synthetic construct
  source 1..75: mol_type = other DNA
atgaataaaaatacgcacttctcccccgaagtccgtcagcgggcgatccatatggttctggaaagtcaggatgat

SEQ ID NO: 415128 - DNA, 75 bp, synthetic construct
  source 1..75: mol_type = other DNA
gcaccgagttctttatcgtagcgctgttcattattcttatctgcgttttgctcttctttctgagaagttctgata

SEQ ID NO: 415129 - DNA, 75 bp, synthetic construct
  source 1..75: mol_type = other DNA
cgacagaaattacacattgatgtggccgcagatcctctgacggctctgtccggggaagataaatggaatattgag

SEQ ID NO: 415130 - DNA, 75 bp, synthetic construct
  source 1..75: mol_type = other DNA
atgcgcgagtcgctgcgtaactggcgcttttatcaggagttttctgtatcaatcggctcggccatgcgcgcgcct

SEQ ID NO: 415131 - DNA, 75 bp, synthetic construct
  source 1..75: mol_type = other DNA
tgagaaatataaacaccatcattagaaaagttctaaacaccaacaaggaattcatttcttctggtgcaaatacaa

SEQ ID NO: 415132 - DNA, 75 bp, synthetic construct
  source 1..75: mol_type = other DNA
aggctttgagtctgaacagtatgatacttttgaggacgcttatcgtaagcaaaagtcatcacagagcaagtggga

SEQ ID NO: 415133 - DNA, 75 bp, synthetic construct
  source 1..75: mol_type = other DNA
tgcagttagctcatgtggataaaaacgccatcaggggtacctataatcatgcccagtatctcgatggtcgccgtg

SEQ ID NO: 415134 - DNA, 75 bp, synthetic construct
  source 1..75: mol_type = other DNA
tagctgctttatattgtgtggctaaaatatttccagatggagaaaatattttaatatataaagtaaatataatta

SEQ ID NO: 415135 - DNA, 75 bp, synthetic construct
  source 1..75: mol_type = other DNA
ctcgccgcccgttgaagataaaaaagccttctggcgacaactggatttatcgcaagaccaggccctgcccgtcat

SEQ ID NO: 415136 - DNA, 75 bp, synthetic construct
  source 1..75: mol_type = other DNA
gaaaattccagagcgcggcgtgcgcagcaatagttgagcagttacgtcgtctgccgaaaccaatgtcgacacctt

SEQ ID NO: 415137 - DNA, 75 bp, synthetic construct
  source 1..75: mol_type = other DNA
attatgtgaactggaagggaccgaaatataacaataaacttgtgaagaggtttgtgagccagtttttattattta

SEQ ID NO: 415138 - DNA, 75 bp, synthetic construct
  source 1..75: mol_type = other DNA
ccaaccgaatttatccgtatccgctgggcgctggaatattaccaggctggcgacgccgataacgaacaaaattaa

SEQ ID NO: 415139 - DNA, 75 bp, synthetic construct
  source 1..75: mol_type = other DNA
agtcatcgtgatattgtaatttgttttcagatgcgggatgtgctttctgtcggaggaaaaatatacagggatgca

SEQ ID NO: 415140 - DNA, 75 bp, synthetic construct
  source 1..75: mol_type = other DNA
aaggttttctgaaagctccattgatcagcttctgcaatataaaccatttggtgataaccattctccggtactgtg

SEQ ID NO: 415141 - DNA, 75 bp, synthetic construct
  source 1..75: mol_type = other DNA
cagtgcgttcatgtcttccggcagcatgagctctgcgaattttaactatcgtacggcccataataaccagggacg

SEQ ID NO: 415142 - DNA, 75 bp, synthetic construct
  source 1..75: mol_type = other DNA
actgatgaatgtaatatctgagtcaataagcaaaattaagataaattctgatatttatagatctaatatgagtca

SEQ ID NO: 415143 - DNA, 75 bp, synthetic construct
  source 1..75: mol_type = other DNA
cgacattacattaaaaaataaccacgcatcagaatatgaactaacggtagttgatgattacgggaataacatcca

SEQ ID NO: 415144 - DNA, 75 bp, synthetic construct
  source 1..75: mol_type = other DNA
tgtgattatgatcataaatgagtctcgggagtatttgttagagctaaaatggccagggaaacagagtacattaga

SEQ ID NO: 415145 - DNA, 75 bp, synthetic construct
  source 1..75: mol_type = other DNA
agtgagttgtgcatgttttataattctgcagatattttttggttattatcagaataccaagaggcttttggtttg

SEQ ID NO: 415146 - DNA, 75 bp, synthetic construct
  source 1..75: mol_type = other DNA
aggccttgtattatccctcctgtgcagagaaaatcggccagttttctctgcctgcagtccgcatgccgtatcggg

SEQ ID NO: 415147 - DNA, 75 bp, synthetic construct
  source 1..75: mol_type = other DNA
cgcgaagaggtgctggcagggcgatttcgcgctgacttgtttcatcgcctgagcgtgtttccactttcggtgccg

SEQ ID NO: 415148 - DNA, 75 bp, synthetic construct
  source 1..75: mol_type = other DNA
gtcaacagaaagagtgaaacagtttttccttcgcggtcttgctggcaaggttattcttcaactcgcctgccttgc

SEQ ID NO: 415149 - DNA, 75 bp, synthetic construct
  source 1..75: mol_type = other DNA
caaaacagcgagcgagtatatagttgaatctgtaaattatttggttgttgcacctgttgaaatatatcttattga

SEQ ID NO: 415150 - DNA, 75 bp, synthetic construct
  source 1..75: mol_type = other DNA
catcgtcaagttcagtgggtcaatattcgatggcacttgggcgatatgcgaattcgggtggtgattattcgatcg

SEQ ID NO: 415151 - DNA, 75 bp, synthetic construct
  source 1..75: mol_type = other DNA
aaacctttaatgaagcctatatgatgcaaacctccacctctcctcattacggtattgtcgcctccactgaaatgg

SEQ ID NO: 415152 - DNA, 75 bp, synthetic construct
  source 1..75: mol_type = other DNA
tgcgcgaaattccgccagcgccggataaaagcagcgaccatgcgatacttcaggtcgcgatccaaagccgtatta

SEQ ID NO: 415153 - DNA, 75 bp, synthetic construct
  source 1..75: mol_type = other DNA
atgatgcgtccggtggcgcaggggcggaagtcatggctgttcgcgggttcgctgcggggaggagagcggctggcg

SEQ ID NO: 415154 - DNA, 75 bp, synthetic construct
  source 1..75: mol_type = other DNA
tggcaaggtgcgctgctggattatccggtgagtaaagtagtctgtgttggcagtaactatgccaaacatattaaa

SEQ ID NO: 415155 - DNA, 75 bp, synthetic construct
  source 1..75: mol_type = other DNA
tactgtgggagcatgagacggggcatgcatacagcgaacaggggctggcgacccgtcaggagccggacggcctgc

SEQ ID NO: 415156 - DNA, 75 bp, synthetic construct
  source 1..75: mol_type = other DNA
ttatcaggctcccacggaagaggcaggccagcaggcactggaagcattccaacaaaaggaatatcatatcttatt

SEQ ID NO: 415157 - DNA, 75 bp, synthetic construct
  source 1..75: mol_type = other DNA
gagtctctgcggcgcattctgcaacacggggcaaagagggcgactttaacccgcaggagcgggcgcaactggcgt

SEQ ID NO: 415158 - DNA, 75 bp, synthetic construct
  source 1..75: mol_type = other DNA
atccctgggatgatactaggcagtaattcaatggtgggtgctggcgcagtattagtgcagtcgttagataatggg

SEQ ID NO: 415159 - DNA, 75 bp, synthetic construct
  source 1..75: mol_type = other DNA
taaaaatctgacctccggggaggtctataccgaagaatgggatcgtctgctcctcagtaccggtgccgctccggt

SEQ ID NO: 415160 - DNA, 75 bp, synthetic construct
  source 1..75: mol_type = other DNA
aacactatggcctacccacacgcctgcttgatgtatcaacaaaccccttgatcgcactatattttgcctgctcta

SEQ ID NO: 415161 - DNA, 75 bp, synthetic construct
  source 1..75: mol_type = other DNA
caaggatactcagggtaactatcgctaccgccatcacgaatcggacatgataacagagctgctgaccgtgcagcc

SEQ ID NO: 415162 - DNA, 75 bp, synthetic construct
  source 1..75: mol_type = other DNA
caactgagccgccttggcattaacgaaagcacggtgtaccccggcattgagaaggctgctacggaaattgcaaaa

SEQ ID NO: 415163 - DNA, 75 bp, synthetic construct
  source 1..75: mol_type = other DNA
agcgtcgcctggcaaatatggtccggcgtggggtgatccactcggtgcggctggacggtggttttccggaatgcc

SEQ ID NO: 415164 - DNA, 75 bp, synthetic construct
  source 1..75: mol_type = other DNA
tatatcattctgatatctggagtaatggagaatggtatatgggaagaaaagcaaggcatcttgcaaataaagaaa

SEQ ID NO: 415165 - DNA, 75 bp, synthetic construct
  source 1..75: mol_type = other DNA
tgtacgaccgtgtaggtgatgctgtttttggtgctgcacttgttgattccaggctgaatggttctgacaaggagg

SEQ ID NO: 415166 - DNA, 75 bp, synthetic construct
  source 1..75: mol_type = other DNA
catattggtttaatacagtaggtaagtttattcattttagatggtttttgatttttttgaatccttgtgttacac

SEQ ID NO: 415167 - DNA, 75 bp, synthetic construct
  source 1..75: mol_type = other DNA
taaatttatatgcttatgcgccgaatcctctggggtgggtcgatcctctcggcttaaaaattgttaccgtatacc

SEQ ID NO: 415168 - DNA, 75 bp, synthetic construct
  source 1..75: mol_type = other DNA
gctcgacttcggcgctaatgtgggaaatacttggcttcatgaatgttcaacattaggtgaacctttccaatgctg

SEQ ID NO: 415169 - DNA, 75 bp, synthetic construct
  source 1..75: mol_type = other DNA
aaagaactgcgccagaataacgccccgtctcccgacaaaatgattcacggggacggacgtaccctggttatccgt

SEQ ID NO: 415170 - DNA, 75 bp, synthetic construct
  source 1..75: mol_type = other DNA
aaaaccacgtaccgctacaacgccgccggagaactgacggaggttatcctgccgggggatgagacgctgacgttc

SEQ ID NO: 415171 - DNA, 75 bp, synthetic construct
  source 1..75: mol_type = other DNA
gacccggaagccgaccccggcctgctgtatgcggggcagtggcgggatgcggaatcggggctgtgctataaccgg

SEQ ID NO: 415172 - DNA, 75 bp, synthetic construct
  source 1..75: mol_type = other DNA
aaagtagaggtcaacgagataatcgttgatccatatggaaacgagactcaatatacacagctaaaatatattcaa

SEQ ID NO: 415173 - DNA, 75 bp, synthetic construct
  source 1..75: mol_type = other DNA
cctggcaggaggtaaaaggcagcgacgatgcctggttttacaccgtttttcagcttagtggtcaggcaataatgg

SEQ ID NO: 415174 - DNA, 75 bp, synthetic construct
  source 1..75: mol_type = other DNA
tacgctggaaaccagtggtatgcgcgaagactttcctgaagtctatatttcaggcgcggaaaaattatgcgtgag

SEQ ID NO: 415175 - DNA, 75 bp, synthetic construct
  source 1..75: mol_type = other DNA
tatattcggtttctgatatctttaggcatggcttgtcttagagttttctttgatatagtgagaaaacggtataaa

SEQ ID NO: 415176 - DNA, 75 bp, synthetic construct
  source 1..75: mol_type = other DNA
aatggtctgcaccctggataccttccagttttatctggagaaacaaggctggactcttgtaaaccggagcgcaat

SEQ ID NO: 415177 - DNA, 75 bp, synthetic construct
  source 1..75: mol_type = other DNA
taatcgctccggggggatcattagggggggcacgtccgaaagccagtgttgttgatgaagctgggcatctctaca

SEQ ID NO: 415178 - DNA, 75 bp, synthetic construct
  source 1..75: mol_type = other DNA
atggtcgttaatgcacttgctgttggctgtggactgaatgttgcacctgctcaggcgcataaatttgccagcaat

SEQ ID NO: 415179 - DNA, 75 bp, synthetic construct
  source 1..75: mol_type = other DNA
cacgtatttcgtcccaatcaggcgctttcctgctctttggtgaaaacgtagacctaccggaaacgggactcagta

SEQ ID NO: 415180 - DNA, 75 bp, synthetic construct
  source 1..75: mol_type = other DNA
atcttagagaggcagctttagattctggtattaaaggtattttggcgaaatatattcttcacaaaatgagagttt

SEQ ID NO: 415181 - DNA, 75 bp, synthetic construct
  source 1..75: mol_type = other DNA
ataatgttggaatagtagcagattggttagttacatatgcaggtgctgaaagagtaattaaagaattgattgatt

SEQ ID NO: 415182 - DNA, 75 bp, synthetic construct
  source 1..75: mol_type = other DNA
atcatttaatcttcatgattgcaggaacaatgcagaaaaattctctgtggaaagatttaacaacgaaattttaaa

SEQ ID NO: 415183 - DNA, 75 bp, synthetic construct
  source 1..75: mol_type = other DNA
ggaaaaggtggtagtcttgagactgtgcgtccttatggtgtagataaacctactggggtatttttcgatgagcaa

SEQ ID NO: 415184 - DNA, 75 bp, synthetic construct
  source 1..75: mol_type = other DNA
aaactcttcaatgataaagatattcaaacttcttttattcaaaagtttccttttgctaaaaagaaataccaaacg

SEQ ID NO: 415185 - DNA, 75 bp, synthetic construct
  source 1..75: mol_type = other DNA
taatattaaccctagtgattgccgaaataacgccttaaaattttctgcagaaagatttcgcgaagagtttaattt

SEQ ID NO: 415186 - DNA, 75 bp, synthetic construct
  source 1..75: mol_type = other DNA
cttctgataaagctatggctagtgcaagacgctctctcgacttctgggcttccatcgacggcaacaaacttgcca

SEQ ID NO: 415187 - DNA, 75 bp, synthetic construct
  source 1..75: mol_type = other DNA
tgataatccaaattttcagaacgatacgcctaacatgctgaatgtcgtggtttcacgcgcaaaacagcagtttat

SEQ ID NO: 415188 - DNA, 75 bp, synthetic construct
  source 1..75: mol_type = other DNA
cgatgggcagcaggaagaaaatctggtgagcctgtgtgctgatatcgcaacgctccggcaacaatggcagcagat

SEQ ID NO: 415189 - DNA, 75 bp, synthetic construct
  source 1..75: mol_type = other DNA
aattattctctctgactgccgtctgaacgctctaaaattttctgagcaaagatttaaagaagagattaaagaata

SEQ ID NO: 415190 - DNA, 75 bp, synthetic construct
  source 1..75: mol_type = other DNA
aaaggtggtgctcttgaaacgatacgacccatcggagttgaaaaagcaactggtgtctttttctataatcaagat

SEQ ID NO: 415191 - DNA, 75 bp, synthetic construct
  source 1..75: mol_type = other DNA
taggatacgggcgtgatggagaaatccatgaagatacagaattaaaaagcaggttgactatttttgaatcatcag

SEQ ID NO: 415192 - DNA, 75 bp, synthetic construct
  source 1..75: mol_type = other DNA
ggaaaaggagggtcattggagacggttagaccgcttggtgttaatatgccgacaggtatgtttttcgaacagcaa

SEQ ID NO: 415193 - DNA, 75 bp, synthetic construct
  source 1..75: mol_type = other DNA
cccaccaacaatccggcagaagacccggatattgaatccattggttattacggctcaacgtggcgtaacagtgcc

SEQ ID NO: 415194 - DNA, 75 bp, synthetic construct
  source 1..75: mol_type = other DNA
gtgatcggcgggcctgtaggggataaaattggacggaaatatgtgatttggggctctatcctcggcgttgcgccg

SEQ ID NO: 415195 - DNA, 75 bp, synthetic construct
  source 1..75: mol_type = other DNA
gcgtggggagagaccccagaacagggcggcgtgtggatcccttcgcaaaagttagaacaacgggaaattatcggc

SEQ ID NO: 415196 - DNA, 75 bp, synthetic construct
  source 1..75: mol_type = other DNA
cgtgtataacagagaaaaagttttagcgtttgattatgagattaccagtgatatcggctacaagcccttaaccag

SEQ ID NO: 415197 - DNA, 75 bp, synthetic construct
  source 1..75: mol_type = other DNA
cgatgtatacatcagcagcaaaagtgcgacggcagaagaagccctgaagcgaatcagtgaactgtacgccatcga

SEQ ID NO: 415198 - DNA, 75 bp, synthetic construct
  source 1..75: mol_type = other DNA
ggttgagccgtcaacaggctggcaggtacgcgcctatttacgcgcggcgctgggcatgaatcagacgcatggagg

SEQ ID NO: 415199 - DNA, 75 bp, synthetic construct
  source 1..75: mol_type = other DNA
tcaaggttgatgcatgcccgctcatactgcttcagcatcgtagctgcatattgggatacccttgcaaaaaagcaa

SEQ ID NO: 415200 - DNA, 75 bp, synthetic construct
  source 1..75: mol_type = other DNA
aaaacaggagttattgcatttcttacgccaacttcttttcttggtgggcagtatttcaccgcgctgcgaaccctt

SEQ ID NO: 415201 - DNA, 75 bp, synthetic construct
  source 1..75: mol_type = other DNA
ttccataataaaaaggctaagacaacatttattcaagatttaccatttgctaagagcaaatatcaaaactattta

SEQ ID NO: 415202 - DNA, 75 bp, synthetic construct
  source 1..75: mol_type = other DNA
agaggagaaaaatgatgcgcttctgaatgagtggcctcacggaaaactagctggcgttccagtgtggcacatgaa

SEQ ID NO: 415203 - DNA, 75 bp, synthetic construct
  source 1..75: mol_type = other DNA
tatggtaacgggcgctattgtcggtgcgatgaatatcggcctttcgacacccggtgccggcattttctcgctctt

SEQ ID NO: 415204 - DNA, 75 bp, synthetic construct
  source 1..75: mol_type = other DNA
tctaacagtatttatattgatggcattcgcgatatcggcagcgtctcgcgcgacaccttcaatactgagcaggtc

SEQ ID NO: 415205 - DNA, 75 bp, synthetic construct
  source 1..75: mol_type = other DNA
catcagaccgcgaccttaaagacgatattctcgttatcagcgacgcgacgaaagcaatccgcaaaatgaacgggt

SEQ ID NO: 415206 - DNA, 75 bp, synthetic construct
  source 1..75: mol_type = other DNA
tgctttacttaattcaggtaattcagaactaccagttagtatcagggtgtggggttccagtactcgacaaaacgt

SEQ ID NO: 415207 - DNA, 75 bp, synthetic construct
  source 1..75: mol_type = other DNA
aacacaagcactagctccgatgatactacggtaagcataaaaggatctcagcatactcctctggttttaacgcgc

SEQ ID NO: 415208 - DNA, 75 bp, synthetic construct
  source 1..75: mol_type = other DNA
tcagatgccggggcagttaaatactatatttgtccatcctctgcaggtggtgcaaatatcaccaacaagcctgac

SEQ ID NO: 415209 - DNA, 75 bp, synthetic construct
  source 1..75: mol_type = other DNA
gcgtcttcttataagaaactcaaacacttcggcgcagtcgtggagtatcagggcatggggtcaaagcggaaggga

SEQ ID NO: 415210 - DNA, 75 bp, synthetic construct
  source 1..75: mol_type = other DNA
ggagtacgtcagattacagtagtatgaattgtgctgtgcgcggtgttgatagcactggaaccaattcggcgtggt

SEQ ID NO: 415211 - DNA, 75 bp, synthetic construct
  source 1..75: mol_type = other DNA
agttgcaaggcccgaccgttgacggcaacgagctacgcgaagaaacgcgctatcttaatgttgactacgccgccg

SEQ ID NO: 415212 - DNA, 75 bp, synthetic construct
  source 1..75: mol_type = other DNA
ggtgttgatagcactggaaccaattcggcgtggtcggtaggcacatcagaaagcacaggcaaaatgttgttcctg

SEQ ID NO: 415213 - DNA, 75 bp, synthetic construct
  source 1..75: mol_type = other DNA
acaagccgtcgaaatcggatgttggacttggcaacgtaactaacgatgcgcaggtgaaaaaatccggcgatgtta

SEQ ID NO: 415214 - DNA, 75 bp, synthetic construct
  source 1..75: mol_type = other DNA
ccgctttattattctaacgcaaccacaagatatgaagaaataccgccgtctgttcaaaaaaatagaaaaattaat

SEQ ID NO: 415215 - DNA, 75 bp, synthetic construct
  source 1..75: mol_type = other DNA
ttccggcagaccactgcctgcatgatgtgcaggacatgagcgggataaaccacccgaaagctgacctgaacaagg

SEQ ID NO: 415216 - DNA, 75 bp, synthetic construct
  source 1..75: mol_type = other DNA
ccagcacatcagcccgtgaggcggcaacccgtgcgactgatgctgcaggctcagcacgtgcagccagcacgtcag

SEQ ID NO: 415217 - DNA, 75 bp, synthetic construct
  source 1..75: mol_type = other DNA
gtgttgaatcgactcgtaaggttagggattcagattatgcgaacatgcaaacgctgattaacagcgacacaaaac

SEQ ID NO: 415218 - DNA, 75 bp, synthetic construct
  source 1..75: mol_type = other DNA
atcaaaaggagatggtctatgggggccaggtaaagcaagtaatgatacaaaagaagctgctggccgttgtgacct

SEQ ID NO: 415219 - DNA, 75 bp, synthetic construct
  source 1..75: mol_type = other DNA
tctttatgaatggtgataattcagtcgagtcgggtggggcatattcagcgggacttttaagccaggttaatgatt

SEQ ID NO: 415220 - DNA, 75 bp, synthetic construct
  source 1..75: mol_type = other DNA
gggtaatgtcgattatgagtttcgatcacttgtagatggtcagattattgatccggcccaaatcagtagcggtga

SEQ ID NO: 415221 - DNA, 75 bp, synthetic construct
  source 1..75: mol_type = other DNA
aatccacactgtatcatcaggcggcgtatgccgatccgcgcaacttcccggcgggcgtggcgccggtcagcaatg

SEQ ID NO: 415222 - DNA, 75 bp, synthetic construct
  source 1..75: mol_type = other DNA
tcggcgggatcatttcaccggaaatggaaacaccgaagctcctgtggcttaaagaaaatatgcctgaagtcttcg

SEQ ID NO: 415223 - DNA, 75 bp, synthetic construct
  source 1..75: mol_type = other DNA
catcagtaattttgccgaacgtatctacgataacagtgacgggagcggattactgagcgactttatcagtgaacg

SEQ ID NO: 415224 - DNA, 75 bp, synthetic construct
  source 1..75: mol_type = other DNA
tgctttcgaacacatcggtttttcaggacatcaattcgaagcggtacaagctttcgcagcctactatgagctgga

SEQ ID NO: 415225 - DNA, 75 bp, synthetic construct
  source 1..75: mol_type = other DNA
tgattaatggcgctggcgttccgatggcggaatgcaaaatttatttagatgcacaggttaataccagtgaagtgg

SEQ ID NO: 415226 - DNA, 75 bp, synthetic construct
  source 1..75: mol_type = other DNA
ggattcagattatgcgaacatgcaaacgctgattaacagcgacacaaaacgtatatacgttcgctttgttgttaa

SEQ ID NO: 415227 - DNA, 75 bp, synthetic construct
  source 1..75: mol_type = other DNA
ggcggcgcgatgttcacgccagtgctgctgtttcccttcgccgggattgtggtgggtcttgccatcttgctgtaa

SEQ ID NO: 415228 - DNA, 75 bp, synthetic construct
  source 1..75: mol_type = other DNA
ttgcgtcgactggaacatggtggtttttccttggtcgtctttggagacgactttggcaaagcagagccttgggaa

SEQ ID NO: 415229 - DNA, 75 bp, synthetic construct
  source 1..75: mol_type = other DNA
ccgggatacggttcagctattagtaaacttgttgaaaacaggagaatttcccacagccgtaacaagccaattaca

SEQ ID NO: 415230 - DNA, 75 bp, synthetic construct
  source 1..75: mol_type = other DNA
cgtgaaacagatgatcgcgttacctcgctggaagaagaaaacgcagaattaaaacaaagattatctgcaattgag

SEQ ID NO: 415231 - DNA, 75 bp, synthetic construct
  source 1..75: mol_type = other DNA
caaacatcttgaaagtattgcccggagtcgtggtctcctcccaaaaaaactgctgaatgaaatgattgagcaggc

SEQ ID NO: 415232 - DNA, 75 bp, synthetic construct
  source 1..75: mol_type = other DNA
caaacaacttgaaagtattgcccggagtcgtggtctccgcccaaaaaaactgctgaatgaaatgattgagcaggc

SEQ ID NO: 415233 - DNA, 75 bp, synthetic construct
  source 1..75: mol_type = other DNA
caaacaacttgaaagtattgcccgcagtcgtggtctccccccaaaaaaactgctgaatgaaatgattgagcaggc

SEQ ID NO: 415234 - DNA, 75 bp, synthetic construct
  source 1..75: mol_type = other DNA
cagaattactttctgttgcaacaggtggtgaaaagatagatgggcgagggcttacttttaaagtatcaacatctt

SEQ ID NO: 415235 - DNA, 75 bp, synthetic construct
  source 1..75: mol_type = other DNA
caaacagcttgaaagtattgcccggagtcgtggtctccacccaaaaaaactgctgaatgaaatgattgagcaggc

SEQ ID NO: 415236 - DNA, 75 bp, synthetic construct
  source 1..75: mol_type = other DNA
caaacaccttgaaagtattgcccgcagtcgtggtctccacccaaaaaaactgctgaatgaaatgattgagcaggc

SEQ ID NO: 415237 - DNA, 75 bp, synthetic construct
  source 1..75: mol_type = other DNA
ggatatgtttccggaagggacactgctgtgcatgacgattgttgtgcagccgcaggacaggctggaagaacagtt

SEQ ID NO: 415238 - DNA, 75 bp, synthetic construct
  source 1..75: mol_type = other DNA
tccgccaggatgtgaaaacggtgaaagagtatctgggaaaccggcataagctgtatcgtgccgggatcaccttcc

SEQ ID NO: 415239 - DNA, 75 bp, synthetic construct
  source 1..75: mol_type = other DNA
aaagcatccactgttcttgaatcgcttttccatgccagctatgtaacggaagatgcccccccgcccctaatttta

SEQ ID NO: 415240 - DNA, 75 bp, synthetic construct
  source 1..75: mol_type = other DNA
caaacaacttgaaagtattgcccgaagtcgtggtctccacccaaaaaaactgctgaatgaaatgattgagcaggc

SEQ ID NO: 415241 - DNA, 75 bp, synthetic construct
  source 1..75: mol_type = other DNA
tcctgcttatacctctgattatcctgcccttcgtaatacgcacaatctgccagaccagcaggtcagggatatgct

SEQ ID NO: 415242 - DNA, 75 bp, synthetic construct
  source 1..75: mol_type = other DNA
ccgcttgagttaatagaagttcgctccggttcttatctcgaagaggatgatgtggtgcgttttgcagatcgctat

SEQ ID NO: 415243 - DNA, 75 bp, synthetic construct
  source 1..75: mol_type = other DNA
aagtattgcccggagtcgtggtatccccccaaaaaaactgctgaatgaaatgattgagcaggcgtaccaggactc

SEQ ID NO: 415244 - DNA, 75 bp, synthetic construct
  source 1..75: mol_type = other DNA
agagccgcgagtaacaacgaatgacctgcatctcatgctgaggctggctcttgccggtgggggtataacatttgc

SEQ ID NO: 415245 - DNA, 75 bp, synthetic construct
  source 1..75: mol_type = other DNA
ctgcgtctgatgttgaggctggctcttgccggcggaggaataacaattgccactcaggaaactttcaggccgtat

SEQ ID NO: 415246 - DNA, 75 bp, synthetic construct
  source 1..75: mol_type = other DNA
aatcctgtacaaaggcttttttttataataattggaacagagaaaaacgcgctttactattttgaaggtgaaaat

SEQ ID NO: 415247 - DNA, 75 bp, synthetic construct
  source 1..75: mol_type = other DNA
gatttagtaattagaaaacaaacagggactggcaatcgttttgctttacttaattcaggtaattcagaactacca

SEQ ID NO: 415248 - DNA, 75 bp, synthetic construct
  source 1..75: mol_type = other DNA
agcgcgcatttatcaacggcgcaaaggttgcggtgctggcgcagacggcacgcccggaattatacattccagacg

SEQ ID NO: 415249 - DNA, 75 bp, synthetic construct
  source 1..75: mol_type = other DNA
ccaccgcgaccacgaaagcgtcagaagctgccacctcagcccgggatgcgtcggcttcaaaagtggcggcaaaat

SEQ ID NO: 415250 - DNA, 75 bp, synthetic construct
  source 1..75: mol_type = other DNA
gccatgattcagcatgagaatggcgcgcagccatattctgaagatgagatacaggctgcaattcaaacggccatc

SEQ ID NO: 415251 - DNA, 75 bp, synthetic construct
  source 1..75: mol_type = other DNA
cgctgtataacaccctttcccggcgtgagcgcggggcggtagatgccggctttatgacggatgccgtccggaaac

SEQ ID NO: 415252 - DNA, 75 bp, synthetic construct
  source 1..75: mol_type = other DNA
tgtccgatcagtctctcaagcttgaaatcacgatggtcaatgataagggggagcgtaaaacctataatgcggaaa

SEQ ID NO: 415253 - DNA, 75 bp, synthetic construct
  source 1..75: mol_type = other DNA
cttgtgcttcaaatgttgatatcagagactggaagaaatgtaaagaaagaaatcaagacaagcaacttttcttta

SEQ ID NO: 415254 - DNA, 75 bp, synthetic construct
  source 1..75: mol_type = other DNA
gcagaacattttaaaatcgtcgatgtaacagttccacaacaaggggatcgttgctcaagaatgagttttactctg

SEQ ID NO: 415255 - DNA, 75 bp, synthetic construct
  source 1..75: mol_type = other DNA
atccgctacaatatttactgacagaataagacaaattatagaagcagatttaagtaaacgctggcgattaagtga

SEQ ID NO: 415256 - DNA, 75 bp, synthetic construct
  source 1..75: mol_type = other DNA
atatggacaggaagcagtggtacacacgtctgatgtgggtacagcatctcgcagggcttctgccggtgaccggcc

SEQ ID NO: 415257 - DNA, 75 bp, synthetic construct
  source 1..75: mol_type = other DNA
ttcatttccgaagatgattttgttaaatggacacgtagagtaacacctcaagccggagatgtcgttttttcttat

SEQ ID NO: 415258 - DNA, 75 bp, synthetic construct
  source 1..75: mol_type = other DNA
aaatggggcattattcattcaactgaagatttcttattttctgatgcgccaagtcgtgcccgtagaatattaaaa

SEQ ID NO: 415259 - DNA, 75 bp, synthetic construct
  source 1..75: mol_type = other DNA
cgttcatcagttcggtgagcgcgatcaggttgcgccgggcattttcaccgattacccggtacgtgagctgctggg

SEQ ID NO: 415260 - DNA, 75 bp, synthetic construct
  source 1..75: mol_type = other DNA
gaaaccgaatccttgttccgcgtcatccgcgagctgaaatcgcaaggccgcggtattgtctatatctcccaccgc

SEQ ID NO: 415261 - DNA, 75 bp, synthetic construct
  source 1..75: mol_type = other DNA
atgtggcgcaagcttggcatctggctgtggctggcaacccagaacctggcggattttcccgatgaggcgaagaaa

SEQ ID NO: 415262 - DNA, 75 bp, synthetic construct
  source 1..75: mol_type = other DNA
ccgcgccgggaacatggctgttagaccagcgtccgcataaggtcatcgtgctggacaggctgcgcaaaccgccca

SEQ ID NO: 415263 - DNA, 75 bp, synthetic construct
  source 1..75: mol_type = other DNA
ttgcaggcggaattctttaccctgcaactgcgtttttcgcgccctttgcccgtggacatccggctgcgccgcgat

SEQ ID NO: 415264 - DNA, 75 bp, synthetic construct
  source 1..75: mol_type = other DNA
tatggtgggcagggatccatggtgccagtatcatgtaccctattactgagacaaccctgctggtggcgattcagg

SEQ ID NO: 415265 - DNA, 75 bp, synthetic construct
  source 1..75: mol_type = other DNA
aagcaaaaaacaaaactactgtggctaagcctcaacttaaacagactaaaagagaagggagtgaaaatggaactg

SEQ ID NO: 415266 - DNA, 75 bp, synthetic construct
  source 1..75: mol_type = other DNA
atgtacagttacagcagttatattcgccagatgagtgctggtatatcaggaggtatggtgctccacaatgaaggt

SEQ ID NO: 415267 - DNA, 75 bp, synthetic construct
  source 1..75: mol_type = other DNA
agtacacagctaataaaagtgggctggatgtgcttgatgatggtgacctgaacgggtttatctccaaaatggaag

SEQ ID NO: 415268 - DNA, 75 bp, synthetic construct
  source 1..75: mol_type = other DNA
ctgggtatcagtcaggcagatgaacgcctgatttataacacggtgctgggccggattgcggaggctgtacggtga

SEQ ID NO: 415269 - DNA, 75 bp, synthetic construct
  source 1..75: mol_type = other DNA
aggagtgtttgtcaaaaattcagatagttcggcagtatgctgcttatttgattttgatgcattttctcgtttagc

SEQ ID NO: 415270 - DNA, 75 bp, synthetic construct
  source 1..75: mol_type = other DNA
gagctcaagtagcatctagcggtcgaggggagtttacattaggtaatgagactgtcagcattgtatttaatgaaa

SEQ ID NO: 415271 - DNA, 75 bp, synthetic construct
  source 1..75: mol_type = other DNA
ttgggctacagcctcaatgccaacctcgtccacaaatggattcgcctgcttacccagaaaaccacggctatccag

SEQ ID NO: 415272 - DNA, 75 bp, synthetic construct
  source 1..75: mol_type = other DNA
gccgtaatattcgtagctataatgaagcaatggcttcactgaataaagtgttagcaaatccaaagatgaaagtaa

SEQ ID NO: 415273 - DNA, 75 bp, synthetic construct
  source 1..75: mol_type = other DNA
gctacacgtatcagtatgagaaggaccgcatcaccatcaccgacagcctgaaccgccgtgaagtgctgcactgtc

SEQ ID NO: 415274 - DNA, 75 bp, synthetic construct
  source 1..75: mol_type = other DNA
gaattggttggagcaagtatttccatgctgtataatttcctatcagatatgggaatagatcttgtagatagaatt

SEQ ID NO: 415275 - DNA, 75 bp, synthetic construct
  source 1..75: mol_type = other DNA
tcctcaaaatcgaagtcgtcaacggtaaggccgttactacatctcttttcggatatctcaaactgttgcgccttg

SEQ ID NO: 415276 - DNA, 75 bp, synthetic construct
  source 1..75: mol_type = other DNA
atttacgccgcgcccagcaggcacgtatccggtcacagaaagcgccggacgggaccgcatggacaccacgcagac

SEQ ID NO: 415277 - DNA, 75 bp, synthetic construct
  source 1..75: mol_type = other DNA
cagcctgaatcagcaggccatcaataacatcgccagaaagctggcacaggatttacgccgcgcccagcaggcacg

SEQ ID NO: 415278 - DNA, 75 bp, synthetic construct
  source 1..75: mol_type = other DNA
aatctttcaaggctcaggtcattcaggagtgttctgaacccggtgcctccatcgcaaacatcgccttgggctaca

SEQ ID NO: 415279 - DNA, 75 bp, synthetic construct
  source 1..75: mol_type = other DNA
gcctgtcatttcaagcgcatgcaccagaacatcgtcgacaaaatcgagtatctgaactgctcgcgtgaattcttc

SEQ ID NO: 415280 - DNA, 75 bp, synthetic construct
  source 1..75: mol_type = other DNA
cattgaagcgttccatgaggctgaaaccagcctgaatcataccgctttccgtcgtaatcaatgggaggcgcgtca

SEQ ID NO: 415281 - DNA, 75 bp, synthetic construct
  source 1..75: mol_type = other DNA
aaagtttcggcctcatctaaattgaaaattactttatctgattcagttcccccctccgtatcaaggagctttaac

SEQ ID NO: 415282 - DNA, 75 bp, synthetic construct
  source 1..75: mol_type = other DNA
ttgcccttgcgagtatcgacgcaaacggcgtcattaccgatcttcgtccaaaaggtacgctgaacgagcaacagg

SEQ ID NO: 415283 - DNA, 75 bp, synthetic construct
  source 1..75: mol_type = other DNA
aagataatgtattctggaatatatctacatttgtataatttggtcgaatcgacgatctctatgttaatagatgct

SEQ ID NO: 415284 - DNA, 75 bp, synthetic construct
  source 1..75: mol_type = other DNA
ggggagcgcgaccgggtggccgcagggatgtatacggattatccggcccgtgaacttcttggaataacaccggca

SEQ ID NO: 415285 - DNA, 75 bp, synthetic construct
  source 1..75: mol_type = other DNA
actatcaataagttggagtcattacctgaatgctgtttaccttcgcattcatcacccaaaatgtatttaggtaca

SEQ ID NO: 415286 - DNA, 75 bp, synthetic construct
  source 1..75: mol_type = other DNA
atatgtaaggataatagtggcagatatttctcaacagcacctaaccgaggagaaagaaaaggatcatatccattc

SEQ ID NO: 415287 - DNA, 75 bp, synthetic construct
  source 1..75: mol_type = other DNA
gtctgcataccgggatacccccggtcaggggctggggatgcattcgtctaatgtttcatgggcggcgggagatcg

SEQ ID NO: 415288 - DNA, 75 bp, synthetic construct
  source 1..75: mol_type = other DNA
tgcgaaccaattatacggagcagaaaactggatcagggaaaggtcaaacagaatatatctcgaccctaaatgcaa

SEQ ID NO: 415289 - DNA, 75 bp, synthetic construct
  source 1..75: mol_type = other DNA
gactaatttgagtggaaaggatgtagctggtcttctcacataccttggtttgggagaagccagattctctggtcg

SEQ ID NO: 415290 - DNA, 75 bp, synthetic construct
  source 1..75: mol_type = other DNA
gactgaaacgtggggaagtggcgctttatgacgatcaggggcagtccgttgtcctgacccgttccggtattgtgg

SEQ ID NO: 415291 - DNA, 75 bp, synthetic construct
  source 1..75: mol_type = other DNA
tcgttcccgctgaaggaatgagtaacatgtttgtcaatatccggctggcaaccagcccgcaggcagtgaagcgca

SEQ ID NO: 415292 - DNA, 75 bp, synthetic construct
  source 1..75: mol_type = other DNA
cgccgcgtgtcctgctgggtatttctaaggccgatgaagcgctgatccgtagtgcggtgattaacagcttgggga

SEQ ID NO: 415293 - DNA, 75 bp, synthetic construct
  source 1..75: mol_type = other DNA
agaaaaaattattccaaatttagaacaaagaattatttttcaatacatctgaacgaattaaaagatgagttaatc

SEQ ID NO: 415294 - DNA, 75 bp, synthetic construct
  source 1..75: mol_type = other DNA
ccggttatacctttggtcggcaatattggcagtctcccgaagatgatcatctgcctttattacgcgaattcttag

SEQ ID NO: 415295 - DNA, 75 bp, synthetic construct
  source 1..75: mol_type = other DNA
agataataataatcaaaataataatgtagaaaatcttgaatggtgtacgcaacatgaaaacatgcagcattgctc

SEQ ID NO: 415296 - DNA, 75 bp, synthetic construct
  source 1..75: mol_type = other DNA
atagtcaagtaagacaatcaccattgcaagcgttaagaatccttactttacttaactccattcaagtgcctggaa

SEQ ID NO: 415297 - DNA, 75 bp, synthetic construct
  source 1..75: mol_type = other DNA
gtgaggctctggatgcctgggtgtgccgaccaggaatgacacaggagcaggcgacgatattaatcacggaagcat

SEQ ID NO: 415298 - DNA, 75 bp, synthetic construct
  source 1..75: mol_type = other DNA
gtacaccaaaaaagactgtcaggaggtgcgccactggctgaaggacggccacaaactctaccgcagcgcgctggc

SEQ ID NO: 415299 - DNA, 75 bp, synthetic construct
  source 1..75: mol_type = other DNA
tcatgacgcaggcgacgccagcaatgcaaccactgatcaatgctgagccagctgtagccgcccagacggaacaaa

SEQ ID NO: 415300 - DNA, 75 bp, synthetic construct
  source 1..75: mol_type = other DNA
aacaccttgccgatggtctttgcgggtgcgccggatgtcgggctgcaacaagcatctgccattgttgcctcgtga

SEQ ID NO: 415301 - DNA, 75 bp, synthetic construct
  source 1..75: mol_type = other DNA
ggcttgctgtgaatgtgaggccgatcctgctggctgagcgtaagttcactcagatgtgtctggcgctggcagggc

SEQ ID NO: 415302 - DNA, 75 bp, synthetic construct
  source 1..75: mol_type = other DNA
gaattgctttatcattaatcgggtagaactggaagataactttctgggtggtcagttgatttctgaagtgcaaaa

SEQ ID NO: 415303 - DNA, 75 bp, synthetic construct
  source 1..75: mol_type = other DNA
agccggatgggcgtacttaataactggctcagcgaagaagaaagcctgtggatccaatcgcgtcttcacctgcgg

SEQ ID NO: 415304 - DNA, 75 bp, synthetic construct
  source 1..75: mol_type = other DNA
aatcctattagccatgcttcggctcttgcatccaagagccttgagaaggttcaggaatccatgctctacagaaaa

SEQ ID NO: 415305 - DNA, 75 bp, synthetic construct
  source 1..75: mol_type = other DNA
aacagagtcttgagcaactatctcgtatctcgtcagagttcgtaccatcaagccagaagcgcaggaaaatgtctc

SEQ ID NO: 415306 - DNA, 75 bp, synthetic construct
  source 1..75: mol_type = other DNA
atatcactcataagtttattgttcacattatgaacaaggaacaacaggggttagccaccattattccttgtcctt

SEQ ID NO: 415307 - DNA, 75 bp, synthetic construct
  source 1..75: mol_type = other DNA
attgcgatggaacagattaagcgtcggcatgagctgcacgctctgtctgttgagcttgggttcgctgagcgccgg

SEQ ID NO: 415308 - DNA, 75 bp, synthetic construct
  source 1..75: mol_type = other DNA
actcaatgataaatgcgcttcgcaatatgaaacaggacatcaagcgtcagcagaaactaagtgaaataaacagtt

SEQ ID NO: 415309 - DNA, 75 bp, synthetic construct
  source 1..75: mol_type = other DNA
atttgattcccagcagacatttaaccgtgaattcaggaaaacagccggcgtgacgcccggacagtaccgcagcca

SEQ ID NO: 415310 - DNA, 75 bp, synthetic construct
  source 1..75: mol_type = other DNA
tattacttcttccgcaatctatagctgtagtatcatatcttttttatagcctaatggccgttatggctttccatt

SEQ ID NO: 415311 - DNA, 75 bp, synthetic construct
  source 1..75: mol_type = other DNA
acgcctcacagggaacatcaagcgacgttttgtatattgatgcaaacgcccccgcgcttgaaatatgggaagcgg

SEQ ID NO: 415312 - DNA, 75 bp, synthetic construct
  source 1..75: mol_type = other DNA
gttgcctttatcagcaagatgttgtcgattacctcgttaaacaaaataacgagcagcatctcaaagaaaatgcgg

SEQ ID NO: 415313 - DNA, 75 bp, synthetic construct
  source 1..75: mol_type = other DNA
gagcaggttaatggtgactcactgttgattaactggaactgtgcagcctcgaaatccccaccgaagacccctgat

SEQ ID NO: 415314 - DNA, 75 bp, synthetic construct
  source 1..75: mol_type = other DNA
gattaactggaactgtgcagcctcgaaatccccaccgaagacccctgatgaaaagcaggatacgcattatttttg

SEQ ID NO: 415315 - DNA, 75 bp, synthetic construct
  source 1..75: mol_type = other DNA
tcaactgggaccgttataacccggcagaccaagacagttcgtgctggatccgtgtggcacaggcgtgggcaggca

SEQ ID NO: 415316 - DNA, 75 bp, synthetic construct
  source 1..75: mol_type = other DNA
atggggccgcccggggcatcagacgggaagagccgggttgtgggtatcaggctgggtaataaacagacttatgcg

SEQ ID NO: 415317 - DNA, 75 bp, synthetic construct
  source 1..75: mol_type = other DNA
aacaaaggcagccacgccgaaggccgtgaaggcggcaatggatgtggcaaatgaagcgaaaacaaaggcagaaga

SEQ ID NO: 415318 - DNA, 75 bp, synthetic construct
  source 1..75: mol_type = other DNA
gtgaagtttctgaacaccgtgggagcagccagagtatacgggcgggacattcatacgggggccggtgaatggacc

SEQ ID NO: 415319 - DNA, 75 bp, synthetic construct
  source 1..75: mol_type = other DNA
gtgaaatggcaaagaacaacatttttttaaatgatcatttttattattcaatatgtcacgctgaaaaaattgata

SEQ ID NO: 415320 - DNA, 75 bp, synthetic construct
  source 1..75: mol_type = other DNA
accaggttgtggttaaaaacctggaaagtaactatcgcaaagtccccggcatttctgctgcgaccattcttggcg

SEQ ID NO: 415321 - DNA, 75 bp, synthetic construct
  source 1..75: mol_type = other DNA
tgatatttgcacctggcttctccacggcagagcaggtcaccgacgtctccgggcgcggcgtcggcatggacgtcg

SEQ ID NO: 415322 - DNA, 75 bp, synthetic construct
  source 1..75: mol_type = other DNA
atggcgcgcctgccgaaccgcagtaacacattatcgactgaacgccggatgcgacaggtctggcgtgtggtattg

SEQ ID NO: 415323 - DNA, 75 bp, synthetic construct
  source 1..75: mol_type = other DNA
tgcagtaatcgtattgtatgcacatattgactttttacaaaggcaaacaaaagataaaaatataatttctattac

SEQ ID NO: 415324 - DNA, 75 bp, synthetic construct
  source 1..75: mol_type = other DNA
ctagggcagcttttgattatggccttcgcaatatttatcttaggaaaaatgctaccttatatgaggtgtatcatg

SEQ ID NO: 415325 - DNA, 75 bp, synthetic construct
  source 1..75: mol_type = other DNA
tatttttagaatgttttaagcagtgctcacaagaaatcattacaaatgcagaagtaattagtgattataattttt

SEQ ID NO: 415326 - DNA, 75 bp, synthetic construct
  source 1..75: mol_type = other DNA
gcggcctgacggtggagcagatgcaaaaccagatggacccggtgtacacgccggcgcgaaaaatccacctgtacc

SEQ ID NO: 415327 - DNA, 75 bp, synthetic construct
  source 1..75: mol_type = other DNA
ggctacagcgcaggcgctcactatcaacaggaatgaggttaactcaactgttgatttaacccttacaaaacaatc

SEQ ID NO: 415328 - DNA, 75 bp, synthetic construct
  source 1..75: mol_type = other DNA
cggtccaccgctggcagcagatcgtgagtctctgttctggatgaatgttaagacgatcccttcggtagataaaaa

SEQ ID NO: 415329 - DNA, 75 bp, synthetic construct
  source 1..75: mol_type = other DNA
atgttaccttctgttggttcatttatccttcactggatcgaattaaatctggattcaggaaaaaacattggcgat

SEQ ID NO: 415330 - DNA, 75 bp, synthetic construct
  source 1..75: mol_type = other DNA
tgaaattataggacttctgcttttaatgttatttaacccattacgagaagggtttattaaaagaaagtttccttc

SEQ ID NO: 415331 - DNA, 75 bp, synthetic construct
  source 1..75: mol_type = other DNA
cgatattataaagttgataattctaaaacgtcggtggcagttctggtggatgggaaatggcagttttttagtctt

SEQ ID NO: 415332 - DNA, 75 bp, synthetic construct
  source 1..75: mol_type = other DNA
ataccggtgttattcgcaagagtaataatttcattgcactggcgctgaaaattaaggaaggtgcgaataagcggg

SEQ ID NO: 415333 - DNA, 75 bp, synthetic construct
  source 1..75: mol_type = other DNA
tgaaatggtcattgataaagtagaaggggggggatttgattacattggtcgtggacaaattcctccaaacccagc

SEQ ID NO: 415334 - DNA, 75 bp, synthetic construct
  source 1..75: mol_type = other DNA
attaaatgtagcagaccaagggaaagatactgggatgttaaatttgacttttacaggtgataatccgactttaat

SEQ ID NO: 415335 - DNA, 75 bp, synthetic construct
  source 1..75: mol_type = other DNA
acaggaaagaaagttctgtttatcgactctgatcttcgaaaaggatacgttcacaaaatgttgggttcgaaaaat

SEQ ID NO: 415336 - DNA, 75 bp, synthetic construct
  source 1..75: mol_type = other DNA
agccacagccacagccacagccacagccacagccacagccacaaaatacaaagcagaaattgcaaaatcaagatc

SEQ ID NO: 415337 - DNA, 75 bp, synthetic construct
  source 1..75: mol_type = other DNA
gagttaattgatgaaaaaggtatttcacttaagattgatgagattgatgcaaaacccggcactgagtttgtaatc

SEQ ID NO: 415338 - DNA, 75 bp, synthetic construct
  source 1..75: mol_type = other DNA
gttaaacgttttgagcaaagcggtgtactggttcgtggctgtattcttaatggtgtagttaaaaaggctagtagc

SEQ ID NO: 415339 - DNA, 75 bp, synthetic construct
  source 1..75: mol_type = other DNA
aaaaaggtattgttcatcgatgctgatatgcgtaaaggtcatgttcataaaatgctcggtagtaaaaatgaaaaa

SEQ ID NO: 415340 - DNA, 75 bp, synthetic construct
  source 1..75: mol_type = other DNA
actgcacaaacaaataaaaaagtattgtttatagatgcagatatgcgcaaaggttatacccataagttattcaat

SEQ ID NO: 415341 - DNA, 75 bp, synthetic construct
  source 1..75: mol_type = other DNA
acaatctcgtatgatcctcggaaagacggtagatgatttaaacttacaaactgaaattcagcaaaattatttacc

SEQ ID NO: 415342 - DNA, 75 bp, synthetic construct
  source 1..75: mol_type = other DNA
gttaaaatcaaggatgatactcggtaagacagttgatgatcttaatttgcaaactcaagtcgagcctaagcactt

SEQ ID NO: 415343 - DNA, 75 bp, synthetic construct
  source 1..75: mol_type = other DNA
taaggactagtctacattttgctatgatggaagcacgaaataatatcttaatgatttctggtgcaagcccaaatg

SEQ ID NO: 415344 - DNA, 75 bp, synthetic construct
  source 1..75: mol_type = other DNA
ggtaaacgagttttattcattgatacagatatgcgaaaaggttatactcataaaattttcaaagcatcaaatgca

SEQ ID NO: 415345 - DNA, 75 bp, synthetic construct
  source 1..75: mol_type = other DNA
tgctattcaattttcagaaactgatgataccattattatttgcatttctattgataaaaaaatcgccttagataa

SEQ ID NO: 415346 - DNA, 75 bp, synthetic construct
  source 1..75: mol_type = other DNA
actcctgctgaataatgataacgtgttgggcaatactcgcgaattgcgcctggccgcagagactcaattggatat

SEQ ID NO: 415347 - DNA, 75 bp, synthetic construct
  source 1..75: mol_type = other DNA
agaatgccgccgatctcagcgcaaagattaccggcagtggtgacctggcattcagcagccagaagggtcagaccg

SEQ ID NO: 415348 - DNA, 75 bp, synthetic construct
  source 1..75: mol_type = other DNA
aaaggtgtgtttaatcaggggctggataaccgccgtgtgcgggagatggcctggtgtttacagggagcaaactga

SEQ ID NO: 415349 - DNA, 75 bp, synthetic construct
  source 1..75: mol_type = other DNA
actgggtggtgatatcgcgcagtggagccaaaacggcggcgatcgctggcatttgggagtaatggcgggttacgg

SEQ ID NO: 415350 - DNA, 75 bp, synthetic construct
  source 1..75: mol_type = other DNA
ggaatgtgggcgttcaggttgccgataggggatataatgacacctctgcaatggttggcattaagtggcaattct

SEQ ID NO: 415351 - DNA, 75 bp, synthetic construct
  source 1..75: mol_type = other DNA
tataccgacatggtgactggcgagcagaaacaaaccaccatgtggatgcgacatgaaggaggccacaataaatgg

SEQ ID NO: 415352 - DNA, 75 bp, synthetic construct
  source 1..75: mol_type = other DNA
ggcggtgcattacggttatgatgataagggccgcctggccggggagcgccagacggtgcataacccggagacggg

SEQ ID NO: 415353 - DNA, 75 bp, synthetic construct
  source 1..75: mol_type = other DNA
gcagtctatgaagcagcaaaaggcgatgttaattcgccctgatcgtcatctgtttaaccgtcatagtgacggcac

SEQ ID NO: 415354 - DNA, 75 bp, synthetic construct
  source 1..75: mol_type = other DNA
aaaaaagacttcaaaatcgccagatgaaatatcaaagtgaaattaaacaactctctgcgttgggtgttaattttg

SEQ ID NO: 415355 - DNA, 75 bp, synthetic construct
  source 1..75: mol_type = other DNA
ggtgtgtttaatcaggggctggataaccgccgtgcgcgggagatggcctggtgccttaaaggagctggactatga

SEQ ID NO: 415356 - DNA, 75 bp, synthetic construct
  source 1..75: mol_type = other DNA
acggcgaccggctgaccacgatacagaacgacagaacccgcatccagacgatttatcagccggggagcttcacgc

SEQ ID NO: 415357 - DNA, 75 bp, synthetic construct
  source 1..75: mol_type = other DNA
tacgatgcgctggaccggctggtacagcagggcggctttgacgggcggacgcaacgttatcattatgacctgacc

SEQ ID NO: 415358 - DNA, 75 bp, synthetic construct
  source 1..75: mol_type = other DNA
gtcacgccgggaaggtatagtcgctctgtgaaccttaaggtctgtgggggcggggtgccagcttgtgcaacagct

SEQ ID NO: 415359 - DNA, 75 bp, synthetic construct
  source 1..75: mol_type = other DNA
tactggcgataacattttctgttaatgcgaaggactgttttgaaatggcgggcagggattatcggattgaacctg

SEQ ID NO: 415360 - DNA, 75 bp, synthetic construct
  source 1..75: mol_type = other DNA
ctacaaaagccccgccctcagaatggcgcgggctaaagagctggtacagaagaaaaaatcacaggaggttaagcc

SEQ ID NO: 415361 - DNA, 75 bp, synthetic construct
  source 1..75: mol_type = other DNA
ccgaactgcttgtttcggaagtcacgtttactcaggaccagaacggcaccctgacggaaatccgtgtcggcccgc

SEQ ID NO: 415362 - DNA, 75 bp, synthetic construct
  source 1..75: mol_type = other DNA
tgcacgggaaaaccacgctcaccacccgtcatcatgtcggtctgctcactgttcagcgtcctttttatcccgaag

SEQ ID NO: 415363 - DNA, 75 bp, synthetic construct
  source 1..75: mol_type = other DNA
aaccagcaaggaacacttgatttcagatcctccctccccttcctggcggaaggaaacctgagcacggaaaatgag

SEQ ID NO: 415364 - DNA, 75 bp, synthetic construct
  source 1..75: mol_type = other DNA
tggggtatgacacaacccaggaagtctgtggccatggattccgggcgatggcgtgcagtgcattgattgaatcag

SEQ ID NO: 415365 - DNA, 75 bp, synthetic construct
  source 1..75: mol_type = other DNA
atttccggggcggttcaatctgccgtaatgcgttatgccgtacagtctggcatcatcagatataatcctgctctg

SEQ ID NO: 415366 - DNA, 75 bp, synthetic construct
  source 1..75: mol_type = other DNA
cggcttgccgttatgctgaatctgctggtgtttattcgttccagtgaactcagatatgcccgctggtcagaaatt

SEQ ID NO: 415367 - DNA, 75 bp, synthetic construct
  source 1..75: mol_type = other DNA
agaagaacaccctcacaacgttctcattcaggagctgggtgagaatgtactggcgcaaagcaggtactacacatt

SEQ ID NO: 415368 - DNA, 75 bp, synthetic construct
  source 1..75: mol_type = other DNA
agaaagcaaaccagaacgcagaggccacgataaataacgcgcttgaggcattcagcaaggccaaatccgcgcaca

SEQ ID NO: 415369 - DNA, 75 bp, synthetic construct
  source 1..75: mol_type = other DNA
gacgcgcgccatgctgactgcctgctccaccggcaataaatacctttcagcgcatgaagatgcctttaccgctta

SEQ ID NO: 415370 - DNA, 75 bp, synthetic construct
  source 1..75: mol_type = other DNA
gcggcaccggacagatagcacagattgttgagtcggaaaaatggctcaacgaggacggcatctgcgaccgggcat

SEQ ID NO: 415371 - DNA, 75 bp, synthetic construct
  source 1..75: mol_type = other DNA
tatggtgcgcgctggagagatattgttaatatatttatgagtaaaattaaagaagcagttccggcaatgcttatt

SEQ ID NO: 415372 - DNA, 75 bp, synthetic construct
  source 1..75: mol_type = other DNA
gctcggcgatgatcattctggctattatttttatattgttcctggctggcgtcgggatacttaatgcccccgtgg

SEQ ID NO: 415373 - DNA, 75 bp, synthetic construct
  source 1..75: mol_type = other DNA
gcctgcccttgggatattttgaacggcgtaaactgggtgatatccagtcccgctttggttcgcttgatacgctgc

SEQ ID NO: 415374 - DNA, 75 bp, synthetic construct
  source 1..75: mol_type = other DNA
gttcacttgttgattcacaacagcagatactgaaaaacctcgccaggcccacagcgcggtcattaagcctgtata

SEQ ID NO: 415375 - DNA, 75 bp, synthetic construct
  source 1..75: mol_type = other DNA
cgttttgccgatgtgtctgctggaatagacactgctcctactacaacataccctgggaaagtgctgataaatata

SEQ ID NO: 415376 - DNA, 75 bp, synthetic construct
  source 1..75: mol_type = other DNA
catgcatacaatactcagtctgtggctgacaaactggctgccagtggagaccattcggttctgactcagcccacg

SEQ ID NO: 415377 - DNA, 75 bp, synthetic construct
  source 1..75: mol_type = other DNA
tgagccggtattttacgggcattgcacttgaggtctggcccggaggtgaattccggacggaaacccagcaaaccc

SEQ ID NO: 415378 - DNA, 75 bp, synthetic construct
  source 1..75: mol_type = other DNA
ttgcagattgccgacttgcggcacagacaatcaggcagaagcaacacctgaacgaggtaatacgtaaaaagaaga

SEQ ID NO: 415379 - DNA, 75 bp, synthetic construct
  source 1..75: mol_type = other DNA
tcctcgcaaaggataccgctgtgcttacagtgtgttgtaccaaacgcagggatgttcgggagcagtcaaagagat

SEQ ID NO: 415380 - DNA, 75 bp, synthetic construct
  source 1..75: mol_type = other DNA
tcttacaggtacaaaagaggctggggcatttagtgcagctcttaggttatcagccatctggtttatgtgtggagg

SEQ ID NO: 415381 - DNA, 75 bp, synthetic construct
  source 1..75: mol_type = other DNA
tattgctgcaattttgaatataactttgaatatcattgttataccaaaatatggagcggttggcgctgcttctgt

SEQ ID NO: 415382 - DNA, 75 bp, synthetic construct
  source 1..75: mol_type = other DNA
ttgcttctatcaaaagaatctatgggttagatatcttgggtagttgggcaacgataatgaatatctcacaaatat

SEQ ID NO: 415383 - DNA, 75 bp, synthetic construct
  source 1..75: mol_type = other DNA
tcaaacttaccatagacgctacagaagtaacggaacactttagtgcgatacatgggttatttaaacttccacccg

SEQ ID NO: 415384 - DNA, 75 bp, synthetic construct
  source 1..75: mol_type = other DNA
ctattccagccgaacgagaagccatacctggagtcagattttcggagcgcggctcaaaaatgaaagaagagcatc

SEQ ID NO: 415385 - DNA, 75 bp, synthetic construct
  source 1..75: mol_type = other DNA
ataagtaaagaatcagagtttgtattacccggtatcagggacaaacataagcccatgagcgaaaatacaatcaac

SEQ ID NO: 415386 - DNA, 75 bp, synthetic construct
  source 1..75: mol_type = other DNA
ttaatgcagctccaatgaaaaaaccataccgaatttctgattcacatggtctatacctcgaaatatcaagtagtg

SEQ ID NO: 415387 - DNA, 75 bp, synthetic construct
  source 1..75: mol_type = other DNA
tgcggtagctacggcgaaaagacaacatcgtgctgctctggaacttaatcgcattcctgaattacttcaccgcat

SEQ ID NO: 415388 - DNA, 75 bp, synthetic construct
  source 1..75: mol_type = other DNA
gctgcgttttgcccgctggtcagaagtagattttgaaacggctatgtggacaatcccaggtgagcgtgagcaact

SEQ ID NO: 415389 - DNA, 75 bp, synthetic construct
  source 1..75: mol_type = other DNA
agtggagaaaaggatcttatgttcattggttttagtcgcgatgacaaaccaatcagcgaaaacactgttaacaag

SEQ ID NO: 415390 - DNA, 75 bp, synthetic construct
  source 1..75: mol_type = other DNA
tgcatacaaaggccagccccttacaagactggcgaccaaactcaccctgcttatcttcatccgttccagtgaact

SEQ ID NO: 415391 - DNA, 75 bp, synthetic construct
  source 1..75: mol_type = other DNA
tcgtacccctctcagaacagtccatcgcaattctgaaacagattaaggatatcaccggtaataatgaactgatct

SEQ ID NO: 415392 - DNA, 75 bp, synthetic construct
  source 1..75: mol_type = other DNA
cgaggcatgaagatgaaagaggaacatatcgttccgcttagtcggcaggcgatgattttattaaatcagttaaag

SEQ ID NO: 415393 - DNA, 75 bp, synthetic construct
  source 1..75: mol_type = other DNA
tccccgcccagcgtgagccgatccccggcgtgcgctattcggagcgtggcgcaaagatgaaaaccccgcatctgg

SEQ ID NO: 415394 - DNA, 75 bp, synthetic construct
  source 1..75: mol_type = other DNA
ctttcgcacaatggcctgtagcgcgctgatcgagtccgggcgctggtcgaaagatgcggttgagcgccagatgag

SEQ ID NO: 415395 - DNA, 75 bp, synthetic construct
  source 1..75: mol_type = other DNA
gcgaaatggatattgcaaatattgaaacccgccatctggcacagcttatccggactattgataataaaggtgtgc

SEQ ID NO: 415396 - DNA, 75 bp, synthetic construct
  source 1..75: mol_type = other DNA
cgatgggcgatagaactcactttgctgatctttattcggtccagtgagctgcgttttgctcgttggtcagagatc

SEQ ID NO: 415397 - DNA, 75 bp, synthetic construct
  source 1..75: mol_type = other DNA
ccgccatcaaatttaaggttgatgacagtgaactgataagcgcagtggaaaaagttggcaccgtgacgggtgaga

SEQ ID NO: 415398 - DNA, 75 bp, synthetic construct
  source 1..75: mol_type = other DNA
aattctcccacaaccaactggcaaaacctgttcaggaactggctgatgccatcaacagtgtcgaccagaatactg

SEQ ID NO: 415399 - DNA, 75 bp, synthetic construct
  source 1..75: mol_type = other DNA
aggcgcagaaaacctgcaacgctatatgaaagtcgtcggtgatggaaaaggcatcatgaaggatgccgcatatgc

SEQ ID NO: 415400 - DNA, 75 bp, synthetic construct
  source 1..75: mol_type = other DNA
caacccaggatgtctgtgggcatgggttcagggcgatggcgtgcagtgcgttaatagaatcaggtttgtggtccc

SEQ ID NO: 415401 - DNA, 75 bp, synthetic construct
  source 1..75: mol_type = other DNA
tccgcgtatgaaaaaagtgattgatgggaaagatttaggcggtattacaaaatctgtaagctggcaaggtggtgg

SEQ ID NO: 415402 - DNA, 75 bp, synthetic construct
  source 1..75: mol_type = other DNA
atcatgtccatggcaacagcctccaccacggcgggaaccgctgttgccgccggggtattcagccagacgctgctg

SEQ ID NO: 415403 - DNA, 75 bp, synthetic construct
  source 1..75: mol_type = other DNA
cttcaaactcaccgatgggcagggtatgcacctgctaatcaatcccaatggttcaaaatactggcgactccaata

SEQ ID NO: 415404 - DNA, 75 bp, synthetic construct
  source 1..75: mol_type = other DNA
gtcgcaagggactggcatactgcctgtaaaaggaaatggtctgattcccacagcgagagagttctaaaaagcatg

SEQ ID NO: 415405 - DNA, 75 bp, synthetic construct
  source 1..75: mol_type = other DNA
gtgatgctgttgaacgtcagatgagccacatggagcgaaattcagtgagggccgcgtatatccataaagcagagc

SEQ ID NO: 415406 - DNA, 75 bp, synthetic construct
  source 1..75: mol_type = other DNA
atggtgagtttgcaaaaaattagcagcaacttgcactacggcaccaccccgctcattcgccagtgcgtcacgcca

SEQ ID NO: 415407 - DNA, 75 bp, synthetic construct
  source 1..75: mol_type = other DNA
caaatacctagaaaatctcgtgataattttgagagaatcctcaataacagcctgattcaagatattacggaatat

SEQ ID NO: 415408 - DNA, 75 bp, synthetic construct
  source 1..75: mol_type = other DNA
ccatatggaacgtagctcagtacgcgcagcttacattcataaggccgaacatcttgatgaacggcgactgatgct

SEQ ID NO: 415409 - DNA, 75 bp, synthetic construct
  source 1..75: mol_type = other DNA
tacaggtgttcgagagttatgggtacgaccaaataccactagcaatgtgggtcggaccgatggaacaatgactat

SEQ ID NO: 415410 - DNA, 75 bp, synthetic construct
  source 1..75: mol_type = other DNA
agaaatctatcaacactgctccaggtatttggggccgtgaagtgaattggcctgatgatatgaataagaaatcaa

SEQ ID NO: 415411 - DNA, 75 bp, synthetic construct
  source 1..75: mol_type = other DNA
ctttcaaggcatcaggactatcagttttttctagatgttttgaatagtggtctgaagacatcatatttagatagt

SEQ ID NO: 415412 - DNA, 75 bp, synthetic construct
  source 1..75: mol_type = other DNA
tattatctatgattttttgcataaaaataatatttttcaaattgaaagtcgtagtgtttttcaattttacccgat

SEQ ID NO: 415413 - DNA, 75 bp, synthetic construct
  source 1..75: mol_type = other DNA
taatgttgatgagactacatcaatcgaaacagaaggattacatgcttatggtgcacacagatattatttagaaca

SEQ ID NO: 415414 - DNA, 75 bp, synthetic construct
  source 1..75: mol_type = other DNA
tcgggctgggactgatggaaacaggaatggcctggttctggagcgatgcgagagtcaaaaaatggtttgatgtcg

SEQ ID NO: 415415 - DNA, 75 bp, synthetic construct
  source 1..75: mol_type = other DNA
ggaagcgtctgtccggtgcggtgcatctgcgccagtcagtcagcgatattctgaacacgccagtgggaagccgtg

SEQ ID NO: 415416 - DNA, 75 bp, synthetic construct
  source 1..75: mol_type = other DNA
atgattggtattgattccgccaccggaagatatctgtacggtaacgaacatctgcgtcagtccgtcaccgatatt

SEQ ID NO: 415417 - DNA, 75 bp, synthetic construct
  source 1..75: mol_type = other DNA
acgctgctgatgcagctaaagcaggtactgtcaatgagcgatgcaaccgttgctgagcatatgcaggatttgtat

SEQ ID NO: 415418 - DNA, 75 bp, synthetic construct
  source 1..75: mol_type = other DNA
gcatgggaaaatattcaaaatgcgacaaatggtaaagatttatctggtggtggaaatatgttttgtgtaggaaat

SEQ ID NO: 415419 - DNA, 75 bp, synthetic construct
  source 1..75: mol_type = other DNA
aaaaccagttcaccaaaaggtgagcatgagcgattaccgaatccgacgctggcggtcaccgatggcaaaacaact

SEQ ID NO: 415420 - DNA, 75 bp, synthetic construct
  source 1..75: mol_type = other DNA
aacgttacccacacgaaggttgggaacatattgaaatcgttttgccgggtgatccagaaacgctgaatgcccgtg

SEQ ID NO: 415421 - DNA, 75 bp, synthetic construct
  source 1..75: mol_type = other DNA
agccaccagtaaatacggcaatattcgtcttggcgaaggaaaaccggaatacagcacgctggtaatgctgccaac

SEQ ID NO: 415422 - DNA, 75 bp, synthetic construct
  source 1..75: mol_type = other DNA
gcaatgcaagtaaagactactcgattaaaacgctgctcataaatgatgccctaacaatttgtgaaatagtatttc

SEQ ID NO: 415423 - DNA, 75 bp, synthetic construct
  source 1..75: mol_type = other DNA
ctgtctgttaataatagtgatgaacataacagatatctaattcaaacatggattgaaaatgacgctggaagtaaa

SEQ ID NO: 415424 - DNA, 75 bp, synthetic construct
  source 1..75: mol_type = other DNA
atgccgactaccgctcggcattaaacgatatcgaaaacctaatgatggcggagcctgataccgtcgaaggcgaaa

SEQ ID NO: 415425 - DNA, 75 bp, synthetic construct
  source 1..75: mol_type = other DNA
ttacctgccttacccgagacgttagaagagcttaatgcgggtgataacaagataaaagaattaccatttcttcct

SEQ ID NO: 415426 - DNA, 75 bp, synthetic construct
  source 1..75: mol_type = other DNA
aacgtaaaagaaaagagtatattacacttcttttggcgtgattatcttatggaagtgatgaacttcactcagcgg

SEQ ID NO: 415427 - DNA, 75 bp, synthetic construct
  source 1..75: mol_type = other DNA
gtctatctaaacagattagcagaaaaacttgctgaatctaaaacactaaaaagtgtgatcatgagcggtggaaca

SEQ ID NO: 415428 - DNA, 75 bp, synthetic construct
  source 1..75: mol_type = other DNA
tcggtatagccggtcagggggggcaaatttacctccgcacagaacagacaaaaggccatttgtcagttcgctggg

SEQ ID NO: 415429 - DNA, 75 bp, synthetic construct
  source 1..75: mol_type = other DNA
atggacaaaactccattacatcctcttcgattcttaatacctgtactgcgacagtaaactctattatccttggta

SEQ ID NO: 415430 - DNA, 75 bp, synthetic construct
  source 1..75: mol_type = other DNA
tggaagttattatcgtactgggcatcatcggaacgattgctgcaggtgtagtagttcttgctcaacgcgcttttg

SEQ ID NO: 415431 - DNA, 75 bp, synthetic construct
  source 1..75: mol_type = other DNA
ccgatgaacatctgcagggtgtggtccggctgaacggcacattgtatccggcactggccaccccatcggccgaca

SEQ ID NO: 415432 - DNA, 75 bp, synthetic construct
  source 1..75: mol_type = other DNA
cgagagaaacattccggctgtccggtgaaacgcgggatcgtatccgtaatatctgggccataaccccggtcagta

SEQ ID NO: 415433 - DNA, 75 bp, synthetic construct
  source 1..75: mol_type = other DNA
acattccggctaatggtgaaattattcgttatggcgaggtgattggttacgccgtgcgcgcaatcccacgcggaa

SEQ ID NO: 415434 - DNA, 75 bp, synthetic construct
  source 1..75: mol_type = other DNA
cacgcgctcggttttcaggttcgccgacatctgtgcaaataccggggagatccacagtctcatctggaaatatct

SEQ ID NO: 415435 - DNA, 75 bp, synthetic construct
  source 1..75: mol_type = other DNA
ttttagatgatagaggtgcagctcttagagactctgtgaaatcatacagaaaaagatataatatagatagcaata

SEQ ID NO: 415436 - DNA, 75 bp, synthetic construct
  source 1..75: mol_type = other DNA
atgaataataaatacagacttattattccagtctgttttattgcgttggttgattcaaatggctcggttaataaa

SEQ ID NO: 415437 - DNA, 75 bp, synthetic construct
  source 1..75: mol_type = other DNA
tgagtatgaattcattgctagaatggactctgatgacatatctagaatatccagacttagtaagcagatagagtt

SEQ ID NO: 415438 - DNA, 75 bp, synthetic construct
  source 1..75: mol_type = other DNA
cgcaggcgtcaaaaacttttgcgtctgcccccggacaactgccccgtgacgtggtgagcgtcccccgtcggaaag

SEQ ID NO: 415439 - DNA, 75 bp, synthetic construct
  source 1..75: mol_type = other DNA
cgagtgaatggcgagtgggcccgcgaagatggcatcttcaaacccagcttcaagaacactgattacagcgctatt

SEQ ID NO: 415440 - DNA, 75 bp, synthetic construct
  source 1..75: mol_type = other DNA
agctttaaatgttgccatttaggagctaaatcttacttagacgatataaataatgaactttactctgatattaaa

SEQ ID NO: 415441 - DNA, 75 bp, synthetic construct
  source 1..75: mol_type = other DNA
tccgcaatacggttacattcgtggtggataagcagagcattgctctggctaaagccgcagcggataaccttcaaa

SEQ ID NO: 415442 - DNA, 75 bp, synthetic construct
  source 1..75: mol_type = other DNA
cagcaagcgaaggtgacacaggcacagcgtacccagtatgccgcagcagccactaagctaaaggctcagaagggc

SEQ ID NO: 415443 - DNA, 75 bp, synthetic construct
  source 1..75: mol_type = other DNA
cggtgttctgctaatgaatatgctgactgaaccagaaaagatccgcattgatatgggaaatggaatgcagtgtca

SEQ ID NO: 415444 - DNA, 75 bp, synthetic construct
  source 1..75: mol_type = other DNA
accggtattcgctatcctgtttcaactcagttaacggaagatatggccttatggtttaatttattatctcaaggg

SEQ ID NO: 415445 - DNA, 75 bp, synthetic construct
  source 1..75: mol_type = other DNA
acgcatcggtgttactgccgcagcccgtgaactcagcctgtatgaatcacagctctacaactggcgcagtaaaca

SEQ ID NO: 415446 - DNA, 75 bp, synthetic construct
  source 1..75: mol_type = other DNA
agaacaggaggggcatcatttatagaatttgcaacatcgttagcctgtaagcacaggataaagctaccaaatggt

SEQ ID NO: 415447 - DNA, 75 bp, synthetic construct
  source 1..75: mol_type = other DNA
cgggaggtgctgtacacggaaggcgagggtggcctgaagcgggtggtgaagaaggaacatgcggacgggagcatc

SEQ ID NO: 415448 - DNA, 75 bp, synthetic construct
  source 1..75: mol_type = other DNA
tgctgccgcagcccgtgaactcagcctgtatgaatcacagctctacaactggcgcagtaaacagcaacatcagca

SEQ ID NO: 415449 - DNA, 75 bp, synthetic construct
  source 1..75: mol_type = other DNA
gatcaccatttatgccaccgcagcccccatgaatgcgtcaaaacatggcgcagacgtgaccgcactgaaaacccg

SEQ ID NO: 415450 - DNA, 75 bp, synthetic construct
  source 1..75: mol_type = other DNA
agtgaaacactggctctgccgccgaaaggcgcgctattaacgctgggactgggatttaacggaagtctggtgaac

SEQ ID NO: 415451 - DNA, 75 bp, synthetic construct
  source 1..75: mol_type = other DNA
agctcatttaccgaatatcctcatgccgctgaattattcgctgactacctgacaacggataagatgttgatgaag

SEQ ID NO: 415452 - DNA, 75 bp, synthetic construct
  source 1..75: mol_type = other DNA
aaacctatatctaaaaataaactaatgctgtgtattgagaattttaacgaggaaaaatattcctataccaattca

SEQ ID NO: 415453 - DNA, 75 bp, synthetic construct
  source 1..75: mol_type = other DNA
aaaccattttcccagcatcagtgttttctttttttatcaataaaagtttcggacaaaactctgtcactcatgttg

SEQ ID NO: 415454 - DNA, 75 bp, synthetic construct
  source 1..75: mol_type = other DNA
aaccgcataaggctagttgtatgcctctatgcggccttctatcttcatttcacccaatcactacttcttacactc

SEQ ID NO: 415455 - DNA, 75 bp, synthetic construct
  source 1..75: mol_type = other DNA
ccttcacgattatcttgatgaccaaaagtactggctttctgtgtggcaagattatcttgagaagttgattgggcg

SEQ ID NO: 415456 - DNA, 75 bp, synthetic construct
  source 1..75: mol_type = other DNA
tgaactgggggctccaccacatgtgatcggaaagttgctaggacatcatatgtcaggtgttatggcgcgttacaa

SEQ ID NO: 415457 - DNA, 75 bp, synthetic construct
  source 1..75: mol_type = other DNA
aaggcgcggtgctaacgctgggactggggttcaacggaaatctggtcaataaaggcagttttaccgtctgtcagg

SEQ ID NO: 415458 - DNA, 75 bp, synthetic construct
  source 1..75: mol_type = other DNA
atgctcttctggattccgggcgatttacgcgtaaacttattctgttagggctgtcaggctcattttcctatatct

SEQ ID NO: 415459 - DNA, 75 bp, synthetic construct
  source 1..75: mol_type = other DNA
acgacttggcttttggttcgctcaatgccttattgttggagtttacggcgagtttcgtagtcctgccggaccatt

SEQ ID NO: 415460 - DNA, 75 bp, synthetic construct
  source 1..75: mol_type = other DNA
gttggtgaggaggtccatacaaatggacttagtattcttgttgattcgattgattcaaaaccagggcaacaattc

SEQ ID NO: 415461 - DNA, 75 bp, synthetic construct
  source 1..75: mol_type = other DNA
acgatctagtaatagtagatactccccctatattagcagttacagatgctgcaataattggtaggtatgttggaa

SEQ ID NO: 415462 - DNA, 75 bp, synthetic construct
  source 1..75: mol_type = other DNA
attgcagtcaagaatgatacttggcaaaacagtagatgaccttaatcttcaaatcgaggttaggccaaacgactt

SEQ ID NO: 415463 - DNA, 75 bp, synthetic construct
  source 1..75: mol_type = other DNA
atttgattataatcgatacgccaccaatacttgctgttactgatgcagcgatcatagggagatactgtgggaccg

SEQ ID NO: 415464 - DNA, 75 bp, synthetic construct
  source 1..75: mol_type = other DNA
gcttcaatcaagaatgatacttggtaaaacagttgataatttaaatttgcaaacgcaaattgaaaacaaatattt

SEQ ID NO: 415465 - DNA, 75 bp, synthetic construct
  source 1..75: mol_type = other DNA
ggttacggactagccttcattttgcaatgatggaagccaaaaataatatacttatgatttctggcgctagtccaa

SEQ ID NO: 415466 - DNA, 75 bp, synthetic construct
  source 1..75: mol_type = other DNA
catctcaggaatctgatgaaatcgattttggtcgcttaatcggtgaattgattgaccatcgcaaattgataatat

SEQ ID NO: 415467 - DNA, 75 bp, synthetic construct
  source 1..75: mol_type = other DNA
tgactatcacgaggttatacttaccatcttcagataaggaattacctgagctaaatttaactgtaaaggataaat

SEQ ID NO: 415468 - DNA, 75 bp, synthetic construct
  source 1..75: mol_type = other DNA
gatgaaaagtcaaaattaaatcaacgagttacagctatgcctaaaactcaacaagaaattttgagattaagcaga

SEQ ID NO: 415469 - DNA, 75 bp, synthetic construct
  source 1..75: mol_type = other DNA
gcaacaccaatatatcaagcaaacgtactgatacaagtggagcagaagcaaggaaatgctatacttagtagctta

SEQ ID NO: 415470 - DNA, 75 bp, synthetic construct
  source 1..75: mol_type = other DNA
gatttaacactggaagcaaaatcagtactagaccaaattgttaatgttgataaccaattgaatacattaacattt

SEQ ID NO: 415471 - DNA, 75 bp, synthetic construct
  source 1..75: mol_type = other DNA
ttgtctttggaagctaaatctgtattagatcaaatagttaatgttgataatcagcttaatgaattgactttcaaa

SEQ ID NO: 415472 - DNA, 75 bp, synthetic construct
  source 1..75: mol_type = other DNA
caatcagaggattaagaaccagccttcattttgcaatgatggaatcgagaaataacgttcttatgatctcaggtg

SEQ ID NO: 415473 - DNA, 75 bp, synthetic construct
  source 1..75: mol_type = other DNA
agcattacgatatcgtaattatggacaccccgccagttttagcagtaacagatgcagcgattattggcaattatg

SEQ ID NO: 415474 - DNA, 75 bp, synthetic construct
  source 1..75: mol_type = other DNA
actcctgtatatcaagctgatgcgctagtgcaagttgagcagaaacaagcgaatgctattcttagtaatctaagt

SEQ ID NO: 415475 - DNA, 75 bp, synthetic construct
  source 1..75: mol_type = other DNA
ttcgagggctaagaactagcttgcattttgctatgatggaagctcgaaataatgtattaatgatttcaggagcaa

SEQ ID NO: 415476 - DNA, 75 bp, synthetic construct
  source 1..75: mol_type = other DNA
ccttattaaaaacgtaaaaaatatcaattttgattttatatcaagaggtattgtgcctccaaatccagccgaatt

SEQ ID NO: 415477 - DNA, 75 bp, synthetic construct
  source 1..75: mol_type = other DNA
aagctgcacaagatgaaaaaagtttagattttttaaatcgacagcttcctcaagttcgaagtgagttagatgcag

SEQ ID NO: 415478 - DNA, 75 bp, synthetic construct
  source 1..75: mol_type = other DNA
tcgctagaagctaaatctgttttagaccagatcgtaaatgttgataaccaactgaacgagttaacatttcgagaa

SEQ ID NO: 415479 - DNA, 75 bp, synthetic construct
  source 1..75: mol_type = other DNA
ttatttattgatgccgatatgagaaaggggtactctcataaattatttggcataaacattggcaatgataatgtt

SEQ ID NO: 415480 - DNA, 75 bp, synthetic construct
  source 1..75: mol_type = other DNA
ctcgtcaagcagcccaagatgcgaaaagtttagacttcttaaataagcaattacctaaagttcgtgacgagcttg

SEQ ID NO: 415481 - DNA, 75 bp, synthetic construct
  source 1..75: mol_type = other DNA
tcagccagcaagaaaatgacataatagatttaggtcgtttatttggggaaattattgatcatagaaaattaattt

SEQ ID NO: 415482 - DNA, 75 bp, synthetic construct
  source 1..75: mol_type = other DNA
attaagcgtatccgatcaaggaaaagatacaggtatgctaacgttaatgctttcaggagatgacccagctctaat

SEQ ID NO: 415483 - DNA, 75 bp, synthetic construct
  source 1..75: mol_type = other DNA
cggtattattaacaaagcaagtagttattatggctatggctataatcactacggttataaatatactgacaaaaa

SEQ ID NO: 415484 - DNA, 75 bp, synthetic construct
  source 1..75: mol_type = other DNA
ggaaaaaaggtattatttattgatacagatatgcgcaaggggtatacgtataaactattcaatgaaaataatgca

SEQ ID NO: 415485 - DNA, 75 bp, synthetic construct
  source 1..75: mol_type = other DNA
cggtatgcgatctattgctagaacggctgctgaagagagcggtaaattcaggacagaagtgcttgaagcggctct

SEQ ID NO: 415486 - DNA, 75 bp, synthetic construct
  source 1..75: mol_type = other DNA
agaaaactcaatctctaatttgctatttgttattttttttatcatcattcaatgaacagatagctgtagtcaatg

SEQ ID NO: 415487 - DNA, 75 bp, synthetic construct
  source 1..75: mol_type = other DNA
gttcagtctctgcgcgagttgtacaccgatgtcatcgaagagttttactggattgcgctcccgcttacaacgcaa

SEQ ID NO: 415488 - DNA, 75 bp, synthetic construct
  source 1..75: mol_type = other DNA
agggcagaatattcgatataagccaggctctgtaaaaaccgtgaatgttgacacaaacacccgccgggcctcatt

SEQ ID NO: 415489 - DNA, 75 bp, synthetic construct
  source 1..75: mol_type = other DNA
gtctggcaaaacgtatagattatatgccaaaatgtttcccccttacggaacaggctcttcattccctgctatatg

SEQ ID NO: 415490 - DNA, 75 bp, synthetic construct
  source 1..75: mol_type = other DNA
ctgactttatttcctcgccagtcatgattatttcaaattccggggaatgggttaataccgttattccagaggcga

SEQ ID NO: 415491 - DNA, 75 bp, synthetic construct
  source 1..75: mol_type = other DNA
ggatttcactattagttattatttatattgcaacttgcccaggaaataaagtcaggtattatgcagagatagaac

SEQ ID NO: 415492 - DNA, 75 bp, synthetic construct
  source 1..75: mol_type = other DNA
aatgaatgtaacgaagttgtgcgcagaggatatgcaataggagtaggtgtctcaggtaaagttatatatgaagga

SEQ ID NO: 415493 - DNA, 75 bp, synthetic construct
  source 1..75: mol_type = other DNA
gctaatgaataataatctgacaacacttccggaaagtgtcctgagattagctcagaatgccttcgtaaatgttgc

SEQ ID NO: 415494 - DNA, 75 bp, synthetic construct
  source 1..75: mol_type = other DNA
ctggtagtttctggaaacagattagacagcattcccccctttccagataagcttgaagggctggctctggctaat

SEQ ID NO: 415495 - DNA, 75 bp, synthetic construct
  source 1..75: mol_type = other DNA
atgaaactgaaagctattatattggccaccggtcttattaactgtattgcgttttcagcacaggcagtggataca

SEQ ID NO: 415496 - DNA, 75 bp, synthetic construct
  source 1..75: mol_type = other DNA
ttttacaaagaagttgtactattggtggtgcaggtggtccaaatcaaacagtatctctgggggatttatatacat

SEQ ID NO: 415497 - DNA, 75 bp, synthetic construct
  source 1..75: mol_type = other DNA
ccaccggtcttattaactgtattgcattttcagcacaggctgttgatacaacgattactgtgacaggaaatgttt

SEQ ID NO: 415498 - DNA, 75 bp, synthetic construct
  source 1..75: mol_type = other DNA
ttaggttgttaaaaccaaacttacctaaaactcaattagccagagaacttcttgaagaagctctactgaaaattg

SEQ ID NO: 415499 - DNA, 75 bp, synthetic construct
  source 1..75: mol_type = other DNA
agcaggaatagccgaagaaaaacgcctccagaatgaatgcacgctggaaaaagttgcggaacagtggctcaaaga

SEQ ID NO: 415500 - DNA, 75 bp, synthetic construct
  source 1..75: mol_type = other DNA
ggctaggtgctttccccgccctttcacttgctgacgcccgagggttaagagcggattaccttgccttgttagcca

SEQ ID NO: 415501 - DNA, 75 bp, synthetic construct
  source 1..75: mol_type = other DNA
ctgttgcgaccaactggttccagataaaaagcaaaagcgttacccctgattacgctaaagatatatggcgctcac

SEQ ID NO: 415502 - DNA, 75 bp, synthetic construct
  source 1..75: mol_type = other DNA
gataacacgggtgcagtggagctgacaccggtggcagttgcagcgggtcgccgtctctctgaacgcctgtttaat

SEQ ID NO: 415503 - DNA, 75 bp, synthetic construct
  source 1..75: mol_type = other DNA
acatctggcgtagccttgaacggaacatctttcccactctgggtgatgtccctatcaaagagatccgccccaaaa

SEQ ID NO: 415504 - DNA, 75 bp, synthetic construct
  source 1..75: mol_type = other DNA
ggtgcgacatcgatatgaaaaaagcggaatggcgtatccctgacacctttatgaagatgaaccgttcacacacgg

SEQ ID NO: 415505 - DNA, 75 bp, synthetic construct
  source 1..75: mol_type = other DNA
ctaacaccgaagttctgcgcgctaaagcgttagagaaggatctgacgctgcatgatggcgacggacttttcctga

SEQ ID NO: 415506 - DNA, 75 bp, synthetic construct
  source 1..75: mol_type = other DNA
catcgtgaacatatatttcctagtagaaatgaccctaaacagccaatgaatagccaaactgcgaatgctgcttta

SEQ ID NO: 415507 - DNA, 75 bp, synthetic construct
  source 1..75: mol_type = other DNA
tgattgatgccaatccagcatcgggggttgggatggcctttgagaagcccaaaaagcaaaacatgccaacattgc

SEQ ID NO: 415508 - DNA, 75 bp, synthetic construct
  source 1..75: mol_type = other DNA
acttgctgatgctcgaaggttaagagcggactaccttgctttgttggctaatggtatagacccacaagttcaagc

SEQ ID NO: 415509 - DNA, 75 bp, synthetic construct
  source 1..75: mol_type = other DNA
caccgagaacatgtttttcccagcaggaatgatcctaaacaacctatgaatagccaaactgctaatgctgctctt

SEQ ID NO: 415510 - DNA, 75 bp, synthetic construct
  source 1..75: mol_type = other DNA
gcaacaaaacagcggactatgatgggacttggtgcttttcctgccctttctcttgctgatgcccgagggttaaga

SEQ ID NO: 415511 - DNA, 75 bp, synthetic construct
  source 1..75: mol_type = other DNA
taatttccggaaattaaatttagaaaacgcaaccctgagtataggccgggatgctaatgtaaaaggacacataga

SEQ ID NO: 415512 - DNA, 75 bp, synthetic construct
  source 1..75: mol_type = other DNA
atgcagcagattgatttgccctgcggtaacgccgagcaccagccgtgcatcttccacatcgaccaccacgacccg

SEQ ID NO: 415513 - DNA, 75 bp, synthetic construct
  source 1..75: mol_type = other DNA
ctctataagacttttgttgactacgtatatgaacatccaaagcaagacgcaaagatttcagggacgtatatttat

SEQ ID NO: 415514 - DNA, 75 bp, synthetic construct
  source 1..75: mol_type = other DNA
gggaagcagcagacaggaatggaatcgcttactggacacgcattaccgccgcggctggaatgtgaagcggggcta

SEQ ID NO: 415515 - DNA, 75 bp, synthetic construct
  source 1..75: mol_type = other DNA
ggagacgctgcgggaggaaagaaaggcgttctatgcccgtccggagaaccggcgaatggggtactggcagtgggt

SEQ ID NO: 415516 - DNA, 75 bp, synthetic construct
  source 1..75: mol_type = other DNA
tcaatggtaatataaaatcagacaaaaaagcatctattctgtttggtgttgaccagtataaagaagataacctgg

SEQ ID NO: 415517 - DNA, 75 bp, synthetic construct
  source 1..75: mol_type = other DNA
ccggtcattacaacccgggaaaccgatgacaaaataacatggtcactgacaggctataacacggtagcaaacaag

SEQ ID NO: 415518 - DNA, 75 bp, synthetic construct
  source 1..75: mol_type = other DNA
atatcaacggcgaagccggtgcatgggcacgcatcatgagcggtaccggctctgccagtggtggtttcagtgaca

SEQ ID NO: 415519 - DNA, 75 bp, synthetic construct
  source 1..75: mol_type = other DNA
cgggatggagctttctcttgttcactaccagctcctatgcgctttttgtgtggcagtgattatgttgcaggaatg

SEQ ID NO: 415520 - DNA, 75 bp, synthetic construct
  source 1..75: mol_type = other DNA
tggccaactggtcagtcagaaggatgcgcaggggcgtgaaacccgttatgagtacagcgccgcaggcgacctcac

SEQ ID NO: 415521 - DNA, 75 bp, synthetic construct
  source 1..75: mol_type = other DNA
gccacaggcagaactggtttacggtgctgtatccggtaaacagtttgcatggaaggaccaggggatgcatctgtc

SEQ ID NO: 415522 - DNA, 75 bp, synthetic construct
  source 1..75: mol_type = other DNA
ccgccatgtttgattccggtgcctatatcgacctgattggtaagtatgttcatcatgataatgagtacacggcaa

SEQ ID NO: 415523 - DNA, 75 bp, synthetic construct
  source 1..75: mol_type = other DNA
atgcaaacagtagatataacgctggtggcaggcccggcagacgcctcgcagtccgtccttaagaacaatcggtcc

SEQ ID NO: 415524 - DNA, 75 bp, synthetic construct
  source 1..75: mol_type = other DNA
caggtaatggcgtcgatagcgcaacgctaactgcaacggttaaagatcagttcgacaatgaggtgaataatcttc

SEQ ID NO: 415525 - DNA, 75 bp, synthetic construct
  source 1..75: mol_type = other DNA
cgcggagtactggcgcgactatcttaaattaagcagtaacggctatttgcgactgaccaactggcgcagcgcacc

SEQ ID NO: 415526 - DNA, 75 bp, synthetic construct
  source 1..75: mol_type = other DNA
aaaagtacaaacagcatggtctatttcactgacagcgcaaacaataagaaattccatacgctgacggtcgatgag

SEQ ID NO: 415527 - DNA, 75 bp, synthetic construct
  source 1..75: mol_type = other DNA
cgtctacggcacatctcactttgctacatgcactttttgatacagtctccgcaggcgagacaaccagtctgtata

SEQ ID NO: 415528 - DNA, 75 bp, synthetic construct
  source 1..75: mol_type = other DNA
ggcagcgtcattaccgccacagtcgttgataataatggctttccggtgaaaggtgtgactgtgaacttcaccagc

SEQ ID NO: 415529 - DNA, 75 bp, synthetic construct
  source 1..75: mol_type = other DNA
taccgaggacaactttatcgctaataacgtcgggatgaccaggctgcaggcaacagtgactgatggaaacggcaa

SEQ ID NO: 415530 - DNA, 75 bp, synthetic construct
  source 1..75: mol_type = other DNA
tggatcctcttatgagaaggatctggtggtaatcgatcaaaaactgacactctcggcgtccagcccgcttatcgg

SEQ ID NO: 415531 - DNA, 75 bp, synthetic construct
  source 1..75: mol_type = other DNA
taccgaaagtgctgaactacatcttgttctgcacgatctatcaggccatccgatcaatgtttctgaagggatgga

SEQ ID NO: 415532 - DNA, 75 bp, synthetic construct
  source 1..75: mol_type = other DNA
tctggagatacctgaaggtcaggtaatggtcgcacaagacgtagcagttaaagctcacgttaacgaccagtttgg

SEQ ID NO: 415533 - DNA, 75 bp, synthetic construct
  source 1..75: mol_type = other DNA
taccagctcctatgcgctttttgtgtggcagtgattatgttgcaggaatgcaaaatacagaagctgatgctgtaa

SEQ ID NO: 415534 - DNA, 75 bp, synthetic construct
  source 1..75: mol_type = other DNA
tgtctccctggaaacagggacgcaaaacacttatcaaacgcatgaatttttttatggggcgtgttataaacagat

SEQ ID NO: 415535 - DNA, 75 bp, synthetic construct
  source 1..75: mol_type = other DNA
gtggttaaaaatctgtcagtagtcttccgcacctcccccgcagacacgcaactgagtctgaacgcgcgtaatact

SEQ ID NO: 415536 - DNA, 75 bp, synthetic construct
  source 1..75: mol_type = other DNA
agcgtttctgaacgaggtcaacaacctgaacaaacgtatgggtgacctgcgtgacatcaacggcgaagccggtgc

SEQ ID NO: 415537 - DNA, 75 bp, synthetic construct
  source 1..75: mol_type = other DNA
gtcattaagcgtagcgagcggcgaattttatgggccagcgccattttgttggggattgcactggtgattggcgca

SEQ ID NO: 415538 - DNA, 75 bp, synthetic construct
  source 1..75: mol_type = other DNA
gcgttgtcgggaagatgcgtgatctgatccttcaactcagcaaaagttcgatttattcaacaaagccgtattcag

SEQ ID NO: 415539 - DNA, 75 bp, synthetic construct
  source 1..75: mol_type = other DNA
tgaatacgaaaaatatgaaaggaacttttttatctactgctgcagattcttctggagatgttaagtggcagcgaa

SEQ ID NO: 415540 - DNA, 75 bp, synthetic construct
  source 1..75: mol_type = other DNA
atattcagaaaacgttttctgaatatccagattatttgaaaaatggggtcgttgatgaagacaacattgcatatt

SEQ ID NO: 415541 - DNA, 75 bp, synthetic construct
  source 1..75: mol_type = other DNA
cgcccccctgacaagcatcacagaatctgacgctcaaatcagtggtggcgaaccccgacaggactataaagatcc

SEQ ID NO: 415542 - DNA, 75 bp, synthetic construct
  source 1..75: mol_type = other DNA
gtagcgaagtcatccgtttacaggcggtttactctgccgtcgcgatgggcggcagtatcgctatcatgaccgttt

SEQ ID NO: 415543 - DNA, 75 bp, synthetic construct
  source 1..75: mol_type = other DNA
attttactggttccatgctgtcgtggtggttcggcattcacccagggcgcggaggggacattcagcgagtccacg

SEQ ID NO: 415544 - DNA, 75 bp, synthetic construct
  source 1..75: mol_type = other DNA
gatgggactatcatttcttacaagggctttggtatagaagttatgtcgatattagatttaaagaattagataatg

SEQ ID NO: 415545 - DNA, 75 bp, synthetic construct
  source 1..75: mol_type = other DNA
gatgggattttcatttaatgcaaggtttgtggtatagaagttacgttgatattagatataaggagttggatgcac

SEQ ID NO: 415546 - DNA, 75 bp, synthetic construct
  source 1..75: mol_type = other DNA
tgctagtgctgggtggtgaagttattggtcgcacgctgttttatggcctgcacatgaccgtaggtatggcggtag

SEQ ID NO: 415547 - DNA, 75 bp, synthetic construct
  source 1..75: mol_type = other DNA
tgcaccacagctaaaaggttatcagcctgcggttccgctactatccgtctcattcattctgcttctggcagggga

SEQ ID NO: 415548 - DNA, 75 bp, synthetic construct
  source 1..75: mol_type = other DNA
attccttctggtgtagcggatgagtctgaagtaattccggtgctttatgtggcgtttacccgggcaacccgtgaa

SEQ ID NO: 415549 - DNA, 75 bp, synthetic construct
  source 1..75: mol_type = other DNA
gccagtgatctttaccattctgaagatgctgtcatgtgtctcactaaaccagcattctcatattatattgcagcc

SEQ ID NO: 415550 - DNA, 75 bp, synthetic construct
  source 1..75: mol_type = other DNA
ggaccaaaaccagacgttgccgtcctggtatatttggcgttatctggtatctactgccaagaattttttgatttt

SEQ ID NO: 415551 - DNA, 75 bp, synthetic construct
  source 1..75: mol_type = other DNA
tttgtcacgaataccaactggcaatcttacagcggtgaaaccacgttgagctatttcagccagatggctggctga

SEQ ID NO: 415552 - DNA, 75 bp, synthetic construct
  source 1..75: mol_type = other DNA
gtaactgaaaacgtattgatgaagtatatgatttttggctgctttgaagagttcgggcgcgatgaggggttaagg

SEQ ID NO: 415553 - DNA, 75 bp, synthetic construct
  source 1..75: mol_type = other DNA
gaaattccatacgctgacggtcgatgagctggcaaccagcaacagcgcctatgcgatgcgtacaaacctttctga

SEQ ID NO: 415554 - DNA, 75 bp, synthetic construct
  source 1..75: mol_type = other DNA
gatttacatgcaggtaaaaatattaccggcgatggttttggcttccgccagaatattgtaagcgggcactctcag

SEQ ID NO: 415555 - DNA, 75 bp, synthetic construct
  source 1..75: mol_type = other DNA
tgagtacaacggcattttcttcgcgaaaaatggcggcacacttgacctgaatggacacaatcagtctttcaataa

SEQ ID NO: 415556 - DNA, 75 bp, synthetic construct
  source 1..75: mol_type = other DNA
gcaacccttaaacagtacatagaagacgctgggcaatgtttcctaaagccactaaacccacgctatccactgatc

SEQ ID NO: 415557 - DNA, 75 bp, synthetic construct
  source 1..75: mol_type = other DNA
ggccagttgtttgatgtaaatggcgctattaattgcacaacgctgaatcagtcatcagaccgcgaccttaaagac

SEQ ID NO: 415558 - DNA, 75 bp, synthetic construct
  source 1..75: mol_type = other DNA
accgggtgctgacgggcgtggtggacggcttcgggcggacgctggccttccaccgggcggcggagggtgacgtgg

SEQ ID NO: 415559 - DNA, 75 bp, synthetic construct
  source 1..75: mol_type = other DNA
atagtgaaaagctgccaccttgaatacctgcatgaagatttggaagcggatctttccaataaggtgctgcactga

SEQ ID NO: 415560 - DNA, 75 bp, synthetic construct
  source 1..75: mol_type = other DNA
cgccttcaccgatcgttgcccggactattctggagcgtgccgaggcttgtggaaaacccgtggtggtgaatttcc

SEQ ID NO: 415561 - DNA, 75 bp, synthetic construct
  source 1..75: mol_type = other DNA
tgtatgctgattgcagcacatggctgggatgtaggaggagcaaaacttgcggggatgaaaaccgcatttatagcc

SEQ ID NO: 415562 - DNA, 75 bp, synthetic construct
  source 1..75: mol_type = other DNA
tatgaccgtcagggcaggctggcggaagaggtctcgcgcaacggtaacattacgcgctggttttatgattcttcc

SEQ ID NO: 415563 - DNA, 75 bp, synthetic construct
  source 1..75: mol_type = other DNA
ttgcaggggcggtatatcacccaggatcccattgggctaagaggtgcatggaacctgtatcagtatccattgaat

SEQ ID NO: 415564 - DNA, 75 bp, synthetic construct
  source 1..75: mol_type = other DNA
gcgtgtatcaaatcgacaccgtgccaacctggcataacggttacactacgctggctttcttcctgacggtattgt

SEQ ID NO: 415565 - DNA, 75 bp, synthetic construct
  source 1..75: mol_type = other DNA
tcgagacggcgtaccgggccggagtgatgtccctccgagaaatagcatcacaacatgggatcagcgaaggcgcta

SEQ ID NO: 415566 - DNA, 75 bp, synthetic construct
  source 1..75: mol_type = other DNA
gcgtcacttccggctggtactgaccacgcaggcgcagcgggcagaagaggcccggcagcaggcctcttccggcgg

SEQ ID NO: 415567 - DNA, 75 bp, synthetic construct
  source 1..75: mol_type = other DNA
catcttattttataaggaaatttaatgaatattatggtataactccaaagaaattttacttatatcataaaaaat

SEQ ID NO: 415568 - DNA, 75 bp, synthetic construct
  source 1..75: mol_type = other DNA
accgatataaggggttttctctgtatctgatcatctttactggcatcctgctctgcatttctccgttcctgaaat

SEQ ID NO: 415569 - DNA, 75 bp, synthetic construct
  source 1..75: mol_type = other DNA
atggccaataagaagttgaacgccacaatcaccatcgggggtgccgtttccggcagcctccgtggtgcgtttggt

SEQ ID NO: 415570 - DNA, 75 bp, synthetic construct
  source 1..75: mol_type = other DNA
ccgggaaattcaccgaaggcgtgatcctgtccaagtcaatggaattgttgttccgcgctgtcccgccgagtctgt

SEQ ID NO: 415571 - DNA, 75 bp, synthetic construct
  source 1..75: mol_type = other DNA
acgaagacgacgcctcccctattgaccgccttttcagcgttctcaagttctcaagcatgattgatgatccgattg

SEQ ID NO: 415572 - DNA, 75 bp, synthetic construct
  source 1..75: mol_type = other DNA
gtggggcttattggattgtgggtattcctgctttcttccatcattggttatccggccatgtacctgtttcaaaga

SEQ ID NO: 415573 - DNA, 75 bp, synthetic construct
  source 1..75: mol_type = other DNA
ttatcctggggttgatgatggtcagtatgtgggacctctccaaaaacatcggttcattcccttcccttagtattt

SEQ ID NO: 415574 - DNA, 75 bp, synthetic construct
  source 1..75: mol_type = other DNA
ttcctcttatatctgaaaaacagtcgctttcaaaggtgcttttaaatgatgagaataatgaactgagtgatggta

SEQ ID NO: 415575 - DNA, 75 bp, synthetic construct
  source 1..75: mol_type = other DNA
gctctttcttgtaggtggtggggagtatcttgaacgtcttaaaaatatttataaaaattatgataatattcattt

SEQ ID NO: 415576 - DNA, 75 bp, synthetic construct
  source 1..75: mol_type = other DNA
tccctttcgatgatttaccgccctggcatctggactgggacgtagaccaacgcgaaaacgcgacatatccagcaa

SEQ ID NO: 415577 - DNA, 75 bp, synthetic construct
  source 1..75: mol_type = other DNA
tcatttcgtaaggcgtttaatgaagcgcaaaccgtggttgttcctgcgggtatcgtttgcgacgagatcaacacc

SEQ ID NO: 415578 - DNA, 75 bp, synthetic construct
  source 1..75: mol_type = other DNA
ttcagcagggaaaccgatggcttaactggctggagaagcagccggtgcagatgagccgcctggaacattatgccg

SEQ ID NO: 415579 - DNA, 75 bp, synthetic construct
  source 1..75: mol_type = other DNA
ccttgtgatatctaattctgctactgctggactgtattctcgacttgcaaaaatattctataggcataaacatat

SEQ ID NO: 415580 - DNA, 75 bp, synthetic construct
  source 1..75: mol_type = other DNA
gagactggatggcttacagatttttttgaacctgaaaaagtaaaaattgtacccggcttagtcagtatgttaaaa

SEQ ID NO: 415581 - DNA, 75 bp, synthetic construct
  source 1..75: mol_type = other DNA
aaacaaccatgccgaaaaaataggtaacaaccaggcgatcaccgttaccaataaccagatccagaacattggcgt

SEQ ID NO: 415582 - DNA, 75 bp, synthetic construct
  source 1..75: mol_type = other DNA
gaatcgttaacttttctgcagaactcaatgagttgggtattgaggtcacattcagtacgtccggcagggcaaaat

SEQ ID NO: 415583 - DNA, 75 bp, synthetic construct
  source 1..75: mol_type = other DNA
tgcattgggccacttattgcgacggcagcggtggccaccatgggggaagcatctgcatttaaatcagggcgagag

SEQ ID NO: 415584 - DNA, 75 bp, synthetic construct
  source 1..75: mol_type = other DNA
ttgtaattattctgcttattgtttttcttctggtgaccttatttacctgtgtcttctgtctcaggcatgatcata

SEQ ID NO: 415585 - DNA, 75 bp, synthetic construct
  source 1..75: mol_type = other DNA
cgatgttcagcggcgagaagcagaacgacgaccgcacccgaacaccattgacatgtttgaaggcactccccaatg

SEQ ID NO: 415586 - DNA, 75 bp, synthetic construct
  source 1..75: mol_type = other DNA
cgccagtgattaactggaactgtggtgccacacaacctgtaccggatgcgcctgtgccgaaagatttaccccccg

SEQ ID NO: 415587 - DNA, 75 bp, synthetic construct
  source 1..75: mol_type = other DNA
aacactatccataaggatatctctgcagccacaacggtcgcattgcttaataccctgcgcaagcgtcttacgcac

SEQ ID NO: 415588 - DNA, 75 bp, synthetic construct
  source 1..75: mol_type = other DNA
atatgtttttgatgtgcatcacattatgtcgattcttgaatacatccttgatcataacgctaaaccagatatttg

SEQ ID NO: 415589 - DNA, 75 bp, synthetic construct
  source 1..75: mol_type = other DNA
tgtcgcttctggtgctgtcgcggttatttctgaagacaagaacatcggccgtgcggacctggatgttgatggcaa

SEQ ID NO: 415590 - DNA, 75 bp, synthetic construct
  source 1..75: mol_type = other DNA
ctcaatgttgcaacgccgtttgtgctggttggattaggactgatattcccgctgctagcgcgtaaagcgaatagc

SEQ ID NO: 415591 - DNA, 75 bp, synthetic construct
  source 1..75: mol_type = other DNA
tgcattaaaacatgagaataataatttattgttaatgataaagaaaatgcatgagaatgcttaccggcataatat

SEQ ID NO: 415592 - DNA, 75 bp, synthetic construct
  source 1..75: mol_type = other DNA
ggcactaaaatatgaaaataataatttactacttatgattcaaagaatgcacgaaaatgcttacaggcataatat

SEQ ID NO: 415593 - DNA, 75 bp, synthetic construct
  source 1..75: mol_type = other DNA
ttgttaaagcaattctttatattattttattttatttttttttttttttttgcattggcgatcaaagtattttga

SEQ ID NO: 415594 - DNA, 75 bp, synthetic construct
  source 1..75: mol_type = other DNA
ggtgatactagttgggcatatcctttgatgcatcaagtggcatcagcaattgatatatatgatcgttgctcctca

SEQ ID NO: 415595 - DNA, 75 bp, synthetic construct
  source 1..75: mol_type = other DNA
caagatattaccactctggcaaaaagagcggcattaaacgtttcgcgagtgattgcaaactaccgaccgatgagg

SEQ ID NO: 415596 - DNA, 75 bp, synthetic construct
  source 1..75: mol_type = other DNA
ttaccgaaagtgctgaactatatcttgttttacacgatctatcaggtcatccgatcaatgtttctgaagggctgg

SEQ ID NO: 415597 - DNA, 75 bp, synthetic construct
  source 1..75: mol_type = other DNA
gtgatactggttgtctggagattcagggggccagtctaccaggggctggtggttgttttttcatgggtgtttatc

SEQ ID NO: 415598 - DNA, 75 bp, synthetic construct
  source 1..75: mol_type = other DNA
ctgaatattgcgacgccatttgtattggtggggttgggattgatatttccgatcttggcacgtagagcgacgacc

SEQ ID NO: 415599 - DNA, 75 bp, synthetic construct
  source 1..75: mol_type = other DNA
actgccttcgcctgcctgacggggatcttcccgaaaatggaggctttcaccgcagagtggactttccagctagcg

SEQ ID NO: 415600 - DNA, 75 bp, synthetic construct
  source 1..75: mol_type = other DNA
gactcgtcaggcacatcagttgtggttatatggtcagatatcacaacaggttcatgaccgaattatcctgcaact

SEQ ID NO: 415601 - DNA, 75 bp, synthetic construct
  source 1..75: mol_type = other DNA
ttgaatcagcaaatagaagttttaggcctcaaatttgctgtaaaagtaaaaaatgaagtttggcagtattcaata

SEQ ID NO: 415602 - DNA, 75 bp, synthetic construct
  source 1..75: mol_type = other DNA
tttctacaaaacaacatttctttagcagtaagctgtttaagtatgtaatgctttttttttctttttgctatcatt

SEQ ID NO: 415603 - DNA, 75 bp, synthetic construct
  source 1..75: mol_type = other DNA
cacagaactcaggacttatatgatattcttaccacagtaaatggatttatactcacttccagaatgatttactct

SEQ ID NO: 415604 - DNA, 75 bp, synthetic construct
  source 1..75: mol_type = other DNA
acgacaatatcatcgggcactcaatccatgattatatgattgataacaaaaaaaacatcaccactcttaacttcc

SEQ ID NO: 415605 - DNA, 75 bp, synthetic construct
  source 1..75: mol_type = other DNA
aaatgagtctgaaagacgcccgctatgcggtggctgaatacagggagttgcttgcgaaagggaagaatccggcac

SEQ ID NO: 415606 - DNA, 75 bp, synthetic construct
  source 1..75: mol_type = other DNA
ccgggcgtgaagatgaatggctgcccattcgccctggcaccgatggcgcactggcctgtgcgattgcctgggtac

SEQ ID NO: 415607 - DNA, 75 bp, synthetic construct
  source 1..75: mol_type = other DNA
aagactcgtttagaaaggttaaagctggaaggtatcgttgaagatgatatggacatcatccaacagatcataatg

SEQ ID NO: 415608 - DNA, 75 bp, synthetic construct
  source 1..75: mol_type = other DNA
ctttcttttattcatatttaataaccaaagtttcgctgtcaaaaatattatagctcagttgattcttggtacggg

SEQ ID NO: 415609 - DNA, 75 bp, synthetic construct
  source 1..75: mol_type = other DNA
agagatacagggctaaatattcttgatattgccgctaactatgctgatttcgtgacagaagctgttttaagaaaa

SEQ ID NO: 415610 - DNA, 75 bp, synthetic construct
  source 1..75: mol_type = other DNA
tcctttgtttgcgtctggctgattgagccgaccgatgaacaagaaaccgcttcttaccgctacatcagggaacaa

SEQ ID NO: 415611 - DNA, 75 bp, synthetic construct
  source 1..75: mol_type = other DNA
gagtcgttaccggccctaaggttcataccatttttaaaactgatggtatcggtaaggagttcgcatggtttcgcc

SEQ ID NO: 415612 - DNA, 75 bp, synthetic construct
  source 1..75: mol_type = other DNA
agggtgtgagcatcttttcctgtgggatgatgatgcgtggccaatagctgataactggcatctaccctacatcga

SEQ ID NO: 415613 - DNA, 75 bp, synthetic construct
  source 1..75: mol_type = other DNA
gatgaaaggctcaaagttctctaatggatccccaaaagtatctacaggtggtagtagcccttattggtataaata

SEQ ID NO: 415614 - DNA, 75 bp, synthetic construct
  source 1..75: mol_type = other DNA
gtggcctcgccggtgacggaagggcactggtcgcaggtgcttacgcgttttgaacccggcgggatttacccggcc

SEQ ID NO: 415615 - DNA, 75 bp, synthetic construct
  source 1..75: mol_type = other DNA
aatgattctcctgcagtataatctttcagttgaacattttaatctgaatagttcacttatttactacataaacaa

SEQ ID NO: 415616 - DNA, 75 bp, synthetic construct
  source 1..75: mol_type = other DNA
ccgctggccggatgcaccggagtgggcgagccgggaaacctggctggagtgtgtcccggacagtatcgaaccgtc

SEQ ID NO: 415617 - DNA, 75 bp, synthetic construct
  source 1..75: mol_type = other DNA
gttgcaggaggacacgggtgtgacgctaccggcggagctggcggtgatgctgggaaggctggagcgggagctgcg

SEQ ID NO: 415618 - DNA, 75 bp, synthetic construct
  source 1..75: mol_type = other DNA
cactgctggcctgggatcttctgtgccttggacgtccggtcatcggagaaaccttcagccacggaacactcgcta

SEQ ID NO: 415619 - DNA, 75 bp, synthetic construct
  source 1..75: mol_type = other DNA
cgccgaggttgccgcacaggaactggatcgcctgctctttattgctaaaatcctgatcaacaaagatattctcca

SEQ ID NO: 415620 - DNA, 75 bp, synthetic construct
  source 1..75: mol_type = other DNA
tggaaatccgcccaccttgccgggcgccggtgctgtgtgggaatccgcccaccttgttatgggaatccgcccacc

SEQ ID NO: 415621 - DNA, 75 bp, synthetic construct
  source 1..75: mol_type = other DNA
gccggtgccgtgtggaaatcggcccaccttgccgcgcgccggtgctgtgtggaaatccgcccaccttaccggacg

SEQ ID NO: 415622 - DNA, 75 bp, synthetic construct
  source 1..75: mol_type = other DNA
ctatagagatggattcatagaagattcactagatatattgaaagagtatagacagatttcaatggtatctctcag

SEQ ID NO: 415623 - DNA, 75 bp, synthetic construct
  source 1..75: mol_type = other DNA
aacgaacttttaaaagatgaaccggaaaaagtaacagtaattgatgcttacgatcagattaatgaaataagcgaa

SEQ ID NO: 415624 - DNA, 75 bp, synthetic construct
  source 1..75: mol_type = other DNA
gtgaagttaatggttttagggaccgcgctcgcggctaagatggtaaagtatggagttaatgaaatgttttttata

SEQ ID NO: 415625 - DNA, 75 bp, synthetic construct
  source 1..75: mol_type = other DNA
aacgcgttatggcgtgactcgccaggtcccggctatgtgcatttccctgactggctggggagctggtttttacga

SEQ ID NO: 415626 - DNA, 75 bp, synthetic construct
  source 1..75: mol_type = other DNA
ttagtaacccggaattgcgtaagtctgccgccgatcgtgatgctgcctttgaaaaattaatgaagcgcgcagtcc

SEQ ID NO: 415627 - DNA, 75 bp, synthetic construct
  source 1..75: mol_type = other DNA
gaaaaaattaatgaagcgcgcagtccattactgccacagctagggaaggtgcgaataagcggggaaattcttctc

SEQ ID NO: 415628 - DNA, 75 bp, synthetic construct
  source 1..75: mol_type = other DNA
atttcgctgaggaacagtaccagcaactgtggttcccggcttatggactgctcccccgttggcaccatgcccgca

SEQ ID NO: 415629 - DNA, 75 bp, synthetic construct
  source 1..75: mol_type = other DNA
tgaagtttatcgtgccggccgtggtgattgccgggctggccgtggggcttaaaagctgcaaaaacgaaccggcag

SEQ ID NO: 415630 - DNA, 75 bp, synthetic construct
  source 1..75: mol_type = other DNA
gaagacgcgcattatgtctaccgctacgatgaatacggcaggctgatggagaagacagaccgcataccggaaggg

SEQ ID NO: 415631 - DNA, 75 bp, synthetic construct
  source 1..75: mol_type = other DNA
atacatcatttttgtcggtgcctattctaacgaccgcgactgtactttcgatctgatgcgtgaagggttaaatcg

SEQ ID NO: 415632 - DNA, 75 bp, synthetic construct
  source 1..75: mol_type = other DNA
tatgttatacataaaacacattcgacttcgtttacttcttaacaaatcttcagatgtttataaaagaattgatta

SEQ ID NO: 415633 - DNA, 75 bp, synthetic construct
  source 1..75: mol_type = other DNA
actcgccgggcaaaagccgctggcgatgtgccgctttaccttcttcagactgatgcgctgaaagatcaggtgaat

SEQ ID NO: 415634 - DNA, 75 bp, synthetic construct
  source 1..75: mol_type = other DNA
gctggtttacaaattactgacggcagagcaggactatgaaaccacaggcagtgaagaaacactgaaaacggtgat

SEQ ID NO: 415635 - DNA, 75 bp, synthetic construct
  source 1..75: mol_type = other DNA
cagaaatatcatggagtagattctctaatgatgttggtaacacaacaatttatcataaagaaaatggtgaacgtg

SEQ ID NO: 415636 - DNA, 75 bp, synthetic construct
  source 1..75: mol_type = other DNA
atatcattgaagagcataactggcctgcacttgctaaatattcagaatcgctctataaacaagtttgtgagagga

SEQ ID NO: 415637 - DNA, 75 bp, synthetic construct
  source 1..75: mol_type = other DNA
tcatttcaagtaatcaacaaaaatgaagtaaagcatattaatatagatgattatgatctttttattttccatggt

SEQ ID NO: 415638 - DNA, 75 bp, synthetic construct
  source 1..75: mol_type = other DNA
gctgtgtggaaatccgctcactttgccgggcgccggtgccgtgtgggaatcagcccaccttgccgggcgccggtg

SEQ ID NO: 415639 - DNA, 75 bp, synthetic construct
  source 1..75: mol_type = other DNA
tctttactggttctttacgctttaattttaacttgcatggtatttatgcaaatgatcgtattttagaactactta

SEQ ID NO: 415640 - DNA, 75 bp, synthetic construct
  source 1..75: mol_type = other DNA
actggacttaataatttcaataatgatgctgagcagatgtcggcaaattttaccaagctaacggtaagggtcact

SEQ ID NO: 415641 - DNA, 75 bp, synthetic construct
  source 1..75: mol_type = other DNA
cagctgtccggcctgacacagagtcttggtggcggggccgccatcgcaacggatggctcctttactgcaccaact

SEQ ID NO: 415642 - DNA, 75 bp, synthetic construct
  source 1..75: mol_type = other DNA
gcctctatcagcccggtttatgacgtgctcgcgcatctgcagaacctggtaatgaccttctcggatatcaccgaa

SEQ ID NO: 415643 - DNA, 75 bp, synthetic construct
  source 1..75: mol_type = other DNA
cgaaaccaaagagcaatttgagatgctacgtaagatccactgtcgcgttattcagggatatttcttttcccgccc

SEQ ID NO: 415644 - DNA, 75 bp, synthetic construct
  source 1..75: mol_type = other DNA
aatcagcccaccttgccgggcgccggtgctgtgtggaaatccgcccatcttcatgacaaaaatttgtcaaatgac

SEQ ID NO: 415645 - DNA, 75 bp, synthetic construct
  source 1..75: mol_type = other DNA
cggtatatcacccaggatccgatagggttgaaggggggaataaatctatacacgtatccactggtaccaatacgt

SEQ ID NO: 415646 - DNA, 75 bp, synthetic construct
  source 1..75: mol_type = other DNA
taagtatagatataccgttgagtgattttttttcatcgtttaatagtaagaaaacgaacgcaatgaatttagtaa

SEQ ID NO: 415647 - DNA, 75 bp, synthetic construct
  source 1..75: mol_type = other DNA
aaaaaaatatgagtatttactgaatttttattacgataatataaattacttatataaacttaagcgaattgaatt

SEQ ID NO: 415648 - DNA, 75 bp, synthetic construct
  source 1..75: mol_type = other DNA
cttggtatttttggggctatacctgtacgcgataataatatgatttcactcaggaatgatttttttgatatttct

SEQ ID NO: 415649 - DNA, 75 bp, synthetic construct
  source 1..75: mol_type = other DNA
acagaaatatatacaaaccagtaaggttaaagctattgttgttttgtcggttaaaaatggcaaggttcctgaata

SEQ ID NO: 415650 - DNA, 75 bp, synthetic construct
  source 1..75: mol_type = other DNA
tacaggtaacgaagattttactgccatacaatttaattcattaagagatgtaataagtttaattgataataaaac

SEQ ID NO: 415651 - DNA, 75 bp, synthetic construct
  source 1..75: mol_type = other DNA
ccgcgctggcgctggaacaggaaaaaagccgccagcatattgaacaactcatccaatttgatccgatgaccggtc

SEQ ID NO: 415652 - DNA, 75 bp, synthetic construct
  source 1..75: mol_type = other DNA
atgaagctaaccgatgcagaaaatgccgctgacggcatttttttccccgcgcttgagcaaaatatgatgggcgcg

SEQ ID NO: 415653 - DNA, 75 bp, synthetic construct
  source 1..75: mol_type = other DNA
tattcatatcccggcgttatccgtgaacttgtcggcgctgcactttcgcagtaatcaactgcctaatcaggtgtc

SEQ ID NO: 415654 - DNA, 75 bp, synthetic construct
  source 1..75: mol_type = other DNA
aagagcaatttgagatgctacgcaagatccactgtcgcgttattcagggatatttcttttcccgcccctacccgc

SEQ ID NO: 415655 - DNA, 75 bp, synthetic construct
  source 1..75: mol_type = other DNA
acgggcttttccggattatcccgcttagtcagtcttccggtaacggaaatcaaattgacaaaagttttgtcgatc

SEQ ID NO: 415656 - DNA, 75 bp, synthetic construct
  source 1..75: mol_type = other DNA
aaagcctcaatttaaccgtcgtggcggaaggcgtcgaaaccaaagagcaatttgagatgctacgtaagatccact

SEQ ID NO: 415657 - DNA, 75 bp, synthetic construct
  source 1..75: mol_type = other DNA
ggtattaggtgcggcgctgaaagaagcgatcagcaacaaccagttgaaactggtttaccagccgcagatcttcgc

SEQ ID NO: 415658 - DNA, 75 bp, synthetic construct
  source 1..75: mol_type = other DNA
ccagtgcattgggcatcatccactcacggaacagaagttaagaatgcgcaaaactggtctgtaaccattcgccag

SEQ ID NO: 415659 - DNA, 75 bp, synthetic construct
  source 1..75: mol_type = other DNA
acgggcttttccggattatcccgcttagtcagtcttccggtaacggaaatcaaaattgacaaaagttttgtcgat

SEQ ID NO: 415660 - DNA, 75 bp, synthetic construct
  source 1..75: mol_type = other DNA
ttacctcgatgacctggtcgacaaagccgtctctccggtggtgtatctcatcggtgttgaccatattcaggatgt

SEQ ID NO: 415661 - DNA, 75 bp, synthetic construct
  source 1..75: mol_type = other DNA
gcgccgaggggaaagtttattacctggcgctggtacgggatgccagcgtagaaatggcgcaaaaagaacagaccc

SEQ ID NO: 415662 - DNA, 75 bp, synthetic construct
  source 1..75: mol_type = other DNA
gccgatcaggcattgctggaagtggttaatcgctttcgcgaaaaactcaaacccgatcagtacctctgtcgcgtt

SEQ ID NO: 415663 - DNA, 75 bp, synthetic construct
  source 1..75: mol_type = other DNA
ggaaaccagcgcctttattgaacgtgtggcggatatcagccagcatatggccgcgctggcgctggagcaggaaaa

SEQ ID NO: 415664 - DNA, 75 bp, synthetic construct
  source 1..75: mol_type = other DNA
tgagtaaaggtacggtttctgcggcgatggggatgctgcaaatgctgatctttaccgtcggtattgaaatcagca

SEQ ID NO: 415665 - DNA, 75 bp, synthetic construct
  source 1..75: mol_type = other DNA
aaagacccgtcgaatcatccggtggcgggaataacggtgaacttcaccatgccacaggacgtggcggcaaacttt

SEQ ID NO: 415666 - DNA, 75 bp, synthetic construct
  source 1..75: mol_type = other DNA
gtgcattttattggcgacacagcggcggcaaaaattatcgagttgacggctgtgccagaccgcataatcgccggt

SEQ ID NO: 415667 - DNA, 75 bp, synthetic construct
  source 1..75: mol_type = other DNA
caagcgtcactgacgctaacggcaacccggtagaaggcataaaagttagtttccgcggaacctccgtcacgctaa

SEQ ID NO: 415668 - DNA, 75 bp, synthetic construct
  source 1..75: mol_type = other DNA
ttctgaagggctggaatttgtgcagtcaggtaccaacgtgccctatgtgcaagttagtgcaattgactacagtaa

SEQ ID NO: 415669 - DNA, 75 bp, synthetic construct
  source 1..75: mol_type = other DNA
acctcgcagtccgtccttaagagcaatcggtcatcactgaaaggggactataccgatagtgctgaattacgtctt

SEQ ID NO: 415670 - DNA, 75 bp, synthetic construct
  source 1..75: mol_type = other DNA
acaacgtgaaaccaggagtcactacagactggaaagaaaccgcagatggcgtctataaggcgacctataccgcct

SEQ ID NO: 415671 - DNA, 75 bp, synthetic construct
  source 1..75: mol_type = other DNA
tcccggactcactcgtcaattaagattgataaggaccgttatctctccgggaatccggtaatgactccaacttat

SEQ ID NO: 415672 - DNA, 75 bp, synthetic construct
  source 1..75: mol_type = other DNA
tatccggatgcacgacgagcgcacccaccactatcactacgacagccagcaccgcctggtgttccacacgcggat

SEQ ID NO: 415673 - DNA, 75 bp, synthetic construct
  source 1..75: mol_type = other DNA
actcaacttagtcagagcacgagcaatactaacgacagtggtgttgctgaagttacccttaagggcacggttttg

SEQ ID NO: 415674 - DNA, 75 bp, synthetic construct
  source 1..75: mol_type = other DNA
tcacgctggcagcctcgaaggatccggtgattgccgacaataacgatctcacgacactaacagcaacagtcgctg

SEQ ID NO: 415675 - DNA, 75 bp, synthetic construct
  source 1..75: mol_type = other DNA
atcattggtttcgtcgctacaaaccaaatatgccctgaaaggctataacgtcgaagccaccgctctggaagctgc

SEQ ID NO: 415676 - DNA, 75 bp, synthetic construct
  source 1..75: mol_type = other DNA
cgcggggagtatgacgagtggggaaacctgctgggagaggaaagcacgcagcaccttcaacagtcactccgtctg

SEQ ID NO: 415677 - DNA, 75 bp, synthetic construct
  source 1..75: mol_type = other DNA
tcgagagcagacagccattccgcaagttccggtaactccggatggttggataagctgtagtgagcgaatgccgaa

SEQ ID NO: 415678 - DNA, 75 bp, synthetic construct
  source 1..75: mol_type = other DNA
tatgatgcgtggggaaaggccgtcagcaccacgcagggcggtctgacgcgcagcatggggtatgacgctgccggg

SEQ ID NO: 415679 - DNA, 75 bp, synthetic construct
  source 1..75: mol_type = other DNA
gaacgggacatattaaaaaaagccgtacttcgcaaagctgtccgactgaggtacgcctttatccgtgacaacacc

SEQ ID NO: 415680 - DNA, 75 bp, synthetic construct
  source 1..75: mol_type = other DNA
atctgaagataaggttgtctcgcctcatacattcaataatcgattagcaacgatccgacagtacttcgtatggga

SEQ ID NO: 415681 - DNA, 75 bp, synthetic construct
  source 1..75: mol_type = other DNA
catgataatttcctgaatcagacatttgaaaataccagtaaacacatcacgataatttctccatggctgacctgg

SEQ ID NO: 415682 - DNA, 75 bp, synthetic construct
  source 1..75: mol_type = other DNA
cgatcactctttttcttctttcttctcaagtcttaatcaaatctttacctatttcctattagttttaaataagaa

SEQ ID NO: 415683 - DNA, 75 bp, synthetic construct
  source 1..75: mol_type = other DNA
agtttccacgagattaccgtgagttcggctactactatctccgctactggaaggggctgcgaatggatgatgacc

SEQ ID NO: 415684 - DNA, 75 bp, synthetic construct
  source 1..75: mol_type = other DNA
tatgctagataataaatgtgaccttataattactggaaacgcatctgttacgctaaaaaaaaggcttgaaaaata

SEQ ID NO: 415685 - DNA, 75 bp, synthetic construct
  source 1..75: mol_type = other DNA
aatgtcttttccggatggtgcgtgggaaattatgtatcaacgcagggactgtctgttcacgtaagaccggtaatt

SEQ ID NO: 415686 - DNA, 75 bp, synthetic construct
  source 1..75: mol_type = other DNA
ggacgacccgcgctttacgcttgctgacggcaaagtgaccagtcactggcaaattctcgaacgggttttcgcata

SEQ ID NO: 415687 - DNA, 75 bp, synthetic construct
  source 1..75: mol_type = other DNA
attataaaaatttaaacacagacacatccgagaattctgctgcggatttagacagtttcttaaagaaaaacaaaa

SEQ ID NO: 415688 - DNA, 75 bp, synthetic construct
  source 1..75: mol_type = other DNA
attataaaattttaaacactggcacatccgagaattctgctacagatttagacagtttcttaaagaaaaccaaaa

SEQ ID NO: 415689 - DNA, 75 bp, synthetic construct
  source 1..75: mol_type = other DNA
caaggatttacgcatcttaccgtacttaccgacgagactaaatttggcgatattactctgcataaaacgacaggg

SEQ ID NO: 415690 - DNA, 75 bp, synthetic construct
  source 1..75: mol_type = other DNA
ggcctgatcaacgtcaccttgtttggcattattttctttcagattcagctgtatgccagcctgctattacaggtg

SEQ ID NO: 415691 - DNA, 75 bp, synthetic construct
  source 1..75: mol_type = other DNA
ctcggcgaatagtgaaaggagaaaaaccccttaacttttcgagcctacgagaaagtttatctcaatttgatttcc

SEQ ID NO: 415692 - DNA, 75 bp, synthetic construct
  source 1..75: mol_type = other DNA
tctatgcttgaggttgacattgacctcaccgataagcggcattggagtgttcgccctccaatagcgacgagctga

SEQ ID NO: 415693 - DNA, 75 bp, synthetic construct
  source 1..75: mol_type = other DNA
gttagtaaaacactggacaatctttatgcccagtttgctgtcggttccgtaagtgttgctgacgtagcaaaagtg

SEQ ID NO: 415694 - DNA, 75 bp, synthetic construct
  source 1..75: mol_type = other DNA
agaatagtggtcgtagaaaagattttgaccatagatttaaaatttttaattatcaattttttgacgctatcactg

SEQ ID NO: 415695 - DNA, 75 bp, synthetic construct
  source 1..75: mol_type = other DNA
aaggcactcagctggttggcggtttgcgttgtttcgattggtctgatgacggtatttatcaatccggtgtttgca

SEQ ID NO: 415696 - DNA, 75 bp, synthetic construct
  source 1..75: mol_type = other DNA
acaggccgtctacaccctgccggagaatgccaccctggtcgggagccgggcaatgacagccctgctggggcgtgt

SEQ ID NO: 415697 - DNA, 75 bp, synthetic construct
  source 1..75: mol_type = other DNA
gctggcgattgattacgaagaccagggccgtaaggtgcgttatgacttcaccctgccgggagaggcggacacaca

SEQ ID NO: 415698 - DNA, 75 bp, synthetic construct
  source 1..75: mol_type = other DNA
gcgattgtttcggggacagccagcggtgactggacgctgtcctgcgtacgcgggcaggttaacagcatcaccttt

SEQ ID NO: 415699 - DNA, 75 bp, synthetic construct
  source 1..75: mol_type = other DNA
ccagtagcgaatgatgatgtttatatggggggactggcgcaagcagagaactttaagaaaaatcacatgagttga

SEQ ID NO: 415700 - DNA, 75 bp, synthetic construct
  source 1..75: mol_type = other DNA
gatctttctgttgcgcactcatgtactaaagaattactggaacaactgaaccgataccatcaaattgatgaatca

SEQ ID NO: 415701 - DNA, 75 bp, synthetic construct
  source 1..75: mol_type = other DNA
actctgaccagcctgctggaggttgggctggatttaagctacgaaactggcgatctatcgcaattggctgtgctt

SEQ ID NO: 415702 - DNA, 75 bp, synthetic construct
  source 1..75: mol_type = other DNA
agggtggcggtggccgtgttaaaagcgtcaccatgaaccagccggatatcaaacttagtgcatctgctggcgtgt

SEQ ID NO: 415703 - DNA, 75 bp, synthetic construct
  source 1..75: mol_type = other DNA
tcacaggtaatgacgcagcaaaaggagtcggtgtactcatagaaggtttagcaactagtaaaaaatcctctaatg

SEQ ID NO: 415704 - DNA, 75 bp, synthetic construct
  source 1..75: mol_type = other DNA
aacattgacggcagcatccatcgctgggcaaaaaaagaagttatcgacaacgaccgcgaagactggaagcgtatc

SEQ ID NO: 415705 - DNA, 75 bp, synthetic construct
  source 1..75: mol_type = other DNA
tgccggggcagcagtatgataaggagtcggggctgtactacaaccggaaccggtactacgatccgttgcaggggc

SEQ ID NO: 415706 - DNA, 75 bp, synthetic construct
  source 1..75: mol_type = other DNA
aggcattgaagagcgttacggcattaaacaagcgattgttgtcgataccgaagatgatgccagtgatcacaccat

SEQ ID NO: 415707 - DNA, 75 bp, synthetic construct
  source 1..75: mol_type = other DNA
gacatcgcccaacttctctcgctttctcagtcatttatatccagagcgctaacccgttgccagaaagaaggcgtg

SEQ ID NO: 415708 - DNA, 75 bp, synthetic construct
  source 1..75: mol_type = other DNA
aatcaacattggattactgaaaccgcagattccagtgaaagacttttagatcttttggtggaactaagaaatttg

SEQ ID NO: 415709 - DNA, 75 bp, synthetic construct
  source 1..75: mol_type = other DNA
atgtcctacagacgatacaaatggccagataatgatttggaaaaggcttgtgaggaaaagcaattcactccttat

SEQ ID NO: 415710 - DNA, 75 bp, synthetic construct
  source 1..75: mol_type = other DNA
tttgagcgcgtacgtggacgattacatcctaccgtgcaaggactgcgtctgtttgaagaagtgcaacgatcctgg

SEQ ID NO: 415711 - DNA, 75 bp, synthetic construct
  source 1..75: mol_type = other DNA
tccccgtaaacctaatagtcccagacgtcctggcagcccacaggaaatggtcggcctgaccatgctggcgtcaac

SEQ ID NO: 415712 - DNA, 75 bp, synthetic construct
  source 1..75: mol_type = other DNA
tgacagtagcacattaaaatacaccgtcaatcagcttataaaatacaaaagaataggttatgttcagaacgttga

SEQ ID NO: 415713 - DNA, 75 bp, synthetic construct
  source 1..75: mol_type = other DNA
aaaggcttggtatacaggttcttgcggaaggtgtggaaacgaagtggcagtgggaatggctcaaatcccgtaatg

SEQ ID NO: 415714 - DNA, 75 bp, synthetic construct
  source 1..75: mol_type = other DNA
agccctatctttctcttatgaatgatgatttctttatcagttttaatcttgattccagtgcgtgcacacctgcat

SEQ ID NO: 415715 - DNA, 75 bp, synthetic construct
  source 1..75: mol_type = other DNA
cgggcgctactttgctgacgggcaagtcgcctttttggggcgcaacgatacccaagtgaaggtgaatggttaccg

SEQ ID NO: 415716 - DNA, 75 bp, synthetic construct
  source 1..75: mol_type = other DNA
atccggtgaatggtattgatccattagggttaagtcctgcagatgtagcgttaatgcgaaaaaaagaacaactaa

SEQ ID NO: 415717 - DNA, 75 bp, synthetic construct
  source 1..75: mol_type = other DNA
gtgactaatgatccgatgacgctggtgcgctggctgactgcaggcgctgggatcgcctacgtgccgctgatgtgg

SEQ ID NO: 415718 - DNA, 75 bp, synthetic construct
  source 1..75: mol_type = other DNA
tttttatctactctctccgtggttttcgacagcgcctcgtacctgaaaaccttcggtttaaccgatgccgatctt

SEQ ID NO: 415719 - DNA, 75 bp, synthetic construct
  source 1..75: mol_type = other DNA
aacaacaggtgctggatttgtccgcacagggccataccggaaccgcccttgcattacgtgatgccagacttgcgc

SEQ ID NO: 415720 - DNA, 75 bp, synthetic construct
  source 1..75: mol_type = other DNA
gaaaaatatcagtcttctgcggacagtcatgcagagcgcaaccctggtgtcacaggcgcagacggtaggaaaact

SEQ ID NO: 415721 - DNA, 75 bp, synthetic construct
  source 1..75: mol_type = other DNA
cattacttgttagtgttttttttacaattgctaattttattttgcttttatataaacaattgttttttgccgtaa

SEQ ID NO: 415722 - DNA, 75 bp, synthetic construct
  source 1..75: mol_type = other DNA
ggctttacggataaccctcgatacattgcggagaaaaattatatggaagctttactcaaaaaagcatctccccat

SEQ ID NO: 415723 - DNA, 75 bp, synthetic construct
  source 1..75: mol_type = other DNA
tcgctctgggtaaaaactcttttcatattcattgtcaggatcatcgcggaaaggctgtttaccgtaaaaatttac

SEQ ID NO: 415724 - DNA, 75 bp, synthetic construct
  source 1..75: mol_type = other DNA
ctttacctccacgttcacggccctgaaagggaataccacagcgttgctgacggcacctgcccgcatggcctcatc

SEQ ID NO: 415725 - DNA, 75 bp, synthetic construct
  source 1..75: mol_type = other DNA
cccagaatattaccatttgtggctggtgtaatgatgttagttcttatttgaatatatttgatatttttgtattac

SEQ ID NO: 415726 - DNA, 75 bp, synthetic construct
  source 1..75: mol_type = other DNA
atcccactggcgctttcggcccgctggacggcgatggcctgggcgctggaaggtctcggcatcctctggctgggc

SEQ ID NO: 415727 - DNA, 75 bp, synthetic construct
  source 1..75: mol_type = other DNA
cactctcgccaaaagatacgttatgcgtcagtttttttattggcgatgaggcgatatttactctgaagttgcagc

SEQ ID NO: 415728 - DNA, 75 bp, synthetic construct
  source 1..75: mol_type = other DNA
gacttcgcacagcggctgtttttcggtcagccgcggtcggatgtcgaaaacggtctctggtttttcgacggcatg

SEQ ID NO: 415729 - DNA, 75 bp, synthetic construct
  source 1..75: mol_type = other DNA
gtgatcgtcacggataaacgtacctataacatcgtccttcatttcatcggtgaagaaacgaagaaaaatgcagac

SEQ ID NO: 415730 - DNA, 75 bp, synthetic construct
  source 1..75: mol_type = other DNA
cgttcttcagctgacctatgaatatccgtttgagcagcaggaaaaagccaaaagcgcggctgataaaaaacgcat

SEQ ID NO: 415731 - DNA, 75 bp, synthetic construct
  source 1..75: mol_type = other DNA
gcaggcgttatctatgtcaatcttaaaaaatggcatgaagcaaatttgacaccgtatttactcaaacttttacga

SEQ ID NO: 415732 - DNA, 75 bp, synthetic construct
  source 1..75: mol_type = other DNA
tgatctgccgacgtcacagttttggtcgtacgcgacatacttcagggtattgtcttttgaatatctgagtgaaag

SEQ ID NO: 415733 - DNA, 75 bp, synthetic construct
  source 1..75: mol_type = other DNA
catagtgtatccgctggtgactgaggtgactgagcctgatgatccgagggtacagcgcgagttgcctttcccatg

SEQ ID NO: 415734 - DNA, 75 bp, synthetic construct
  source 1..75: mol_type = other DNA
atatcagtattgccaccagaagttcgggctgaattgctggcaactcgtggtttgattgaaacctcatccggactc

SEQ ID NO: 415735 - DNA, 75 bp, synthetic construct
  source 1..75: mol_type = other DNA
cttggggcgatcagtaccggcactacgtcaccagacgttaagcgcgtgaaaaagggtgagggggataaatcatga

SEQ ID NO: 415736 - DNA, 75 bp, synthetic construct
  source 1..75: mol_type = other DNA
cattgatctgagtaatgcttactttaacggggttgtcatttgtggtattgactgtctcgaggttgacctgagcaa

SEQ ID NO: 415737 - DNA, 75 bp, synthetic construct
  source 1..75: mol_type = other DNA
ccgggcgccggtgcggtagcaaccggtacggcttccccggatgtgcgcagggttcagattggagaggataactga

SEQ ID NO: 415738 - DNA, 75 bp, synthetic construct
  source 1..75: mol_type = other DNA
accgcaggtctacatgatctcggcaagcggcaaagaaacactgccgaactcgcatattgtgggcgagaaccgcaa

SEQ ID NO: 415739 - DNA, 75 bp, synthetic construct
  source 1..75: mol_type = other DNA
atgaaaaaactacttctttcagcagtcgttttgtcagtcctgggaggcgcggccactaacgttatggcgcttgag

SEQ ID NO: 415740 - DNA, 75 bp, synthetic construct
  source 1..75: mol_type = other DNA
aaaccggacttctcagcggaaaatatgatattgggattgtaatcaatgataatctgacatgtcccgatattgtat

SEQ ID NO: 415741 - DNA, 75 bp, synthetic construct
  source 1..75: mol_type = other DNA
tagaggtacttttaacgcattcaaagggaaaacagttggtaaacagtcagtgaaggtccgtcttcaggctgtgga

SEQ ID NO: 415742 - DNA, 75 bp, synthetic construct
  source 1..75: mol_type = other DNA
gaatccatcagatgccgaaggggatcgttttgatgatatagcacagctctcatggctaaatgatgttgccccaga

SEQ ID NO: 415743 - DNA, 75 bp, synthetic construct
  source 1..75: mol_type = other DNA
gtgatcacgcacggcggaatgatggcaggcaatggattttataacgcctggtcggtgatgatgctcaatgcgctt

SEQ ID NO: 415744 - DNA, 75 bp, synthetic construct
  source 1..75: mol_type = other DNA
tgcatgtatattatctgaaaggtggatggcctgcggggaacggcaataaagggtactggactaataatccgactt

SEQ ID NO: 415745 - DNA, 75 bp, synthetic construct
  source 1..75: mol_type = other DNA
gcaatggtaacgtcatcgcaagcacctataggtagtggtggttgtgccgcagataaatacccgacagttgccgat

SEQ ID NO: 415746 - DNA, 75 bp, synthetic construct
  source 1..75: mol_type = other DNA
tcggatctgagtgagcgaacagctcaaggatcaatgccagtcatttttgagacaattaccagcccggatacgcct

SEQ ID NO: 415747 - DNA, 75 bp, synthetic construct
  source 1..75: mol_type = other DNA
ctggtgcggctgctggacaggctggaggaagaaatccgggcagaccgcgtgagcagtgaaagccgggcgtggctt

SEQ ID NO: 415748 - DNA, 75 bp, synthetic construct
  source 1..75: mol_type = other DNA
aaaccatcaaagagcatgggatatattatctgatacttatgaagatatgaagagattaaatttaggtgggactga

SEQ ID NO: 415749 - DNA, 75 bp, synthetic construct
  source 1..75: mol_type = other DNA
gtatgagtacaacgccgcaggcgacctgactgccgttatcaccccggacggcaaccggagcgagacacagtacga

SEQ ID NO: 415750 - DNA, 75 bp, synthetic construct
  source 1..75: mol_type = other DNA
ggcgctcatggcgcttactgcggtctggcctatcgggccggttcaggtgcgttaatgggcgatctggataaaaat

SEQ ID NO: 415751 - DNA, 75 bp, synthetic construct
  source 1..75: mol_type = other DNA
ctgacgcgcagcatggggtatgacgctgccgggcgcatcaccgtgctgaccaacgagaacggcagccagtccacg

SEQ ID NO: 415752 - DNA, 75 bp, synthetic construct
  source 1..75: mol_type = other DNA
atgctacagcatgcggacatgcaggaattggtggtgggataaatgcggctatcacatattctgagaccaagtctt

SEQ ID NO: 415753 - DNA, 75 bp, synthetic construct
  source 1..75: mol_type = other DNA
gttgcgcgaaaaagcctagttgctgcaaaaactattatagcgggggaaagcttcacatccgataatctggcaata

SEQ ID NO: 415754 - DNA, 75 bp, synthetic construct
  source 1..75: mol_type = other DNA
tcagtaagccgcgcatgacacagagagatcgctggcataaaagacctgcgacggcggcatattgggctttcaaag

SEQ ID NO: 415755 - DNA, 75 bp, synthetic construct
  source 1..75: mol_type = other DNA
cgaggatagccatgtctgggacgggcgtgttaccaaaatctggggagaaaccgggcaaattatcatcggggaggc

SEQ ID NO: 415756 - DNA, 75 bp, synthetic construct
  source 1..75: mol_type = other DNA
aataataatgaattgtatttttccttaaagagtataaagaaatttataccatgggtgcgaaaaatatatatcatt

SEQ ID NO: 415757 - DNA, 75 bp, synthetic construct
  source 1..75: mol_type = other DNA
cccccagcttttcgtgcggcgccccagagggctcattgtcagaggcatcatggagcgccatggtgtcaccaatca

SEQ ID NO: 415758 - DNA, 75 bp, synthetic construct
  source 1..75: mol_type = other DNA
ggaatgaaagtggtatggcgaagagaggacattccagaactgtatgtctcagccgtgcgcgaagcggtgaccgca

SEQ ID NO: 415759 - DNA, 75 bp, synthetic construct
  source 1..75: mol_type = other DNA
cacgtgggggatcaaaaggattacctggtaaaaatattaaacctctagcaggcaaacctctcctgcaatactcta

SEQ ID NO: 415760 - DNA, 75 bp, synthetic construct
  source 1..75: mol_type = other DNA
tggttatatacgactgcgtaaatttttatcattcaaaagagttgggtgtatttctaaaaaaaatcattcatgaga

SEQ ID NO: 415761 - DNA, 75 bp, synthetic construct
  source 1..75: mol_type = other DNA
agcttttgaccttcctgtgggctattccgatcacagcgaggggatagctatccctgtagcagccgttgccagagg

SEQ ID NO: 415762 - DNA, 75 bp, synthetic construct
  source 1..75: mol_type = other DNA
gttgcgagaaaaagtctggtggctgcgcagaaaattcgagcgggggaaacttttaccgcgtcgaatgttacaatc

SEQ ID NO: 415763 - DNA, 75 bp, synthetic construct
  source 1..75: mol_type = other DNA
agctatgccccggagccgccactgccagagccagtcccccgtccgaccgaactctatatcaatggtgagctggtg

SEQ ID NO: 415764 - DNA, 75 bp, synthetic construct
  source 1..75: mol_type = other DNA
agctacgcgcctgagcctccattacccgagccgatgacgcgaccgactgagctgtatatcaatggtgagctggtg

SEQ ID NO: 415765 - DNA, 75 bp, synthetic construct
  source 1..75: mol_type = other DNA
aaagagtctgccaagcagcgcgccactgagaagaaagaacgtgcagcctggcgccagcgtaaagctgcagttaag

SEQ ID NO: 415766 - DNA, 75 bp, synthetic construct
  source 1..75: mol_type = other DNA
ttggcgatagcaccgttttgctgcccagcgcagcggcgctgtttattgtcctgatgctgcgtaaaacgtcgcggt

SEQ ID NO: 415767 - DNA, 75 bp, synthetic construct
  source 1..75: mol_type = other DNA
ccgtttgtttaacggcgaagtcacgctgcgcaacgtgcaggaaggtggcgtgctggcctcgcttcgacttcaccg

SEQ ID NO: 415768 - DNA, 75 bp, synthetic construct
  source 1..75: mol_type = other DNA
tcaccacttctgttgactgcgactacagtgcccggaaagatgatattgcggctatagcaaaaacattatacaggt

SEQ ID NO: 415769 - DNA, 75 bp, synthetic construct
  source 1..75: mol_type = other DNA
gttttttttatggtttcctctgctattcagaaggcaaacctgatcgcgccgaccgtgggaacggtgatcaaaatg

SEQ ID NO: 415770 - DNA, 75 bp, synthetic construct
  source 1..75: mol_type = other DNA
aagaacactgcatcctgctgggaaatctgttcaccaaattcatctcgcaggttggtggtcttggtgccgccagaa

SEQ ID NO: 415771 - DNA, 75 bp, synthetic construct
  source 1..75: mol_type = other DNA
tgcgcctccaaactggcctttatgggctggggtctgggttttcgcgagctggattacaccggcttcagcggccac

SEQ ID NO: 415772 - DNA, 75 bp, synthetic construct
  source 1..75: mol_type = other DNA
aaatcattgggaatggcgtggatgagacgactctgacggcaacagtgaaagatccttttgataacgtagtaaaag

SEQ ID NO: 415773 - DNA, 75 bp, synthetic construct
  source 1..75: mol_type = other DNA
gaatggtgtggatgcggctaaagcccccgccgtggtgaatatcatttctatttcgtcatcccgaactcactcgtc

SEQ ID NO: 415774 - DNA, 75 bp, synthetic construct
  source 1..75: mol_type = other DNA
cgtagactggctggcaactctccgggaactccggatagttgggttatggtgccgaaggagccaactcaggccatg

SEQ ID NO: 415775 - DNA, 75 bp, synthetic construct
  source 1..75: mol_type = other DNA
cctatgagcagatgtacctgctaaatcagcagttgatctgcaatgctgaccagctcaaacacgccgttatcacag

SEQ ID NO: 415776 - DNA, 75 bp, synthetic construct
  source 1..75: mol_type = other DNA
tctgatagagaatactctaaaaatgaaggatatgcagccccgttagatgtcgttcgtgccgtttacctcgagact

SEQ ID NO: 415777 - DNA, 75 bp, synthetic construct
  source 1..75: mol_type = other DNA
atgatgaagcccttcattttcagcatcattgtttccatgctgctggcggccaccgttatcggcgcgctgattgaa

SEQ ID NO: 415778 - DNA, 75 bp, synthetic construct
  source 1..75: mol_type = other DNA
ggccttaaaaaggaaagaaccaaaatatatagccaaatatttgattcagtatgtgaataaaaatacaaacaaata

SEQ ID NO: 415779 - DNA, 75 bp, synthetic construct
  source 1..75: mol_type = other DNA
taggaaaaggagtactagggaaagatacgagcataggtaaacaatgtgagccatcgatttatacagtaagagttt

SEQ ID NO: 415780 - DNA, 75 bp, synthetic construct
  source 1..75: mol_type = other DNA
ccgggaaacgctgcgcagcttcggccgttatgaactcaccaccgcttacacctctgccgggcagttacagagcca

SEQ ID NO: 415781 - DNA, 75 bp, synthetic construct
  source 1..75: mol_type = other DNA
gggatggtccagggaggagacagcgcaaatccgggcacccgtcgggatattccccaaagcccgggatgcgcatac

SEQ ID NO: 415782 - DNA, 75 bp, synthetic construct
  source 1..75: mol_type = other DNA
gggcgattggcggcggcgtacttgaggcgttaatgatgttgatgcatcagggcgtgaaagcgacaaaagaagtgc

SEQ ID NO: 415783 - DNA, 75 bp, synthetic construct
  source 1..75: mol_type = other DNA
ttgttgccgctcgcgagataagcctcaccttactgcccctgatgccagaattattaaacgaagaggtgtatgcaa

SEQ ID NO: 415784 - DNA, 75 bp, synthetic construct
  source 1..75: mol_type = other DNA
ggaaataaaaaattagatgaaacgattgatgataactttaattttacctcaacactttctttagattcgccaaat

SEQ ID NO: 415785 - DNA, 75 bp, synthetic construct
  source 1..75: mol_type = other DNA
tatcggcatgtttttacaaaccgtaatgacgttaataaagtcatttccgaaaataccgtcacgaaaatgataacg

SEQ ID NO: 415786 - DNA, 75 bp, synthetic construct
  source 1..75: mol_type = other DNA
tcaaggtgtttatgggcataatttaattacaagatataagttttatttgttaggtatattgcatgggattaataa

SEQ ID NO: 415787 - DNA, 75 bp, synthetic construct
  source 1..75: mol_type = other DNA
gaaaacaaagaaatgatggctttgtgtcttatcggtgcttatacaggtatgcggatcaatgagatagcaagtctc

SEQ ID NO: 415788 - DNA, 75 bp, synthetic construct
  source 1..75: mol_type = other DNA
tgaaccgcctggaacagagaaaaccgtcgggtctgcgctacgatccgcaagctcaatcgctggtgtgcctgccca

SEQ ID NO: 415789 - DNA, 75 bp, synthetic construct
  source 1..75: mol_type = other DNA
accgaccactggatgctgtttaccccattgtttatcttgactgtatcgtccttaaagttcggcaggacagtcgcg

SEQ ID NO: 415790 - DNA, 75 bp, synthetic construct
  source 1..75: mol_type = other DNA
gttctggacgccgcctgcgcttcagacatccagttacgcgatgaggaaatcatcctgctggtgtcacgaacggtg

SEQ ID NO: 415791 - DNA, 75 bp, synthetic construct
  source 1..75: mol_type = other DNA
cgttggtggcaatttcgctatcggtatcgtggtgtttgtcattctcgtgatcatcaactttatggtcattaccaa

SEQ ID NO: 415792 - DNA, 75 bp, synthetic construct
  source 1..75: mol_type = other DNA
gccggaaagcgcaggcggtttctgctgaaaaaacggatgaaaacaaggctgacaaaaccgtacaccgcagtacac

SEQ ID NO: 415793 - DNA, 75 bp, synthetic construct
  source 1..75: mol_type = other DNA
ccgtatccgggctaattatcgtgagtgtcctgatgccatacggcaggttacactgcagcaggagtatattcgggg

SEQ ID NO: 415794 - DNA, 75 bp, synthetic construct
  source 1..75: mol_type = other DNA
ggtatgtggattcagatgcgcgataacaacgctatctttgggaaaaatatagttaacactgatagcgctcaggcg

SEQ ID NO: 415795 - DNA, 75 bp, synthetic construct
  source 1..75: mol_type = other DNA
ttagaaaactgtgtgaagtataccctgattcaatggttgatgtaaccggattaagctacaatgatgcaggggctc

SEQ ID NO: 415796 - DNA, 75 bp, synthetic construct
  source 1..75: mol_type = other DNA
ttaccatgtgcagataaacctctaaaagataactatgtatataagtttatacatgatcaatgtggttattcctta

SEQ ID NO: 415797 - DNA, 75 bp, synthetic construct
  source 1..75: mol_type = other DNA
tgatggcgatgatccggcagtattcagaccaatacaaaaatacatcaatggcacatggtataacgtcgtacaggt

SEQ ID NO: 415798 - DNA, 75 bp, synthetic construct
  source 1..75: mol_type = other DNA
atgatcagcaaagttgaacgaggcaccactgatgcgggtgccgggtttgagcagacgctgaccggaatgacagtg

SEQ ID NO: 415799 - DNA, 75 bp, synthetic construct
  source 1..75: mol_type = other DNA
tgcagtttttttgtcaggatgaggacgacgtgagcgtcacactggccacattgcgggactatatcctgccggcgg

SEQ ID NO: 415800 - DNA, 75 bp, synthetic construct
  source 1..75: mol_type = other DNA
atctacagtcaatgcactgaggatatttaattcatcttttggggctatttttcgccgttctgaagaaaacctgta

SEQ ID NO: 415801 - DNA, 75 bp, synthetic construct
  source 1..75: mol_type = other DNA
cactaaatattcttgttaatgccgtcattaatggaagtcttggagttggtacgacgaatgcgttaggtggtaact

SEQ ID NO: 415802 - DNA, 75 bp, synthetic construct
  source 1..75: mol_type = other DNA
tcttttcgcataaacaaaattgaaaagaaaaaatcatccggtatagaaatttctggaaacttaatatgcactatt

SEQ ID NO: 415803 - DNA, 75 bp, synthetic construct
  source 1..75: mol_type = other DNA
agcccattacccagaacgagatcgtcaccactgagcgttatttatacccctcagccctcaggaaggttgcgattg

SEQ ID NO: 415804 - DNA, 75 bp, synthetic construct
  source 1..75: mol_type = other DNA
cgtagataccttgcatcgtagggatctggtgtgccggatcttggcaaaggcagccgaggtgtggcgtctgatgct

SEQ ID NO: 415805 - DNA, 75 bp, synthetic construct
  source 1..75: mol_type = other DNA
ggctatcagagattgctaactttcgcggtcatgctgctggttacagggctgctcttgaggcagcaccacaactgg

SEQ ID NO: 415806 - DNA, 75 bp, synthetic construct
  source 1..75: mol_type = other DNA
gagtagtgtacctctctcattatctggttttaatcttgatttatattcttgtgatgtgaacagttgtacttttag

SEQ ID NO: 415807 - DNA, 75 bp, synthetic construct
  source 1..75: mol_type = other DNA
ctgtagaagatgtgcttccagagataaaaagaaatatgggtttaaaaatgtacaatggagtacaacattacctaa

SEQ ID NO: 415808 - DNA, 75 bp, synthetic construct
  source 1..75: mol_type = other DNA
aaaacgcgtgaagagatacaacacgaaactggacttacatttgaacaacaggctgtagcgcgtaagcatcttgtg

SEQ ID NO: 415809 - DNA, 75 bp, synthetic construct
  source 1..75: mol_type = other DNA
gcgggctgacgttacaaggaatggatgataacgccgcaggtttagggaaggtgcgaataagcggggaaattcttc

SEQ ID NO: 415810 - DNA, 75 bp, synthetic construct
  source 1..75: mol_type = other DNA
cctgaaagactatccgaatgtcgccgagaagatgctgaatatggccgagtggtgggtgtgcctgaccatgccgcc

SEQ ID NO: 415811 - DNA, 75 bp, synthetic construct
  source 1..75: mol_type = other DNA
gactctctgactatgatcgaaacaaagttttatcgtcgcagttctccgccgccatcttctatttttaaacgcgct

SEQ ID NO: 415812 - DNA, 75 bp, synthetic construct
  source 1..75: mol_type = other DNA
atcaatgcaatcatatcaacttatagactcatggctattacaatccaaaagtcttggtatagatcttaaattttt

SEQ ID NO: 415813 - DNA, 75 bp, synthetic construct
  source 1..75: mol_type = other DNA
gcactcacgatgtactggtgatggcacaagaagcgtatcgcacaggctatgatgcagtgatgatcctgccgcctt

SEQ ID NO: 415814 - DNA, 75 bp, synthetic construct
  source 1..75: mol_type = other DNA
ttgaaaatggtaaacattttgttattcgtaatatcaaagcccgcaatatcacgccggatttcagtaagaaagcag

SEQ ID NO: 415815 - DNA, 75 bp, synthetic construct
  source 1..75: mol_type = other DNA
accatgtcatcgagcgcatcaactgtactaacggaaaaatcaactggggcattggcataggccttgcggggagta

SEQ ID NO: 415816 - DNA, 75 bp, synthetic construct
  source 1..75: mol_type = other DNA
tcgtcgtgcctgccggattggtttgtgacaatatcaacaccggcatcttcattcctgcaggtaaaacgttacaca

SEQ ID NO: 415817 - DNA, 75 bp, synthetic construct
  source 1..75: mol_type = other DNA
tcgatgacgataagccaatcgacaacctagcgtttgtcgttcagtacagctaccccgcagatgtgcgccagctgt

SEQ ID NO: 415818 - DNA, 75 bp, synthetic construct
  source 1..75: mol_type = other DNA
cgcttctgatagcgccgttttcgtgtctggccgttgtcactccgcgtagcagttcttacgactcgcatatgcaga

SEQ ID NO: 415819 - DNA, 75 bp, synthetic construct
  source 1..75: mol_type = other DNA
tggcctttacaaagcggaggtaatacaccgtaagagctggaaaaaccggacagaagtggagctggccacactcac

SEQ ID NO: 415820 - DNA, 75 bp, synthetic construct
  source 1..75: mol_type = other DNA
ctggagttacacaacaaaccgcaacatctttttatgcgtaatatcaaagtgatgcaggaatcctcagttggacca

SEQ ID NO: 415821 - DNA, 75 bp, synthetic construct
  source 1..75: mol_type = other DNA
cgcggtatccaaatctccgccgggaatgctgtctcctttgtggcgctgactaacattgagatgaagcgtgcgtcg

SEQ ID NO: 415822 - DNA, 75 bp, synthetic construct
  source 1..75: mol_type = other DNA
agtttttaacaaaaccattgtctatcaagcatattgatctaaaatccctttttcttatcaggatcgctaagtcaa

SEQ ID NO: 415823 - DNA, 75 bp, synthetic construct
  source 1..75: mol_type = other DNA
gatgcaggaatcctctgttggacccgcattgagcatgaacttcgacatgcgcaaagacgttcgcggcgtgtttat

SEQ ID NO: 415824 - DNA, 75 bp, synthetic construct
  source 1..75: mol_type = other DNA
attatcggtgccaacatcaccaactgtaagttcagcgacttacagggcgacgccattgaatggaacgtggcgatt

SEQ ID NO: 415825 - DNA, 75 bp, synthetic construct
  source 1..75: mol_type = other DNA
acacgactggatcgcctcatttaaacaagccttcagcgaaggacaaacagtcgtcgtgcctgccggattggtttg

SEQ ID NO: 415826 - DNA, 75 bp, synthetic construct
  source 1..75: mol_type = other DNA
tcagcgctgaacgagatgattgccaacaatcaggaccgcgaagcgtttaacgaagcggatattcgctaccacgag

SEQ ID NO: 415827 - DNA, 75 bp, synthetic construct
  source 1..75: mol_type = other DNA
gtgatgccggcaagcataccgttggcatgtgtatctcccgtcttgcaaaagaactcagtgcaaaggacgcaaaag

SEQ ID NO: 415828 - DNA, 75 bp, synthetic construct
  source 1..75: mol_type = other DNA
aatatgttcgagatattgatattgttagagtgtccttgccgggcagagcttcagagtctatcacagattttaaag

SEQ ID NO: 415829 - DNA, 75 bp, synthetic construct
  source 1..75: mol_type = other DNA
gtaaccgccaatgatctaatgacttattcatatcatcattctatcgttaacctaaaattctctagcgcacctaat

SEQ ID NO: 415830 - DNA, 75 bp, synthetic construct
  source 1..75: mol_type = other DNA
tccacacctgcgttctggcttgggctgggcgtcattgtgctgttttatggtcatctgcaaattcttcccggcggc

SEQ ID NO: 415831 - DNA, 75 bp, synthetic construct
  source 1..75: mol_type = other DNA
gaaaatattcgccagcaattggggctcgaccagccgctatacgtacaattttaccgctacgtcagcgacctgttt

SEQ ID NO: 415832 - DNA, 75 bp, synthetic construct
  source 1..75: mol_type = other DNA
gtgacctgggaacatccattcgtaccgggcgtccggtgctggaagagttgcgtatatttttcccggcgacgctgg

SEQ ID NO: 415833 - DNA, 75 bp, synthetic construct
  source 1..75: mol_type = other DNA
ggatctggcggttttacttgatggggaagcgactaatcctcgatatgcactggctacggaaatggttaaacatct

SEQ ID NO: 415834 - DNA, 75 bp, synthetic construct
  source 1..75: mol_type = other DNA
ctatctggatagctcttgttatgagttgtttgatgtgtattgcattaacaagaaccggattgttgcaatcgatgt

SEQ ID NO: 415835 - DNA, 75 bp, synthetic construct
  source 1..75: mol_type = other DNA
ggtatacacccgggaacggtgcatgcttttttaacaacggcaatgtcgtgcaatggtctgcggggcgtaaacgca

SEQ ID NO: 415836 - DNA, 75 bp, synthetic construct
  source 1..75: mol_type = other DNA
aaattaggcacaattgctaaaacagcttttaacgctacggctgggactactgctgcaaataccaaatttacactg

SEQ ID NO: 415837 - DNA, 75 bp, synthetic construct
  source 1..75: mol_type = other DNA
ccaataagttaagtgcaaatccctatctgaagtggtttactgaatttggccacctgaacagaggtgatatgctca

SEQ ID NO: 415838 - DNA, 75 bp, synthetic construct
  source 1..75: mol_type = other DNA
cttgatatcgtcgtcgatagtcgtaatgctgagcaggttatcgcgttaattggtaatattttcagttatcagatt

SEQ ID NO: 415839 - DNA, 75 bp, synthetic construct
  source 1..75: mol_type = other DNA
cgatcaaaacggtcgtattatctttaccccaagcaaagggctggtgggcgttggcttgccgcgtaccgcgcgtaa

SEQ ID NO: 415840 - DNA, 75 bp, synthetic construct
  source 1..75: mol_type = other DNA
gaacatagaaaacccagaagttcaagcagacatcatcaagaaaatgaaacaattgcgaaaactacataaccgtac

SEQ ID NO: 415841 - DNA, 75 bp, synthetic construct
  source 1..75: mol_type = other DNA
cgttagtttcgataattatggcgtgctataattccataaaaacaatagatgaatctatttcatctgttattaatc

SEQ ID NO: 415842 - DNA, 75 bp, synthetic construct
  source 1..75: mol_type = other DNA
tcgctgtcagtctcctgccctcctgtgtactggcctggaacacaccaggagagaatttcagcggagagcttaagc

SEQ ID NO: 415843 - DNA, 75 bp, synthetic construct
  source 1..75: mol_type = other DNA
cgttgactatgatattgggcattttaacctgaagttaagtgtaccccaggcctatgtcgttgagtatgaacgcgg

SEQ ID NO: 415844 - DNA, 75 bp, synthetic construct
  source 1..75: mol_type = other DNA
acgtggaattccacaaattctcggcacgtttcgcgcaggtgaaatgtatactggttctgatgtttttgactccgt

SEQ ID NO: 415845 - DNA, 75 bp, synthetic construct
  source 1..75: mol_type = other DNA
cattatttaaacctaacacaccaggcaattccaactatttccctgacaacttatccattacagatatggttttct

SEQ ID NO: 415846 - DNA, 75 bp, synthetic construct
  source 1..75: mol_type = other DNA
aaaaagaagaggcgctgaaatcatatgataaagaaaaagaagctactctagaaaagattagagatacaaacgaga

SEQ ID NO: 415847 - DNA, 75 bp, synthetic construct
  source 1..75: mol_type = other DNA
taaaaaatacagacagagaagtctgtccggaactaagagtaaaactattggataatcttaattattcaaggaata

SEQ ID NO: 415848 - DNA, 75 bp, synthetic construct
  source 1..75: mol_type = other DNA
tcgctgacgatctgtttaaatatgagtcagtatgcatcgccgcgatggaacatttaaaaagtaaggcaacggtcc

SEQ ID NO: 415849 - DNA, 75 bp, synthetic construct
  source 1..75: mol_type = other DNA
gtaccatcacagcgactgggcagcacgatacattgaacatacagcaaggaatgccgctgtgatgcagttgtttat

SEQ ID NO: 415850 - DNA, 75 bp, synthetic construct
  source 1..75: mol_type = other DNA
gacagccagaaatgaactggatgaatgtctcagaaatgaaccggttaagcctgtaagggtgcatctgacggtaac

SEQ ID NO: 415851 - DNA, 75 bp, synthetic construct
  source 1..75: mol_type = other DNA
aagaactgatagaggcgacagggtcttcccaaaagtcactacagaaagaagtcttaacgcagaatggcatttttt

SEQ ID NO: 415852 - DNA, 75 bp, synthetic construct
  source 1..75: mol_type = other DNA
acgttttcgcggtgtacgcctatggcgcgatatgcagatgttgccgaactctaaacagaactttactccagtggt

SEQ ID NO: 415853 - DNA, 75 bp, synthetic construct
  source 1..75: mol_type = other DNA
cggccgtgctgcgtactgaagaaggttacattgccccccagttctgggacgaggggataccggcgcttatgctct

SEQ ID NO: 415854 - DNA, 75 bp, synthetic construct
  source 1..75: mol_type = other DNA
aggatacctactctgggataaaagattatcctgtatgtttctatgaccccaaatacaaaataatggcaaatcatc

SEQ ID NO: 415855 - DNA, 75 bp, synthetic construct
  source 1..75: mol_type = other DNA
tacagtattaccgcccagacacgacatgaagaaaatggcggggatgacagcaatgaaattagcggtaacgggacg

SEQ ID NO: 415856 - DNA, 75 bp, synthetic construct
  source 1..75: mol_type = other DNA
agaaaaagactattattcaacccaacattggaacgaagttaatgctcaggatgatgggataatcagacgcgaaac

SEQ ID NO: 415857 - DNA, 75 bp, synthetic construct
  source 1..75: mol_type = other DNA
tgtctacattcggcgcggtcgcgtttgatgttactcactcgcacaccaaactggataaagacaccgcttatggca

SEQ ID NO: 415858 - DNA, 75 bp, synthetic construct
  source 1..75: mol_type = other DNA
cgctgggtgatgaaaactatcagtctgcggcgctgggcgtcggtcgcgatttgtctaccttcggcgcggtcgcgt

SEQ ID NO: 415859 - DNA, 75 bp, synthetic construct
  source 1..75: mol_type = other DNA
gccgtgcaaaaatagttagtaattacaatataacacaaagaattgaaaaaataaaaatcatgtattatcaactac

SEQ ID NO: 415860 - DNA, 75 bp, synthetic construct
  source 1..75: mol_type = other DNA
gatcctcactgaaggaattagtatcgataaaggcgtagaatgtgtaccacttcgggatgctgtccagggaggcag

SEQ ID NO: 415861 - DNA, 75 bp, synthetic construct
  source 1..75: mol_type = other DNA
attactcatcgtttgttcttggaacaggatggaatacactgattggtgctatatcggttgattttacccattcat

SEQ ID NO: 415862 - DNA, 75 bp, synthetic construct
  source 1..75: mol_type = other DNA
atggaaaactgtttataaccgctttaaccgatggtcaaagtcaggcgtgattaatattattttcaacaggttgct

SEQ ID NO: 415863 - DNA, 75 bp, synthetic construct
  source 1..75: mol_type = other DNA
tagctgaacagacgcagttagcgtctgcggttgttacgccagaagaaaagacgatttctactcctgaacaggttt

SEQ ID NO: 415864 - DNA, 75 bp, synthetic construct
  source 1..75: mol_type = other DNA
ttgaagatgagttgttacataatagattgttattattaggttggcgaaatgatatctcagatattttgaaagcta

SEQ ID NO: 415865 - DNA, 75 bp, synthetic construct
  source 1..75: mol_type = other DNA
tgaaccatctggcgaaaaaagcggtcggcgaaaccctggcatcggaacaggccctcaaggatgtgcagcaggcgc

SEQ ID NO: 415866 - DNA, 75 bp, synthetic construct
  source 1..75: mol_type = other DNA
caccgatcacgtctttgccctgatgcacctgctaggcttccgcttcgcgccgcgcatccgcgacctcggcgaaac

SEQ ID NO: 415867 - DNA, 75 bp, synthetic construct
  source 1..75: mol_type = other DNA
ttatgctacagcatgcggacatgcaggaattggtggtgggataaatgcggctatcacatattctgagaccaagtc

SEQ ID NO: 415868 - DNA, 75 bp, synthetic construct
  source 1..75: mol_type = other DNA
gaaaaagatcttgggacttataaaaaatcaacccttaaaactgaaaaaatcactcgcggattattttcaaacgat

SEQ ID NO: 415869 - DNA, 75 bp, synthetic construct
  source 1..75: mol_type = other DNA
aagttaatatctttcgtggtttatatcagacagggaaataccgtgatatatataaaatcacttcaagtgattttc

SEQ ID NO: 415870 - DNA, 75 bp, synthetic construct
  source 1..75: mol_type = other DNA
tccggccatccggtcaatcccctgctcggtgcaaaggtccttcccggtgaaaccgacatcgccctgcccggcccg

SEQ ID NO: 415871 - DNA, 75 bp, synthetic construct
  source 1..75: mol_type = other DNA
aaaacaacacggtatattctgctgcaacccaaacgggtgtttgccaggtgatacgtctcgttatggacccgttaa

SEQ ID NO: 415872 - DNA, 75 bp, synthetic construct
  source 1..75: mol_type = other DNA
actcacaaccgaccaggttgtctctgttaacacccgattcacacagataaaaaacaacacggtatattctgctgc

SEQ ID NO: 415873 - DNA, 75 bp, synthetic construct
  source 1..75: mol_type = other DNA
tacgggcaaatcggtttatagaactatatgatataaaaagagagattatgcaagtgttaagagatgagtcgccag

SEQ ID NO: 415874 - DNA, 75 bp, synthetic construct
  source 1..75: mol_type = other DNA
gcaggatgctgacctgattatgtttatttaccgcgacgaggtctataaccccgactcactggcaaagggggaggc

SEQ ID NO: 415875 - DNA, 75 bp, synthetic construct
  source 1..75: mol_type = other DNA
gcgcctgataattgatgactgcagccagcagacaccgtcatcactgcgtgccagtgcccgccgttatacccgcct

SEQ ID NO: 415876 - DNA, 75 bp, synthetic construct
  source 1..75: mol_type = other DNA
gatggcggcgatgcgttgaatgaccggacggtgatgctggcgcctcaaaccgccatgacggtgactgttaactcg

SEQ ID NO: 415877 - DNA, 75 bp, synthetic construct
  source 1..75: mol_type = other DNA
atggatccattaggattatatgaatttaaatcaaaaaatatagatgatattggaatatttgcattggcaatgtgt

SEQ ID NO: 415878 - DNA, 75 bp, synthetic construct
  source 1..75: mol_type = other DNA
tcgatttcgctccccttcggtaacggtggtcgggttggctatgacatgcaaaacagtagccacagcaccatacac

SEQ ID NO: 415879 - DNA, 75 bp, synthetic construct
  source 1..75: mol_type = other DNA
ggcttaagctactggatttgcccctatatttccagacacctgttatcacttaacccattactggcctgctgccgc

SEQ ID NO: 415880 - DNA, 75 bp, synthetic construct
  source 1..75: mol_type = other DNA
ggcatggcgcttacgcagtgattatcagttgaatcagactgatagcgatgataaccatgaacagtcaggcgaaat

SEQ ID NO: 415881 - DNA, 75 bp, synthetic construct
  source 1..75: mol_type = other DNA
tgccgcaatgggtatcgggcaaaatatgctgtggcttggcgcgctgtcgtttgatgtcacctgggccagtagcca

SEQ ID NO: 415882 - DNA, 75 bp, synthetic construct
  source 1..75: mol_type = other DNA
tcgatttcgctccccttcggtaacggtggtcgggttggttatgacatgcaaaacagtagccacagcaccacacac

SEQ ID NO: 415883 - DNA, 75 bp, synthetic construct
  source 1..75: mol_type = other DNA
catacgcaacgccagcggtcagttccctcccctcggtgcggatatccgccaggatgacagcggcattagcgtggg

SEQ ID NO: 415884 - DNA, 75 bp, synthetic construct
  source 1..75: mol_type = other DNA
accacgcagggcggtctgacgcgcagtatggaatacgatgctgccggacgggtcatccgcctgaccagtgaaaac

SEQ ID NO: 415885 - DNA, 75 bp, synthetic construct
  source 1..75: mol_type = other DNA
tctggtagagattatgctctatttttcctcttatatcattcacatacttacgtcattgactcatgtagccgaagc

SEQ ID NO: 415886 - DNA, 75 bp, synthetic construct
  source 1..75: mol_type = other DNA
gtaacgctggcggctggcgctttatgacattaacggttgtaaccttatggggaagtcccttgcagtttaatgtgg

SEQ ID NO: 415887 - DNA, 75 bp, synthetic construct
  source 1..75: mol_type = other DNA
accaacgccactgtcaccgtaagtcattcggggcgagttatttatcagaaaaaagtcccgccaggcccgtttatc

SEQ ID NO: 415888 - DNA, 75 bp, synthetic construct
  source 1..75: mol_type = other DNA
acacaccgctggtggatttcacccgcgaccgcctgcaccgggaaacgctgcgcagcttcggccgttatgaactca

SEQ ID NO: 415889 - DNA, 75 bp, synthetic construct
  source 1..75: mol_type = other DNA
ggctgaccggcgttcacaccaccgcagcgaatctggatatccgcatcccgtatgccacggacccggcaggtaacc

SEQ ID NO: 415890 - DNA, 75 bp, synthetic construct
  source 1..75: mol_type = other DNA
ctgatccgctgctgctggctcatatgacttctgatgcggtggctgttccgaagttcgctaaaggctctaacgtct

SEQ ID NO: 415891 - DNA, 75 bp, synthetic construct
  source 1..75: mol_type = other DNA
tccagttggttcactgctcaggtagtgctgctggctgtcggcattgtcggtgtggtggcctgggttcgactcaaa

SEQ ID NO: 415892 - DNA, 75 bp, synthetic construct
  source 1..75: mol_type = other DNA
tcaccgatttaaatgaattcagaatcggtgaatatgattaccgggcacaaggacaagtcattattgacggtgcgg

SEQ ID NO: 415893 - DNA, 75 bp, synthetic construct
  source 1..75: mol_type = other DNA
ctcgatcgctggcatctcggcctgatggctggctatgccaacagtaagagtcacacacattccaacctgaccggg

SEQ ID NO: 415894 - DNA, 75 bp, synthetic construct
  source 1..75: mol_type = other DNA
aaattaatgttgcttgtgcaccttgctaccggcgatacgatgaaaattaagccagccaaaaatgtaataaaaatg

SEQ ID NO: 415895 - DNA, 75 bp, synthetic construct
  source 1..75: mol_type = other DNA
ttgcaaccaaaagcttttatttttgaaaatgttaaagggttgcttagaaaatcatttgcggattattttgaatac

SEQ ID NO: 415896 - DNA, 75 bp, synthetic construct
  source 1..75: mol_type = other DNA
ttacggttctgacgcagagcgcggttggcgcgttcactgttctgctgatcggcaacgcgatgggccatattgagc

SEQ ID NO: 415897 - DNA, 75 bp, synthetic construct
  source 1..75: mol_type = other DNA
ggctggaattggtttactttattttgtaattgtaattatttcaaaaataaaactggattataaatatgataaata

SEQ ID NO: 415898 - DNA, 75 bp, synthetic construct
  source 1..75: mol_type = other DNA
gcagcatcactaggaagcctttgctgcaagaaggcagaagaagtcgagcgtaaacagaaccgtatttactaccgc

SEQ ID NO: 415899 - DNA, 75 bp, synthetic construct
  source 1..75: mol_type = other DNA
cttgaaggcaacggtgaagtcttcttcaatgcgttgcaacatctcatcttaccggcattaacgctggcgttcgtt

SEQ ID NO: 415900 - DNA, 75 bp, synthetic construct
  source 1..75: mol_type = other DNA
ttaatccacgtctgcaactgtggggcaacgtcgcccagcagttgggggacaacggttacagcgatacccagggaa

SEQ ID NO: 415901 - DNA, 75 bp, synthetic construct
  source 1..75: mol_type = other DNA
catactgaagacaatggcactctggttgaggacagcaccgaaggcaacctgcaaacgcgtctgggggtgaaagcg

SEQ ID NO: 415902 - DNA, 75 bp, synthetic construct
  source 1..75: mol_type = other DNA
atttggcgggtacagcaacactatcttcctcaaaaaatggcgacaaattcacgcctgccacactcaccattaatg

SEQ ID NO: 415903 - DNA, 75 bp, synthetic construct
  source 1..75: mol_type = other DNA
ccattttattctcgtaatgagctaatagaacagttggtcattcgcaatatgtcagttaaccgagaaagtaagtaa

SEQ ID NO: 415904 - DNA, 75 bp, synthetic construct
  source 1..75: mol_type = other DNA
atttttgggcaataaccatcatcagctttattattttcttcgtcttttatgttttactaacattgttgccaattt

SEQ ID NO: 415905 - DNA, 75 bp, synthetic construct
  source 1..75: mol_type = other DNA
ggcgctgctggacattaacaatatcgctgacgaaatcgccagccgtggccatcgccaccacgccagagtcttcag

SEQ ID NO: 415906 - DNA, 75 bp, synthetic construct
  source 1..75: mol_type = other DNA
cggattccatggatgagttacttgaacatcccgcccccttttatgaaagggtaaaggccatgatcaaaaccaaga

SEQ ID NO: 415907 - DNA, 75 bp, synthetic construct
  source 1..75: mol_type = other DNA
ataacatcattgacctcgcaccgctgccgcaggtggcccgcacagcactgcatgcggtgacccacaccgtcgccc

SEQ ID NO: 415908 - DNA, 75 bp, synthetic construct
  source 1..75: mol_type = other DNA
acaacgccacttgctgcaacttgaggagcatgagccctgcctgttgattcaccggcgaacctggagcggcagccg

SEQ ID NO: 415909 - DNA, 75 bp, synthetic construct
  source 1..75: mol_type = other DNA
atttttgggcaatcaccattattagctttattatctttttcgtcttttatgtgttgctgaccttattacctattt

SEQ ID NO: 415910 - DNA, 75 bp, synthetic construct
  source 1..75: mol_type = other DNA
atgccccttgcggcgaaggttctcaaacgggtgaagttcataccacagggaatacagcagcaggttcccgcgaaa

SEQ ID NO: 415911 - DNA, 75 bp, synthetic construct
  source 1..75: mol_type = other DNA
ctcgtacaccaatcggcagggcaacacttcgttatcgtggtcttccaacgagacacctcctctcaatgctgggga

SEQ ID NO: 415912 - DNA, 75 bp, synthetic construct
  source 1..75: mol_type = other DNA
gcgcacacctgagggtcgcatgactctccgttaccgtggctatcggactgaattcctcctgaaggagcttggtct

SEQ ID NO: 415913 - DNA, 75 bp, synthetic construct
  source 1..75: mol_type = other DNA
cgcgggagggctacaacgcgcagctctccatcgcctatatcagcctgatcaacacggtgaacaacattgctgaac

SEQ ID NO: 415914 - DNA, 75 bp, synthetic construct
  source 1..75: mol_type = other DNA
gtgaaccgctggaattttcccacagcgcgcgctttactcaagcgatacaaatggtatgccgaaagttaagcctgc

SEQ ID NO: 415915 - DNA, 75 bp, synthetic construct
  source 1..75: mol_type = other DNA
tgattttacatatgcaacaaaagataattatcccttgagtgataaaatggaacatgcagtatcttttatgtttac

SEQ ID NO: 415916 - DNA, 75 bp, synthetic construct
  source 1..75: mol_type = other DNA
tataaaaagagcacaagaaaaaataattgaagagagtgatagtgataatatcatttcacaagcgactctggatga

SEQ ID NO: 415917 - DNA, 75 bp, synthetic construct
  source 1..75: mol_type = other DNA
tatcatgatagaaaaggcaaaagatgtaatgagaaaagttattattaatagaaaaaataaaaactctgatttatc

SEQ ID NO: 415918 - DNA, 75 bp, synthetic construct
  source 1..75: mol_type = other DNA
agggatgcgtgggacagacattctcagttagcagatatattgccgttgaagaaaagtgacaagggaaaaataaac

SEQ ID NO: 415919 - DNA, 75 bp, synthetic construct
  source 1..75: mol_type = other DNA
ctcggcatgccgtgtttatgatatggcactcaaggaatacaaccagtgttcgtcctgatccagcgcgggcagtct

SEQ ID NO: 415920 - DNA, 75 bp, synthetic construct
  source 1..75: mol_type = other DNA
ctggtgggccgtttattcaggcattgctgatgcaatcacggaaaggatggcccagcatgcgcttcgcttacctga

SEQ ID NO: 415921 - DNA, 75 bp, synthetic construct
  source 1..75: mol_type = other DNA
ttcgagaaaaaacacggtacccagctggagctgctattccggtttatgaatcgagcgctggcgatcggcgtaata

SEQ ID NO: 415922 - DNA, 75 bp, synthetic construct
  source 1..75: mol_type = other DNA
tggtcgacgctatcgccgccgtgaaaaccagatcatgcgcctgccacaaagacgtccctgctgaggatgtgacca

SEQ ID NO: 415923 - DNA, 75 bp, synthetic construct
  source 1..75: mol_type = other DNA
gtattcattgatgacggttcaacaaacatcaaactacagtggcaggaaagcgacggaacaattaaacagcacatt

SEQ ID NO: 415924 - DNA, 75 bp, synthetic construct
  source 1..75: mol_type = other DNA
gtggttggatttcgtaatggtaaaacattgctgaatctcatcggaaactctgttggtctgacccgtacagcggta

SEQ ID NO: 415925 - DNA, 75 bp, synthetic construct
  source 1..75: mol_type = other DNA
cttatcgtcgttttattagaattgaacatccagtaagtcaccgtgagcgcattgagtgtatagaggatttctttg

SEQ ID NO: 415926 - DNA, 75 bp, synthetic construct
  source 1..75: mol_type = other DNA
ccagaaactcagaactatcatcagaaaaggatagcgatactcctccagatttaagtagcaatggctggccttttt

SEQ ID NO: 415927 - DNA, 75 bp, synthetic construct
  source 1..75: mol_type = other DNA
ttaatggatagcccacaaggttacaaatttgtaggcggattttttgaagcagaaggaaaagcgcttgcaggttta

SEQ ID NO: 415928 - DNA, 75 bp, synthetic construct
  source 1..75: mol_type = other DNA
gcaagacagcaaagcactgcagcagacgattgagaatacagcgatgcgcttgatgcagagagaatcaaccaggcc

SEQ ID NO: 415929 - DNA, 75 bp, synthetic construct
  source 1..75: mol_type = other DNA
aagactataataaagctcataagacacctgaggaagttatcagggtgaatcgccacgggtttaacagacacctca

SEQ ID NO: 415930 - DNA, 75 bp, synthetic construct
  source 1..75: mol_type = other DNA
atcacatcccgcgtgacgatctgcgcgcgctttccccggaagaacagcgcatcgcgctggaaaaacggcggcatg

SEQ ID NO: 415931 - DNA, 75 bp, synthetic construct
  source 1..75: mol_type = other DNA
tggaaatggatgcggcaattgagcaattgacccaagctctgacacttgcccgaaatttgcaggcggcagtaaaag

SEQ ID NO: 415932 - DNA, 75 bp, synthetic construct
  source 1..75: mol_type = other DNA
ccaaggggcgcgatgaccattcagacgacccgaccatcaacgaaaaaattgtcacgccgaaagccgggagcaaga

SEQ ID NO: 415933 - DNA, 75 bp, synthetic construct
  source 1..75: mol_type = other DNA
gatttatcaacttccagatttaacatcattagagatgatcaattataaaggttatgctggatttaaaataaaaac

SEQ ID NO: 415934 - DNA, 75 bp, synthetic construct
  source 1..75: mol_type = other DNA
caaggaatgtttatcattgatttttgaacttccggatttaacctccttggagaagataaactataaaggctatgc

SEQ ID NO: 415935 - DNA, 75 bp, synthetic construct
  source 1..75: mol_type = other DNA
agaatttccccgcttattcgcaccttccttagtgaacccaaaagcgaaaatactttgcgtattatttacaccggt

SEQ ID NO: 415936 - DNA, 75 bp, synthetic construct
  source 1..75: mol_type = other DNA
atgtgtgtaagaaaccaaagcaatcatttctttatactccttatttttgccgtcaggaatacacaaggcgtatta

SEQ ID NO: 415937 - DNA, 75 bp, synthetic construct
  source 1..75: mol_type = other DNA
gtatggcggcctccggttttggaacgggaggcaaataccagcaggcgatacaggctgcaacggcagcagtacggg

SEQ ID NO: 415938 - DNA, 75 bp, synthetic construct
  source 1..75: mol_type = other DNA
caatgagtttgagattcttaatcccgtagttgagggcgcccgaattgtcggcattggcgagggtgctcactttgt

SEQ ID NO: 415939 - DNA, 75 bp, synthetic construct
  source 1..75: mol_type = other DNA
aaaaaactcaagttatgatggtatatatctaaataatagtgacaactctagaactaatgttcttcttcagatagt

SEQ ID NO: 415940 - DNA, 75 bp, synthetic construct
  source 1..75: mol_type = other DNA
gacaaaatggacgagaaggcattaaggaatatgtttgctgggatcgttgctaataagctcggcctgggtttttca

SEQ ID NO: 415941 - DNA, 75 bp, synthetic construct
  source 1..75: mol_type = other DNA
ttctataccgtgctgctggaaggtgaagatgaatctgatccattgggagatgaaataaaatctatacttgatggt

SEQ ID NO: 415942 - DNA, 75 bp, synthetic construct
  source 1..75: mol_type = other DNA
aaaacctaggtttctagatacggcaaaaattgaatttgaaaagctgaatactatcatgagaacatatgatgcatt

SEQ ID NO: 415943 - DNA, 75 bp, synthetic construct
  source 1..75: mol_type = other DNA
ggtacgcacattcatctggaaggggagtcggatgtgaacggtgatgcgccagtgattaactggaactgtggtgcc

SEQ ID NO: 415944 - DNA, 75 bp, synthetic construct
  source 1..75: mol_type = other DNA
ctgccccaggaagcccagtttgcgcttatcggagaaaaggccgaagaggcatacaacgaatacatttcggcctgc

SEQ ID NO: 415945 - DNA, 75 bp, synthetic construct
  source 1..75: mol_type = other DNA
tctgaaaatacaggacacgcgactgaaaaatggagatattgcagctacaactcacaaagaaaaagcccgaatggc

SEQ ID NO: 415946 - DNA, 75 bp, synthetic construct
  source 1..75: mol_type = other DNA
tataaaagagcatagcttactctttatacacacacaaacgccccggaaacggaataatccgtttcatagttcggt

SEQ ID NO: 415947 - DNA, 75 bp, synthetic construct
  source 1..75: mol_type = other DNA
gccgtattgtgctgccattttcatccgttcagaacgtgaatatttttttagaaactcatcaaggacaaaagcgca

SEQ ID NO: 415948 - DNA, 75 bp, synthetic construct
  source 1..75: mol_type = other DNA
tcctgcacaaattgccattgcaaatgccaatacggtgccctacacccttggagcgctggaatcggcccaaagcgt

SEQ ID NO: 415949 - DNA, 75 bp, synthetic construct
  source 1..75: mol_type = other DNA
ggcaacccgttagccaatgagccggtgacattcacactaccggcagatgtgagtgcaagcttcactcttggagaa

SEQ ID NO: 415950 - DNA, 75 bp, synthetic construct
  source 1..75: mol_type = other DNA
ccgcgacgctgattaataacaatgccagtgattcgcagccggtaacatttgtggcagacaaaacctcggctcagg

SEQ ID NO: 415951 - DNA, 75 bp, synthetic construct
  source 1..75: mol_type = other DNA
tcatgatgcagcaggtaatcctgttatcgggctggtgctctcgacgcgtcacgaaggtgttcaggacatcaccct

SEQ ID NO: 415952 - DNA, 75 bp, synthetic construct
  source 1..75: mol_type = other DNA
agatatggggcattacatgaatgaagccgatttttattcagatatgtattggtcatctagtcccgcaaactccaa

SEQ ID NO: 415953 - DNA, 75 bp, synthetic construct
  source 1..75: mol_type = other DNA
agtcaggatacggtctctacgaatacactgggtatagccgaagtcaccatgacgcccaatagatacggttcgtat

SEQ ID NO: 415954 - DNA, 75 bp, synthetic construct
  source 1..75: mol_type = other DNA
aaatcactgcgccacagggtgacaagctaaaccgtatggcggtggattttgaagaaatcaaatcaaaagtagagt

SEQ ID NO: 415955 - DNA, 75 bp, synthetic construct
  source 1..75: mol_type = other DNA
caatggtgttctggtatttaatacagctttaggaagtgatcattccctcagcgataagttagttatatgtggtaa

SEQ ID NO: 415956 - DNA, 75 bp, synthetic construct
  source 1..75: mol_type = other DNA
gtgcattattcattagcaatgatgacggagaagttaacattaaaaccgccagcaaaattattgcatctggcgcag

SEQ ID NO: 415957 - DNA, 75 bp, synthetic construct
  source 1..75: mol_type = other DNA
gcggcgcgatgtttacgccagtgctgctgtttcccttcgccgggattgtggtgggtcttgccatcttgctgcaaa

SEQ ID NO: 415958 - DNA, 75 bp, synthetic construct
  source 1..75: mol_type = other DNA
gcgccaggaactggcagcaagattacgcctggtgaaaccgaaacggcgtaaagactacaaacagcgaattacaga

SEQ ID NO: 415959 - DNA, 75 bp, synthetic construct
  source 1..75: mol_type = other DNA
ggctggcatacccgcagaggatatgcggctctgttcttgaagcggctctgcctgatgtggctatcggggagctgt

SEQ ID NO: 415960 - DNA, 75 bp, synthetic construct
  source 1..75: mol_type = other DNA
aagcggacagataacggcttactcactatcccggttcacgcagcttacggaaacgtcagcaacgaaattaagcgc

SEQ ID NO: 415961 - DNA, 75 bp, synthetic construct
  source 1..75: mol_type = other DNA
gtggtgctggatatgatgctacccgataccaacggcctgagggtattgcagcaaatccagaaactgcgtccgaca

SEQ ID NO: 415962 - DNA, 75 bp, synthetic construct
  source 1..75: mol_type = other DNA
catcacacatatctttgctaaaaaaacgaacaaaacgcctaaagccaacatcgagttaggtttagcacgttataa

SEQ ID NO: 415963 - DNA, 75 bp, synthetic construct
  source 1..75: mol_type = other DNA
accatggtgggaaattacgtatctggtttgtttataaaggtgtaagagtccgggaaaatcttggggttcctgaca

SEQ ID NO: 415964 - DNA, 75 bp, synthetic construct
  source 1..75: mol_type = other DNA
atgatggttccttcgaaccacaactggtgaagaaaaatcagacccgtattaccggcatggacaaccagatcctgg

SEQ ID NO: 415965 - DNA, 75 bp, synthetic construct
  source 1..75: mol_type = other DNA
aggggggatattaatgtaatacaggcaaacgattctgtttctgccgggcttgatgataacccagggttttgtgct

SEQ ID NO: 415966 - DNA, 75 bp, synthetic construct
  source 1..75: mol_type = other DNA
tcaaccaagcttgggaaaaatatgatggaagctatgggattagctcgttctacaacatggaaaggatatagagca

SEQ ID NO: 415967 - DNA, 75 bp, synthetic construct
  source 1..75: mol_type = other DNA
acacgcaccctcagcatgtggccggataaccgtatcgcccgtgacgcgcactatctttaccggtatgaccgtcac

SEQ ID NO: 415968 - DNA, 75 bp, synthetic construct
  source 1..75: mol_type = other DNA
ttggcgcaatcttcggggtgatttacatctctatgttgctgttggttggctggccgattctcgccatgtggaact

SEQ ID NO: 415969 - DNA, 75 bp, synthetic construct
  source 1..75: mol_type = other DNA
ctgtacccggtttatgctcagccccgacacccgcgtggtcgccgttgatctgaacaatgtggccggggacaagac

SEQ ID NO: 415970 - DNA, 75 bp, synthetic construct
  source 1..75: mol_type = other DNA
actgtccagagcagacgattagtattaacagcaaataccagttcactgaagaggatgcagatgcgataaacggta

SEQ ID NO: 415971 - DNA, 75 bp, synthetic construct
  source 1..75: mol_type = other DNA
acggcgctgcataaccgtctgttcgataaaaactgccggtttttctcggcattttccaggggacgtcttatgtgg

SEQ ID NO: 415972 - DNA, 75 bp, synthetic construct
  source 1..75: mol_type = other DNA
tcgaaataattcctggagcgtttctgcttcaggcgacaatgatgaattcaaagatatgaaagcgtcactacgcgc

SEQ ID NO: 415973 - DNA, 75 bp, synthetic construct
  source 1..75: mol_type = other DNA
ccgggtcagcgaagggctggaaatcacggcaacactggtgaagcccgtaccggatatgccgtcgcaactggctgc

SEQ ID NO: 415974 - DNA, 75 bp, synthetic construct
  source 1..75: mol_type = other DNA
aacgcttcaattctaccttgatttactcactaccaatggggtttatcatggggtgtactatcaaaataccgacca

SEQ ID NO: 415975 - DNA, 75 bp, synthetic construct
  source 1..75: mol_type = other DNA
ctacgcgaccgaagtgtctaacatgtctcgtgcgcagatcctgcaacaagcaggtacttctgttctggcacaggc

SEQ ID NO: 415976 - DNA, 75 bp, synthetic construct
  source 1..75: mol_type = other DNA
tgttttattcaaccacccaatagcagcaacttaaccaccggaacggctattttaccgtgtattagccaaaattaa

SEQ ID NO: 415977 - DNA, 75 bp, synthetic construct
  source 1..75: mol_type = other DNA
ataaacgcgcggtaactaatcggtatggcatcggagttattccatcagtcagcagttacataacaacatcattaa

SEQ ID NO: 415978 - DNA, 75 bp, synthetic construct
  source 1..75: mol_type = other DNA
gaatcagcaacactagtcctttatttttcaaacaatgacattgaatgtttcgtctttgaaagagatattccgagc

SEQ ID NO: 415979 - DNA, 75 bp, synthetic construct
  source 1..75: mol_type = other DNA
aaaataaaaagccatcgttttcacattcttaatcagtcatctaacacacttaccaaagcattaaaaaaagttgta

SEQ ID NO: 415980 - DNA, 75 bp, synthetic construct
  source 1..75: mol_type = other DNA
aacggcggtgctgttaatggtggcaatctttatagggttggggagcacggcgaaagcgagctattccagaccaat

SEQ ID NO: 415981 - DNA, 75 bp, synthetic construct
  source 1..75: mol_type = other DNA
aacactgcctggatcattctggctgtaaagccagataatttctggttagtggattcgccagaaatggatgtaggg

SEQ ID NO: 415982 - DNA, 75 bp, synthetic construct
  source 1..75: mol_type = other DNA
gttatttccgtcctgcagaagttgaaactcttcttggtgatccagcaaaagcgaaaaaagtattgggttgggaac

SEQ ID NO: 415983 - DNA, 75 bp, synthetic construct
  source 1..75: mol_type = other DNA
atggatataataaaatttttgcaagaatagttattatagctgcgttaacaagtttgattataattttccctttag

SEQ ID NO: 415984 - DNA, 75 bp, synthetic construct
  source 1..75: mol_type = other DNA
tgatgaataaagccatcgaaaaaggcgtggcggcggaaaacgtcatcttcttccccaactggtcggaaattgccc

SEQ ID NO: 415985 - DNA, 75 bp, synthetic construct
  source 1..75: mol_type = other DNA
cgtggcggcggaaaacgtcatcttcttccccaactggtcggaaatcgcccgttttcagcatgttgcagacgccga

SEQ ID NO: 415986 - DNA, 75 bp, synthetic construct
  source 1..75: mol_type = other DNA
gaatggctggcggcgcaaggtcatgaggtgcgggtcattaccgcaccgccttactacccgcagtggcaggtgggc

SEQ ID NO: 415987 - DNA, 75 bp, synthetic construct
  source 1..75: mol_type = other DNA
aatgaaaccgaagtcataaacaaagggactacaatgccaatacgtggattgttaattggcaatgaagaaaaagct

SEQ ID NO: 415988 - DNA, 75 bp, synthetic construct
  source 1..75: mol_type = other DNA
gacatcaaagagaacattcattttcaggcgcgaaatcagcagattaagcacggattttatcgtgatttaccacga

SEQ ID NO: 415989 - DNA, 75 bp, synthetic construct
  source 1..75: mol_type = other DNA
ctgaaaatgtacgaaaattttggccgtaagtcgctctggttaacgaagcaggatgtggaggcgcataaggagtcg

SEQ ID NO: 415990 - DNA, 75 bp, synthetic construct
  source 1..75: mol_type = other DNA
atgaaaaaaatacgattactgctttgcgtcatgctggtgctgtgctttagccagggagctcaggcgaaactgggg

SEQ ID NO: 415991 - DNA, 75 bp, synthetic construct
  source 1..75: mol_type = other DNA
agatctccgctcaccatgtactgaagagatcgccgtcttccaggcattctcgcggataatcaaagaggcagacga

SEQ ID NO: 415992 - DNA, 75 bp, synthetic construct
  source 1..75: mol_type = other DNA
cagctgaaccgtcttcacctttcctgaagaccagggcgaaccgcgagttgcctctcatctctgatgtggaagagc

SEQ ID NO: 415993 - DNA, 75 bp, synthetic construct
  source 1..75: mol_type = other DNA
gacggttgcggcgtcgatcgcggtatcgctggcgaaacgtggtcataaagttcacctgaccacgtccgatccggc

SEQ ID NO: 415994 - DNA, 75 bp, synthetic construct
  source 1..75: mol_type = other DNA
gagaacggttccttcatgcccgtcggcgttttcgcccccatgtcagaaaaaacaagcggtaagcgaccggaaggg

SEQ ID NO: 415995 - DNA, 75 bp, synthetic construct
  source 1..75: mol_type = other DNA
ccattacgacagtcagcaccggctggtgcactacacgcggacacaatatgcagagccgctggtcgaaagccgcta

SEQ ID NO: 415996 - DNA, 75 bp, synthetic construct
  source 1..75: mol_type = other DNA
cctctcatctctgatgtggaagagcagtatgcaaagcgtattgcattaacagcgctacagagcgaagagccggtt

SEQ ID NO: 415997 - DNA, 75 bp, synthetic construct
  source 1..75: mol_type = other DNA
ggtcgattttatctacaaaaaagcgctatctgaaggctatcccattgttatggactctactttctccagtatagg

SEQ ID NO: 415998 - DNA, 75 bp, synthetic construct
  source 1..75: mol_type = other DNA
agattcaatgggactggcatcaaaatatggacacttaaataatggcggatatggagcgagacccaacaaaccgcc

SEQ ID NO: 415999 - DNA, 75 bp, synthetic construct
  source 1..75: mol_type = other DNA
tggaggagcttttcttttttttggtatatatgggaaatgtttctgtcatgatgctttcgaagataaaaaaccatt

SEQ ID NO: 416000 - DNA, 75 bp, synthetic construct
  source 1..75: mol_type = other DNA
ctctcatacgcacgatgagctttctgctatcggtttgcagcatcaacaccttgccattaatggcgtgctgccgcc

SEQ ID NO: 416001 - DNA, 75 bp, synthetic construct
  source 1..75: mol_type = other DNA
tactcatgatgagcttgcggcgataggtctcaaaaatcagtatctggtcatcaacggcgtgttacctgagacaga

SEQ ID NO: 416002 - DNA, 75 bp, synthetic construct
  source 1..75: mol_type = other DNA
gatagcaaagaaaatgggagataaaggccatttctctacgccaatgatgcagcttcaggatccggaaagaacaaa

SEQ ID NO: 416003 - DNA, 75 bp, synthetic construct
  source 1..75: mol_type = other DNA
ttctttgccgccccctgttttattggtgagattgagttaatcgataaccgcgtgcggtacaggctattgaagagt

SEQ ID NO: 416004 - DNA, 75 bp, synthetic construct
  source 1..75: mol_type = other DNA
cctgaaattgccaatttgctgaagagtaaaagcctagcacatgcgtcgttttatctggatgacctgattgagcgg

SEQ ID NO: 416005 - DNA, 75 bp, synthetic construct
  source 1..75: mol_type = other DNA
acggtttttacttcgacggaaaatctcagacggattcgatcgggctggagaaaggctttaagaacatcacacaaa

SEQ ID NO: 416006 - DNA, 75 bp, synthetic construct
  source 1..75: mol_type = other DNA
tgcaactgaagaaagctgaagccagcgcctgcgtgctgattaaacacgaaaaaggtctgccctggctggatattg

SEQ ID NO: 416007 - DNA, 75 bp, synthetic construct
  source 1..75: mol_type = other DNA
atggctagctttaaagacatctgcccattcgcccccgccattcccccatcttccgttaacacaggcgtacgacgc

SEQ ID NO: 416008 - DNA, 75 bp, synthetic construct
  source 1..75: mol_type = other DNA
gcgaactcttatttaccctcgaactggctttctgcgctgggtctgtacgcctgggcacaagtggatgaatcttct

SEQ ID NO: 416009 - DNA, 75 bp, synthetic construct
  source 1..75: mol_type = other DNA
tgtatcgtggttattcttgcgataccgcgactaaattatcactacgctgtatgtttgtgcgtgaaggtggaacgg

SEQ ID NO: 416010 - DNA, 75 bp, synthetic construct
  source 1..75: mol_type = other DNA
tttttttacccgaaaaacctgccagcactggtgacaatggtgtatctggaggacggtgatgtacgggaaagcata

SEQ ID NO: 416011 - DNA, 75 bp, synthetic construct
  source 1..75: mol_type = other DNA
ctgaacggtgtcctggtgaaacaggatggcgcggcgaacattggcgagatgaaagtgggtgtggagggccagctg

SEQ ID NO: 416012 - DNA, 75 bp, synthetic construct
  source 1..75: mol_type = other DNA
ttggcaccgggaggggccgtgcggatctggctggaggataatggcgagcctgttgtactccaacatcctgcccgg

SEQ ID NO: 416013 - DNA, 75 bp, synthetic construct
  source 1..75: mol_type = other DNA
atataagacaggaatttctagggcatatgcggatcagtcaaccattggtttgggaggcactggagcctgagatat

SEQ ID NO: 416014 - DNA, 75 bp, synthetic construct
  source 1..75: mol_type = other DNA
atgaaggcgagtaatggcctcaatatacatctgaatcactacgaatcgctgctggggcgtgccagcatgatactg

SEQ ID NO: 416015 - DNA, 75 bp, synthetic construct
  source 1..75: mol_type = other DNA
ttataattcttgcaatttccagtacgctaacaccccaggcgatggcagaaaaattgattcctgaaactgatgctg

SEQ ID NO: 416016 - DNA, 75 bp, synthetic construct
  source 1..75: mol_type = other DNA
tccgcaattccggttaccgcaatcagtgctggatgcagagatcgcccgtattgaaaaaaatgggcgtgaccatta

SEQ ID NO: 416017 - DNA, 75 bp, synthetic construct
  source 1..75: mol_type = other DNA
tctcaggtttatatcgaaggtcagctgcgtacccgtaaatggaccgatcaatccggtcaggatcgctacaccaca

SEQ ID NO: 416018 - DNA, 75 bp, synthetic construct
  source 1..75: mol_type = other DNA
ggaatttaggaaagatttgaacttgccttcaaatcgaaaaattattctttactcgggaaatgtaggtgataaaca

SEQ ID NO: 416019 - DNA, 75 bp, synthetic construct
  source 1..75: mol_type = other DNA
tggcttacttccgtacattcccttgcgtggatgtacagaattgtacgatttcggacaccaaaaccgctgttgtcc

SEQ ID NO: 416020 - DNA, 75 bp, synthetic construct
  source 1..75: mol_type = other DNA
agaacataataaaaacacaccacatattcttgatggaggtaatggtgtgggatttatcgctgagttattgaaaga

SEQ ID NO: 416021 - DNA, 75 bp, synthetic construct
  source 1..75: mol_type = other DNA
atatggtatccaatgataagaatgaagttgagaaaattaaatcaggtgttttttttataagcgggaatattcatt

SEQ ID NO: 416022 - DNA, 75 bp, synthetic construct
  source 1..75: mol_type = other DNA
tacaatgaaattcttgttactactcctgatagcgtagaccttactcgactaaatacaggtgcaccactcctatat

SEQ ID NO: 416023 - DNA, 75 bp, synthetic construct
  source 1..75: mol_type = other DNA
actgattgggtctcttattacgaaatataccaagcagcaaaaaatagtaccgtatgttctaatatatactgttta

SEQ ID NO: 416024 - DNA, 75 bp, synthetic construct
  source 1..75: mol_type = other DNA
gtgctgacgcgacgaaaaaaggtggcgcgaaaacgaaaggccgtggacgtaaggccgcgcaacccgagtctcagc

SEQ ID NO: 416025 - DNA, 75 bp, synthetic construct
  source 1..75: mol_type = other DNA
taattattcatatacaagattatgaagtcgatgcaatgtttggcttgaatcttgctaatatgggggggctgtcta

SEQ ID NO: 416026 - DNA, 75 bp, synthetic construct
  source 1..75: mol_type = other DNA
cgttgcggtgttacgcgaacagcttggcctgccacccgaccgcaaactgattctttactccggcaatatcggcga

SEQ ID NO: 416027 - DNA, 75 bp, synthetic construct
  source 1..75: mol_type = other DNA
attattcgccagaattgaccggtattggcaaatataccggggagatggtggagtggctggcccgcaatggtcacg

SEQ ID NO: 416028 - DNA, 75 bp, synthetic construct
  source 1..75: mol_type = other DNA
gctgtgtattctcagtgatggggtgaacaataagctgggaaacctgtttgccccttacgagttctactacgcttg

SEQ ID NO: 416029 - DNA, 75 bp, synthetic construct
  source 1..75: mol_type = other DNA
tcagcttcttatcgcgcaacgccaagcggacgaatcgtttgacagaattgagcgcggggccaagaaagctgattc

SEQ ID NO: 416030 - DNA, 75 bp, synthetic construct
  source 1..75: mol_type = other DNA
atgttgatggataagacaggacaacagccaggccgtcgccagttcttagagcaacgggctcgactgcaagcaagt

SEQ ID NO: 416031 - DNA, 75 bp, synthetic construct
  source 1..75: mol_type = other DNA
cggggctggttattcttcacctgttgcagtcagaagaagccattacgctgactttcttgagccggtgttttgagt

SEQ ID NO: 416032 - DNA, 75 bp, synthetic construct
  source 1..75: mol_type = other DNA
aattattatcctccaatatagttcttgtactaccatacaaagccgcttcacaatcaggtgttatgtatacagctc

SEQ ID NO: 416033 - DNA, 75 bp, synthetic construct
  source 1..75: mol_type = other DNA
aacggtggcgcggtaggcgctggcaacctataccgcgtgggcgaacacggtaagcctgagcttttccagaccaat

SEQ ID NO: 416034 - DNA, 75 bp, synthetic construct
  source 1..75: mol_type = other DNA
atgactacaaatttaggtacgattgaatataccgtggatgcaaaaactggtcagcttcttatcgcgcaacgccaa

SEQ ID NO: 416035 - DNA, 75 bp, synthetic construct
  source 1..75: mol_type = other DNA
gactacaatttatatgcctctcattatgcaccacatcagggcgataattcacaaaatataagttcctatgggcag

SEQ ID NO: 416036 - DNA, 75 bp, synthetic construct
  source 1..75: mol_type = other DNA
ctgagggagtagaggagatatttactttaggcgaagataaagctgagaccatcgacatatttgatgatgagtaca

SEQ ID NO: 416037 - DNA, 75 bp, synthetic construct
  source 1..75: mol_type = other DNA
agcaagagaaaaaagaattgatgagccttcctctggtcaacatggtaatgacccgaggccaggatgatgaagagg

SEQ ID NO: 416038 - DNA, 75 bp, synthetic construct
  source 1..75: mol_type = other DNA
aaaatcactgatctgtatcgtgagttcaatggcgaaacaaagtgttatgataaaaagtgtagggatatggatttt

SEQ ID NO: 416039 - DNA, 75 bp, synthetic construct
  source 1..75: mol_type = other DNA
actcaatgattcaggggctgtttcatccggtacgtctgctggatgtgattaaaaactttatctgcttcccggata

SEQ ID NO: 416040 - DNA, 75 bp, synthetic construct
  source 1..75: mol_type = other DNA
cggacgttccgaactggcgcagttgatcttcggcgtgcggaaagcgacaggcggaatgattgaagtcgatggtga

SEQ ID NO: 416041 - DNA, 75 bp, synthetic construct
  source 1..75: mol_type = other DNA
gcggcaccggcacgcagattaacggtgacgacgccacggcgaatgacaccggcaaaaccaccgttgacggtaagg

SEQ ID NO: 416042 - DNA, 75 bp, synthetic construct
  source 1..75: mol_type = other DNA
catataatggcggggaactatgggaaaagtccgttgctaatataaaaaaatacgcgcctcaagatatttttgttc

SEQ ID NO: 416043 - DNA, 75 bp, synthetic construct
  source 1..75: mol_type = other DNA
atcctctgtatttatttagggcctgtgcgctaaatgctttgaaaataacagggtataaattagggcaaagttata

SEQ ID NO: 416044 - DNA, 75 bp, synthetic construct
  source 1..75: mol_type = other DNA
caaacgatatttcgatattggtgttttccatgctgaccagcaatggataagaaatgattttggaggagcgggggg

SEQ ID NO: 416045 - DNA, 75 bp, synthetic construct
  source 1..75: mol_type = other DNA
gcaggatggtagctacccgccgtttggcgcggaagtgaaaaacgacaacgcgcagaacgttggtctggttgacga

SEQ ID NO: 416046 - DNA, 75 bp, synthetic construct
  source 1..75: mol_type = other DNA
gctaagtttgatgttatatcgattgcgagtaatgatttcaatcatggcgcaacaagaaatatggccataaaaaaa

SEQ ID NO: 416047 - DNA, 75 bp, synthetic construct
  source 1..75: mol_type = other DNA
ggttacaagttaggccttagatttaaaatccttccgaagaagtttgtaaaatctctaagtatgcacaaacgatat

SEQ ID NO: 416048 - DNA, 75 bp, synthetic construct
  source 1..75: mol_type = other DNA
gagagtctgcagtggatttgcgtgaaaggcattccgccgaaggaggatgacaggtgggcggaagggaaggacggg

SEQ ID NO: 416049 - DNA, 75 bp, synthetic construct
  source 1..75: mol_type = other DNA
gctgacggtgattaatgaccaggactatccgatgctggtgcagtcggaggtgctgagtgaggaccagaagagtcc

SEQ ID NO: 416050 - DNA, 75 bp, synthetic construct
  source 1..75: mol_type = other DNA
aaactgctttggaggagagtggcgccaacatcttgtatttggcgttagggttccttgagtggtatgaaagcgatt

SEQ ID NO: 416051 - DNA, 75 bp, synthetic construct
  source 1..75: mol_type = other DNA
tcgaacacaatattatgtgaagatatgttttacacggcaaaagcaatattggcaggatacaaagtagcttatgtg

SEQ ID NO: 416052 - DNA, 75 bp, synthetic construct
  source 1..75: mol_type = other DNA
gtgagagtcttaagtgggtttgtgtaaaagggataccgccaaagcatggtgataaatgggtggaaactcagaaaa

SEQ ID NO: 416053 - DNA, 75 bp, synthetic construct
  source 1..75: mol_type = other DNA
ggtgttgagtgaaaattatgataagagtcataattttgtagtgacgcccccactgtttcgtcttgaccctcatca

SEQ ID NO: 416054 - DNA, 75 bp, synthetic construct
  source 1..75: mol_type = other DNA
tcaaggcgttgctagaaagggttccaaaatagatatcgatttactggccgacttactggaagccagaatcgaaaa

SEQ ID NO: 416055 - DNA, 75 bp, synthetic construct
  source 1..75: mol_type = other DNA
cgacaggaatataaccagcaacgacctcattcatcattaaacaacctgacaccggaggagtttatccgaagtctg

SEQ ID NO: 416056 - DNA, 75 bp, synthetic construct
  source 1..75: mol_type = other DNA
ggggaataacgtcaccttctcggtgggcaagacaatgaaggaaaacaccggacaaacagcagtttattctgccgg

SEQ ID NO: 416057 - DNA, 75 bp, synthetic construct
  source 1..75: mol_type = other DNA
ccacggatgtgataaacaaccatgctgagaccattggcaacaatcagatgattgcggttaccaacaatcagatac

SEQ ID NO: 416058 - DNA, 75 bp, synthetic construct
  source 1..75: mol_type = other DNA
agattttaaaataaatcctaaaaaaattaaaatatgtagtgcttcaggtggaagtataattgttactggtctgaa

SEQ ID NO: 416059 - DNA, 75 bp, synthetic construct
  source 1..75: mol_type = other DNA
ctggagacgcgaaagagccctgcgcgctgctgaagctacccgcaacagggagtggaatcaagtagtgatacctga

SEQ ID NO: 416060 - DNA, 75 bp, synthetic construct
  source 1..75: mol_type = other DNA
ccgtagtggttgtctgcctgctggtttccgtggcttgggcgattaaccactaccgcgacaacgccatcacctaca

SEQ ID NO: 416061 - DNA, 75 bp, synthetic construct
  source 1..75: mol_type = other DNA
tataccaatatgtttggtaaagccgtcgtttctgacgtcaataactattaccgcaatcaggcgtatatcgacctc

SEQ ID NO: 416062 - DNA, 75 bp, synthetic construct
  source 1..75: mol_type = other DNA
gccacttataaccagaacttccgcgatacgggtgtttcggtttatctcaactatacccgccatacctactgggat

SEQ ID NO: 416063 - DNA, 75 bp, synthetic construct
  source 1..75: mol_type = other DNA
aaatgaaagtatgcctactgctaaggaaacggcactgaaaagcatcaattcacgatatcttgattgtcaaggaga

SEQ ID NO: 416064 - DNA, 75 bp, synthetic construct
  source 1..75: mol_type = other DNA
agacctgcgccgaatgaaggtgccgggctgccagcgctgcgcgtcgtgccagcaggatgaagaattaagaatgaa

SEQ ID NO: 416065 - DNA, 75 bp, synthetic construct
  source 1..75: mol_type = other DNA
agtacaatcgttagtggtaacactgccgctaaatttatgattgaaggctatcgtttcgaagcttatctatctggc

SEQ ID NO: 416066 - DNA, 75 bp, synthetic construct
  source 1..75: mol_type = other DNA
ggcgtatatcgacctcaacaaattgccggaaaacgccgaagcaacccagtcggtggtgcaagccacgctaactga

SEQ ID NO: 416067 - DNA, 75 bp, synthetic construct
  source 1..75: mol_type = other DNA
gacgctgatggtaagacgatggagatttctcaggcggctcaggccgtgcgtcgtatcactatccaacaagcaacc

SEQ ID NO: 416068 - DNA, 75 bp, synthetic construct
  source 1..75: mol_type = other DNA
tttgacgaaattaaagcgcgggtaactttcgatactgaaatttactctatggccattaaggcaattgagaagacc

SEQ ID NO: 416069 - DNA, 75 bp, synthetic construct
  source 1..75: mol_type = other DNA
ttgacgagcaggttctcgctattgccgtcgaaacgctggcgcgcaccgcgctcaattttccctggacgcgaggta

SEQ ID NO: 416070 - DNA, 75 bp, synthetic construct
  source 1..75: mol_type = other DNA
caagcctgagctgtttcaatcaggcgggcggcagtacatgattcctggtgagggcggcaggattatccccaaccg

SEQ ID NO: 416071 - DNA, 75 bp, synthetic construct
  source 1..75: mol_type = other DNA
acgcagataacaccgccactctcaaactgaaaaagacagcaccgttctctgctctgttgtctgttaatggcgagc

SEQ ID NO: 416072 - DNA, 75 bp, synthetic construct
  source 1..75: mol_type = other DNA
tttagcttttaaaggtgattatgtggctgatggaaccagtgttggggctggtcttggtgattttctttgtggagt

SEQ ID NO: 416073 - DNA, 75 bp, synthetic construct
  source 1..75: mol_type = other DNA
tggagagatctcccttccatcatcaattgatagcagattcaatggtcaacaatatagattaatgtatgactcatc

SEQ ID NO: 416074 - DNA, 75 bp, synthetic construct
  source 1..75: mol_type = other DNA
aaagccgccctggaagagaagaacagagcagaccgtgaagccattgcgctatccaaacgccaggccgcagaagct

SEQ ID NO: 416075 - DNA, 75 bp, synthetic construct
  source 1..75: mol_type = other DNA
ccctgccgctgctggcttccggtatcggcctgcccgtcatggcagctgatattgataccgatgatattcagcaaa

SEQ ID NO: 416076 - DNA, 75 bp, synthetic construct
  source 1..75: mol_type = other DNA
cgattcgtcaagcatcttcacttaaggaaggtgcgaataagcaggtcatttcttcccaagctgactcgctgatta

SEQ ID NO: 416077 - DNA, 75 bp, synthetic construct
  source 1..75: mol_type = other DNA
gagcattttaaatagaacagatctttcttttagtaacttcagcaataccgatatgacaggttcggatttatcatt

SEQ ID NO: 416078 - DNA, 75 bp, synthetic construct
  source 1..75: mol_type = other DNA
tctactatggcacaccaccagtaaagaatgaaaacaatgacagcataaatgaaagaaaaaattattcagaaaaaa

SEQ ID NO: 416079 - DNA, 75 bp, synthetic construct
  source 1..75: mol_type = other DNA
acagccgaagccacactgcctaacggcaacagagatacgaagatagtcaatattgcgcccgatgccagcaacgcg

SEQ ID NO: 416080 - DNA, 75 bp, synthetic construct
  source 1..75: mol_type = other DNA
cgaaagaaacggttcgtatatggtgaaagcatccctggcgaatggagcctcacttgagaaacaactggaggctat

SEQ ID NO: 416081 - DNA, 75 bp, synthetic construct
  source 1..75: mol_type = other DNA
gaggtaacatttactctgccggaagatgtgagggcgaacttcacgctgagcgatggcggtaaagcgattactgat

SEQ ID NO: 416082 - DNA, 75 bp, synthetic construct
  source 1..75: mol_type = other DNA
ggctggaatttgtgcagtcaggtaccaacgtgccctatgtgcaagttagtgcaattgactacagcaaaaatttct

SEQ ID NO: 416083 - DNA, 75 bp, synthetic construct
  source 1..75: mol_type = other DNA
tgattatgagttttcaagctctgcctcctgggtcgatgttgatgctaccggtaaagtgacatttaaaaatgtcgg

SEQ ID NO: 416084 - DNA, 75 bp, synthetic construct
  source 1..75: mol_type = other DNA
aggcagccgttatgatctggtggatcgcaacaacaacatcgttctggaatatcgcaaaaaagaactggttcgcct

SEQ ID NO: 416085 - DNA, 75 bp, synthetic construct
  source 1..75: mol_type = other DNA
gagtaccacaatacaattcactcgcgcagaagacaaaataatgagcggtacagtatcagtcaatggtactgacct

SEQ ID NO: 416086 - DNA, 75 bp, synthetic construct
  source 1..75: mol_type = other DNA
aacaatcaaaacaccgcaaaaacggatgttaatggtctggcgacttttgatctgaaaagtagtaagcaggaagac

SEQ ID NO: 416087 - DNA, 75 bp, synthetic construct
  source 1..75: mol_type = other DNA
gtgccctacacccttggagcgctggaatcggcccaaagcgttgccgaacgtttcggtatttcggtggctgagtta

SEQ ID NO: 416088 - DNA, 75 bp, synthetic construct
  source 1..75: mol_type = other DNA
aacggtgtcccccagcaggaggtaaccctcagcgtttcaccaagtgaaggcgtgacccccagtaataacgctata

SEQ ID NO: 416089 - DNA, 75 bp, synthetic construct
  source 1..75: mol_type = other DNA
aatggcgattcgatgcaacaaacagtgacctatgtgccgaacgtcgcgaatgccgaaatcacgctggcagcctcg

SEQ ID NO: 416090 - DNA, 75 bp, synthetic construct
  source 1..75: mol_type = other DNA
caggggcgatgtctggtacgctcacgctgatgccgcaactgaacggtgcggatgcggccaaagcccccgccgtgg

SEQ ID NO: 416091 - DNA, 75 bp, synthetic construct
  source 1..75: mol_type = other DNA
atcaccagtctggagatgcctgaaggtcaggtaataatcagagaacccatagcggttaaagcacacgtcgacgac

SEQ ID NO: 416092 - DNA, 75 bp, synthetic construct
  source 1..75: mol_type = other DNA
tttgccctgacggacctgccggtgacggggtccggcagtgacctgcaggtgacggtgctggaatcagacgggacg

SEQ ID NO: 416093 - DNA, 75 bp, synthetic construct
  source 1..75: mol_type = other DNA
taccgggcttaattactttcttactcttctggctggtcaacgttggtataggttttggcggtggcaaagttttaa

SEQ ID NO: 416094 - DNA, 75 bp, synthetic construct
  source 1..75: mol_type = other DNA
acaccgcaccaggtgattttaaatattacgataacggttttaacctcactgcattctctgtcactctggtggcgg

SEQ ID NO: 416095 - DNA, 75 bp, synthetic construct
  source 1..75: mol_type = other DNA
actggcctgcttgattctgattggcaaaatctggccgggatttttaactctcggtggtgatttcactctgttagg

SEQ ID NO: 416096 - DNA, 75 bp, synthetic construct
  source 1..75: mol_type = other DNA
aaaacttccgccagtcgttgtttgccgcgcaagatgcacaaagtatcctgacgctgctggaaacagaattaacct

SEQ ID NO: 416097 - DNA, 75 bp, synthetic construct
  source 1..75: mol_type = other DNA
aacggcggcgcggttggtgctggcaacctgtaccgcgtgggtgaacacggtaagcctgagatattcaaggcgaac

SEQ ID NO: 416098 - DNA, 75 bp, synthetic construct
  source 1..75: mol_type = other DNA
tattccgctcatggaaccattatctcgaatttcatggtttgtcggcgttatcgtcgcctttgcggcttacgcttt

SEQ ID NO: 416099 - DNA, 75 bp, synthetic construct
  source 1..75: mol_type = other DNA
gaaaacgccgaagaagaaaaagaacggcaaatagcctcaatactttcatgggaaatagatattatctataaaatc

SEQ ID NO: 416100 - DNA, 75 bp, synthetic construct
  source 1..75: mol_type = other DNA
gatgttcagttgcgtggacaatatcacccggatgcaggtggcgctgatgcaccctctggatgtccatgatatcgc

SEQ ID NO: 416101 - DNA, 75 bp, synthetic construct
  source 1..75: mol_type = other DNA
acgttacaggccatacagtcctgtcggcgggagtccgcggcgctggagcggcttgactgctatgaccgcctgctg

SEQ ID NO: 416102 - DNA, 75 bp, synthetic construct
  source 1..75: mol_type = other DNA
atggaacatcagagaaaactattccagcaacgcggctatagcgaagatctattgccgaaaacgcaaagccagcga

SEQ ID NO: 416103 - DNA, 75 bp, synthetic construct
  source 1..75: mol_type = other DNA
atgttttcacataactgttgcgttgaccaattgaatctacactgggcggcaccggcggtgagcgcatccgacttt

SEQ ID NO: 416104 - DNA, 75 bp, synthetic construct
  source 1..75: mol_type = other DNA
agggcggtaaagctgatgcacaagcggcagcgcaggcacttgatgacctgggaatcacaaccaacgactacaaag

SEQ ID NO: 416105 - DNA, 75 bp, synthetic construct
  source 1..75: mol_type = other DNA
ccagtttcactggctgatagtcggtggcgggcgtccggaagaggagcgcctgttacgccgtaaaattcatgcact

SEQ ID NO: 416106 - DNA, 75 bp, synthetic construct
  source 1..75: mol_type = other DNA
ctggccagcgaaatcgtgattgcggtcaccaacatccctctggcgacttacccggcagccgtgaaatccgtcgtg

SEQ ID NO: 416107 - DNA, 75 bp, synthetic construct
  source 1..75: mol_type = other DNA
ttctggaagcggaaaaacaactcttttaaaaattatatctgggttatatatgcctacatcaggtgcaataaaaat

SEQ ID NO: 416108 - DNA, 75 bp, synthetic construct
  source 1..75: mol_type = other DNA
acctggagcgtttttctaaattaaaaatgcaagcagccgagctcgagaaactacaatcactcctttcttattcag

SEQ ID NO: 416109 - DNA, 75 bp, synthetic construct
  source 1..75: mol_type = other DNA
gcatggtgccttataacctgcgtgaatttgcgccggttgtacgtggcattgcccggacacaggcgcggatagagg

SEQ ID NO: 416110 - DNA, 75 bp, synthetic construct
  source 1..75: mol_type = other DNA
ttacctgacatgcaaagctaccgagacctttacgacgggtttggccgcgaaggagccgaactattcttacgtaca

SEQ ID NO: 416111 - DNA, 75 bp, synthetic construct
  source 1..75: mol_type = other DNA
ccagatagcgatgcgacacgtaactttattaccggaatggccacagctaaagctaaccaggaaatacaggagtag

SEQ ID NO: 416112 - DNA, 75 bp, synthetic construct
  source 1..75: mol_type = other DNA
gcagcacgctggttgaccgacataacctttatttattgggacgcaggcaggccagtagcgacgatttcagcgtac

SEQ ID NO: 416113 - DNA, 75 bp, synthetic construct
  source 1..75: mol_type = other DNA
ccatacaattatcatgtcgaagaggcattagaaaaattaatcgctgctgcggacgccatcattgatgaactgtaa

SEQ ID NO: 416114 - DNA, 75 bp, synthetic construct
  source 1..75: mol_type = other DNA
tctcgcactggaactcgccagccgggtatcagtagcaaaaaaaatcgcaccagccgtaatggcacgaaacctggc

SEQ ID NO: 416115 - DNA, 75 bp, synthetic construct
  source 1..75: mol_type = other DNA
tcaccctttgtgtgtcacacggttcctctctaaaattaatggcatcgcctttaaatacaagttgagcaaagctaa

SEQ ID NO: 416116 - DNA, 75 bp, synthetic construct
  source 1..75: mol_type = other DNA
tgccgcgatggtcaacgctccgctgattgaagaacaactggccttccgcgccagcgttgatcgccagcggcggcg

SEQ ID NO: 416117 - DNA, 75 bp, synthetic construct
  source 1..75: mol_type = other DNA
agtgctcgtttcgacccacggcgtccggtgtttgagaccacctcaaccagcggtatctgggatctggcctgggaa

SEQ ID NO: 416118 - DNA, 75 bp, synthetic construct
  source 1..75: mol_type = other DNA
taccgatcgttcataacacaacgtatgaagctctccgcaatgttagtcccttgctcgcatcccgaagcggtctgg

SEQ ID NO: 416119 - DNA, 75 bp, synthetic construct
  source 1..75: mol_type = other DNA
gatgatgcgtgccatcgataaaggattagcaaactctcgaataggcttggttttagtaacaccagcattgttaaa

SEQ ID NO: 416120 - DNA, 75 bp, synthetic construct
  source 1..75: mol_type = other DNA
aaatcatgtcagcattaaattttctcggtgacaaaataaaagcatcatcacaatttataatgatatttgcaaaaa

SEQ ID NO: 416121 - DNA, 75 bp, synthetic construct
  source 1..75: mol_type = other DNA
actgcgaccaccggggcctgccgctggcgctcatcagcgaagacggcaatactgcgtggagcggggagtatgatg

SEQ ID NO: 416122 - DNA, 75 bp, synthetic construct
  source 1..75: mol_type = other DNA
atcatcttggtgatattgcgcagcaagaaggcgcttatttttgccttgaaccaaacccagtctgttacggggcaa

SEQ ID NO: 416123 - DNA, 75 bp, synthetic construct
  source 1..75: mol_type = other DNA
tccggacggcaaattcaatatcgctgcggagcaggaaagcctgctcagggccgatgtgattgtctggcagtttcc

SEQ ID NO: 416124 - DNA, 75 bp, synthetic construct
  source 1..75: mol_type = other DNA
cgaaatggcacataataagtttcgtgaattaagtgacgcttactcctcgtcattagattccgcgcaaaaagccaa

SEQ ID NO: 416125 - DNA, 75 bp, synthetic construct
  source 1..75: mol_type = other DNA
cagtgatgtaactgccatcagctatggtgaagactcccctgtgaaaggaaatggcagtcaatggcacttctccga

SEQ ID NO: 416126 - DNA, 75 bp, synthetic construct
  source 1..75: mol_type = other DNA
atggtcgccgctcgcatggggcgtgatcgttccaagccacttcgtaaaaactgggagtcggtcaaagaacaggtg

SEQ ID NO: 416127 - DNA, 75 bp, synthetic construct
  source 1..75: mol_type = other DNA
cagtagtattaggtgttgatattatttgtcaaatcactctgggtaccacggctaccggttggattttgggaaaac

SEQ ID NO: 416128 - DNA, 75 bp, synthetic construct
  source 1..75: mol_type = other DNA
taaaacagttgatcccactctgctcgcaatcaccgcgcttctggacgttattggtgtcgatcaagatacgattga

SEQ ID NO: 416129 - DNA, 75 bp, synthetic construct
  source 1..75: mol_type = other DNA
cattagattctgcgcaaaaagctgacgatatcatgcatcaggccaacaataattacaatgcggccgataaaaagg

SEQ ID NO: 416130 - DNA, 75 bp, synthetic construct
  source 1..75: mol_type = other DNA
aaggcgtagattgccttgtccgcctgggggcgcttcaagattctagttttatatccagacgtcttggtgacatcc

SEQ ID NO: 416131 - DNA, 75 bp, synthetic construct
  source 1..75: mol_type = other DNA
gcgttctctgggggcggtaaacctgccgaccactgtcgtggagtggtggcaggattcaccgcaggctgcacccta

SEQ ID NO: 416132 - DNA, 75 bp, synthetic construct
  source 1..75: mol_type = other DNA
atcatcagatccgccagcttaccgagcgggccaagaacctgcgcagctatctgagcaaaatcgatgtgatggcga

SEQ ID NO: 416133 - DNA, 75 bp, synthetic construct
  source 1..75: mol_type = other DNA
cgatagaagtttgccaggaacgcaaatccaactgcgtgagtggtttttaactgagaaaatcccggatttgcgtag

SEQ ID NO: 416134 - DNA, 75 bp, synthetic construct
  source 1..75: mol_type = other DNA
gggaaatgagcgttgtcagagtgcgccgaagctggtggaaaaaacatcgggatgagttttctttactggagggag

SEQ ID NO: 416135 - DNA, 75 bp, synthetic construct
  source 1..75: mol_type = other DNA
ggtttgccgacagtaacaagaaggcgttgctggctgaaattggcgtcggcacgctggatcaggcgatgatggcgg

SEQ ID NO: 416136 - DNA, 75 bp, synthetic construct
  source 1..75: mol_type = other DNA
tacctcctggcgcatttcatgaagagcgggcgcaggagcaggccagcgctgagcagatcgccaccctcgatacca

SEQ ID NO: 416137 - DNA, 75 bp, synthetic construct
  source 1..75: mol_type = other DNA
cgagcaaacccaccagcctgacgtttctctactccgataacgatccgaactgggagcctattgctctggcgacac

SEQ ID NO: 416138 - DNA, 75 bp, synthetic construct
  source 1..75: mol_type = other DNA
attggcaactggagtccggattttgccgacccgtatatgtttatgaattactggtttgagtcagacaaaaaaggt

SEQ ID NO: 416139 - DNA, 75 bp, synthetic construct
  source 1..75: mol_type = other DNA
cgctcgtcatgtcgaggtcgctgtaatgaaaagcgataaactcgagaaaattagagataatattattgagtcgac

SEQ ID NO: 416140 - DNA, 75 bp, synthetic construct
  source 1..75: mol_type = other DNA
tatgaacgctggctggacgattttattgctggcatgagtatgaagggtttcgatagaagtttgccaggaacgcaa

SEQ ID NO: 416141 - DNA, 75 bp, synthetic construct
  source 1..75: mol_type = other DNA
cattaggtggtacggagatttatggcgatataacaaaagaaagtcctataccgttgtatatgacacagcaggatg

SEQ ID NO: 416142 - DNA, 75 bp, synthetic construct
  source 1..75: mol_type = other DNA
ctttaggcggtacagatatttatggcgatataacaaaagaaagccctgtaccgctttatatgacgcagcaggatg

SEQ ID NO: 416143 - DNA, 75 bp, synthetic construct
  source 1..75: mol_type = other DNA
acaaaaattccttgatgaaaaataccgcgaagagatccgtcgggtttcttcccctatggtcgccgcacgcatggg

SEQ ID NO: 416144 - DNA, 75 bp, synthetic construct
  source 1..75: mol_type = other DNA
ttgggagagcatgtcgatcgccagacggtgaacagcgttttttccactgcgtataatgattatctgattaatgca

SEQ ID NO: 416145 - DNA, 75 bp, synthetic construct
  source 1..75: mol_type = other DNA
agaaatgcaataatttcaacaaattacagatctatacctgatatagtgtatgaggggaggaatgcaatatttgtt

SEQ ID NO: 416146 - DNA, 75 bp, synthetic construct
  source 1..75: mol_type = other DNA
cacaggctttggtatcgctcgactgtccaaagaaaagcagcaacagctcatgatggaaaccataaatgaaagcaa

SEQ ID NO: 416147 - DNA, 75 bp, synthetic construct
  source 1..75: mol_type = other DNA
atgagattgaagcccttagtgaccgcgctctgtgcaggcgcgctgctggccgcagcaccgttcgcccaggcgaaa

SEQ ID NO: 416148 - DNA, 75 bp, synthetic construct
  source 1..75: mol_type = other DNA
ttttatgagacttaatagcttcataaatcaatttgattctggttttgattatatttataatggaaaaatactgtg

SEQ ID NO: 416149 - DNA, 75 bp, synthetic construct
  source 1..75: mol_type = other DNA
cgctggcagggaaaatccgtggtttttgatgccagccataacgtgtttgactacaaagtattacgaaagaacttt

SEQ ID NO: 416150 - DNA, 75 bp, synthetic construct
  source 1..75: mol_type = other DNA
agaatactatggtgtgattactgttatgacaacatttactaatgtttccatgatggggatcccaatgatatattc

SEQ ID NO: 416151 - DNA, 75 bp, synthetic construct
  source 1..75: mol_type = other DNA
ctgagtgtcgggccgagaggtgcttccgtttcttttggtagccggggacctatgccaatctgggcttgcccggta

SEQ ID NO: 416152 - DNA, 75 bp, synthetic construct
  source 1..75: mol_type = other DNA
atgaagcaaatcatattacctttgaccatattatccacgctcattactgctaataattcttacgcaagaaacact

SEQ ID NO: 416153 - DNA, 75 bp, synthetic construct
  source 1..75: mol_type = other DNA
agctccaagcaatcttgctatcataggaagatatattttaactcctgatatttttggaattttagaaaatactaa

SEQ ID NO: 416154 - DNA, 75 bp, synthetic construct
  source 1..75: mol_type = other DNA
tccttagtaaagcgacaacagaaagttttaccactgcggacttatcaaataatgttattgccgtagctaataaag

SEQ ID NO: 416155 - DNA, 75 bp, synthetic construct
  source 1..75: mol_type = other DNA
atgtctttcgtattaccatcgataacggcttatccacggcagtcaaaaaaatacattttcatcgcattgctactt

SEQ ID NO: 416156 - DNA, 75 bp, synthetic construct
  source 1..75: mol_type = other DNA
agacggaagcccggacgccgaagaggcgctgaaacgtgagaattcgttgtttgtcgctactccggcgcaagatcc

SEQ ID NO: 416157 - DNA, 75 bp, synthetic construct
  source 1..75: mol_type = other DNA
ctctgccggaagcgctacaggatgcggaatacaacctccgcgtttcggcacgcaatattgccagcgtctggaaat

SEQ ID NO: 416158 - DNA, 75 bp, synthetic construct
  source 1..75: mol_type = other DNA
ataaacataaacatgcaggtcatattatcactattgaaggccacagctttaagtctaatgagtctggcatgtgga

SEQ ID NO: 416159 - DNA, 75 bp, synthetic construct
  source 1..75: mol_type = other DNA
aacgaaaaatttcttgaacgattttttgataaaaataaaattcttaaactacttacagcaatggatgacgaggtc

SEQ ID NO: 416160 - DNA, 75 bp, synthetic construct
  source 1..75: mol_type = other DNA
tggcaatggaaacgggtttgaccgctgatcgcgttaaatcactgctccgtaaattccagaatctgggcatgatca

SEQ ID NO: 416161 - DNA, 75 bp, synthetic construct
  source 1..75: mol_type = other DNA
gaaatcgcttcctttcggcggcggcgcgctaagcaacctggcgctcatcgatgcctcaggctgcgacgctcgact

SEQ ID NO: 416162 - DNA, 75 bp, synthetic construct
  source 1..75: mol_type = other DNA
taccaccagttatggcacaggcgaactgatccttgccgcactggaccacggcgttgagcgaattattctcgggat

SEQ ID NO: 416163 - DNA, 75 bp, synthetic construct
  source 1..75: mol_type = other DNA
acgcagatcgcaaacacagcctttgttaaggcagctataacagcacttatcaatggtgctcctggagcactggat

SEQ ID NO: 416164 - DNA, 75 bp, synthetic construct
  source 1..75: mol_type = other DNA
ggtgaagaaggagcatgccgacgggagcatcacccgcagcgagtatgatgaggcggggaggctgaaggcgcagac

SEQ ID NO: 416165 - DNA, 75 bp, synthetic construct
  source 1..75: mol_type = other DNA
cgtgcagataaccaaaggcgcggagctggaagcgcgcaaactggcaggcgataacgtcaaagtgacgctggtttc

SEQ ID NO: 416166 - DNA, 75 bp, synthetic construct
  source 1..75: mol_type = other DNA
agatcatttcaaaatcggcgaatggtctgcgcattgcctacggaaactacggattctttatccgaaacgatggtt

SEQ ID NO: 416167 - DNA, 75 bp, synthetic construct
  source 1..75: mol_type = other DNA
gggcatatggttcgggcggcggtggtgcatacgatgccggttatagcggaaccagtatgacgggcgggaaaggcg

SEQ ID NO: 416168 - DNA, 75 bp, synthetic construct
  source 1..75: mol_type = other DNA
aactatcaacaatgccctggctctcaaagcgcctttggcaagccctgcattaacgggtatccctactgcacctac

SEQ ID NO: 416169 - DNA, 75 bp, synthetic construct
  source 1..75: mol_type = other DNA
ttctcagggaacgcctgcagggggctgtaattgcttccggctctggctgggtcgcgacgcgagaaaacaatactt

SEQ ID NO: 416170 - DNA, 75 bp, synthetic construct
  source 1..75: mol_type = other DNA
cgagtgtcacacatatcatgcaggaaatcgccgccgcctcggatgaacaaagtagaggcataactcaggttagcc

SEQ ID NO: 416171 - DNA, 75 bp, synthetic construct
  source 1..75: mol_type = other DNA
ggggaacagcaagtttcccgcggtggtagtgctgtaggcaccaccattgaggggggactgcagactgttttcggt

SEQ ID NO: 416172 - DNA, 75 bp, synthetic construct
  source 1..75: mol_type = other DNA
tctggcaggtattgtcataccggtttacgggtacagtcatgaactgtcaggcacttatgccagaatattaagtat

SEQ ID NO: 416173 - DNA, 75 bp, synthetic construct
  source 1..75: mol_type = other DNA
taccgcgctgacgaattactggtttaagcgtaaaacctaccgctacctgacctcacttggacccgataaggggct

SEQ ID NO: 416174 - DNA, 75 bp, synthetic construct
  source 1..75: mol_type = other DNA
ggtgtacgtgaatggtgtccgaaaccgggggctggaaaaccgacgcgatcgggagtgggcttactgcgtgaaggg

SEQ ID NO: 416175 - DNA, 75 bp, synthetic construct
  source 1..75: mol_type = other DNA
gccagcagtgtttttcaaggcgatttcatcaatactttgggaaaacgccaagccaagtaagacgtaacgtagacg

SEQ ID NO: 416176 - DNA, 75 bp, synthetic construct
  source 1..75: mol_type = other DNA
actttcagcaattattagccttgccgaaaacagagcaaggagaatggcggctggctgcgctatatagtctggcaa

SEQ ID NO: 416177 - DNA, 75 bp, synthetic construct
  source 1..75: mol_type = other DNA
cgctacgtgaaaaacggtaaagtttttgactggtctgcgcattttggtcgtgattgtccagatccagtgtttaag

SEQ ID NO: 416178 - DNA, 75 bp, synthetic construct
  source 1..75: mol_type = other DNA
ccatactcccagccgtggcaagactgttagcggtttctctggaggatttgcttggcgaagaaccggagaagatcg

SEQ ID NO: 416179 - DNA, 75 bp, synthetic construct
  source 1..75: mol_type = other DNA
tccagtggtggcagtgctaccagcaccactattaatggtggcttccagctcatttccagcggtggcagtgctgtt

SEQ ID NO: 416180 - DNA, 75 bp, synthetic construct
  source 1..75: mol_type = other DNA
tccagcggtggtagtgctgtagacaccaccattgaggtgggactacagactgtttttgatggcggaagtgttaat

SEQ ID NO: 416181 - DNA, 75 bp, synthetic construct
  source 1..75: mol_type = other DNA
gaaaggggatgttgatgatggtgccgtggttcactggcggtcatatggcacgcttgtggggacagatgtcaccgt

SEQ ID NO: 416182 - DNA, 75 bp, synthetic construct
  source 1..75: mol_type = other DNA
ataaataatgaattagcagaagcatcaacagtaatatcttattctctggtcgatttatgtaaaaccgaccagtat

SEQ ID NO: 416183 - DNA, 75 bp, synthetic construct
  source 1..75: mol_type = other DNA
agtttatttactctaaccattttgatgcgattccacctcatgtcatttcccgtgcaaagattcatctgttggata

SEQ ID NO: 416184 - DNA, 75 bp, synthetic construct
  source 1..75: mol_type = other DNA
ctggtgatgcagccgtcggttattctgctggatgaaccatttactggcattgatgttcagactatccgtactctg

SEQ ID NO: 416185 - DNA, 75 bp, synthetic construct
  source 1..75: mol_type = other DNA
atagagccgcaaacccagctcacatacagccaccagaatgagatggctatgaaggcgagtaatggtctcaatata

SEQ ID NO: 416186 - DNA, 75 bp, synthetic construct
  source 1..75: mol_type = other DNA
atgttcgccatttacacctttggcccgcaaatcgttggtttgttgggattgggtgttggcaaaaacgcggcgctg

SEQ ID NO: 416187 - DNA, 75 bp, synthetic construct
  source 1..75: mol_type = other DNA
atcatgctcatgttttattgcacgccgatattatatgcgtcagatatgattcctgaaaaatttagctggattatt

SEQ ID NO: 416188 - DNA, 75 bp, synthetic construct
  source 1..75: mol_type = other DNA
ttctattccgcattgggaggtattgttttgcatagcgatggcgtagcttttactcaaaaagccggagatacctct

SEQ ID NO: 416189 - DNA, 75 bp, synthetic construct
  source 1..75: mol_type = other DNA
aacagcggaaaaggcatgacggatagcaacgggactgcaatcgcctccctgaccggcacgttagcgggcacgcat

SEQ ID NO: 416190 - DNA, 75 bp, synthetic construct
  source 1..75: mol_type = other DNA
cgacctataccgcctataccagaggcagtgggcttactgcgaagctattaatgcaaaactggaatgaagatttac

SEQ ID NO: 416191 - DNA, 75 bp, synthetic construct
  source 1..75: mol_type = other DNA
accgcaggggcaacgccagttaggttatttgccccaattgactgaatttgatcgccagtttccactgagtgttaa

SEQ ID NO: 416192 - DNA, 75 bp, synthetic construct
  source 1..75: mol_type = other DNA
gctttggcgagctgatgtcgcaggacacgcgtatggtgattctcgactataacgaggtgcgcagcctggagcgta

SEQ ID NO: 416193 - DNA, 75 bp, synthetic construct
  source 1..75: mol_type = other DNA
gcctgttcctgaaagagtgtcgccactaccgccagcgcatcgacaccagcccggattgcggcgtgattctaatcg

SEQ ID NO: 416194 - DNA, 75 bp, synthetic construct
  source 1..75: mol_type = other DNA
tgaggaaagccgccgctggctggcatcgtgcggcctgacggtggagcagatgcaaaaccagatggacccggtgta

SEQ ID NO: 416195 - DNA, 75 bp, synthetic construct
  source 1..75: mol_type = other DNA
gcaatggcgttagctatagcgaaattgttgacgatgtcgccagccatctgaaaattaaagtcgcgaaaaatgcac

SEQ ID NO: 416196 - DNA, 75 bp, synthetic construct
  source 1..75: mol_type = other DNA
ctactaccagctaagaataagcaaatcacagtgctggactctaaaaaagcaaagcacaaattcaagattgaaggc

SEQ ID NO: 416197 - DNA, 75 bp, synthetic construct
  source 1..75: mol_type = other DNA
cctcacactatctagtcagcggcctgcagatatttcacctactattgtttcccagattcacaatttcttcataca

SEQ ID NO: 416198 - DNA, 75 bp, synthetic construct
  source 1..75: mol_type = other DNA
ccaataaagtcattttgcgaaaatggtgcaataaccgcttaatgccgcaaaaagtcgcaattaaggaagcccgca

SEQ ID NO: 416199 - DNA, 75 bp, synthetic construct
  source 1..75: mol_type = other DNA
gatattgcctttgctggcgagaaggtagcctctataaatgacggcagttttttcagtagcgcaaccatcaccagt

SEQ ID NO: 416200 - DNA, 75 bp, synthetic construct
  source 1..75: mol_type = other DNA
cggtaaaagaaaaagaatcactgattatcgatgccgtttttgcgtcatcctggaacaaaatgtcagatgacgatc

SEQ ID NO: 416201 - DNA, 75 bp, synthetic construct
  source 1..75: mol_type = other DNA
ggcgcgaaaagttcatctttatcactgcgaccaccggggcctgccgctggcgctcatcagcgaagacggcaatac

SEQ ID NO: 416202 - DNA, 75 bp, synthetic construct
  source 1..75: mol_type = other DNA
ttgcagtgagtggagtacgtatctcccttcgaatttttgaagactccaatcatgagactatttactacggaggag

SEQ ID NO: 416203 - DNA, 75 bp, synthetic construct
  source 1..75: mol_type = other DNA
atcggtgatgctggcgacggtgaacttaatgtctctagtgaaggcaaagtcgattcgggaattatcactgcgggg

SEQ ID NO: 416204 - DNA, 75 bp, synthetic construct
  source 1..75: mol_type = other DNA
attacggataagggttacgtcacgagttcaatcgtcgccattgtaggatatcaggcgaacagcaatggtaaggtt

SEQ ID NO: 416205 - DNA, 75 bp, synthetic construct
  source 1..75: mol_type = other DNA
aggaaacattagtgataaaacattctatatatctggtcctccggcattggttgaactggtagctaatacagcaac

SEQ ID NO: 416206 - DNA, 75 bp, synthetic construct
  source 1..75: mol_type = other DNA
gaacgggattatttcaccctcagagagcggctgatgacgatgcagaagcaactggaaggggcacaggaatatatc

SEQ ID NO: 416207 - DNA, 75 bp, synthetic construct
  source 1..75: mol_type = other DNA
gcgctgacagcgtgtggtgacaacaaccagcgctgcgcctgttggtatccgcagcaggaggtcataagtgtctga

SEQ ID NO: 416208 - DNA, 75 bp, synthetic construct
  source 1..75: mol_type = other DNA
atatcattatcataaaaatgacatctctttgggagtagatactctttacgggagggaaagttttgatattgtact

SEQ ID NO: 416209 - DNA, 75 bp, synthetic construct
  source 1..75: mol_type = other DNA
cgcggacacaatatgcagagccgcgggtcgaaagtcgctatctttacgacccgctgggccgcagggtggcaaaac

SEQ ID NO: 416210 - DNA, 75 bp, synthetic construct
  source 1..75: mol_type = other DNA
aacacatatgaagcatataactcagagaatcaatattttaccagagaggactatacgtataattacgacctttta

SEQ ID NO: 416211 - DNA, 75 bp, synthetic construct
  source 1..75: mol_type = other DNA
caatggctttgaagtcgaagaatataacgcatatgaagcatataactcagagaatctatattttaccagagagga

SEQ ID NO: 416212 - DNA, 75 bp, synthetic construct
  source 1..75: mol_type = other DNA
gcaaaatatacggagactcatctcttggtgtatctctggtcacatctgcagtaaaagatgccctttctcttgcga

SEQ ID NO: 416213 - DNA, 75 bp, synthetic construct
  source 1..75: mol_type = other DNA
ctgaatgtctgctggaactggcagacgcgctgggaattgataatccgcaaaggaataaaggtgcactgacccgtg

SEQ ID NO: 416214 - DNA, 75 bp, synthetic construct
  source 1..75: mol_type = other DNA
aaggcgttcctctgtccaaagactacattaaagcggcttttaaagaggtttacagcaacccgaaattactgaact

SEQ ID NO: 416215 - DNA, 75 bp, synthetic construct
  source 1..75: mol_type = other DNA
tggaaaacgatactaaagccaaatatgtccgaccgtgaaataaataaagtccctattataagacatttacaggaa

SEQ ID NO: 416216 - DNA, 75 bp, synthetic construct
  source 1..75: mol_type = other DNA
gaagaaataatatgtagagcttttttacaagaaaccccatcagataaatctatattcgtattgaactgtggtacg

SEQ ID NO: 416217 - DNA, 75 bp, synthetic construct
  source 1..75: mol_type = other DNA
aacttgtactggaaggatattttaaggccaaatatatcacatcaagatataaataaagtgcctataattaagtat

SEQ ID NO: 416218 - DNA, 75 bp, synthetic construct
  source 1..75: mol_type = other DNA
tccacaccacggcagcgaacctggatatcgatatcccgtatgcgacggacccggcaggaaaccggctgccggacc

SEQ ID NO: 416219 - DNA, 75 bp, synthetic construct
  source 1..75: mol_type = other DNA
gatagcgggaaaaagtctggattattttctgcatggtcaggaatatctcagtttggtcacgttgactggaaagtc

SEQ ID NO: 416220 - DNA, 75 bp, synthetic construct
  source 1..75: mol_type = other DNA
gctatcgtaatgaactacgaagcgatcgagatggaagtgaaaggcaagagcaaatgttacgagaggaaccatttt

SEQ ID NO: 416221 - DNA, 75 bp, synthetic construct
  source 1..75: mol_type = other DNA
tactgtgtttaatttcctctgatgtccgaaactttatattttcagttcacactgttgaagatagatttcttattt

SEQ ID NO: 416222 - DNA, 75 bp, synthetic construct
  source 1..75: mol_type = other DNA
atgataaacttaatttttattttaattttcgcgtcaggagataataatgataaaagtgtttatcgtatccttaaa

SEQ ID NO: 416223 - DNA, 75 bp, synthetic construct
  source 1..75: mol_type = other DNA
gagctggcggtcttgaccttggttttaaaaacgccggatttcaaatcgtttgggcaaatgatattgactctgacg

SEQ ID NO: 416224 - DNA, 75 bp, synthetic construct
  source 1..75: mol_type = other DNA
actgaacatccgtttgagctggaagaagatgtctggcagcgggaagagattgttaccaccggcgttggttttggc

SEQ ID NO: 416225 - DNA, 75 bp, synthetic construct
  source 1..75: mol_type = other DNA
aagcgatgggtaaagccaattctgttgaactggcggcgcggcttgatatcagccgtgaagaagttcttaacgaac

SEQ ID NO: 416226 - DNA, 75 bp, synthetic construct
  source 1..75: mol_type = other DNA
gcttccgacgataatatgttgccaaacagccagcgcggatttgccccaacggtacgcggtatcgcaaacagtagt

SEQ ID NO: 416227 - DNA, 75 bp, synthetic construct
  source 1..75: mol_type = other DNA
actgcgaagcgagcgatctggcagtgaagcgcagagccgggctttacgtgaggagccattttatcgtttgatgac

SEQ ID NO: 416228 - DNA, 75 bp, synthetic construct
  source 1..75: mol_type = other DNA
cgcatcagcggggcaaatgggtaggcatttgcggtgaactgggcggtgaaagccgttatctgccgctactgcttg

SEQ ID NO: 416229 - DNA, 75 bp, synthetic construct
  source 1..75: mol_type = other DNA
cattgcccggctggcgaaaccggttgactggcagtcagaaatgggcgaagtcgaactggtgatcatgctgacgct

SEQ ID NO: 416230 - DNA, 75 bp, synthetic construct
  source 1..75: mol_type = other DNA
tatatcagtatcctttaaatccactacaacaaattgaccctatgggattattgcagacttgggatgatgccagat

SEQ ID NO: 416231 - DNA, 75 bp, synthetic construct
  source 1..75: mol_type = other DNA
ccggaaacggagaggttccggtgggacagccgggaccagctgaccgggtattgcagcgcacagggtgagcagtgg

SEQ ID NO: 416232 - DNA, 75 bp, synthetic construct
  source 1..75: mol_type = other DNA
tatcgcatccgacattattgcggcactggagtttggcaacagtgccggatgcggcgcgagcgccttatccggcct

SEQ ID NO: 416233 - DNA, 75 bp, synthetic construct
  source 1..75: mol_type = other DNA
cgaataatatggcgatatattggaatagtagagcatctttattttgttcaactgaattaaactcgaaatcacaat

SEQ ID NO: 416234 - DNA, 75 bp, synthetic construct
  source 1..75: mol_type = other DNA
aacaggctggataccggcacactgggcttcagtgacactgaaaaccgggctgactttaaaacggaacatcagagt

SEQ ID NO: 416235 - DNA, 75 bp, synthetic construct
  source 1..75: mol_type = other DNA
cgtctggcgaccggggcagaccagcctgtgggggctggcactcagtctgcccgcagacacagactacccggaccc

SEQ ID NO: 416236 - DNA, 75 bp, synthetic construct
  source 1..75: mol_type = other DNA
aacggctttgagctgataagccagcagttcagccgggtacggcaggcgcatccgtcggtggccccgcagtgggtg

SEQ ID NO: 416237 - DNA, 75 bp, synthetic construct
  source 1..75: mol_type = other DNA
cgctggctggcatcgtgcggcctgactgtggagcagatgcaaaaccagatggacccggtgtacacgccggcgcga

SEQ ID NO: 416238 - DNA, 75 bp, synthetic construct
  source 1..75: mol_type = other DNA
attacgtccgaaatatggccatatgtatggctacgacgcatctatgcctgctaatatcgaaatggcaataagatt

SEQ ID NO: 416239 - DNA, 75 bp, synthetic construct
  source 1..75: mol_type = other DNA
caattattaagaaagtaactgaagtattacgtccgaaatatggccatatgtatggctacgacgcatctatgcctg

SEQ ID NO: 416240 - DNA, 75 bp, synthetic construct
  source 1..75: mol_type = other DNA
aggagctcatagtggactgcctttttatcgggtggatggaccgttgcagacgatgaaaataacgggtacaccaga

SEQ ID NO: 416241 - DNA, 75 bp, synthetic construct
  source 1..75: mol_type = other DNA
cgatatccggatttttataacgaagaaattttcagggaggtgaccgaagagagcgagtcaacatttaaagagctt

SEQ ID NO: 416242 - DNA, 75 bp, synthetic construct
  source 1..75: mol_type = other DNA
cagtgatttagatgccgtactcgcgctgcgtaatcatctcgataccgccaggcaatcgatgattcgctcagtcaa

SEQ ID NO: 416243 - DNA, 75 bp, synthetic construct
  source 1..75: mol_type = other DNA
tcagcgccagcaacaaacgattatttcccacctgaattactacaaccggaagaaggggagaaactcaggcttttc

SEQ ID NO: 416244 - DNA, 75 bp, synthetic construct
  source 1..75: mol_type = other DNA
ttcattatactggctttccccctggcgatatcgatgaatttccaggagtggaacaggtattcagatatctttcgg

SEQ ID NO: 416245 - DNA, 75 bp, synthetic construct
  source 1..75: mol_type = other DNA
gggcgacagtacatgattcctggtgagggcggcaggattattcccaaccgtgatattggtggcggtggcggaatc

SEQ ID NO: 416246 - DNA, 75 bp, synthetic construct
  source 1..75: mol_type = other DNA
cacaacgggggattactcaatcggtttgctaagtcaaacgaatggaaacctgaatactgataccataataagagt

SEQ ID NO: 416247 - DNA, 75 bp, synthetic construct
  source 1..75: mol_type = other DNA
gattccggctattttaaaagaaagaatagaatatccttttttatggatgtttcaaagatggagcatacttgtcat

SEQ ID NO: 416248 - DNA, 75 bp, synthetic construct
  source 1..75: mol_type = other DNA
ttatttccggtgtgtcttttggcgtttttgcacagcagggcggtttccaagggcctgaagcagagcgttcaacag

SEQ ID NO: 416249 - DNA, 75 bp, synthetic construct
  source 1..75: mol_type = other DNA
gtaaaagaaggtgacgagattaagggggcacttgtatataagggtagtaaattagcaatactggagaggaatagt

SEQ ID NO: 416250 - DNA, 75 bp, synthetic construct
  source 1..75: mol_type = other DNA
aataatcacccttatcagtccgtatttacagactttatcgccggtcatcctgaaccgccccgggaatcctggaga

SEQ ID NO: 416251 - DNA, 75 bp, synthetic construct
  source 1..75: mol_type = other DNA
gatatatcacccaggacccgatagggctgagaggtgaatggaatctgtataaatatccattaaaccctgttcggt

SEQ ID NO: 416252 - DNA, 75 bp, synthetic construct
  source 1..75: mol_type = other DNA
aaacctgctgggcgaggaaagcgcgcagcaccttcagcagtcactccgtctgccgggacagcagtatgatgagga

SEQ ID NO: 416253 - DNA, 75 bp, synthetic construct
  source 1..75: mol_type = other DNA
atgcgctgaaaatagatagtgcaaatacagaaaatattaataatgcgctagttataacaacgggtaatggaagtt

SEQ ID NO: 416254 - DNA, 75 bp, synthetic construct
  source 1..75: mol_type = other DNA
cgtattcatattgtttgcgatgtccctgatgaacttattgatttcacgtttgaatggaaaggactgaaaattcac

SEQ ID NO: 416255 - DNA, 75 bp, synthetic construct
  source 1..75: mol_type = other DNA
tgaacgggacctgacgggctggatgtcgctgtcacggaaaccgcaagtgacctggtacggctgggacggcgaccg

SEQ ID NO: 416256 - DNA, 75 bp, synthetic construct
  source 1..75: mol_type = other DNA
agcaagagttaataaaagagaataatgaaagacgaacgaaaagaaccaaaagcgcagaagtcgcgattcgtaaac

SEQ ID NO: 416257 - DNA, 75 bp, synthetic construct
  source 1..75: mol_type = other DNA
agttcaggaagaatgatccggaggaaatggaaggcgctgaacatccacacaaggagaacactgacggcaatcagc

SEQ ID NO: 416258 - DNA, 75 bp, synthetic construct
  source 1..75: mol_type = other DNA
cagatgaggttattaatagatataaaaaactctcttttggcgaaactgataaaatttcacgatctcagaggttaa

SEQ ID NO: 416259 - DNA, 75 bp, synthetic construct
  source 1..75: mol_type = other DNA
aacgcactgatgtccacttccagtatccagctataacgccagcaccggatggcacattgtttcagagcgtcatga

SEQ ID NO: 416260 - DNA, 75 bp, synthetic construct
  source 1..75: mol_type = other DNA
gccgcctgtgggggcgcattgctgcgcgtatcgacccggaatgggtggagccagttgctcagcatttgattaaac

SEQ ID NO: 416261 - DNA, 75 bp, synthetic construct
  source 1..75: mol_type = other DNA
catctggaaaaaacgtcgcgaaggtgaacgcaaggaagccggaaaatacacgtctgttgttgatctcgcccgcgc

SEQ ID NO: 416262 - DNA, 75 bp, synthetic construct
  source 1..75: mol_type = other DNA
tcaggaagacgattcggagaaaatggaaggcgctgaacatccacacaaggagaatgctggcagcgctcaggacca

SEQ ID NO: 416263 - DNA, 75 bp, synthetic construct
  source 1..75: mol_type = other DNA
gtactgaatcactggcggtcactaataagccagcgtcgatgtgcaggctattaccggtggctggagaatccggat

SEQ ID NO: 416264 - DNA, 75 bp, synthetic construct
  source 1..75: mol_type = other DNA
gatgatattctatttgacgttgggaaaaaatatgaagatgttttaactgttcctttgcttacttttaaatcatca

SEQ ID NO: 416265 - DNA, 75 bp, synthetic construct
  source 1..75: mol_type = other DNA
agcagcacatccgtgaggctattgtggcgatggaacgcaataaccagaacaattactgggaagcattaggcaagg

SEQ ID NO: 416266 - DNA, 75 bp, synthetic construct
  source 1..75: mol_type = other DNA
ctttagttagagatggctattgtttattacatccaataagggttaatgcttcaaattatggagcacctacgacac

SEQ ID NO: 416267 - DNA, 75 bp, synthetic construct
  source 1..75: mol_type = other DNA
gatgtctgctcgcttacagcaaaagatattttgtctgcatgtgctgtaaaggacattgattgcgttattggtggt

SEQ ID NO: 416268 - DNA, 75 bp, synthetic construct
  source 1..75: mol_type = other DNA
gagttggcggtttaagcttaggggcaactcgagccggtttcaacttggttggagctgttgaactggataaacatg

SEQ ID NO: 416269 - DNA, 75 bp, synthetic construct
  source 1..75: mol_type = other DNA
cccgttatcagcagcgaaatggcggcgtgcaggatgtgcgttatggttccgaaatgtattacaacccgggaggta

SEQ ID NO: 416270 - DNA, 75 bp, synthetic construct
  source 1..75: mol_type = other DNA
gtttcaattctggtgttgatcattgtccgcgtcacaccgttaagcacctttttcccgtggatcgaaaaacaagga

SEQ ID NO: 416271 - DNA, 75 bp, synthetic construct
  source 1..75: mol_type = other DNA
ttgattcactcgtttctgaactggaaatcgctggtggcaattgcagtaggcgttattgtctcctggctgggtggg

SEQ ID NO: 416272 - DNA, 75 bp, synthetic construct
  source 1..75: mol_type = other DNA
gataacggctgggttggcgaagtcagcgcttcaggagagattcatgttcaggcgacgtggcgtaacattaactaa

SEQ ID NO: 416273 - DNA, 75 bp, synthetic construct
  source 1..75: mol_type = other DNA
taagcagatggttgtttcgggaagtgaaaaaccgttatttgtaaaacatactgaaatgataagagaggcatgcga

SEQ ID NO: 416274 - DNA, 75 bp, synthetic construct
  source 1..75: mol_type = other DNA
tgtgtaaatgaactaaaacatggactgtcgagtaacaatgaatatagtttattcaaaaatagagaaggttcactg

SEQ ID NO: 416275 - DNA, 75 bp, synthetic construct
  source 1..75: mol_type = other DNA
ctggatgaggctttgccgggtgatacattccacctgaaaacgtccatactggcgcgtttatccacgccagtggtg

SEQ ID NO: 416276 - DNA, 75 bp, synthetic construct
  source 1..75: mol_type = other DNA
cctgcactggcccatctgggcgaacaggctgttcttaacaaggagatttatgcacaaggtaacgagaaggatgag

SEQ ID NO: 416277 - DNA, 75 bp, synthetic construct
  source 1..75: mol_type = other DNA
tggtaatggaattaactgatattgacccgaccgatagatttcatccctcgttaatctgggttgaatgccccgctg

SEQ ID NO: 416278 - DNA, 75 bp, synthetic construct
  source 1..75: mol_type = other DNA
cattttgatcgctcattctctgatggcgttctcgaagatatcgccgaacagcttcgtaaaggaggcagtccaatg

SEQ ID NO: 416279 - DNA, 75 bp, synthetic construct
  source 1..75: mol_type = other DNA
cgctgcaaacagaaaaacgccacattgccctctggtatgcagcaactgaacattgtccccggcgcacttcccgac

SEQ ID NO: 416280 - DNA, 75 bp, synthetic construct
  source 1..75: mol_type = other DNA
tgccaagcgtcacgattacttcacaagtgctctgccgtggcctcagaagggtgaaggcgttgagattggtttagg

SEQ ID NO: 416281 - DNA, 75 bp, synthetic construct
  source 1..75: mol_type = other DNA
ttaagctgaggactgcgctggatcattttgacctcaacgaaccatttgaaggcgaaagtttttcaggtgcattta

SEQ ID NO: 416282 - DNA, 75 bp, synthetic construct
  source 1..75: mol_type = other DNA
aatccggatgatgtcaaacgtcggcgcaaggccgaaattgatgaaaaccgcaagctggacctggtatttgatacc

SEQ ID NO: 416283 - DNA, 75 bp, synthetic construct
  source 1..75: mol_type = other DNA
ccgaaaagattactgaacaagattgatacctacgtgcgcaataacccagactacgccaacagaagtgcgtttctg

SEQ ID NO: 416284 - DNA, 75 bp, synthetic construct
  source 1..75: mol_type = other DNA
aggttactgaacaagattgatacctacgtgcgcaataacccagactacgccaacagaagtgcgtttctggcagaa

SEQ ID NO: 416285 - DNA, 75 bp, synthetic construct
  source 1..75: mol_type = other DNA
gcgctgacgcgtctgtggtcgccagtgatgacggcattgttgcgcgcattcctgacactgatggtaaattgcccg

SEQ ID NO: 416286 - DNA, 75 bp, synthetic construct
  source 1..75: mol_type = other DNA
atcgtggcatgtatagcgtgttattacccgaaggtgaagaaaaggccggttcgcggcgggtgggtgaactggatg

SEQ ID NO: 416287 - DNA, 75 bp, synthetic construct
  source 1..75: mol_type = other DNA
tacccgaaggtgaagaaaaggccggttcgcggcggggggtgaactggatgaggagatggtatatgagtcgcgggt

SEQ ID NO: 416288 - DNA, 75 bp, synthetic construct
  source 1..75: mol_type = other DNA
aagcaatggttcattagatacagtattttataatgccagaaattactttgtagtggggttttcattatttacaaa

SEQ ID NO: 416289 - DNA, 75 bp, synthetic construct
  source 1..75: mol_type = other DNA
ccatacttatattttggatttattggaactataatatgtagcatatttttcggactgctaatttcttataattta

SEQ ID NO: 416290 - DNA, 75 bp, synthetic construct
  source 1..75: mol_type = other DNA
gttgtaagggcattttatattttgatcaagatgattgatgagtcatccgaggatgaagtgagtgcaaatattgca

SEQ ID NO: 416291 - DNA, 75 bp, synthetic construct
  source 1..75: mol_type = other DNA
ccgaatgttcatctttatgaattccggaacgggcagttgcgtgctgtggctgccggaacccgtggcagttattcc

SEQ ID NO: 416292 - DNA, 75 bp, synthetic construct
  source 1..75: mol_type = other DNA
tcttaataatttattcaatgatttagcattgttaaaagatgctgatgccgttatcaataaaggatggttagtagt

SEQ ID NO: 416293 - DNA, 75 bp, synthetic construct
  source 1..75: mol_type = other DNA
gtgttgaccgcgggttatggtcatcagtttttgaatggcccggtacacagtttccgctttgaattcggtccaggt

SEQ ID NO: 416294 - DNA, 75 bp, synthetic construct
  source 1..75: mol_type = other DNA
tggttcttctgggtggtgccaattgtcggcggcattatcggtggtctgatttaccggaccctgctggaaaagcgt

SEQ ID NO: 416295 - DNA, 75 bp, synthetic construct
  source 1..75: mol_type = other DNA
aaacgcgggcgtccggtgagtgtgacggaaggcggactgacgcgcagcatggggtatgacgccgccgggcgcatc

SEQ ID NO: 416296 - DNA, 75 bp, synthetic construct
  source 1..75: mol_type = other DNA
ggatacaatccttcgattgcggttagtgagcttgaagcatttcttcattatcttgaatcaggaaagcttatgttg

SEQ ID NO: 416297 - DNA, 75 bp, synthetic construct
  source 1..75: mol_type = other DNA
atatgtttggtgaccgggtcgatcacggcggcagtatcaatattctgacctctcaccgcccttcaccgctggcaa

SEQ ID NO: 416298 - DNA, 75 bp, synthetic construct
  source 1..75: mol_type = other DNA
gtcgataacaacatcgcagagaacgccttacgggatgtggctgtaggccggaaaaactggctgttcgcaggttcc

SEQ ID NO: 416299 - DNA, 75 bp, synthetic construct
  source 1..75: mol_type = other DNA
aaatggctgcgttacgtcattgatcatatccaggactggccggcaaaccgggtacgcgatctgttgccctggaaa

SEQ ID NO: 416300 - DNA, 75 bp, synthetic construct
  source 1..75: mol_type = other DNA
gcgcgatggcagtacgctgggcgatcgcctgaattactgggatgtgaaaatgagtattcagtatgactttatgct

SEQ ID NO: 416301 - DNA, 75 bp, synthetic construct
  source 1..75: mol_type = other DNA
agccgaatgttgggaaggatttgacggatgaagagaagaactgcctggccggcggcagtgcaggaagtccgggag

SEQ ID NO: 416302 - DNA, 75 bp, synthetic construct
  source 1..75: mol_type = other DNA
tccaaatacagcttcactggccggggctggtattggtgctggtctgggtggggcatttgggaagtatgcccccac

SEQ ID NO: 416303 - DNA, 75 bp, synthetic construct
  source 1..75: mol_type = other DNA
ccgggtaatgagaacaaaaactgggactggaaaagcagtgccagtgcaggcattactggtatgcttgcaccggga

SEQ ID NO: 416304 - DNA, 75 bp, synthetic construct
  source 1..75: mol_type = other DNA
tttattctgaacgactggcgaagattgcggatacctgggaattgaaaaaagatgaaattattcatccccttccag

SEQ ID NO: 416305 - DNA, 75 bp, synthetic construct
  source 1..75: mol_type = other DNA
tcgcagggagatctcacgcattcggtgagggtcgaaggaaataatgagatggcaaaactggcagaaagtattctc

SEQ ID NO: 416306 - DNA, 75 bp, synthetic construct
  source 1..75: mol_type = other DNA
tggtgctggtctgggtggggcatttgggaagtatgcccccacagccgtggggaaaatcttagggaatgatcctgt

SEQ ID NO: 416307 - DNA, 75 bp, synthetic construct
  source 1..75: mol_type = other DNA
agctgcattacaaggccatagtgacgcgcaaaacaatctggccgatctttatgaagacggaaaaggcgttgctca

SEQ ID NO: 416308 - DNA, 75 bp, synthetic construct
  source 1..75: mol_type = other DNA
gcgataacatgctacgtctgtgggatgacctgaatgaccgttacgcgccgccggaagttgtgcgcgaactggcgc

SEQ ID NO: 416309 - DNA, 75 bp, synthetic construct
  source 1..75: mol_type = other DNA
gcgaagagcagctcattaacgagcgtgaccatgctgagtctgctttagctgatatgtattttgcagcaaccgggg

SEQ ID NO: 416310 - DNA, 75 bp, synthetic construct
  source 1..75: mol_type = other DNA
agaccattgatgagctgattgatggcggcatactgacacagtatgccatagccagagaagcgggaatttccgacg

SEQ ID NO: 416311 - DNA, 75 bp, synthetic construct
  source 1..75: mol_type = other DNA
aatgcatcagagtctcttgcttatgcttacaaagagcttacgcctgagattatacgcggccatatcgctgtattc

SEQ ID NO: 416312 - DNA, 75 bp, synthetic construct
  source 1..75: mol_type = other DNA
acgttctgaaaaacaacgctgaatttattgctgcctttaatccaaagattgctttggcactacttgatgaacggg

SEQ ID NO: 416313 - DNA, 75 bp, synthetic construct
  source 1..75: mol_type = other DNA
taaatgaaagggccaagataaaaaacatggaaggttggcttgctaatgcgttgagagatataaatgcgtcagagt

SEQ ID NO: 416314 - DNA, 75 bp, synthetic construct
  source 1..75: mol_type = other DNA
aaggtcttcagagtttctacttaatttttatgaatgttgctatgagtttttaccaagagcgcagcctcaggataa

SEQ ID NO: 416315 - DNA, 75 bp, synthetic construct
  source 1..75: mol_type = other DNA
cccatgtgctggcgctaatttgcagtgccgggctttgtgctgcctctgccgggctatatataaaaagccgcacag

SEQ ID NO: 416316 - DNA, 75 bp, synthetic construct
  source 1..75: mol_type = other DNA
acttattatttaatccaattgctttggagggaaattatacgcctgtagaaagaaatttgtcccgattaaatgaag

SEQ ID NO: 416317 - DNA, 75 bp, synthetic construct
  source 1..75: mol_type = other DNA
ggcgacccgtcaggagccggacggcctgccgccggtggagtggctgacgtatggcagcggttatcttgcggggat

SEQ ID NO: 416318 - DNA, 75 bp, synthetic construct
  source 1..75: mol_type = other DNA
aggtagtgaaaaaagcgactacctgtttatatctgatggtggaggtcgtctcacaagacaacgtatatatgatat

SEQ ID NO: 416319 - DNA, 75 bp, synthetic construct
  source 1..75: mol_type = other DNA
ctgagtggcgtactgttctggaatctgtatcagggaaacatcaggaaagagatcgttgtatgatttacatgatgt

SEQ ID NO: 416320 - DNA, 75 bp, synthetic construct
  source 1..75: mol_type = other DNA
caggcgtttgattcgggttctcaggggcagattgttgcgctcaatgcgctgagtaaaaatcttaccagtcagata

SEQ ID NO: 416321 - DNA, 75 bp, synthetic construct
  source 1..75: mol_type = other DNA
ccaaagtcaccagtatttatatgatgatgggtggactggctaactttgttattccgctgattaccggttatctgt

SEQ ID NO: 416322 - DNA, 75 bp, synthetic construct
  source 1..75: mol_type = other DNA
atctgcataatacgtcagtgagtcggttgcatagacaagggaataaaaaccttaattatcaacgtcactatatta

SEQ ID NO: 416323 - DNA, 75 bp, synthetic construct
  source 1..75: mol_type = other DNA
atggctggatcacagcatacccaaactcgccctgaatttacatggagatttctctccacctctgagcgctaccct

SEQ ID NO: 416324 - DNA, 75 bp, synthetic construct
  source 1..75: mol_type = other DNA
tggaaaatggcttgtgtaaaaacggcagtgcgaacgtgttaacggcggatatccccagctcgcagctggcaaatg

SEQ ID NO: 416325 - DNA, 75 bp, synthetic construct
  source 1..75: mol_type = other DNA
taaggtactatataccctgaccaatgatcgtctccgggaaatgtgggagtatgatgtatggttactgtgtgactg

SEQ ID NO: 416326 - DNA, 75 bp, synthetic construct
  source 1..75: mol_type = other DNA
ctgaatatgacagatatataatttcccaacgtcaatttttcttacgcgtaaatgaatcaaaatcatcgccgaact

SEQ ID NO: 416327 - DNA, 75 bp, synthetic construct
  source 1..75: mol_type = other DNA
atgtggtacacagaaagggatgttgttttcggtataatctgtgctggtatcagatgcggggatccgcggatgaaa

SEQ ID NO: 416328 - DNA, 75 bp, synthetic construct
  source 1..75: mol_type = other DNA
atgtcctggttaatatctcagtgtgctcatcagtgcactgataataaaaagacggagacagatgccatttacgat

SEQ ID NO: 416329 - DNA, 75 bp, synthetic construct
  source 1..75: mol_type = other DNA
ttgtcgatgctgacgatgaggtctatcccaccatgtacgaaacgctgatgaccatggcgttagaggacgacctcg

SEQ ID NO: 416330 - DNA, 75 bp, synthetic construct
  source 1..75: mol_type = other DNA
tttgttttttcatcggaaatagttatggtagcgaccatcttaagattatctctttgaatgaagttaggtttaaaa

SEQ ID NO: 416331 - DNA, 75 bp, synthetic construct
  source 1..75: mol_type = other DNA
tcagaaatattgcgtcgcaaagtcctcttgaattgattatggggggatatcgtaataatcaagcatctattcttg

SEQ ID NO: 416332 - DNA, 75 bp, synthetic construct
  source 1..75: mol_type = other DNA
catctgtcattatgcccctccgcacagggggattcatcatgcaggattttttaacaaatgctcagccagacaggc

SEQ ID NO: 416333 - DNA, 75 bp, synthetic construct
  source 1..75: mol_type = other DNA
gcaggataaccatttttgcactgcacactgttcactctgtgatgtttcacccggaaaccttcacaccagacggac

SEQ ID NO: 416334 - DNA, 75 bp, synthetic construct
  source 1..75: mol_type = other DNA
gctgctgcgcgccgacatgctgctgactcaccggttgcactttgatgagttgggtagcacctatgaacgagatgt

SEQ ID NO: 416335 - DNA, 75 bp, synthetic construct
  source 1..75: mol_type = other DNA
ccccgcgctccccggccatcgtatccccggtggcgtggtctggacgctggcttttgctcccctgattgggtatgc

SEQ ID NO: 416336 - DNA, 75 bp, synthetic construct
  source 1..75: mol_type = other DNA
cgttttgatgcagatggtaataatctgggtggatatgatttttacactgatgcggttgttgatacacactggcgt

SEQ ID NO: 416337 - DNA, 75 bp, synthetic construct
  source 1..75: mol_type = other DNA
cacaaggctccgcttgtttgtgagaaatcagggcagggctttacaggggtatacaactcagccgcccctggcagg

SEQ ID NO: 416338 - DNA, 75 bp, synthetic construct
  source 1..75: mol_type = other DNA
tcttatggctggactgagtgcaataccttcgaagggtattacgattggtcgagaaacaaatggtgggcagttact

SEQ ID NO: 416339 - DNA, 75 bp, synthetic construct
  source 1..75: mol_type = other DNA
gctctgctggatatggttcttccctgctattggcggtgttttcattatcttttatttccagctcagtgaatgcgg

SEQ ID NO: 416340 - DNA, 75 bp, synthetic construct
  source 1..75: mol_type = other DNA
gaccagaaatttcgaagaggaaatcgcgtattgctgctctgtaactttaaataaattgatcgcttcgttttgtaa

SEQ ID NO: 416341 - DNA, 75 bp, synthetic construct
  source 1..75: mol_type = other DNA
atgcttacatcagatggtataacgagcggcgtataaaattatcgctgggtgccgtcagccccaaaatgtaccgcc

SEQ ID NO: 416342 - DNA, 75 bp, synthetic construct
  source 1..75: mol_type = other DNA
tcctgagatggaccaccatctggtcagctcattactaagcggtcggggcaccccaccatgccttatctggcatca

SEQ ID NO: 416343 - DNA, 75 bp, synthetic construct
  source 1..75: mol_type = other DNA
ttgtatatgcttatttatatgattaaattgacagtaaaatcccgcagtttgattttttttaaaatgttcatgggc

SEQ ID NO: 416344 - DNA, 75 bp, synthetic construct
  source 1..75: mol_type = other DNA
gcacctcaaagaacagcaagttcaaaaagcagaatgacagcagcactactggctttctttttaggtggtcttggt

SEQ ID NO: 416345 - DNA, 75 bp, synthetic construct
  source 1..75: mol_type = other DNA
cagatggcggacaataacgaagtaacgagcagcattcttgcagacccttacggtaaactctcacataaaacgctt

SEQ ID NO: 416346 - DNA, 75 bp, synthetic construct
  source 1..75: mol_type = other DNA
atttatgatgaacaacctattgatgaaataactaatacagaagtgaaatatgcaggtgattttagttctttaatt

SEQ ID NO: 416347 - DNA, 75 bp, synthetic construct
  source 1..75: mol_type = other DNA
ttggcaggcttcattaaggcactttttgctgagtttaatttttttgttaatcgtgtaacgaataaaatattgaaa

SEQ ID NO: 416348 - DNA, 75 bp, synthetic construct
  source 1..75: mol_type = other DNA
atataatttacgtggattggattttaaggggtgcttcttttctggacagaacttcagtaactatgatattcaata

SEQ ID NO: 416349 - DNA, 75 bp, synthetic construct
  source 1..75: mol_type = other DNA
atctggatgatgactactttgacatgttgcaggaggagctttgcagcgttgtggaggcgtccggtgccagcttgg

SEQ ID NO: 416350 - DNA, 75 bp, synthetic construct
  source 1..75: mol_type = other DNA
gagtggaggaaaacagttgtttctggtatttactgaatacaaaccgtatccgcatgtggtgggatgtttatcggg

SEQ ID NO: 416351 - DNA, 75 bp, synthetic construct
  source 1..75: mol_type = other DNA
ttcaccacccagtacagcggctcgttcaactgtacgacgcgtaacagtgaattttcttacacgccgatcctctcg

SEQ ID NO: 416352 - DNA, 75 bp, synthetic construct
  source 1..75: mol_type = other DNA
ttgacagcgacactaatgcgatcgatgtcgcagtaaagcgactccgcgctaaaatagacaacgattacgggacaa

SEQ ID NO: 416353 - DNA, 75 bp, synthetic construct
  source 1..75: mol_type = other DNA
gcacagggctgacgaaccgagtgcgacgattactgcaggtggtggcggtaagtcgcagctggtaactccaacact

SEQ ID NO: 416354 - DNA, 75 bp, synthetic construct
  source 1..75: mol_type = other DNA
acaagcaggtagcgcgctgtggtaacgcagtaccgccgccgttcgctcgtgcgctggtagaagcaaatcttcctg

SEQ ID NO: 416355 - DNA, 75 bp, synthetic construct
  source 1..75: mol_type = other DNA
tcccgttgagaatagtcctgttgtgactagtcctgttgtgactagtcccgttgtatcaagttctaaaagcagttt

SEQ ID NO: 416356 - DNA, 75 bp, synthetic construct
  source 1..75: mol_type = other DNA
ggggtcttctggctggggacggttgaaagggattgtttcgtactgattagcgaaacaccatttaaagatgttctg

SEQ ID NO: 416357 - DNA, 75 bp, synthetic construct
  source 1..75: mol_type = other DNA
ggacaagcaggttgcgcgttgtggcaacgcagttccgccgccattcgccgaggcactggtgagggctaatttacc

SEQ ID NO: 416358 - DNA, 75 bp, synthetic construct
  source 1..75: mol_type = other DNA
ggctttcgatgcgcaacgggttatctgccgcatcgatgaatgccggggatggagcgccgggctggcgctggctcc

SEQ ID NO: 416359 - DNA, 75 bp, synthetic construct
  source 1..75: mol_type = other DNA
acgatgacagcctgcggtttaaggtggatggaacaacgtcaattaactggacacgaaatgatattgccaatggat

SEQ ID NO: 416360 - DNA, 75 bp, synthetic construct
  source 1..75: mol_type = other DNA
gaatgattgccacacagatgtacggtaagtcagtgagtgaactgagtgaaacagagaagcagacgctctcgacac

SEQ ID NO: 416361 - DNA, 75 bp, synthetic construct
  source 1..75: mol_type = other DNA
tacaggtgaggtgaataaggctgcaaatgtggcagtccatgccgtggtgaatgctgcactggcggtggcacaggg

SEQ ID NO: 416362 - DNA, 75 bp, synthetic construct
  source 1..75: mol_type = other DNA
caaatcagcggcaaaagaccaggaatactggagtttaaacgtgcactgctgttgattgcgctggcgctggcgaag

SEQ ID NO: 416363 - DNA, 75 bp, synthetic construct
  source 1..75: mol_type = other DNA
ggcttacttgtggtggagccgaactccttatgacgcagttagcagaccaaatgtttatacgcgggcatgatgtta

SEQ ID NO: 416364 - DNA, 75 bp, synthetic construct
  source 1..75: mol_type = other DNA
atgaaaatctccgctttaaactcaacggtagccagcgagtcacctggacgaatgatgaaataagtaatggattag

SEQ ID NO: 416365 - DNA, 75 bp, synthetic construct
  source 1..75: mol_type = other DNA
accagcagcatatgcgcaacattgcgcagtggttgcaggaaaacggcatcacccgcgctaccgtcgcgccagact

SEQ ID NO: 416366 - DNA, 75 bp, synthetic construct
  source 1..75: mol_type = other DNA
caactggcaaccgtggcagtgattcaccagcagcatatgcgcaacattgcgcagtggttgcaggaaaacggcatc

SEQ ID NO: 416367 - DNA, 75 bp, synthetic construct
  source 1..75: mol_type = other DNA
gcgtggtcactattttgctgacggcggtagtaccgaaaatcatcgaacagtttgatcatctcggacacgcgctgc

SEQ ID NO: 416368 - DNA, 75 bp, synthetic construct
  source 1..75: mol_type = other DNA
acgcagcacatgcaaaccagacgttgtcccccatctttgacagggaaaaagagcagcagcgactgcagcaggcgc

SEQ ID NO: 416369 - DNA, 75 bp, synthetic construct
  source 1..75: mol_type = other DNA
gtacggtaagccggtgagtgaactgagcgagacagagaagcagacggtctcgacactggcaacggtcgctgctgg

SEQ ID NO: 416370 - DNA, 75 bp, synthetic construct
  source 1..75: mol_type = other DNA
tcaaccttcaatggtgccgactatgtttacggatgagctgaaacagctgtcgaaagatgaaaaccccatactgca

SEQ ID NO: 416371 - DNA, 75 bp, synthetic construct
  source 1..75: mol_type = other DNA
tggcgtctggttcttcctgttccgccgcttcgccgagaagcagggcatgggcgggtttctcaacatcggtaagag

SEQ ID NO: 416372 - DNA, 75 bp, synthetic construct
  source 1..75: mol_type = other DNA
aataaacaatcacttagccctaatagattttctgatgtttacgtctttgagggcgagcaaggaaaacgagatagt

SEQ ID NO: 416373 - DNA, 75 bp, synthetic construct
  source 1..75: mol_type = other DNA
tatggctcgttctggcgtggcgtgatatttgataccgaatataaaaacctcacagacatcattactcagtcgaag

SEQ ID NO: 416374 - DNA, 75 bp, synthetic construct
  source 1..75: mol_type = other DNA
tggtgtggtaaaatgttcggatgttggttacgtacaatcactatttactgctaaaggtcagctttgggtgtctga

SEQ ID NO: 416375 - DNA, 75 bp, synthetic construct
  source 1..75: mol_type = other DNA
acccacgaaagttcattatcgctggagatcctttccagatcgggccgattgttgctgtagaagaatggaaagatg

SEQ ID NO: 416376 - DNA, 75 bp, synthetic construct
  source 1..75: mol_type = other DNA
tactgataccaagaatgaagggtagtgggaaggaaaacgtgcttgtcctagcgccaaccaacaaggctgcagatg

SEQ ID NO: 416377 - DNA, 75 bp, synthetic construct
  source 1..75: mol_type = other DNA
taacttcaaactctaacgtggggataaaaatttacgacaaaaataataaggaaatcaaagtgaacggtggtgagt

SEQ ID NO: 416378 - DNA, 75 bp, synthetic construct
  source 1..75: mol_type = other DNA
cgcttggacttgacctgtatgagtggggaggtactggcgacgaacgtgaacgggaaaaccatttcgttctgaacg

SEQ ID NO: 416379 - DNA, 75 bp, synthetic construct
  source 1..75: mol_type = other DNA
acaggggatgagcgtgaaagggacagccatttagtgcttaacggcatgctctgtaaatactccgacccgacagtc

SEQ ID NO: 416380 - DNA, 75 bp, synthetic construct
  source 1..75: mol_type = other DNA
ggcgaggagctgctcttccgcttcggcaaagaggcggacgactactgggatttccacgggcaggaatttcctttc

SEQ ID NO: 416381 - DNA, 75 bp, synthetic construct
  source 1..75: mol_type = other DNA
cactgcctggatctcagtccctggcgctgagctgcccgtgtaacgaaatcctgttcgagggcactcgcggaccgg

SEQ ID NO: 416382 - DNA, 75 bp, synthetic construct
  source 1..75: mol_type = other DNA
tggaggcggtgccggtaaaagcagctgacgcagtgctgaccgacatgactttttctgcttacgcaaccttacggg

SEQ ID NO: 416383 - DNA, 75 bp, synthetic construct
  source 1..75: mol_type = other DNA
tatatccgtaacccaaatttgggttacgttacaaatcaatcagttacgtgccaccaatatgataaaaacaacccg

SEQ ID NO: 416384 - DNA, 75 bp, synthetic construct
  source 1..75: mol_type = other DNA
catgatgctctcttggttccttcctcttgtttatgatgaatatatattatggttccatgaccttttcagactgat

SEQ ID NO: 416385 - DNA, 75 bp, synthetic construct
  source 1..75: mol_type = other DNA
taaaagggcgcagcgttcttgactctctcgagtttaaggagttgttaggaaaaggattttatattaccaaaatca

SEQ ID NO: 416386 - DNA, 75 bp, synthetic construct
  source 1..75: mol_type = other DNA
ttttccagatactatcatggctattctgattttgaatttctttcaaacatactcggttctgttgggcggagagaa

SEQ ID NO: 416387 - DNA, 75 bp, synthetic construct
  source 1..75: mol_type = other DNA
tccaataatttttgggatactatctggattatataaggagaggcttaatgaagaactatataagctttttattta

SEQ ID NO: 416388 - DNA, 75 bp, synthetic construct
  source 1..75: mol_type = other DNA
caggagcggatcgactggcagcgggtggcaaaaatgcgcgataacggtattcgcttgcagtttgcctttatcaag

SEQ ID NO: 416389 - DNA, 75 bp, synthetic construct
  source 1..75: mol_type = other DNA
catggtgctctcctggttccttcctcttgtttatgatgaatatatattatggttccatgaccttttcaggttggt

SEQ ID NO: 416390 - DNA, 75 bp, synthetic construct
  source 1..75: mol_type = other DNA
ctttgatcccggtgagcagggttccggctgcgttgcctgtacgcatggaaaaccagtactttgcacttgatatgg

SEQ ID NO: 416391 - DNA, 75 bp, synthetic construct
  source 1..75: mol_type = other DNA
aatcgaaaactgtagctgaacagggatatattgtaacctttgggattatacctgaatatgcggaaacaggttatg

SEQ ID NO: 416392 - DNA, 75 bp, synthetic construct
  source 1..75: mol_type = other DNA
aacaaaactttcttagttactgctaatgaatccgtttatattcctctgggtgctacttatagccttgaaaatcca

SEQ ID NO: 416393 - DNA, 75 bp, synthetic construct
  source 1..75: mol_type = other DNA
agctgaaaggttcgctgggtgagttgaagcaactttctggcttaagtggcgtggtaatgggctatacgccgaatt

SEQ ID NO: 416394 - DNA, 75 bp, synthetic construct
  source 1..75: mol_type = other DNA
caccattcataatctctttcaacgatttaatgcctccggtattacttggtcattacctgaatcactttcagtcgc

SEQ ID NO: 416395 - DNA, 75 bp, synthetic construct
  source 1..75: mol_type = other DNA
aagcgcggcagagcgccgccagtggtttgatgtgcttcttgccgggcaattggatgatcggatcctggcgctgca

SEQ ID NO: 416396 - DNA, 75 bp, synthetic construct
  source 1..75: mol_type = other DNA
ccgacatgaaaacctgatcgacataatcaaggagcgcgggaatgtcacccgcaaccgcgccaggctaatcgcacg

SEQ ID NO: 416397 - DNA, 75 bp, synthetic construct
  source 1..75: mol_type = other DNA
gccccgtaaaaaagacggtggtgctgcgcgtatcaatatggttgccttccgtgctcgactcttggctcagggcct

SEQ ID NO: 416398 - DNA, 75 bp, synthetic construct
  source 1..75: mol_type = other DNA
atatagaatctgtctgggaggcatggattacactaactcagattgactcaatccgacatggtgtacaccacgcta

SEQ ID NO: 416399 - DNA, 75 bp, synthetic construct
  source 1..75: mol_type = other DNA
gcctgagttcacagataaaacactctccaggaaacccggggcggttcagtgggtgagtttcaaggcactcactga

SEQ ID NO: 416400 - DNA, 75 bp, synthetic construct
  source 1..75: mol_type = other DNA
aacggtgattccatcgataacggtactgaagggtctgcggtacgtgttggtctgggtactcagttcagcttcacc

SEQ ID NO: 416401 - DNA, 75 bp, synthetic construct
  source 1..75: mol_type = other DNA
tgtgggtatcgcaaataaaacccagaactttgaagctgtagcacagtatcagttcgattttggtctgcgcccatc

SEQ ID NO: 416402 - DNA, 75 bp, synthetic construct
  source 1..75: mol_type = other DNA
gcgcgcgtgaatcgacctataccattaccatagagcgcctgccggtgctggataatccggtcaaaacgtcaattt

SEQ ID NO: 416403 - DNA, 75 bp, synthetic construct
  source 1..75: mol_type = other DNA
tgttcatgaacgatgtgttcctgaagcgactgtttgcggtgagtatcacctcgtccggcaatcccccgacgtttt

SEQ ID NO: 416404 - DNA, 75 bp, synthetic construct
  source 1..75: mol_type = other DNA
catggctggtaaataactggtatcccacagcaagtatcagcgatttgctggttgtggtgatgaagaaatccacag

SEQ ID NO: 416405 - DNA, 75 bp, synthetic construct
  source 1..75: mol_type = other DNA
tccgcagcagggcgcgggaaatacgcgttatcgtcgcagctttgtggcgaccggatttatgacgctgataaccgt

SEQ ID NO: 416406 - DNA, 75 bp, synthetic construct
  source 1..75: mol_type = other DNA
gattcttttttaaaggagcatgatataacactgacattgagaattcaccctgcaaataatcctgatgctaaaatg

SEQ ID NO: 416407 - DNA, 75 bp, synthetic construct
  source 1..75: mol_type = other DNA
tgggcaagtctgcgtttgtggaagccagcgggcaggccagcaatgatgcagaagggtatctggactttttcagag

SEQ ID NO: 416408 - DNA, 75 bp, synthetic construct
  source 1..75: mol_type = other DNA
ccacgacggatgctcagggcgtattttcctcagttatagatatgcctgccggacaggggacgctgacactgacat

SEQ ID NO: 416409 - DNA, 75 bp, synthetic construct
  source 1..75: mol_type = other DNA
aagaactttagcgcctataccgatgctaactacctcggtggtggtgacgtagatcaagactggtccgcgaacgtg

SEQ ID NO: 416410 - DNA, 75 bp, synthetic construct
  source 1..75: mol_type = other DNA
tggaggctgtacccgtgaagtcggccgatgcggtgttgagtgatacaacgttttcggcctatgcaacattgcggg

SEQ ID NO: 416411 - DNA, 75 bp, synthetic construct
  source 1..75: mol_type = other DNA
gtgcaatgaatcaacttattaataatgaaatctatactttaaaaaccggttcaaccgctcatgacttagaaattc

SEQ ID NO: 416412 - DNA, 75 bp, synthetic construct
  source 1..75: mol_type = other DNA
gatgctaataactttacgctgaataaaggaactgctgagaacattggctttgccattttcctcgatgatgggact

SEQ ID NO: 416413 - DNA, 75 bp, synthetic construct
  source 1..75: mol_type = other DNA
gatggcgcgataaagccagaaatggaaaaggcggttaatgacaatgtcgacctgatcacctccatccataccgac

SEQ ID NO: 416414 - DNA, 75 bp, synthetic construct
  source 1..75: mol_type = other DNA
gaatactccgcttactattaacgccaccgattttacccaaaagccgaagctggaagccgtgccagtgaagtcagc

SEQ ID NO: 416415 - DNA, 75 bp, synthetic construct
  source 1..75: mol_type = other DNA
accgattttacccaaaagccgaagctggaagccgtgccagtgaagtcagccgatgcggtgctgagtgataccacg

SEQ ID NO: 416416 - DNA, 75 bp, synthetic construct
  source 1..75: mol_type = other DNA
gccggtatgcccactttgccagggcagaatgcggaagctgaaaggtaagaacggagagttctggagttgccagcg

SEQ ID NO: 416417 - DNA, 75 bp, synthetic construct
  source 1..75: mol_type = other DNA
gccctggatgatattgcacagggtaaactgtcgctggcgtcatttatggagaagcagaaacagtggctgaatcac

SEQ ID NO: 416418 - DNA, 75 bp, synthetic construct
  source 1..75: mol_type = other DNA
aagagagtgcgcaggtgtcggcgatggtgaaacaccgcgccagccgactggaagacgcggtgacggtgctgcatt

SEQ ID NO: 416419 - DNA, 75 bp, synthetic construct
  source 1..75: mol_type = other DNA
ataaagcccgacctccacgagtacagataacctacgatgttgaaaccggagatgcagaaaccgcgaaagagttac

SEQ ID NO: 416420 - DNA, 75 bp, synthetic construct
  source 1..75: mol_type = other DNA
atgggtagtacacaacataaacttgataaagctcgtccccctagagttcaaataacttatgacgttgaaattggt

SEQ ID NO: 416421 - DNA, 75 bp, synthetic construct
  source 1..75: mol_type = other DNA
atgactaaacatatactatatgtcatgttaacattctttcctaacttttttataagtattattcatctagatgta

SEQ ID NO: 416422 - DNA, 75 bp, synthetic construct
  source 1..75: mol_type = other DNA
tctcattgaggagtacgagaagaaacattacccaattcagccaccatcacctgttgaatcttttaactatccata

SEQ ID NO: 416423 - DNA, 75 bp, synthetic construct
  source 1..75: mol_type = other DNA
ccgtcggtcagaccgttgcagaggtcccgtttgcagttgaagccctgcttcagccataccgaatttacggggtgt

SEQ ID NO: 416424 - DNA, 75 bp, synthetic construct
  source 1..75: mol_type = other DNA
tttaggtttagttaatgtctatgctaaagacattggccttcttccaacatggcagcagcagatatgggctggatt

SEQ ID NO: 416425 - DNA, 75 bp, synthetic construct
  source 1..75: mol_type = other DNA
ttgaacaaaatcttctattaaaaattctcagcgactctctagataacatgtcatccgaagatataaaagtttttg

SEQ ID NO: 416426 - DNA, 75 bp, synthetic construct
  source 1..75: mol_type = other DNA
tttcctggtcgccaggaatatggcgattagctatgagcaagatgatcttttatgcggattaacggcaataggagc

SEQ ID NO: 416427 - DNA, 75 bp, synthetic construct
  source 1..75: mol_type = other DNA
atatggacggtattttgctggagattctgccgccatcaacgcgccgtttgtactggcgtgtagaggatgatttga

SEQ ID NO: 416428 - DNA, 75 bp, synthetic construct
  source 1..75: mol_type = other DNA
ttcgtgcattaggtatcaaaagcattcttgtacgttataaagttagtgatagaagtactttagtgtcagcttttg

SEQ ID NO: 416429 - DNA, 75 bp, synthetic construct
  source 1..75: mol_type = other DNA
agagttatgacaaggccaatgtgtaatgatgatggaatgttgatttctcaggtcgtcgattccgtcatgtacatt

SEQ ID NO: 416430 - DNA, 75 bp, synthetic construct
  source 1..75: mol_type = other DNA
caaactggagattcgtaacgacttcacattctggatagatttgtcattatctccttacgtaaagataaaatattc

SEQ ID NO: 416431 - DNA, 75 bp, synthetic construct
  source 1..75: mol_type = other DNA
tcagcatccaatctaaactggaatcattgacaacccaacttaatgctattcaaaacgtaccccatacagtggcag

SEQ ID NO: 416432 - DNA, 75 bp, synthetic construct
  source 1..75: mol_type = other DNA
tatagtgtattgtcattccctgaacgattctattcattagaggaatcactgaaaattctaatatcagaaatgtgt

SEQ ID NO: 416433 - DNA, 75 bp, synthetic construct
  source 1..75: mol_type = other DNA
gaatatcagcgaaagcgagtctcatgtgggatctgacaatgtgatgtgggcatggaacaaattacgcaccggcaa

SEQ ID NO: 416434 - DNA, 75 bp, synthetic construct
  source 1..75: mol_type = other DNA
aatacaaccgtgaaaatagtgataataccatagctatggtggtcgggatagattactatcgtgctcctgttttaa

SEQ ID NO: 416435 - DNA, 75 bp, synthetic construct
  source 1..75: mol_type = other DNA
atgatgtttaccaatcctttggcttattcagtaaaggggaccggcaaggcgagatacgggcatctgcaacctttt

SEQ ID NO: 416436 - DNA, 75 bp, synthetic construct
  source 1..75: mol_type = other DNA
acggcaggggcttactggcgtggcgacagcaacaacaaaatgttgcaacgtatttacggtacggcgtgggcagca

SEQ ID NO: 416437 - DNA, 75 bp, synthetic construct
  source 1..75: mol_type = other DNA
caacgccattgctgccgccgtaatgaaagaacaggcagttcgtgcgttgaagacactacagaaagagacgcaaga

SEQ ID NO: 416438 - DNA, 75 bp, synthetic construct
  source 1..75: mol_type = other DNA
gactggaatgtaactccccatgaactaaacccgcatgactacccaaacatggaagatggtattccgcttcatgta

SEQ ID NO: 416439 - DNA, 75 bp, synthetic construct
  source 1..75: mol_type = other DNA
cattgtatgatgttagtgtaaaagtggatgaaaacaacattcttaatatctcatattatgataattatgcaataa

SEQ ID NO: 416440 - DNA, 75 bp, synthetic construct
  source 1..75: mol_type = other DNA
gaatttttatcagtatccgttgaatccagttacgaatacagatcctctggggttagaagtttttcctagaccatt

SEQ ID NO: 416441 - DNA, 75 bp, synthetic construct
  source 1..75: mol_type = other DNA
tgtttgatatccaatcaatctgctatgttcgcgctattgatttttgcaatattggaattaatgaatacatgcaga

SEQ ID NO: 416442 - DNA, 75 bp, synthetic construct
  source 1..75: mol_type = other DNA
ttaaggctgccggtttattcccactggcgctgatgctttcgggctgtatctcgtatgccctggtttcccataccg

SEQ ID NO: 416443 - DNA, 75 bp, synthetic construct
  source 1..75: mol_type = other DNA
gcgcacctgttagggcacgcgattaaacaactttggccgcataccaaaatggcaatcggcccggttattgacaac

SEQ ID NO: 416444 - DNA, 75 bp, synthetic construct
  source 1..75: mol_type = other DNA
gcatttactggcgcttctgccaacggtaaaacagggttgattcaggcggcgaatacgggcacgctgtttctcgat

SEQ ID NO: 416445 - DNA, 75 bp, synthetic construct
  source 1..75: mol_type = other DNA
aagaagtcgtcgcccgtgcaatccataagttgagcggaagacggaataaaccctttattgctatcaactgtgccg

SEQ ID NO: 416446 - DNA, 75 bp, synthetic construct
  source 1..75: mol_type = other DNA
attgcagttacttgagaaagtagatggtagaaaataccggaaaatgccctatatgcgttttgccagtaaagctta

SEQ ID NO: 416447 - DNA, 75 bp, synthetic construct
  source 1..75: mol_type = other DNA
aaaggttattggcgtaatgacagtaatgtttttcctgacagggtatatgtgggatggatgttatatatgcccaca

SEQ ID NO: 416448 - DNA, 75 bp, synthetic construct
  source 1..75: mol_type = other DNA
atgaaacgcacacccttctaccgcaggcccgggcgaacagggcaattctccggcctccgtgaacgcgttatctgg

SEQ ID NO: 416449 - DNA, 75 bp, synthetic construct
  source 1..75: mol_type = other DNA
ggggggtaagttttaaggtaagggctataattcaaacagatatatcagcgaactggatgcttggtgaaattgcta

SEQ ID NO: 416450 - DNA, 75 bp, synthetic construct
  source 1..75: mol_type = other DNA
attactttaaggatatggcagtatattgtgagcccggtgatgttgattcaatccgtaaaggtgttattgaggtta

SEQ ID NO: 416451 - DNA, 75 bp, synthetic construct
  source 1..75: mol_type = other DNA
tcttatccgagcttgtcaaggcttaccctataaattagtcttagttggaaagcctagtcctaatagtatacagta

SEQ ID NO: 416452 - DNA, 75 bp, synthetic construct
  source 1..75: mol_type = other DNA
tctgttgctaacgctgttgatttaaaagtttttgattacaataaggttgatacctcaaaatatcaacacttcgaa

SEQ ID NO: 416453 - DNA, 75 bp, synthetic construct
  source 1..75: mol_type = other DNA
aagataaatttgtcgatgccctccgtgcaacagctgcgcaaatgaccatgcatgagttacaggatacccgcgaga

SEQ ID NO: 416454 - DNA, 75 bp, synthetic construct
  source 1..75: mol_type = other DNA
cctgttcagaaatggaaagaatatcagttcagtttatcaacgcctgtaaatcctgatgagttgttccctttattt

SEQ ID NO: 416455 - DNA, 75 bp, synthetic construct
  source 1..75: mol_type = other DNA
gctggcaacgtataccggtgtgcaggccgggaatattgttatcgggaatggctcagaagatatcctgcatatgct

SEQ ID NO: 416456 - DNA, 75 bp, synthetic construct
  source 1..75: mol_type = other DNA
gcgtctttttatcatcagcggccagcgcttgctggatctgcttgccggccgacatggctggctgtcaggttgttc

SEQ ID NO: 416457 - DNA, 75 bp, synthetic construct
  source 1..75: mol_type = other DNA
gtgcaaattggcctgacgttaatggctgaacgtttcccttacgctaaaggtaaagctacagggatctattacagt

SEQ ID NO: 416458 - DNA, 75 bp, synthetic construct
  source 1..75: mol_type = other DNA
ggtctggaactggagagcgtttcacttaccaactttaaccagacctcgaaagaacatttcaatccgaacaatgcc

SEQ ID NO: 416459 - DNA, 75 bp, synthetic construct
  source 1..75: mol_type = other DNA
gcaaaaagaaatagtttctacggtagacgttttgttacctaatagtcctactgaattggaacgcgttagaagaga

SEQ ID NO: 416460 - DNA, 75 bp, synthetic construct
  source 1..75: mol_type = other DNA
gcggcgccggacaaatagcgcagatcgttgagtctgaaaaatggctcaacgaggacggtatctgcgaccggactt

SEQ ID NO: 416461 - DNA, 75 bp, synthetic construct
  source 1..75: mol_type = other DNA
ggtggctggaccagcaggtccggcaggtgcgccggggccgaaaggcgataaaggtgatccgggagtagcaggtcc

SEQ ID NO: 416462 - DNA, 75 bp, synthetic construct
  source 1..75: mol_type = other DNA
gagagcgggggcctaaaggggaccagggggatatggggccaaaaggcgagaaaggtgatccgggaggtcctgcag

SEQ ID NO: 416463 - DNA, 75 bp, synthetic construct
  source 1..75: mol_type = other DNA
atgccgggaagtattttgaggtgagtcatggggcctataatagcgaaatttttctgggtgccgtcgtacaaaaag

SEQ ID NO: 416464 - DNA, 75 bp, synthetic construct
  source 1..75: mol_type = other DNA
tccgtaataatgttccagggatgaatatcaactgtattgataaattgcgtgatgataatttctatcttgttgata

SEQ ID NO: 416465 - DNA, 75 bp, synthetic construct
  source 1..75: mol_type = other DNA
cgctgagcttggtgtactggaacagacggcccaggcttacattgaatcgcatggtgccattgaacgtcatcttgg

SEQ ID NO: 416466 - DNA, 75 bp, synthetic construct
  source 1..75: mol_type = other DNA
agcgatgcgccataatcaaagatgcaagcgggaactatatgaaagctaacaccgatggcattgacggcaacctat

SEQ ID NO: 416467 - DNA, 75 bp, synthetic construct
  source 1..75: mol_type = other DNA
tgccagtgcgaagactgcatcagaaagcgcgaaggctgcgacaagcaaagcgacggagtctgcacaaaaagccag

SEQ ID NO: 416468 - DNA, 75 bp, synthetic construct
  source 1..75: mol_type = other DNA
gataaagtaaaaattatagataaatatcacgtctttatgaaaaataaagaaaaaaagctacgcgccttcttctta

SEQ ID NO: 416469 - DNA, 75 bp, synthetic construct
  source 1..75: mol_type = other DNA
ttgttcacccggcgcgccatagagcagtcgcaagaaggcaggcggcaggagtgcatagcgcgtgccgcacgtcgt

SEQ ID NO: 416470 - DNA, 75 bp, synthetic construct
  source 1..75: mol_type = other DNA
gcaggtgagtctgaaaaggcagcggcagctgacgctaaagaggccagacaacatgctgaaaccgccagagtggct

SEQ ID NO: 416471 - DNA, 75 bp, synthetic construct
  source 1..75: mol_type = other DNA
gaccagcaggtccggcggggccacagggaccgaagggagacactggagcccccgggcaaggaacagaactgctta

SEQ ID NO: 416472 - DNA, 75 bp, synthetic construct
  source 1..75: mol_type = other DNA
atgtacgtttgcgaccgcttttataacaaagaatatttctgtttacaggggaccggtaaaccagatgttttatga

SEQ ID NO: 416473 - DNA, 75 bp, synthetic construct
  source 1..75: mol_type = other DNA
atatcgttcacatgtaaatagtttccccatagatgtgaaatcattttttaatttattttttcgatcgcagatatt

SEQ ID NO: 416474 - DNA, 75 bp, synthetic construct
  source 1..75: mol_type = other DNA
aatagaatcttttaccagaatatctgtaccgttattcattatgatttctggggctttgcttattaaagaaagtac

SEQ ID NO: 416475 - DNA, 75 bp, synthetic construct
  source 1..75: mol_type = other DNA
ttttctattaagtaccgagatttgcaggtgatcagtcagaccatcgtcagaatgtatcagtacattcccaatgag

SEQ ID NO: 416476 - DNA, 75 bp, synthetic construct
  source 1..75: mol_type = other DNA
actcgccgcctgttaggattatggtgctttgccctgatgaatcccctaatgatttttatcaaaatcattaagtta

SEQ ID NO: 416477 - DNA, 75 bp, synthetic construct
  source 1..75: mol_type = other DNA
gaactgttgctttagttttctcttcttctggagcgttagcagatgtgcaaaccgccactgctggaagtggaaaaa

SEQ ID NO: 416478 - DNA, 75 bp, synthetic construct
  source 1..75: mol_type = other DNA
aattgatattttatatgataactctgacgtatttcataaagaaagcattttgtttttctcacaattatttataaa

SEQ ID NO: 416479 - DNA, 75 bp, synthetic construct
  source 1..75: mol_type = other DNA
gatacttttgtccgtaatgttgattaccacaaagaaagcacccttctgggcgaggtgaaaacggcgagtaatttt

SEQ ID NO: 416480 - DNA, 75 bp, synthetic construct
  source 1..75: mol_type = other DNA
tgcaacgattatgaagattgatgcagggttattatctaagactcaggcaattagcgaaatgcggccggtaatgca

SEQ ID NO: 416481 - DNA, 75 bp, synthetic construct
  source 1..75: mol_type = other DNA
aaatgttagcaatgttcaccttgaaagttatggagagatagcagaaccttataaagcaatatacggaacaatatc

SEQ ID NO: 416482 - DNA, 75 bp, synthetic construct
  source 1..75: mol_type = other DNA
agattcttcatcgttatgctgaaggggtaatggaacgttctaaccatcatgcaaaaaatgttggtgcagccgctc

SEQ ID NO: 416483 - DNA, 75 bp, synthetic construct
  source 1..75: mol_type = other DNA
aagttcagccgtttggtgaaaacagtaaaggtgtggcgttcgcagaagggtttagcgcgcttctgctggaaagtg

SEQ ID NO: 416484 - DNA, 75 bp, synthetic construct
  source 1..75: mol_type = other DNA
ccctcgcaccggacctggacatccgcatcccgtatgccacggacccggcgggcaaccggctgccggacccggagc

SEQ ID NO: 416485 - DNA, 75 bp, synthetic construct
  source 1..75: mol_type = other DNA
ttgctggtggcggtggtgcatcaacgggtattgaactggcgatcggacgcagcgtggatattgcgatcaaccacg

SEQ ID NO: 416486 - DNA, 75 bp, synthetic construct
  source 1..75: mol_type = other DNA
ttgccggcggcggcggggcgagtacgggtatcgagctggcgatcggccgcagcgtggatattgccatcaatcacg

SEQ ID NO: 416487 - DNA, 75 bp, synthetic construct
  source 1..75: mol_type = other DNA
tgcctttattacgcgaattcttagcgcgtaaagaatacgacgattccggcaatgatatgttttatcaattatttg

SEQ ID NO: 416488 - DNA, 75 bp, synthetic construct
  source 1..75: mol_type = other DNA
agctttataaggcgcagggcttccctgacggctacgttatcgatcaggactatcgcggcaatcgttacgccaaag

SEQ ID NO: 416489 - DNA, 75 bp, synthetic construct
  source 1..75: mol_type = other DNA
cagaccctgcccgcactggcgaaacattcaatgcttttgtcggcatgctttccactggcattcctgccgatcacc

SEQ ID NO: 416490 - DNA, 75 bp, synthetic construct
  source 1..75: mol_type = other DNA
cactcagtcactactgttgatcaccacgcggtagttgcgtcgcacctggtgaagctgcgcggaacctgccgcgac

SEQ ID NO: 416491 - DNA, 75 bp, synthetic construct
  source 1..75: mol_type = other DNA
gctgagctggatatgataattgatgagcaatggtgcgataaatgggaagacagtggttctgatattgctccgggt

SEQ ID NO: 416492 - DNA, 75 bp, synthetic construct
  source 1..75: mol_type = other DNA
gtatcagaaacgcaaaacctttgttgcggtctatagtgatttctgggagtctgtagcaggaaaaaccgtggcgac

SEQ ID NO: 416493 - DNA, 75 bp, synthetic construct
  source 1..75: mol_type = other DNA
tctggcggagaagttacagtcggaagggagtgaggacggtcacggtatggtgttcccgcctgaactggtgatgat

SEQ ID NO: 416494 - DNA, 75 bp, synthetic construct
  source 1..75: mol_type = other DNA
aaagtggcgcgtggttcagccgaatccggttaagcccgcagatgtgctgatctcctacaacatccagctgaggac

SEQ ID NO: 416495 - DNA, 75 bp, synthetic construct
  source 1..75: mol_type = other DNA
tgtttttcctttttatttatctttttttagcgtttttttcttttgttttttttttttttgctcattttttaattt

SEQ ID NO: 416496 - DNA, 75 bp, synthetic construct
  source 1..75: mol_type = other DNA
tttatttgtttttttattttttatttttttttttcttttgctttgttttttttttttttttctttattgtatttt

SEQ ID NO: 416497 - DNA, 75 bp, synthetic construct
  source 1..75: mol_type = other DNA
gcagcgcgtcagggcgacatgacgcagtatggcggtagcattgttcagggttcagccggggtgcgcattggtgcc

SEQ ID NO: 416498 - DNA, 75 bp, synthetic construct
  source 1..75: mol_type = other DNA
ctgttcacccggcgcgccattgagcaatcgcaggaaggtagacggcaggagtgcatagcccgtgccgcccgccgt

SEQ ID NO: 416499 - DNA, 75 bp, synthetic construct
  source 1..75: mol_type = other DNA
tccgggtcgagacagagaacggcgagcgggagaaagcgcagcgccgcagcctggcggagaagttacagcaggaag

SEQ ID NO: 416500 - DNA, 75 bp, synthetic construct
  source 1..75: mol_type = other DNA
gaaatgggggaaacaatctcagagcaactggatatcattaatactgaaccgccccgggaatcctggagactaaac

SEQ ID NO: 416501 - DNA, 75 bp, synthetic construct
  source 1..75: mol_type = other DNA
gatgcgtcatttacgccatgtgacggctcattgcttgtttgcagaatggaaggtgagatgaggattaagcgttat

SEQ ID NO: 416502 - DNA, 75 bp, synthetic construct
  source 1..75: mol_type = other DNA
aaacacaatcgtactatttggaatcaaaaggtaatttgatagcattgcttgtatcatgtgctatgactagtttta

SEQ ID NO: 416503 - DNA, 75 bp, synthetic construct
  source 1..75: mol_type = other DNA
atgagataagcttggaaattggtgcgttagggtggttttcaagagaaaacattagcgatcaagaacgttcacatt

SEQ ID NO: 416504 - DNA, 75 bp, synthetic construct
  source 1..75: mol_type = other DNA
ccaggaatcacttgctaacatcggaacgaccattatcaaccaggttgttggaagccttgcgcagatgggggcgga

SEQ ID NO: 416505 - DNA, 75 bp, synthetic construct
  source 1..75: mol_type = other DNA
gcttgatgcgcttggcgtgtccggcaattcacttaatgaagtgcttaaaaaactgagcaaggagggtgcattcgg

SEQ ID NO: 416506 - DNA, 75 bp, synthetic construct
  source 1..75: mol_type = other DNA
cgggaatatggtcgatggcctgtcttctggtgctggcagcgcatttactggcctgctaaacggtactcaatcgct

SEQ ID NO: 416507 - DNA, 75 bp, synthetic construct
  source 1..75: mol_type = other DNA
atgtaacgttgccactgttccgccaggagttacagtggcaacgtattctaccgtcagtgatagcgttttgttatt

SEQ ID NO: 416508 - DNA, 75 bp, synthetic construct
  source 1..75: mol_type = other DNA
ggaaaactcggttgtagaaagccacctgggcgaccgtgatgttattttttatgctgatgaacgtattaatgatcg

SEQ ID NO: 416509 - DNA, 75 bp, synthetic construct
  source 1..75: mol_type = other DNA
tgtttggcttaaaaataaaatattatcgcagattggttatttgaaaacgcaaaatgcggatttagtattgggaaa

SEQ ID NO: 416510 - DNA, 75 bp, synthetic construct
  source 1..75: mol_type = other DNA
ttaacaattgtgaggatgatagtgttaagagtaaagcgcaggcatatattgaactcttaaacgataattcagaag

SEQ ID NO: 416511 - DNA, 75 bp, synthetic construct
  source 1..75: mol_type = other DNA
atcaggctgagttcagcatcaaggcaatgtgccgtgtgctccgggtggtccgcagcggctggtatatgtggtgtc

SEQ ID NO: 416512 - DNA, 75 bp, synthetic construct
  source 1..75: mol_type = other DNA
cgaacaggcaaaactggatgtgctgcaacgagcgtctgtggcatatgccaactggaccggcgcacggggtcgcga

SEQ ID NO: 416513 - DNA, 75 bp, synthetic construct
  source 1..75: mol_type = other DNA
gtaaaaataatgggcttatttttttaataagttttatggtgatgggagaagctgcaattgctgcaccgctgccac

SEQ ID NO: 416514 - DNA, 75 bp, synthetic construct
  source 1..75: mol_type = other DNA
cggcaaaagagtccgaaaaccatttcatcacaaaagttacaactatataaaaagctcggaataaaaaatgacatt

SEQ ID NO: 416515 - DNA, 75 bp, synthetic construct
  source 1..75: mol_type = other DNA
atttcccctggcagagtgttcagaagaaaatccagttccatacagcgcgggcaacagagaccaccgtgtcacgga

SEQ ID NO: 416516 - DNA, 75 bp, synthetic construct
  source 1..75: mol_type = other DNA
aagttcagcccggtcagttaccgtgcacacaacctgtctgtgtcagaaaatctgctggagcaggatttttacgcc

SEQ ID NO: 416517 - DNA, 75 bp, synthetic construct
  source 1..75: mol_type = other DNA
gagctggatgcgctgacctttgctcaccgggcaggactggccgatatttttccggggctggaccggcgtctggcg

SEQ ID NO: 416518 - DNA, 75 bp, synthetic construct
  source 1..75: mol_type = other DNA
ctatttttttatttgcatgtttactcgcctacattggaacatcagatacaaaaagcttagatgctgcctattatg

SEQ ID NO: 416519 - DNA, 75 bp, synthetic construct
  source 1..75: mol_type = other DNA
catttatgcgttcgaaaatcatgagtatctaaaagattttgcatcagtatgtcagcccaaaaagaaatatcaaca

SEQ ID NO: 416520 - DNA, 75 bp, synthetic construct
  source 1..75: mol_type = other DNA
acgcagtctgaatgatctattaaccgtcgagcaagatgtctttcaggcgcaatcggctgaaataaatgccaatta

SEQ ID NO: 416521 - DNA, 75 bp, synthetic construct
  source 1..75: mol_type = other DNA
ggggggcaaaacgcgctaccagaccagcgaccgctcgtattgggatgatcagctacaactgaacgttaacgcgcc

SEQ ID NO: 416522 - DNA, 75 bp, synthetic construct
  source 1..75: mol_type = other DNA
atgcggtgacagtcctgaacaccacttttaccccgcgaaaacgtctcagccagttaaccacacaggcgggcttta

SEQ ID NO: 416523 - DNA, 75 bp, synthetic construct
  source 1..75: mol_type = other DNA
aagaggctttgcctttgccacattaacgtcattaacagcggtgaccgatcaaaacggagtcgcgacaacgagcgt

SEQ ID NO: 416524 - DNA, 75 bp, synthetic construct
  source 1..75: mol_type = other DNA
atggtgtacccctgcatcaggtaaccctcagcgtttcgccgagtgaaggcgtgaccctcagtaataacggtataa

SEQ ID NO: 416525 - DNA, 75 bp, synthetic construct
  source 1..75: mol_type = other DNA
gacaatacattgtttccctggaaaacggggcgcatggctctgttcaaacatctgaatattttcatgtagcatgct

SEQ ID NO: 416526 - DNA, 75 bp, synthetic construct
  source 1..75: mol_type = other DNA
gctgcggcagcacaaggtgtggtaaacgccgcaaccccacaaccagttcctgcacaaatcgccattgcaaatgcc

SEQ ID NO: 416527 - DNA, 75 bp, synthetic construct
  source 1..75: mol_type = other DNA
cacctcccccgcagacacgcaactgagtctgaacacgcgtaatactaatgagaacggtattgctgaagttaccct

SEQ ID NO: 416528 - DNA, 75 bp, synthetic construct
  source 1..75: mol_type = other DNA
aagcaactggggtcggtgtacgactgatggacaaaaatgacggtaacatcgtattaggttcagccgcgccagatc

SEQ ID NO: 416529 - DNA, 75 bp, synthetic construct
  source 1..75: mol_type = other DNA
tcagttgaataatgacaactttgcaccaagaaaaacggcggctgattatgcgttttcaagctctgcctcctgggt

SEQ ID NO: 416530 - DNA, 75 bp, synthetic construct
  source 1..75: mol_type = other DNA
tggtgggtgaacgccggcgaggctttcatgatatacagccttgctgaaaatttttgcagcagcaatggctacacg

SEQ ID NO: 416531 - DNA, 75 bp, synthetic construct
  source 1..75: mol_type = other DNA
tggtactgacctaccgacaactacattcccttcgcaggggttcaccggggcgtattatcagttgaataatgacaa

SEQ ID NO: 416532 - DNA, 75 bp, synthetic construct
  source 1..75: mol_type = other DNA
aacgctaacttctgcaaatggcactccagtggaaggtcaggtcatcaactttagcgtaacgccagaaggtgcaac

SEQ ID NO: 416533 - DNA, 75 bp, synthetic construct
  source 1..75: mol_type = other DNA
tgtaataacgagatcggcaacggttacgctattcctggcgtgaatcttttaagcagtggagaaaaccgacgcgaa

SEQ ID NO: 416534 - DNA, 75 bp, synthetic construct
  source 1..75: mol_type = other DNA
atactgtaataatcacagcgaccccaagatccggtggcgctatttaccaaacgcaagtacgggtgaagggctggt

SEQ ID NO: 416535 - DNA, 75 bp, synthetic construct
  source 1..75: mol_type = other DNA
acacctggccgattgaagtcaccgctgaagatgtcaaaggcaatttttcgaatcgtgaacaaagcatggtggtcg

SEQ ID NO: 416536 - DNA, 75 bp, synthetic construct
  source 1..75: mol_type = other DNA
ttttgaacttattgggttttttgggggcatcatccttggttgctgctgccgatcacgccaatcaggatggctatg

SEQ ID NO: 416537 - DNA, 75 bp, synthetic construct
  source 1..75: mol_type = other DNA
gcagcgcgtgctgcgtacctgaaagcgaagcgacgctatcacccttcaacaccagtcgacttattaagggctgct

SEQ ID NO: 416538 - DNA, 75 bp, synthetic construct
  source 1..75: mol_type = other DNA
ccgcttatgcaatctgcgattggttacgcagcgggaaaacgaccagaatcgacgcagggcaagagggtatagctg

SEQ ID NO: 416539 - DNA, 75 bp, synthetic construct
  source 1..75: mol_type = other DNA
gagtttcgtaataggctgaaaaatagtcgtgaccgttttgattcctggcttagtgatgtgcgtgtcggctggcgt

SEQ ID NO: 416540 - DNA, 75 bp, synthetic construct
  source 1..75: mol_type = other DNA
aaaacaggataaatcgacaaatccagttcgcccaacaggagcagtactacgagctgatcaatgactttgcggcaa

SEQ ID NO: 416541 - DNA, 75 bp, synthetic construct
  source 1..75: mol_type = other DNA
tcatcttttataattcatcggttttcaggtgttttttgggaaccaggtactctcggcttatatctcattttctta

SEQ ID NO: 416542 - DNA, 75 bp, synthetic construct
  source 1..75: mol_type = other DNA
tgcctccaggtgacgttaaccagttaacaattaacgccggattgttagttgatgtctgttacgccagtaaaagac

SEQ ID NO: 416543 - DNA, 75 bp, synthetic construct
  source 1..75: mol_type = other DNA
gggcacgttttctcaatctcgacggaatcagcaattctcacgatcgcaaacaggcgcagaattttgtggagaagg

SEQ ID NO: 416544 - DNA, 75 bp, synthetic construct
  source 1..75: mol_type = other DNA
ttggcgatgttcctattctgggatcactgttcaggaatgcctctacagaacgtagccgtggcgaacttatggttg

SEQ ID NO: 416545 - DNA, 75 bp, synthetic construct
  source 1..75: mol_type = other DNA
atccactggcaccaccgccagcaatatcgaccagacggtcaacaccagctggggcggcttacaggccaccgatgc

SEQ ID NO: 416546 - DNA, 75 bp, synthetic construct
  source 1..75: mol_type = other DNA
ttaattctggctttggtctttctcgtgctatctgtgctggtggatttcaccagcacaatcctgtcagttttatcg

SEQ ID NO: 416547 - DNA, 75 bp, synthetic construct
  source 1..75: mol_type = other DNA
attggcattaaaagaaaattaattctcacacccaagattagtgatgcctttaatacgttaaaccgcataggacat

SEQ ID NO: 416548 - DNA, 75 bp, synthetic construct
  source 1..75: mol_type = other DNA
gccgattttgataccttcggtaaaggtgcctggacctttgaattacgcgttaacgccgtggcggcgctggaagcc

SEQ ID NO: 416549 - DNA, 75 bp, synthetic construct
  source 1..75: mol_type = other DNA
ggttctaaaaatattgagctaacggcggcagatttaaatcttgagcaaactgtagaattagccgcaggagcatta

SEQ ID NO: 416550 - DNA, 75 bp, synthetic construct
  source 1..75: mol_type = other DNA
gcgatgcgtttcaactcgatcgataggaatttaaatcccaaaaagattaaaaaaacacccaaaaacggatgttta

SEQ ID NO: 416551 - DNA, 75 bp, synthetic construct
  source 1..75: mol_type = other DNA
gtcacgcattaccacgccttccatgagtctctctttgtcattaaatttacccgccagagcgaacttatcgccaca

SEQ ID NO: 416552 - DNA, 75 bp, synthetic construct
  source 1..75: mol_type = other DNA
cccggcgccgcggcgcgctgccgttcccggctgccagacgtgcgcggattgccagagtgttatcgaattgaggaa

SEQ ID NO: 416553 - DNA, 75 bp, synthetic construct
  source 1..75: mol_type = other DNA
aaaatcgtctgtgcaaacatggaatggtcctggatggaacgataaatctggttatgttgttactgcctcaattaa

SEQ ID NO: 416554 - DNA, 75 bp, synthetic construct
  source 1..75: mol_type = other DNA
caatcttccaggtgtaaatacaactggtaaccagaacaccacggggaatgctgctaccgcgacaaaacttgcgac

SEQ ID NO: 416555 - DNA, 75 bp, synthetic construct
  source 1..75: mol_type = other DNA
cgatatttttcatcaggatgccgcaaattttgtccgtaggttaaaaatgcaaaaagataacgtgatgatcaccgg

SEQ ID NO: 416556 - DNA, 75 bp, synthetic construct
  source 1..75: mol_type = other DNA
atgttgcttagcataatcactgtcgcgtttcgtaacctcgcagggatagtcaaaacacacgcctcgctggcgcat

SEQ ID NO: 416557 - DNA, 75 bp, synthetic construct
  source 1..75: mol_type = other DNA
catttagaaaactcaatggcctggtgtctgaattttctatgggtggagtatctaccaccaataatatggaattat

SEQ ID NO: 416558 - DNA, 75 bp, synthetic construct
  source 1..75: mol_type = other DNA
gatgggctgtattaacgtcatcgtgggcgtaccgggtgtgggtaaaacggccacggcccgtaattactgtcagga

SEQ ID NO: 416559 - DNA, 75 bp, synthetic construct
  source 1..75: mol_type = other DNA
gaggccgagctggctgtcatgcaggctatcgctgaaaaaccgggagcattacgtgttttgacgcatacgcttaac

SEQ ID NO: 416560 - DNA, 75 bp, synthetic construct
  source 1..75: mol_type = other DNA
atgctaaagcgcaaatgaacctcttcctttccggcgattacagtgcagtaagacttcgtgtcgatgaggcttttt

SEQ ID NO: 416561 - DNA, 75 bp, synthetic construct
  source 1..75: mol_type = other DNA
tgtgctgacagaggctgccattgacgagccacgatttgaacgtgatggtctgcttattgagggacaacgaacaaa

SEQ ID NO: 416562 - DNA, 75 bp, synthetic construct
  source 1..75: mol_type = other DNA
tgccgaccgcgacgttgtaagctcagtatctcgtgatattgactctgcattatcgctcactgaagttgatgatga

SEQ ID NO: 416563 - DNA, 75 bp, synthetic construct
  source 1..75: mol_type = other DNA
atggcaaattgcaaattaatgccaacaaagattgggtatttgataacgatcttgaaggtaaaggcattgttgaaa

SEQ ID NO: 416564 - DNA, 75 bp, synthetic construct
  source 1..75: mol_type = other DNA
tttaatgtctccaacggcggcaaaattcatgttaatggcaccagtcgtctgacttatacgcagggaaatgtcagt

SEQ ID NO: 416565 - DNA, 75 bp, synthetic construct
  source 1..75: mol_type = other DNA
tatcgatggtgaagcgaaaagatacacacatataactggtgatttttcacaagacctatcagatcttgttaactt

SEQ ID NO: 416566 - DNA, 75 bp, synthetic construct
  source 1..75: mol_type = other DNA
tggttctgatatcagattcgaaaagacttgcgaatcagttcacgttcccgaagagattgaatctaattacaggag

SEQ ID NO: 416567 - DNA, 75 bp, synthetic construct
  source 1..75: mol_type = other DNA
gctaattcggctaatgtcctggtaagtcatgcgcagggattgggtagcgcaaacgttgagaacaacggtaccctg

SEQ ID NO: 416568 - DNA, 75 bp, synthetic construct
  source 1..75: mol_type = other DNA
tttaatccgaccgaatccgtgaccattgaccttgcttatgaaggttccggtagtggcgactggcgaacggatgca

SEQ ID NO: 416569 - DNA, 75 bp, synthetic construct
  source 1..75: mol_type = other DNA
taagagcacacaacactacctgagggtgtttgccctcgatgtggggataggccggaaccggggaatacagtttac

SEQ ID NO: 416570 - DNA, 75 bp, synthetic construct
  source 1..75: mol_type = other DNA
ctgcttgccccggaagtggctgttttactcgatgccgttgcagacctgcgccagcgcatgttgtttgaccttatc

SEQ ID NO: 416571 - DNA, 75 bp, synthetic construct
  source 1..75: mol_type = other DNA
ctggatatgaatggtcacagccagatcgtgggcacgctcaatggcagcgccgattcactgctgagcttgaacggc

SEQ ID NO: 416572 - DNA, 75 bp, synthetic construct
  source 1..75: mol_type = other DNA
ttgctgagataaaaaccggggtggaaggacagctaaatgccaacctgaatgtctgggggaatgtgggcgttcagg

SEQ ID NO: 416573 - DNA, 75 bp, synthetic construct
  source 1..75: mol_type = other DNA
ccgataagcaccgcgaaagcaatggaaccctcgttcatagcaacggtgatggcaatgttcaaacccgacttggcg

SEQ ID NO: 416574 - DNA, 75 bp, synthetic construct
  source 1..75: mol_type = other DNA
tgctgttccttctgtcgcggcggcgctgggatattccgctgactggtatggcctggtgattgctgatgcgacgat

SEQ ID NO: 416575 - DNA, 75 bp, synthetic construct
  source 1..75: mol_type = other DNA
ggtgcggcatccattgttggcattccatcagcagcaggggcaggaacggatctggctcctttgatgggtatcgat

SEQ ID NO: 416576 - DNA, 75 bp, synthetic construct
  source 1..75: mol_type = other DNA
tgcaggcccaacagcaggagaagcagcagcaggcgatgacggccgccgtggttcagaatcaggcagcgttgctga

SEQ ID NO: 416577 - DNA, 75 bp, synthetic construct
  source 1..75: mol_type = other DNA
ccacgaaagtaccccagagtgaagccggtattacccgactgttatcaagtgttgaaaaatcactggatcaggccg

SEQ ID NO: 416578 - DNA, 75 bp, synthetic construct
  source 1..75: mol_type = other DNA
ccacgaaggttccccagactgaaaccggtattacccgactgttatcaaatgtagaaaaatcactggatcaggccg

SEQ ID NO: 416579 - DNA, 75 bp, synthetic construct
  source 1..75: mol_type = other DNA
ggccgttgctgacgatgaagatatcgacgatgccgactggctgagcgtggccgctgcgatcgaggcctccagtct

SEQ ID NO: 416580 - DNA, 75 bp, synthetic construct
  source 1..75: mol_type = other DNA
ggctgggcatgcactcgcagaggatggcgttgttcactttgttggtgaaatagtcgacagtacttgtgaagtgac

SEQ ID NO: 416581 - DNA, 75 bp, synthetic construct
  source 1..75: mol_type = other DNA
cgtcgctctctggttaacaccccatgcaacgatggttatctcagaacttgaaaaagcagtattaaagcctcggta

SEQ ID NO: 416582 - DNA, 75 bp, synthetic construct
  source 1..75: mol_type = other DNA
tggccgccgaatattgtagctatgtcattacattaacagacagagataaagcttattgggagaataacttaaagt

SEQ ID NO: 416583 - DNA, 75 bp, synthetic construct
  source 1..75: mol_type = other DNA
tataaacatctcaataacaatacgaaagagttattcggaacgctgtcggggggcgtgggagaaaaggattcaaag

SEQ ID NO: 416584 - DNA, 75 bp, synthetic construct
  source 1..75: mol_type = other DNA
agccgctgttcgagtccgagtttgtgctggtagccagtaagtcccgaacatgcaccggcaccaccacgctggagt

SEQ ID NO: 416585 - DNA, 75 bp, synthetic construct
  source 1..75: mol_type = other DNA
actggcgtaggtattcgtatttttaaccagtccgataattctcaggttaaactctataacgattccgcctatacc

SEQ ID NO: 416586 - DNA, 75 bp, synthetic construct
  source 1..75: mol_type = other DNA
tatgcagctgcttcagcgttcggacgtgcgttcaccgtgaatttcctggggaataacaccactatcacgctgaag

SEQ ID NO: 416587 - DNA, 75 bp, synthetic construct
  source 1..75: mol_type = other DNA
agttgaaaccgccaccggtgagctggcgaaaacgcagcgccgcagcctggcggatacccttcagcagtccggcgg

SEQ ID NO: 416588 - DNA, 75 bp, synthetic construct
  source 1..75: mol_type = other DNA
tacacgccggcgcgaaaaatccacctgtaccactgcgaccatcgcggcctgccgctggcccttatcagcaaggaa

SEQ ID NO: 416589 - DNA, 75 bp, synthetic construct
  source 1..75: mol_type = other DNA
ccagaaacatgggccgctattgttctcatcgtaaaaaaatggataaaccgacacaaggatgccagtgttgaatta

SEQ ID NO: 416590 - DNA, 75 bp, synthetic construct
  source 1..75: mol_type = other DNA
ggaccagttgccttcccaagagatgctcgcgcatgccgttgctgttatccagcaagggggattatttgcatggtt

SEQ ID NO: 416591 - DNA, 75 bp, synthetic construct
  source 1..75: mol_type = other DNA
caaggggatgagcgtgatgtaatctttatttcctttacctatggaccttctgagcatggtggaaaggtttatcaa

SEQ ID NO: 416592 - DNA, 75 bp, synthetic construct
  source 1..75: mol_type = other DNA
gcgaccgcctgaccacgatacagaacgacagaacccgcatccagacgatttatcagccggggagcttcacgccac

SEQ ID NO: 416593 - DNA, 75 bp, synthetic construct
  source 1..75: mol_type = other DNA
gaaaacactggctgcccaactggccgacaacggggtggagcactttgatcccgaacaatatttacacgaggtaga

SEQ ID NO: 416594 - DNA, 75 bp, synthetic construct
  source 1..75: mol_type = other DNA
tgaagttcaaaaccgagccgggcgtgacgcacgaaacgctgacgaccgcacaggcgtccgctattgatgctatta

SEQ ID NO: 416595 - DNA, 75 bp, synthetic construct
  source 1..75: mol_type = other DNA
cccgcgtgtatggtgtaaccacttccgcatcggcggttctggatgcaaccagtaccacggatattgcctacaagc

SEQ ID NO: 416596 - DNA, 75 bp, synthetic construct
  source 1..75: mol_type = other DNA
gaatctgtaccaatatccgctgaatccagtgcaacacgttgatccattagggcttagtactatgataataggtaa

SEQ ID NO: 416597 - DNA, 75 bp, synthetic construct
  source 1..75: mol_type = other DNA
atctaaatatggacacttaaataatggcggatatggagcgaaacccagcaaaccgcctacgcccgatccaagtaa

SEQ ID NO: 416598 - DNA, 75 bp, synthetic construct
  source 1..75: mol_type = other DNA
tggtatttgtatccataatttctcgcaaacaccttgtgagcgccatttgcaatgctcagcagactgcaaggatta

SEQ ID NO: 416599 - DNA, 75 bp, synthetic construct
  source 1..75: mol_type = other DNA
gataaagaggggttaactcctgaaaaattattagtcttgcaggatcatgtgcttaattataatgtcgaggtttca

SEQ ID NO: 416600 - DNA, 75 bp, synthetic construct
  source 1..75: mol_type = other DNA
gggcatggcggcgcttggcatggtgattgtctttacctttttgctgttccaaaaaattcgtactgctgatagcgc

SEQ ID NO: 416601 - DNA, 75 bp, synthetic construct
  source 1..75: mol_type = other DNA
cgtactttctcttctcagtcacggcagaatgtgactcaggcgttacccgaattacagctcggtaatgccattgtt

SEQ ID NO: 416602 - DNA, 75 bp, synthetic construct
  source 1..75: mol_type = other DNA
gcgtgccgggtgtgtcgtttgtggtgctgctggcaacgctgggtagcgtcggtattccgctggaaggtctggcgt

SEQ ID NO: 416603 - DNA, 75 bp, synthetic construct
  source 1..75: mol_type = other DNA
ttgaaaaaaatattcatcctatcggcagcgctgatcatggcaggatgcgcaacaaagcaatatccacaggccgtg

SEQ ID NO: 416604 - DNA, 75 bp, synthetic construct
  source 1..75: mol_type = other DNA
attgaacgtgattatcacctgagcgccgcaatgtactgcgatgtggcaaacctggataaatttttctgggtcttc

SEQ ID NO: 416605 - DNA, 75 bp, synthetic construct
  source 1..75: mol_type = other DNA
tctggagacaaacaactggccagcaccgattaccgaaagttataccgacgaattaaacgactttgatcttcgtcg

SEQ ID NO: 416606 - DNA, 75 bp, synthetic construct
  source 1..75: mol_type = other DNA
atcgagcacgccctcaagccattgctcgacaaacacactaaagattcagcgcgacttcaaatcgtccttgatcgc

SEQ ID NO: 416607 - DNA, 75 bp, synthetic construct
  source 1..75: mol_type = other DNA
gcccgcccgactgatcgcagcggaactaaaagagctacgctcgaaggcctccgactcctataccaatgaactgtt

SEQ ID NO: 416608 - DNA, 75 bp, synthetic construct
  source 1..75: mol_type = other DNA
catagtcctgcaatattaatgaaaggctggatggattctttcgtagatataaaaaatatttcaaaggaatcttct

SEQ ID NO: 416609 - DNA, 75 bp, synthetic construct
  source 1..75: mol_type = other DNA
gtgcatttgatatgcaccactgccaaagtggatcgtagttttggcgatattccggaaggtgcgaataagcgggga

SEQ ID NO: 416610 - DNA, 75 bp, synthetic construct
  source 1..75: mol_type = other DNA
aatacgcgagaatacaacaaaaatctcgctgtccttaataacctaactaaacagcatggtgtatataaacagtga

SEQ ID NO: 416611 - DNA, 75 bp, synthetic construct
  source 1..75: mol_type = other DNA
aatcatcatttaaaatatcaggcaatcattctgaatggaaagataaagaaaatgccataatgcgtactgatatta

SEQ ID NO: 416612 - DNA, 75 bp, synthetic construct
  source 1..75: mol_type = other DNA
cattgccaccactgccgtgacttactcgaacggcgtggctaccgccaccaccgcatccgcacatgggctgactgc

SEQ ID NO: 416613 - DNA, 75 bp, synthetic construct
  source 1..75: mol_type = other DNA
ggggcctcgctcattaattttcgtctttatgatgaggcatttatttgtggtccggcggcgatgatggatgacgcg

SEQ ID NO: 416614 - DNA, 75 bp, synthetic construct
  source 1..75: mol_type = other DNA
acagccgggagcgtcagcttgctttttccctctggcttaaacgcctggcaggatcacgtcagaccgctcatgaaa

SEQ ID NO: 416615 - DNA, 75 bp, synthetic construct
  source 1..75: mol_type = other DNA
cagagattgaagagcttcagcgtaacgctgccctttccgctcaccgcgtaaatcgcaacgccgtatcagctgagc

SEQ ID NO: 416616 - DNA, 75 bp, synthetic construct
  source 1..75: mol_type = other DNA
gtgaggcactgcactgggcggtgactaccggcggcttcaacagtgaaacagtacaggatgtcatgctgagagcgg

SEQ ID NO: 416617 - DNA, 75 bp, synthetic construct
  source 1..75: mol_type = other DNA
gacttatcgttcagcacattattttatggatagaggataatattgagtcaacgataaagatcgaggatgttgcga

SEQ ID NO: 416618 - DNA, 75 bp, synthetic construct
  source 1..75: mol_type = other DNA
aggatgaatcagacccactgggtgatgaaattcgctcaatccttgatggccatatctatctaagtcgcaaactcg

SEQ ID NO: 416619 - DNA, 75 bp, synthetic construct
  source 1..75: mol_type = other DNA
cccgctatgagtggcatgtcagtatgcggtgatgcgcttaacggtgacgagtggccatttacctggcggataaat

SEQ ID NO: 416620 - DNA, 75 bp, synthetic construct
  source 1..75: mol_type = other DNA
gcattgctgcgcggtgcctttccaaaaactgcgacgattatgctcaccgagtgggaaaaaacactcggcttacct

SEQ ID NO: 416621 - DNA, 75 bp, synthetic construct
  source 1..75: mol_type = other DNA
ccgcctctgcgcatggactgaccgctggccagtacgtgaagatcagcggtgtaactccggcggcctataacggaa

SEQ ID NO: 416622 - DNA, 75 bp, synthetic construct
  source 1..75: mol_type = other DNA
tttgattttctgctctacgcgcagcgcaacccacaaagttgcccggtgcttgatgtcctcgaagccgggcaatgc

SEQ ID NO: 416623 - DNA, 75 bp, synthetic construct
  source 1..75: mol_type = other DNA
tttaatgacgaaggggtgtatgaagttacccctgagtttgcaactatttttgatatcgcctctggatacatttca

SEQ ID NO: 416624 - DNA, 75 bp, synthetic construct
  source 1..75: mol_type = other DNA
gtggtgatgggttaaatggtgatgactggccatttgtctggatggttgaaggagaggaaacgaatataacatact

SEQ ID NO: 416625 - DNA, 75 bp, synthetic construct
  source 1..75: mol_type = other DNA
tacttaggttcaatgtttggtttgtatgatatcacgcgaggaagtaataaaccggaaacagaagggcccggttat

SEQ ID NO: 416626 - DNA, 75 bp, synthetic construct
  source 1..75: mol_type = other DNA
atggctatctatgactaacaaagacaccaataaatattataagaaaatttcaaatagaaaagttgaaagtaaata

SEQ ID NO: 416627 - DNA, 75 bp, synthetic construct
  source 1..75: mol_type = other DNA
gctggcatcacgtattcaggtaaaagataagattactacggcgcaaattgtatctgaattcaataaaaatgttac

SEQ ID NO: 416628 - DNA, 75 bp, synthetic construct
  source 1..75: mol_type = other DNA
gtgaatatgaaattacgaatgattttctcctgcatattaatgtatctccgtggcaattaaatgaatttgatttcc

SEQ ID NO: 416629 - DNA, 75 bp, synthetic construct
  source 1..75: mol_type = other DNA
agattctgttaatttagtcggaataatgctaaataatggaaagtatcttagctttattcgaactgataatggtga

SEQ ID NO: 416630 - DNA, 75 bp, synthetic construct
  source 1..75: mol_type = other DNA
aatattttacattgatgtttttatgtggcttggtttgtttttgtttattatggtatatcgttgaaaaaataacaa

SEQ ID NO: 416631 - DNA, 75 bp, synthetic construct
  source 1..75: mol_type = other DNA
agggctatcaacatttctttgctctgctgggtgctgccagcgccgtcactaccggtcatccggaagcgcgcaagc

SEQ ID NO: 416632 - DNA, 75 bp, synthetic construct
  source 1..75: mol_type = other DNA
gccaatgtcacacttcgcgcctggcctatcagtattaccggtcaaaaaccgaccgaagggccgtttagcgcgctg

SEQ ID NO: 416633 - DNA, 75 bp, synthetic construct
  source 1..75: mol_type = other DNA
gccgtgtggctgacgcacgacccggaatacccggagaatttacctgccgcgccgctggtacgctatggctggacg

SEQ ID NO: 416634 - DNA, 75 bp, synthetic construct
  source 1..75: mol_type = other DNA
tagaggactatatttcaaaaaccgtgctgttatgttcactaaccgagtcagaacaccgtcttgacgcgtatatgc

SEQ ID NO: 416635 - DNA, 75 bp, synthetic construct
  source 1..75: mol_type = other DNA
tgggttgaaagcatgaacggagaatttcctgaagcgtgggatatcgatagttacgattataatgatcataattta

SEQ ID NO: 416636 - DNA, 75 bp, synthetic construct
  source 1..75: mol_type = other DNA
tctgcaattgccgggctatctcaggaagttgaaaacactgctaccgcaggaatgcgtcatcttgaagcgttccgt

SEQ ID NO: 416637 - DNA, 75 bp, synthetic construct
  source 1..75: mol_type = other DNA
tagtgagattattgagctcaaaaaaatcattaataacattagtgacaaatacaaagagcggatggaacggttact

SEQ ID NO: 416638 - DNA, 75 bp, synthetic construct
  source 1..75: mol_type = other DNA
atcgggcgcatttgataaatatcccaacctgcaggtaatcagtggccactggggggagatgttacccttctggct

SEQ ID NO: 416639 - DNA, 75 bp, synthetic construct
  source 1..75: mol_type = other DNA
tctagatgaacttgttactttattagaaaaaaaaggctccaatcaaataagacgagccaatattttcacaactaa

SEQ ID NO: 416640 - DNA, 75 bp, synthetic construct
  source 1..75: mol_type = other DNA
tgagctgcatcttaaatcaggtgtgataaaactgttttcccctctcactccggaacttctgcgggtgctcatccg

SEQ ID NO: 416641 - DNA, 75 bp, synthetic construct
  source 1..75: mol_type = other DNA
acaaatagatttcgtgaagttgtcaatgcgctaagagaagcaaataggattaaagacaataaagacaataaagac

SEQ ID NO: 416642 - DNA, 75 bp, synthetic construct
  source 1..75: mol_type = other DNA
gtcaacggcaacaggattatcgccgatgtgggccacgacctgctgataagcagccagcaggacaccagtaagtac

SEQ ID NO: 416643 - DNA, 75 bp, synthetic construct
  source 1..75: mol_type = other DNA
aaattgaaccttgttccaatggatggaaatctgaacaaaggagcctggaagcagatggaaaatacttgggcaaaa

SEQ ID NO: 416644 - DNA, 75 bp, synthetic construct
  source 1..75: mol_type = other DNA
gggaagttataacataagtaataatagtggaaactatacagacaatattatctcactccccaggcttcctgatgt

SEQ ID NO: 416645 - DNA, 75 bp, synthetic construct
  source 1..75: mol_type = other DNA
tattttttgcataagaaatatttatgttcataaggttgctatttgtgaaactttttcaggggaaagtttgtcgat

SEQ ID NO: 416646 - DNA, 75 bp, synthetic construct
  source 1..75: mol_type = other DNA
atatcagcaaagtattctaaatattgtgatattgtaaaaatttctactgaaacatatttgttgctgtgtcacact

SEQ ID NO: 416647 - DNA, 75 bp, synthetic construct
  source 1..75: mol_type = other DNA
gtaaaacgtcgtggggactggctatctggttcggttcggtaaaccgcaggttgcgcggtgggaagccgaaagatt

SEQ ID NO: 416648 - DNA, 75 bp, synthetic construct
  source 1..75: mol_type = other DNA
tatatgggaacctgcgttttttacgagtatgactttaatcgtcaggtccatgcctcatatgctccttcattcagg

SEQ ID NO: 416649 - DNA, 75 bp, synthetic construct
  source 1..75: mol_type = other DNA
gggtgattttgttcttgaaacggctattggtgaatttggttcatttagtcgtgagtatgaaattacgaaagaatt

SEQ ID NO: 416650 - DNA, 75 bp, synthetic construct
  source 1..75: mol_type = other DNA
atgaaggcaacgcctgcctcagggacatatcgcggtgctcttgaaactttacaaaaaatgatgtctgaatgtata

SEQ ID NO: 416651 - DNA, 75 bp, synthetic construct
  source 1..75: mol_type = other DNA
aatgaattgaaagactttggctatacatatcttatattcaaaaagaaaattaaaaaagtaatcagggatgtaaaa

SEQ ID NO: 416652 - DNA, 75 bp, synthetic construct
  source 1..75: mol_type = other DNA
ttgaaaagcgcacagcagggtaatcggcacgcccagtttcaaattgcatgggattataacgctggcgaaggggtg

SEQ ID NO: 416653 - DNA, 75 bp, synthetic construct
  source 1..75: mol_type = other DNA
tattaatatagctcttgtcaatgagcaggttatgttatgggctaattttgatgcaccaagtgatgtaaaacttca

SEQ ID NO: 416654 - DNA, 75 bp, synthetic construct
  source 1..75: mol_type = other DNA
catgcgtcgcaacagcccgcagaaagcagcgaaagtgttgtttgaatcgctgcttggagagagcgatgaggtcta

SEQ ID NO: 416655 - DNA, 75 bp, synthetic construct
  source 1..75: mol_type = other DNA
attcagtacggcaacgtctggagcaatatcagcgacgagttgctgaatcaggcaggaatcaaactcaacgacacg

SEQ ID NO: 416656 - DNA, 75 bp, synthetic construct
  source 1..75: mol_type = other DNA
tcctccctctccgcactgtcggaagaaaacctgagtgcgaaacatgagacagtcccgcaacgtcgcgtcagggta

SEQ ID NO: 416657 - DNA, 75 bp, synthetic construct
  source 1..75: mol_type = other DNA
ggaattgcaccctacaggtatttcaggcctgctcggaattaactcgcagggtaggtaaaacatcgacggttaatt

SEQ ID NO: 416658 - DNA, 75 bp, synthetic construct
  source 1..75: mol_type = other DNA
tcgaccatcaccgcagatgaaatccgcaaaaaccccgttgcccgcgatgtgtcggagatcatccgtaccatgcca

SEQ ID NO: 416659 - DNA, 75 bp, synthetic construct
  source 1..75: mol_type = other DNA
attattttattgatcgtgttactaatatattaaattttgatagtaatactagtaatctagagagaaaatatcagt

SEQ ID NO: 416660 - DNA, 75 bp, synthetic construct
  source 1..75: mol_type = other DNA
acgttacgtgatttacagggcgacgaggtggaagcggacaaaacgttacacattgcgcaaaacggaacggtggtc

SEQ ID NO: 416661 - DNA, 75 bp, synthetic construct
  source 1..75: mol_type = other DNA
tgctgcgacgctcgcggagggatatatcagcgtcgatacgctggttgtcggcgcgggtgactacacctggaaagg

SEQ ID NO: 416662 - DNA, 75 bp, synthetic construct
  source 1..75: mol_type = other DNA
caattgattggtaaagaattattcagccgaaatgggcgtaataaggcactgactgaacatggtgtaaaaatgcta

SEQ ID NO: 416663 - DNA, 75 bp, synthetic construct
  source 1..75: mol_type = other DNA
ttgcaaaaagagatcgcgtttttgtcggcggtgaaagtggcgattatcaagctgacgacaaccgacaaaaaattc

SEQ ID NO: 416664 - DNA, 75 bp, synthetic construct
  source 1..75: mol_type = other DNA
caggtgattgaagagctgatcgagatggcgaaagcgtttcaggaagcgatggcgcgcgatgatgcactggggttg

SEQ ID NO: 416665 - DNA, 75 bp, synthetic construct
  source 1..75: mol_type = other DNA
tgtgtttctgcgcccggtgatgctggagcagctgcaaaccatcaacccccatctccctgtttccgtgctggaaga

SEQ ID NO: 416666 - DNA, 75 bp, synthetic construct
  source 1..75: mol_type = other DNA
cgcagcggcgaatgttccatcaccagattgaacgtggcaacccgcgacgaacgttcacagggatggcttttatcg

SEQ ID NO: 416667 - DNA, 75 bp, synthetic construct
  source 1..75: mol_type = other DNA
attaataaaatcctacagccaaagtactgaagatcctgaatcatacatcatagatttccctgaggaacttcttga

SEQ ID NO: 416668 - DNA, 75 bp, synthetic construct
  source 1..75: mol_type = other DNA
cagaaaattctctcatatttctttatctcattttatttcatcaaccgaacaaagcgatcctaatactaagcgatt

SEQ ID NO: 416669 - DNA, 75 bp, synthetic construct
  source 1..75: mol_type = other DNA
ttaaacttatatatagaccaagtggtttagaacaaccttcatttaatgactttaaaaaaaatgtaaaatggaaga

SEQ ID NO: 416670 - DNA, 75 bp, synthetic construct
  source 1..75: mol_type = other DNA
tgaccagatgtgtaggctctgttgagaacagagataatcttgaggccgttatagaaagatatggtcgctcattcc

SEQ ID NO: 416671 - DNA, 75 bp, synthetic construct
  source 1..75: mol_type = other DNA
ttttttttgtgtattgtttcaatacccgcctgttattttgttgtaaaattcttaaataaatctgattatcttgct

SEQ ID NO: 416672 - DNA, 75 bp, synthetic construct
  source 1..75: mol_type = other DNA
tgattaagaagattgccgcctatcaccagttccatgcagtgcgtgaagcggtgacggcgacgattgtggcctcga

SEQ ID NO: 416673 - DNA, 75 bp, synthetic construct
  source 1..75: mol_type = other DNA
atgacggcgcgacggtgccaatttactacgaatcccgcttggcaaagctcgacctgaaccatgaggagctggaaa

SEQ ID NO: 416674 - DNA, 75 bp, synthetic construct
  source 1..75: mol_type = other DNA
cctttgaggcctgtcagacgaacaaaaatacctggctgaaacgtaaagccgaactggcagaccttgaacgggaat

SEQ ID NO: 416675 - DNA, 75 bp, synthetic construct
  source 1..75: mol_type = other DNA
ctacgccgtccaccatgccaacgatttactggacccataccggttcgaagctgctcaggacaaaatgactggctg

SEQ ID NO: 416676 - DNA, 75 bp, synthetic construct
  source 1..75: mol_type = other DNA
gtctgtgagcaccgcacctctttcggaaggctcgaaatacatgcgggtctgggttcgttttggggagtccccgga

SEQ ID NO: 416677 - DNA, 75 bp, synthetic construct
  source 1..75: mol_type = other DNA
tgagcataaaaacgctcaatgaatctgagtgtattgagaaaactatcgatagcatccgtcagcagcttagaggtt

SEQ ID NO: 416678 - DNA, 75 bp, synthetic construct
  source 1..75: mol_type = other DNA
catcgatcgctttatttaaataataaatcatccatgtgtaggtttttattctcattgcaacttagaaagattgtt

SEQ ID NO: 416679 - DNA, 75 bp, synthetic construct
  source 1..75: mol_type = other DNA
ggaatttgaggtcggggaaagagcaatgcaggatagacaacccactagacattgcatgcaatgttctgtggattg

SEQ ID NO: 416680 - DNA, 75 bp, synthetic construct
  source 1..75: mol_type = other DNA
catgccaacgatttactggacccataccggttcgaagctgctcaggacaaaatgactggctgggcgacctggtaa

SEQ ID NO: 416681 - DNA, 75 bp, synthetic construct
  source 1..75: mol_type = other DNA
ccagaatagtatagatcctgctaaagatcattttgatgcagcggtaaaatggggtgaggagtggttaaagagtaa

SEQ ID NO: 416682 - DNA, 75 bp, synthetic construct
  source 1..75: mol_type = other DNA
gaagctggggcttacgtctacacgctggctaaagggaaggggaatgacgagaaaaactggtatctgaccagtaaa

SEQ ID NO: 416683 - DNA, 75 bp, synthetic construct
  source 1..75: mol_type = other DNA
gatggacccggtatacacgccggcgcgaaaaatccacctgtaccactgcgaccatcgcggcctgccgctggccct

SEQ ID NO: 416684 - DNA, 75 bp, synthetic construct
  source 1..75: mol_type = other DNA
tatacttcgtccaatcctggaaggccatcgacagctttatctggataagctaggtctttctctgactcatgagca

SEQ ID NO: 416685 - DNA, 75 bp, synthetic construct
  source 1..75: mol_type = other DNA
acgagccggagagcgggatgtacctggtgagtgatccgctggggttgctggggggtgagcagacttaccggtatg

SEQ ID NO: 416686 - DNA, 75 bp, synthetic construct
  source 1..75: mol_type = other DNA
tgggtgacgcggacgaatcatgcggtgagcgacctgacgggccgtccgctgatgctctttaacagtgaaggtaaa

SEQ ID NO: 416687 - DNA, 75 bp, synthetic construct
  source 1..75: mol_type = other DNA
ttccggtcagtaattcgacgctaaaaagcgaagatccgaccggcgcgccggtaaccagcagcggtttcctcggcg

SEQ ID NO: 416688 - DNA, 75 bp, synthetic construct
  source 1..75: mol_type = other DNA
gtgcggcgttacatgcagggggaatgtccggtggaacacgtcttcttgttgacacggatggtgtgggaggtgtac

SEQ ID NO: 416689 - DNA, 75 bp, synthetic construct
  source 1..75: mol_type = other DNA
ttttcggactgcagggcgtggcggttggtctgtcagcctcaaggtctaaatatctggggcgtgataatgattctg

SEQ ID NO: 416690 - DNA, 75 bp, synthetic construct
  source 1..75: mol_type = other DNA
cattaattattactcaattggaaaatgatacaaatcttattgttaattccccaaggtttaaaaataacatcaatt

SEQ ID NO: 416691 - DNA, 75 bp, synthetic construct
  source 1..75: mol_type = other DNA
atgaatcaatcaacaaacccttatgtcatgctgcatgacgagaaacgctgtattggctgccaggcgtgtacggtt

SEQ ID NO: 416692 - DNA, 75 bp, synthetic construct
  source 1..75: mol_type = other DNA
gggaagtcggtcgcgtcgagcgcaccctgttcatgatcgactggattctggatgccgaactccaacggcgtgccc

SEQ ID NO: 416693 - DNA, 75 bp, synthetic construct
  source 1..75: mol_type = other DNA
actgacatcagcagttattaccggaatacaacctctgttgacctgaagcgcttaccggatgatgtggaagcaacc

SEQ ID NO: 416694 - DNA, 75 bp, synthetic construct
  source 1..75: mol_type = other DNA
tggataccgaagtgctcaacgaccgtaccaccaccgtaaaacacgatcaccgcgaaaccgtaaaaaatgaccaga

SEQ ID NO: 416695 - DNA, 75 bp, synthetic construct
  source 1..75: mol_type = other DNA
tacggcgattaaggaaattttgctggctgtggaggaaagcaaaattgcgctgacgccggatggcattcagctaca

SEQ ID NO: 416696 - DNA, 75 bp, synthetic construct
  source 1..75: mol_type = other DNA
gactgaatcagctggacctgaaatcactaaaaaaatggtgcgagaaaggacaacaaaaaaaattaccttcgaaat

SEQ ID NO: 416697 - DNA, 75 bp, synthetic construct
  source 1..75: mol_type = other DNA
ttattgttgctgttatgcatgccgttaaatgaaaaagcacaatttttagcaccaattataccttgtcattattgc

SEQ ID NO: 416698 - DNA, 75 bp, synthetic construct
  source 1..75: mol_type = other DNA
caggttaatggtgactcactgttgattaactggaactgtgcagcctcgaaatccccaccgaagacccctgatgaa

SEQ ID NO: 416699 - DNA, 75 bp, synthetic construct
  source 1..75: mol_type = other DNA
cacggcttccgtcggaaccggtgataattttgaacggttacttggcgcttctcattcagaggcagaggcgattat

SEQ ID NO: 416700 - DNA, 75 bp, synthetic construct
  source 1..75: mol_type = other DNA
cggcgtgaccgttaacgccacaggcaacacggaaaacaccgtgaaaaacattgcgtttaactacatcgtgaggct

SEQ ID NO: 416701 - DNA, 75 bp, synthetic construct
  source 1..75: mol_type = other DNA
cggggtaacagaatcttcattcaataccatattcccgttattgatattaacagcattatacttcgctgttactgt

SEQ ID NO: 416702 - DNA, 75 bp, synthetic construct
  source 1..75: mol_type = other DNA
ttacttgagatgtcatacagttttagaaattactactgggtgctaccatttactccatttattatggcgaaaatt

SEQ ID NO: 416703 - DNA, 75 bp, synthetic construct
  source 1..75: mol_type = other DNA
tgtatatatcttttgttttgattatttgcgccttatctaaaaacataatgatgttaaatacatctgatttcggaa

SEQ ID NO: 416704 - DNA, 75 bp, synthetic construct
  source 1..75: mol_type = other DNA
ggggtggacgagaagctgaagattcaggtcgggccgaaaacagcaccgctgatggacgacgtgctggattacgac

SEQ ID NO: 416705 - DNA, 75 bp, synthetic construct
  source 1..75: mol_type = other DNA
ggcaccggaacctaacctgaccattctttggtcggaagaattaccgattgccttcaaaaaatatgccgcgcaggt

SEQ ID NO: 416706 - DNA, 75 bp, synthetic construct
  source 1..75: mol_type = other DNA
tcctcgatatctacattgagcgcgactttaaagctggcgtactcaatgagcagcaggcacaggaactgatcgatc

SEQ ID NO: 416707 - DNA, 75 bp, synthetic construct
  source 1..75: mol_type = other DNA
gtaccttttccccggagttcaagcttgaagctatcggacaggtggttaaataccagcgtgatgtcagagaagtcg

SEQ ID NO: 416708 - DNA, 75 bp, synthetic construct
  source 1..75: mol_type = other DNA
ttacctctgcacctcagcagaccataacacacaccggaatcaaaaaattgttatggataatcaaaaaaaccctcc

SEQ ID NO: 416709 - DNA, 75 bp, synthetic construct
  source 1..75: mol_type = other DNA
cggaaccatgatgaggaaaaagaaacgcaaatattgtagtgaaatctgtgccgaaaaagaccagatggcacacga

SEQ ID NO: 416710 - DNA, 75 bp, synthetic construct
  source 1..75: mol_type = other DNA
cctttggtttatgtacgattacattgcaatttatctttttgttccaatgatagttatgggatgtagagaaataag

SEQ ID NO: 416711 - DNA, 75 bp, synthetic construct
  source 1..75: mol_type = other DNA
gatgctcctcagtatcccagaggggttaggaatgtccaaaatggcactacaaggaatgttgtaaaggatcagtag

SEQ ID NO: 416712 - DNA, 75 bp, synthetic construct
  source 1..75: mol_type = other DNA
gcttaaagcgctgacttccattcccgcgataacagcaggggattccgtctggtggcactgcgatgtgattcactc

SEQ ID NO: 416713 - DNA, 75 bp, synthetic construct
  source 1..75: mol_type = other DNA
gttctttacaacctttgtgcattatttgtttttccttcacttcatgaaggtttcggtttacctccccttgaagca

SEQ ID NO: 416714 - DNA, 75 bp, synthetic construct
  source 1..75: mol_type = other DNA
ggcgggaaccgtttatattcatatcaatgaagacgatagtagtctacccggtaagagcatcaagaacgctcatag

SEQ ID NO: 416715 - DNA, 75 bp, synthetic construct
  source 1..75: mol_type = other DNA
aaacgctacagcaatcgcctgtcggatgccctgttctccatggcgcgtatcgaggagactaggcctgatgcttgc

SEQ ID NO: 416716 - DNA, 75 bp, synthetic construct
  source 1..75: mol_type = other DNA
gacgccgggctccgggaaagcctgcaccatattcagcagacgctgttcgtgctgggggctgaactggccagcgat

SEQ ID NO: 416717 - DNA, 75 bp, synthetic construct
  source 1..75: mol_type = other DNA
gcggtgacgcctggacagaatggcgggaaatctataactcattcagtcttgcccagagtctggggatgggtcgtg

SEQ ID NO: 416718 - DNA, 75 bp, synthetic construct
  source 1..75: mol_type = other DNA
aagctgggatgcatcaaatccgcagtgggaaccgtggttaagagtcggtcatcagtcagagagtcgttattacga

SEQ ID NO: 416719 - DNA, 75 bp, synthetic construct
  source 1..75: mol_type = other DNA
gcttgaacgtggagccacccggctaaccatcgtgtttggcaccaaaggcggacggccccgcgacacccttattca

SEQ ID NO: 416720 - DNA, 75 bp, synthetic construct
  source 1..75: mol_type = other DNA
gttaccagtcggaaagtaaagtccgcggtattggtcgcagtaccctggccatgagccgcgccattattgaaaatg

SEQ ID NO: 416721 - DNA, 75 bp, synthetic construct
  source 1..75: mol_type = other DNA
gatattgaggccttcaaacgcattcagctaaaaggtgttgaatcgataatacagcatatgccagaaagctcacgg

SEQ ID NO: 416722 - DNA, 75 bp, synthetic construct
  source 1..75: mol_type = other DNA
gagtcatcaagacaggaatttatatcccatgcaaatattgatgaaaataaaatcatcaatatatcttctgctgct

SEQ ID NO: 416723 - DNA, 75 bp, synthetic construct
  source 1..75: mol_type = other DNA
aacagtgcctgcttaacctctttcaggccgctgagctattgttgaaggccgtagtttcgcgcaatgggtctggag

SEQ ID NO: 416724 - DNA, 75 bp, synthetic construct
  source 1..75: mol_type = other DNA
accaatatctgtccagtcatttcccgggcgaatttggtgctgacgaaccggtgctgttcagcaaagacgatgtgc

SEQ ID NO: 416725 - DNA, 75 bp, synthetic construct
  source 1..75: mol_type = other DNA
tatgttcatcttctcagccgtcgcgccaacagcctatcgtcatattgaaaaccatggccgcagtaaagcggccca

SEQ ID NO: 416726 - DNA, 75 bp, synthetic construct
  source 1..75: mol_type = other DNA
ccataaacattaatggcgtcaggttcgatggttctacgaacatttcgataccaacaattacgtctagaggacgcg

SEQ ID NO: 416727 - DNA, 75 bp, synthetic construct
  source 1..75: mol_type = other DNA
acgggtgcagaccaaaatagtcgcatcaaatatcggtgaactggatgccctgcaacagttgggattctcactggt

SEQ ID NO: 416728 - DNA, 75 bp, synthetic construct
  source 1..75: mol_type = other DNA
agtgaggcatttgcgcaaagccgttttcgtgcgccgtggtatgcgcctgacgccagtgggcgcttttatgcgcag

SEQ ID NO: 416729 - DNA, 75 bp, synthetic construct
  source 1..75: mol_type = other DNA
ggtttacaggaaacggtaaatcaggcttctggcgcattacagaaaaaccagaacggcgcagatattccgggaaaa

SEQ ID NO: 416730 - DNA, 75 bp, synthetic construct
  source 1..75: mol_type = other DNA
atcttcagacaggtgcatggttctgccttatttctgcacatctatatagttgggaaggtcttgctgttgcttcat

SEQ ID NO: 416731 - DNA, 75 bp, synthetic construct
  source 1..75: mol_type = other DNA
tgctttcattcgatccaaaagagatagcactgctgcggcatggtccgaatgggcgcagatctatacgtcaaaaga

SEQ ID NO: 416732 - DNA, 75 bp, synthetic construct
  source 1..75: mol_type = other DNA
atgaaggtgaagaaaataatcaggcgaatacctccagccgcgataatgccatctaacaccgaagacccgaccatg

SEQ ID NO: 416733 - DNA, 75 bp, synthetic construct
  source 1..75: mol_type = other DNA
ggaaacgcaattgccgctatacaggtgcaaacgtattgcccgaactgaaatatgcacagcgttacgcacagcgcg

SEQ ID NO: 416734 - DNA, 75 bp, synthetic construct
  source 1..75: mol_type = other DNA
aagacggtaatatattaaacaaccgaatcaaacaacgggcgcaagaaaactataaggttgcgcacgctaaatatg

SEQ ID NO: 416735 - DNA, 75 bp, synthetic construct
  source 1..75: mol_type = other DNA
gatgaaatatagtggtcgtcttgaggatcactattttaacaagcgagcgcaacaggaagaattaaaggcacgtca

SEQ ID NO: 416736 - DNA, 75 bp, synthetic construct
  source 1..75: mol_type = other DNA
tgggataaagcctatgagcgtaatttgttgcttaatggctatgggccttacaaacgaagaatatgccgaaatgct

SEQ ID NO: 416737 - DNA, 75 bp, synthetic construct
  source 1..75: mol_type = other DNA
gagagatggcttaaggagtcggggatgaatccaaaatccccgcaaaaaaacagggattttaagttagttattgga

SEQ ID NO: 416738 - DNA, 75 bp, synthetic construct
  source 1..75: mol_type = other DNA
tccttactggatgtgcaaaggctcatgggcttatgcaaataataaggtcattacagatacaggttgcggaaatat

SEQ ID NO: 416739 - DNA, 75 bp, synthetic construct
  source 1..75: mol_type = other DNA
ggccattgcccaggtcggcggtaagaaggaactgaccggtcgcaccgacattgaaatcgagatcagcaaccagtg

SEQ ID NO: 416740 - DNA, 75 bp, synthetic construct
  source 1..75: mol_type = other DNA
tggccttgcagtggcaggcggtggacgggctggccgaccgcatgcgccgccatcttcgtccactgtacgttgcgc

SEQ ID NO: 416741 - DNA, 75 bp, synthetic construct
  source 1..75: mol_type = other DNA
gcgatggcgtaccacatgaagcagttggaggacgaaagcagcgctggtgccaaacaatcctttgccgacgagcag

SEQ ID NO: 416742 - DNA, 75 bp, synthetic construct
  source 1..75: mol_type = other DNA
ttgacggtactttaactgaggaagatacaaatgattatactaaagttaaaccaaaactaaaagttgttaaaaaat

SEQ ID NO: 416743 - DNA, 75 bp, synthetic construct
  source 1..75: mol_type = other DNA
atgatgctgtaccacgacgatgaacctctgacgtttgagttggtctggcagcatggcggttggtacagtgcgacg

SEQ ID NO: 416744 - DNA, 75 bp, synthetic construct
  source 1..75: mol_type = other DNA
catggcggcacatcctgctcaacgggcactacacctttcaaagcagcggcaagacgatcgatctcgatgcgatcg

SEQ ID NO: 416745 - DNA, 75 bp, synthetic construct
  source 1..75: mol_type = other DNA
actggttgggagagcgtggcggcgtttcttgacgcgccaccgcttaaggacattgacaccagtgcggccatgccg

SEQ ID NO: 416746 - DNA, 75 bp, synthetic construct
  source 1..75: mol_type = other DNA
cgcttctggtggtattgctgatcctgtcgttaatggtaacgatagcggcggtgattgcggagcgcaacggccgga

SEQ ID NO: 416747 - DNA, 75 bp, synthetic construct
  source 1..75: mol_type = other DNA
cattgctgttggtgctactgattctggcattgatggtcacgatagccgcagagattacagagcgtaacgggcgga

SEQ ID NO: 416748 - DNA, 75 bp, synthetic construct
  source 1..75: mol_type = other DNA
cttttgccgtatgtttgtgtactgcccacgtcagatctgtcagtgaatgtgaatactctgctggattcacaggcg

SEQ ID NO: 416749 - DNA, 75 bp, synthetic construct
  source 1..75: mol_type = other DNA
gaaattactgctgcggcgaccccgtaccggttgggatagcgtggcagcgtttcttgactcgccacagcttaaggg

SEQ ID NO: 416750 - DNA, 75 bp, synthetic construct
  source 1..75: mol_type = other DNA
cgcttctggttgtattgctgatcttgtcgttaatggtgacgatcgcggctgcgatcgcggagcgtaacggcagga

SEQ ID NO: 416751 - DNA, 75 bp, synthetic construct
  source 1..75: mol_type = other DNA
tggcaggaatacgtgaaggtggcatatcagcgcggcacggcacaggaatacgccaaccttgccaaccagtctgtt

SEQ ID NO: 416752 - DNA, 75 bp, synthetic construct
  source 1..75: mol_type = other DNA
aaaaagggaacgctaaaaaaagccagggaaaaatcgtttatggaaggaagggagtataagcatgtcgcccatgac

SEQ ID NO: 416753 - DNA, 75 bp, synthetic construct
  source 1..75: mol_type = other DNA
ttttctgccaagaccgacagtgccttatcctcggggctggcgcgttttgccgattttctgcaacatgaatcgctg

SEQ ID NO: 416754 - DNA, 75 bp, synthetic construct
  source 1..75: mol_type = other DNA
gctttcttcggtatcgcaccccgagaggcggagctgatggatcctcagcaccgtgtcctgttggaaaccgcgtgg

SEQ ID NO: 416755 - DNA, 75 bp, synthetic construct
  source 1..75: mol_type = other DNA
gagaacaccggtgacgttatcggtgacttgagccgtcgtcgtggtatgctcaaaggtcaggaatctgaagttact

SEQ ID NO: 416756 - DNA, 75 bp, synthetic construct
  source 1..75: mol_type = other DNA
aactatccgccagaaagttaccgatgttgaaggtaaacacgcgaaacagtctggtggtcgtggtcagtatggtca

SEQ ID NO: 416757 - DNA, 75 bp, synthetic construct
  source 1..75: mol_type = other DNA
gacggtaaagacactccggctgaacgtcacgcaagtgatgacgagccgttctctgcactggcgttcaaaatcgct

SEQ ID NO: 416758 - DNA, 75 bp, synthetic construct
  source 1..75: mol_type = other DNA
tgtgccacccccgtcggccctgccgctggcccgcacacgcaacttgcgcaaaacattgtcacctcctggctgaca

SEQ ID NO: 416759 - DNA, 75 bp, synthetic construct
  source 1..75: mol_type = other DNA
ctttgataacagcagcaatccaggcttcctggtggaagatgagcgtgtacgtgtccgtctgaataaccagagttg

SEQ ID NO: 416760 - DNA, 75 bp, synthetic construct
  source 1..75: mol_type = other DNA
agagcgggccatccggttacgctgtttgaacgcgaagccaatgcgggcggcgtggtgaaaaatatcattcctcag

SEQ ID NO: 416761 - DNA, 75 bp, synthetic construct
  source 1..75: mol_type = other DNA
acggacctcgggggaaaaacgtgtatttttagtcatcctgtttacctctttctcagggagtttggtctccaggat

SEQ ID NO: 416762 - DNA, 75 bp, synthetic construct
  source 1..75: mol_type = other DNA
cggttacaacctcgaaggtattaagcaaccgccgatgcaacagttcatcgacaatatgatggacgcatctgacca

SEQ ID NO: 416763 - DNA, 75 bp, synthetic construct
  source 1..75: mol_type = other DNA
tcggtgcgggtaacacggctatggactgcgcgcgtgccgcattacgcgtgcctggcgttgaaaaagcaaccattg

SEQ ID NO: 416764 - DNA, 75 bp, synthetic construct
  source 1..75: mol_type = other DNA
atgaacagtattcattatcaggcactgcgtgaagttgcacaaaactatcagtcgacgctggcgtggtatcaggct

SEQ ID NO: 416765 - DNA, 75 bp, synthetic construct
  source 1..75: mol_type = other DNA
gaagagctcctatctggattatgcgatgtcggttattgttggccgtgcgctgccagatgtccgagatggcctgaa

SEQ ID NO: 416766 - DNA, 75 bp, synthetic construct
  source 1..75: mol_type = other DNA
gactttatcgaccgactgctggtggcgaacactcacgatcatatcctgtgcttctccagccgtggtcgcgtctat

SEQ ID NO: 416767 - DNA, 75 bp, synthetic construct
  source 1..75: mol_type = other DNA
tggaacacatcccggggccggacttcccgacggcggcaatcatcaacggtcgtcgcggtattgaagaagcttacc

SEQ ID NO: 416768 - DNA, 75 bp, synthetic construct
  source 1..75: mol_type = other DNA
aaacgtattgcccgcactgaaatatgcacagcgttacgcacagcgcgtatggatgaggcagaagcggcgacggaa

SEQ ID NO: 416769 - DNA, 75 bp, synthetic construct
  source 1..75: mol_type = other DNA
aaggaatgatcaccttgaatctcaaacggatttttctcaccctcaccttacttcccttgttttctgttgccgctg

SEQ ID NO: 416770 - DNA, 75 bp, synthetic construct
  source 1..75: mol_type = other DNA
aatgccgcgcctttgaccagcgaacaacagacagcgtggcagaaaatccataatgacttttacgctcaaagcagc

SEQ ID NO: 416771 - DNA, 75 bp, synthetic construct
  source 1..75: mol_type = other DNA
gacgccaaaaccgggcgtgaaaccattatcgtccacgaaattccgtatcaggtgaacaaagctcgcctgatcgaa

SEQ ID NO: 416772 - DNA, 75 bp, synthetic construct
  source 1..75: mol_type = other DNA
gcttcagatattgcagcattatgcggtgcgattctcggtggcgttggtggattcctgattgcacgtggctgctct

SEQ ID NO: 416773 - DNA, 75 bp, synthetic construct
  source 1..75: mol_type = other DNA
cgtaagtttgctgcccgggcagaatggcaaccgatcatcttaagcgtggcattgccgccaggccttgtgcgattt

SEQ ID NO: 416774 - DNA, 75 bp, synthetic construct
  source 1..75: mol_type = other DNA
atcgatggcagtgctgcggaaggagacgacgaaatcgctccggaagtggacgttgacgacgagccagaagaagaa

SEQ ID NO: 416775 - DNA, 75 bp, synthetic construct
  source 1..75: mol_type = other DNA
tttcggaaatcagtgtggttggtcgtaacactcagggcgttatcctcatccgtacagcggaagatgaaaacgtgg

SEQ ID NO: 416776 - DNA, 75 bp, synthetic construct
  source 1..75: mol_type = other DNA
tatcagccgctttctgaatacgaagcgcagcgtcgtggcgggaaaggtaaatctgccgcacgtattaaagaagaa

SEQ ID NO: 416777 - DNA, 75 bp, synthetic construct
  source 1..75: mol_type = other DNA
gaagaagaacagaaacgcaatgctgcaatgcttcatgatgaaatgtacggtactaacttttcttactgccaataa

SEQ ID NO: 416778 - DNA, 75 bp, synthetic construct
  source 1..75: mol_type = other DNA
tcgcagaactgaaagctgcactggaagaaaaagaccagattatcgaagcacagaaagctgagattgaagaactga

SEQ ID NO: 416779 - DNA, 75 bp, synthetic construct
  source 1..75: mol_type = other DNA
gaacgtattgaatcttgcgaagcatttctggaactggaagcacaggtgaatgctgtttctccggttgttgaagat

SEQ ID NO: 416780 - DNA, 75 bp, synthetic construct
  source 1..75: mol_type = other DNA
cccagaaaggtggtgtgggcaaaagcactaaagcgagagcgttagcgcgtgaagcatccgcctgtggcatcaaaa

SEQ ID NO: 416781 - DNA, 75 bp, synthetic construct
  source 1..75: mol_type = other DNA
ggactgttaatggcgctggtggtatctgcactggtcatcaactgggcgatgatcagtctggcgcatatgaaattc

SEQ ID NO: 416782 - DNA, 75 bp, synthetic construct
  source 1..75: mol_type = other DNA
tagtcattctggcaaccagtctgttaaatggctgtgtgaatgagccaaaagtcaatcaactggcgggcaatgtgc

SEQ ID NO: 416783 - DNA, 75 bp, synthetic construct
  source 1..75: mol_type = other DNA
ctggataagccgttgcttgaggcggcgcgcgatctcggtgccagcaagttgcagacctttatccgcatcattatc

SEQ ID NO: 416784 - DNA, 75 bp, synthetic construct
  source 1..75: mol_type = other DNA
agcgatgggccagtcacgaatattgaggaactggaccttgatgacgttaccgatcagcaggtttttcgcaccgcc

SEQ ID NO: 416785 - DNA, 75 bp, synthetic construct
  source 1..75: mol_type = other DNA
agcgcggtgattattggtctggtttacattttgctgccatttatggtgatgccgctctactccagcatcgaaaag

SEQ ID NO: 416786 - DNA, 75 bp, synthetic construct
  source 1..75: mol_type = other DNA
ctaacgaagtaaccaacgctaaagcagttatcaaatttggcaccgaagcaaacaagaagattcagccgaaagttg

SEQ ID NO: 416787 - DNA, 75 bp, synthetic construct
  source 1..75: mol_type = other DNA
aagcagggaaacacagcgctggctgaagcagaatccgaagttcagggtgatttatcagccggtttactcaccatg

SEQ ID NO: 416788 - DNA, 75 bp, synthetic construct
  source 1..75: mol_type = other DNA
ccggtcttttatgaagatgaagtggatatccatcttaatcccaaaatcggtgcggactggcagttgcgcggacaa

SEQ ID NO: 416789 - DNA, 75 bp, synthetic construct
  source 1..75: mol_type = other DNA
cctttttgagaagccagcatacagaaaagcgatgaattcaggactcgcagtgacagaaacacgttataaaggttt

SEQ ID NO: 416790 - DNA, 75 bp, synthetic construct
  source 1..75: mol_type = other DNA
ggtactgggactgtgctttatttcggaaggtgcaattccgtttgctgctcgtgatccgatgcgtgtgctgccgtg

SEQ ID NO: 416791 - DNA, 75 bp, synthetic construct
  source 1..75: mol_type = other DNA
atcattccgctgatttccagtctggtggtcggtctggcgatgatctacctgatcggtaaaccggttgctggcatc

SEQ ID NO: 416792 - DNA, 75 bp, synthetic construct
  source 1..75: mol_type = other DNA
gcataccgtcacctgctgacgggcgtttcctatatgctaccgatggtagttgccggtggtctgtgtatcgcactt

SEQ ID NO: 416793 - DNA, 75 bp, synthetic construct
  source 1..75: mol_type = other DNA
atgaccgatattctcagcggtgcaattgtcgcggcgattgccatcgcagcaggaatggtcgccgtatggtgctta

SEQ ID NO: 416794 - DNA, 75 bp, synthetic construct
  source 1..75: mol_type = other DNA
tgggctatcgattgtccagcgaatcgccaaattgcatgacatgaatgttgaatttgggaatgcgaaacaaggtgg

SEQ ID NO: 416795 - DNA, 75 bp, synthetic construct
  source 1..75: mol_type = other DNA
cggttaacaaagcggcgtacgcgttcggtgtgggtctgttgagtacccaaacctatggcccaatggcagcgatta

SEQ ID NO: 416796 - DNA, 75 bp, synthetic construct
  source 1..75: mol_type = other DNA
ccgtctcctcccgttatgtcatgcctacccacgacggagtattgacggtctctgtgcgccagagcatagttttcc

SEQ ID NO: 416797 - DNA, 75 bp, synthetic construct
  source 1..75: mol_type = other DNA
gcaatctatgctcaaaacttattggtttgtcaagtgggatgagttagatcttgtaaagatgattgagaaaaaaga

SEQ ID NO: 416798 - DNA, 75 bp, synthetic construct
  source 1..75: mol_type = other DNA
cgcagaaaggcgggattggtaaaagcacaaaggccagagcactggcccgcgaagcgaccaacagcggtattaaaa

SEQ ID NO: 416799 - DNA, 75 bp, synthetic construct
  source 1..75: mol_type = other DNA
tttttagaaataaaaatgttgatacgatagttatttacgcaacgatgccggttggcaaagtaataggtgaattta

SEQ ID NO: 416800 - DNA, 75 bp, synthetic construct
  source 1..75: mol_type = other DNA
gcgttcaggctcagcgtgctgaacagcaagcgaaaaaacgcgaagctgccgcagcttctggtgagaaagaagatg

SEQ ID NO: 416801 - DNA, 75 bp, synthetic construct
  source 1..75: mol_type = other DNA
accaaagacggcgtccgcgtccagctgaattcgggtatgtctttgattgtgcgcgcagaacacctggtgttctga

SEQ ID NO: 416802 - DNA, 75 bp, synthetic construct
  source 1..75: mol_type = other DNA
ataatacaacgtaacattaataagtttaattgtgaagttagtgaattaaaactcaaaactgactcagaatttacc

SEQ ID NO: 416803 - DNA, 75 bp, synthetic construct
  source 1..75: mol_type = other DNA
cgccagggactttccggctggacatctgtgtactggatgtggggatcacagaggaaatgtacaccgaaatggaaa

SEQ ID NO: 416804 - DNA, 75 bp, synthetic construct
  source 1..75: mol_type = other DNA
ccccggtatggcagggcataaaaaccctgttcagtgccttctccgatctgtttgcaccggtacagctgaccacgg

SEQ ID NO: 416805 - DNA, 75 bp, synthetic construct
  source 1..75: mol_type = other DNA
gcaccgcagcttctcgccgtagagctcgtcgtgcaaatctgcaaagtcaggaggcgatcagctccgacaagctac

SEQ ID NO: 416806 - DNA, 75 bp, synthetic construct
  source 1..75: mol_type = other DNA
tacctgctgatcgcctggctttccggaaaaaatcacagttggattgtttatggcgtgcctgcgaccgtcgcgttt

SEQ ID NO: 416807 - DNA, 75 bp, synthetic construct
  source 1..75: mol_type = other DNA
ataatgctgtaccacgacgatgaaccgctaacgtttgatctggtctggcagaaggggagttggcatcgcacgatg

SEQ ID NO: 416808 - DNA, 75 bp, synthetic construct
  source 1..75: mol_type = other DNA
gccggataccctttacggcgctgtggatgggcagaaatttggtgttgaacgaccaacagtgaaagcccggcactc

SEQ ID NO: 416809 - DNA, 75 bp, synthetic construct
  source 1..75: mol_type = other DNA
cgtaacctgaggtcattatatctgtcgcttgacctcaccagcatggtccgggacagcccgtgggttaaggtactg

SEQ ID NO: 416810 - DNA, 75 bp, synthetic construct
  source 1..75: mol_type = other DNA
tttgatgataaaaattctgcgtcacggcgtgcatctggaaatggctgtgatggttggtatcgatccagaatctga

SEQ ID NO: 416811 - DNA, 75 bp, synthetic construct
  source 1..75: mol_type = other DNA
ggcagatgaacagcgtcacccgtgccggggaaacatgcggtcgcgtggtggccgcagcggtaagcctgatatccc

SEQ ID NO: 416812 - DNA, 75 bp, synthetic construct
  source 1..75: mol_type = other DNA
atatcggcgcgacgttcgtgcgctggctgaacatgttcccgaacatcgcccgctggctgggttacatcacgctga

SEQ ID NO: 416813 - DNA, 75 bp, synthetic construct
  source 1..75: mol_type = other DNA
gctgtagatggtagaaaaaatcaaactacagttgtattgtatcagtctgctgtaaaactcagtggtcgatattca

SEQ ID NO: 416814 - DNA, 75 bp, synthetic construct
  source 1..75: mol_type = other DNA
tgatggccaaaaccgatgaagtactttgtctgaatcatcacatctgttgttccggcacaccggaagtcgtttccc

SEQ ID NO: 416815 - DNA, 75 bp, synthetic construct
  source 1..75: mol_type = other DNA
ttgccaaaaatcatcgccagcctgacgttcctggaacagggcggcaaagaagtgattatcaccacgccggaatgc

SEQ ID NO: 416816 - DNA, 75 bp, synthetic construct
  source 1..75: mol_type = other DNA
gcgtggacgcggttatcgacaaagatctctccaccgcgctactggcatgtgaaattcacgccgacattctggtga

SEQ ID NO: 416817 - DNA, 75 bp, synthetic construct
  source 1..75: mol_type = other DNA
ttagtggatcatttcattaaaattactgaacatcctaaaaagggagatctcattttctatcctaattcccaagaa

SEQ ID NO: 416818 - DNA, 75 bp, synthetic construct
  source 1..75: mol_type = other DNA
atggttgcttgtggcagtgtactgatgcgtaacgccatgctttctcgcaagatggagaaagccattacggtagat

SEQ ID NO: 416819 - DNA, 75 bp, synthetic construct
  source 1..75: mol_type = other DNA
caggcgctggatcgcgtagatattgccaccatgacccgctatatgcaggaagggcatttcccgcctggcagcatg

SEQ ID NO: 416820 - DNA, 75 bp, synthetic construct
  source 1..75: mol_type = other DNA
aacaaggttttgtcgtaattggcgcgggcggcggtggaattccggtagtgcgtactgaagcgggagattaccaaa

SEQ ID NO: 416821 - DNA, 75 bp, synthetic construct
  source 1..75: mol_type = other DNA
aatgcaaaagctctctggcggcgaaacacagcgtgtactgctggcgcgcgcgttgttaaatcaaccgcaattatt

SEQ ID NO: 416822 - DNA, 75 bp, synthetic construct
  source 1..75: mol_type = other DNA
ggaatttaccgccatcatcataatcaccgccacgatttacagggtcggattattctacgtcggggaaatgatcgc

SEQ ID NO: 416823 - DNA, 75 bp, synthetic construct
  source 1..75: mol_type = other DNA
tggtcctcgtggtgctgaacaactgggtatctatcgccatcatcataatcatcgtcacgatttacagggacgaat

SEQ ID NO: 416824 - DNA, 75 bp, synthetic construct
  source 1..75: mol_type = other DNA
caacgttgaccagaaaatatgaaggttcaacttgtcttccaaacgtagccatttacgcagcaggataccggaaat

SEQ ID NO: 416825 - DNA, 75 bp, synthetic construct
  source 1..75: mol_type = other DNA
atgagagcagaagttataactctgacaacgttgaccagaaaatatgaaggttcaacttgtcttccgaacgtagct

SEQ ID NO: 416826 - DNA, 75 bp, synthetic construct
  source 1..75: mol_type = other DNA
caacgttgaccagaaaatatgaaggttcaacttgtcttccgaacgtagccatttacgcggcaggctacaggaaat

SEQ ID NO: 416827 - DNA, 75 bp, synthetic construct
  source 1..75: mol_type = other DNA
aaatgcacgctatcgcccgtcagatggggattgataatttaatggcgcggttaccgggcgagctttccggcggcc

SEQ ID NO: 416828 - DNA, 75 bp, synthetic construct
  source 1..75: mol_type = other DNA
gccgtcacgccgtccggtgtcgatgctgtttcaggagaacaacctgttcagccacctgacggtcgcgcagaacat

SEQ ID NO: 416829 - DNA, 75 bp, synthetic construct
  source 1..75: mol_type = other DNA
tgccagcagcaaaaaatgacgttattgatggtgtcgcacagtgtggaagatgcggcgcggattgccacgcgctcg

SEQ ID NO: 416830 - DNA, 75 bp, synthetic construct
  source 1..75: mol_type = other DNA
ctgctgaaagataaagagcaaatgctgaatgccgttcgtcgggtgttgccgcgtaaccgcggtctggccgggcag

SEQ ID NO: 416831 - DNA, 75 bp, synthetic construct
  source 1..75: mol_type = other DNA
tggggcgtgttctttgccattcctctggctacgctaattaaagcggtaatccatgcctggcccgatggccaaatc

SEQ ID NO: 416832 - DNA, 75 bp, synthetic construct
  source 1..75: mol_type = other DNA
ctggcagcagggcatctatttaatccgcgatatgccggggatgctcaataagctatctgattttgccgccacgtt

SEQ ID NO: 416833 - DNA, 75 bp, synthetic construct
  source 1..75: mol_type = other DNA
tgtcaccgtgctggacggcgaaaagctcacctaccgcgtcgacccgcagagcgggcaaattctggtgccggaaga

SEQ ID NO: 416834 - DNA, 75 bp, synthetic construct
  source 1..75: mol_type = other DNA
tgctgcgacatcctcagtgaatgcgccctgaatgccgacctgattgatgctcaggtggaacaactgatgacgctg

SEQ ID NO: 416835 - DNA, 75 bp, synthetic construct
  source 1..75: mol_type = other DNA
atgctgcaaatcccacagaattatattcatacgcgctcaacgcctttctggaataaacaaactgcgcctgccgga

SEQ ID NO: 416836 - DNA, 75 bp, synthetic construct
  source 1..75: mol_type = other DNA
gtggtgctcaatcaaaacgctccggcgctgaaaaactggaagccggagcagaccacgcagcttaccgcgctgctg

SEQ ID NO: 416837 - DNA, 75 bp, synthetic construct
  source 1..75: mol_type = other DNA
accgctcgccggaagccctttcgaaacacagcgaaagcaagcgcgattactcttacgaccgcagcgtccagcata

SEQ ID NO: 416838 - DNA, 75 bp, synthetic construct
  source 1..75: mol_type = other DNA
ctttgtgccgcaggcggtgccggtcgaaccaattattccgctgtggaaagatgacagcgtgctggcctgggtgcg

SEQ ID NO: 416839 - DNA, 75 bp, synthetic construct
  source 1..75: mol_type = other DNA
attggttggcgagaatgcggcgagcattgatgcttatgctgccagtgatcctgctgaatgttttgccgtactttc

SEQ ID NO: 416840 - DNA, 75 bp, synthetic construct
  source 1..75: mol_type = other DNA
cgctgacttttgcatccgctcttgagtatgtcggatggcctaaatctctttctgttgccattggtggcggcgttg

SEQ ID NO: 416841 - DNA, 75 bp, synthetic construct
  source 1..75: mol_type = other DNA
cgtggtcttcgtcagtcatcgtctggaagaagtgatggaagtttccgaccgtatttcagtgttgaaagatggtga

SEQ ID NO: 416842 - DNA, 75 bp, synthetic construct
  source 1..75: mol_type = other DNA
gcctgctgacgttgtgcctggtgacatcctgctgctggacgatggtcgcgttcagttaaaagtactggaagttca

SEQ ID NO: 416843 - DNA, 75 bp, synthetic construct
  source 1..75: mol_type = other DNA
tctgttgccattggtggtggtgtggggctgatcggtgttgatgctattcgtggggctgcaatgcgagtaatcggt

SEQ ID NO: 416844 - DNA, 75 bp, synthetic construct
  source 1..75: mol_type = other DNA
gtttaatctgatcatccacgaagttgcacataaactggacacccggaacggcgatcgcgccagtggtgtcccctt

SEQ ID NO: 416845 - DNA, 75 bp, synthetic construct
  source 1..75: mol_type = other DNA
aggcgatgagtatctatcagcaggcgcgcgccagcgttgccagctatcagacgcaagtgatgcaggataaaaatg

SEQ ID NO: 416846 - DNA, 75 bp, synthetic construct
  source 1..75: mol_type = other DNA
tgggaacacgatcttcatgctgcaatgaacaacattcaggaagaaatcgaattagttggcgagaatgcggcgagc

SEQ ID NO: 416847 - DNA, 75 bp, synthetic construct
  source 1..75: mol_type = other DNA
tggcgcgtgtttgcctgggtgcggaaaaaatcccaagcatcaacgtgtctaaacatcgtctggacgttcagttcg

SEQ ID NO: 416848 - DNA, 75 bp, synthetic construct
  source 1..75: mol_type = other DNA
gtctggctcgcgaggcgggttgcgacgcgaaaattgtcgccaaagttgaacgtgcggaagccgtttgcagtcagg

SEQ ID NO: 416849 - DNA, 75 bp, synthetic construct
  source 1..75: mol_type = other DNA
gaagcacaaaagcgcgggcttattgccacctatgagaaaaccgttcagagcgctttcaaagatgttgctgacgcg

SEQ ID NO: 416850 - DNA, 75 bp, synthetic construct
  source 1..75: mol_type = other DNA
caacaaagtgtttcagggggaagaagataagaagtttgccttctttaccatcggtgttcagggggcggatatgaa

SEQ ID NO: 416851 - DNA, 75 bp, synthetic construct
  source 1..75: mol_type = other DNA
gcatcattaatgcccatcagggtgatattcgcgtcgccagtttgccgggctacggcgcaaccttcacgcttattt

SEQ ID NO: 416852 - DNA, 75 bp, synthetic construct
  source 1..75: mol_type = other DNA
ggccatttcgatagaggacaacggctgtggcattgatctctcgctgcaaaaaaagatcttcgatccctttttcac

SEQ ID NO: 416853 - DNA, 75 bp, synthetic construct
  source 1..75: mol_type = other DNA
tcgcaggtgattgggcaactctcgccagttggcatgatggttgccagcgtatttatcctgaaagagaaaatgcgc

SEQ ID NO: 416854 - DNA, 75 bp, synthetic construct
  source 1..75: mol_type = other DNA
gattgatgccctcgatactgacgatctggagatgtggctggagcaggctgaagagcaaatcaaaagcgagttcgg

SEQ ID NO: 416855 - DNA, 75 bp, synthetic construct
  source 1..75: mol_type = other DNA
caaacgcgcggaacttgccgagcgtgaatgggcgcgaatgaaagaaaacaactcggcaacctgccgctccccata

SEQ ID NO: 416856 - DNA, 75 bp, synthetic construct
  source 1..75: mol_type = other DNA
agcacggtggcccggaagtacttcaagccgtagagttcactcctgccgatccggcggagaatgaaatccaggtcg

SEQ ID NO: 416857 - DNA, 75 bp, synthetic construct
  source 1..75: mol_type = other DNA
aaatatccgctgaaggatgcgcagcgtgcgcatgaaattctggaaagccgggcaacgcaaggttccagcctgctg

SEQ ID NO: 416858 - DNA, 75 bp, synthetic construct
  source 1..75: mol_type = other DNA
atggcaacacgaattgaatttcacaagcacggtggcccggaagtacttcaaaccgtggaatttactcctgccgat

SEQ ID NO: 416859 - DNA, 75 bp, synthetic construct
  source 1..75: mol_type = other DNA
agtggatttatccacgccgcttacgcaatcaaatgatcctgatggcaatcctgatggtcattgtcccaacgctta

SEQ ID NO: 416860 - DNA, 75 bp, synthetic construct
  source 1..75: mol_type = other DNA
agcacggtggcccggaagtacttcaggccgtggagttcactcctgccgatccggcggagaatgaaatccaggtcg

SEQ ID NO: 416861 - DNA, 75 bp, synthetic construct
  source 1..75: mol_type = other DNA
tcgtgaagagaatctggtcgagcgattgaaagagatcaccggctgtaagaaagtgcgcgtagtgtacgattccgt

SEQ ID NO: 416862 - DNA, 75 bp, synthetic construct
  source 1..75: mol_type = other DNA
tgctcctgagcggcctggtgatgttttttaacaccagtctggtcgagatatttacaaagctcaccgattacacct

SEQ ID NO: 416863 - DNA, 75 bp, synthetic construct
  source 1..75: mol_type = other DNA
ctggtgtcgttacagcatcccgattttggtatatctgatagtaatattcccgggcaggctggagttaatgaaatt

SEQ ID NO: 416864 - DNA, 75 bp, synthetic construct
  source 1..75: mol_type = other DNA
taaccgctggacttaactatacccccttcccgctaatgaccttcagcgcggagcaacgccagggtaaacagggcg

SEQ ID NO: 416865 - DNA, 75 bp, synthetic construct
  source 1..75: mol_type = other DNA
taccagcgcccaggcgcaactggatgtcgccattcaacaatacaatgccaatcaggcgatgattctgggtactaa

SEQ ID NO: 416866 - DNA, 75 bp, synthetic construct
  source 1..75: mol_type = other DNA
tgaatatcgtgccaatggtatttcctattatcgtccgtggattttcctgatcaccgatggcgcaccaaccgatga

SEQ ID NO: 416867 - DNA, 75 bp, synthetic construct
  source 1..75: mol_type = other DNA
tggtatttcgtattatcgcccgtggattttcctgatcaccgatggtgcaccaaccgatgagtggcaggctgccgc

SEQ ID NO: 416868 - DNA, 75 bp, synthetic construct
  source 1..75: mol_type = other DNA
tggatatggtagaggagcggaaacgtgagtatcgtgcaaatggtatttcgtattatcgcccgtggattttcctga

SEQ ID NO: 416869 - DNA, 75 bp, synthetic construct
  source 1..75: mol_type = other DNA
ttcttttggcgctcactaccgcaatttgctggggtgcgttgccaatcgcaatgaagcaggtgctggaggtgatgg

SEQ ID NO: 416870 - DNA, 75 bp, synthetic construct
  source 1..75: mol_type = other DNA
ggcgccattcttgcagcgaaaaagaaactgccgccattacgtgtttttcgtaagcctcgctggttgattttgctg

SEQ ID NO: 416871 - DNA, 75 bp, synthetic construct
  source 1..75: mol_type = other DNA
ttttaacaccagtctggtcgagatatttacaaagctcaccgattacacctggggagttatctttggggtcggtgc

SEQ ID NO: 416872 - DNA, 75 bp, synthetic construct
  source 1..75: mol_type = other DNA
ctgcttacccgaaacttgcagccgcttatccgtcaggtgtgatccctgatatgcgtggctggacgattaagggca

SEQ ID NO: 416873 - DNA, 75 bp, synthetic construct
  source 1..75: mol_type = other DNA
aaatatctcggctacgctgatgaacacagtgcagagcctgatcaggtgatccttatcgaagcggggcagtttgcg

SEQ ID NO: 416874 - DNA, 75 bp, synthetic construct
  source 1..75: mol_type = other DNA
atcatcacgctcaccccactgtttacgctgttttttcagatcttttatcactggcctggcccgatttcttcgcca

SEQ ID NO: 416875 - DNA, 75 bp, synthetic construct
  source 1..75: mol_type = other DNA
cccatttgcttgctcttaaaatattaataattaggttgcgtcgacacaaaagagcaaagggatggcgtagtcaat

SEQ ID NO: 416876 - DNA, 75 bp, synthetic construct
  source 1..75: mol_type = other DNA
attttagttctgcatggaaccattatcgttgtcaattcactgcatctttaaacgcctctttgcgcaatatctcta

SEQ ID NO: 416877 - DNA, 75 bp, synthetic construct
  source 1..75: mol_type = other DNA
actggtgtgacttctggagtaacgaggatgtttcagtgtggtggaaccgtctgtgtgacaatgtgctgccagaaa

SEQ ID NO: 416878 - DNA, 75 bp, synthetic construct
  source 1..75: mol_type = other DNA
aactgctggatggggctgaggttgagtgggtagcattaaataaattagcaacttttttaaaagggaagtctttac

SEQ ID NO: 416879 - DNA, 75 bp, synthetic construct
  source 1..75: mol_type = other DNA
ttcaatgcgcaggccgatgagcctgaagtaatccctggcgacagcccggtggctgttagcgaacagggagatgca

SEQ ID NO: 416880 - DNA, 75 bp, synthetic construct
  source 1..75: mol_type = other DNA
atgcaaacgggcttcatgattcgcaccaatagcggcgagtttatgatcagggataaaaagctgattaagaaaata

SEQ ID NO: 416881 - DNA, 75 bp, synthetic construct
  source 1..75: mol_type = other DNA
ggcccgatggtatggtgataaaaagcgtaaaatttatgaatgggattcccagcacggtgagcttgaagggtaccg

SEQ ID NO: 416882 - DNA, 75 bp, synthetic construct
  source 1..75: mol_type = other DNA
tcgaattgttcattaaaaagccgcttgaaaacggccttactcgtggcgaacaaatggaactggcacgtattgctc

SEQ ID NO: 416883 - DNA, 75 bp, synthetic construct
  source 1..75: mol_type = other DNA
atgatttacaaaaaacacacaacattatttttgaggcataccggaaagtactgctaattagtggcatcaaaattc

SEQ ID NO: 416884 - DNA, 75 bp, synthetic construct
  source 1..75: mol_type = other DNA
gtgagccacataactttccacaacgtgtggaatgaaaacgagctatgtgaaatgtctgcaggtccgaaggtgcct

SEQ ID NO: 416885 - DNA, 75 bp, synthetic construct
  source 1..75: mol_type = other DNA
tgaccataatccgctgctcctcattgcttctcagcgtctcagggctgtgattgaaggggcgctgagtgtcctgcc

SEQ ID NO: 416886 - DNA, 75 bp, synthetic construct
  source 1..75: mol_type = other DNA
agtcagttaacgctacaactggaggattgcggcatatcctcaaaaccagtacattacgcgcgggtgcctttcggc

SEQ ID NO: 416887 - DNA, 75 bp, synthetic construct
  source 1..75: mol_type = other DNA
cagaaacactggaagccagaagagcgtattgaagtggcagaagacctgccgctgaccgactgctacgttgccccc

SEQ ID NO: 416888 - DNA, 75 bp, synthetic construct
  source 1..75: mol_type = other DNA
catccgaaattcgcgcaatatcgcgatacgctgaataaattactccaggatgacgcatttttagcccgccacgga

SEQ ID NO: 416889 - DNA, 75 bp, synthetic construct
  source 1..75: mol_type = other DNA
gaagacgagtgctttaacaccgaatggtctaccgaatttaccctgcttaaagcctgggatgaatacctcaaagcc

SEQ ID NO: 416890 - DNA, 75 bp, synthetic construct
  source 1..75: mol_type = other DNA
cggcgacgtacagcgcggaccatcctccattgtcgctgctgtcggaaccgcgcgtcgggcgaccgatgccatcct

SEQ ID NO: 416891 - DNA, 75 bp, synthetic construct
  source 1..75: mol_type = other DNA
taaatcgttcatctttaatatgagcgtcggttacaacctcgaaggtattaagcaaccgccgatgcaacagttcat

SEQ ID NO: 416892 - DNA, 75 bp, synthetic construct
  source 1..75: mol_type = other DNA
acaactgtacccgcctggattacgacagtgcactgaatatccgcgaactgaaaaaaagtcgcgctggaaaaaggt

SEQ ID NO: 416893 - DNA, 75 bp, synthetic construct
  source 1..75: mol_type = other DNA
accaaaagcggtcaaggctgcatacgacctagcagccggcaaggcgcccgacagccacactcacccgtggagtca

SEQ ID NO: 416894 - DNA, 75 bp, synthetic construct
  source 1..75: mol_type = other DNA
aggtcgtccgcatggtttcctgcggaagttcgggttgagccgtattaagtccgtgaagccgctatgcgcggtgaa

SEQ ID NO: 416895 - DNA, 75 bp, synthetic construct
  source 1..75: mol_type = other DNA
ggaaacgttaaggcaatcactggctgagcagttggttaaacgggatgtggagatggcccgggcaggcgtaccacg

SEQ ID NO: 416896 - DNA, 75 bp, synthetic construct
  source 1..75: mol_type = other DNA
accaaaagcggtcaaggctgcatacgacctggcagccggcaaggcgcctgtcagccacactcacccgtggagtca

SEQ ID NO: 416897 - DNA, 75 bp, synthetic construct
  source 1..75: mol_type = other DNA
accaaaagcggtcaaggctgcatacgacctcgcagccggcaaggcgccggccagccacactcacccgtggagtca

SEQ ID NO: 416898 - DNA, 75 bp, synthetic construct
  source 1..75: mol_type = other DNA
accaaaagcggtcaaggctgcatacgaccttgcagccggcaaggcgcctggcagccacactcacccgtggagtca

SEQ ID NO: 416899 - DNA, 75 bp, synthetic construct
  source 1..75: mol_type = other DNA
tcgaattgttcattaaaaacccgcttgaaaacggacttactcgtggagaacaaatggaactggcacgtattgctc

SEQ ID NO: 416900 - DNA, 75 bp, synthetic construct
  source 1..75: mol_type = other DNA
agtccgttagaacacatcgaaatgttagagcagcttcgtgttctgtggtacggcgaaaaaatccatgttgctgtc

SEQ ID NO: 416901 - DNA, 75 bp, synthetic construct
  source 1..75: mol_type = other DNA
taaagtggttcttgatgctgaaggttatgcgctttacttttcacgtgccaccattccgtgggatcgtgaccgttt

SEQ ID NO: 416902 - DNA, 75 bp, synthetic construct
  source 1..75: mol_type = other DNA
tttatggctaccgtgcaggctttatccgtcgttacgtcaactggcagccaagtccgttagaacacatcgaaatgt

SEQ ID NO: 416903 - DNA, 75 bp, synthetic construct
  source 1..75: mol_type = other DNA
gaccagaaacagctggagcaatacccgctgcgtatcggtttgtccacgctggtgagcgtcaataccactaaccgt

SEQ ID NO: 416904 - DNA, 75 bp, synthetic construct
  source 1..75: mol_type = other DNA
gggcgcaaattagcccaacgacgccgctgatggcggtcgttccagccaccaatatgtgggtggatgccaacttta

SEQ ID NO: 416905 - DNA, 75 bp, synthetic construct
  source 1..75: mol_type = other DNA
ttcgtcaggttgctgataatctcgcccagcgtgaagtaggcatggctactctggctgtacccatccacagtgcgg

SEQ ID NO: 416906 - DNA, 75 bp, synthetic construct
  source 1..75: mol_type = other DNA
agttggaaatgcagttcctcctgttttagcttggcatttagcgcaagccgttgaggaatatttagacaaattata

SEQ ID NO: 416907 - DNA, 75 bp, synthetic construct
  source 1..75: mol_type = other DNA
gtggggtggggctgattggtgttgatgctattcgtggtgcggcaatgagggtcatcggtaacaagttcggtgccc

SEQ ID NO: 416908 - DNA, 75 bp, synthetic construct
  source 1..75: mol_type = other DNA
atgcctcataacccaaatacctggctggagttgttccagagctggtggcgtggagacacaccactgggcgcagta

SEQ ID NO: 416909 - DNA, 75 bp, synthetic construct
  source 1..75: mol_type = other DNA
gggtatgattttgtggtgctctgtgacgttgtcactgctctattttattgtctatatgtgttcatggagtacgta

SEQ ID NO: 416910 - DNA, 75 bp, synthetic construct
  source 1..75: mol_type = other DNA
tcctgatgatgttatttgtgttagtcgaagccggagtattgcaagtatcaggacgacagaaaatcgactggctgg

SEQ ID NO: 416911 - DNA, 75 bp, synthetic construct
  source 1..75: mol_type = other DNA
agagcgggcgtcgatggtaaacgtagtggtttatatcttgcgatggtggaagcagtcaaacgctctcgcccaaaa

SEQ ID NO: 416912 - DNA, 75 bp, synthetic construct
  source 1..75: mol_type = other DNA
atgtggtctgggtgacaaaatacgccgcctgaccgccggagtttgtttatttacacaaatttttttccccgtcat

SEQ ID NO: 416913 - DNA, 75 bp, synthetic construct
  source 1..75: mol_type = other DNA
gttgggtattgcacttggcttgcataaagcctattgggatattgattacaacagtggcgaacgctaccgctttgg

SEQ ID NO: 416914 - DNA, 75 bp, synthetic construct
  source 1..75: mol_type = other DNA
gtcagcacgtaattattttatgtgatggcgcattcgttctttatgcgcaatatcgagacggtgagttttttgatg

SEQ ID NO: 416915 - DNA, 75 bp, synthetic construct
  source 1..75: mol_type = other DNA
aggccgagcaagaacttatcgttaccattaacgaatacgccagtcagatcgcagtagaagcgacacagggggaga

SEQ ID NO: 416916 - DNA, 75 bp, synthetic construct
  source 1..75: mol_type = other DNA
tttcttcgccgggggcgaccgcagtattcgcggctataaatacaaatcgatcgctccgaaatacgccaatggtga

SEQ ID NO: 416917 - DNA, 75 bp, synthetic construct
  source 1..75: mol_type = other DNA
tagccgcacgcgttcacgcggcggcctgatgccgacctggggcgactcgcaacgctactcaatcgactattcaaa

SEQ ID NO: 416918 - DNA, 75 bp, synthetic construct
  source 1..75: mol_type = other DNA
ttgttccgtttaaagaaggtgatgaatacgagtcaaaagacctggcagagctgaaccgccgtctctccgccactg

SEQ ID NO: 416919 - DNA, 75 bp, synthetic construct
  source 1..75: mol_type = other DNA
ccagtgacaaagtgaatgtctataccgttacggccacaatgggcaaagatgttcccgttcagagccaggtaacgg

SEQ ID NO: 416920 - DNA, 75 bp, synthetic construct
  source 1..75: mol_type = other DNA
tgacaaagtgaatgtctataccgttacggccacaatgggcaaagatgttcccgttcagagccaggtaacggttgc

SEQ ID NO: 416921 - DNA, 75 bp, synthetic construct
  source 1..75: mol_type = other DNA
tatcggcgatcaaacgtcagtcacaataagcgctgttccccgacaaggaggtacaacctaccagaccttaattaa

SEQ ID NO: 416922 - DNA, 75 bp, synthetic construct
  source 1..75: mol_type = other DNA
cgttacggccacaatgggcaaagacgttcccgttcagagccaggtgacggttgcggttaaggctgatgctacaac

SEQ ID NO: 416923 - DNA, 75 bp, synthetic construct
  source 1..75: mol_type = other DNA
acactgagcagaaataataccagtgctaatcagctagtctattttattggggatacaagcagcgcgcagctccag

SEQ ID NO: 416924 - DNA, 75 bp, synthetic construct
  source 1..75: mol_type = other DNA
accggttcggtatttcactggaagagcttcgtcgtcttaatcagtttcgtacttttgctcgcggctttgataacg

SEQ ID NO: 416925 - DNA, 75 bp, synthetic construct
  source 1..75: mol_type = other DNA
cgcatgtcgatgatgataagcgtcaggagaaacaacatctgctgaatgatgctgttgaaaagctcaataagatgg

SEQ ID NO: 416926 - DNA, 75 bp, synthetic construct
  source 1..75: mol_type = other DNA
gctcgacgaccgattttctgacgctaccagggcttgtcagcgcgtttgacgacctcggctacgacgtggtggaaa

SEQ ID NO: 416927 - DNA, 75 bp, synthetic construct
  source 1..75: mol_type = other DNA
gctcgacaagcgatttcctgacgctgccaggacttgtgagtgcattcgatgaactcggctacgacgtagtggaaa

SEQ ID NO: 416928 - DNA, 75 bp, synthetic construct
  source 1..75: mol_type = other DNA
ctgaaagcgttgcgctcgacaccctgggctttgagttcctgcgtgatgtcgcaccgggtgaagcgatttacatca

SEQ ID NO: 416929 - DNA, 75 bp, synthetic construct
  source 1..75: mol_type = other DNA
aacccggatatccagcagtttgaatgctcggtgttcaacggcgtctacgtcaccaaagatgttgatcagagctat

SEQ ID NO: 416930 - DNA, 75 bp, synthetic construct
  source 1..75: mol_type = other DNA
gggctttgatttcctgcgtgacgtcgcgccgggcgaagcgatttacatcactgaagaagggcagttgtttacccg

SEQ ID NO: 416931 - DNA, 75 bp, synthetic construct
  source 1..75: mol_type = other DNA
ttgtacaactttctcggatcgcacaatccatactggcggttgacggaaagcagcgatgttttgcgcttttctacc

SEQ ID NO: 416932 - DNA, 75 bp, synthetic construct
  source 1..75: mol_type = other DNA
agtcaattaggcgcacaggttcatctggatgatttcggcacgggttactcttctctttcccaactggcacgattc

SEQ ID NO: 416933 - DNA, 75 bp, synthetic construct
  source 1..75: mol_type = other DNA
tcaataagcgtgaatggggtggaaacgcgtcagcatggcatgacacaccggcggtagctcgtgatttatcacacg

SEQ ID NO: 416934 - DNA, 75 bp, synthetic construct
  source 1..75: mol_type = other DNA
gatggctttaatattggcacgcaaaacactgctcctaatcgtcgggaatggtattctttttggaagtcagcatca

SEQ ID NO: 416935 - DNA, 75 bp, synthetic construct
  source 1..75: mol_type = other DNA
gaacagctaaccagtatctattttatgggggtggaatagccttgatgcgtggaaaatttacgcctgcgctacgta

SEQ ID NO: 416936 - DNA, 75 bp, synthetic construct
  source 1..75: mol_type = other DNA
ttacggataaagaaaaaagtaagtttgtggacttctatatgaagattactaaagccagtaaaactaaaccaaata

SEQ ID NO: 416937 - DNA, 75 bp, synthetic construct
  source 1..75: mol_type = other DNA
gaaagtgtaatacgcgccgtccatgacagccgtagcaggcttatcgatcagcatacagtcgatatgatcggcaac

SEQ ID NO: 416938 - DNA, 75 bp, synthetic construct
  source 1..75: mol_type = other DNA
tgcgcttgtcagcgatcctactgccggtgtggattgtgttcctgtttgtggcgtttaaaacgctgcgtcggaaat

SEQ ID NO: 416939 - DNA, 75 bp, synthetic construct
  source 1..75: mol_type = other DNA
tcttggcattggcccggcgattcagatggcgggtccggctgtattgctgggctacggcgtcgccgggatcattgc

SEQ ID NO: 416940 - DNA, 75 bp, synthetic construct
  source 1..75: mol_type = other DNA
ccggttcatttgcccactttgcctataaatactggggaccgtttgcgggcttcctctctggctggaactactggg

SEQ ID NO: 416941 - DNA, 75 bp, synthetic construct
  source 1..75: mol_type = other DNA
cttgtgaccggaacctgctggtatgagctgacagggctgtggcacctgttgtccgcacagggacacaacgtttac

SEQ ID NO: 416942 - DNA, 75 bp, synthetic construct
  source 1..75: mol_type = other DNA
attgtggcgctgagtgcagagcctgttgcgggatggggacgtcatctttcccgtatacgtgaactgagtgcggaa

SEQ ID NO: 416943 - DNA, 75 bp, synthetic construct
  source 1..75: mol_type = other DNA
ttctcctgatcggaacctgctggtatgagctgacaggattgttgaatctgttattagtacagggacacgacgtct

SEQ ID NO: 416944 - DNA, 75 bp, synthetic construct
  source 1..75: mol_type = other DNA
tttaccgcgccaaccagtgaagaggcgcagaccgttttgagcgggtatatcgattatatctctgcgttggtggtg

SEQ ID NO: 416945 - DNA, 75 bp, synthetic construct
  source 1..75: mol_type = other DNA
ctcgatgaagaaagcgcggtgatcccgttggtcaggatcgccgccgtacactttaacgctgaaacaaagtcatag

SEQ ID NO: 416946 - DNA, 75 bp, synthetic construct
  source 1..75: mol_type = other DNA
gacagacacaatcagcaatgattcgtctttgcagtgacatagggttactactcatagatattaacggagttgatg

SEQ ID NO: 416947 - DNA, 75 bp, synthetic construct
  source 1..75: mol_type = other DNA
agcggttgatgacaatgccagtaagaaaaaagatgagtctgcattgtatacttcctggacgctaagtttcaccgc

SEQ ID NO: 416948 - DNA, 75 bp, synthetic construct
  source 1..75: mol_type = other DNA
atgtcatcactgaatattaagcagggaagcgattctcattttcccgattatcatctggcgtcgcccagtaataat

SEQ ID NO: 416949 - DNA, 75 bp, synthetic construct
  source 1..75: mol_type = other DNA
aaactttcactaaactccacgtgctggatctcgatgtcaatatcgaccgcggtagtgtttttaatctttttatca

SEQ ID NO: 416950 - DNA, 75 bp, synthetic construct
  source 1..75: mol_type = other DNA
gcctttttaaccaaaaatggcatcaatgagaggcaaggtttcttgtttgcaaaaccgatgcccgctgtcgctttt

SEQ ID NO: 416951 - DNA, 75 bp, synthetic construct
  source 1..75: mol_type = other DNA
acaacttagcgatggggtcattttcagtaactgggaagctgcacaaggcggagcagtagccacacaagaagcaat

SEQ ID NO: 416952 - DNA, 75 bp, synthetic construct
  source 1..75: mol_type = other DNA
cacggcaaaacaatggcgaacaatttaccgggcattgggtgataagcggagccggaaaatgtgttgggctggggg

SEQ ID NO: 416953 - DNA, 75 bp, synthetic construct
  source 1..75: mol_type = other DNA
cgggaatacgcagatcatcaaaaagcaatggacgcgcttgcagaaggtgaagtcgatatagtgttatcacattta

SEQ ID NO: 416954 - DNA, 75 bp, synthetic construct
  source 1..75: mol_type = other DNA
tgatcgtctacggtttgctggttgggctgatggcatcactgatcggtggcccacttttccttaaatttctgggtc

SEQ ID NO: 416955 - DNA, 75 bp, synthetic construct
  source 1..75: mol_type = other DNA
tttaaatactatacgacagcgacatttatcgcttcagtcatcgctctggcgggcacattcctgctgtcatttatc

SEQ ID NO: 416956 - DNA, 75 bp, synthetic construct
  source 1..75: mol_type = other DNA
tggctttttcaattgccaaaaaaaccaatacctcattgttaaagctggccattccgctgtgtaccgcattgatgg

SEQ ID NO: 416957 - DNA, 75 bp, synthetic construct
  source 1..75: mol_type = other DNA
ttgctgaactctgttaaagaacacattgcagagttagaccaggagattgcggttttctgtcaacaaaatgactaa

SEQ ID NO: 416958 - DNA, 75 bp, synthetic construct
  source 1..75: mol_type = other DNA
gtgtattcatcgcatccacggtgcggctaacatcctgaatttgcaaaagttgattaatattagccatcagttaga

SEQ ID NO: 416959 - DNA, 75 bp, synthetic construct
  source 1..75: mol_type = other DNA
ccttaccgaatccaacttatgttgtaaactggcaaggtaatgtcattagtcataatagtgcttttgaacattatt

SEQ ID NO: 416960 - DNA, 75 bp, synthetic construct
  source 1..75: mol_type = other DNA
taaacatattaatcgcggatgatcatccgacaaacagacttttactcaaacgccagctaaacctattagggtatg

SEQ ID NO: 416961 - DNA, 75 bp, synthetic construct
  source 1..75: mol_type = other DNA
aaataagaacaccaataagctccattatgggcttcctggaacttctgtcgggttctggtcttagcaaggaacaac

SEQ ID NO: 416962 - DNA, 75 bp, synthetic construct
  source 1..75: mol_type = other DNA
taagcctgaaattcttcagttgctgaactctgtaaaagaacacattgcagagctggaccaggagattactgcttt

SEQ ID NO: 416963 - DNA, 75 bp, synthetic construct
  source 1..75: mol_type = other DNA
gctgatggcatcactgatcggtggcccacttttccttaaatttctgggtcaacgactgccctttaaacctgtacc

SEQ ID NO: 416964 - DNA, 75 bp, synthetic construct
  source 1..75: mol_type = other DNA
aatacagaaacgaatacgagcttaacgaagaatcttctgtcaaaattgatgatattcaatcactaacctgtaacg

SEQ ID NO: 416965 - DNA, 75 bp, synthetic construct
  source 1..75: mol_type = other DNA
ggctgcctgacggtaaccccttactacaatcgtccgtcgcaagaaggtttgtatcagcatttcaaagccatcgct

SEQ ID NO: 416966 - DNA, 75 bp, synthetic construct
  source 1..75: mol_type = other DNA
ggttacgaaactacatggattgcgcatgttaaatccgctgatattcacaaaattacccttagccagcgcagatag

SEQ ID NO: 416967 - DNA, 75 bp, synthetic construct
  source 1..75: mol_type = other DNA
tgcgtattctggcaaataccgacagtatcaccggactgccgaatcgtaacgcaatgcaggatttaatcgatcacg

SEQ ID NO: 416968 - DNA, 75 bp, synthetic construct
  source 1..75: mol_type = other DNA
gcgcggcaacttgccgatcaaaccattttcaccgaccttaaacaggtccttcaggaacttaaatttgaatactgc

SEQ ID NO: 416969 - DNA, 75 bp, synthetic construct
  source 1..75: mol_type = other DNA
tatgcggattacgttttggatataggtaagcgaataccactttccgcagcagatttaagcaacgtatacgaaagt

SEQ ID NO: 416970 - DNA, 75 bp, synthetic construct
  source 1..75: mol_type = other DNA
acttcaacgctgtcgctggctttcggctgatgtcattatggtgctggttggcctgatttgcggcatcacgctttt

SEQ ID NO: 416971 - DNA, 75 bp, synthetic construct
  source 1..75: mol_type = other DNA
acttcaacgctgtcgctggctttctgctgatgtcattatggtgctggttggcctgatttgcggcatcacgctgtt

SEQ ID NO: 416972 - DNA, 75 bp, synthetic construct
  source 1..75: mol_type = other DNA
ctcacacatacggaaaatggtttcggttctattgctaatattttgctgattatcggggccggaggcgcattcaac

SEQ ID NO: 416973 - DNA, 75 bp, synthetic construct
  source 1..75: mol_type = other DNA
agaaacagagaatgatgcgctattgctcgagtggccgcacggtaaattcttcggcgttccggtctggcacatgaa

SEQ ID NO: 416974 - DNA, 75 bp, synthetic construct
  source 1..75: mol_type = other DNA
gatcgtaataactaacaattgtaaggttagtatcaccacccctacacaaattgaacgtcctgctacacaggccac

SEQ ID NO: 416975 - DNA, 75 bp, synthetic construct
  source 1..75: mol_type = other DNA
cggcattaatcatgagtttttcaagtattgctgggggaggagggtcatggtctccaagtattagtccggagcatt

SEQ ID NO: 416976 - DNA, 75 bp, synthetic construct
  source 1..75: mol_type = other DNA
ggtgtgccatggatgcttgctgctaattctgtttgcgcaatgaaactttatgcagagtatcgcggcgagccggga

SEQ ID NO: 416977 - DNA, 75 bp, synthetic construct
  source 1..75: mol_type = other DNA
ggaagaacttattagacgttttggctttgttatctataacgccgattatgatctccggttaattcgtcagaccta

SEQ ID NO: 416978 - DNA, 75 bp, synthetic construct
  source 1..75: mol_type = other DNA
ctttactttcgtatgcccgaccgaactgggtgacgttgctgaccactacgaagaactgcagaaactgggcgtaga

SEQ ID NO: 416979 - DNA, 75 bp, synthetic construct
  source 1..75: mol_type = other DNA
cacctgtggaatcagttttaaacttttgggataatataaaaagaagaaatgctttttctggacaaaaaaatatag

SEQ ID NO: 416980 - DNA, 75 bp, synthetic construct
  source 1..75: mol_type = other DNA
ttaaaagataactactcgtttattacagaggtaaaagttgattttgcagaacatgctgttgcaggtgttctactt

SEQ ID NO: 416981 - DNA, 75 bp, synthetic construct
  source 1..75: mol_type = other DNA
atgagcattcgtatcgagattggtgagcgctatgtcgtcacaagtgaccgttttcagttcattttgcaggagaaa

SEQ ID NO: 416982 - DNA, 75 bp, synthetic construct
  source 1..75: mol_type = other DNA
cgtgacgaagagaacgatctcggcccgatggcacgttttgatttgcgtgatgagctacatcatcaggtggaaaaa

SEQ ID NO: 416983 - DNA, 75 bp, synthetic construct
  source 1..75: mol_type = other DNA
tttaaagatgcaggtattccgcaaggtgtatatggctggttaaatgctgacaacgatggtgtcagtcagatgatt

SEQ ID NO: 416984 - DNA, 75 bp, synthetic construct
  source 1..75: mol_type = other DNA
ccatttcgatcaatcccgccaatggcgaacgactttctgtgcttccctgggctggtactcatgaaattgaacatg

SEQ ID NO: 416985 - DNA, 75 bp, synthetic construct
  source 1..75: mol_type = other DNA
agggagcttttccctaagagcaggattgtgctgcccgaagaatccgtggcatctaatgccaggggcttctggttc

SEQ ID NO: 416986 - DNA, 75 bp, synthetic construct
  source 1..75: mol_type = other DNA
atcggcgaatttgtgtgactggtatgcagagcatggcccggcaatgctgaaagcggaaccaacgctggttgagaa

SEQ ID NO: 416987 - DNA, 75 bp, synthetic construct
  source 1..75: mol_type = other DNA
acccgtgaaatgggtaaacccatcagacaggcgcgtgccgaagtggcgaaatcggcgaatttgtgtgactggtat

SEQ ID NO: 416988 - DNA, 75 bp, synthetic construct
  source 1..75: mol_type = other DNA
ctggtgatttaggggggaagttgacgcctaagatgtatcaggaaggtatgattttgaatccggattggcgttatg

SEQ ID NO: 416989 - DNA, 75 bp, synthetic construct
  source 1..75: mol_type = other DNA
aagcaaaattgaggcgcttgaaaaacaacaagaactcgacaagcgcaagatagaacactttgaaaaacaacaaac

SEQ ID NO: 416990 - DNA, 75 bp, synthetic construct
  source 1..75: mol_type = other DNA
catcaacgcattagcaaaatggcagcaattgctatttagtaccgcaatgaactcctccctgaaattattaccagg

SEQ ID NO: 416991 - DNA, 75 bp, synthetic construct
  source 1..75: mol_type = other DNA
caacaagttaacgtcataaacagtacaaaaatgcttgctaccgtcatcaagagcattaaagatcaacaggataca

SEQ ID NO: 416992 - DNA, 75 bp, synthetic construct
  source 1..75: mol_type = other DNA
atgcgtaaaggatctgataatgcgtgctttttctcggccaactcggtgcagaaacccaaaaaattccccaaaacc

SEQ ID NO: 416993 - DNA, 75 bp, synthetic construct
  source 1..75: mol_type = other DNA
cggcggtaatcggcaactttgcctttaagaacaccacgccggatatgaagttgctgaaatatatcagccaggtca

SEQ ID NO: 416994 - DNA, 75 bp, synthetic construct
  source 1..75: mol_type = other DNA
aagctctgagaagagttaccagaacgtcccagaaagaattgggtaaattttgtggagtaagtgacgttgctgtgg

SEQ ID NO: 416995 - DNA, 75 bp, synthetic construct
  source 1..75: mol_type = other DNA
aacactgtcatcagcggtaaaacggtcccgatgttacgggcgtttaaagtggcaaaacaggaggctggcaatggt

SEQ ID NO: 416996 - DNA, 75 bp, synthetic construct
  source 1..75: mol_type = other DNA
attagtcccgatgcgctactaaatgaaaccattttattgttcggggattctttctttagaatgatgctaaaacat

SEQ ID NO: 416997 - DNA, 75 bp, synthetic construct
  source 1..75: mol_type = other DNA
aatatgccaaatggcaacaactgctatttagcaccaccatgaactccacgctgaaattattaccgggtcaatggc

SEQ ID NO: 416998 - DNA, 75 bp, synthetic construct
  source 1..75: mol_type = other DNA
ccgctgttattggtaattacgctttcgataataccgccgccgatatgaagctgctgaaatatatcagcgcagtca

SEQ ID NO: 416999 - DNA, 75 bp, synthetic construct
  source 1..75: mol_type = other DNA
aatcagaaagctacgatattgcccgtcagggcgtgactgcttttatcactgcgctgttacaaagtgatgaagagg

SEQ ID NO: 417000 - DNA, 75 bp, synthetic construct
  source 1..75: mol_type = other DNA
tctgtctggcgactggcgcaagatggaatgaagcggcaacactcaaaagttcccagatagctggcggaaaagtca

SEQ ID NO: 417001 - DNA, 75 bp, synthetic construct
  source 1..75: mol_type = other DNA
tggcgcgcgtccggttgatttacatatttccggccttgagcaattaggcgcgaccatcaagctgaaagaaggtta

SEQ ID NO: 417002 - DNA, 75 bp, synthetic construct
  source 1..75: mol_type = other DNA
gattgtctggaagcgaacggtatacgccgatgtgacatggctgtatgactcgctggcgttgatgcaccgtgacct

SEQ ID NO: 417003 - DNA, 75 bp, synthetic construct
  source 1..75: mol_type = other DNA
atatcacactgggagatgttattagcacattcccctttaataatgacctcatcgagatggatttgacgggccgcg

SEQ ID NO: 417004 - DNA, 75 bp, synthetic construct
  source 1..75: mol_type = other DNA
atgccgccgatcgccgtctttactctttgctggcagattgcgctgggtggtcagcttgggccggctgtcgctacc

SEQ ID NO: 417005 - DNA, 75 bp, synthetic construct
  source 1..75: mol_type = other DNA
gcgctgttcgccttaagtttacccatgcaaggactatggtggctgggcaagcgttctgtaacgccattacctcct

SEQ ID NO: 417006 - DNA, 75 bp, synthetic construct
  source 1..75: mol_type = other DNA
tgtggaacgtttaggcggtggcgtctaccgcgtgctaccggatcgtattgagaccggcacgttcctggtcgctgc

SEQ ID NO: 417007 - DNA, 75 bp, synthetic construct
  source 1..75: mol_type = other DNA
ccgggacacgaatggtttcaggataatgccccgggtaatgactccaacttattgatagtgttttatgttcagata

SEQ ID NO: 417008 - DNA, 75 bp, synthetic construct
  source 1..75: mol_type = other DNA
acaattgaccgctgaaccttatgcgtttggtgagcaactaacgctggtggactgttatctttgcaccatgcgcac

SEQ ID NO: 417009 - DNA, 75 bp, synthetic construct
  source 1..75: mol_type = other DNA
tattcagcgacagtgtcgatcgctatgcggatctgcttgccggagcgcaccagcttggtgagcgcgtcaatgcag

SEQ ID NO: 417010 - DNA, 75 bp, synthetic construct
  source 1..75: mol_type = other DNA
acatgtccgatgtcgtgatcgattatttgaagaaaggccacaagattacgcctgcacaggtaaatgaaatgcggg

SEQ ID NO: 417011 - DNA, 75 bp, synthetic construct
  source 1..75: mol_type = other DNA
atataaatgcaggcacgattacctttggtgacattaccagtacattccccttcaagaatgaacttactgaaatgg

SEQ ID NO: 417012 - DNA, 75 bp, synthetic construct
  source 1..75: mol_type = other DNA
ccgggacacgaatggtttcaggataatgccccgaatattaatgcgattgctgatgctgtatgtcagataccgaaa

SEQ ID NO: 417013 - DNA, 75 bp, synthetic construct
  source 1..75: mol_type = other DNA
aagagaagctggccagaagaataaactatgttctgggggctgtcagcatagccagtttctgcatctcgctgttcc

SEQ ID NO: 417014 - DNA, 75 bp, synthetic construct
  source 1..75: mol_type = other DNA
cacggcgtagctttgcgcaatggtcaaaaacgtaaagacgctatgacttgggcggctgagtgcatgggatttcca

SEQ ID NO: 417015 - DNA, 75 bp, synthetic construct
  source 1..75: mol_type = other DNA
ggtaaagtcacgttcgtcaaaaccaaagggaagcgcaacagaacaattccccttgatgatgaacttctgtccgaa

SEQ ID NO: 417016 - DNA, 75 bp, synthetic construct
  source 1..75: mol_type = other DNA
ttagttgtggtgtgtatatagacgcaacggctacagctataaatgttggcataagaaattatggttcaggaaatg

SEQ ID NO: 417017 - DNA, 75 bp, synthetic construct
  source 1..75: mol_type = other DNA
ggagaacgtcagacagtaccgtacagatgaaactgaaatggcatttctcactgctgaggaaattgatcggctttt

SEQ ID NO: 417018 - DNA, 75 bp, synthetic construct
  source 1..75: mol_type = other DNA
aagggaagcgcaacagaacaatcccccttgatgatgaacttctatccgaattgcctgaaacgaaaggcgctctgt

SEQ ID NO: 417019 - DNA, 75 bp, synthetic construct
  source 1..75: mol_type = other DNA
cacggagtagctttgcgcaatggtcaaaagcgcaaagacgctatgacctgggcggcagagtgcatgggattcccg

SEQ ID NO: 417020 - DNA, 75 bp, synthetic construct
  source 1..75: mol_type = other DNA
atgcagctctacttcaacattggtggagaagccgtgttgcggtctgtgaaccacggcagcctggcggctgcaaat

SEQ ID NO: 417021 - DNA, 75 bp, synthetic construct
  source 1..75: mol_type = other DNA
aagtgtacgtacttcacctctgttaatcaaagaacctgcgttgaatgtccgttctgcaaagaacaaggaaggcat

SEQ ID NO: 417022 - DNA, 75 bp, synthetic construct
  source 1..75: mol_type = other DNA
ggaaaaatatgtggctatgtgctcaaacataaaagcaagctggatgagcttttagtcagggaaaaggagacacaa

SEQ ID NO: 417023 - DNA, 75 bp, synthetic construct
  source 1..75: mol_type = other DNA
cgattgctgatgctgtatgtcagggtaatgactccaacttattgatagtgttttatgttcagataatgcccgatg

SEQ ID NO: 417024 - DNA, 75 bp, synthetic construct
  source 1..75: mol_type = other DNA
aatcgctttatatctggctgaattcacaattgaccgctgaaccttatgcctttggtgagcaactaacgctggtgg

SEQ ID NO: 417025 - DNA, 75 bp, synthetic construct
  source 1..75: mol_type = other DNA
aaaatcatcatgatcgagacaggcctgacctacaaacaggtcaggcggctttaccaggacctagagagggacgga

SEQ ID NO: 417026 - DNA, 75 bp, synthetic construct
  source 1..75: mol_type = other DNA
cagtacctcataaaaaaatattccagccaggctattgaggagctgataaacgaagacgatgaagacgatgacgac

SEQ ID NO: 417027 - DNA, 75 bp, synthetic construct
  source 1..75: mol_type = other DNA
ccaacccacacgaagccgctcaacagattattgttgagcttatcagagccggtaatcttgcccctggcattgacg

SEQ ID NO: 417028 - DNA, 75 bp, synthetic construct
  source 1..75: mol_type = other DNA
acaatgtgggatgcaacttccagccagctgacgcttaacgtcatgacctgggttgcggtggttctggtaccgatc

SEQ ID NO: 417029 - DNA, 75 bp, synthetic construct
  source 1..75: mol_type = other DNA
aatggtcatcaccgaatgcgctaagttctctactcgcggtctattccgatcatatctatcgcaaccaaccaacga

SEQ ID NO: 417030 - DNA, 75 bp, synthetic construct
  source 1..75: mol_type = other DNA
gaaatcaatggcaaacttatctggagtaataccggctatctgatcaactggtatttgactgagatgaagcagtta

SEQ ID NO: 417031 - DNA, 75 bp, synthetic construct
  source 1..75: mol_type = other DNA
gcagaagcagtacggtcgacgatcgcagaaaatcgtgaacatttgctggagtttatccgcctggatgaacccgcc

SEQ ID NO: 417032 - DNA, 75 bp, synthetic construct
  source 1..75: mol_type = other DNA
aaacccatcgccgggcgcgacccgcaatcggaagatctggcgctgacgcagcgttgcttgataaagggggatgtt

SEQ ID NO: 417033 - DNA, 75 bp, synthetic construct
  source 1..75: mol_type = other DNA
agcgtgcgctgtttccactatttccgcgccgtctgcgccatgaccagtgcaacgctgtttgaacgctatcgcggc

SEQ ID NO: 417034 - DNA, 75 bp, synthetic construct
  source 1..75: mol_type = other DNA
ggttgtgcaggcactagaagcgacgggagagatcaacggcaaacttatctggagtaataccggttatttgatcaa

SEQ ID NO: 417035 - DNA, 75 bp, synthetic construct
  source 1..75: mol_type = other DNA
caatggcattaacagccatattagtcttaaaagactcgtccaacatatggctcaacattacttttattgcattat

SEQ ID NO: 417036 - DNA, 75 bp, synthetic construct
  source 1..75: mol_type = other DNA
ttgcggttgcacagtctgcgataacagacaatgtggcccccccacagacgctgcctgcactgaccgaaaagctgg

SEQ ID NO: 417037 - DNA, 75 bp, synthetic construct
  source 1..75: mol_type = other DNA
cgctgtgaccctggggacgctgcaggcagcctgcagacataaaaggcagacactatcttcacagaccctgctttt

SEQ ID NO: 417038 - DNA, 75 bp, synthetic construct
  source 1..75: mol_type = other DNA
tgatccgcgagaataagccgctgatctccctgtgggcgcaatggtacatcggcctgatggtgccgccattaatgc

SEQ ID NO: 417039 - DNA, 75 bp, synthetic construct
  source 1..75: mol_type = other DNA
ctgaccggtgaacaacctgcggcccagccggtgcctgtaagcgccccggcggcaaccaccgcagcggtaagcgca

SEQ ID NO: 417040 - DNA, 75 bp, synthetic construct
  source 1..75: mol_type = other DNA
gaaaatctacgatacctcatcacaaccacttagccagatcttaagccaggttcagcaggatggcgcgagtattgt

SEQ ID NO: 417041 - DNA, 75 bp, synthetic construct
  source 1..75: mol_type = other DNA
gccgcaaaccgtggatggcgttgccagcccggcacaagcctcggttagcgatctgaccggtgaacagcctgcggc

SEQ ID NO: 417042 - DNA, 75 bp, synthetic construct
  source 1..75: mol_type = other DNA
agccggtgcctgtaagcgccccggcgacaagcaccgcagcggtaagcgcacccgcgaatccatccgcagagctga

SEQ ID NO: 417043 - DNA, 75 bp, synthetic construct
  source 1..75: mol_type = other DNA
aaaactctgctggcagtagaaattaaactggcacagaaagattttactggcgcgcaaaccttgctggttaaaatt

SEQ ID NO: 417044 - DNA, 75 bp, synthetic construct
  source 1..75: mol_type = other DNA
ctgaaaaataacgttgaagagttgcttaagagcaacaccccgctgaacgtgctggcactgaaccagccggagaat

SEQ ID NO: 417045 - DNA, 75 bp, synthetic construct
  source 1..75: mol_type = other DNA
ggttgcggtggttctggtaccgatcattctgctctacaccgcctggtgctactggaaaatgttcggtcgtatcac

SEQ ID NO: 417046 - DNA, 75 bp, synthetic construct
  source 1..75: mol_type = other DNA
aatggtcatcaccgaatacgctaagttctcaactggcggtctattccgatcatatctaccgcaaccaacccttga

SEQ ID NO: 417047 - DNA, 75 bp, synthetic construct
  source 1..75: mol_type = other DNA
atggcctatcgttccgcaccgctctatgaagatgtcatctggcgaacgcatctccagccgcaggatcccacgctt

SEQ ID NO: 417048 - DNA, 75 bp, synthetic construct
  source 1..75: mol_type = other DNA
acaacccgggcgcgaaaatgttgccaacacagttggtaaacgtaaaagcgtttaaacctgcgtcaaccaataaaa

SEQ ID NO: 417049 - DNA, 75 bp, synthetic construct
  source 1..75: mol_type = other DNA
taactttactggagtatgctttaacattattgactgagcttgagtataaccttctttccggaaaatgttttatta

SEQ ID NO: 417050 - DNA, 75 bp, synthetic construct
  source 1..75: mol_type = other DNA
gccccggctcaccgaattttcataaatcgaacgccctgaaaaccatgcgtaatcagccgcagctgcaggggaaat

SEQ ID NO: 417051 - DNA, 75 bp, synthetic construct
  source 1..75: mol_type = other DNA
ggtagtgcaggcattagaagcgactggagagattaacggcaaacttatctggagtaataccggttatttgatcaa

SEQ ID NO: 417052 - DNA, 75 bp, synthetic construct
  source 1..75: mol_type = other DNA
ttagccgaagtgctcgccagtggtgaagccaatctcttcaactgcgcgcgtaatattgcctgcgccattaaaata

SEQ ID NO: 417053 - DNA, 75 bp, synthetic construct
  source 1..75: mol_type = other DNA
cagcattctgccgcgtctggcacctttagccgaagtgctcgccagtggtgaagccaatctcttcaactgcgcgcg

SEQ ID NO: 417054 - DNA, 75 bp, synthetic construct
  source 1..75: mol_type = other DNA
aggcgctggcggcaaacggtggcaatttagcgcgagtggcaagcattgagatggaggaatgcgatccgcgtctgg

SEQ ID NO: 417055 - DNA, 75 bp, synthetic construct
  source 1..75: mol_type = other DNA
aggtgctggcggctaacggcggcaatttagcgcgcgtggcaagcattgagatggatgaatgcgatccgcgtctgg

SEQ ID NO: 417056 - DNA, 75 bp, synthetic construct
  source 1..75: mol_type = other DNA
cagtatactgccgcggctggcacctttagccgaagtgcttgccagtggtgaaaccaatctctttaacagcgcgcg

SEQ ID NO: 417057 - DNA, 75 bp, synthetic construct
  source 1..75: mol_type = other DNA
acatcgtgaagcttgaagtctgcgggccgatgggcgaaacagtgaatgctttttatggccttaccggcgacggga

SEQ ID NO: 417058 - DNA, 75 bp, synthetic construct
  source 1..75: mol_type = other DNA
ctcccatcgttaacttcgccggatgcctgggaaaagcaccttgcagaaggtgcagccgcgtttatgcgttttagg

SEQ ID NO: 417059 - DNA, 75 bp, synthetic construct
  source 1..75: mol_type = other DNA
aggggatatcaaaggtatccaacgtgcagctacaatatatcctctcttgttggcttttccgatgcgttttgtgcc

SEQ ID NO: 417060 - DNA, 75 bp, synthetic construct
  source 1..75: mol_type = other DNA
ttcaggcttgaataccattggcatctctatttttggactctgtgccgtcctcttatatatgcagtcacaaaatac

SEQ ID NO: 417061 - DNA, 75 bp, synthetic construct
  source 1..75: mol_type = other DNA
cgtccgtttccgttacctactcacgcagcggagcatcgaccaaggctaatgctcttgggatgcggcctatgcaag

SEQ ID NO: 417062 - DNA, 75 bp, synthetic construct
  source 1..75: mol_type = other DNA
ggtcgcggcggcaatctcggccaagcgtacctcgatcacacctgaagatgccaaggtgatcgccaagcgtgccgc

SEQ ID NO: 417063 - DNA, 75 bp, synthetic construct
  source 1..75: mol_type = other DNA
cccatcgttaacttcaccggatgcctgggagaagcaccttgccgagggcgcagctgcgtttatgcgtttcagggc

SEQ ID NO: 417064 - DNA, 75 bp, synthetic construct
  source 1..75: mol_type = other DNA
aaacggcggtgattgagatggcggcggcaagtggcctgatgctggtcgcgcctgaaaagcgtaatccgttgctgg

SEQ ID NO: 417065 - DNA, 75 bp, synthetic construct
  source 1..75: mol_type = other DNA
tgacctatatgttccgcttccgttacccacagccacccaaagttggagaaactccatttaaagggcgtagcatta

SEQ ID NO: 417066 - DNA, 75 bp, synthetic construct
  source 1..75: mol_type = other DNA
accactatcaggttgcatttggcggcaaaggcgcgaatcaggcggtggctgctgggcgtagcggtgcgaatatcg

SEQ ID NO: 417067 - DNA, 75 bp, synthetic construct
  source 1..75: mol_type = other DNA
gcaattgctggatatgcagtttgattccggttactggataaccagtttgtatcaggtaaaagaggccaaatggca

SEQ ID NO: 417068 - DNA, 75 bp, synthetic construct
  source 1..75: mol_type = other DNA
tctttattcagggaaaacggatatgaccttcagaccggagcatggttctgtcttatttccgctcatctatatagc

SEQ ID NO: 417069 - DNA, 75 bp, synthetic construct
  source 1..75: mol_type = other DNA
acgacggcctgttggtgcgccgtacctgctgccaacgttatcgcttgccggatgtacagcaatgcggcgactgta

SEQ ID NO: 417070 - DNA, 75 bp, synthetic construct
  source 1..75: mol_type = other DNA
atgccagttagccgttatctctgcattttcataaacgttggtttgggagaagcggcaaaacgggacgtgggaaca

SEQ ID NO: 417071 - DNA, 75 bp, synthetic construct
  source 1..75: mol_type = other DNA
gtggtcgtggaatttaagtctctgacaggtcgcagccggacagtatgtgtcgggtgtggttattccggtgttcgg

SEQ ID NO: 417072 - DNA, 75 bp, synthetic construct
  source 1..75: mol_type = other DNA
actctgtgtaaatacggtgtcccctcgattacaggtcagaaaaaaatggtattaaaactcacatccaggtgggta

SEQ ID NO: 417073 - DNA, 75 bp, synthetic construct
  source 1..75: mol_type = other DNA
cattagattataatggcaaggcaaattattctcttgagataacaagacatgtagccactataaccgatgacgcag

SEQ ID NO: 417074 - DNA, 75 bp, synthetic construct
  source 1..75: mol_type = other DNA
tgatgccgagcaaacctggcattttagaaaagtgggcattgcaggcgtaacgcttgagaagatgccaaatgaaga

SEQ ID NO: 417075 - DNA, 75 bp, synthetic construct
  source 1..75: mol_type = other DNA
tcaacccgtcatggcgatggatggcaaggttggcaggcacgtgcgccgtttgacgctatcattgttacggcggca

SEQ ID NO: 417076 - DNA, 75 bp, synthetic construct
  source 1..75: mol_type = other DNA
catcatcacagccgatcaccaatttacatttacaaaatgaagctatccgttttgccgatcttaatttacccgtag

SEQ ID NO: 417077 - DNA, 75 bp, synthetic construct
  source 1..75: mol_type = other DNA
gttgaaggcttccgccaggcacgggatgaaggctgcgaagaggcttatcgtctctgggtggaggataccggtgag

SEQ ID NO: 417078 - DNA, 75 bp, synthetic construct
  source 1..75: mol_type = other DNA
ccttgctggaggatgcattaacattattggctgatctcgaatacaatcttctttctggcaaattttttatcgttt

SEQ ID NO: 417079 - DNA, 75 bp, synthetic construct
  source 1..75: mol_type = other DNA
cgctatggccagtattggctctcgccattattttctgcgtcatcggtttcaggatgtttgaagtggtcaacaaaa

SEQ ID NO: 417080 - DNA, 75 bp, synthetic construct
  source 1..75: mol_type = other DNA
tgttacgctggatagccaagaacctgccactgggcaacgttcacacatagatagcgtgtttgattttgcctgtgg

SEQ ID NO: 417081 - DNA, 75 bp, synthetic construct
  source 1..75: mol_type = other DNA
aagggaagaggccagaaagctggtagctgctggtatcgatcctcgtgagcataagcgtgctgtgaaagaagagca

SEQ ID NO: 417082 - DNA, 75 bp, synthetic construct
  source 1..75: mol_type = other DNA
atgtctgttgttgcacctgctgtatacgttggaacctggcataaatacaactgtggaagcatcgctggccgctgg

SEQ ID NO: 417083 - DNA, 75 bp, synthetic construct
  source 1..75: mol_type = other DNA
acaggggcgtcaggagtgggagcggcgtcttgctgccctgactgcgcggcgacgggggaacccgggatataaact

SEQ ID NO: 417084 - DNA, 75 bp, synthetic construct
  source 1..75: mol_type = other DNA
atcattgcgctgatctccaaaccgcctgcgcctgcggtggcccgcaaagtgctggaacgtgcgcgcgcctgccgc

SEQ ID NO: 417085 - DNA, 75 bp, synthetic construct
  source 1..75: mol_type = other DNA
gcagcatcaaacacaccttcctcgactttggcgatgatgacttcaccaacggcaagccgcatccaatgattgacc

SEQ ID NO: 417086 - DNA, 75 bp, synthetic construct
  source 1..75: mol_type = other DNA
gtggctttattattgacagcgttaaacgggactttcagtcccgttaccagaccagttttttaggcgcggcatggc

SEQ ID NO: 417087 - DNA, 75 bp, synthetic construct
  source 1..75: mol_type = other DNA
attttttgacagcgcaatgttcaatgccggtgagaatggttccgctaattcgatgtttattcagtccatttcccc

SEQ ID NO: 417088 - DNA, 75 bp, synthetic construct
  source 1..75: mol_type = other DNA
tggcattatcagttttcttaattagcggatgtaaagaagaggctaaaacaaccaaatggtataaagaccatccag

SEQ ID NO: 417089 - DNA, 75 bp, synthetic construct
  source 1..75: mol_type = other DNA
ggtaaaacatacggtgagagaaataaccgcctttgcaagataatcaaagaaattgctgatgggttgaaacagttc

SEQ ID NO: 417090 - DNA, 75 bp, synthetic construct
  source 1..75: mol_type = other DNA
aatgaagcggaatacttccagttatccgtagtgatggatgatctggatgaaataatttttatgtcagactgtata

SEQ ID NO: 417091 - DNA, 75 bp, synthetic construct
  source 1..75: mol_type = other DNA
ataacccacgtggcttgatattcaatgactacaagttagccagacgttatgcagtcaatcgtaaaggcatactac

SEQ ID NO: 417092 - DNA, 75 bp, synthetic construct
  source 1..75: mol_type = other DNA
ttttacttaggcaatggctttactgcgacacttgatttcctgcttaaaccaaaaacgctacgtgatacacgcgct

SEQ ID NO: 417093 - DNA, 75 bp, synthetic construct
  source 1..75: mol_type = other DNA
ttattaccttgcaaacaggtttaaatttttctccgatcaccgtttcacacaatatccatgctggaacacagctta

SEQ ID NO: 417094 - DNA, 75 bp, synthetic construct
  source 1..75: mol_type = other DNA
agactgcggaaacgcttcataaatggtgtctgcagaagaaaataatgctgagtgtcaatatttcccgggtggtag

SEQ ID NO: 417095 - DNA, 75 bp, synthetic construct
  source 1..75: mol_type = other DNA
aaaatctgcgcatctgtttttttcagaagtgcacctccggatattcagtacaaaatactcatcagtcagttgaag

SEQ ID NO: 417096 - DNA, 75 bp, synthetic construct
  source 1..75: mol_type = other DNA
aaatgcactcctggcagacgcagcccgcagttcagtgcttactgtacgctgccaccggtgcccgggtttgtctgc

SEQ ID NO: 417097 - DNA, 75 bp, synthetic construct
  source 1..75: mol_type = other DNA
gctcgttgtggagaagcaaattggtgcggcaaaagaacggtacaaccaatacttagcagaattgggtcttccttt

SEQ ID NO: 417098 - DNA, 75 bp, synthetic construct
  source 1..75: mol_type = other DNA
aattgctgatgggttgaaacagttcactaccgacagtgacacattgggggatgcttacgaatatttaatcggtca

SEQ ID NO: 417099 - DNA, 75 bp, synthetic construct
  source 1..75: mol_type = other DNA
atatcacagcgtgtcgtatttcatttacgtctttcgaaattattatgggatgacgcccacagagtatcaggagcg

SEQ ID NO: 417100 - DNA, 75 bp, synthetic construct
  source 1..75: mol_type = other DNA
ttcatcgaaattggtttatttgaatgttctcaaggccatataacatgcttaaagttattgaaaaggctggaccaa

SEQ ID NO: 417101 - DNA, 75 bp, synthetic construct
  source 1..75: mol_type = other DNA
acgcggctggagcgatttttgtccgctgaaagaggggcgttatgtcagcttccctgaagaatcaacaaggcttta

SEQ ID NO: 417102 - DNA, 75 bp, synthetic construct
  source 1..75: mol_type = other DNA
gcttaaccagccgttgattgcggatgtgcgtgcgcgtctgcaaccgcagcagaaatacattcgtggcctgttctg

SEQ ID NO: 417103 - DNA, 75 bp, synthetic construct
  source 1..75: mol_type = other DNA
caggaattacaggccagtaacaaacctgaatatctggggccggggacgctttcccgggcggaatacgcccgttgc

SEQ ID NO: 417104 - DNA, 75 bp, synthetic construct
  source 1..75: mol_type = other DNA
tccgcgccagcctgatttgctatggacattcgattccattgctgagttggatagttccttcggaaaaacagcaaa

SEQ ID NO: 417105 - DNA, 75 bp, synthetic construct
  source 1..75: mol_type = other DNA
tcggatcagaaataacgttcagtattgcctcgataacgcgcctgaaagatggttaaaagtgtcggattgccctga

SEQ ID NO: 417106 - DNA, 75 bp, synthetic construct
  source 1..75: mol_type = other DNA
atttcttagtcggcgcaaacgatgttattgatgatttacttctgagaaatagatttgaaaacataaaatgtgtta

SEQ ID NO: 417107 - DNA, 75 bp, synthetic construct
  source 1..75: mol_type = other DNA
tacgatatcagcgttgacctgcgccgcaaaatcatccgccagtacggcattcaatcgctggtcgacgcgccagtg

SEQ ID NO: 417108 - DNA, 75 bp, synthetic construct
  source 1..75: mol_type = other DNA
ttactgtaaatactactgaccccaaaaataataaagaatttctttggcttagttatagtatgaatcacttaagac

SEQ ID NO: 417109 - DNA, 75 bp, synthetic construct
  source 1..75: mol_type = other DNA
actgaacgattaccagcgtcgcgagaaaactcttctggcagtagaaattaagctggcgcagaaagattttgctgg

SEQ ID NO: 417110 - DNA, 75 bp, synthetic construct
  source 1..75: mol_type = other DNA
tgaggagttgctcaagagcaacaccccgctgaacgtgctggcactcaatcagccggaaaatatcgaaaaccgcgc

SEQ ID NO: 417111 - DNA, 75 bp, synthetic construct
  source 1..75: mol_type = other DNA
agcaggcgcgttactggcaggcaaaaatcgatgccagtcagggacgtccttccattgatttactgcgcgcattaa

SEQ ID NO: 417112 - DNA, 75 bp, synthetic construct
  source 1..75: mol_type = other DNA
cagaagtgtcactgcgtgcagagtcacgacttactgaacgcagtcagacgacgatcccggcagtaatacgcgatg

SEQ ID NO: 417113 - DNA, 75 bp, synthetic construct
  source 1..75: mol_type = other DNA
gatagcggctataccttttacaccattttcaaaggtgatgacggtaagtggaagaaaggtcaaaaagtggttaag

SEQ ID NO: 417114 - DNA, 75 bp, synthetic construct
  source 1..75: mol_type = other DNA
taattgcgtacgcaagacataaatatattctcaccatggttaatggtgaatatcgctattttaatggcggtgatc

SEQ ID NO: 417115 - DNA, 75 bp, synthetic construct
  source 1..75: mol_type = other DNA
taaaaacagtctcaagttataaaaatgacttaatgaaaaggttaaatgtctgtaataatatagaattgttttaca

SEQ ID NO: 417116 - DNA, 75 bp, synthetic construct
  source 1..75: mol_type = other DNA
gtgcacaagaaactgctggatgcgctgcctttcctgtcggccgatccttcagcttgccggtgggtgtgcctgcag

SEQ ID NO: 417117 - DNA, 75 bp, synthetic construct
  source 1..75: mol_type = other DNA
gttattcgatacccagttgatgctgtttgccaaacggttaagtacgctcgatcttaacgaaatcaatgcggcaga

SEQ ID NO: 417118 - DNA, 75 bp, synthetic construct
  source 1..75: mol_type = other DNA
agcgcctgacgctaacaagttacgcgagatcttcggcaagtgctggaagctattgcctaaggattcagaacaaca

SEQ ID NO: 417119 - DNA, 75 bp, synthetic construct
  source 1..75: mol_type = other DNA
atagctttattactgaaatggttatgaactattctggatgttcagtctccctccctaattcagcagactcctggt

SEQ ID NO: 417120 - DNA, 75 bp, synthetic construct
  source 1..75: mol_type = other DNA
ctcagcgcacgtgatctgagtagtcgtttcaatggcactgttgcaaagttagcgatgaggcagccttttgtctta

SEQ ID NO: 417121 - DNA, 75 bp, synthetic construct
  source 1..75: mol_type = other DNA
atgttatttggaatgactatatttcatacaacacattctgttatcgaaaagggggatgctgtgcacaagaaactg

SEQ ID NO: 417122 - DNA, 75 bp, synthetic construct
  source 1..75: mol_type = other DNA
agaaaatccaggataaacttctggatcctaaagaacttagaaaaaaaagaaatgatatctttaaaaacatggcta

SEQ ID NO: 417123 - DNA, 75 bp, synthetic construct
  source 1..75: mol_type = other DNA
atttcctgatcgggatcaacaaaacaattgaagatgttatccagaaaaataaatttaatggcgtgaaaaatatta

SEQ ID NO: 417124 - DNA, 75 bp, synthetic construct
  source 1..75: mol_type = other DNA
agatgttttttgttttttacagttcaataacattaattttaggtgttcggataccattttttatgctccccctga

SEQ ID NO: 417125 - DNA, 75 bp, synthetic construct
  source 1..75: mol_type = other DNA
gatgcttacgcgaagcagacaggccagcagccgcgacaacagaaaaacccaccaaaacaacaaccgcagcagaag

SEQ ID NO: 417126 - DNA, 75 bp, synthetic construct
  source 1..75: mol_type = other DNA
ttgcgctggtagcggaagaactgcgcgccaatcattctggcgaacgaattgtggcgcgttttgaggatgaggacg

SEQ ID NO: 417127 - DNA, 75 bp, synthetic construct
  source 1..75: mol_type = other DNA
cgcgccaaagaatcagtacaactcattcggtaaatataaatacagaagctgcgaagatattcttgaaggcgttaa

SEQ ID NO: 417128 - DNA, 75 bp, synthetic construct
  source 1..75: mol_type = other DNA
caccgatgtagtaaacggctctcaattgtacgacctgcagcaggatgccctgttgtggaacggcactgcattcag

SEQ ID NO: 417129 - DNA, 75 bp, synthetic construct
  source 1..75: mol_type = other DNA
caggatgctctgttgtggaacggcacagcattcagtgccgcacacggcaccgaagccaccagcaaaatcactaac

SEQ ID NO: 417130 - DNA, 75 bp, synthetic construct
  source 1..75: mol_type = other DNA
acagcattcagtgccgcacacggcaccgaagccaccagcaaaatcactaacgtcaccgctggcaacctgactgcc

SEQ ID NO: 417131 - DNA, 75 bp, synthetic construct
  source 1..75: mol_type = other DNA
ttgtgacgacttcgtccaggcgatggaagatgcgtcgaatgtcgatctttcccatttccgccgttggtacagcca

SEQ ID NO: 417132 - DNA, 75 bp, synthetic construct
  source 1..75: mol_type = other DNA
tgaaatgggatgaagagcgcttcggtctggagtatgacctcgacatctatatgattgttgcggtggacttcttca

SEQ ID NO: 417133 - DNA, 75 bp, synthetic construct
  source 1..75: mol_type = other DNA
gcggcgaatactgcgctggaagggctttatcagtcaggcgatgcgctttgcacccagtgtgaagccgaaggtttc

SEQ ID NO: 417134 - DNA, 75 bp, synthetic construct
  source 1..75: mol_type = other DNA
ctctttgcatattgcaagctttaagaaaatgagtaaacaggtcattgacgtatatctgaatgcggcgattcgcct

SEQ ID NO: 417135 - DNA, 75 bp, synthetic construct
  source 1..75: mol_type = other DNA
accgaagccaccagcaaaatcactaacgtcaccgctggcaacctgactgccggcagcactgacgccgttaacggc

SEQ ID NO: 417136 - DNA, 75 bp, synthetic construct
  source 1..75: mol_type = other DNA
atggcaccgcgttcagcgccgcgcacggcaccgaagccaccagcaaaatcaccaacgtcaaagacggtgacctga

SEQ ID NO: 417137 - DNA, 75 bp, synthetic construct
  source 1..75: mol_type = other DNA
ttatcacttgccagtgcagcgaacgctattgcgatgggggcagacagtagcagttcgaacgataacgccatcgcg

SEQ ID NO: 417138 - DNA, 75 bp, synthetic construct
  source 1..75: mol_type = other DNA
actgggcaacaacagtaatgcggggggcaaaaacagccttgctttcggttttaacaccaccgcaaatggtgataa

SEQ ID NO: 417139 - DNA, 75 bp, synthetic construct
  source 1..75: mol_type = other DNA
cagcaagattaccaacgttgcaaatggtgacatattagccaacagttatgatgctattaatggctcacaacttta

SEQ ID NO: 417140 - DNA, 75 bp, synthetic construct
  source 1..75: mol_type = other DNA
tactgaatgttacccaggcggaacagacatttgtttttgataatgtctacttccagccagtgcctgcgctgttgt

SEQ ID NO: 417141 - DNA, 75 bp, synthetic construct
  source 1..75: mol_type = other DNA
cgccatattacgtactatctcgaccgcccggacgtgctggcgcgttttaccaccaaaattgttgccgataaaact

SEQ ID NO: 417142 - DNA, 75 bp, synthetic construct
  source 1..75: mol_type = other DNA
ggcgcaaagtttgctggcaacctacatcaagctgaacgtcgcgcgtcatcagcaaggtcagccgctgtctctgcc

SEQ ID NO: 417143 - DNA, 75 bp, synthetic construct
  source 1..75: mol_type = other DNA
cgactttgatgtgctgcgcgacactttcaccacgcgttctggtcgcgaagtagcgctggagctgtacgtcgatcg

SEQ ID NO: 417144 - DNA, 75 bp, synthetic construct
  source 1..75: mol_type = other DNA
caacaacgtgcgcaccatgcgcggattgcagtttgcggaagacgccagtccgatggcgcacccaatccgtccgga

SEQ ID NO: 417145 - DNA, 75 bp, synthetic construct
  source 1..75: mol_type = other DNA
agcagtacaccctgaccatcagccagcgcacgccagctacgccggatcaggcagaaaaacagccgctgcatattc

SEQ ID NO: 417146 - DNA, 75 bp, synthetic construct
  source 1..75: mol_type = other DNA
cataactggaccggtaaccgcgttacctgccgtgactggttccagctcagtctgaaagaaggcttgaccgttttc

SEQ ID NO: 417147 - DNA, 75 bp, synthetic construct
  source 1..75: mol_type = other DNA
gaagatgcgtcgaatgtcgatctctcccatttccgccgttggtacagccagtccggtacgccggttgtgaccgtc

SEQ ID NO: 417148 - DNA, 75 bp, synthetic construct
  source 1..75: mol_type = other DNA
ggaaaacggacgtcactgggtacagtggcaggacccgttccctaaaccgtgctacctgtttgcgctggtggcagg

SEQ ID NO: 417149 - DNA, 75 bp, synthetic construct
  source 1..75: mol_type = other DNA
gtaccgcgttgagcatgaagatattgcaaaacgcactctgcgtaatgcctgcctgcgcttcctcgcttttggtga

SEQ ID NO: 417150 - DNA, 75 bp, synthetic construct
  source 1..75: mol_type = other DNA
caacaacgtgcgcaccatgcgcggattgcagtttgcggaagacgccagcccgatggcgcacccaatccgcccgga

SEQ ID NO: 417151 - DNA, 75 bp, synthetic construct
  source 1..75: mol_type = other DNA
ttccgccatattacgtattatctcgaccgcccggacgtgctggcgcgttttaccaccaaaattattgccgataaa

SEQ ID NO: 417152 - DNA, 75 bp, synthetic construct
  source 1..75: mol_type = other DNA
ccgataaagattatctcgatattgagcgcgttattggtcacgaatatttccacaactggaccggtaaccgtgtga

SEQ ID NO: 417153 - DNA, 75 bp, synthetic construct
  source 1..75: mol_type = other DNA
cgcggatactgtttctgtgggtaacacaacagctcagcgacaaattgtcaatatggcagcaggtgatatcagcac

SEQ ID NO: 417154 - DNA, 75 bp, synthetic construct
  source 1..75: mol_type = other DNA
tgccctgcagatggcgctgtggcggcgtaagaggccccggaacgttatcgttcacacggaccgtggaggccagta

SEQ ID NO: 417155 - DNA, 75 bp, synthetic construct
  source 1..75: mol_type = other DNA
gcctgcgatgccctgcagatggcgctgtggcggcgtaagaggccccggaacgttatcgttcacacggaccgtgga

SEQ ID NO: 417156 - DNA, 75 bp, synthetic construct
  source 1..75: mol_type = other DNA
cccggtcaaaacagcgttacggtgccccacgcctgacggatgaactgcgtgctcagggttacccctttaacgtaa

SEQ ID NO: 417157 - DNA, 75 bp, synthetic construct
  source 1..75: mol_type = other DNA
attatatcgaatgtgattacattcgatggcggcggcacagttggtgtggcggtctcactcgggaacaatttgaaa

SEQ ID NO: 417158 - DNA, 75 bp, synthetic construct
  source 1..75: mol_type = other DNA
tacaatcggtggcggcggcacagttggtgtggcggcctcagtccggaacaatttgaaaaccagaacctcgcttag

SEQ ID NO: 417159 - DNA, 75 bp, synthetic construct
  source 1..75: mol_type = other DNA
tgattacaatcggtggcggcggcacagttggtgtggcggcctcagtccggaacaatttgaaaaccagaacctcgc

SEQ ID NO: 417160 - DNA, 75 bp, synthetic construct
  source 1..75: mol_type = other DNA
aggctactgttatgacaatgcctgtgtggaaagcttctttcattcgctgaaggtggaatgtctccacggagaaca

SEQ ID NO: 417161 - DNA, 75 bp, synthetic construct
  source 1..75: mol_type = other DNA
ccgtaattttagaggcgcagaatgtgtggataacctacaaaggaaagctaccaggaagaattactgattttctga

SEQ ID NO: 417162 - DNA, 75 bp, synthetic construct
  source 1..75: mol_type = other DNA
gagttttatgaggctgcagccagaaggagcatcagacaggtcttcctggatgttgctgccgggttatgtgaaggg

SEQ ID NO: 417163 - DNA, 75 bp, synthetic construct
  source 1..75: mol_type = other DNA
ggcgtcgtcaccagatgagcctgcgccaacagtttcggttcacctgcgatgccgctgtccataaggcattctttg

SEQ ID NO: 417164 - DNA, 75 bp, synthetic construct
  source 1..75: mol_type = other DNA
gcctgcgtcgtcaggggctgcgggcgaaagccagccggaagttcagcccagtcagctaccgtgcacatggcctgc

SEQ ID NO: 417165 - DNA, 75 bp, synthetic construct
  source 1..75: mol_type = other DNA
tgtggtcacgcgccgttattggctggtcgatgtcaccgcgaatgacagcacaactggcctgtgatgcactgcaaa

SEQ ID NO: 417166 - DNA, 75 bp, synthetic construct
  source 1..75: mol_type = other DNA
attatatcgaatgtgattacattcgctggcggcggcacagttggtgtggcggtctcaatcgggaacaatttgaaa

SEQ ID NO: 417167 - DNA, 75 bp, synthetic construct
  source 1..75: mol_type = other DNA
aactggcgaccgttcgacggcttttggtcgttacgcaaagacgaatggttatacatctcttgctgttggggacac

SEQ ID NO: 417168 - DNA, 75 bp, synthetic construct
  source 1..75: mol_type = other DNA
agccaactgattatggcgatggctcagcaggtgacggctgggttgctatcggtaaaggttcaaaagcaaatacct

SEQ ID NO: 417169 - DNA, 75 bp, synthetic construct
  source 1..75: mol_type = other DNA
gtgatcgacttccgcaatgttgatatggcggaactgcttatccacaccctgactaagcgcgtagctataactgaa

SEQ ID NO: 417170 - DNA, 75 bp, synthetic construct
  source 1..75: mol_type = other DNA
gtaaatgctattgctcttggacaaggcagttatgccggtttagaaaatggcactgcaattggtgctcaagccagt

SEQ ID NO: 417171 - DNA, 75 bp, synthetic construct
  source 1..75: mol_type = other DNA
taaaattcctggatgatatttttacttgccttcatacgtaccctgatgatgagagttttacaaaagagcagataa

SEQ ID NO: 417172 - DNA, 75 bp, synthetic construct
  source 1..75: mol_type = other DNA
gaaggtgagtacagctctgccatcgggtcaaaaaccctcgcaagtggtggagcatccatggcgtttggggttagt

SEQ ID NO: 417173 - DNA, 75 bp, synthetic construct
  source 1..75: mol_type = other DNA
tctccgaagcgcaggcggttacggcttccgcagcttctactgatgtaatcgatctcggtcctatcgacggtaccc

SEQ ID NO: 417174 - DNA, 75 bp, synthetic construct
  source 1..75: mol_type = other DNA
cagcagttccgccaacactgcgacagcgttgtcctcgcggcttttacccggtcaaaacagcgttacggtgcccca

SEQ ID NO: 417175 - DNA, 75 bp, synthetic construct
  source 1..75: mol_type = other DNA
attatatcgaatgtgattacattcggtggcggcggcacagttggtgtggcggtctcagtcaggaacaatttgaaa

SEQ ID NO: 417176 - DNA, 75 bp, synthetic construct
  source 1..75: mol_type = other DNA
aatgaaaaaccagaaaatgaaatcgtgtgcaggcatctttctctacaatattgtatagattcaatgaatgaacat

SEQ ID NO: 417177 - DNA, 75 bp, synthetic construct
  source 1..75: mol_type = other DNA
aacgcggcgactggatatgcttgaacgtgtggtttttcccgccatcggtaagctccctgtcagagagatcactcc

SEQ ID NO: 417178 - DNA, 75 bp, synthetic construct
  source 1..75: mol_type = other DNA
atgctcactgatacgcaatgccgcactgctaagccgaaagaaaaactctatcgacttaatgatttcaatggtctc

SEQ ID NO: 417179 - DNA, 75 bp, synthetic construct
  source 1..75: mol_type = other DNA
ggctgatgctggttgggtacgttttccaaatggcatcatttttcaatggtgttgggggaatactgatgccagtgg

SEQ ID NO: 417180 - DNA, 75 bp, synthetic construct
  source 1..75: mol_type = other DNA
tgcgctaagtgaaatcaaagatgcgttcaaaataggtttttatttatatttgccatttgttgttgttgatcttgt

SEQ ID NO: 417181 - DNA, 75 bp, synthetic construct
  source 1..75: mol_type = other DNA
aacgccgaaagcggtaaaggccgcgtatgacctggctaacgggaaatataccgcacaggacgccaccacagcgcg

SEQ ID NO: 417182 - DNA, 75 bp, synthetic construct
  source 1..75: mol_type = other DNA
tgcgcgacagggaacgaataatacccaaatcgcaagcacggctttcgttatggctgcgatcgctgccctcgtgga

SEQ ID NO: 417183 - DNA, 75 bp, synthetic construct
  source 1..75: mol_type = other DNA
gtacgacgaatgcgttaggtggtagctctattgttcttggtgataatgacaccggatttaaacagaatggagacg

SEQ ID NO: 417184 - DNA, 75 bp, synthetic construct
  source 1..75: mol_type = other DNA
agcaaccgaaagatgccaccctgacggcgctggccgggcttgctactgcggcagacaagtttccgtattttacgg

SEQ ID NO: 417185 - DNA, 75 bp, synthetic construct
  source 1..75: mol_type = other DNA
acactgattcatacatgtggtttgaaacaggcgacaacggcaatgaatatttcaaatggagaagcaaacaaagca

SEQ ID NO: 417186 - DNA, 75 bp, synthetic construct
  source 1..75: mol_type = other DNA
tgttgagggtgtcgccattacagctattactgcaactggctttactctgagcatcaccggagataacggtggatg

SEQ ID NO: 417187 - DNA, 75 bp, synthetic construct
  source 1..75: mol_type = other DNA
gcgggtaagcaaccgaaagatgccaccctgacggcgctggccgggcttgctactgcggcagacaagtttccgtat

SEQ ID NO: 417188 - DNA, 75 bp, synthetic construct
  source 1..75: mol_type = other DNA
tatccagcactgccactgtggcgcttaccgtggataacaccatggtgatggccacagtggattacgtggatgaca

SEQ ID NO: 417189 - DNA, 75 bp, synthetic construct
  source 1..75: mol_type = other DNA
agggtccaactctgccgataatatagcgggcgtttattacagacccgttcaaaagtatataaatggcacctggta

SEQ ID NO: 417190 - DNA, 75 bp, synthetic construct
  source 1..75: mol_type = other DNA
tgcttcacctcaaaggtgccaccgctgctggcgaaggtgagttattcattggctggagtggcacgagcggtgccc

SEQ ID NO: 417191 - DNA, 75 bp, synthetic construct
  source 1..75: mol_type = other DNA
agatggcgatgatgaagccatcttcaggccaatacaaaaatacatcaatggcacatggtataacgtcgcacaggt

SEQ ID NO: 417192 - DNA, 75 bp, synthetic construct
  source 1..75: mol_type = other DNA
tgactgggcaaagattggatttaaaaatgatgccgacagcgatactgattcatatatgtggtttgaaacaggtga

SEQ ID NO: 417193 - DNA, 75 bp, synthetic construct
  source 1..75: mol_type = other DNA
caaacacggctttcgttatgaccgcgattgccgcccttgtagactcgtcacctgacgcactgaatacgctgaacg

SEQ ID NO: 417194 - DNA, 75 bp, synthetic construct
  source 1..75: mol_type = other DNA
tggcaactatggattctttatccgaaacgatggttcaaacacatacttcatgttgaccaattcgggagacagcct

SEQ ID NO: 417195 - DNA, 75 bp, synthetic construct
  source 1..75: mol_type = other DNA
atgggacgtaatgcggtatccactgatggtgctcaggctttgctccgtcaggaccatgccgaccgcaaatttatg

SEQ ID NO: 417196 - DNA, 75 bp, synthetic construct
  source 1..75: mol_type = other DNA
aatgatgttgccagcctggcaaccctgacaaaagtcggacgggatattctggctaaagcgaccgttactgccgtt

SEQ ID NO: 417197 - DNA, 75 bp, synthetic construct
  source 1..75: mol_type = other DNA
aaaactggcaagggcttaccccaccaataaattaccagacttacgcggtgaatttatccgtggctgggatgatgg

SEQ ID NO: 417198 - DNA, 75 bp, synthetic construct
  source 1..75: mol_type = other DNA
ctgacggcaaaaggcaccgtacaactgagcaatgccatcaacagcacgtctgaaatactggccgccacaccgaaa

SEQ ID NO: 417199 - DNA, 75 bp, synthetic construct
  source 1..75: mol_type = other DNA
cgctctgattaacggtgcgccagctacgctggacacactgaaagaaattgccgcagccattgacaatgacccgaa

SEQ ID NO: 417200 - DNA, 75 bp, synthetic construct
  source 1..75: mol_type = other DNA
atgtctgaaacgctcgccgcaacaccaaaagccgttaagacggtaatggatgaaacgaacaagaaagcgccatta

SEQ ID NO: 417201 - DNA, 75 bp, synthetic construct
  source 1..75: mol_type = other DNA
aatattatggagtgaacaactggcaaacatggaatttccagtgcccgtcaggtcatgtattgtctggtattaatg

SEQ ID NO: 417202 - DNA, 75 bp, synthetic construct
  source 1..75: mol_type = other DNA
caactctgccgataatatagcgggcgtttattacagacccgttcaaaagtatataaatggcacctggtataatgt

SEQ ID NO: 417203 - DNA, 75 bp, synthetic construct
  source 1..75: mol_type = other DNA
gccgaaggctgtgaaaatcgcgtatgatctggcctggggaaaatacacagcccaggatgcaacaacgacccgtaa

SEQ ID NO: 417204 - DNA, 75 bp, synthetic construct
  source 1..75: mol_type = other DNA
agcacggctttcgttatggctgcaattgccgcccttgtagattcgtcacctgatgcactgaacacgctgaacgag

SEQ ID NO: 417205 - DNA, 75 bp, synthetic construct
  source 1..75: mol_type = other DNA
gcaaatattgccaccaataccaccaatatcaccaacctgacggattccgttggtgaccttcaggctgatgccctg

SEQ ID NO: 417206 - DNA, 75 bp, synthetic construct
  source 1..75: mol_type = other DNA
gtacggaaaccaccagcaccatcactaatgtgaaagctggcaccctttcggatgacagtactgacgcggttaatg

SEQ ID NO: 417207 - DNA, 75 bp, synthetic construct
  source 1..75: mol_type = other DNA
atatagtggcgtatcttaaaaatccttcagtttattcacttgaaaaagaaggtccgttaaatcatttttttaata

SEQ ID NO: 417208 - DNA, 75 bp, synthetic construct
  source 1..75: mol_type = other DNA
accaacgttaaagatgccgacctgacggctgacagcactgatgctgttaacggctctcagctgaaaaccaccaac

SEQ ID NO: 417209 - DNA, 75 bp, synthetic construct
  source 1..75: mol_type = other DNA
ccaataccgccaatatcgctactaataccagcaacattgccacgaatacggcaaatattgccaccaataccacca

SEQ ID NO: 417210 - DNA, 75 bp, synthetic construct
  source 1..75: mol_type = other DNA
tatatccgcagtcatgatgatccggcgaccggccagcctgtcggtcagcctctggggccgacggtgaccgtgttt

SEQ ID NO: 417211 - DNA, 75 bp, synthetic construct
  source 1..75: mol_type = other DNA
actaacaccacggatattgcaaccaacactgccaatatcgccgataacactacggatattgcgaccaacactgcc

SEQ ID NO: 417212 - DNA, 75 bp, synthetic construct
  source 1..75: mol_type = other DNA
atcaagctgaacgtcgcccgtcatcagcaagggcagccgctgtctctgccggtgcatgtggctgatgctttccgc

SEQ ID NO: 417213 - DNA, 75 bp, synthetic construct
  source 1..75: mol_type = other DNA
gcgaattttctgcgccggtgaaactggaatataagtggagcgaccagcaactgactttcctgatgcgccatgcgc

SEQ ID NO: 417214 - DNA, 75 bp, synthetic construct
  source 1..75: mol_type = other DNA
actcaatcgcgttgggaagtaacagtttgtcctcgggagagaatgccatcgcattgggagagggtagtgccgctg

SEQ ID NO: 417215 - DNA, 75 bp, synthetic construct
  source 1..75: mol_type = other DNA
tgcctttaaagccggaatgcgtgaatttaccgccaatgtcagcggtaacgatctggttcgcgttactggttatat

SEQ ID NO: 417216 - DNA, 75 bp, synthetic construct
  source 1..75: mol_type = other DNA
tggcatgtatgggctggcggaagcggttaacttgctgtgtgaaaaagaaggaattgccgcacgttacggtaaaga

SEQ ID NO: 417217 - DNA, 75 bp, synthetic construct
  source 1..75: mol_type = other DNA
ccaatatcgctactaataccagcaacattgccacgaatacggcaagtattgccaccaacaccaccaatatcacca

SEQ ID NO: 417218 - DNA, 75 bp, synthetic construct
  source 1..75: mol_type = other DNA
caacggcaatgaatatttcaaatggagaagtcgccagagcaccacaacaaaagacctgatgaatcttaaatggga

SEQ ID NO: 417219 - DNA, 75 bp, synthetic construct
  source 1..75: mol_type = other DNA
ttcaactaattcaggggcttcagcgcgaaaacatagctataaataccgcagccaatttcctgttctacaacatcg

SEQ ID NO: 417220 - DNA, 75 bp, synthetic construct
  source 1..75: mol_type = other DNA
ttttttatcgataccgttgcatttattttcatgcaattgtatttcatttatgatcgtgtgcaattttcaaactgt

SEQ ID NO: 417221 - DNA, 75 bp, synthetic construct
  source 1..75: mol_type = other DNA
cgacagtcaatgcactgaggatatttaattcatcttttggtgctattttttgtcgttctgaagaatgcctgcata

SEQ ID NO: 417222 - DNA, 75 bp, synthetic construct
  source 1..75: mol_type = other DNA
ctacagtcaatgcactgaggatatttaattcatcttttggggctatttttcgccgttctgaagaaaacctgtata

SEQ ID NO: 417223 - DNA, 75 bp, synthetic construct
  source 1..75: mol_type = other DNA
cttttcagcagtgaagtaaaaatatctacagtcaatgcactgaggatatttaattcatcttttggggctattttt

SEQ ID NO: 417224 - DNA, 75 bp, synthetic construct
  source 1..75: mol_type = other DNA
gagagcaaagctgctgaaaatgcgacggcagttggtactaacgcggaggcaaatggacttaatagtatcgcgttg

SEQ ID NO: 417225 - DNA, 75 bp, synthetic construct
  source 1..75: mol_type = other DNA
ggcgaccttaaagacgatgccctgctgtggaatggcaccgcgttcagtgccgcgcacggtactgatgccaccagc

SEQ ID NO: 417226 - DNA, 75 bp, synthetic construct
  source 1..75: mol_type = other DNA
tctgtgaatactgacggtgtgtttaccggtccaacctacaaaatcggtgaaacaaattattataacgtcggcgat

SEQ ID NO: 417227 - DNA, 75 bp, synthetic construct
  source 1..75: mol_type = other DNA
cggtggactgatgtcgtcgttcggggcgggtgcttctgtcagtcttgatggtggtacgagcattgaaactcccca

SEQ ID NO: 417228 - DNA, 75 bp, synthetic construct
  source 1..75: mol_type = other DNA
acggtcagggcgtcaattatggccagggaacaggaacaggctgggttgctatcggtgaagatgcaaaagcaaata

SEQ ID NO: 417229 - DNA, 75 bp, synthetic construct
  source 1..75: mol_type = other DNA
aagtcaggcagtagcggctggcgcaattgccatcggtcaagggaataaagctgacggcgcaaatgctatcgcgct

SEQ ID NO: 417230 - DNA, 75 bp, synthetic construct
  source 1..75: mol_type = other DNA
ctcaggctgaaaggtgaactgacgccggcgttattacagacacttatccgcgaaatgaaagggagcagccactga

SEQ ID NO: 417231 - DNA, 75 bp, synthetic construct
  source 1..75: mol_type = other DNA
ttaggaactgtgtcattgtatctttgtttgtttttacatacaacacatgggcgcagtgtaataataatattaaaa

SEQ ID NO: 417232 - DNA, 75 bp, synthetic construct
  source 1..75: mol_type = other DNA
cgggtacgtgggatacggtcagggcggtattctgacggaggctgtgcgtaaacgcccttacagcgtggtgctgct

SEQ ID NO: 417233 - DNA, 75 bp, synthetic construct
  source 1..75: mol_type = other DNA
ccccggcggcccaacttcccttatgagtttaaaatcgccttagtggagcagtcactgcagcccggagcctgtgtg

SEQ ID NO: 417234 - DNA, 75 bp, synthetic construct
  source 1..75: mol_type = other DNA
gtggagcagtcactgcagcccggagcctgtgtggcgcagatcgcccgggaaaacggaatcaacgataacctgctc

SEQ ID NO: 417235 - DNA, 75 bp, synthetic construct
  source 1..75: mol_type = other DNA
cttcactttgaagaacatttaccccgggttgtggccgggcgtcgcctgggtgtaccaaaatcaacagtttgtagt

SEQ ID NO: 417236 - DNA, 75 bp, synthetic construct
  source 1..75: mol_type = other DNA
atttgaacagcgcctgaaaaacgtgattgatgccgtgcagcagtcaccggctcctgtactgttgtttatagatga

SEQ ID NO: 417237 - DNA, 75 bp, synthetic construct
  source 1..75: mol_type = other DNA
gcgctggtggaagggctggcgctgcgtatcgccgaaggcaacgtgccggacagcctgaaaacggtgcatatccgc

SEQ ID NO: 417238 - DNA, 75 bp, synthetic construct
  source 1..75: mol_type = other DNA
caaagccttgaaaaccgcgttgtcgggcaaagtccggcgctctgcgccatcgcacagcggctgcgggcggctaaa

SEQ ID NO: 417239 - DNA, 75 bp, synthetic construct
  source 1..75: mol_type = other DNA
gtgctgccgtcacactctcgcgccgttatctgacagaacgtcagctaccggacaaggccgttgacctgcttgata

SEQ ID NO: 417240 - DNA, 75 bp, synthetic construct
  source 1..75: mol_type = other DNA
tatttgaccggggctttatgcgcgacggcgaggggcgtgaaattgacttccgtaatacggtcattctgatgacct

SEQ ID NO: 417241 - DNA, 75 bp, synthetic construct
  source 1..75: mol_type = other DNA
agcgtccgtacagtgtggtgctgctggatgaagtggaaaaggcccaccgggatgtgctgaatctgttttatcagg

SEQ ID NO: 417242 - DNA, 75 bp, synthetic construct
  source 1..75: mol_type = other DNA
aaaaaacgtccccggcggcccaacttcccttatgagtttaaaatcgccttagtggagcagtcactgcagcccgga

SEQ ID NO: 417243 - DNA, 75 bp, synthetic construct
  source 1..75: mol_type = other DNA
tcacaatcagcgcacttcccgttacaggtcagagcattgacggtaaatggcggagccactcagggaaccatttag

SEQ ID NO: 417244 - DNA, 75 bp, synthetic construct
  source 1..75: mol_type = other DNA
atcacctgccgatcacctgcaacgaagcgggcgctctttaccaaaacgcgatcaacagcgataacgcgtttgccc

SEQ ID NO: 417245 - DNA, 75 bp, synthetic construct
  source 1..75: mol_type = other DNA
ccggattccccatcagccagtggcaccgtaaaccgcgtggtgcaaggcgtaattattcatccgtggcaggaataa

SEQ ID NO: 417246 - DNA, 75 bp, synthetic construct
  source 1..75: mol_type = other DNA
atcaaagcatgactatacgaacccgccgtggaacgcgaaagttccggtgcaacgtgcgatgcagtggatgccaat

SEQ ID NO: 417247 - DNA, 75 bp, synthetic construct
  source 1..75: mol_type = other DNA
catctggataccatggcagaacgtgcagtgcagctgggcggtgtagctctggggaccactcaagttatcaacagc

SEQ ID NO: 417248 - DNA, 75 bp, synthetic construct
  source 1..75: mol_type = other DNA
gaagtcgttgcaaatagcagcgcatataatggttcaaaagagcttgctgctatgaatgcactgaaggctgaaagg

SEQ ID NO: 417249 - DNA, 75 bp, synthetic construct
  source 1..75: mol_type = other DNA
ccaccgagggctactataccctcaatgagtgggcatcgcggcgcaacagccctgaagacttttgggaaacaggta

SEQ ID NO: 417250 - DNA, 75 bp, synthetic construct
  source 1..75: mol_type = other DNA
cggagagctggcctttcgtggcctttgcccgcaggcatgtcggagcaggaacttgatgcctgcctttacggacaa

SEQ ID NO: 417251 - DNA, 75 bp, synthetic construct
  source 1..75: mol_type = other DNA
cctgtgtggcgcagatcgcccgggaaaacggaatcaacgataacctgctcttcaactggcgccatcaataccgga

SEQ ID NO: 417252 - DNA, 75 bp, synthetic construct
  source 1..75: mol_type = other DNA
accttccgcgacgtggcggatcgttgccaggcgatcctgacctcactgggcgatttcagcgaaggtgtgtttggt

SEQ ID NO: 417253 - DNA, 75 bp, synthetic construct
  source 1..75: mol_type = other DNA
ctgaagaaattatgcgtggcagtctcctttcggtcaataatagcagaacaaaagaaagagccagaaatgacggtc

SEQ ID NO: 417254 - DNA, 75 bp, synthetic construct
  source 1..75: mol_type = other DNA
ttggcccaagtggtgtagggaaaaccgaaacggcgctggcgctggctgacgtcatgtacggcggtgaaaaatcac

SEQ ID NO: 417255 - DNA, 75 bp, synthetic construct
  source 1..75: mol_type = other DNA
tgggcttacggggcgatagccggttgtacgttcttcattgctcgtgaacatacccaggcagaatatcgctggatt

SEQ ID NO: 417256 - DNA, 75 bp, synthetic construct
  source 1..75: mol_type = other DNA
cgcacgcatggggtgtggcaagcctgatggattttgctgtgcctgtggtggcgtgtttgctggtttggctgttgg

SEQ ID NO: 417257 - DNA, 75 bp, synthetic construct
  source 1..75: mol_type = other DNA
tgatccgcgtgcgtgggatgtagcaagcctgatggattttgctgtgccggtggtggcgtgtttacttgtatttat

SEQ ID NO: 417258 - DNA, 75 bp, synthetic construct
  source 1..75: mol_type = other DNA
aagtgcgacgatacaggcagccgatgtcaccatcacggttaacggtaaggtcgtcgccaaaccgtgtacggtttc

SEQ ID NO: 417259 - DNA, 75 bp, synthetic construct
  source 1..75: mol_type = other DNA
tacccaggcagaatatcgctggattgaaatgttcgggcatggcaagcgtatgaatatgccgtggtggggcggttt

SEQ ID NO: 417260 - DNA, 75 bp, synthetic construct
  source 1..75: mol_type = other DNA
cgcctggcccgcgatatccgcaaaagccgcgccaataccggctacatcttccaacaattcaacctggtgaatcgc

SEQ ID NO: 417261 - DNA, 75 bp, synthetic construct
  source 1..75: mol_type = other DNA
gtacgttttttgttgcccgcgaatatacccaggcagaatatcgctggattaagcgttttggtgatggtcaccgac

SEQ ID NO: 417262 - DNA, 75 bp, synthetic construct
  source 1..75: mol_type = other DNA
cgcgcgtgtgggatgtggcaagcctgatggattttgctgtgccggtggtggcgtgtctgctgatctggatgttga

SEQ ID NO: 417263 - DNA, 75 bp, synthetic construct
  source 1..75: mol_type = other DNA
tgatccacgtgcatgggatgtggcaagcctgatggattttgctgtgccggtggtggcgtgtctgctggtctggct

SEQ ID NO: 417264 - DNA, 75 bp, synthetic construct
  source 1..75: mol_type = other DNA
atggatataacacctttccttcatgcactttgtgctgtggctgcgcaggtactggttggcctttttaccggaaac

SEQ ID NO: 417265 - DNA, 75 bp, synthetic construct
  source 1..75: mol_type = other DNA
aagggaaacgtgtcaacatgccgtggtggggaggttttgatccacgcgtgtgggatgtgggaagtttgttggatt

SEQ ID NO: 417266 - DNA, 75 bp, synthetic construct
  source 1..75: mol_type = other DNA
tgatcctcgtgcatgggatgtggcaagcctgatggattttgctgtgccagtggtggtgtgtctgctggtctggct

SEQ ID NO: 417267 - DNA, 75 bp, synthetic construct
  source 1..75: mol_type = other DNA
taatgacattgcggtgctgttggacgtggtagtcaaccacaaaatgggcgcggatgaaaaagaagctattcgcgt

SEQ ID NO: 417268 - DNA, 75 bp, synthetic construct
  source 1..75: mol_type = other DNA
tcagaccaaattgctggtggggtttttattatagaaataggcaaaaatgatgggagaattctaaattttggccac

SEQ ID NO: 417269 - DNA, 75 bp, synthetic construct
  source 1..75: mol_type = other DNA
acaacaagttgggttgttgaaggtaccattcactcagaccaaattgctggtggggtttttattatagaaataggc

SEQ ID NO: 417270 - DNA, 75 bp, synthetic construct
  source 1..75: mol_type = other DNA
caggtagctccggctctcgcacactatgggcaagagccaacggacttacccccatccgaaaggaaaattggttaa

SEQ ID NO: 417271 - DNA, 75 bp, synthetic construct
  source 1..75: mol_type = other DNA
cagcacagcaacccgttactttcagtcgatgtggatgtgcgtaccgttgctaccgtgattgctgactggacgggc

SEQ ID NO: 417272 - DNA, 75 bp, synthetic construct
  source 1..75: mol_type = other DNA
tggtggcgcggatgccgccaacctgttgaaaccggcactggcgcgtggtgaattacgaaccatcgccgctacaac

SEQ ID NO: 417273 - DNA, 75 bp, synthetic construct
  source 1..75: mol_type = other DNA
tattccggaaaaacgccgtcagacgctgccgggtgtaacaacctgtactgactgtcagtcgatactggagaaacg

SEQ ID NO: 417274 - DNA, 75 bp, synthetic construct
  source 1..75: mol_type = other DNA
aaccgttgcaagccctcgaagcgccggtcgaaccgtggtttaaaccgctggcgtacgccctaattttgttgcggg

SEQ ID NO: 417275 - DNA, 75 bp, synthetic construct
  source 1..75: mol_type = other DNA
gagcgtagtaaccgacgaaaacggtgaagcgaccttcttttgcaacggcggcagcgtcagcgtgtgggttatcga

SEQ ID NO: 417276 - DNA, 75 bp, synthetic construct
  source 1..75: mol_type = other DNA
gcccgtcagcgtttcgcccacggtgtacagacattatttttcgaccatccgaactgcattgcctttagccgcagt

SEQ ID NO: 417277 - DNA, 75 bp, synthetic construct
  source 1..75: mol_type = other DNA
taaaactaatgcgtgaaagtgagcgcattacaagtcgcaatgaggctgcggagttaataggtattccgcataacg

SEQ ID NO: 417278 - DNA, 75 bp, synthetic construct
  source 1..75: mol_type = other DNA
cgctatttattgtggcggaatactggtcgcgcgaagttgataagctgcaaacgtatattgatcaagttgaaggca

SEQ ID NO: 417279 - DNA, 75 bp, synthetic construct
  source 1..75: mol_type = other DNA
cggatgaaaaagaagctattcgcgtgcagcgtgtaaatgctgatgaccgtacgcaaattgatgaagaaatcattg

SEQ ID NO: 417280 - DNA, 75 bp, synthetic construct
  source 1..75: mol_type = other DNA
caggtaatcccaaaaccgttgctcagtatcaactgacaaaaaattttgatgttatctggttattttccgaagacg

SEQ ID NO: 417281 - DNA, 75 bp, synthetic construct
  source 1..75: mol_type = other DNA
gaactggatgtttaaggatggcacagtgattaaacgcatttatacggcagaggaattgcagcagcaggcagaaaa

SEQ ID NO: 417282 - DNA, 75 bp, synthetic construct
  source 1..75: mol_type = other DNA
gaggcatgggaacgctacagcgttctggtcagtcgtgtggatcctgcaaatcctgaatggccggagctaccacaa

SEQ ID NO: 417283 - DNA, 75 bp, synthetic construct
  source 1..75: mol_type = other DNA
acaaaaggccgcattgctttccgaagctgaatcagtcatccaaccgctggaacgcgctgtcaggctgaatatggc

SEQ ID NO: 417284 - DNA, 75 bp, synthetic construct
  source 1..75: mol_type = other DNA
atgcagcatttaaaaaatattactgcgggtaatcccaaaactgttgcccaatatcaactgacaaaaaattttgat

SEQ ID NO: 417285 - DNA, 75 bp, synthetic construct
  source 1..75: mol_type = other DNA
atatcaactgacaaaaaattttgatgttatctggttatggtctgaagacggaaaaaactggtatgaggaagtaag

SEQ ID NO: 417286 - DNA, 75 bp, synthetic construct
  source 1..75: mol_type = other DNA
gtggttaaacggatttatacggcagaagaacagcaacaacaggccgaatcacaaaaggccgcgttactttccgaa

SEQ ID NO: 417287 - DNA, 75 bp, synthetic construct
  source 1..75: mol_type = other DNA
aaagccagacttcttgcagatgctgaatccgtgattttgccgctggagcgcgctgtcaggctgaacatggcaaca

SEQ ID NO: 417288 - DNA, 75 bp, synthetic construct
  source 1..75: mol_type = other DNA
gttgtctggtttttttcagaagatggtaagaactggtacgaagaacaaaagtattttgctgatgacacgctaaaa

SEQ ID NO: 417289 - DNA, 75 bp, synthetic construct
  source 1..75: mol_type = other DNA
tcgttgccatcacccgggatgcctcaacgcttaatccggcggggttaagtgttgttgaggtggcagatataacgg

SEQ ID NO: 417290 - DNA, 75 bp, synthetic construct
  source 1..75: mol_type = other DNA
atgatgcacttaaagaacataaaagcgggtaacgctaaaacactggaacagtatgagttaacaaagaagcatgga

SEQ ID NO: 417291 - DNA, 75 bp, synthetic construct
  source 1..75: mol_type = other DNA
ataccagctaactgaaaaagcgggcgtggtatggctcttttgcgaagatggcaaaaactggtatgaggaacaaaa

SEQ ID NO: 417292 - DNA, 75 bp, synthetic construct
  source 1..75: mol_type = other DNA
ccattgaaaaaggcattgcgcgtaacggtattgattttcttattctgacccgcttaatcccgttgtttccttaca

SEQ ID NO: 417293 - DNA, 75 bp, synthetic construct
  source 1..75: mol_type = other DNA
agcgcgctgtcaggctgaatatggcaacagatgaggaacgcagccgactggaagcatgggaacgctacaacgttc

SEQ ID NO: 417294 - DNA, 75 bp, synthetic construct
  source 1..75: mol_type = other DNA
aggaattgcagcagcaggcagaaattcggaaagccagacttcttgcagatgctgaatccgtgattttgccgctgg

SEQ ID NO: 417295 - DNA, 75 bp, synthetic construct
  source 1..75: mol_type = other DNA
aacgcgctgtcaggctgaatattgcgacggatgaggaacgcgcacgactggagtcatgggaacgctatagtgttc

SEQ ID NO: 417296 - DNA, 75 bp, synthetic construct
  source 1..75: mol_type = other DNA
tgaaaggagtccgtaattttgagaataaagttacggtaactgtagccttacaggacaaggaacgctttgacggtg

SEQ ID NO: 417297 - DNA, 75 bp, synthetic construct
  source 1..75: mol_type = other DNA
ttaaagggataaataattacccggataagattactgttactgtggcactggaagttggtgggtatccgtcactgt

SEQ ID NO: 417298 - DNA, 75 bp, synthetic construct
  source 1..75: mol_type = other DNA
acagaagtcagctttgctttccgaagctgaaactatcattcagccactggaacgctctgtcagactgaatatggc

SEQ ID NO: 417299 - DNA, 75 bp, synthetic construct
  source 1..75: mol_type = other DNA
tatattctgttatttatcgtcgccaccctctttctattaccgggaagcgtactggtaatcgcaggcggaattgcc

SEQ ID NO: 417300 - DNA, 75 bp, synthetic construct
  source 1..75: mol_type = other DNA
taattgccgccacgctggcctcctcgtgctcattcctgctggcgcgctggctgggacgtgatttactgctgaaat

SEQ ID NO: 417301 - DNA, 75 bp, synthetic construct
  source 1..75: mol_type = other DNA
tacgcccgacacaaacatgtggatctgtctgcttctcgccgcagcccacttactcacccaaaaaatgaaggatag

SEQ ID NO: 417302 - DNA, 75 bp, synthetic construct
  source 1..75: mol_type = other DNA
taagtggatgtttaaggacggagctgtggttaaacggatttatacggcagacgagcaacaacaacaggccgaatc

SEQ ID NO: 417303 - DNA, 75 bp, synthetic construct
  source 1..75: mol_type = other DNA
gagttaacaaagaaacacggagttatctggctttactctgaggacggaaaaaactggtatgaggaagtgaaaaac

SEQ ID NO: 417304 - DNA, 75 bp, synthetic construct
  source 1..75: mol_type = other DNA
atagcgtacgacaaagataatatcatccgctatgtggaaaaggatgtgacagctatcagaccagatggattaagt

SEQ ID NO: 417305 - DNA, 75 bp, synthetic construct
  source 1..75: mol_type = other DNA
aagattgtatacgacgaaaataatattattgttgccataaccaaagatgcctcaacgcttaatcccgaaggcttt

SEQ ID NO: 417306 - DNA, 75 bp, synthetic construct
  source 1..75: mol_type = other DNA
ctccacttccagccaggacgaatacaaccagccgcaggttaacatctcgctcgacagcgcaggtggtaacatcat

SEQ ID NO: 417307 - DNA, 75 bp, synthetic construct
  source 1..75: mol_type = other DNA
tcggagactccacacatgcggatgccatcctagattgtcaacgacggatgaaaagtgatccacttatatctccac

SEQ ID NO: 417308 - DNA, 75 bp, synthetic construct
  source 1..75: mol_type = other DNA
acgtatcctggaatggccggacacactgcaggctgacgctgcctgagagcgcagacctcagccgggggccgctgt

SEQ ID NO: 417309 - DNA, 75 bp, synthetic construct
  source 1..75: mol_type = other DNA
tatgccaggtatcgcgggtatcgtcttaacccttgcggtagcggtcgatgcgaacgtactgatcaacgaacgtat

SEQ ID NO: 417310 - DNA, 75 bp, synthetic construct
  source 1..75: mol_type = other DNA
gaagaacgtaccattggcccgaccctgggtatgcagaacattgagcaggggctggaggcttgccttgccggtctg

SEQ ID NO: 417311 - DNA, 75 bp, synthetic construct
  source 1..75: mol_type = other DNA
accgcgattgtcggtacgcgtgccatcgtaaacctgctatatggcggcaagcgtgtcaagaagctgtcaatctga

SEQ ID NO: 417312 - DNA, 75 bp, synthetic construct
  source 1..75: mol_type = other DNA
tatatattttcttacataagaggctttgcttatcaatatgtattgattttatagacagacggagaaaaaatcttc

SEQ ID NO: 417313 - DNA, 75 bp, synthetic construct
  source 1..75: mol_type = other DNA
ctgatttttacgcgcacagcgtagaggagtttaagcgcaaagggattaagtcacttgaaattgaaccggcccctt

SEQ ID NO: 417314 - DNA, 75 bp, synthetic construct
  source 1..75: mol_type = other DNA
ggtgtcgatccacaattgatcacggcgattatcgctattgaatcgggcggtaacccaaacgcggtcagtaagtcg

SEQ ID NO: 417315 - DNA, 75 bp, synthetic construct
  source 1..75: mol_type = other DNA
tacctgagtggtctctgtgcaatctggtctgccagttacaggcccttaaaggtgttggtcagctaaccgcaataa

SEQ ID NO: 417316 - DNA, 75 bp, synthetic construct
  source 1..75: mol_type = other DNA
tgcgaacagacaaacattatgcaggaaagcactggacaggaaaacatcgaacctggttagctaatcaatcattta

SEQ ID NO: 417317 - DNA, 75 bp, synthetic construct
  source 1..75: mol_type = other DNA
acgtcgggctggatgtgcataaagaaacgttggcggttgctattgctgtacctgaacggcttggcgaagttcgtt

SEQ ID NO: 417318 - DNA, 75 bp, synthetic construct
  source 1..75: mol_type = other DNA
gctggaagcatgtctcgccggcttgctggtttctattctgttcatgatcctcttctacaagaagtttggtttgat

SEQ ID NO: 417319 - DNA, 75 bp, synthetic construct
  source 1..75: mol_type = other DNA
ttgttaccgtaagcaaagatgtttcaactattaacccggaaggtttaagtgttgttgaagtatccgatattacgg

SEQ ID NO: 417320 - DNA, 75 bp, synthetic construct
  source 1..75: mol_type = other DNA
atgatgcatttaaaaaacattaaagcaggaaacccaaaaacaccagaacaataccagttaaccaaaaaagctgga

SEQ ID NO: 417321 - DNA, 75 bp, synthetic construct
  source 1..75: mol_type = other DNA
aaaaaaactggtatgaggaagtgaaaaactttcagccagacaccataaagattgtttacgataaaaatcagatta

SEQ ID NO: 417322 - DNA, 75 bp, synthetic construct
  source 1..75: mol_type = other DNA
acgaacagcagcaactggcagaatcacaaaaggcaactttgctttccgaagccgaatccgtgattttgccactgg

SEQ ID NO: 417323 - DNA, 75 bp, synthetic construct
  source 1..75: mol_type = other DNA
cgggtaatccaaaaactgttgcccagtatcaactgacaaaaaattttgatgttatctggttatggtccgaagagg

SEQ ID NO: 417324 - DNA, 75 bp, synthetic construct
  source 1..75: mol_type = other DNA
atgcagcatttaaaaaatattaagtctggaaatcctaaaacgaaagaacaatatcagctaacaaagaattttgat

SEQ ID NO: 417325 - DNA, 75 bp, synthetic construct
  source 1..75: mol_type = other DNA
gtcattgatgtatatctgaatgcggcgattcgcctggcgttgcaacacgggttcactttcgatgaaattgtggag

SEQ ID NO: 417326 - DNA, 75 bp, synthetic construct
  source 1..75: mol_type = other DNA
atgcagcacttaaaaaatatcaggtcaggaaacccaaagacaaaagagcaataccaattaacaaagaattttgac

SEQ ID NO: 417327 - DNA, 75 bp, synthetic construct
  source 1..75: mol_type = other DNA
attttactgaccggggccaccggcagcggtaaaacgttcctggcgtgtgcacttggtcataatgcctgccgacag

SEQ ID NO: 417328 - DNA, 75 bp, synthetic construct
  source 1..75: mol_type = other DNA
atgatgcagcatttaaaaaatattaagtcaggaaatccaaaaacaaaagagcaatatcagctaacaaagaatttt

SEQ ID NO: 417329 - DNA, 75 bp, synthetic construct
  source 1..75: mol_type = other DNA
cacgcttaaccctgaaggttatagcgtcgttgaggttccagatattacagccaaccgctgcgctgatgattccgg

SEQ ID NO: 417330 - DNA, 75 bp, synthetic construct
  source 1..75: mol_type = other DNA
gtagttaagcggatttatacggcagacgaacagcaacaacaggccgaatcacaaaaggccgcattactttccgaa

SEQ ID NO: 417331 - DNA, 75 bp, synthetic construct
  source 1..75: mol_type = other DNA
ccatcgttatgttggcggggggcatgtttgcgtcactgaatgcaactgccgatgattccgtttttactgtcatgg

SEQ ID NO: 417332 - DNA, 75 bp, synthetic construct
  source 1..75: mol_type = other DNA
ctgacagattttgactggatgtcacgtcatgatgaaattcagttagtctatctctgggactatctcaaaggaaaa

SEQ ID NO: 417333 - DNA, 75 bp, synthetic construct
  source 1..75: mol_type = other DNA
gatggcgggatttatcgtgatggtttttcccctcgcccagtttgtcgccatgtttaactggagcaacatggggaa

SEQ ID NO: 417334 - DNA, 75 bp, synthetic construct
  source 1..75: mol_type = other DNA
aagacaattaacaaattagaatcaatcgcaatcatcgataccgtttgccaattaatagatggtggcgtagctagg

SEQ ID NO: 417335 - DNA, 75 bp, synthetic construct
  source 1..75: mol_type = other DNA
gggttagaccaaaaggctatccatcagcgaaaaggtcttaaaaagagccaaaagatactcgatcacatgggttct

SEQ ID NO: 417336 - DNA, 75 bp, synthetic construct
  source 1..75: mol_type = other DNA
actgcctggtcgctgtgggggaatgccagtaatacttcttctaatgatgagcgttcttcagaaaaatatgcggcg

SEQ ID NO: 417337 - DNA, 75 bp, synthetic construct
  source 1..75: mol_type = other DNA
agaccagcgcaattctatcggcaccttagcggctggcgcacgccttgctgcctcgtctccagaagcaatgcaatc

SEQ ID NO: 417338 - DNA, 75 bp, synthetic construct
  source 1..75: mol_type = other DNA
aatatcacgatgcgcggtcaggatttatcgatgcagagagcatcaatgaaagggtcggttgggaataatgagcgt

SEQ ID NO: 417339 - DNA, 75 bp, synthetic construct
  source 1..75: mol_type = other DNA
acagcgaatccaaggaaagatgcagaatcagggcattgcagcagccagagacatgggggcatccggtatcaacac

SEQ ID NO: 417340 - DNA, 75 bp, synthetic construct
  source 1..75: mol_type = other DNA
actgcccattatgggcggcagccgcaggctatgattttaattatatggattgtatgtcttatagcgctactgcat

SEQ ID NO: 417341 - DNA, 75 bp, synthetic construct
  source 1..75: mol_type = other DNA
tggagtaatccccaacgttccaggctcacaggctgcagacactcaggcacgacttgatacctttaaatcccaagc

SEQ ID NO: 417342 - DNA, 75 bp, synthetic construct
  source 1..75: mol_type = other DNA
atcaggagccagtacagaatacgccaggacaacaatctactgctggcagtaacttttcttcactatggggtgatt

SEQ ID NO: 417343 - DNA, 75 bp, synthetic construct
  source 1..75: mol_type = other DNA
aatttctttctgaagaggggataacaataacagaagataataataacgatcctaattgtaaacaccaatatatta

SEQ ID NO: 417344 - DNA, 75 bp, synthetic construct
  source 1..75: mol_type = other DNA
attatcggcgcaggcccggcaggtctggcgtgtgcggatgtcctgacgcgtaacggcgtaaaagccgttgtcttc

SEQ ID NO: 417345 - DNA, 75 bp, synthetic construct
  source 1..75: mol_type = other DNA
gaacttctgaaaatgtataccgatgcggcgctggaagcctgccagaagcatatcgggaaacgttttgaagacggg

SEQ ID NO: 417346 - DNA, 75 bp, synthetic construct
  source 1..75: mol_type = other DNA
taatggcgatgaagccactgtaaacaacaacggcaacaccaccgttgatggtcagggctctacaggtaccgaaat

SEQ ID NO: 417347 - DNA, 75 bp, synthetic construct
  source 1..75: mol_type = other DNA
acgcgcgggaagaaggtgtagagttcaaattcaatgtccagccactgggaattgaagtgaacggtaacggcaaag

SEQ ID NO: 417348 - DNA, 75 bp, synthetic construct
  source 1..75: mol_type = other DNA
gaaacagaccggtaaaaaagtagcgattatcggtgcaggcccggcgggtctggcgtgtgcggatgtgctgacgcg

SEQ ID NO: 417349 - DNA, 75 bp, synthetic construct
  source 1..75: mol_type = other DNA
tcagtcaatgcgcggcgggctggaaaacgaagacgccgatggcgtgtacgcagcgctgccgttccttatcgccaa

SEQ ID NO: 417350 - DNA, 75 bp, synthetic construct
  source 1..75: mol_type = other DNA
ctgacaatgggcaggcattttatagtactggcaacggtgtcattcttaactacggcaccatttgtgttaacagta

SEQ ID NO: 417351 - DNA, 75 bp, synthetic construct
  source 1..75: mol_type = other DNA
gtccggcgtaattaatatcaatgctgacaatgggcaggcgttttatagtgatggaaccggtactattcttaacta

SEQ ID NO: 417352 - DNA, 75 bp, synthetic construct
  source 1..75: mol_type = other DNA
ctaaggcttgcccaagatatacatttcatattattggtgatggaccagattcatatgtccttaaaaatcaggaaa

SEQ ID NO: 417353 - DNA, 75 bp, synthetic construct
  source 1..75: mol_type = other DNA
gttaacggcaacgatgctcaggtcaacaatactggcaacaccacggtagacggcaaaaactccaccggaacagaa

SEQ ID NO: 417354 - DNA, 75 bp, synthetic construct
  source 1..75: mol_type = other DNA
accagatggcgtttgacaacggtatgagctggaataacgccctgcgttatgatgtgcataatctcgatagcagtc

SEQ ID NO: 417355 - DNA, 75 bp, synthetic construct
  source 1..75: mol_type = other DNA
ttgatgatggtcagaatggtggtggtttcaacagcctggcgacaatgggtgtgaaatacagcagccaggaaagtg

SEQ ID NO: 417356 - DNA, 75 bp, synthetic construct
  source 1..75: mol_type = other DNA
atcagaggaaactatacaacgctgcacagcgaatccaaggaaagatgcagaatcagggcattgcagcagccagag

SEQ ID NO: 417357 - DNA, 75 bp, synthetic construct
  source 1..75: mol_type = other DNA
tgtctgtatcaacaattagttgctttaagtttattaccagcatattcatttgtatcaatacgatacgtatatgat

SEQ ID NO: 417358 - DNA, 75 bp, synthetic construct
  source 1..75: mol_type = other DNA
tacaacggcaatttactttagatgatgtgtccggcgcagaatttaaccaacaaaaaatacgcttctggtgctgtc

SEQ ID NO: 417359 - DNA, 75 bp, synthetic construct
  source 1..75: mol_type = other DNA
caaaaaaatacgcttctggtgctgtctcatgaatctcgcgcactccaggaagtaacgctggttggcgaggttatc

SEQ ID NO: 417360 - DNA, 75 bp, synthetic construct
  source 1..75: mol_type = other DNA
tgcaacccggtctttttgaccgatatatggagcgaaaaggtgaaccgccccggaaatcctggagactaaactccc

SEQ ID NO: 417361 - DNA, 75 bp, synthetic construct
  source 1..75: mol_type = other DNA
ggagaacgaaaaaccgcagtggacaaattattaatgaagcccctgtatcagcaggagatgcagttatattccaga

SEQ ID NO: 417362 - DNA, 75 bp, synthetic construct
  source 1..75: mol_type = other DNA
ggctcattgaggagtgccgcggagaatgcccgccccgtgtcaggaaaattatattctccagtgtggcccgggccg

SEQ ID NO: 417363 - DNA, 75 bp, synthetic construct
  source 1..75: mol_type = other DNA
caaaacgcagtggtcagtgcgatggaaaaacatcaggtgcaatggctgatccacgggcatacgcatcgcccggcg

SEQ ID NO: 417364 - DNA, 75 bp, synthetic construct
  source 1..75: mol_type = other DNA
cttacttagtactgaatgtgataatctattgactgctttgattgaatcaatcaactcaggagagcttagtttaaa

SEQ ID NO: 417365 - DNA, 75 bp, synthetic construct
  source 1..75: mol_type = other DNA
aaacaaactgaatgggatagtcttttagattgtttatgtgatgaaagcaaagatgttagagcagtaataaaaaaa

SEQ ID NO: 417366 - DNA, 75 bp, synthetic construct
  source 1..75: mol_type = other DNA
ttgcggttttgaagggttggcttattctcgccaggatcacactttctggttttttaaagagaaaaatccgattga

SEQ ID NO: 417367 - DNA, 75 bp, synthetic construct
  source 1..75: mol_type = other DNA
cgcattaaaaaacaaagaagatttaacattttctgaagaagaaatagatgcttttcttcccaaggaactgaaaag

SEQ ID NO: 417368 - DNA, 75 bp, synthetic construct
  source 1..75: mol_type = other DNA
cgccctgccgttgtttgtgcgcaaacgcattgccgcgcgaatgcgcgcgaacagcaaagaagccaacagcagtaa

SEQ ID NO: 417369 - DNA, 75 bp, synthetic construct
  source 1..75: mol_type = other DNA
tctgccgatatcatgacgtctgctgtcgtaataagttcgtggtacacagatgaatataaaaaattatttgcgtta

SEQ ID NO: 417370 - DNA, 75 bp, synthetic construct
  source 1..75: mol_type = other DNA
ccgcacgaggatgtgacggagaagatggccgatttcgccaacgcccatctggcaaccctgggcgagctgtcgggc

SEQ ID NO: 417371 - DNA, 75 bp, synthetic construct
  source 1..75: mol_type = other DNA
ctggagcaggatttgtctccttccggacccttaagccagtttcggggacatgtttcaaaaaaaacagaaaacatt

SEQ ID NO: 417372 - DNA, 75 bp, synthetic construct
  source 1..75: mol_type = other DNA
acctgatgaatctgaactgcagcagaaggacgccgaggagtgtagtggtcaagtaatattggccacggttttaca

SEQ ID NO: 417373 - DNA, 75 bp, synthetic construct
  source 1..75: mol_type = other DNA
agattcgataccttcaggagaaccacggaatcaggttggatcatatacctcaaaatcaggcattcaatttacggt

SEQ ID NO: 417374 - DNA, 75 bp, synthetic construct
  source 1..75: mol_type = other DNA
atacgctaatgcttatgcgtctggtgatcgcggtgctttgcgtcagttggctactcaatatccagaccagattga

SEQ ID NO: 417375 - DNA, 75 bp, synthetic construct
  source 1..75: mol_type = other DNA
ctcgttcggtgcggagcatgatgttcaatggtcgggtgatacgaaattaaatgaggaattcataaaacgctgggg

SEQ ID NO: 417376 - DNA, 75 bp, synthetic construct
  source 1..75: mol_type = other DNA
cggcatttcatgaacgattaatggaactggccagaggcagtattgaaaaatccagtaaggatgaacgttattgtc

SEQ ID NO: 417377 - DNA, 75 bp, synthetic construct
  source 1..75: mol_type = other DNA
ggcatttcatgaacgattaatggaactggccagaggcagtattgaaaaatccagtgaggatgaacggtattgtct

SEQ ID NO: 417378 - DNA, 75 bp, synthetic construct
  source 1..75: mol_type = other DNA
catttttaatgatgccacgactgcggcaattaagaatcagctttgtggtaaatggcgttcagtgggtattatgtc

SEQ ID NO: 417379 - DNA, 75 bp, synthetic construct
  source 1..75: mol_type = other DNA
ctggaacaggagctgtctccttccggctccttaagtccgtttcggggacatgtttcaaaaaaaacagaaaatatc

SEQ ID NO: 417380 - DNA, 75 bp, synthetic construct
  source 1..75: mol_type = other DNA
atttacaccgttgctggtggcaatgcagcaatgctcgaagctgtcagcaaaaaagtcgttcgtgatggcaaggtt

SEQ ID NO: 417381 - DNA, 75 bp, synthetic construct
  source 1..75: mol_type = other DNA
tggccctgggcgctgatcaggacgacgtcaccgagatgatcgatgacgaagatgacgcggcagcagaacgcgtat

SEQ ID NO: 417382 - DNA, 75 bp, synthetic construct
  source 1..75: mol_type = other DNA
gttttctttccggaaatccccaaagagttcaatgtggtgttcgagcaggaatttcattcaaatataaattatcgc

SEQ ID NO: 417383 - DNA, 75 bp, synthetic construct
  source 1..75: mol_type = other DNA
tgttaaagtgctgaagttcgaccgcgaacgtacccgtgtatccttgggcctgaaacaactgggcgaagatccgtg

SEQ ID NO: 417384 - DNA, 75 bp, synthetic construct
  source 1..75: mol_type = other DNA
ttgaagagtccttaaaagaaatcgaaccccgcccgggttctatcgttcgtggcgttgttgttgctatcgacaaag

SEQ ID NO: 417385 - DNA, 75 bp, synthetic construct
  source 1..75: mol_type = other DNA
agacaaagccatcgaagcgttacagatactcccggataccccgtggcgagaagcactcatcggcctcgcacacat

SEQ ID NO: 417386 - DNA, 75 bp, synthetic construct
  source 1..75: mol_type = other DNA
cttaatcggcttggcgctcattgtggacttgacgatgtattcccccccccagacggtaagcatagcgaaaacagc

SEQ ID NO: 417387 - DNA, 75 bp, synthetic construct
  source 1..75: mol_type = other DNA
ctctttataaattgcatattattcttgttatttttatactttcaaatttgaatttttcagatgattttttttatg

SEQ ID NO: 417388 - DNA, 75 bp, synthetic construct
  source 1..75: mol_type = other DNA
caggaaaacggcaatgattccggtgcatggcgtactgcctttcgtgccggaggtgcagttattaccgacgagctg

SEQ ID NO: 417389 - DNA, 75 bp, synthetic construct
  source 1..75: mol_type = other DNA
ccgtcaggaacatcacggcgtcctcagtcagtatgcagagcatgagctcgatgttgccctgcgtgatacctgtaa

SEQ ID NO: 417390 - DNA, 75 bp, synthetic construct
  source 1..75: mol_type = other DNA
tgcggccactcccgttcagcgaaaagtctggcaggaaaaaatgcaggaacgtgaagctgacctgaaggctcgggg

SEQ ID NO: 417391 - DNA, 75 bp, synthetic construct
  source 1..75: mol_type = other DNA
aaacgcgttaagcatccgagcgaaatcgtcaacgtgggcgacgaaatcactgtgaaagtgctgaagttcgaccgc

SEQ ID NO: 417392 - DNA, 75 bp, synthetic construct
  source 1..75: mol_type = other DNA
ccggtgttatcaacggcaaagttaagggcggcttcactgttgagctgaacggtattcgtgcgttcctgccaggtt

SEQ ID NO: 417393 - DNA, 75 bp, synthetic construct
  source 1..75: mol_type = other DNA
tgacaacatggctgaggtgctttctttcgagctggatagcctccgggtagcctgtgaccgcacggccagagcata

SEQ ID NO: 417394 - DNA, 75 bp, synthetic construct
  source 1..75: mol_type = other DNA
ctgaagaaaactacatgcgcgttatctatagcaaaaccgcgcgtctgtttgaggctgccgcgcagtgttccggga

SEQ ID NO: 417395 - DNA, 75 bp, synthetic construct
  source 1..75: mol_type = other DNA
aaggctcgtgagggttacagaccttcagcacgttgtgaagtagtcatcgatcgcaacataacaagagacttttat

SEQ ID NO: 417396 - DNA, 75 bp, synthetic construct
  source 1..75: mol_type = other DNA
ttccgccgtcagatgaacgaaggctggtaccagacacgtattccgacagcttcacaaaaccggagtccggctccg

SEQ ID NO: 417397 - DNA, 75 bp, synthetic construct
  source 1..75: mol_type = other DNA
caagtcttacggtttctggaaataccatttcatggtctggagctagtggcaatttaaacatattggtttttcaaa

SEQ ID NO: 417398 - DNA, 75 bp, synthetic construct
  source 1..75: mol_type = other DNA
aaatttgatcgccggttttctgacgccagccagcggtttgctgactatcgacggcgtagatcacaccacgacgcc

SEQ ID NO: 417399 - DNA, 75 bp, synthetic construct
  source 1..75: mol_type = other DNA
ttgctggatttctcaagagaactccatgagcttatctgggcaaaggcgaaaatatctgaagaagataaacctctg

SEQ ID NO: 417400 - DNA, 75 bp, synthetic construct
  source 1..75: mol_type = other DNA
aaaggaggcgcaggctatcctgaatttattatttccacgcaaactgatacgcagtttataattatatttgaatgt

SEQ ID NO: 417401 - DNA, 75 bp, synthetic construct
  source 1..75: mol_type = other DNA
atgaacgttaacgacccggatatcaccgaagaaaactacatgcgcgttatctacagcaaaactgcacgtctgttt

SEQ ID NO: 417402 - DNA, 75 bp, synthetic construct
  source 1..75: mol_type = other DNA
cgcgtcagcgtgccgaggaagaagcagacaaagccatcgcagcgttacaggtgctcccggacaccccttggcgag

SEQ ID NO: 417403 - DNA, 75 bp, synthetic construct
  source 1..75: mol_type = other DNA
ttctggcaggttgtacgccagaagaagaaaaaggtctgcaggattatggtcgctacctcggcaccgctttccagc

SEQ ID NO: 417404 - DNA, 75 bp, synthetic construct
  source 1..75: mol_type = other DNA
gccatttttggtatctgacttgagcagtacatttgctcatctcccgtactcgtccctgcctccgaatgaattagc

SEQ ID NO: 417405 - DNA, 66 bp, synthetic construct
  source 1..66: mol_type = other DNA
atgaaaatgaaaaaattgatgatggttgcactggtcagttccactctggccctttcagggtgtggt

SEQ ID NO: 417406 - DNA, 75 bp, synthetic construct
  source 1..75: mol_type = other DNA
ccgaagaaaactacatgcgcgttatctacagcaaaactgcacgtctgtttgaggctgctgcgcagtgttccggga

SEQ ID NO: 417407 - DNA, 75 bp, synthetic construct
  source 1..75: mol_type = other DNA
atgttgccctgcgtgatacctgtagcgcgctggtcagggcaatgaaactcaacatactggttcttaataacccgc

SEQ ID NO: 417408 - DNA, 75 bp, synthetic construct
  source 1..75: mol_type = other DNA
caggaactcatgaatgatccgatggccgcaaagcgtgtagagttggcgatgatcactttcgggcctgtggagatc

SEQ ID NO: 417409 - DNA, 75 bp, synthetic construct
  source 1..75: mol_type = other DNA
cgaattgcccgatccttatgacggtttgattccagggcaggagagtctgaaggttcacgcctgcgttggtttgcc

SEQ ID NO: 417410 - DNA, 75 bp, synthetic construct
  source 1..75: mol_type = other DNA
atattgatggtgagttctactacccggtgtttcagttcactgatgaggaagggatctcggataaaggtgtgctcc

SEQ ID NO: 417411 - DNA, 75 bp, synthetic construct
  source 1..75: mol_type = other DNA
atccctgttgcgtacgaagatgaggagatgacaaaggcaatcggggaagagcaaactttgagtacagagcgtaag

SEQ ID NO: 417412 - DNA, 75 bp, synthetic construct
  source 1..75: mol_type = other DNA
gaagaacgagaaggcgttgatcgctgcattggtgtgatttgttcttcggtaagtgatgagttattccctaatgtg

SEQ ID NO: 417413 - DNA, 75 bp, synthetic construct
  source 1..75: mol_type = other DNA
agtacggcctgcgcggtgaggccctgagcgcggaggtaagacgtatcgtcgctggccctgaacgaccagataaca

SEQ ID NO: 417414 - DNA, 75 bp, synthetic construct
  source 1..75: mol_type = other DNA
aaaacagaccggtaaaaaagtggcgattatcggcgcaggtccggcggggctggcgtgtgcggatgtgttaacgcg

SEQ ID NO: 417415 - DNA, 75 bp, synthetic construct
  source 1..75: mol_type = other DNA
agggggcgaagcacgttacctgtgcctatcgtcgtgatgaagagaacatgccaggttcccgccgcgaagtgaaaa

SEQ ID NO: 417416 - DNA, 75 bp, synthetic construct
  source 1..75: mol_type = other DNA
tggcgatattgtccgtggttccgacctggtagtaaccgctattgccgaaggtcgtaaggcggcagacggcattat

SEQ ID NO: 417417 - DNA, 75 bp, synthetic construct
  source 1..75: mol_type = other DNA
tccgccagcacgacgccgcgccattccgggagtgcagctgcattacctgccaggaaatcgtagagctgaaaggca

SEQ ID NO: 417418 - DNA, 75 bp, synthetic construct
  source 1..75: mol_type = other DNA
gaaacagaccggtaaaaaagtggcgattatcggcgcaggcccggcgggtctggcgtgcgcggatgtcctgacgcg

SEQ ID NO: 417419 - DNA, 75 bp, synthetic construct
  source 1..75: mol_type = other DNA
ccagcaacccgaaaatcttcgccggtggtgacattgtgcgaggttcagacctggtggtaacggcaattgccgaag

SEQ ID NO: 417420 - DNA, 75 bp, synthetic construct
  source 1..75: mol_type = other DNA
tgttcgtgctggaagatagcgagacaggcaccgtggcggggatttgtgccattgaggtggcggttgggctgaacg

SEQ ID NO: 417421 - DNA, 75 bp, synthetic construct
  source 1..75: mol_type = other DNA
cggcggcaccggcacgcagattaacggtgacgacgccacggcgaataacagcggcaaaaccaccgttgacggtaa

SEQ ID NO: 417422 - DNA, 75 bp, synthetic construct
  source 1..75: mol_type = other DNA
cccgctatgcctgttacctggtagtacaaaacggcgaccctgcgaaaccggttattgcggcagggcaaacttatt

SEQ ID NO: 417423 - DNA, 75 bp, synthetic construct
  source 1..75: mol_type = other DNA
ggctggtatttgccggatattcactggttctggctctcgcatttatggtgttgtttaaatataaacacaacagta

SEQ ID NO: 417424 - DNA, 75 bp, synthetic construct
  source 1..75: mol_type = other DNA
catggcgcgccgcctttcgtgccggtggtgctgtcgttaccgacgagctgaaacaacgccatctggcgcgcgtgg

SEQ ID NO: 417425 - DNA, 75 bp, synthetic construct
  source 1..75: mol_type = other DNA
ggcgacaaggccatcgtcaataacgaaggcgagagcactatcaccaatggcggcaccggcactcagatcaacggt

SEQ ID NO: 417426 - DNA, 75 bp, synthetic construct
  source 1..75: mol_type = other DNA
aaacggctgataccgacgtgaaacgtaagcgtcgtctgagtaccgtctggtcccgaatccaggatcctgtaactt

SEQ ID NO: 417427 - DNA, 75 bp, synthetic construct
  source 1..75: mol_type = other DNA
tgtattattcaggggatgtcgatcagcgcccgcgaaggcgcatcgctggaaaaactgatgcagattgcccaaacc

SEQ ID NO: 417428 - DNA, 75 bp, synthetic construct
  source 1..75: mol_type = other DNA
ccgcgccgtacttgaccgctatatcgaccgttttgccgcaaagcacgaagcgcaattgttttgtgaagagaaaag

SEQ ID NO: 417429 - DNA, 75 bp, synthetic construct
  source 1..75: mol_type = other DNA
tttctcgacccggagtggcgcaaagagggcaacggctatttgctgtcgaaatcgcgctttatgtttatggcggct

SEQ ID NO: 417430 - DNA, 75 bp, synthetic construct
  source 1..75: mol_type = other DNA
gatggcaatccacagtggtcaaccatttggctggtatttgccggatattcactggttctggctctcgcatttatg

SEQ ID NO: 417431 - DNA, 75 bp, synthetic construct
  source 1..75: mol_type = other DNA
ggttcttgctctcgcatttatggtgttgtttaaatataaacatgacggtgcagcgacgacttccagtcattacgc

SEQ ID NO: 417432 - DNA, 75 bp, synthetic construct
  source 1..75: mol_type = other DNA
tcacctggcaagaagcggaagagggatgtactggacgtgctgatttcttgctgtataaagaaaaaaaagtggggt

SEQ ID NO: 417433 - DNA, 75 bp, synthetic construct
  source 1..75: mol_type = other DNA
actgcgctggatggggtgaatattagcggtgaaaataacaccgttgatttgaacggcagtataaatttctcactc

SEQ ID NO: 417434 - DNA, 75 bp, synthetic construct
  source 1..75: mol_type = other DNA
ccgccagacgatggcggagacacaccagtaccgccggacgatggcggagacacaccagtaccgccggacgatggc

SEQ ID NO: 417435 - DNA, 75 bp, synthetic construct
  source 1..75: mol_type = other DNA
cgaccaacctggaaggtggtgtaattactgtatataacgcaggtgccggtatggccgcctacggtaacagtaata

SEQ ID NO: 417436 - DNA, 75 bp, synthetic construct
  source 1..75: mol_type = other DNA
acgccagtaccgccggacgatggcggtaatacgccagtaccgccggacgatggcggtgatacaccagtaccgccg

SEQ ID NO: 417437 - DNA, 75 bp, synthetic construct
  source 1..75: mol_type = other DNA
ataaccagttatttgcgatgggcgcgattgccagtggcgtggcgattaacgacaagaccggcgtgattaatatta

SEQ ID NO: 417438 - DNA, 75 bp, synthetic construct
  source 1..75: mol_type = other DNA
cggaacaggcaatacggttaaccttcagggcggtatcaacgtttctggaataagcgcagagcagattgtgacggg

SEQ ID NO: 417439 - DNA, 75 bp, synthetic construct
  source 1..75: mol_type = other DNA
ggcgtgaagtacagcagcaaagaaagttcgctgaatctggatgcgtacaactggaaagaggacggcatcagcgac

SEQ ID NO: 417440 - DNA, 75 bp, synthetic construct
  source 1..75: mol_type = other DNA
cggacggtggaaatgttatatttgataaaaactctgtaacggatatatccagtaaagtcagagataccgactatt

SEQ ID NO: 417441 - DNA, 75 bp, synthetic construct
  source 1..75: mol_type = other DNA
tccactgcgcagaatgctggcgacattacaattgatacattgtgggtggatgataatgacactaccacattacgc

SEQ ID NO: 417442 - DNA, 75 bp, synthetic construct
  source 1..75: mol_type = other DNA
ttcaacagcagaaaatcagggtaaaattacactggattctatgtgggtagatgcaaatgacactaccgcaatgcg

SEQ ID NO: 417443 - DNA, 75 bp, synthetic construct
  source 1..75: mol_type = other DNA
cgggtacaggataaagctttgctggaaattggcagtggcgctacgctaacaatgcaggatattgacagttttgaa

SEQ ID NO: 417444 - DNA, 75 bp, synthetic construct
  source 1..75: mol_type = other DNA
tcggtgccaactatggtctgtgggccagtaatgatggcagcgtgatcaatgaatccgacgccaccatgaatctgc

SEQ ID NO: 417445 - DNA, 75 bp, synthetic construct
  source 1..75: mol_type = other DNA
agggtgcaacgggcatcaatatgacgggtaatggtagcgatatcaccctggacggaaatatcaacctgatatcga

SEQ ID NO: 417446 - DNA, 75 bp, synthetic construct
  source 1..75: mol_type = other DNA
tctactcttatcaatgtgggggacatcattgctaataatttcagtaccgggattcgcgtcgttggagatgatggt

SEQ ID NO: 417447 - DNA, 75 bp, synthetic construct
  source 1..75: mol_type = other DNA
tcggcgtgaagtacagcagcaaagaaagttcgctgaatctggatgcttaccactggaaagaggatggtatcagcg

SEQ ID NO: 417448 - DNA, 75 bp, synthetic construct
  source 1..75: mol_type = other DNA
taccgagtacgacatgctggcgctgcgtaaaaccctcgacctgagcgaaaaccagaccatgagcctggagtacgg

SEQ ID NO: 417449 - DNA, 75 bp, synthetic construct
  source 1..75: mol_type = other DNA
agttccggcaccttgaaagccaataaccttgttatcagtgacaacgtcaaggtaaatactggctttagtgcagga

SEQ ID NO: 417450 - DNA, 75 bp, synthetic construct
  source 1..75: mol_type = other DNA
caggatcgcaagtcatcaataacgggtttgttgaactctggaatattgggtttgccgaaatatcgggtacgggat

SEQ ID NO: 417451 - DNA, 75 bp, synthetic construct
  source 1..75: mol_type = other DNA
cgatattattcagacaagcaataatgcctttcttgaaatcacggatgatgcgaccttcagtatgaaggacattga

SEQ ID NO: 417452 - DNA, 75 bp, synthetic construct
  source 1..75: mol_type = other DNA
acgaaggtaaactccacgtcacacagttagccagcgtcgtgtctgatggaacaacgggcagaataattaccgtta

SEQ ID NO: 417453 - DNA, 75 bp, synthetic construct
  source 1..75: mol_type = other DNA
tggcctgcaacatcagatgacctttgagaatggcgtgaactggaataaagccctgcgctacgacgttcaccagtt

SEQ ID NO: 417454 - DNA, 75 bp, synthetic construct
  source 1..75: mol_type = other DNA
catcgcccgtcttgacggcgacggttcagataaggccggggacaacggcgtgaccggtggttacagccagttctt

SEQ ID NO: 417455 - DNA, 75 bp, synthetic construct
  source 1..75: mol_type = other DNA
ttcattaagctggagaaacggcgatatcattacggccgagggggagacgcttaacctgtcttcatccggtggttc

SEQ ID NO: 417456 - DNA, 75 bp, synthetic construct
  source 1..75: mol_type = other DNA
attcttccgtaggtattcgtgtttcgggtaacaataatgacctgacgctggatggtcagttaacattgaaggttg

SEQ ID NO: 417457 - DNA, 75 bp, synthetic construct
  source 1..75: mol_type = other DNA
ttaaacaggaaggggatttatacgttagcaatgctgcacggggtattgatgttgagggcaatggcgcagtcgtca

SEQ ID NO: 417458 - DNA, 75 bp, synthetic construct
  source 1..75: mol_type = other DNA
ttaggtaataataccgaatacgacatgctggcattgcgtaaaaccatcgacctgagcgaaagccagacgatgagt

SEQ ID NO: 417459 - DNA, 75 bp, synthetic construct
  source 1..75: mol_type = other DNA
taaacagaaccgtatttactaccggaaaccacggagtgaaatgggtgtgacttgtgttggtcgccagaaaataaa

SEQ ID NO: 417460 - DNA, 75 bp, synthetic construct
  source 1..75: mol_type = other DNA
ggcgatgctagcctccggcagcctgcaagtggacaccgagcagttagccagcgacatgctgagttttttccagaa

SEQ ID NO: 417461 - DNA, 75 bp, synthetic construct
  source 1..75: mol_type = other DNA
ggcgatgctggcgtccggcagcccgcaagtggacactgaacagttagccagcgacatgctgagttttttccagaa

SEQ ID NO: 417462 - DNA, 75 bp, synthetic construct
  source 1..75: mol_type = other DNA
gccagcatcctcaaagatgggcgtgtcgtgtttaacattgccggtaataagtaccggttagttgtttggatcaat

SEQ ID NO: 417463 - DNA, 75 bp, synthetic construct
  source 1..75: mol_type = other DNA
ttgaacattttcgtatttacgtcaccctggcggatggctttaacagccacaccatcgagtattacgtcgaaacaa

SEQ ID NO: 417464 - DNA, 75 bp, synthetic construct
  source 1..75: mol_type = other DNA
gaacaggcaatgaaagaacagcgactggcgaggaagattgcgctaaagctctctggttgcgtcagagcagacaaa

SEQ ID NO: 417465 - DNA, 75 bp, synthetic construct
  source 1..75: mol_type = other DNA
cctcatgaatgagggtaccaaaacgtctgttcttggagtgtttaaatttcgagccgtattaaaccttgccatgtt

SEQ ID NO: 417466 - DNA, 75 bp, synthetic construct
  source 1..75: mol_type = other DNA
tagtgactttcctgatctaaatatttcattagtaaaaagtgatgaaacgtcattaagagattttttaactaatat

SEQ ID NO: 417467 - DNA, 75 bp, synthetic construct
  source 1..75: mol_type = other DNA
cccgaattttgctaccaccatgactaatgcgcttgcgggtaagcaaccgaaagatgctaccctgacggcgctggc

SEQ ID NO: 417468 - DNA, 75 bp, synthetic construct
  source 1..75: mol_type = other DNA
ctgttacatgcatttgtaaaaaaaacacagaaaacaccagtgaaggctatagaaatcgccagaaatcgtctgaag

SEQ ID NO: 417469 - DNA, 75 bp, synthetic construct
  source 1..75: mol_type = other DNA
gctaggctgattgaacgactggaacaagaaggtaacaaaatgaaaatgcctcatagtcgtgtaattggcggagga

SEQ ID NO: 417470 - DNA, 75 bp, synthetic construct
  source 1..75: mol_type = other DNA
tttttaaacaatttgaatctcatccattgtttaagcctatgatgctagatgccagaaccaaaatggcaagtaggg

SEQ ID NO: 417471 - DNA, 75 bp, synthetic construct
  source 1..75: mol_type = other DNA
gcggctgttcgacgagatgcaggcacaccagttactcatcccctgtgaggacaaagccatctggcattgccggat

SEQ ID NO: 417472 - DNA, 75 bp, synthetic construct
  source 1..75: mol_type = other DNA
tgacggatatgaacagcgacgggctggtggtctgaatgcggatctgaaaacgtttaaaccggtatttcgtgtcac

SEQ ID NO: 417473 - DNA, 75 bp, synthetic construct
  source 1..75: mol_type = other DNA
agacgcttgataaatgcgcaagcgctggggagacgttcggcaaagtgcttggcctggcaattcagggactaatgc

SEQ ID NO: 417474 - DNA, 75 bp, synthetic construct
  source 1..75: mol_type = other DNA
gtggaacccatgaaaataacagtgaaggacagccgtgttttttattttacggtttataacgacacagacaacgaa

SEQ ID NO: 417475 - DNA, 75 bp, synthetic construct
  source 1..75: mol_type = other DNA
ctgaccgacgcggatgctatcacctcaacctccgtggtatggactgctaaaggcagcaccgatgccagcggtaac

SEQ ID NO: 417476 - DNA, 75 bp, synthetic construct
  source 1..75: mol_type = other DNA
aacgtcggcacagaaggcacctctgagactggcatggtagggatgcaactcgaaagcaacgcgaaggcggatgcg

SEQ ID NO: 417477 - DNA, 75 bp, synthetic construct
  source 1..75: mol_type = other DNA
gtaaccaaccccctggcagagagcgatatttatatcaccaacgcaggaacggtgacgggcggagccattacggtt

SEQ ID NO: 417478 - DNA, 75 bp, synthetic construct
  source 1..75: mol_type = other DNA
cgcatattttttggctcagtctcggcggtttattgctggctgccgagatgctgggcagcaatggttatctgcttt

SEQ ID NO: 417479 - DNA, 75 bp, synthetic construct
  source 1..75: mol_type = other DNA
atgcatcctgaatccgcgcaaacactactggctgaaactcctcgtcaacagctggtccagtttattcgccagagc

SEQ ID NO: 417480 - DNA, 75 bp, synthetic construct
  source 1..75: mol_type = other DNA
cttcgctgatttgggaagatccacaacagcggcccgctaccttcattggaaccgtcacaccgatagcggaaatcc

SEQ ID NO: 417481 - DNA, 75 bp, synthetic construct
  source 1..75: mol_type = other DNA
ttttttgtttatatcagcacaggggcagacccgtgaacccgaaaaaggtgttgccgtcgagcccctgaaaattac

SEQ ID NO: 417482 - DNA, 75 bp, synthetic construct
  source 1..75: mol_type = other DNA
tgatgatttttacaacgttgtttgtagggggagcttctaccgcagttgctaaaaactgcaaaaaaggaatacctt

SEQ ID NO: 417483 - DNA, 75 bp, synthetic construct
  source 1..75: mol_type = other DNA
tcgcggcgggtgcgcgaacaaaagcacagcgatagtcatttaaaccagcgcgggcagcagctgattggccgacgt

SEQ ID NO: 417484 - DNA, 75 bp, synthetic construct
  source 1..75: mol_type = other DNA
ttaaaaaattaatactgatagatgatttgataggttctggagatcgaacaaaggaatttattgaaagcgtttata

SEQ ID NO: 417485 - DNA, 75 bp, synthetic construct
  source 1..75: mol_type = other DNA
caggctgtgccggattcagttatccgaatcatgcaatcgagcactctttatccgcacttttcaacgttccacacg

SEQ ID NO: 417486 - DNA, 75 bp, synthetic construct
  source 1..75: mol_type = other DNA
tgctctcgcgctttaataacatcacagtgatgaccaacagcctgcatatcgtcaatgcgctatccgaactggata

SEQ ID NO: 417487 - DNA, 75 bp, synthetic construct
  source 1..75: mol_type = other DNA
tttgtggcgcaaacgagctgcaggcaaaaaaaatcatcgccaaaggcggaaaagatgaagttgctatctgctctg

SEQ ID NO: 417488 - DNA, 75 bp, synthetic construct
  source 1..75: mol_type = other DNA
acagacgttgagaaaatggagttgccaatgagctttaactggttggttgctccttatcgccttataccactatga

SEQ ID NO: 417489 - DNA, 75 bp, synthetic construct
  source 1..75: mol_type = other DNA
agacaaggaactacaacgtcaatttactttagatgatgtgtccggcgcagaatttaaccaacaaaaaaatacgct

SEQ ID NO: 417490 - DNA, 75 bp, synthetic construct
  source 1..75: mol_type = other DNA
cagtatctggaattccgtagtgaaggggcaaaaacctttgaactgcgtgaaggtctgaatgtgacgccttatgcg

SEQ ID NO: 417491 - DNA, 75 bp, synthetic construct
  source 1..75: mol_type = other DNA
caaaagtactcgcgaagcacctcaactcaagaggttaaaatttacgctaccgaagctagggccaattgtttttct

SEQ ID NO: 417492 - DNA, 75 bp, synthetic construct
  source 1..75: mol_type = other DNA
aacaatcaatctgacatcaaatacacaaccttatcgggggtcaggaattggcgagtacccggtaaaatggtacag

SEQ ID NO: 417493 - DNA, 75 bp, synthetic construct
  source 1..75: mol_type = other DNA
gataaactgattaccgacgcaggtatcgatccagcgtttcgtcaggcgctggaagaaaaagggatcgacgtgatc

SEQ ID NO: 417494 - DNA, 75 bp, synthetic construct
  source 1..75: mol_type = other DNA
gcaaagacggtgagacgatgacagttagtgatgaaaacatcattaaagttgccgcactgctgggagtaactcccg

SEQ ID NO: 417495 - DNA, 75 bp, synthetic construct
  source 1..75: mol_type = other DNA
ggatgtgatatctatgcaccgggtaccaccggtacgctgaacgatcataacagtactactgatattatcgttcct

SEQ ID NO: 417496 - DNA, 75 bp, synthetic construct
  source 1..75: mol_type = other DNA
tgcggttttgaagggttggcttattctcgccaggatcacactttctggttttttaaagagaaaaatccgatttag

SEQ ID NO: 417497 - DNA, 75 bp, synthetic construct
  source 1..75: mol_type = other DNA
caggaagcgcaggtctttaccctggtgctaccggtggcccagaaaatggccagcttggtgtcgggatggttcgct

SEQ ID NO: 417498 - DNA, 75 bp, synthetic construct
  source 1..75: mol_type = other DNA
attctggtggttttctggctggaattggtgcgcaaaatgagaatgcgccaaaggcaagcgacattaacgcaacgc

SEQ ID NO: 417499 - DNA, 75 bp, synthetic construct
  source 1..75: mol_type = other DNA
tatccccatggcattatgggcatcatggtgaaaatgctatgttttataaaacactcttttttgggtacagagaga

SEQ ID NO: 417500 - DNA, 75 bp, synthetic construct
  source 1..75: mol_type = other DNA
tctatatatggaaatccggtgatatagaagctgtttatggatttggtaaaaaacaaactgaatgggatagtcttt

SEQ ID NO: 417501 - DNA, 75 bp, synthetic construct
  source 1..75: mol_type = other DNA
ccattgataccaagcgcctgaagatggaaaaccagttcaattcgctgaaagctgcttctggtcgagcttatgatg

SEQ ID NO: 417502 - DNA, 75 bp, synthetic construct
  source 1..75: mol_type = other DNA
ggcagaaacaatccgcagcaatcaggctggcgaagcacttcaggcgagagggcaggatattagccgagcaaatgc

SEQ ID NO: 417503 - DNA, 75 bp, synthetic construct
  source 1..75: mol_type = other DNA
ttcgatatcaaagatcaaatggaaggtcgggatattgaacgtggcaagttggcagagacaatccgcagcaatcag

SEQ ID NO: 417504 - DNA, 75 bp, synthetic construct
  source 1..75: mol_type = other DNA
gatcggcgtgcaggcagtggccccggaagcgggcgaactgatccagacggccgcactggcgattcgcaaccggat

SEQ ID NO: 417505 - DNA, 75 bp, synthetic construct
  source 1..75: mol_type = other DNA
cccctgagcaattacgtaaacaggcacaggaaatgttgcgtcatgctgaacaactggaaaagacgggtgtaacaa

SEQ ID NO: 417506 - DNA, 75 bp, synthetic construct
  source 1..75: mol_type = other DNA
tcaggcaacaatgcatggactgccagttgcgacacgaccgaagatcaaaatggttcaattacagtttacgccatt

SEQ ID NO: 417507 - DNA, 75 bp, synthetic construct
  source 1..75: mol_type = other DNA
caagatggctggtcgtgatattgaccgaggcaggctggcagagacaatccgcagcaatcaggctggtgaagcact

SEQ ID NO: 417508 - DNA, 75 bp, synthetic construct
  source 1..75: mol_type = other DNA
acactcttttttgggtacagagagagtatctccggtggatggtgttttttgcgtcagacatatgatatccgcaac

SEQ ID NO: 417509 - DNA, 75 bp, synthetic construct
  source 1..75: mol_type = other DNA
atgaaaacagtctttacggcgtggtggtttcggggtcaaataacatcatcagcctcgatggtggtatcaatattt

SEQ ID NO: 417510 - DNA, 75 bp, synthetic construct
  source 1..75: mol_type = other DNA
tgacagttcatggcctgtcagcgccagcgaggatctcggcgctggtacgcatgttgaagtcattgcgatagaagg

SEQ ID NO: 417511 - DNA, 75 bp, synthetic construct
  source 1..75: mol_type = other DNA
cacatattttctggctcagtctcggcggtttgctgctggcagccgagatgctgggcggaaatggttatttgttgt

SEQ ID NO: 417512 - DNA, 75 bp, synthetic construct
  source 1..75: mol_type = other DNA
gaagttcagtccggtcagttaccgagcacacaacctgcctgtgtcagaaaatttgctggagcaggatttttacgc

SEQ ID NO: 417513 - DNA, 75 bp, synthetic construct
  source 1..75: mol_type = other DNA
acaattaataacgcacaaagcggtgtaattaacgtttacgcagataactcctgggctttcggaggacagactaaa

SEQ ID NO: 417514 - DNA, 75 bp, synthetic construct
  source 1..75: mol_type = other DNA
aaggcgacccgcgtgctgaactgggtaacgacacacagtacgacatgatggcgctgcgtaaatctctgacgctga

SEQ ID NO: 417515 - DNA, 75 bp, synthetic construct
  source 1..75: mol_type = other DNA
agcgaagatttaggtgcaggcacgcatgttgaggtgattgcgattgaagggataacgttgatcatccgtgcggtc

SEQ ID NO: 417516 - DNA, 75 bp, synthetic construct
  source 1..75: mol_type = other DNA
gattaccgcgttgtgaagatgcctgttaccaaaggtgggaggctggaactgaccatcaccgaaatggggaatgaa

SEQ ID NO: 417517 - DNA, 75 bp, synthetic construct
  source 1..75: mol_type = other DNA
acaaggcggtcgtgaacaacgacggtgacaatgccatcagcaacggcggcaccggcacgcaggttaacggtgatg

SEQ ID NO: 417518 - DNA, 75 bp, synthetic construct
  source 1..75: mol_type = other DNA
aacaacgacggcgacagcacgatccttgatggcggcaccggaacccgcattacgggtgatgatgcgacggccaac

SEQ ID NO: 417519 - DNA, 75 bp, synthetic construct
  source 1..75: mol_type = other DNA
agcggctggtatacgtggtgtcagcggcggacaaggataagcacgcgtcagcagttccgccaacactgcgacagc

SEQ ID NO: 417520 - DNA, 75 bp, synthetic construct
  source 1..75: mol_type = other DNA
aattgaattcagattttaattatttctttacagatatactggatggatgttcagttggaatacgcacagagggta

SEQ ID NO: 417521 - DNA, 75 bp, synthetic construct
  source 1..75: mol_type = other DNA
ttcggaaactcacccaggcactgaccggcacgatcggcgtgatgactgaatgggcaaataagaatccgcagctat

SEQ ID NO: 417522 - DNA, 75 bp, synthetic construct
  source 1..75: mol_type = other DNA
gaggaaaagatgaatggactgtttatgaacagataggttttgcggtcagttgtatgctctacaatcgtaattaca

SEQ ID NO: 417523 - DNA, 75 bp, synthetic construct
  source 1..75: mol_type = other DNA
gttgtcaatgccggggtgattaatatcaggccagatgctgaatcacacactttctttgctggaatgatggcaaga

SEQ ID NO: 417524 - DNA, 75 bp, synthetic construct
  source 1..75: mol_type = other DNA
cctgggcgtttggtgggcaaacgaaagccatcattaacaacggtgaaattaatctgctgtgtgacaccggatgcg

SEQ ID NO: 417525 - DNA, 75 bp, synthetic construct
  source 1..75: mol_type = other DNA
cggtgacgccagcgacattgccctggccggggcgatgcatgtcggggatttttccaccgggctggaggtgatggg

SEQ ID NO: 417526 - DNA, 75 bp, synthetic construct
  source 1..75: mol_type = other DNA
tggtgtgcagattaacggcgataacagtacctttatcaacgttggagatttaaatgccgacgacagggcgaccgg

SEQ ID NO: 417527 - DNA, 75 bp, synthetic construct
  source 1..75: mol_type = other DNA
attaatcttttcggtaatccaatggatgaaagtgattcccatatgggcgttacgccggatgacaaagatattctc

SEQ ID NO: 417528 - DNA, 75 bp, synthetic construct
  source 1..75: mol_type = other DNA
ctggttattggcgacaacgtgagtgttaacgccgggtttagtgcaggaactgcggacaccaccgttgtcgttaac

SEQ ID NO: 417529 - DNA, 75 bp, synthetic construct
  source 1..75: mol_type = other DNA
tcacgatgaccaaaaacgcctatacggatgttgtgacggattcttcagttaataatgtcgctcaggtactggata

SEQ ID NO: 417530 - DNA, 75 bp, synthetic construct
  source 1..75: mol_type = other DNA
actgatgcaagcggcaacgtagacgtcacgatgaccaaaaacgcctatacggatgttgtgacggattcttcagtt

SEQ ID NO: 417531 - DNA, 75 bp, synthetic construct
  source 1..75: mol_type = other DNA
attactggattctgacaccattagtgcagcagcgaatgtctataaccgtgcatcgggtagcattattaccgacct

SEQ ID NO: 417532 - DNA, 75 bp, synthetic construct
  source 1..75: mol_type = other DNA
tctgcaaccttacctgttgttgctagcactcaagaagtcattggcacaacagttccagcaatcagcgccgtttta

SEQ ID NO: 417533 - DNA, 75 bp, synthetic construct
  source 1..75: mol_type = other DNA
acagtgcagatccccatatgggggctaccccagataatctggatctgctgtcagcactaacaggcagcggcgaaa

SEQ ID NO: 417534 - DNA, 75 bp, synthetic construct
  source 1..75: mol_type = other DNA
acgcggtagcgtgggtatgttggcggttactcaagcgattatagaaaatgctggcaccatcaaactggactctct

SEQ ID NO: 417535 - DNA, 75 bp, synthetic construct
  source 1..75: mol_type = other DNA
cggtatggttgtcagcgtggcggatgaaaacagcctgagaacgctgcgtgagctggcgcccggcgtgatgatggt

SEQ ID NO: 417536 - DNA, 75 bp, synthetic construct
  source 1..75: mol_type = other DNA
actgttggtttaacggagccgcaggcgcgcgagcagtacggcgacgatcaggtgaaagtgtataaatcctctttc

SEQ ID NO: 417537 - DNA, 75 bp, synthetic construct
  source 1..75: mol_type = other DNA
tctgccgtccgtgatggccccgtcaatggtgttgccggttgagacaccggaaatgacgccgggggaggtggatga

SEQ ID NO: 417538 - DNA, 75 bp, synthetic construct
  source 1..75: mol_type = other DNA
aaatgacaccggggaaggtggatgaccgcgccctgcatttgccggggattggggcactgtatctggtgggggatg

SEQ ID NO: 417539 - DNA, 75 bp, synthetic construct
  source 1..75: mol_type = other DNA
tgagctggcccgccgtttgcagttacggcattacccggtgctgatcaccgataccggattgtcccgacaggtacg

SEQ ID NO: 417540 - DNA, 75 bp, synthetic construct
  source 1..75: mol_type = other DNA
aaccatacctgggcgttctcaattgccgaaatgaaaaagaatctcggttttagccatctggaaattattaacgat

SEQ ID NO: 417541 - DNA, 75 bp, synthetic construct
  source 1..75: mol_type = other DNA
aatatcagcacagaaacccgcgaaattctgcgtaattacagggccgtgattaatgcgcggcgtcgtgaaatgggg

SEQ ID NO: 417542 - DNA, 75 bp, synthetic construct
  source 1..75: mol_type = other DNA
cgtaattacagggccgtgattaatgcgcggcgtcgtgaaatggggcagaaaccgctcaccaccgcgcagattgtt

SEQ ID NO: 417543 - DNA, 75 bp, synthetic construct
  source 1..75: mol_type = other DNA
gacagagtatgtatacgttaccttgagtacaaaaaggaacaagtcaggaaaaacatgggccaatccaatttcaac

SEQ ID NO: 417544 - DNA, 75 bp, synthetic construct
  source 1..75: mol_type = other DNA
ccagtttggcggagcagaaccagtagaaggtaaaccaatcgcggtgtacggtgccggaacagggcttggggttgc

SEQ ID NO: 417545 - DNA, 75 bp, synthetic construct
  source 1..75: mol_type = other DNA
tgggtaagcttgccaggcgaaggcggtcacgttgattttgcgccgaatagtgaagaagaggccattatcctcgaa

SEQ ID NO: 417546 - DNA, 75 bp, synthetic construct
  source 1..75: mol_type = other DNA
gcaatgaatgcggccgggatggtggtgaatgtgaaatcggatgccggattacaggcgcttcaggcgctggctcag

SEQ ID NO: 417547 - DNA, 75 bp, synthetic construct
  source 1..75: mol_type = other DNA
ttgctggaaaatgcggcgaagcaatttaacaacattggggcgacgactccggtcgttccttttcgtattttgctg

SEQ ID NO: 417548 - DNA, 75 bp, synthetic construct
  source 1..75: mol_type = other DNA
tgaggctaacgcccacctcagagcgctgttgaaggcgcagggatttgcactcagtcacagttttatgtcggtgct

SEQ ID NO: 417549 - DNA, 75 bp, synthetic construct
  source 1..75: mol_type = other DNA
actggatacccgtcgcggttcaaattctcaactcgaaacggcagtgaaagatctgggcgcagtggtgtccttcaa

SEQ ID NO: 417550 - DNA, 75 bp, synthetic construct
  source 1..75: mol_type = other DNA
catggcggcatgtttgttgtgcctctgttcacccatcctctgctgttttgcctggcgctgggtataggcacggtg

SEQ ID NO: 417551 - DNA, 75 bp, synthetic construct
  source 1..75: mol_type = other DNA
gcactgctgactgacatgctggagccgtcactgctgaccgcgccgccggtactgaccgcgcgcggctgtgaagtg

SEQ ID NO: 417552 - DNA, 75 bp, synthetic construct
  source 1..75: mol_type = other DNA
tttggcagttgccctcagcatatcaccacattggccatttttggcgaagtcgcggcggtgcatgaagccatgcga

SEQ ID NO: 417553 - DNA, 75 bp, synthetic construct
  source 1..75: mol_type = other DNA
tgatcactgaaggagtcattccgatcgccgcgcgtgacctgctgcgagtagtgggatcttgtgtggtggcatcgg

SEQ ID NO: 417554 - DNA, 75 bp, synthetic construct
  source 1..75: mol_type = other DNA
gcagggcggatcgcgcttcctgatgggggccatacttggcgcgatggcaaccttcgatttcggtggtccggtcaa

SEQ ID NO: 417555 - DNA, 75 bp, synthetic construct
  source 1..75: mol_type = other DNA
ttgcgttggggcaagttcttggcggtacagatgttggtgaaaaaacaggaacaatcccgtggatgcttaatcaga

SEQ ID NO: 417556 - DNA, 75 bp, synthetic construct
  source 1..75: mol_type = other DNA
ctttaccctgtcgatggacgatgtggtggtttcttcgttcgtcaccgggccgagttatgaaattctgccgttaaa

SEQ ID NO: 417557 - DNA, 75 bp, synthetic construct
  source 1..75: mol_type = other DNA
gcggtagcaggtgcggtaaaccagaacgctgaacgcgtgtttatcgaactggcgcaaattctgtttaacccgtgg

SEQ ID NO: 417558 - DNA, 75 bp, synthetic construct
  source 1..75: mol_type = other DNA
cgtccatgcgcgtcgtatcagtatgacctggatgatcctctgcctggcaggggcggtggctgtcggcttctttgg

SEQ ID NO: 417559 - DNA, 75 bp, synthetic construct
  source 1..75: mol_type = other DNA
cctgatgatttttgccctgatcctgacgccggttatcgtaatcattagcgttggtgggtttggcgactcgctgga

SEQ ID NO: 417560 - DNA, 75 bp, synthetic construct
  source 1..75: mol_type = other DNA
cattgcatactttaacaataatccagcggttgccggtgcggtaaatcagaactctgagcgcgtgtttatcgaact

SEQ ID NO: 417561 - DNA, 75 bp, synthetic construct
  source 1..75: mol_type = other DNA
gtgagctacgcgtgggcaggctttggcgcggcgtttggtccagtggtgctgttctcggtgatgtggtcacgcatg

SEQ ID NO: 417562 - DNA, 75 bp, synthetic construct
  source 1..75: mol_type = other DNA
actatattctgggcggtcgcagccttgggccgtttgtaacggcattatcggcgggggcgtcggatatgagcggct

SEQ ID NO: 417563 - DNA, 75 bp, synthetic construct
  source 1..75: mol_type = other DNA
ggcggcggcacagggcactgacaccattgaagtggcctggctggatggtgtggacacgccatacattgatcagca

SEQ ID NO: 417564 - DNA, 75 bp, synthetic construct
  source 1..75: mol_type = other DNA
atatgctggtggacgtgccgatgaagatggggcgtgcggcgaaggcaacgattggtgacctggtctacaaggtgc

SEQ ID NO: 417565 - DNA, 75 bp, synthetic construct
  source 1..75: mol_type = other DNA
acaccggcgaattacatctgtggggagataaaacagaacgctggaatgtgtccctgccagtgagtattgagtatc

SEQ ID NO: 417566 - DNA, 75 bp, synthetic construct
  source 1..75: mol_type = other DNA
tggcgatcaacgaaaaactttgacgactatattctgggcggtcgtagtcttgggccattcgtgacggcattatcg

SEQ ID NO: 417567 - DNA, 75 bp, synthetic construct
  source 1..75: mol_type = other DNA
aatcagcaggtgaaaacggagatgtagaagctcagtatgcgttggggctcatgtatttatatggagaaatactgg

SEQ ID NO: 417568 - DNA, 75 bp, synthetic construct
  source 1..75: mol_type = other DNA
tagcgggatttattatccttcttgcgatcgtttatgctgctatcagtgacagggattctacgctttctaggttga

SEQ ID NO: 417569 - DNA, 75 bp, synthetic construct
  source 1..75: mol_type = other DNA
tggtggcaattgcgctggcggcgaatcctgaaaaccgtgtgctgggcttagtaagctacgcgtgggcaggcttcg

SEQ ID NO: 417570 - DNA, 75 bp, synthetic construct
  source 1..75: mol_type = other DNA
agattgttgatgaaatctgcgattttgtggtgaatcagcaggctgttttcctgggtggtcactatatccttcggg

SEQ ID NO: 417571 - DNA, 75 bp, synthetic construct
  source 1..75: mol_type = other DNA
agattgttgatgaaatctgcgattttgtagtgaatcagcaggcagttttcctgggcggtcactacatctttcagg

SEQ ID NO: 417572 - DNA, 75 bp, synthetic construct
  source 1..75: mol_type = other DNA
tgcgattttgtggtgaatcagcaggcggttttcctcggtggtcactatatccttcagggcagcagaaacaggtga

SEQ ID NO: 417573 - DNA, 75 bp, synthetic construct
  source 1..75: mol_type = other DNA
tggaagcggcgaaagatctcggtgccagcgaatttaccattctgcgaaaaatcattctgccactggcaatgcctg

SEQ ID NO: 417574 - DNA, 75 bp, synthetic construct
  source 1..75: mol_type = other DNA
ttattgaacaatccggcattcgcccggaatttgtggtcagtactgaaccgactgattgccaggtataccgtggtc

SEQ ID NO: 417575 - DNA, 75 bp, synthetic construct
  source 1..75: mol_type = other DNA
gggttatgacgaattcctcggcaaaggcaccctcaccgtttctgaaatcttcttcacatccccaagccgttgcgc

SEQ ID NO: 417576 - DNA, 75 bp, synthetic construct
  source 1..75: mol_type = other DNA
cgtgcgtactgtgctggaagccttaccagcggcgtcgcacccgatggatgttatgcgcaccggcgtttccgcgct

SEQ ID NO: 417577 - DNA, 75 bp, synthetic construct
  source 1..75: mol_type = other DNA
attatattttgggtggccgcagtcttggcccatttgtaacggcattatcggcgggtgcgtcggatatgagcggct

SEQ ID NO: 417578 - DNA, 75 bp, synthetic construct
  source 1..75: mol_type = other DNA
ctgtttgaaagcaccttcggcatgagctacgaaaccgcactctgggcgggcgcggcggcgaccatcctttatacc

SEQ ID NO: 417579 - DNA, 75 bp, synthetic construct
  source 1..75: mol_type = other DNA
gccacattacgtcatgagtgcaaccgcagagatcgggcgtgttgctgcaggtgcggtaacaggtggcaggctgtc

SEQ ID NO: 417580 - DNA, 75 bp, synthetic construct
  source 1..75: mol_type = other DNA
aggttgttgatgaaatctgcgattttgtggtgaatcagcaggctgttttcctcggtggtcactacatctttcagg

SEQ ID NO: 417581 - DNA, 75 bp, synthetic construct
  source 1..75: mol_type = other DNA
atgaatatcagcacagaaacccgcgaaattctgcgcaattacaaggccgtgattaatgcgcggcgtcgtgaaatg

SEQ ID NO: 417582 - DNA, 75 bp, synthetic construct
  source 1..75: mol_type = other DNA
gctctatgccgaagcagaacagaccagtgtactgctgagacaacgacaacgccggattgaggaactgaaacgtga

SEQ ID NO: 417583 - DNA, 75 bp, synthetic construct
  source 1..75: mol_type = other DNA
acctgttcctccatggctgtggcgaaaagaaaataaaaatgaccacacagaattacaaataaacaacatcttacc

SEQ ID NO: 417584 - DNA, 75 bp, synthetic construct
  source 1..75: mol_type = other DNA
agagccctccatttttaaagcacaactgaacatgcaatttgagcgaagctactcgaaatatttctatgcttctct

SEQ ID NO: 417585 - DNA, 75 bp, synthetic construct
  source 1..75: mol_type = other DNA
tgacgttattactggcggcgctgggctggcagacgtggcggctggctgatgccagccagaccatcagcacgcagg

SEQ ID NO: 417586 - DNA, 75 bp, synthetic construct
  source 1..75: mol_type = other DNA
tccggctgcgggaacgtccggcactcaccggaggtacggcttaccgtcagtggttgtccgcgagtgacgccgtgt

SEQ ID NO: 417587 - DNA, 75 bp, synthetic construct
  source 1..75: mol_type = other DNA
tggttgtccgcgagtgacgccccgtgtcggctggatcaggcaacgccgcgcactaacggtgatctgaacgcgttg

SEQ ID NO: 417588 - DNA, 75 bp, synthetic construct
  source 1..75: mol_type = other DNA
gtttataccatcgccgacccgcgccaccaggtgattaaacgtgtggcgaagcagctctcgcaggaaggcggctcg

SEQ ID NO: 417589 - DNA, 75 bp, synthetic construct
  source 1..75: mol_type = other DNA
atattgccgacaaactgctggcgtcacttagctcgattcttctctactggtatcactacagccacaacggcgaac

SEQ ID NO: 417590 - DNA, 75 bp, synthetic construct
  source 1..75: mol_type = other DNA
acgccggacgaagccgaagccgatatccgcaagcgggtggaaaacaaagaagtagtcattggttttggtcatccg

SEQ ID NO: 417591 - DNA, 75 bp, synthetic construct
  source 1..75: mol_type = other DNA
gacgctcctttgcctgctgacattatcaggctgcgggagcgtccggccttcgccggaggtgcagcttaccgtgag

SEQ ID NO: 417592 - DNA, 75 bp, synthetic construct
  source 1..75: mol_type = other DNA
acacggcgctgaaaagcaaaacgcaggaactgacaaagaagaacagtcagttgatcggcctgtccattctgaccg

SEQ ID NO: 417593 - DNA, 75 bp, synthetic construct
  source 1..75: mol_type = other DNA
ttgcaaaattaatcaatggaaataattattcgcgcagccctgtttacgaggaccgtctggatcacgaagcgttta

SEQ ID NO: 417594 - DNA, 75 bp, synthetic construct
  source 1..75: mol_type = other DNA
gctctatgccgaagcagaacagaccagcacacagctgagacaacgacaacgccggatcgaggaactgaaacgtga

SEQ ID NO: 417595 - DNA, 75 bp, synthetic construct
  source 1..75: mol_type = other DNA
cgacgtgtcagtaaacgttatgacgatgtagaagtgatcatcaaatccaccagcaacgatggcctttcagttact

SEQ ID NO: 417596 - DNA, 75 bp, synthetic construct
  source 1..75: mol_type = other DNA
tgcgcgtcaccgacatcgaaccgggtctggtgggtggcaccgagttttccaatgtccgctttaaaggcgatgacg

SEQ ID NO: 417597 - DNA, 75 bp, synthetic construct
  source 1..75: mol_type = other DNA
ctccgtttgcagctcaggttgcagcagagcgttgcgctgacgccgtgaaagaatacggcatcaagaatctggaag

SEQ ID NO: 417598 - DNA, 75 bp, synthetic construct
  source 1..75: mol_type = other DNA
ctactattgatagcttaaatattgaaaatcctaaaattcctaagctaataaaggaatttaatgaccttctaacat

SEQ ID NO: 417599 - DNA, 75 bp, synthetic construct
  source 1..75: mol_type = other DNA
atgaatctatcaaatgctcagcgccagatcgttgaagcccctatggatatagctattcaagtgcttgcctctgca

SEQ ID NO: 417600 - DNA, 75 bp, synthetic construct
  source 1..75: mol_type = other DNA
atccgcagacccatcttgcggggttcagtggtgtactgcaggcggatgctgtcacgaacggtgcaatagtgatcc

SEQ ID NO: 417601 - DNA, 75 bp, synthetic construct
  source 1..75: mol_type = other DNA
aaagagttcgaatggggtgacttccttctgtccagagaagaaagccttttacttcacactattcagtctgaacga

SEQ ID NO: 417602 - DNA, 75 bp, synthetic construct
  source 1..75: mol_type = other DNA
aaatggaatctttattaaataaacctggtgaaagcagccatgatgtgtgggaagagttcgaatggggaaacttcc

SEQ ID NO: 417603 - DNA, 75 bp, synthetic construct
  source 1..75: mol_type = other DNA
aaatggaatccttattaaataaacctggagaatacagtcatgatatatggaaagagttcggatggggagacttcc

SEQ ID NO: 417604 - DNA, 75 bp, synthetic construct
  source 1..75: mol_type = other DNA
ccgccggtctgtaccgaacgagcacaacactataccgagatgtatcaacaacatctcgataagccaatcccggta

SEQ ID NO: 417605 - DNA, 75 bp, synthetic construct
  source 1..75: mol_type = other DNA
gtttattccctccgtctgcagcatcgaaataccctacgttgacaatgcgattcgtcatcttgcgcaacaaggcgt

SEQ ID NO: 417606 - DNA, 75 bp, synthetic construct
  source 1..75: mol_type = other DNA
cactcttaaatccatcgccatacctgaacttgatttaataatagatggcgaattattgtctgtggggagaccgtg

SEQ ID NO: 417607 - DNA, 75 bp, synthetic construct
  source 1..75: mol_type = other DNA
tcgaacaacgtcaggacaacaaaattatccgtccttccgccaattacataggcccggaagaccgcccgtttgtcg

SEQ ID NO: 417608 - DNA, 75 bp, synthetic construct
  source 1..75: mol_type = other DNA
gctgaacccagctcagcctcatctattaaccgcaccagaaatctggctgcttaccgatctgactgaagattcaac

SEQ ID NO: 417609 - DNA, 75 bp, synthetic construct
  source 1..75: mol_type = other DNA
atttttaaaaaaataatacaatttttaaaaaaacagatgcaaataaaaaactctatttcccaattctttacagat

SEQ ID NO: 417610 - DNA, 75 bp, synthetic construct
  source 1..75: mol_type = other DNA
catgcagcacgtaattattgtctgactttgctttgttttattcatggtttccgggcgagtgaaatttgtcgattg

SEQ ID NO: 417611 - DNA, 75 bp, synthetic construct
  source 1..75: mol_type = other DNA
aaatcactgataactctccttgaacctgtaataacagagttgcaagaaatagacgcattacacgaacaatataac

SEQ ID NO: 417612 - DNA, 75 bp, synthetic construct
  source 1..75: mol_type = other DNA
ctgaatatcgccgccgattatgctgatttcgtgacagaggttattttaagaaaacgacggacggggattaatatg

SEQ ID NO: 417613 - DNA, 75 bp, synthetic construct
  source 1..75: mol_type = other DNA
tgaagggcatcatacttcgccggaagatttacgcgattacgtgatgcaggtgattgatgctaccgcggaaaatat

SEQ ID NO: 417614 - DNA, 75 bp, synthetic construct
  source 1..75: mol_type = other DNA
cgaagggcatcatacttcagcggaagatttacgtgattacgtgatacaggtgattgatgccacagcagaaaacat

SEQ ID NO: 417615 - DNA, 75 bp, synthetic construct
  source 1..75: mol_type = other DNA
tctgccggagggcacactggtcctggggaatacgtcagcagagggcattcgttgctatggtgccattcaggatgc

SEQ ID NO: 417616 - DNA, 75 bp, synthetic construct
  source 1..75: mol_type = other DNA
gtatcagcaacttctttttatcgcgcagaaagaaaacaaaagtaagtcagaaatcataaaggaactcattaccag

SEQ ID NO: 417617 - DNA, 75 bp, synthetic construct
  source 1..75: mol_type = other DNA
catggagtgtggcgtgaactctgacaacatcaaaacagggattgacccactcgacgaaatgttaggcggcattaa

SEQ ID NO: 417618 - DNA, 75 bp, synthetic construct
  source 1..75: mol_type = other DNA
tctacttcaggtgataatgctggattatcactagagattcatcctcacatgttacgtcattcatgtggttttgct

SEQ ID NO: 417619 - DNA, 75 bp, synthetic construct
  source 1..75: mol_type = other DNA
gccagacagatttgcacagcatcaaatgcacctgctgcacgtggcagacgatatgcacaaggggctgacgtatga

SEQ ID NO: 417620 - DNA, 75 bp, synthetic construct
  source 1..75: mol_type = other DNA
tcatcatgctctatcgggaagcggtatatgacgagaacagtagcgccgcgccatttgctgaaatcatcgtgacga

SEQ ID NO: 417621 - DNA, 75 bp, synthetic construct
  source 1..75: mol_type = other DNA
gcgggctggagtgctatcagcgcttccaggcgcgcgccaagaccgggagcgaaaccgatgccgatccgaacgcct

SEQ ID NO: 417622 - DNA, 75 bp, synthetic construct
  source 1..75: mol_type = other DNA
ggctcgcgcggcgtccgcctgcatccagtcaatgcaacaacgtccggcagcaagccgattctccccacgaaataa

SEQ ID NO: 417623 - DNA, 75 bp, synthetic construct
  source 1..75: mol_type = other DNA
gctatcgctggcgctgggaacttatcaacggattgcctacgtaatccggtaaaactggatgacgaaggttgggcg

SEQ ID NO: 417624 - DNA, 75 bp, synthetic construct
  source 1..75: mol_type = other DNA
ggacgtcctgggtctggtaaatctgcgttggcgcttgcaattgcccgcgaggctgccgaacgcccttaccctggc

SEQ ID NO: 417625 - DNA, 75 bp, synthetic construct
  source 1..75: mol_type = other DNA
atcgccggacgccctgggtctggtaaatcggcgttggcgttggcaattgcccgcgcggcggctgaacgtccatac

SEQ ID NO: 417626 - DNA, 75 bp, synthetic construct
  source 1..75: mol_type = other DNA
gtaatcttgagcaggacgctgacaggataatcatggtataccgcgatggctactacgatgagcagtctgtagccc

SEQ ID NO: 417627 - DNA, 75 bp, synthetic construct
  source 1..75: mol_type = other DNA
caaacgcatggaatgcggtgtcaattctgacaacatcaaaacagggatagaaccactcgacgaaatgttaggcgg

SEQ ID NO: 417628 - DNA, 75 bp, synthetic construct
  source 1..75: mol_type = other DNA
atcattccaccgcctgctgctcgaccctatcagtcgcgtcatgttctcatccgacggtgaggattttgactaccg

SEQ ID NO: 417629 - DNA, 75 bp, synthetic construct
  source 1..75: mol_type = other DNA
cggagtttatgcagctgcgcaattatctctctgtctttccgttcatgatgccggaagggctgtggagtgatatct

SEQ ID NO: 417630 - DNA, 75 bp, synthetic construct
  source 1..75: mol_type = other DNA
acggggcctatatcaccatcacccaggggattgaagacttcgacgggcagaaagccagtggcgcggcgaaagcgg

SEQ ID NO: 417631 - DNA, 75 bp, synthetic construct
  source 1..75: mol_type = other DNA
ccctggcagtggagatccccgcgaacttcggtcgcaatctgttgcgcggacgcccagtggagatcgccgcctggg

SEQ ID NO: 417632 - DNA, 75 bp, synthetic construct
  source 1..75: mol_type = other DNA
cgatcccgccgctgcaagccgacgacggcgacatcgccatcgaggcccaggggctgaccatgcgcttcggtgatt

SEQ ID NO: 417633 - DNA, 75 bp, synthetic construct
  source 1..75: mol_type = other DNA
agtctggaatcgtaaaaagaaagaggcgctgattgacgatattgtgcaatacatgcgggaatcgctggagcagcc

SEQ ID NO: 417634 - DNA, 75 bp, synthetic construct
  source 1..75: mol_type = other DNA
agcgggtgttcatgaatatgtcgtttccacaggcgatacactaagcagcattctcaatcaatatggtattgatat

SEQ ID NO: 417635 - DNA, 75 bp, synthetic construct
  source 1..75: mol_type = other DNA
tgaagatggcaaattctacgatcgtaacggtactggtctggcgaagggattcttgcgattcccgacggcgaaaca

SEQ ID NO: 417636 - DNA, 75 bp, synthetic construct
  source 1..75: mol_type = other DNA
gtaacaccgggcgttcaaccgggccgcatttgcactatgaagtatggatcaaccagcaggccgtaaacccgctga

SEQ ID NO: 417637 - DNA, 75 bp, synthetic construct
  source 1..75: mol_type = other DNA
ttggtctggacaagtactgctcctggggaatttacggtgcgtacttcaacagtaagaaaccatcactggatgaca

SEQ ID NO: 417638 - DNA, 75 bp, synthetic construct
  source 1..75: mol_type = other DNA
catccgccgagagtgtccgcaacctgctggtcgtgctggccaacccgtccggtaactgcgatgacacctttatgt

SEQ ID NO: 417639 - DNA, 75 bp, synthetic construct
  source 1..75: mol_type = other DNA
aaaggcattagcgcataccagatactggaattaatgaagaaatataatccgaatgcaaaaccggctacggtttat

SEQ ID NO: 417640 - DNA, 75 bp, synthetic construct
  source 1..75: mol_type = other DNA
atgacagacctggataaacacattgagaaactgaaaaaactgctggcgctggctgcatccggcaacccgcacgag

SEQ ID NO: 417641 - DNA, 75 bp, synthetic construct
  source 1..75: mol_type = other DNA
ccgaccagagcggtaagctgggaacgcaggccaataacatgcacgtctggtccgacgccaccgggcagaaagcag

SEQ ID NO: 417642 - DNA, 75 bp, synthetic construct
  source 1..75: mol_type = other DNA
tcatcgtcatcatgggcgatgatccgaaagaagatctggcggtgctggcgaagcgtctggaagatcagcaacgta

SEQ ID NO: 417643 - DNA, 75 bp, synthetic construct
  source 1..75: mol_type = other DNA
tggagaagttaaaaaagctacttgcgctggctaaatccgataacccccatgaagcggcactggcactgcaacgcg

SEQ ID NO: 417644 - DNA, 75 bp, synthetic construct
  source 1..75: mol_type = other DNA
tggacaatccggtcaagcgtggtgagcaggttatcgaacaggtcacgctgatgaaacccagtgccgggacgctgc

SEQ ID NO: 417645 - DNA, 75 bp, synthetic construct
  source 1..75: mol_type = other DNA
atgttcacgccatgatttcctgtgatgatgcgcctgcgctggaaaaaacacttcatgacagtctggaaaaatacc

SEQ ID NO: 417646 - DNA, 75 bp, synthetic construct
  source 1..75: mol_type = other DNA
ataagttcgacaccacttacgcaacagacacaatcaatacttaatcagattaataacattagatatgaaaaaaaa

SEQ ID NO: 417647 - DNA, 75 bp, synthetic construct
  source 1..75: mol_type = other DNA
cacatgggcctgccgttctcgcgtcttgatgatggtcgtatctatcaacgtccgtttggcggtcagtcgaaaaac

SEQ ID NO: 417648 - DNA, 75 bp, synthetic construct
  source 1..75: mol_type = other DNA
aggatatggaaatgtggcaattccacccgaccggcattgccggtgcgggcgtactggtcaccgaaggttgccgtg

SEQ ID NO: 417649 - DNA, 75 bp, synthetic construct
  source 1..75: mol_type = other DNA
aaccgggaacgggccgcactggctgcgtacacctgggaggtgctggcccgccagttgaaaaaggcgcgtcagcaa

SEQ ID NO: 417650 - DNA, 75 bp, synthetic construct
  source 1..75: mol_type = other DNA
tggtattcggtcgtgcggccggtctgcatctgcaagaatccatcgccgagcagggcgcactgcgtgatgccagcg

SEQ ID NO: 417651 - DNA, 75 bp, synthetic construct
  source 1..75: mol_type = other DNA
tcgtctgaaccgctggaacaataatcgtaacggtgaagatccggtggcgattcgtaaagcgctgcaagaatgtat

SEQ ID NO: 417652 - DNA, 75 bp, synthetic construct
  source 1..75: mol_type = other DNA
gaatcccgtctgccgggtattctggaactctcccgtaccttcgctcacgttgatccggtgaaagagccgattccg

SEQ ID NO: 417653 - DNA, 75 bp, synthetic construct
  source 1..75: mol_type = other DNA
gcttgctcgccttcactgtcgccagctccggcgctatggcttaattaccaaagcgccggacgcgattacctctta

SEQ ID NO: 417654 - DNA, 75 bp, synthetic construct
  source 1..75: mol_type = other DNA
aggcattacaaattctggccggatcggcctggcagatcgaggttgattctgtacaacggatcgtctgccactcat

SEQ ID NO: 417655 - DNA, 75 bp, synthetic construct
  source 1..75: mol_type = other DNA
accactgacgctgatgacgcttgatgactgggcgcttgctaccatttctggcgcggacagcgaaaaatatatgca

SEQ ID NO: 417656 - DNA, 75 bp, synthetic construct
  source 1..75: mol_type = other DNA
ggcgctgggcggcatcagctttaagaaaggctgctataccggacaagagatggtggcgcgagcaaaattccgtgg

SEQ ID NO: 417657 - DNA, 75 bp, synthetic construct
  source 1..75: mol_type = other DNA
catacatgtgggcgctggtatgcgtcctcatttctctcattctgtatgcaggactactcccccgaatgatttcat

SEQ ID NO: 417658 - DNA, 75 bp, synthetic construct
  source 1..75: mol_type = other DNA
cgagcgatcagtatctctgctgaatatgacaggctttatgggatgacctgcgagcgccagtcgttaggcgagaag

SEQ ID NO: 417659 - DNA, 75 bp, synthetic construct
  source 1..75: mol_type = other DNA
gcgaccctctctcgcagattattgatatccgcatcccctcatccctgcatcccaccgtggcggatgcactgcgtt

SEQ ID NO: 417660 - DNA, 75 bp, synthetic construct
  source 1..75: mol_type = other DNA
cgccggggtgacactatcgggtactgtcattcagaccatgcagaatgttgaattaaccatcacgctgagagagta

SEQ ID NO: 417661 - DNA, 75 bp, synthetic construct
  source 1..75: mol_type = other DNA
ggcggcgcataatgtgtcgccgcgtcaggctgaacttatcaatacacaacttaatgcgctgcaaaacgcgctggc

SEQ ID NO: 417662 - DNA, 75 bp, synthetic construct
  source 1..75: mol_type = other DNA
catgaagtggatgactttgctgccagcgtcgaaatagttaaacaggtgtgcgcggaaaatcgtgttacccgtctg

SEQ ID NO: 417663 - DNA, 75 bp, synthetic construct
  source 1..75: mol_type = other DNA
ttctccggcattgtgaccttccgaaatgcggaacagctacgcgatgccgcgcgctatgtgcctctggatcggttg

SEQ ID NO: 417664 - DNA, 75 bp, synthetic construct
  source 1..75: mol_type = other DNA
atctcgatggtctggattatgaatctttgcataaggacgtggatgacgttctggcgaaagccgccgcacgcgatg

SEQ ID NO: 417665 - DNA, 75 bp, synthetic construct
  source 1..75: mol_type = other DNA
agccgttatcaccctcaccggcacactgacagaaagcctggaaaccgtacagaacacactgacactcaggagcga

SEQ ID NO: 417666 - DNA, 75 bp, synthetic construct
  source 1..75: mol_type = other DNA
gaaaagcagatggaagcggcagcaaacaaaggggatgtagagacgtaccgcaagctcaaggcgcaactgaataaa

SEQ ID NO: 417667 - DNA, 75 bp, synthetic construct
  source 1..75: mol_type = other DNA
ggaaaaaggtattcctttattgttccgtgaagtggatgactttgtcgccagcgtcgaaatagttaaacaggtgtg

SEQ ID NO: 417668 - DNA, 75 bp, synthetic construct
  source 1..75: mol_type = other DNA
aacccgacaacccagggcgagaaatttgaccgcgaaggcgagtttatccgccagtggctaccggaactgcgcaat

SEQ ID NO: 417669 - DNA, 75 bp, synthetic construct
  source 1..75: mol_type = other DNA
gtctacagcctgaaccactcgcagatcgccgatctcgctcgtcagaataaagcctttaaccttcagattgaaaaa

SEQ ID NO: 417670 - DNA, 75 bp, synthetic construct
  source 1..75: mol_type = other DNA
agaaattctcgttcgcgggatgtacgtgcgcggacgtaaaatggtggcgttcctggtctgctgcgtggcgctggc

SEQ ID NO: 417671 - DNA, 75 bp, synthetic construct
  source 1..75: mol_type = other DNA
gagtggtgggcagcgctggcaatgggtcagggagcggatgattttctcggtacccagggcgaccaatgggacaca

SEQ ID NO: 417672 - DNA, 75 bp, synthetic construct
  source 1..75: mol_type = other DNA
cttccctgttacatccgcgttactggcctgcatggctgggcactggtctgttgtggctggtggtgcagcttcctt

SEQ ID NO: 417673 - DNA, 75 bp, synthetic construct
  source 1..75: mol_type = other DNA
tggcttctgccgaccaaccatcggtcatggacgaagcctataaagagtttgttatgcaactggcctcgtgggata

SEQ ID NO: 417674 - DNA, 75 bp, synthetic construct
  source 1..75: mol_type = other DNA
gccccgacgaagtaacgtcggagctgatttctgcaaaggaaagatttttacgtggtattcagccatacttgtgta

SEQ ID NO: 417675 - DNA, 75 bp, synthetic construct
  source 1..75: mol_type = other DNA
gggaattttcattgccatgctgtacccggcaggcgttgttcgccttttcagtaagtacatcaaggaaatcaaaca

SEQ ID NO: 417676 - DNA, 75 bp, synthetic construct
  source 1..75: mol_type = other DNA
cagttaccttcaatggattccattcaacttacggttttacgcaagggtgcgcgccacgacatttccatcgcgctg

SEQ ID NO: 417677 - DNA, 75 bp, synthetic construct
  source 1..75: mol_type = other DNA
tcgatctcattgacattgccagagatcaccctcagtcttacacataccgagttggctcacaggagcctgccatta

SEQ ID NO: 417678 - DNA, 75 bp, synthetic construct
  source 1..75: mol_type = other DNA
tgttaaacaccctgaatgttggtccaaccctggatccgcgttttcagacctatcgctatttgcgtacgccggaag

SEQ ID NO: 417679 - DNA, 75 bp, synthetic construct
  source 1..75: mol_type = other DNA
ttttgtgggctgttcatttaccctggacagtcagtacggcaggttgtggctgtatcagccccggcgacagggact

SEQ ID NO: 417680 - DNA, 75 bp, synthetic construct
  source 1..75: mol_type = other DNA
gctggagatccaacaacgctacgaaacgccggatgaagccgaagcggatattcgtaaacgcgtggaaaacaaaga

SEQ ID NO: 417681 - DNA, 75 bp, synthetic construct
  source 1..75: mol_type = other DNA
cggtcgggtgttcatcatggataccgccgtgccttaccttgaaccctttgaggtgggcgggctgcattatctcgg

SEQ ID NO: 417682 - DNA, 75 bp, synthetic construct
  source 1..75: mol_type = other DNA
ccgcagcaatccagaaattgactgaacctcaggtaaaaatcgtttcattaaccatcaccgagaaaggctattgtc

SEQ ID NO: 417683 - DNA, 75 bp, synthetic construct
  source 1..75: mol_type = other DNA
gccgacctgttaattgaacgctttagcaaccgtaacgttgcacaccgtaccgggcaaatcgctatggacggttca

SEQ ID NO: 417684 - DNA, 75 bp, synthetic construct
  source 1..75: mol_type = other DNA
gttgatcgtctggtgatgttggcgctgggcgcggagacactggctgaagtcatcgcctttagcgttgaccgggca

SEQ ID NO: 417685 - DNA, 75 bp, synthetic construct
  source 1..75: mol_type = other DNA
attcctgaaaacggtgtgctgaccaaaaatgccgtccttgatttcgcgaatcagcttgatgccggacttgccaca

SEQ ID NO: 417686 - DNA, 75 bp, synthetic construct
  source 1..75: mol_type = other DNA
aaattctgcgtaattacagggctgtgattaatgcgcggcgtcgtgaaatggggcagaaaccgctcaccaccgcgc

SEQ ID NO: 417687 - DNA, 75 bp, synthetic construct
  source 1..75: mol_type = other DNA
ttccgtatccctgtgtccaatacacaggcttacagacagtttgggaactccgtggtcgttgatgtctttgcggcc

SEQ ID NO: 417688 - DNA, 75 bp, synthetic construct
  source 1..75: mol_type = other DNA
ggtgcgttttgccactgcgcgcgccatcactgccacggtgagaaaaattgaagcggcagagaaagaaaaccttcg

SEQ ID NO: 417689 - DNA, 75 bp, synthetic construct
  source 1..75: mol_type = other DNA
ggcgtttaccgcccgaacgataatccactgattgactggctacaaacctggggccgtttgcgctcaaataaatcg

SEQ ID NO: 417690 - DNA, 75 bp, synthetic construct
  source 1..75: mol_type = other DNA
gcgtattaagaacggcaaagctcagggtgaagtggtattcaaaaaacgtacgtcgctggttttcaagtcattaca

SEQ ID NO: 417691 - DNA, 75 bp, synthetic construct
  source 1..75: mol_type = other DNA
atgtcattgaagctgttgagaaaagccagtctgtcgctgatccaatgagtgaacaatttcaggcgctaataaagg

SEQ ID NO: 417692 - DNA, 75 bp, synthetic construct
  source 1..75: mol_type = other DNA
atgggctcgtatgtcactgacggagcgcggtattggggtggccagttataaccccatgcagatggtcgggctggc

SEQ ID NO: 417693 - DNA, 75 bp, synthetic construct
  source 1..75: mol_type = other DNA
ttatcaaggatgataagccagcagagcttgttacctatcttgaaaaaatcagcggccagactccagaaaccgcca

SEQ ID NO: 417694 - DNA, 75 bp, synthetic construct
  source 1..75: mol_type = other DNA
ccaagatgatattgggtgtgtttattgaaacgccagaagatgattcctcttctccgacagaagtagtcaggcagt

SEQ ID NO: 417695 - DNA, 75 bp, synthetic construct
  source 1..75: mol_type = other DNA
atggcttctatgggtacacaaaaattaaaagctcaaggcttttttattttcagtttattgctgacgttaatttta

SEQ ID NO: 417696 - DNA, 75 bp, synthetic construct
  source 1..75: mol_type = other DNA
attagcaagcgagatgtggccgtcaattgcattattatgtctggcatcgctctgctgtaacttgttactactgac

SEQ ID NO: 417697 - DNA, 75 bp, synthetic construct
  source 1..75: mol_type = other DNA
ttatcatgcgtacacgattagccagcgaactatggccgttaatagcattattatgtctggcatcgctatgctgca

SEQ ID NO: 417698 - DNA, 75 bp, synthetic construct
  source 1..75: mol_type = other DNA
agccatttataaatgaaataaaaatcgcctttgcgaatatagaaaacaacggcatcaaggctaccattagccagt

SEQ ID NO: 417699 - DNA, 75 bp, synthetic construct
  source 1..75: mol_type = other DNA
gcatctgacgcgcaatgccgttctcggttttgcccgacaactggaccagcccctggctcagtggatcgaagaaaa

SEQ ID NO: 417700 - DNA, 75 bp, synthetic construct
  source 1..75: mol_type = other DNA
gcatcaaggccaccatcagccaattattatcggatgagcagaaatgaaaacattaatttgtcagcagcctggcgt

SEQ ID NO: 417701 - DNA, 75 bp, synthetic construct
  source 1..75: mol_type = other DNA
atgctgcgctatcagggaaaaatagagcgcctgagcctggcagaagaggagcgttccaccgtagccgtgaccaac

SEQ ID NO: 417702 - DNA, 75 bp, synthetic construct
  source 1..75: mol_type = other DNA
ggatcgcctttggtaccagacctggcgcggttattgaagaaggcggcaaacagcaggtctatttgcagggggaac

SEQ ID NO: 417703 - DNA, 75 bp, synthetic construct
  source 1..75: mol_type = other DNA
tcgtctgcgaatcatttcgtcagtgggtgatcgaagataattttgtgcgcggacgaccggaatgggataaagccg

SEQ ID NO: 417704 - DNA, 75 bp, synthetic construct
  source 1..75: mol_type = other DNA
ttacagctatgatgacccggcgagtgagctgccgacagggatagaggatgcgacgggcagtacaaaacagatggc

SEQ ID NO: 417705 - DNA, 75 bp, synthetic construct
  source 1..75: mol_type = other DNA
ttccacgcggtatgctgtggtcgtcgctggggtaaaacggtgatgctggtgaacatcgctaccagtttcgcgacg

SEQ ID NO: 417706 - DNA, 75 bp, synthetic construct
  source 1..75: mol_type = other DNA
ctggtggcggaaagtcaggggatgattggctatatgctggcgcaaagtttgagcgcacagccgcagatgccgcct

SEQ ID NO: 417707 - DNA, 75 bp, synthetic construct
  source 1..75: mol_type = other DNA
aaccgcgtaaaattctcgacagcgaagccatcgaacttttgctcaaagaggggcatgtagtgatttgcagcggtg

SEQ ID NO: 417708 - DNA, 75 bp, synthetic construct
  source 1..75: mol_type = other DNA
tattgatgcaaattcaaccgacaattcagcgttttgccagaatgcttgccagcgttttgcagcttgaggttgaga

SEQ ID NO: 417709 - DNA, 75 bp, synthetic construct
  source 1..75: mol_type = other DNA
attaacaaccgtcaggatattgttatcaatgtgacgatccactaccccgccgataaagcgcgcaccagcgaagat

SEQ ID NO: 417710 - DNA, 75 bp, synthetic construct
  source 1..75: mol_type = other DNA
acataaacgtgctgatgaccttttcgattgttacacctacggattgattatcgcgcacggtaattacgcggcgtt

SEQ ID NO: 417711 - DNA, 75 bp, synthetic construct
  source 1..75: mol_type = other DNA
cggttatggaaacggtttgttgcgcaaccggcattagctattgctctacaaaaagaggcgctgcctcgcgagagc

SEQ ID NO: 417712 - DNA, 75 bp, synthetic construct
  source 1..75: mol_type = other DNA
ctggctattgccctgcagaaagatctgcaacctcgtgagagcaaaacgctggccctcacttcgcgcgaagcttaa

SEQ ID NO: 417713 - DNA, 75 bp, synthetic construct
  source 1..75: mol_type = other DNA
ggcaaagtggtggaagtattagtagtggattagttgtctggcccggtggtattaatataactaaccagttatccg

SEQ ID NO: 417714 - DNA, 75 bp, synthetic construct
  source 1..75: mol_type = other DNA
ggtgatcctcaccgatgctgatgcggtatatgaaaactggggaacgccgcagcaacgcgccattcgccatgccac

SEQ ID NO: 417715 - DNA, 75 bp, synthetic construct
  source 1..75: mol_type = other DNA
gagcgcacagccgcagatgccgcctgtcacgacggtgctgacgcgcattgaggtttcgcctgatgatccggcgtt

SEQ ID NO: 417716 - DNA, 75 bp, synthetic construct
  source 1..75: mol_type = other DNA
cgcctgcatatcgagcctgatgaaaagtgtgttttgtattacgggaaagttttacgtaacccaccaccgccacca

SEQ ID NO: 417717 - DNA, 75 bp, synthetic construct
  source 1..75: mol_type = other DNA
tgctgttttctggtggtaatgctcgatggttttgacaccgcggctatcggatttatcgcccctgatattcgcact

SEQ ID NO: 417718 - DNA, 75 bp, synthetic construct
  source 1..75: mol_type = other DNA
gctgatcatttacctgctctcaagctggatgccgacgttgcttaaccatcgtggtatcgacctgcaacatgcgtc

SEQ ID NO: 417719 - DNA, 75 bp, synthetic construct
  source 1..75: mol_type = other DNA
gtgcgtctttttatttggcgcgttaagtctcgcctcggcgttctcaccggatctgcaaacgctgatattcctgcg

SEQ ID NO: 417720 - DNA, 75 bp, synthetic construct
  source 1..75: mol_type = other DNA
ctgggtcaccgccgcattccagattggcggcacgttgggcgcgctggctctgggcgtactgatggataaattcaa

SEQ ID NO: 417721 - DNA, 75 bp, synthetic construct
  source 1..75: mol_type = other DNA
atgaggcggggaggctgaaggcgcagacggatgcggcgggacggcggacggagtaccgactgcatatggcgtctg

SEQ ID NO: 417722 - DNA, 75 bp, synthetic construct
  source 1..75: mol_type = other DNA
agattgttgatgaaatctgtgattttgtggtgaatcagcaggtggttttcctcggtggtcactacatccttcagg

SEQ ID NO: 417723 - DNA, 75 bp, synthetic construct
  source 1..75: mol_type = other DNA
atgctgctccggtcggcaagatgcagtggcgcgttaagcctcgcctcagctttctctccggatctgcaaactctg

SEQ ID NO: 417724 - DNA, 75 bp, synthetic construct
  source 1..75: mol_type = other DNA
ccacgctggcaggtgcgccgccagctaccgcaggcggtgattgcgaaaaccgtcagcgccatcacccgcgagcgt

SEQ ID NO: 417725 - DNA, 75 bp, synthetic construct
  source 1..75: mol_type = other DNA
atgttaaccctgctgattaccgtggttcgccagtcgacctctgtccctgactcactgcctcgcgcaggcgttgtg

SEQ ID NO: 417726 - DNA, 75 bp, synthetic construct
  source 1..75: mol_type = other DNA
cggcgtttggcgggattgtcagtgcgcaactggtgccggtgattggctggcacggcattctggtgttggggggcg

SEQ ID NO: 417727 - DNA, 75 bp, synthetic construct
  source 1..75: mol_type = other DNA
tgtgcccgcggcgatcagtgcggtgatgttaaccctgctgatcaccgtggttcgccagtcgacctctgtccctga

SEQ ID NO: 417728 - DNA, 75 bp, synthetic construct
  source 1..75: mol_type = other DNA
acaatatctattcactccccttttagacgttacttcttggttagaaatagtttttacatgataaggttaaattat

SEQ ID NO: 417729 - DNA, 75 bp, synthetic construct
  source 1..75: mol_type = other DNA
gatttacagaggaggcggtacgacacagtggttattctttgtcgcagagtcctcgatatctccacgaaaaaactg

SEQ ID NO: 417730 - DNA, 75 bp, synthetic construct
  source 1..75: mol_type = other DNA
tcagatagcaccatcagggcgaatgacaaaagccgagagggctcagattccgcgcatccgcttcgaactggcgca

SEQ ID NO: 417731 - DNA, 75 bp, synthetic construct
  source 1..75: mol_type = other DNA
gagcgtgtgaatcagcgccatgaaatgaacaccgacgcgtcgttgctgtttctggcagagcgtgaccattatgcg

SEQ ID NO: 417732 - DNA, 75 bp, synthetic construct
  source 1..75: mol_type = other DNA
caggtgcaaggcgttttatccaaaattgaccgcctgccttactttttaagttctctgtttgcctcgcgttatgaa

SEQ ID NO: 417733 - DNA, 75 bp, synthetic construct
  source 1..75: mol_type = other DNA
gagggcgctcagaggtgcattaaaacacggactgagaacaccaaatcgtcagcaaagaaacggaagcccgttaaa

SEQ ID NO: 417734 - DNA, 75 bp, synthetic construct
  source 1..75: mol_type = other DNA
gaatggtatcaggcctcagcgatgggagcttgaggcgttggttcgaggagcgagagtaaattatggtgatatgtc

SEQ ID NO: 417735 - DNA, 75 bp, synthetic construct
  source 1..75: mol_type = other DNA
gaacttcaggcgctggctcgtggcggaatagtggtttatggcgaaaaaagatttgtatacccgatagcggacgag

SEQ ID NO: 417736 - DNA, 75 bp, synthetic construct
  source 1..75: mol_type = other DNA
gcagggcatgtaacgcaaatactgttttccctggtacagagttacaacagtaaacttacagcaacaacttctggt

SEQ ID NO: 417737 - DNA, 75 bp, synthetic construct
  source 1..75: mol_type = other DNA
cctgcaaaacgtttggttgtcgcaatttagggttaccaacatctgctgattacagttggccagactacaggctgg

SEQ ID NO: 417738 - DNA, 75 bp, synthetic construct
  source 1..75: mol_type = other DNA
tacgagctcaaaagtgaatatgactctttggagcgtttgcctcttcaaatcaagcattattcttctgtaatggac

SEQ ID NO: 417739 - DNA, 75 bp, synthetic construct
  source 1..75: mol_type = other DNA
aaaccgtcagcaaagaaacggaagcccgttaaaaccgcatgaaattgcaccatcggccagactgacccggtcgga

SEQ ID NO: 417740 - DNA, 75 bp, synthetic construct
  source 1..75: mol_type = other DNA
tcttaggaagagattaaaagattactcacgggaattgatggtattcaaaggaagggctagccaacgcccaatctg

SEQ ID NO: 417741 - DNA, 75 bp, synthetic construct
  source 1..75: mol_type = other DNA
gtgactacgagcccatcctcacaggaaccaaaaccgcagagctgttcgcttacgagctggacggcattgaggtca

SEQ ID NO: 417742 - DNA, 75 bp, synthetic construct
  source 1..75: mol_type = other DNA
tgaacacgccgcagcagtgcttaatctggttgatgacggtgttatcgaatggaatgaccaggaggtcgtgagggc

SEQ ID NO: 417743 - DNA, 75 bp, synthetic construct
  source 1..75: mol_type = other DNA
agcgtgctggtcgccaccgcctatatggaagaggcggaacgcttcgactggctggtagcgatgaatgccggagaa

SEQ ID NO: 417744 - DNA, 75 bp, synthetic construct
  source 1..75: mol_type = other DNA
cgaaacggtaaaaggttacgtgcaggccatgcaccagagctggttacaggatgtggcgagccgacaatccacacc

SEQ ID NO: 417745 - DNA, 75 bp, synthetic construct
  source 1..75: mol_type = other DNA
cacgctggaagaagcatttataaatctgttaccgcaagcgcaacgccaggcgcatcaggcggtagtgatcccacc

SEQ ID NO: 417746 - DNA, 75 bp, synthetic construct
  source 1..75: mol_type = other DNA
gatgaaattcagtatggcagcgcagcgctcaagcgcaatgctaaaggcgctattctgcgtccggttatctcggcg

SEQ ID NO: 417747 - DNA, 75 bp, synthetic construct
  source 1..75: mol_type = other DNA
agaggtgcgattattacggcctgggcagaactgtttcgccaacagcaaggtgaaatttggtttattgaagaggaa

SEQ ID NO: 417748 - DNA, 75 bp, synthetic construct
  source 1..75: mol_type = other DNA
atattccggcccgctgtatggtcgggctgattggcccggacggcgtcgggaagtcgagtttgttgtcgttgattt

SEQ ID NO: 417749 - DNA, 75 bp, synthetic construct
  source 1..75: mol_type = other DNA
cccgttactttatcgaacagccgctgctcaccagttatgacgagcttgatcgtcggatgcgtgcgggcgatatca

SEQ ID NO: 417750 - DNA, 75 bp, synthetic construct
  source 1..75: mol_type = other DNA
acgtcgattttttcgcccgcctgttcggtcacgacaaagcggagcgggaagtccgaattaatgagctgctgacca

SEQ ID NO: 417751 - DNA, 75 bp, synthetic construct
  source 1..75: mol_type = other DNA
acagtggcgattttgcgctgtatatcagcgcgcagggtggggcaaatgtcccgcgcgattgtcagactgtcaggg

SEQ ID NO: 417752 - DNA, 75 bp, synthetic construct
  source 1..75: mol_type = other DNA
ccaccggaatggggctgctgatctccacctttatgaaaagccagattgccgccattttcggtacggcgattatca

SEQ ID NO: 417753 - DNA, 75 bp, synthetic construct
  source 1..75: mol_type = other DNA
acgcctgtggaactcggtgtctggatcgacggtgcgatgcccagtcgtgccgaaacggtaaaaggttacgtgcag

SEQ ID NO: 417754 - DNA, 75 bp, synthetic construct
  source 1..75: mol_type = other DNA
tctgtttagctacagccgccgcgaagcactggaactgcgacgcgatccggtacgttcgacgctggcgctgatggg

SEQ ID NO: 417755 - DNA, 75 bp, synthetic construct
  source 1..75: mol_type = other DNA
gaagcagcgcacaaaaaatcttgcgccgctgcctcacgcccaccagcaaaacccgccacaggaagagacggtggt

SEQ ID NO: 417756 - DNA, 75 bp, synthetic construct
  source 1..75: mol_type = other DNA
gcatcttcatcgggtattccggccattattaactctcgctgcagcacaaacgttcagatggcatttagtcgcagg

SEQ ID NO: 417757 - DNA, 75 bp, synthetic construct
  source 1..75: mol_type = other DNA
tggatttaaatgactcgattggcggattgattttgttaaatgataatgtcttttcacatgagtctaattatttgt

SEQ ID NO: 417758 - DNA, 75 bp, synthetic construct
  source 1..75: mol_type = other DNA
caggcgtcccccataaattcagtgaagagaaacaaaggcaattcattgaatattataaggaactgaaaacaactg

SEQ ID NO: 417759 - DNA, 75 bp, synthetic construct
  source 1..75: mol_type = other DNA
tgcagaacagctggaaaaagaaggtatcaactgtaacctgaccctgctgttctccttcgctcaggctcgtgcttg

SEQ ID NO: 417760 - DNA, 75 bp, synthetic construct
  source 1..75: mol_type = other DNA
agataaactggcggaaggtatccgtaagtttgctgttgaccaggaaaaactggaaaaaatgatcggcgatctgct

SEQ ID NO: 417761 - DNA, 75 bp, synthetic construct
  source 1..75: mol_type = other DNA
gaaattatcgcctttgttctccacacatggggaattttgttcagcgttgccggtatgaacaaatggttgcatcgt

SEQ ID NO: 417762 - DNA, 75 bp, synthetic construct
  source 1..75: mol_type = other DNA
aaacagcttgagaacaacaaggcaatcattcaggcgaataaccttgaggctaaacggttacagtctcagaaccgc

SEQ ID NO: 417763 - DNA, 75 bp, synthetic construct
  source 1..75: mol_type = other DNA
gcagcggaaaaaagaaacggcggaccagctacgtgctgaaagcaagctacaacgtgaactaggtaaacgcttcgc

SEQ ID NO: 417764 - DNA, 75 bp, synthetic construct
  source 1..75: mol_type = other DNA
ctcacagccggggagatgaccctctttgctgagtttgtggatgacggctcaaagactctccgcgcctttgatgaa

SEQ ID NO: 417765 - DNA, 75 bp, synthetic construct
  source 1..75: mol_type = other DNA
tccatttacagccttgacgtgcgacgaaactctagtttttagtggttcagtgcttaacttagtggcacattctgt

SEQ ID NO: 417766 - DNA, 75 bp, synthetic construct
  source 1..75: mol_type = other DNA
agacccggagatcaggtatataccaaatggcggcgcagtcggaagactcagcatcgcaacgaatgaatcatggcg

SEQ ID NO: 417767 - DNA, 75 bp, synthetic construct
  source 1..75: mol_type = other DNA
tgggggcaatcaaaccaacctcaaaaccaccagcaatacagtggtggcggtaaacctcagagcaacgccaataac

SEQ ID NO: 417768 - DNA, 75 bp, synthetic construct
  source 1..75: mol_type = other DNA
ggggttgagtgatgatttttacgcggaacagctgcggactcaaaatcttgaaaagatctgccaggagatgaatat

SEQ ID NO: 417769 - DNA, 75 bp, synthetic construct
  source 1..75: mol_type = other DNA
atgatcgtattaagtaaacgggagaaggaaacgcttcatgaaatcagtaagtggccggagttccctgagtactgg

SEQ ID NO: 417770 - DNA, 75 bp, synthetic construct
  source 1..75: mol_type = other DNA
aggaaaccctgcgtgaaatcagcaagtggaaggagttctacgccaactggaagccgaagaccagagccaaactgg

SEQ ID NO: 417771 - DNA, 75 bp, synthetic construct
  source 1..75: mol_type = other DNA
cggtgattggctgcgtggcgtatttcgtcatggttatgctgcctgaaacgggcgctgaccgtcacgggcgtactt

SEQ ID NO: 417772 - DNA, 75 bp, synthetic construct
  source 1..75: mol_type = other DNA
cttatctcggcaaaccgaccggactggaagattacatcggctggctggggaataacttcgatccgtctatctcat

SEQ ID NO: 417773 - DNA, 75 bp, synthetic construct
  source 1..75: mol_type = other DNA
atgattgccgttgccgaaaatgcccggcaaaagtggacgcaaagcccctttatcttctgtgccgacaacgatcat

SEQ ID NO: 417774 - DNA, 75 bp, synthetic construct
  source 1..75: mol_type = other DNA
acatgaatacctgacccggaaaggcattcaggctgcaccgggggtgcgggtaaacaacaaaaatgaactggttat

SEQ ID NO: 417775 - DNA, 75 bp, synthetic construct
  source 1..75: mol_type = other DNA
ggcggatattcacgctgactgcctcgaccgtttagagaaagatatggcgcagctagccaggacgcattctggaca

SEQ ID NO: 417776 - DNA, 75 bp, synthetic construct
  source 1..75: mol_type = other DNA
atccccgcgccaaccatgccgcccagcagcacagccagaatcaaggtaattgctttcttcgggctatcgcgacga

SEQ ID NO: 417777 - DNA, 75 bp, synthetic construct
  source 1..75: mol_type = other DNA
cggcaacagccaaaaagtcaatttcgggtcattctatggggggactgggcgcgctggtactggcgctacgtaacc

SEQ ID NO: 417778 - DNA, 75 bp, synthetic construct
  source 1..75: mol_type = other DNA
tgccaacgaactggcgcgcctcgaacgctaccacgaagctgttccccattatcagcaggcgttaggcgggatatt

SEQ ID NO: 417779 - DNA, 75 bp, synthetic construct
  source 1..75: mol_type = other DNA
caaagaatgccgtccgtctgggcgctgatggcattgtggtttctaatcacgggggcaggcagcttgatggcgcaa

SEQ ID NO: 417780 - DNA, 75 bp, synthetic construct
  source 1..75: mol_type = other DNA
gcggttacatgcgcaatgctctcgaacgctcgtgggccgcagggatgaaaacgctggttttcaccgtcgatatgc

SEQ ID NO: 417781 - DNA, 75 bp, synthetic construct
  source 1..75: mol_type = other DNA
acgaattttttggcgtgattgatgccgtaggtgaaggtgtggataacgccagagttggcgaacgtgttgcggtag

SEQ ID NO: 417782 - DNA, 75 bp, synthetic construct
  source 1..75: mol_type = other DNA
gtggttcagatagccatatttaccgtgggcaaatatccgcgcgtcattggtcatgaattctttggcgtcattgat

SEQ ID NO: 417783 - DNA, 75 bp, synthetic construct
  source 1..75: mol_type = other DNA
gatcgaaccttttaccattgcggctaacgtaaccggtcatggtcaaccgactgaaaatgataccgttctggttta

SEQ ID NO: 417784 - DNA, 75 bp, synthetic construct
  source 1..75: mol_type = other DNA
tggcgtagtcaacgacaatccggacatcattactaacgtttatcgcgacgacgaatggtttatgaatcgccatcg

SEQ ID NO: 417785 - DNA, 75 bp, synthetic construct
  source 1..75: mol_type = other DNA
gtgagaaaggtctcctggtttatcgttcggttattccacgcccgcatgaagccgtgtggcaccagatagtggagg

SEQ ID NO: 417786 - DNA, 75 bp, synthetic construct
  source 1..75: mol_type = other DNA
ctaataaaagatattgtacgagaggctcaggaggatatcaatagcaatggacctgcatggagttcttggtcataa

SEQ ID NO: 417787 - DNA, 75 bp, synthetic construct
  source 1..75: mol_type = other DNA
ttgcccgtcgggtagagtgtgaagaggacggcctgtattacgcgcgctacttcttcaagcagcgcaccggcggca

SEQ ID NO: 417788 - DNA, 75 bp, synthetic construct
  source 1..75: mol_type = other DNA
tttgaactggaagctatgctggagaaacgtgtaaaacgccagttgcttgatgaagtgcagtctatttgtccgccg

SEQ ID NO: 417789 - DNA, 75 bp, synthetic construct
  source 1..75: mol_type = other DNA
gcaatacgcgcttacaagatccacgaagctgatgcgatagttatcgaaaccaaccagggcggcgacatggcggag

SEQ ID NO: 417790 - DNA, 75 bp, synthetic construct
  source 1..75: mol_type = other DNA
cctgaaaaggtgagtgatgaagcgcacaccatccataacccggtggtgaaagacaatgaggctgcgcatgaaggc

SEQ ID NO: 417791 - DNA, 75 bp, synthetic construct
  source 1..75: mol_type = other DNA
tcgggcttcctggctggacgagcggtttgggcgtcggttgttggtgcacaagatccacaaactatgctgcgcgat

SEQ ID NO: 417792 - DNA, 75 bp, synthetic construct
  source 1..75: mol_type = other DNA
atgttgaaactagtgagagtacgtcagtacaaccgctatcgtttcggacgttgggagacggtgcgtaaacaccgc

SEQ ID NO: 417793 - DNA, 75 bp, synthetic construct
  source 1..75: mol_type = other DNA
cgacgccgaaatgctgtcgatggcggggaaaggctgcattatgggcagtgcgcaccagcgtctgaaagaccttca

SEQ ID NO: 417794 - DNA, 75 bp, synthetic construct
  source 1..75: mol_type = other DNA
gcgacattctgccattcatggccttccgtccaattatcaagcacccacgtctgatggaaagcagcctgtttacgc

SEQ ID NO: 417795 - DNA, 75 bp, synthetic construct
  source 1..75: mol_type = other DNA
aacgtgattccactggcacctaaccatgcctacgggatgtttatggaacgttttaacgagttatcggagttacgc

SEQ ID NO: 417796 - DNA, 75 bp, synthetic construct
  source 1..75: mol_type = other DNA
ttgaattagtagtgcttaattctccaatgattaaaacagctgttactctattctctgggggaatatttaacattc

SEQ ID NO: 417797 - DNA, 75 bp, synthetic construct
  source 1..75: mol_type = other DNA
ggaagcatttttattatgaccggataaataaagacaacatcgatattaacgatatcgcggtttccctttcaaata

SEQ ID NO: 417798 - DNA, 75 bp, synthetic construct
  source 1..75: mol_type = other DNA
gatgagtaaggttgaattagtagcaaagatatttccttttgatcaccaaaactatggtgggttttgttgtgctcc

SEQ ID NO: 417799 - DNA, 75 bp, synthetic construct
  source 1..75: mol_type = other DNA
aatcagaggttgagaaggaggctgacaaatgggggattaggattgcgtccattatatgtgaaggtgaaggtattc

SEQ ID NO: 417800 - DNA, 75 bp, synthetic construct
  source 1..75: mol_type = other DNA
gaacccacggcggcaactttgggggcaggtccaaaggagtgacggcgggtgtaggtgtcggcctcgcaggtgcag

SEQ ID NO: 417801 - DNA, 75 bp, synthetic construct
  source 1..75: mol_type = other DNA
ggaagcatttttattatgacaagataaataaagacgacatcgtgattaacgatatcgcagtttccctttcaaata

SEQ ID NO: 417802 - DNA, 75 bp, synthetic construct
  source 1..75: mol_type = other DNA
gtattgcctttggtgacgggatgaacgacgccgaaatgctgtcgatggcggggaaaggctgcattatgggcagtg

SEQ ID NO: 417803 - DNA, 75 bp, synthetic construct
  source 1..75: mol_type = other DNA
ggcagcaggttaagggacatgacctgacgaaatgggtctggcagaatgaacctgaactgcgccctgaaaacacgc

SEQ ID NO: 417804 - DNA, 75 bp, synthetic construct
  source 1..75: mol_type = other DNA
ccacgtgcaaatgacgctgcctggcacctcactcccgacgagtttaactggctgattgccggtgttgactggcag

SEQ ID NO: 417805 - DNA, 75 bp, synthetic construct
  source 1..75: mol_type = other DNA
gcccttccagcctgacacaatcagccgtgaacgctaaggcatcacaacagaccgttgttgtgaagcaggagcctc

SEQ ID NO: 417806 - DNA, 75 bp, synthetic construct
  source 1..75: mol_type = other DNA
taatctcaggccatcatttagccatccgtgatgcactgcaacgcgttatcaatggtgagataacccgactcatca

SEQ ID NO: 417807 - DNA, 75 bp, synthetic construct
  source 1..75: mol_type = other DNA
acaacgcgttcaatgccgttcatgcaaaaaagtctggactccgaaacagcagccagcaagagaaattacgtatcc

SEQ ID NO: 417808 - DNA, 75 bp, synthetic construct
  source 1..75: mol_type = other DNA
cgatcgctggatttgcccctatatttccagacatctgttatcacttaacccattacaagcccgctgccgcagata

SEQ ID NO: 417809 - DNA, 75 bp, synthetic construct
  source 1..75: mol_type = other DNA
gtcgttcaggtattaaaaggcgtctataacgttaaaaatgtcattgtcgctgatcgtattgatgaacgactggaa

SEQ ID NO: 417810 - DNA, 75 bp, synthetic construct
  source 1..75: mol_type = other DNA
aaaaacgacgccaatgatacagccgccatctgtggggccatcagcaggcccggcatgcgatttgttgccctcaaa

SEQ ID NO: 417811 - DNA, 75 bp, synthetic construct
  source 1..75: mol_type = other DNA
tgtcaaaccttatctcaaaggtaacaaaaacgacgccaatgatacagccgccatctgtggggccatcagcaggcc

SEQ ID NO: 417812 - DNA, 75 bp, synthetic construct
  source 1..75: mol_type = other DNA
acacgactttacccaaagcgcgttattatccgcaggtcgcgtaacgaaaatgctgacctcactggcgttaaaata

SEQ ID NO: 417813 - DNA, 75 bp, synthetic construct
  source 1..75: mol_type = other DNA
aattgttgacccgtgaaggcgaaattgacatcgctaaacgcattgaagacgggatcaaccaggttcaatgctctg

SEQ ID NO: 417814 - DNA, 75 bp, synthetic construct
  source 1..75: mol_type = other DNA
caccggatgccgatgatctgatgctggctgaaaacaccgcggacgaagatgctgccgaagccgccgcgcaggggc

SEQ ID NO: 417815 - DNA, 75 bp, synthetic construct
  source 1..75: mol_type = other DNA
ggcagaaactgtatgttttaatgagtttcgatgctattcacggaaatattcttcatctctccactaatttcacac

SEQ ID NO: 417816 - DNA, 75 bp, synthetic construct
  source 1..75: mol_type = other DNA
tcacagtgctgtggcgtttaccctgagctggccggagcgcgtgggcaaactggtattaatgggcggcggaacggg

SEQ ID NO: 417817 - DNA, 75 bp, synthetic construct
  source 1..75: mol_type = other DNA
cctgaataatatgctgtcgcgccgcgatcacctggaaaacttcgttaagagcctggaagctaatccgaaacagtt

SEQ ID NO: 417818 - DNA, 75 bp, synthetic construct
  source 1..75: mol_type = other DNA
aagatatcaaccgtcgtatgtccatcggtgaagcaaaagcccgccgcgcgaagaaagagatggttgaagcgaacc

SEQ ID NO: 417819 - DNA, 75 bp, synthetic construct
  source 1..75: mol_type = other DNA
ccgcattagcaccgaaagccgtgtttatccttgccctgataaatgggttgcggagatcgagcaatcaatgagaaa

SEQ ID NO: 417820 - DNA, 75 bp, synthetic construct
  source 1..75: mol_type = other DNA
ctataacggttttacgtatctcgcaacgggtgattttcttcaaatctcatcgaataccgaagagaaggagatcaa

SEQ ID NO: 417821 - DNA, 75 bp, synthetic construct
  source 1..75: mol_type = other DNA
tggaaacgagaacgatctattcttctcaaggacgggtcgctggaatagcgaaagccgctggcattcatcgaagaa

SEQ ID NO: 417822 - DNA, 75 bp, synthetic construct
  source 1..75: mol_type = other DNA
aatgtaccaacgaatcagagttccagcttaatagtatctgggaagttctcgataaaaacgctcgtagtcatgctt

SEQ ID NO: 417823 - DNA, 75 bp, synthetic construct
  source 1..75: mol_type = other DNA
atggagggggagtataaaagaggcgagaaattccatgtgctgtggtcgctgatgaaccgccatgatggcgggtcg

SEQ ID NO: 417824 - DNA, 75 bp, synthetic construct
  source 1..75: mol_type = other DNA
actgcaatccgggggcaatattagcagtgatatgaaaggactgattgattatccgccggactggatgtcacccgc

SEQ ID NO: 417825 - DNA, 75 bp, synthetic construct
  source 1..75: mol_type = other DNA
gttaaccttaaaagtgacgttgaagaaggcaagtttaccatcaaattgtttgcagaaatgatggtgctcaacaat

SEQ ID NO: 417826 - DNA, 75 bp, synthetic construct
  source 1..75: mol_type = other DNA
atgaaaagcattttaattgaaaaaccgaatcaactgtcgattatcgaacgtgaaatacccaccccgtcagcgggt

SEQ ID NO: 417827 - DNA, 75 bp, synthetic construct
  source 1..75: mol_type = other DNA
tatcgactggttaagtaaagggttaattaaaccagaaaaactaattacccatacgtttgatttccagcatgttgc

SEQ ID NO: 417828 - DNA, 75 bp, synthetic construct
  source 1..75: mol_type = other DNA
atgatgttaaatcccggacgggaaaatcagtaaaaacatgttggatcgcgcatgttaagtcattgcatgggctaa

SEQ ID NO: 417829 - DNA, 75 bp, synthetic construct
  source 1..75: mol_type = other DNA
ctataacggctttacctatcttgcgacgggtgattttcttgatattagttcgaactccgaagaaaaggaaatcaa

SEQ ID NO: 417830 - DNA, 75 bp, synthetic construct
  source 1..75: mol_type = other DNA
ccctgattcgtaacaagcaattcgataaatcagatgtgaaaattgagatggtatttctgaacccgaatacaggaa

SEQ ID NO: 417831 - DNA, 75 bp, synthetic construct
  source 1..75: mol_type = other DNA
atagcctatgcaccaatgtagactttatcgaggtatacaacgaccagacgggtcaaaacgtgtctagattgacgc

SEQ ID NO: 417832 - DNA, 75 bp, synthetic construct
  source 1..75: mol_type = other DNA
gcgtgattaacggcctcggcgcgaagacgcatctgtttgtgcgtaaacacgcgccgctgcgcagctttgacccga

SEQ ID NO: 417833 - DNA, 75 bp, synthetic construct
  source 1..75: mol_type = other DNA
tgacaacatcaacctggaagccgctggcgttaaaactaacgaaaaaggctatatcgtcgtcgataaatatcaaaa

SEQ ID NO: 417834 - DNA, 75 bp, synthetic construct
  source 1..75: mol_type = other DNA
tgacgacgataaagcggaaaaaacctatcaaaacaccgttgcgctgacgccagaagatgtcagcgaagcagtctg

SEQ ID NO: 417835 - DNA, 75 bp, synthetic construct
  source 1..75: mol_type = other DNA
cggttgacaaggcaggagagaaagactatcccgaaaattaaggttcttcttgcacaaagtgacattcaggctagt

SEQ ID NO: 417836 - DNA, 75 bp, synthetic construct
  source 1..75: mol_type = other DNA
tgctcagaacggtatcaggccgcagcgatgggagcttgaggcgctggcgcgtggcgcgaccgtaaattatgacgg

SEQ ID NO: 417837 - DNA, 75 bp, synthetic construct
  source 1..75: mol_type = other DNA
aaattacccgtatccgcgttgaccttgctcagaacggtatcaggccgcagcgatgggagcttgaggcgctggcgc

SEQ ID NO: 417838 - DNA, 75 bp, synthetic construct
  source 1..75: mol_type = other DNA
taattaaagatggttattccgttgatattaaagatgcctgccgaattgttatcagaaaaggccattatttacaaa

SEQ ID NO: 417839 - DNA, 75 bp, synthetic construct
  source 1..75: mol_type = other DNA
ctgcggcaactgaaggagttacgtgataacaggcttacgctggggatgccgtccactcagaaagatgtgcctgag

SEQ ID NO: 417840 - DNA, 75 bp, synthetic construct
  source 1..75: mol_type = other DNA
ctataccctgccgctggcggaaataccgaccgttctgcgggacattgccatcacgctggtgcgttaccggctcta

SEQ ID NO: 417841 - DNA, 75 bp, synthetic construct
  source 1..75: mol_type = other DNA
tatcaaaataccgttgcattgacgccagaagatgtcagcgaagccgtctggtgggtgtcaacgctgcctgctcac

SEQ ID NO: 417842 - DNA, 75 bp, synthetic construct
  source 1..75: mol_type = other DNA
tacggcggtgcgcgtcaccgacatcgaaccgggtctggtgggtggcaccgagttttccaatgtccgctttaaagg

SEQ ID NO: 417843 - DNA, 75 bp, synthetic construct
  source 1..75: mol_type = other DNA
caacggcaggtagctggccatatgctggtggcaacgtttatggcgcaacaaaagcgttcgttcgtcaattcagcc

SEQ ID NO: 417844 - DNA, 75 bp, synthetic construct
  source 1..75: mol_type = other DNA
gaaacggaagcccgttaaaaccgcatgaaattgcgccatcggccagactgacccggtcggaaagaatgcaaatta

SEQ ID NO: 417845 - DNA, 75 bp, synthetic construct
  source 1..75: mol_type = other DNA
cgggcgttgatgcgcgcgatgtccaggcgacgctggtggaactgacagcagtgaccatttctgaacaggtgttat

SEQ ID NO: 417846 - DNA, 75 bp, synthetic construct
  source 1..75: mol_type = other DNA
gtctctgaaacaggctgtactggatatttgccagggccagcagcttacactttcgcagtttggacagcttgatac

SEQ ID NO: 417847 - DNA, 75 bp, synthetic construct
  source 1..75: mol_type = other DNA
atgacacagggctggcgggaggataaatgcccgtctgtccgcaccgggaaaagaccgcgcgccggtggcgctgaa

SEQ ID NO: 417848 - DNA, 75 bp, synthetic construct
  source 1..75: mol_type = other DNA
atgcataatgaaatcgtcatgttatcatggatagaaaatgcaggtgaccaaaaagacacccagtttgtcattacc

SEQ ID NO: 417849 - DNA, 75 bp, synthetic construct
  source 1..75: mol_type = other DNA
atgcaaggtaaaaaagagaatacgctgcggataatcaacgctactaatcatcagttaccaggcgaccgtgaaagc

SEQ ID NO: 417850 - DNA, 75 bp, synthetic construct
  source 1..75: mol_type = other DNA
ttgtctgttactgatgttgttgttcctgctactgctactgctactgctactgctactgctactgctactgctact

SEQ ID NO: 417851 - DNA, 75 bp, synthetic construct
  source 1..75: mol_type = other DNA
caagtaccgtggggacagcaagcctttgccgcgtatcttggtgaaaataaagaagcctggttggattacgatccg

SEQ ID NO: 417852 - DNA, 75 bp, synthetic construct
  source 1..75: mol_type = other DNA
ctgcgaacgccaaaccgtcagcaaagaaacggaagcccgttaaaaccacatgaaattgcaccatcggccagactg

SEQ ID NO: 417853 - DNA, 75 bp, synthetic construct
  source 1..75: mol_type = other DNA
caaccgtaaattatgacgggaaaaaattcacgtatccggttgctgatgagtggtcggttttttcaattaaacaat

SEQ ID NO: 417854 - DNA, 75 bp, synthetic construct
  source 1..75: mol_type = other DNA
tgcctgtcacgaataatgatcctgccagtgtctatctcattcagtcatggatagaaaatgcgggtgaccagaaag

SEQ ID NO: 417855 - DNA, 75 bp, synthetic construct
  source 1..75: mol_type = other DNA
atgtatcggctttcattttccgtcggtatggttggtggagaagatggagacacccagtttgtcattaccccaccg

SEQ ID NO: 417856 - DNA, 75 bp, synthetic construct
  source 1..75: mol_type = other DNA
acgaaactacgaaaattatttttgtgaaagtattgacaacgctaactatttttaattatatattcatgatgctct

SEQ ID NO: 417857 - DNA, 75 bp, synthetic construct
  source 1..75: mol_type = other DNA
caccgaagctgatgtaccggaatccggtgagtttcgggtgcgagcgcgagcggcaacgtttggcggcgctaacgg

SEQ ID NO: 417858 - DNA, 75 bp, synthetic construct
  source 1..75: mol_type = other DNA
cacttttgagcggaaactgttaccccgacttgaacgtgttaacgagctgtgcgggatgaatgattctgtctcgcg

SEQ ID NO: 417859 - DNA, 75 bp, synthetic construct
  source 1..75: mol_type = other DNA
ctctccgctgaatctgcaacatttccggcatgttattccagtggatcaggttgaaactatttctttgttcgatac

SEQ ID NO: 417860 - DNA, 75 bp, synthetic construct
  source 1..75: mol_type = other DNA
aactcgaggcaaaaggcttttaccggagggcggcggcacgatggggtgaagtcatgcaactggtggagacagaca

SEQ ID NO: 417861 - DNA, 75 bp, synthetic construct
  source 1..75: mol_type = other DNA
cggccagctcgaccacgacaccggcaagcctctgaaagataccgccgcagccgtaaccgcatgggcgtctacatg

SEQ ID NO: 417862 - DNA, 75 bp, synthetic construct
  source 1..75: mol_type = other DNA
ggctcaggagggcattaccccggaacggtgggagcttgaagcgctggcgcgtggggcaacggtgatttatggcga

SEQ ID NO: 417863 - DNA, 75 bp, synthetic construct
  source 1..75: mol_type = other DNA
acaaagagcttaagaaatttgcggccagaatagcgtcacaactctggagcaaatacgaggagttaagcgacgcat

SEQ ID NO: 417864 - DNA, 75 bp, synthetic construct
  source 1..75: mol_type = other DNA
acaattgatgaaattcagtccaccgagacactgatcgtcctgcagaacccaatcatgcgtaccatcaagccctga

SEQ ID NO: 417865 - DNA, 75 bp, synthetic construct
  source 1..75: mol_type = other DNA
ctgttgtacgtagttcgtccttcaggaacgtgtttgttgcgttgtgacaaatatttctatccgaaatattatctt

SEQ ID NO: 417866 - DNA, 75 bp, synthetic construct
  source 1..75: mol_type = other DNA
ttagttgcatttaggaacgcattggcattggggcaactagctgaaagtagtatggatgaaggcttaactttaagt

SEQ ID NO: 417867 - DNA, 75 bp, synthetic construct
  source 1..75: mol_type = other DNA
gcccgcccaccagcaaagctggataatttcgaagagatgcgcgaaaccatcagccaggcacatgctggtatggga

SEQ ID NO: 417868 - DNA, 75 bp, synthetic construct
  source 1..75: mol_type = other DNA
gccgaactggcgaaacaatttggcgtcagtccggggacgattcacgttcgtgtagagaaaatgaagcaggcgggg

SEQ ID NO: 417869 - DNA, 75 bp, synthetic construct
  source 1..75: mol_type = other DNA
tgatgaagtcactgaagcctattacacaacaggccactacagcatctttataaaagtaatgtgccgttcgatcga

SEQ ID NO: 417870 - DNA, 75 bp, synthetic construct
  source 1..75: mol_type = other DNA
aagaagttcaggctttaaaaaactggttgagtatccgtacttcgtatccgcatgctgagagcgagtgggtatttt

SEQ ID NO: 417871 - DNA, 75 bp, synthetic construct
  source 1..75: mol_type = other DNA
tgaagaactgttcccgcttccgagcgccgctgagtgcgtgccgggcggtccttccgtcgcgtgttcttccgctaa

SEQ ID NO: 417872 - DNA, 75 bp, synthetic construct
  source 1..75: mol_type = other DNA
tgcgcgctgaatatggcgatcgttaccagttccagaccgggtctgactgtgaagtgatcctcgcgctgtatcagg

SEQ ID NO: 417873 - DNA, 75 bp, synthetic construct
  source 1..75: mol_type = other DNA
tggatcgacaccctgaaagaagtggcggcgcagcaggtttctgatcagcaactggaaactgcccgcttccgcttc

SEQ ID NO: 417874 - DNA, 75 bp, synthetic construct
  source 1..75: mol_type = other DNA
cggcccgtccgtcgcgtgttcttccgctaaagcgattgagtgggatgaggcgttcaagaaaatggacgatccgtc

SEQ ID NO: 417875 - DNA, 75 bp, synthetic construct
  source 1..75: mol_type = other DNA
gagcagttttccgatggcgtcggttacagttggatagacactctgaaagaagtggcggcgcagcaggtttctgat

SEQ ID NO: 417876 - DNA, 75 bp, synthetic construct
  source 1..75: mol_type = other DNA
aggacggcgaaatccgttcttattatcatcgcgactggttcgactacgatgcggtgaaagataacgtgaccgaca

SEQ ID NO: 417877 - DNA, 75 bp, synthetic construct
  source 1..75: mol_type = other DNA
acgcgaatactttaactacggctggctggagcgccatttgcgccattttccgggtgttgatccccgtgatgtaca

SEQ ID NO: 417878 - DNA, 75 bp, synthetic construct
  source 1..75: mol_type = other DNA
aggccgctgaaagatactgctgcggctgttaccgcatgggcgtcaacgtggcgcattccgcaatttaaaacggtt

SEQ ID NO: 417879 - DNA, 75 bp, synthetic construct
  source 1..75: mol_type = other DNA
cccgtatccgcgttgaccttgctcagaacggtatcaggccgcagcgatgggagcttgaggcgctggcgtgtggcg

SEQ ID NO: 417880 - DNA, 75 bp, synthetic construct
  source 1..75: mol_type = other DNA
acggtgcgtaaactgctggccctgcatatgtatgactgcgcgcgtgccaacaaagcgatgtcagcctggggcgtg

SEQ ID NO: 417881 - DNA, 75 bp, synthetic construct
  source 1..75: mol_type = other DNA
tttgccgcccgtatctcatcgcagcttttcatgatgtatgaggaactctgcgatgcatgggttgatgcacatggc

SEQ ID NO: 417882 - DNA, 75 bp, synthetic construct
  source 1..75: mol_type = other DNA
ctcatcgcagcttttcatgatgtatgaggaactctgcgatgcctgggtggatgcgcatggcgagaaagaatcgct

SEQ ID NO: 417883 - DNA, 75 bp, synthetic construct
  source 1..75: mol_type = other DNA
attcaggctgcgccgggggtgcgaataaacgacaaaaatgagctcgttattcctttccgcaaccgtaacggcgca

SEQ ID NO: 417884 - DNA, 75 bp, synthetic construct
  source 1..75: mol_type = other DNA
gtatctgtcagacgcacagcgcgaacaggttaccaaactccagagtgatatgatgctattgggccaggcatccgc

SEQ ID NO: 417885 - DNA, 75 bp, synthetic construct
  source 1..75: mol_type = other DNA
ctatcagggcgtgatgcggctgggcgggcacgggcttttccccgttcttgtcacaccggtcaaccagaaactggt

SEQ ID NO: 417886 - DNA, 75 bp, synthetic construct
  source 1..75: mol_type = other DNA
gccgtcccctgttatttgcggaaggttacgcaactgcagcctccctgcacgaagccaccggccttccggttctga

SEQ ID NO: 417887 - DNA, 75 bp, synthetic construct
  source 1..75: mol_type = other DNA
cattcagccaggtgatgtcacaaatgcaacaacactggccacagataatgcaggaagttcgctcccccaaaaatc

SEQ ID NO: 417888 - DNA, 75 bp, synthetic construct
  source 1..75: mol_type = other DNA
tgctgatgacggtggatggaggcaacatgattgccgttgccgaaaatgcccggcaaaagtggacgcaaagcccct

SEQ ID NO: 417889 - DNA, 75 bp, synthetic construct
  source 1..75: mol_type = other DNA
cgtctgctgtgctggcgctgctggatgagctggagcacgccagaaccacacctctcgccattcgcctgacgctcc

SEQ ID NO: 417890 - DNA, 75 bp, synthetic construct
  source 1..75: mol_type = other DNA
atcatgaaatcgctgatttctgcgcaacgctggggggcacctggcgaaccggaaacgccggaagcaatgcagcaa

SEQ ID NO: 417891 - DNA, 75 bp, synthetic construct
  source 1..75: mol_type = other DNA
ctggcgtttcgcgcaatgctctcgccgtctgccgtgctggcgctactggatgaactggagcacgccagaaccacg

SEQ ID NO: 417892 - DNA, 75 bp, synthetic construct
  source 1..75: mol_type = other DNA
ttacacagggttgaaagaacacgacgtcattgggcaaagcgtgtttaaactgtttatgagccgtcgtgaagctgc

SEQ ID NO: 417893 - DNA, 75 bp, synthetic construct
  source 1..75: mol_type = other DNA
atgaaaaccgttagggagtccacaacgttgtgcaactttctcggatcgcacaatccatactggcggttgacggaa

SEQ ID NO: 417894 - DNA, 75 bp, synthetic construct
  source 1..75: mol_type = other DNA
aaagataagaacgcagctctacggattggtccaggccagccagcgagttgctcaccgtaaccaacgatcagggaa

SEQ ID NO: 417895 - DNA, 75 bp, synthetic construct
  source 1..75: mol_type = other DNA
atctggactgacagcccctttgtcttctgtgccgacaacgaccatcaacggaaaattaacaaaggtgtttcaagt

SEQ ID NO: 417896 - DNA, 75 bp, synthetic construct
  source 1..75: mol_type = other DNA
cgagggctatgccactgccgcctccctgcacgaagccactggccttccggtgctgatgacagtggatgcgggcaa

SEQ ID NO: 417897 - DNA, 75 bp, synthetic construct
  source 1..75: mol_type = other DNA
gccccaacagccccgtacagaaccggcacaaccgcaggccacctcagccgcccccggaggcacagcctccccggc

SEQ ID NO: 417898 - DNA, 75 bp, synthetic construct
  source 1..75: mol_type = other DNA
ctggttcgcccgcccgggggcggacctgtccaggctggaccgctggctgccccgaccgcaggaagtctccatgaa

SEQ ID NO: 417899 - DNA, 75 bp, synthetic construct
  source 1..75: mol_type = other DNA
caggccgcgtatgcccgccgctatgtcaacaaatggccgcaggccacagcacatgaatacctgacccggaaaggc

SEQ ID NO: 417900 - DNA, 75 bp, synthetic construct
  source 1..75: mol_type = other DNA
catcgctgaccaggacactccggcagcaaccactgacaacgcacagccatctgacgttgtacctgacgcctccga

SEQ ID NO: 417901 - DNA, 75 bp, synthetic construct
  source 1..75: mol_type = other DNA
aagatcccgtgcagcgaaatgcgctggagcagatgcgggcagagcgggagaatcctgacaccatcatgacgcaca

SEQ ID NO: 417902 - DNA, 75 bp, synthetic construct
  source 1..75: mol_type = other DNA
cagaatgggtgtaggcggtattcctgcgacctatcaggctgaggtgatactgaaggaaaatacaactaccgagga

SEQ ID NO: 417903 - DNA, 75 bp, synthetic construct
  source 1..75: mol_type = other DNA
aatatattgtaatcgaacctaacttcagaatgggtgtaggcggtattcctgcgacctatcaggctgaggtgatac

SEQ ID NO: 417904 - DNA, 75 bp, synthetic construct
  source 1..75: mol_type = other DNA
aagcttgagaagcatatcgacactgtatcctatgcagtggtgctttatactgcctgtgatgaagggaaagccaag

SEQ ID NO: 417905 - DNA, 75 bp, synthetic construct
  source 1..75: mol_type = other DNA
cggagagcagacagatccccgcgcaagacttcacctgaaagcgcattcgatgcaacgcagggaagacgcagagcg

SEQ ID NO: 417906 - DNA, 75 bp, synthetic construct
  source 1..75: mol_type = other DNA
gccccaacagccccgcccagaaccagcacaaccgcaggccacctcagccgcccccggaggcactgcatccccggc

SEQ ID NO: 417907 - DNA, 75 bp, synthetic construct
  source 1..75: mol_type = other DNA
ctccggacacgctcagcttcacgctggccggtaacaaaaccaccctgcatgtgccgctgacggccccccgtaagc

SEQ ID NO: 417908 - DNA, 75 bp, synthetic construct
  source 1..75: mol_type = other DNA
aacgctgggttcacctggcgaaccggaaacaccggaagcaatgcaacgagagctactgcaacgcatcgacaaggt

SEQ ID NO: 417909 - DNA, 75 bp, synthetic construct
  source 1..75: mol_type = other DNA
tggataaaatgtcggtttcgatgaccatgaatggcgcagtgctaccagtactggcgttttatatcgtcgccgcag

SEQ ID NO: 417910 - DNA, 75 bp, synthetic construct
  source 1..75: mol_type = other DNA
tggactgtttgaaccagatagtggaaaagtactggttaatggcacggatatacgtcaacttggaataaataatta

SEQ ID NO: 417911 - DNA, 75 bp, synthetic construct
  source 1..75: mol_type = other DNA
atgacacagggctggcgggaggataaatgcccgtctggccgcgccgggaaaaaaccgcgcgtcggtggcgctgaa

SEQ ID NO: 417912 - DNA, 75 bp, synthetic construct
  source 1..75: mol_type = other DNA
atgttgcatttaaaaaatattactgcgggtaatccgaaaacggcagagcaatatcagatgacaaagcggcatagt

SEQ ID NO: 417913 - DNA, 75 bp, synthetic construct
  source 1..75: mol_type = other DNA
atatcagctgacaaaacaatatggtgtcacctggcttttttcggaagacggcaaaaactggtatgaagaacagaa

SEQ ID NO: 417914 - DNA, 75 bp, synthetic construct
  source 1..75: mol_type = other DNA
atgcttcatttaaaaaatattactgcgggtaatccgaaaacggcagagcaatatcagatgacaaaacggcatagt

SEQ ID NO: 417915 - DNA, 75 bp, synthetic construct
  source 1..75: mol_type = other DNA
ggacttctgtcttttcagacctgtcatttgtctgttactgatgatgttgttgttcctgctactgctactgttctt

SEQ ID NO: 417916 - DNA, 75 bp, synthetic construct
  source 1..75: mol_type = other DNA
atttgtctgttactgatgatgtggttgttcctgctactgctactgctactgctactgctactgctactgctcttc

SEQ ID NO: 417917 - DNA, 75 bp, synthetic construct
  source 1..75: mol_type = other DNA
atttgtctgttactgatgatgtggttgttcctgctactgctactgctactgctactgctcttctttttcctgccg

SEQ ID NO: 417918 - DNA, 75 bp, synthetic construct
  source 1..75: mol_type = other DNA
atgacacagggctggcgggaggataaatgcccgtctggccgcgcagggaaaacaccgcgcgtcggtggcgctgaa

SEQ ID NO: 417919 - DNA, 75 bp, synthetic construct
  source 1..75: mol_type = other DNA
atgacacagggctggcgggaggataaatgcccgtctgaccgcgcggggaaaagaccgcgcgtcggtggcgctgaa

SEQ ID NO: 417920 - DNA, 75 bp, synthetic construct
  source 1..75: mol_type = other DNA
ctacgctgccggaggcggtacggatctggttgcccgtgcctttgctgatgccgccaaaaaccatttacccgtcag

SEQ ID NO: 417921 - DNA, 75 bp, synthetic construct
  source 1..75: mol_type = other DNA
ttatgattttacggggttatcattagcgatcagtcatagacatgatcatgttgtcaaattatacggcaagtcatt

SEQ ID NO: 417922 - DNA, 75 bp, synthetic construct
  source 1..75: mol_type = other DNA
cgcgagccgacgccggaagaactggctgaacgtatgctgatgccggaagataagatccgcaaagtgctgaagatc

SEQ ID NO: 417923 - DNA, 75 bp, synthetic construct
  source 1..75: mol_type = other DNA
gcgcacgactgacccggtacgcatgtacatgcgtgaaatgggcaccgttgaactgttgacccgcgaaggcgaaat

SEQ ID NO: 417924 - DNA, 75 bp, synthetic construct
  source 1..75: mol_type = other DNA
aaactgtctgaagtatttaaacagttccgcctggtgccgaagcagtttgactacctggtcaacagcatgcgcgtc

SEQ ID NO: 417925 - DNA, 75 bp, synthetic construct
  source 1..75: mol_type = other DNA
tgagctggagcacgccagaaccacacctctcgccattcgcctgacgctccgtcatgaaatcgaggatttctgcgc

SEQ ID NO: 417926 - DNA, 75 bp, synthetic construct
  source 1..75: mol_type = other DNA
tttaaccagcctgaatatatctacctgtccggcaagggtacctacaagcacacctgttttatcgatgtcgatgcg

SEQ ID NO: 417927 - DNA, 75 bp, synthetic construct
  source 1..75: mol_type = other DNA
acaacatgacccgtgacaccctgaaccgcgcaatcgcacgtggtgtggggggggatgatgatgcaaacatggaaa

SEQ ID NO: 417928 - DNA, 75 bp, synthetic construct
  source 1..75: mol_type = other DNA
cagggacgatttctcaatgatctttaaaggtaatatggcgacactcgccagaatggatttgacgcccacagcatt

SEQ ID NO: 417929 - DNA, 75 bp, synthetic construct
  source 1..75: mol_type = other DNA
attcgtttaacttttatcgtgctgggagtaaaaaaaagccggttaaaaatcccaaaagaagatatcctgcagacg

SEQ ID NO: 417930 - DNA, 75 bp, synthetic construct
  source 1..75: mol_type = other DNA
atgtcaatcacaagcgttgtattaaccaatgaacaaaagtcaattattgcagaagcattagaggttatgcccgaa

SEQ ID NO: 417931 - DNA, 75 bp, synthetic construct
  source 1..75: mol_type = other DNA
ttgcgttctattattgcggatatcgtggtgaaagttccggtgaccgccgaggggctggcagctattaagatgtta

SEQ ID NO: 417932 - DNA, 75 bp, synthetic construct
  source 1..75: mol_type = other DNA
gcaaatgggtaaattcaagagatccaaagcagaaactgaggactttgataactcatttagtttttatagtgttag

SEQ ID NO: 417933 - DNA, 75 bp, synthetic construct
  source 1..75: mol_type = other DNA
ctgacttttcacagtctcgtactgccagagagcttggactaaataaatctaacgtctcacgtgcattcagagaat

SEQ ID NO: 417934 - DNA, 75 bp, synthetic construct
  source 1..75: mol_type = other DNA
ttgctctcaatgatgaacagaacttattctgtactattacttttcaacacgttatcgatgaaaacaaaacatata

SEQ ID NO: 417935 - DNA, 75 bp, synthetic construct
  source 1..75: mol_type = other DNA
ggcgaaacgctggaaacccacgcccctgatttctggcgctggctcgaccgcgcagccggtggccgaccggaaaaa

SEQ ID NO: 417936 - DNA, 75 bp, synthetic construct
  source 1..75: mol_type = other DNA
gggcgcgggacgtggttctgcaatcagtgtggcgcaggtgacgggcttaagctggtagagaaagtgtttggcgtg

SEQ ID NO: 417937 - DNA, 75 bp, synthetic construct
  source 1..75: mol_type = other DNA
ccgcgttctggcgctggcttgaccgtgccgccggtggccgtgcggaaaaacgcgacgtgattctggccgcactgt

SEQ ID NO: 417938 - DNA, 75 bp, synthetic construct
  source 1..75: mol_type = other DNA
gccaacggccagcttctgtcccgttatgaaaatggtgtctggaaggtgctgccgccacaggactttgcccgggat

SEQ ID NO: 417939 - DNA, 75 bp, synthetic construct
  source 1..75: mol_type = other DNA
gggtgattattcacttcccggaacagatagccccgcaggagcgcgacccgcagcttaaggacaaaatcacccgcg

SEQ ID NO: 417940 - DNA, 75 bp, synthetic construct
  source 1..75: mol_type = other DNA
caggggatacaaaccaacctgtcgctgaaagaggaaagctacggcgactggctgccgaagtgcgacgaacctgca

SEQ ID NO: 417941 - DNA, 75 bp, synthetic construct
  source 1..75: mol_type = other DNA
ctggcagctctttctcgaagtcaccggtcccggcgggagtggcaaaagtattctcgccgaaattgcgaccctgct

SEQ ID NO: 417942 - DNA, 75 bp, synthetic construct
  source 1..75: mol_type = other DNA
taaaacaggcgtgcggccactggccgaacattctcccggcgctgggggtgaaggtcattaaaaaccgccatcagt

SEQ ID NO: 417943 - DNA, 75 bp, synthetic construct
  source 1..75: mol_type = other DNA
cagggcatacaaaccaatctcacgctaagagaggaaagcaacgccgactggttgccgaaatgtgataaccccata

SEQ ID NO: 417944 - DNA, 75 bp, synthetic construct
  source 1..75: mol_type = other DNA
cggcacggcgtctgattggctttcgcaacggcgtactcgataccgccaccggcacattcaaccctcaccataaat

SEQ ID NO: 417945 - DNA, 75 bp, synthetic construct
  source 1..75: mol_type = other DNA
ccagaccaaagccgcagcggccgcagaagcctgtgacggtattgttgccctgccgccggtgttcggtgactggaa

SEQ ID NO: 417946 - DNA, 75 bp, synthetic construct
  source 1..75: mol_type = other DNA
gtccagctcattaacgcggacggtctcaagcgcaccctgaaaggcggtcaggtgaaaggggcgtgtcatattctc

SEQ ID NO: 417947 - DNA, 75 bp, synthetic construct
  source 1..75: mol_type = other DNA
cgtagcggtggagtttcacgccgtagggtgatcctgcacttccccgatcagatagccccggaggaacgcgatact

SEQ ID NO: 417948 - DNA, 75 bp, synthetic construct
  source 1..75: mol_type = other DNA
tgatgcggtatcggtcgacccgaaatacaaggatgcgtactccacccatattccggcggtgattctggccgtgaa

SEQ ID NO: 417949 - DNA, 75 bp, synthetic construct
  source 1..75: mol_type = other DNA
acgccatccggccaccggctgacagccctttcactaccatgagtgaggcggaattcactgccatgagcaccagtg

SEQ ID NO: 417950 - DNA, 75 bp, synthetic construct
  source 1..75: mol_type = other DNA
atgataaaacgtaacttgccgctgatgatcaccatcggcgtctttgtgctgggctatctctactgcctgacccag

SEQ ID NO: 417951 - DNA, 75 bp, synthetic construct
  source 1..75: mol_type = other DNA
caggggatacagaccaacctgacgctgaaagaggaaagctacggcgactggctgccaaaatgtgacgaccctgcg

SEQ ID NO: 417952 - DNA, 75 bp, synthetic construct
  source 1..75: mol_type = other DNA
gaaggtcgtggaacatggttctgcaaccagtgcggggctggggacggtttagcgcttgtcagcaaggtactgaat

SEQ ID NO: 417953 - DNA, 75 bp, synthetic construct
  source 1..75: mol_type = other DNA
atgtctgacgctcaccgccctgcataaaaccggcggcgtgacgttccgcgccggtgatgtggcggtgccgctgta

SEQ ID NO: 417954 - DNA, 75 bp, synthetic construct
  source 1..75: mol_type = other DNA
atgaggcgggtatatggaaaatcattccgccgtcagactttgcgcgtgacgtggccgggctgttccagcgcctgc

SEQ ID NO: 417955 - DNA, 75 bp, synthetic construct
  source 1..75: mol_type = other DNA
ggtcccggcgggagcggcaaaagtatactggccgaaattgcgaccctgctcgccggggaagataatgccacgtca

SEQ ID NO: 417956 - DNA, 75 bp, synthetic construct
  source 1..75: mol_type = other DNA
gaagccagtgagggcgttgtcgccctgccgccggtgtttggtgactggaatgatgcgtttaggcagcagggtgag

SEQ ID NO: 417957 - DNA, 75 bp, synthetic construct
  source 1..75: mol_type = other DNA
tgtcgtccgtgaacctcctttctctggcgagccttgcccgacaaaagcacccggcctgccagattatgctggccg

SEQ ID NO: 417958 - DNA, 75 bp, synthetic construct
  source 1..75: mol_type = other DNA
tcaaacgcactctgaaaggtggagcggtaaaaggggcatgccatatcatcgaggggcagaaacaggcgggaaaac

SEQ ID NO: 417959 - DNA, 75 bp, synthetic construct
  source 1..75: mol_type = other DNA
acgcctatctggtttacatggaggcgcacggctacaagaacaccctcagcctgaccatgttcggcaaagggctgt

SEQ ID NO: 417960 - DNA, 75 bp, synthetic construct
  source 1..75: mol_type = other DNA
atgtatggcgggctagcgttcgctcaggaaaagatcaccagcccgctggcgataattacccttgcgcccggtgtt

SEQ ID NO: 417961 - DNA, 75 bp, synthetic construct
  source 1..75: mol_type = other DNA
aatggtccacgaactggcggcggtgctgaatgctgaagtcggctgttcacgtccaattgccgaaggcgagaactg

SEQ ID NO: 417962 - DNA, 75 bp, synthetic construct
  source 1..75: mol_type = other DNA
ggcagttatgccttatggtccaaaatgtatttatgttcttgagcaaaacgacgcactgcaacgcactgaaaatta

SEQ ID NO: 417963 - DNA, 75 bp, synthetic construct
  source 1..75: mol_type = other DNA
cgatggaagcataataagctttttctgcttctgccggaggagtatggcccagcctgctcatcattgatgaaatag

SEQ ID NO: 417964 - DNA, 75 bp, synthetic construct
  source 1..75: mol_type = other DNA
atggtcgaactgcaacatcaacggctgatggtgcttgccgaacggctgcaactggacagtcttatcggcgcagca

SEQ ID NO: 417965 - DNA, 75 bp, synthetic construct
  source 1..75: mol_type = other DNA
tctggcaatagcgatgggctatgaagcagtccgtgcaggtatcaaagttgatcctacccacgtaatatggacaca

SEQ ID NO: 417966 - DNA, 75 bp, synthetic construct
  source 1..75: mol_type = other DNA
tgtatttatgttcttgagcaaaacgacgcgctgcaacgcactgaaaattacgccgaaagcattgctgccctgctg

SEQ ID NO: 417967 - DNA, 75 bp, synthetic construct
  source 1..75: mol_type = other DNA
cagggccgttacaaaacgactctcaatcgtggtgtcatggccacgaagctgcttatcatcgatgaaataggttat

SEQ ID NO: 417968 - DNA, 75 bp, synthetic construct
  source 1..75: mol_type = other DNA
cggaccgcgatctgaatggttcaggccaggaaagggctgaaactgctgcaaaagcgtgtcagtgtgacattgtgc

SEQ ID NO: 417969 - DNA, 75 bp, synthetic construct
  source 1..75: mol_type = other DNA
gacgcctgtgagggcgttgttgccctgccaccggtattcggtgactggaatgatgcgtttatacagtacggcgag

SEQ ID NO: 417970 - DNA, 75 bp, synthetic construct
  source 1..75: mol_type = other DNA
gccggttgccccggaagtgattgcggtcgcagaggctgaaactgaggccgaccgcaaagcggccgccacgatggc

SEQ ID NO: 417971 - DNA, 75 bp, synthetic construct
  source 1..75: mol_type = other DNA
gcggcgatgcggtgtccgttgacccgaaataccgggatgcgtactccacgcatatcccggcggtgattctggccg

SEQ ID NO: 417972 - DNA, 75 bp, synthetic construct
  source 1..75: mol_type = other DNA
cgcagcggcggggtgtcccgtcgccgggtgataatgcacttcccggaacagattgccccggaagagcgtgacccg

SEQ ID NO: 417973 - DNA, 75 bp, synthetic construct
  source 1..75: mol_type = other DNA
gagttatgaaaagcgccggaaaaatcagggcatacagaccaatctggcgctcagggaagaaagcaacgccgactg

SEQ ID NO: 417974 - DNA, 75 bp, synthetic construct
  source 1..75: mol_type = other DNA
tatgggaaatgccagcatcatcccgcgtaattatcgtaaatatctctatcacgcgtatctggcctatatggaggc

SEQ ID NO: 417975 - DNA, 75 bp, synthetic construct
  source 1..75: mol_type = other DNA
ggctggcgttaccaatgctgagtttatcaacgaaaaaggtgagaaagaggactggacgccattaatgaagcgttt

SEQ ID NO: 417976 - DNA, 75 bp, synthetic construct
  source 1..75: mol_type = other DNA
cgatgcattcacgcagaacagcgaagaagccacccggctggcaatttatgaagtaataaaaccagctgttgccag

SEQ ID NO: 417977 - DNA, 75 bp, synthetic construct
  source 1..75: mol_type = other DNA
ccaacgcaccagataattattgctgctgaccgcgatctcaatggtgcagggcaaacaaggggcgtagttgctgcc

SEQ ID NO: 417978 - DNA, 75 bp, synthetic construct
  source 1..75: mol_type = other DNA
atgtctgacgctcaccgtcatgcataaaaccggcggcgtgacgttccgcgccggggatgtggttgtcccgctgtc

SEQ ID NO: 417979 - DNA, 75 bp, synthetic construct
  source 1..75: mol_type = other DNA
ccagaacagggctgaaactgctgcaaaagcgagtcagtgtgacattgtgctgccaccggtttttggtgactggaa

SEQ ID NO: 417980 - DNA, 75 bp, synthetic construct
  source 1..75: mol_type = other DNA
gcccgcgccgttatctgtatcacgcttatctggcttatatgcgggctaatggtctgagcaagccggtatcgctga

SEQ ID NO: 417981 - DNA, 75 bp, synthetic construct
  source 1..75: mol_type = other DNA
tgtcgtccgtgaacctcctttctctggcgagccttgtccgccagaaacacccggcctgtcagattgtcctcgccg

SEQ ID NO: 417982 - DNA, 75 bp, synthetic construct
  source 1..75: mol_type = other DNA
accggtgaaaccgtcatggtggcactgtcgtccgtgaacctcctttctctggcgagccttgtccgccagaaacac

SEQ ID NO: 417983 - DNA, 75 bp, synthetic construct
  source 1..75: mol_type = other DNA
aagggaaagtaagaggtgtatctgtctccggagagttttattataatgacggcacgacaagcaacttcaaagggg

SEQ ID NO: 417984 - DNA, 75 bp, synthetic construct
  source 1..75: mol_type = other DNA
ttatggtgctggcgaaccgttacgactggcagctctttcttgaggtgaccggacccggtggcagcggaaaaagta

SEQ ID NO: 417985 - DNA, 75 bp, synthetic construct
  source 1..75: mol_type = other DNA
gaaggacagaatcaggccggaaaacgtctgtggatagcggagggatacgcgaccgcacttaccgtacatcacctg

SEQ ID NO: 417986 - DNA, 75 bp, synthetic construct
  source 1..75: mol_type = other DNA
gaagcctgtgaaggcgttgttgccctgccgccggtattcggtgactggaatgatgcgtttgttcagaaaggcgaa

SEQ ID NO: 417987 - DNA, 75 bp, synthetic construct
  source 1..75: mol_type = other DNA
ccggatgaagtagacgtcgctaccgtcgtgaatgttattgatacgtgccccagcggcgcactgaaataccgtcat

SEQ ID NO: 417988 - DNA, 75 bp, synthetic construct
  source 1..75: mol_type = other DNA
ggacgccgggcaggacgtggagatgccggagccggagaagaagaagcgagaaatgattcagttgtggggggagta

SEQ ID NO: 417989 - DNA, 75 bp, synthetic construct
  source 1..75: mol_type = other DNA
gccccgccatttcattactgaaaccggtattgggtatcggtttatgctttgaattgttattcaataaattcgctt

SEQ ID NO: 417990 - DNA, 75 bp, synthetic construct
  source 1..75: mol_type = other DNA
gaatgcctttgcgggtggtagcggttggaacgcagataatgtagacccgtcccaatgtataaaactgtctggagt

SEQ ID NO: 417991 - DNA, 75 bp, synthetic construct
  source 1..75: mol_type = other DNA
agttgagaacgcttatctaaaaaagctgaaagccttagctcaggaaaaattacgattggaacaaaggaaaaagta

SEQ ID NO: 417992 - DNA, 75 bp, synthetic construct
  source 1..75: mol_type = other DNA
ctgattgcatgattatctgtacggggacatccagccgtcatgtgatgtctattgctgatcatgtggttcaggagt

SEQ ID NO: 417993 - DNA, 75 bp, synthetic construct
  source 1..75: mol_type = other DNA
caggggatacagaccaacctgacgctgaaagaggaaagctacggcgactggctgcgtattaccgtgaaggagatc

SEQ ID NO: 417994 - DNA, 75 bp, synthetic construct
  source 1..75: mol_type = other DNA
ggtttcgtcgggcttatcgtcttgcgcgtatgtgtgcccgtcttccccgttatcagccacgacttgcgtttgcac

SEQ ID NO: 417995 - DNA, 75 bp, synthetic construct
  source 1..75: mol_type = other DNA
tgtggaattgcaaaacctcggatacaccatggaccttcagttccctgctgaaaaaggcagtctgcgcgattttgc

SEQ ID NO: 417996 - DNA, 75 bp, synthetic construct
  source 1..75: mol_type = other DNA
catacgatgctgctgtatgtgcaatggctgaaagaaacggcatgtcagtgcaaaaagttaatagcatgataagca

SEQ ID NO: 417997 - DNA, 75 bp, synthetic construct
  source 1..75: mol_type = other DNA
ccaggtgagctttgtgtcaaaggaccgcaggtgatgctgggttactggcagcgtccggatgctaccgatgaaatc

SEQ ID NO: 417998 - DNA, 75 bp, synthetic construct
  source 1..75: mol_type = other DNA
cgttgctgaacaataaagagttccagcagctggatttctccagtctgcatctttccgcaggcggagggatgcctg

SEQ ID NO: 417999 - DNA, 75 bp, synthetic construct
  source 1..75: mol_type = other DNA
gtttggcttaaccgttatcccgcggacgttccgacggagatcaaccctgaccgttatcaatctctggtagatatg

SEQ ID NO: 418000 - DNA, 75 bp, synthetic construct
  source 1..75: mol_type = other DNA
cggagccggactcaaggccatcaccggcggcgatgcagtgtccgttgacccgaaataccgggatgcgtactccac

SEQ ID NO: 418001 - DNA, 75 bp, synthetic construct
  source 1..75: mol_type = other DNA
ggcgagccttgcccgtcagaaatatccggcctgtcagattgtgctcgctgccgaccgtgaccttaacggcgacgg

SEQ ID NO: 418002 - DNA, 75 bp, synthetic construct
  source 1..75: mol_type = other DNA
ccggccaccggcaacgcctacctcacccgcaagggcttccccgctctggaatgtctgacgctcaccgtcatgcat

SEQ ID NO: 418003 - DNA, 75 bp, synthetic construct
  source 1..75: mol_type = other DNA
tcggatccgttgtcacggataaaaccattgatagccagtacctgttagagatggtcaatcatgctcgtagacagc

SEQ ID NO: 418004 - DNA, 75 bp, synthetic construct
  source 1..75: mol_type = other DNA
tgacgataccggcgcgctggtaaaccttcagctcatcaattctgacggtctcaaacgcaccctgaagggcggtca

SEQ ID NO: 418005 - DNA, 75 bp, synthetic construct
  source 1..75: mol_type = other DNA
accgcaaagcggcggccgcactgaccgtcaggctcatggagaaaacccaacctgccagcggcaacgcctacctga

SEQ ID NO: 418006 - DNA, 75 bp, synthetic construct
  source 1..75: mol_type = other DNA
cgacaaaaactggaacaggatcccgcccgcccacgccatttcattactgaaaccggtattggctatcggtttatg

SEQ ID NO: 418007 - DNA, 75 bp, synthetic construct
  source 1..75: mol_type = other DNA
ttacggcgaagcgctggccgtggacgcgaacggccagctcctgtcccgctatgaggccgggatatggaaaatcat

SEQ ID NO: 418008 - DNA, 75 bp, synthetic construct
  source 1..75: mol_type = other DNA
ggcgagccttgccagacaaaaacacccggcctgtcagattgtgctggccgccgaccgtgaccttaacggcgacgg

SEQ ID NO: 418009 - DNA, 75 bp, synthetic construct
  source 1..75: mol_type = other DNA
taaaaagaataatcagtcaactcattacattaaagccactgtaccagcatgcagagtgtgcaattctgatttgct

SEQ ID NO: 418010 - DNA, 75 bp, synthetic construct
  source 1..75: mol_type = other DNA
tcaagaggttatccaacgtatgtcgcaatctacatcacagaagtcgagggccctcgcgcacgcctcgccctatga

SEQ ID NO: 418011 - DNA, 75 bp, synthetic construct
  source 1..75: mol_type = other DNA
gggaagtcaaaagccaccttgaacagctcgacagcgtagggagtgccgccgtggtgtgccaccagggacagctgt

SEQ ID NO: 418012 - DNA, 75 bp, synthetic construct
  source 1..75: mol_type = other DNA
agaacggcacgttccacccgcacagtccgtcacactggatgcgtaccctgtgtgatgtggatttcaccccgccgg

SEQ ID NO: 418013 - DNA, 75 bp, synthetic construct
  source 1..75: mol_type = other DNA
gcctctcgccgctgctggcgtttccgctggtgctggtgatgggctgtgccttcggcgcatttatggggcttctga

SEQ ID NO: 418014 - DNA, 75 bp, synthetic construct
  source 1..75: mol_type = other DNA
attgtcttctcgatttatacccaggccggatacgcgctggcaggcgtaggtgtggaactggacgctatcgcgtcg

SEQ ID NO: 418015 - DNA, 75 bp, synthetic construct
  source 1..75: mol_type = other DNA
ttgacggcacgatgagttcatggtggacgaaaatcgccatcggcattttgctgtttattttcattgcattacagc

SEQ ID NO: 418016 - DNA, 75 bp, synthetic construct
  source 1..75: mol_type = other DNA
gattgtattattgctgaccataatgctgatatatgtgtgttatgcgggagttctgacgatattactcgtgagcac

SEQ ID NO: 418017 - DNA, 75 bp, synthetic construct
  source 1..75: mol_type = other DNA
tcgacgccctgaagatcccggcgtttatcattactttggcaggaatgttctttttgcgcggcgtcagctacctcg

SEQ ID NO: 418018 - DNA, 75 bp, synthetic construct
  source 1..75: mol_type = other DNA
gccttacagcgtggattaacggtgctgtgggagaatcgtcagagttcgccagtgacaagagtcaatattgcgcag

SEQ ID NO: 418019 - DNA, 75 bp, synthetic construct
  source 1..75: mol_type = other DNA
ccacgtttttttcgcacacgaattatggcggggcgtacggggccgacttcggtcgggccgggttctatgtttgcc

SEQ ID NO: 418020 - DNA, 75 bp, synthetic construct
  source 1..75: mol_type = other DNA
aaacgggaaagatgcaaatcgcctggactgcgcgatccctgccgacgtggttaacggcctgcatgtgtttgccgg

SEQ ID NO: 418021 - DNA, 75 bp, synthetic construct
  source 1..75: mol_type = other DNA
atttgtccgttcagtaccacgccagcccttgccgccctgaagcagcatctggagaaaaccgggaacgcgatggaa

SEQ ID NO: 418022 - DNA, 75 bp, synthetic construct
  source 1..75: mol_type = other DNA
tttcggggccggttcgctggccgctgcaatggcgcgcgcggccattaatgccaacagctatctgcaactggatgt

SEQ ID NO: 418023 - DNA, 75 bp, synthetic construct
  source 1..75: mol_type = other DNA
attgtgctttccgcacgcagcgaagagagcgacaaaatcgccgcgctggatgccggagcggatgattatctaagt

SEQ ID NO: 418024 - DNA, 75 bp, synthetic construct
  source 1..75: mol_type = other DNA
caaaaactggaacaggatccggcccggcctcgccacttcattactgaaaccggtattgggtatcggtttatgctt

SEQ ID NO: 418025 - DNA, 75 bp, synthetic construct
  source 1..75: mol_type = other DNA
aagctcagctcaagaacacctccgaaggtgcgcagtgaactgcttgatgtgctttacaagctggaggagctggag

SEQ ID NO: 418026 - DNA, 75 bp, synthetic construct
  source 1..75: mol_type = other DNA
caaaaactggaacaagacccggctcggcctcgccattttattactgaaaccggtattgggtatcggtttatgctt

SEQ ID NO: 418027 - DNA, 75 bp, synthetic construct
  source 1..75: mol_type = other DNA
taaacatacggcttgagtttgaaacagccgttagacgtctttctcttgattcttttacagaggataaagggaaag

SEQ ID NO: 418028 - DNA, 75 bp, synthetic construct
  source 1..75: mol_type = other DNA
cacttaatatagtgcaactagatgtatctcaaattcaagttgctgaatttgctcttgccaagatgcaaattaata

SEQ ID NO: 418029 - DNA, 75 bp, synthetic construct
  source 1..75: mol_type = other DNA
atgagtgaaattcagtttgacaccatttcgggcggcatccgtaagcccggtgtgcattttgaattcaatacccgg

SEQ ID NO: 418030 - DNA, 75 bp, synthetic construct
  source 1..75: mol_type = other DNA
acgcggtcgaacacagtcattatttgcgtatttatatggggcatctgcgacaaaaactggaacaggatcccgccc

SEQ ID NO: 418031 - DNA, 75 bp, synthetic construct
  source 1..75: mol_type = other DNA
tgcgtgggacggtaagtgatgtgcgtaagggaagccaggagatgcacattggtatcgcggagattgtcgcaggca

SEQ ID NO: 418032 - DNA, 75 bp, synthetic construct
  source 1..75: mol_type = other DNA
ttcatcatgacggcaatcccatcatgacctggtgtatcggcaatgtggtcggcaaaaacatgccaggtaacgatg

SEQ ID NO: 418033 - DNA, 75 bp, synthetic construct
  source 1..75: mol_type = other DNA
agattgacggtaaaacgcattactacagtgtggccccgcgcttctgggtaccgtatgacacggtgtacagcgtcg

SEQ ID NO: 418034 - DNA, 75 bp, synthetic construct
  source 1..75: mol_type = other DNA
cttcaccctgggagagaagcgtgtcctgatgttctcgccacaggggatgacggcggaaggatatcactatcgcaa

SEQ ID NO: 418035 - DNA, 75 bp, synthetic construct
  source 1..75: mol_type = other DNA
gttcaacggcaggctgcggcaggagtgcctgaacgtaaactggttcatgtcgctggaggatgcacggtgcaaaat

SEQ ID NO: 418036 - DNA, 75 bp, synthetic construct
  source 1..75: mol_type = other DNA
atggatgtacgacagagggatccacatcgacctatcacgaccgggaacgcccacggataatgccacagtggagtc

SEQ ID NO: 418037 - DNA, 75 bp, synthetic construct
  source 1..75: mol_type = other DNA
atctgtctctccccgcacaatcagcaataaatatgttttgcaggaaaacgcgcaagcagttgagattcagttgca

SEQ ID NO: 418038 - DNA, 75 bp, synthetic construct
  source 1..75: mol_type = other DNA
aagaccaacaaaatacttttatttttaccgagtttaacccagcaaaaacgaagtatttcatcctgaacaacggtt

SEQ ID NO: 418039 - DNA, 75 bp, synthetic construct
  source 1..75: mol_type = other DNA
gtatttcatcctgaacaatggttcggtggctttagcgggtcgagtgttatccattgacgccacagagaatggcag

SEQ ID NO: 418040 - DNA, 75 bp, synthetic construct
  source 1..75: mol_type = other DNA
ctgaagttagccatcaacatggaaaatattcagttcgacaatcttccctctgctgaaaatcggcagaaaagaagc

SEQ ID NO: 418041 - DNA, 75 bp, synthetic construct
  source 1..75: mol_type = other DNA
ctgatgttctcgccgcagggcatggcggcggaagggtatcactatcgcaacctgttccagagcggctatttactt

SEQ ID NO: 418042 - DNA, 75 bp, synthetic construct
  source 1..75: mol_type = other DNA
aaaatgcggcgggtgaagaactggccggattgcttgaacttcctgaaaatcctaaagcgtttgcgctgttagctc

SEQ ID NO: 418043 - DNA, 75 bp, synthetic construct
  source 1..75: mol_type = other DNA
taccaggtcaatggcaagacattaatttgaccctgaagggtgtatcgcccaataacctgggatatctgaagttag

SEQ ID NO: 418044 - DNA, 75 bp, synthetic construct
  source 1..75: mol_type = other DNA
ctgatgtttctgaactggcggtacaaatcatgaagttgtccgaagatgagcgtaagtgcctctttgaaaagctga

SEQ ID NO: 418045 - DNA, 75 bp, synthetic construct
  source 1..75: mol_type = other DNA
ggttatcatgtttgctcttggggatcataaaaaaagatttgctcaattatattatattcctttagataaacttat

SEQ ID NO: 418046 - DNA, 75 bp, synthetic construct
  source 1..75: mol_type = other DNA
acacgaatatacaagtaacaagctcaggtgggggaaaagttatagtcttactcaatggcacaacgttccagagcg

SEQ ID NO: 418047 - DNA, 75 bp, synthetic construct
  source 1..75: mol_type = other DNA
gtcttacggtcttctcgtaaccaagaaagcatatgccaagttagagaatatagtatcttacggacataccaacgg

SEQ ID NO: 418048 - DNA, 75 bp, synthetic construct
  source 1..75: mol_type = other DNA
tctgcaacaaatatatctttgggtgatttagtttctcatttaaatgatgatgttgttacgaaaaaagtgagatta

SEQ ID NO: 418049 - DNA, 75 bp, synthetic construct
  source 1..75: mol_type = other DNA
accatgctacgccaagcctggcgagtaaaagccggacagcgtgtcaacgtgatcgccagtggcgatggtttcagc

SEQ ID NO: 418050 - DNA, 75 bp, synthetic construct
  source 1..75: mol_type = other DNA
tatttcatcggaagaaaatttagaatggtttattgataaaggtctaaccaagaataattatgtcttacaagcaat

SEQ ID NO: 418051 - DNA, 75 bp, synthetic construct
  source 1..75: mol_type = other DNA
atgtggtatttattgtggttcgtcggcattttgttgatgtgttcactctccaccgtggtgttggtgtggctggaa

SEQ ID NO: 418052 - DNA, 75 bp, synthetic construct
  source 1..75: mol_type = other DNA
ccgaacctttgctcaactggcactggataaatctgagctggtcattcgtcaggcagatttagtgagcgatgcagc

SEQ ID NO: 418053 - DNA, 75 bp, synthetic construct
  source 1..75: mol_type = other DNA
gtgtgtatgatacggtaacgaaaacctttttctcgttaagcaacgaggcctcggcagcaacgttttctccgctga

SEQ ID NO: 418054 - DNA, 75 bp, synthetic construct
  source 1..75: mol_type = other DNA
aggtgacgcagcgtttaacagtcagagattggctgcatatgactacatcggcaacatgacgctgaaagggaatcc

SEQ ID NO: 418055 - DNA, 75 bp, synthetic construct
  source 1..75: mol_type = other DNA
tttctcatccgctcgcagcagttgctagcggttatattgtgcagataacacctatatctgcgcctgattcagtta

SEQ ID NO: 418056 - DNA, 75 bp, synthetic construct
  source 1..75: mol_type = other DNA
atctccgggcgcaaggtgaaacactgaatgatgaagatatcgcacgcctctccccgctttgccacggacatatca

SEQ ID NO: 418057 - DNA, 75 bp, synthetic construct
  source 1..75: mol_type = other DNA
agaactacaccaacatgtccgacccgatgaaagagctggaagcggcaattgaatcggggcgctttcatcatgacg

SEQ ID NO: 418058 - DNA, 75 bp, synthetic construct
  source 1..75: mol_type = other DNA
aatgaccagggatcagcgtcaaaacttatgtttataattaatggtgcaggacaaacagactctacagcaccttta

SEQ ID NO: 418059 - DNA, 75 bp, synthetic construct
  source 1..75: mol_type = other DNA
acatcactcacacgtagtccagataaaaggagagagctatcgactgaagcagaaacgaaaggccggggttatagc

SEQ ID NO: 418060 - DNA, 75 bp, synthetic construct
  source 1..75: mol_type = other DNA
acctattaagcgttcccgtatcaaatattggctttcaagctacatggggcaatgaaagacccaccgatgccaaag

SEQ ID NO: 418061 - DNA, 75 bp, synthetic construct
  source 1..75: mol_type = other DNA
ttcctgtttcgcaaccaatcatcattaacgctgctggttaccctgtatataacggacagattgccaagttcgtaa

SEQ ID NO: 418062 - DNA, 75 bp, synthetic construct
  source 1..75: mol_type = other DNA
acgttggtagttatgacccggcgacacaaaaccctgacactgcgcatttaatagatattgcgaacagagagttaa

SEQ ID NO: 418063 - DNA, 75 bp, synthetic construct
  source 1..75: mol_type = other DNA
aaaacatctatgctggtaattattcattcttagttacgacaggagatagagtttggggacgaacgatagacctca

SEQ ID NO: 418064 - DNA, 75 bp, synthetic construct
  source 1..75: mol_type = other DNA
atgttcgggatgtcaattactcaatcagatggaagtttgtggatgagtcctgaatttactccgcaaaatctgatt

SEQ ID NO: 418065 - DNA, 75 bp, synthetic construct
  source 1..75: mol_type = other DNA
acgtagtgacctggagcgtgagctgaacacctggattcgccagtatgttgctgaccaggaaaatccgcctgccga

SEQ ID NO: 418066 - DNA, 75 bp, synthetic construct
  source 1..75: mol_type = other DNA
aagtaaaatagagattcttgaaaaagaacaagaacaatataaaagaaaaatagaaattattgaaaatcaacaaat

SEQ ID NO: 418067 - DNA, 75 bp, synthetic construct
  source 1..75: mol_type = other DNA
acctattaagcgttcccgtatcaaatattggttttcatgctacatggggcaatgaaaggcccaccgatgccaaag

SEQ ID NO: 418068 - DNA, 75 bp, synthetic construct
  source 1..75: mol_type = other DNA
caacaagaacaagataaacgcaagatagaactatttgaaaaacagcaaactgccatcataagtagtaccaaaacg

SEQ ID NO: 418069 - DNA, 75 bp, synthetic construct
  source 1..75: mol_type = other DNA
gatgaaagagctggaagcagcgattgaatcggggcgctttcatcatgacggcaatcccatcatgacctggtgtat

SEQ ID NO: 418070 - DNA, 75 bp, synthetic construct
  source 1..75: mol_type = other DNA
cgtgtataaaacgaatgaggctaatcagcagctagctcatctttctggtatgaatgtttatgcaaaaacaaatga

SEQ ID NO: 418071 - DNA, 75 bp, synthetic construct
  source 1..75: mol_type = other DNA
gagtttttactctatcaagagtcaatatataaagataccctgacagacgataccgtttattttgaagccgggcat

SEQ ID NO: 418072 - DNA, 75 bp, synthetic construct
  source 1..75: mol_type = other DNA
gttcaatttatggttattacaaaaggggccgagcgtgttgctgaagtgagtgctcgtttttcccttgatggtatg

SEQ ID NO: 418073 - DNA, 75 bp, synthetic construct
  source 1..75: mol_type = other DNA
agaaaaaatcagagcaggaggataaaccccgtcgccgtgaggcggctgcaataccacagccggacgaaaacaatc

SEQ ID NO: 418074 - DNA, 75 bp, synthetic construct
  source 1..75: mol_type = other DNA
gcgtgaaattgaggcggcgctggcatcaggacgctttcatcatgacggtaaccctatcatgaactggtgcatcca

SEQ ID NO: 418075 - DNA, 75 bp, synthetic construct
  source 1..75: mol_type = other DNA
caggttaaaattgtccagtgcccgatagatccttacggggcaacatcattgcgccatctgcttgaagaggagggg

SEQ ID NO: 418076 - DNA, 75 bp, synthetic construct
  source 1..75: mol_type = other DNA
gcgaggcttacaacgaaataccccgtaaaaacgggaaatcagcaatgtctgctggcgttggtctgtatatgtttg

SEQ ID NO: 418077 - DNA, 75 bp, synthetic construct
  source 1..75: mol_type = other DNA
gatgaaagagctggaagcggcaattgaatcggggcgctttcatcatgacggcaatcccatcatgacctggtgtat

SEQ ID NO: 418078 - DNA, 75 bp, synthetic construct
  source 1..75: mol_type = other DNA
atgagccggaaatcttaccccaacgtaaatgctgccaatcagtatgcccgtgatgtcgtgcgcggaaagattgtg

SEQ ID NO: 418079 - DNA, 75 bp, synthetic construct
  source 1..75: mol_type = other DNA
tactgtttattttgaggctgggcatgcagagatatcatttgaatttgtccaggaaaagctttcggctaactctat

SEQ ID NO: 418080 - DNA, 75 bp, synthetic construct
  source 1..75: mol_type = other DNA
tatcgcgattaatatttcgacagctttacttttattaatgctctcaatctatataaaaaatcctcttgaactaac

SEQ ID NO: 418081 - DNA, 75 bp, synthetic construct
  source 1..75: mol_type = other DNA
cagccagactgatggcgcaacgcacggagccattgcgtgaagcatttggtattgaagtacatgctcaaagcatga

SEQ ID NO: 418082 - DNA, 75 bp, synthetic construct
  source 1..75: mol_type = other DNA
atcgctcaacagtctgatcctgacggtggagcaaattttatggggcatgttgttcgggttgatgtttcagtttct

SEQ ID NO: 418083 - DNA, 75 bp, synthetic construct
  source 1..75: mol_type = other DNA
tgatggatctggcgctggggctgtggtttcccttcgtgcgcattatggcgtttctgcgctatgtgccggtgctgg

SEQ ID NO: 418084 - DNA, 75 bp, synthetic construct
  source 1..75: mol_type = other DNA
caccctgctctacaacctgccggatcactatctgcatctggcgaattttgtgttgcagcaactcgacgcgctgaa

SEQ ID NO: 418085 - DNA, 75 bp, synthetic construct
  source 1..75: mol_type = other DNA
aaatataaagtgactgcgcctgaatttatcaaaattaatggtattccttatctgtcagatgaagatacccgcgat

SEQ ID NO: 418086 - DNA, 75 bp, synthetic construct
  source 1..75: mol_type = other DNA
aagcgaaaaaattaaagtcgaggcttttggatgtaagctggcaattgacagtttgctggacgtggacaccgcagg

SEQ ID NO: 418087 - DNA, 75 bp, synthetic construct
  source 1..75: mol_type = other DNA
aatatcgtcaagtatatatctatatggattaagtttaattgcatctattgtgattgataaaaatataattatata

SEQ ID NO: 418088 - DNA, 75 bp, synthetic construct
  source 1..75: mol_type = other DNA
gagcagcggcgcatcgaccaccgtgctggcggagttaatcaacgtctatgcgatcctgctgttttttgccatgga

SEQ ID NO: 418089 - DNA, 75 bp, synthetic construct
  source 1..75: mol_type = other DNA
cccatcccattccccacgacctgctttcactcaacagcctgatcctgacggtggagcaaattttatggggcatgt

SEQ ID NO: 418090 - DNA, 75 bp, synthetic construct
  source 1..75: mol_type = other DNA
aaccttctctaactcaaaacgaatggaagatgcgtttgatgttcagcgcgatcatctggcactgatgaaagattt

SEQ ID NO: 418091 - DNA, 75 bp, synthetic construct
  source 1..75: mol_type = other DNA
ttatcgcctgtatgacgccgatttgccggaatacaacgttgccgttgaccgctatgctgactgggtggtggtgca

SEQ ID NO: 418092 - DNA, 75 bp, synthetic construct
  source 1..75: mol_type = other DNA
agcggctgggcgcagcatgatgaagctatctggcaggaagtgaaagcggaagcgcaaactcgcgcccgtaaaggc

SEQ ID NO: 418093 - DNA, 75 bp, synthetic construct
  source 1..75: mol_type = other DNA
tgccggtattgcgccaatcaaagaaacactggcggctgccattgtgatgcgatccggctggcagccaggaacacc

SEQ ID NO: 418094 - DNA, 75 bp, synthetic construct
  source 1..75: mol_type = other DNA
ggaagactacgccaaccgcctgcgtaagaacctcaaaaaattcgagaagtgggctcgccaggaagggattgaatg

SEQ ID NO: 418095 - DNA, 75 bp, synthetic construct
  source 1..75: mol_type = other DNA
aagggcagcggttactggcagaaagtggcctgatggtggaagccgtcaattctctggatgatgccgctaaacgca

SEQ ID NO: 418096 - DNA, 75 bp, synthetic construct
  source 1..75: mol_type = other DNA
gccgtgtccaaaagagatagccatccaacagatttcgcaactggcagatgcctggcaacatattgcttgcccgag

SEQ ID NO: 418097 - DNA, 75 bp, synthetic construct
  source 1..75: mol_type = other DNA
ttgttcagataaaaggagagagctatcggttaaagcaaaaaagaaaggcaggggttatcgcagaagctaatcctg

SEQ ID NO: 418098 - DNA, 75 bp, synthetic construct
  source 1..75: mol_type = other DNA
gcttgtttaccagagcctgatgtggagccgtctggcctcgcgtattatgttgccgctgggcgagtgtaaggttta

SEQ ID NO: 418099 - DNA, 75 bp, synthetic construct
  source 1..75: mol_type = other DNA
cagacagcaaaccggcaatggtggcggaagactacgccaaccgcctgcgtaagaacctcaaaaaattcgagaagt

SEQ ID NO: 418100 - DNA, 75 bp, synthetic construct
  source 1..75: mol_type = other DNA
tgttgagcaacccgccatacggtgaacgtctggacagcgaaccggcgctgattgcgctgcatagtctgctgggcc

SEQ ID NO: 418101 - DNA, 75 bp, synthetic construct
  source 1..75: mol_type = other DNA
ccgctggtgtccaaatatcattggcccgcaaagcggcggcgcggtgaaagatctgccagtgcatctgttcgaaac

SEQ ID NO: 418102 - DNA, 75 bp, synthetic construct
  source 1..75: mol_type = other DNA
aaaatgctgccgccgtttcgtcttggcctgggcgggccgattggctctggtcggcagtatctggcctggattcat

SEQ ID NO: 418103 - DNA, 75 bp, synthetic construct
  source 1..75: mol_type = other DNA
cgggattaatgggtcgccatttgattccgcgtttgctggagctgggacatcaaatcacggtagtaacgcgtaacc

SEQ ID NO: 418104 - DNA, 75 bp, synthetic construct
  source 1..75: mol_type = other DNA
aaacggctggaagaagcgggttttgcgtttcgctggtacgatttagaagaggcgctggcggatgtcgttcgctga

SEQ ID NO: 418105 - DNA, 75 bp, synthetic construct
  source 1..75: mol_type = other DNA
acatgtcggcagcattgttacggctactggtggagtagtgaaggcataccagattcgcccggatcttccgaagtt

SEQ ID NO: 418106 - DNA, 75 bp, synthetic construct
  source 1..75: mol_type = other DNA
gtcgcactatggagtgggcaacagctgatggtacttccgaagttggtgttctgctgggcgaaaatgaagaagccg

SEQ ID NO: 418107 - DNA, 75 bp, synthetic construct
  source 1..75: mol_type = other DNA
gaaaacctatatcgatagccgtaataccggcaattttgatgttatccgcgcctcgtgggtaggggattataatga

SEQ ID NO: 418108 - DNA, 75 bp, synthetic construct
  source 1..75: mol_type = other DNA
aatggaaaaggggcaaccgtacctggcagtaacactgatatacaaaaaatcagtactatttgtaaaaatgcggca

SEQ ID NO: 418109 - DNA, 75 bp, synthetic construct
  source 1..75: mol_type = other DNA
aacagaagagtaacggaaatgtttatctccatcacccaacatattaatgcactttacagcaaccaacctaaatcc

SEQ ID NO: 418110 - DNA, 75 bp, synthetic construct
  source 1..75: mol_type = other DNA
tgttgttacgaaaaaagtgagattatatagggatggcgagggtaaaaataatattgttcaaggagtcgcgattga

SEQ ID NO: 418111 - DNA, 75 bp, synthetic construct
  source 1..75: mol_type = other DNA
ggtaaaatgctgccgccatttcgttttggcctgggcgggccgattggctccggtcggcagtatctggcctggatt

SEQ ID NO: 418112 - DNA, 75 bp, synthetic construct
  source 1..75: mol_type = other DNA
caaatcacggtagtgacgcgtaacccgcagaaagccagttccgttctcggccctcgggtgacactatggcaaggg

SEQ ID NO: 418113 - DNA, 75 bp, synthetic construct
  source 1..75: mol_type = other DNA
ataataaatagatcaggcgagatatcgaaaggtattacattaaatggtatccccggtgtcttttctatttatggc

SEQ ID NO: 418114 - DNA, 75 bp, synthetic construct
  source 1..75: mol_type = other DNA
gtgacgctcgcgcgtcaggatgcaaagtatccggtcgatgcgcagttgaaagccgcattgactcagccgctaaat

SEQ ID NO: 418115 - DNA, 75 bp, synthetic construct
  source 1..75: mol_type = other DNA
tggggtcatggaaagaaaggagcgacttagagagggagcttaatacctggatccgtcagtatgttgccgaccagg

SEQ ID NO: 418116 - DNA, 75 bp, synthetic construct
  source 1..75: mol_type = other DNA
gccgaattattaaatgcacaaagtcaaatggaattctggcgagatccctatggtgctttttccagcgtgtttgga

SEQ ID NO: 418117 - DNA, 75 bp, synthetic construct
  source 1..75: mol_type = other DNA
tagtatgaccaccggaaaagatagtgggggtcagagtggtgtaaaatataccttaaatggcggaggttatattag

SEQ ID NO: 418118 - DNA, 75 bp, synthetic construct
  source 1..75: mol_type = other DNA
ccgaaccggtcaataaactggtcgtggacagcatgattgcagatattgatgaacgcatcagccgccagatggatg

SEQ ID NO: 418119 - DNA, 75 bp, synthetic construct
  source 1..75: mol_type = other DNA
aagcgtgaggcctcattttaaatttatgggggcaaattttgagctttccctggttggccggttagacagggagta

SEQ ID NO: 418120 - DNA, 75 bp, synthetic construct
  source 1..75: mol_type = other DNA
gatgaacgcatcagccgccagatggatgtcatcatccatgcgcctgcctttcagcaggtcgagtcgttctggcgc

SEQ ID NO: 418121 - DNA, 75 bp, synthetic construct
  source 1..75: mol_type = other DNA
ccttcaatgggcgtgaaatcctcaatttgccagagcgtgaactcaataaactgcgcgctgaacaaatctcaatga

SEQ ID NO: 418122 - DNA, 75 bp, synthetic construct
  source 1..75: mol_type = other DNA
aagactttattcaggaaattgaaactggtgaaccgcgttttatgtttcctgttaccgactcaaacatgaagcgtc

SEQ ID NO: 418123 - DNA, 75 bp, synthetic construct
  source 1..75: mol_type = other DNA
tatggtctgacgcttggtgtccatacgcgtattgatgaaaccatcgcccaggtcactggctcggcccatgttggt

SEQ ID NO: 418124 - DNA, 75 bp, synthetic construct
  source 1..75: mol_type = other DNA
gaaccggtggtgcggttgaatgtggaatcacgcggtgatgtgccgctgatggaagcgcgaacgcgaactctgctg

SEQ ID NO: 418125 - DNA, 75 bp, synthetic construct
  source 1..75: mol_type = other DNA
gcatcaagccggtcgatatgcgccacgaaggcaagtaccttgtgatagttgctgagccggtaacggtcgaggtgc

SEQ ID NO: 418126 - DNA, 75 bp, synthetic construct
  source 1..75: mol_type = other DNA
aatgcaggcactggggcacgcatctggctggctaaagaagcactggaatctggcgattatgatagcgaagaagcc

SEQ ID NO: 418127 - DNA, 75 bp, synthetic construct
  source 1..75: mol_type = other DNA
cggcgcatctgcgattgtcatcgtgtccaactttgcccataccctggaaaaagtggttgataaaaccgctgtcca

SEQ ID NO: 418128 - DNA, 75 bp, synthetic construct
  source 1..75: mol_type = other DNA
cggaagccaaactggtggatgatgatgataatgaagtaccaccgggtcaaccgggtgagctttgtgtcaaaggac

SEQ ID NO: 418129 - DNA, 75 bp, synthetic construct
  source 1..75: mol_type = other DNA
cgctggttaacttcgtggttaaatacatcaagcgtctggtccccaaatatcatctgccagatgctatttcgtttc

SEQ ID NO: 418130 - DNA, 75 bp, synthetic construct
  source 1..75: mol_type = other DNA
cggagaaatccgtcttaatggcaaagatatctctccacgttcacccctggatgccgtgaaaaaagggatggctta

SEQ ID NO: 418131 - DNA, 75 bp, synthetic construct
  source 1..75: mol_type = other DNA
agaaaaaggtccgggatatctcatttagcgtctgccggggagaatattaggctttgccgggctggtcggttccgg

SEQ ID NO: 418132 - DNA, 75 bp, synthetic construct
  source 1..75: mol_type = other DNA
agcggtgaaaatcttcgtagtgaaaaaagatccatcgcttaccgaagagtcactggtgactttttgccgccgtca

SEQ ID NO: 418133 - DNA, 75 bp, synthetic construct
  source 1..75: mol_type = other DNA
atgaaaaaattactgacaccacttttatttcttttagctttatttagtccgatgctgaatgccgcaccggtaact

SEQ ID NO: 418134 - DNA, 75 bp, synthetic construct
  source 1..75: mol_type = other DNA
ggattatttactgtaacagtcgtgcgaaagtagaggataccgccgcgcgcctgcaaagtcggggaattagcgcgg

SEQ ID NO: 418135 - DNA, 75 bp, synthetic construct
  source 1..75: mol_type = other DNA
ctcagcgttaacggcgttgggatgcgcaagctggaacgctttggcaaaccgtttatggcgctgattcgtgcgcat

SEQ ID NO: 418136 - DNA, 75 bp, synthetic construct
  source 1..75: mol_type = other DNA
cggcgcatcggcgattgttatcgtgtctaactttgctcacacactggagaaagtggttgataaaacagccgtcca

SEQ ID NO: 418137 - DNA, 75 bp, synthetic construct
  source 1..75: mol_type = other DNA
ccgttatcaatctctggtagatatgtttgagcagtcggtcgcgcgctacgccgatcagcctgcgtttgtgaatat

SEQ ID NO: 418138 - DNA, 75 bp, synthetic construct
  source 1..75: mol_type = other DNA
atgaaaaaattactgacaccatttttatttcttttcgctttattaagtccgatgctgaatgccgcaccggtcact

SEQ ID NO: 418139 - DNA, 75 bp, synthetic construct
  source 1..75: mol_type = other DNA
gatatctctccacgttcacccctggatgccgtgaaaaaagggatggcttacatcactgaaagccgccgggataac

SEQ ID NO: 418140 - DNA, 75 bp, synthetic construct
  source 1..75: mol_type = other DNA
acggtacgcgaactcaacggcgagtccagcatatccctggaagaagcaccaccggcaaaacagcagattgtctgt

SEQ ID NO: 418141 - DNA, 75 bp, synthetic construct
  source 1..75: mol_type = other DNA
atccgcagatgcgttataaagaaaaatgccagcaggaaggcattccggttgcgcagagcatttatcaatttttaa

SEQ ID NO: 418142 - DNA, 75 bp, synthetic construct
  source 1..75: mol_type = other DNA
gaagctcgtcgtattggagcagaaaaaactctgcatcaacaggcgagaacacaagtgccactgggatcaagcgac

SEQ ID NO: 418143 - DNA, 75 bp, synthetic construct
  source 1..75: mol_type = other DNA
tagatgaaatcgacggttttgttgaatgggcacgccaggtattagcggacaccctggctgcgggtgtgcagcaaa

SEQ ID NO: 418144 - DNA, 75 bp, synthetic construct
  source 1..75: mol_type = other DNA
tggcgaacccgaatgggggagacggtccatctcatgcgcaacctgcgccagtggatgcataagcaaaaactggac

SEQ ID NO: 418145 - DNA, 75 bp, synthetic construct
  source 1..75: mol_type = other DNA
ggcggtaacgagctggtaacggggatatttatgtttattgccccggcttgtggcttgatgatccgctttatggtg

SEQ ID NO: 418146 - DNA, 75 bp, synthetic construct
  source 1..75: mol_type = other DNA
taacgagaatgagtcagtttcctgaaaatgccgacaaaatgtttcttgatatgatcattgacatgggggagagta

SEQ ID NO: 418147 - DNA, 75 bp, synthetic construct
  source 1..75: mol_type = other DNA
atgcgatgactccgccggaggacagctactacacacctgtggtgcatggaatagcacaaagtgaggcgcaggtta

SEQ ID NO: 418148 - DNA, 75 bp, synthetic construct
  source 1..75: mol_type = other DNA
cattcgataaaccagaatatcaccgaactctccgggggggaatcagcagaaagtcctgatctccaaatggctgtg

SEQ ID NO: 418149 - DNA, 75 bp, synthetic construct
  source 1..75: mol_type = other DNA
atggggaagcaaggcaaaggcaaaggcaaaggcaacaaaaatcaggttaaggttacgtgggctcaggcgtggcgg

SEQ ID NO: 418150 - DNA, 75 bp, synthetic construct
  source 1..75: mol_type = other DNA
gctactggcagagtttttgaaagataagtgtggcgttgaagaatgccggttaaatctgaaatcaacagaagatga

SEQ ID NO: 418151 - DNA, 75 bp, synthetic construct
  source 1..75: mol_type = other DNA
gccgcaaaggcggccgcaagccgaagatgaccgacagcaagatcgagtcggccaagaagctgctggccagcgggg

SEQ ID NO: 418152 - DNA, 75 bp, synthetic construct
  source 1..75: mol_type = other DNA
caacattgaatcctattatcaggaaaccggtcgcgccgggcgtgatggcctgccagcggaagcgatgctgtttta

SEQ ID NO: 418153 - DNA, 75 bp, synthetic construct
  source 1..75: mol_type = other DNA
ctcgttaaccgccacgatggcgtgctgccgccgcacctggcctccgccattcagaaactgaccggaaccggagcg

SEQ ID NO: 418154 - DNA, 75 bp, synthetic construct
  source 1..75: mol_type = other DNA
aagctgctttccgaggcggtggaagcgattgaacccggcccggtggaaggcattcgcgccaccggtgccaacaag

SEQ ID NO: 418155 - DNA, 75 bp, synthetic construct
  source 1..75: mol_type = other DNA
agagatcctctacggcgtgctgccgcaggtgatgccgctgctgatctcctactccctctatcgcttcgaatccaa

SEQ ID NO: 418156 - DNA, 75 bp, synthetic construct
  source 1..75: mol_type = other DNA
tatccgggctggatcagcatttacgtgcggctggatgcgccccggctggcgacgttacttatcaaccgtcacggc

SEQ ID NO: 418157 - DNA, 75 bp, synthetic construct
  source 1..75: mol_type = other DNA
cctgctgctggcgcagggctggccggaagagacggatgttgaccagcgaaacccgaactatccgggctggatcag

SEQ ID NO: 418158 - DNA, 75 bp, synthetic construct
  source 1..75: mol_type = other DNA
aaggaaagcgattacccctgctggcttgatgaagatgacgaaaatctgcccgtggtgctcgatgccattctgaac

SEQ ID NO: 418159 - DNA, 75 bp, synthetic construct
  source 1..75: mol_type = other DNA
tgtgctgcgtataccggatgaaccgccccgccggtggtttgaccgtggtgttctgcgggaggtggtccgggaagc

SEQ ID NO: 418160 - DNA, 75 bp, synthetic construct
  source 1..75: mol_type = other DNA
ggttcgccagaacctccggcggtctggttcgcctacttaccggaccatcagggtaaacatccggagcaacacctt

SEQ ID NO: 418161 - DNA, 75 bp, synthetic construct
  source 1..75: mol_type = other DNA
ggcggcgctgaccacaaccggtcagacgttgctgacccgccagacccgccgctttcgcctggtggtgaaggaaag

SEQ ID NO: 418162 - DNA, 75 bp, synthetic construct
  source 1..75: mol_type = other DNA
taacgaaatggtctttgccatgctgttcgtggtcgccgtcggcctcggcccgttcgctggcgtgttggcgctgtt

SEQ ID NO: 418163 - DNA, 75 bp, synthetic construct
  source 1..75: mol_type = other DNA
gcgtcaggctgcggcttcccttgcgccctgtgcatccccgccttatcgcccggcttttatggaggcacggcaccg

SEQ ID NO: 418164 - DNA, 75 bp, synthetic construct
  source 1..75: mol_type = other DNA
agtatccgggctggatcagcatttacgtgcggctggatgcgccccggctggcgacgttacttatcaaccgtcacg

SEQ ID NO: 418165 - DNA, 75 bp, synthetic construct
  source 1..75: mol_type = other DNA
ctgacccgccagacgcgccgctttcgtctggttgtgaaggaaagcgatcacccctgctggctcgatgaagatgac

SEQ ID NO: 418166 - DNA, 75 bp, synthetic construct
  source 1..75: mol_type = other DNA
ctcaatattgcgtcggactatgcggaatatgtggcagaggcacggtacagaagaaaattcacggaggatgtaagc

SEQ ID NO: 418167 - DNA, 75 bp, synthetic construct
  source 1..75: mol_type = other DNA
atgcgttttgcgccgtcgctggtggtggaagatgcggatatcgatgaagggatgcatcgtttcgcccacgcggtg

SEQ ID NO: 418168 - DNA, 75 bp, synthetic construct
  source 1..75: mol_type = other DNA
acggctttgggccaaaaccggcagacatcatccacgttccctttaacgatctccacgcagtgaaagcagtgatgg

SEQ ID NO: 418169 - DNA, 75 bp, synthetic construct
  source 1..75: mol_type = other DNA
ttggcgaagggcggcaggagccgtgcgggaactgcgatatctgcctcgatccgccaaaacagtacgatggttcaa

SEQ ID NO: 418170 - DNA, 75 bp, synthetic construct
  source 1..75: mol_type = other DNA
caatatcgaatcctattatcaggaaaccggtcgcgccgggcgtgatggcctgcccgcggaagcgatgctgtttta

SEQ ID NO: 418171 - DNA, 75 bp, synthetic construct
  source 1..75: mol_type = other DNA
cgccacagccgacgacaccacgcgccaggatatcgtgcgcctgctggggctgaacgatccgctgattcaaatcag

SEQ ID NO: 418172 - DNA, 75 bp, synthetic construct
  source 1..75: mol_type = other DNA
cctcgtgggttggcgattataatgaaccgtcaactttcctgacgctgctaacgtcaacgcactcaggaaatattt

SEQ ID NO: 418173 - DNA, 75 bp, synthetic construct
  source 1..75: mol_type = other DNA
ccgtttgaacaaatgagtcaggaagaactgaatgcgcaggcaaaaactttgttgagcgcagctggttatggtccg

SEQ ID NO: 418174 - DNA, 75 bp, synthetic construct
  source 1..75: mol_type = other DNA
ctgaaccgtggcgcacgtttttcctctgtggaaatgtacctggtctgtgagtgtgtggagcatatcctggccagt

SEQ ID NO: 418175 - DNA, 75 bp, synthetic construct
  source 1..75: mol_type = other DNA
ggtttgaccgtggtgttctgcgggaagttgtccgggaagcccgggccgaaatccgcagcatggcggatgccctgg

SEQ ID NO: 418176 - DNA, 75 bp, synthetic construct
  source 1..75: mol_type = other DNA
ggttaatcaaaccgtggttgaaaggttatccaattaataacccggaagatgtggcgtatagtcggactatgtata

SEQ ID NO: 418177 - DNA, 75 bp, synthetic construct
  source 1..75: mol_type = other DNA
gcgaaagccgtgggtttgccagagattcaggtcattcgcgatttgtttgaagggttggtgaatcagaacgagaaa

SEQ ID NO: 418178 - DNA, 75 bp, synthetic construct
  source 1..75: mol_type = other DNA
gcaccctaatccgtatctttgcccttcatgagttacatcgactgaaagaacatggcttaacgcgcggggcgcttc

SEQ ID NO: 418179 - DNA, 75 bp, synthetic construct
  source 1..75: mol_type = other DNA
tcctgccacctggcgcggtgatggccggcaatcacgagatgtacaaagtatttacgccatttaaaaatgcctggc

SEQ ID NO: 418180 - DNA, 75 bp, synthetic construct
  source 1..75: mol_type = other DNA
ggcttttgggtcagctccgcaatggcgggagcttatgtgggtcttgggatcatcctgattttcacgctcggcaat

SEQ ID NO: 418181 - DNA, 75 bp, synthetic construct
  source 1..75: mol_type = other DNA
ataaaggtcgagaaataaacaaaacaaagctacctgaagaaaatttggatattgtaaaaaacttaccgtataaat

SEQ ID NO: 418182 - DNA, 75 bp, synthetic construct
  source 1..75: mol_type = other DNA
tgagtttattgcaaggatggattccgatgatatttctcatcctgatagattcactaaacaagttgattttttaaa

SEQ ID NO: 418183 - DNA, 75 bp, synthetic construct
  source 1..75: mol_type = other DNA
gggttatcgcctcgccagtgtttgcatcgcttgttggcggaacagccgcaggcgctggacggtggggccggtagt

SEQ ID NO: 418184 - DNA, 75 bp, synthetic construct
  source 1..75: mol_type = other DNA
ggcacttcctggaagaatagaacgccgctgccgtgatgtaatgcggataatgctaccgctggtgaaggagctggc

SEQ ID NO: 418185 - DNA, 75 bp, synthetic construct
  source 1..75: mol_type = other DNA
atgctggaactggctgaacgtctgaaaaatacgcctaccgagtatggtattcgttttgtggcaaccagtggagaa

SEQ ID NO: 418186 - DNA, 75 bp, synthetic construct
  source 1..75: mol_type = other DNA
gcgggctgacgttacaaggaatggatgataacgccgcaggtttaggtgtcatgctggaactggcagaacgcctga

SEQ ID NO: 418187 - DNA, 75 bp, synthetic construct
  source 1..75: mol_type = other DNA
tggtgatgggcgcgacctttggtatcgccttaacgctggtgattatcgccggttctgaactgttcaccggacaca

SEQ ID NO: 418188 - DNA, 75 bp, synthetic construct
  source 1..75: mol_type = other DNA
aagatagtcctgtctatatcgctactgtaccaaagcgcggctataaattaatggtgccggttatctggtacagcg

SEQ ID NO: 418189 - DNA, 75 bp, synthetic construct
  source 1..75: mol_type = other DNA
gtgacgggaagtacggtgattgccgctcatgaaggcaaagcgccgcagcagatcatcattatggcgcatctggat

SEQ ID NO: 418190 - DNA, 75 bp, synthetic construct
  source 1..75: mol_type = other DNA
cgagatgtcaccgccgagatccagattcgcacggggttagcaaatagctctgattttttgcgttcagcccgaatc

SEQ ID NO: 418191 - DNA, 75 bp, synthetic construct
  source 1..75: mol_type = other DNA
tgtctttctgcacagcagtgtttctcatttgctgatgaatatgtttgcactcctggtggtggggggagtggtgga

SEQ ID NO: 418192 - DNA, 75 bp, synthetic construct
  source 1..75: mol_type = other DNA
atgtgtacacgttgaaacaggccgcccgccttatcggttatcatgaacacgaatttattgatttgctgattgagc

SEQ ID NO: 418193 - DNA, 75 bp, synthetic construct
  source 1..75: mol_type = other DNA
gcgtgaatatcgctctgcacaatattgatggttccactatcaaacaggttcaaattaacaaccctggcgatgtgt

SEQ ID NO: 418194 - DNA, 75 bp, synthetic construct
  source 1..75: mol_type = other DNA
gtgtaaacatcgtccgtttattgtctggacggatcgtgtgcagtggcagcgcaatcccgcccattttaaagcctg

SEQ ID NO: 418195 - DNA, 75 bp, synthetic construct
  source 1..75: mol_type = other DNA
gtaccagggaaagcggtgcatgaaccgtggaagtgggcagataaatcaggtgtgacgctggattatccgcaaccg

SEQ ID NO: 418196 - DNA, 75 bp, synthetic construct
  source 1..75: mol_type = other DNA
tgtgacgctggattatccgcaaccgatagtcgatcacaaagaagcgagagtacgaacgttggcagcgtacgaaga

SEQ ID NO: 418197 - DNA, 75 bp, synthetic construct
  source 1..75: mol_type = other DNA
gtgaatcagtcaggttaattgacctgggatcggatgaggtggccacggccgggaaaaccatgagcactattgttg

SEQ ID NO: 418198 - DNA, 75 bp, synthetic construct
  source 1..75: mol_type = other DNA
atgaatacaactccctcacagcgattaggttttttgcatcacatcaggttggttccgttatttgcctgcattcta

SEQ ID NO: 418199 - DNA, 75 bp, synthetic construct
  source 1..75: mol_type = other DNA
aaagtgagcagatccgaccgctggataatgcttataccgatattttgaacaaagccgttaagatacgtagcacca

SEQ ID NO: 418200 - DNA, 75 bp, synthetic construct
  source 1..75: mol_type = other DNA
tctttttcattgccaccttatcgccactaaccgcaatggccgataactgggcagataagtggtttgataatgctg

SEQ ID NO: 418201 - DNA, 75 bp, synthetic construct
  source 1..75: mol_type = other DNA
cgcaactgcatcaggaaagcggctggcgacctgatgcgatctcgccggttggcgctcagggactggcgcagttca

SEQ ID NO: 418202 - DNA, 75 bp, synthetic construct
  source 1..75: mol_type = other DNA
tgaggtggcaacggcagggaaaaccatgagcactattgttgatgccgtcgcgagtgtcacacatatcatgcagga

SEQ ID NO: 418203 - DNA, 75 bp, synthetic construct
  source 1..75: mol_type = other DNA
aacagtttcagcaaatgggttatcgcagtgatattcggacatttaatagtcggtatatttataccgcccgcgata

SEQ ID NO: 418204 - DNA, 75 bp, synthetic construct
  source 1..75: mol_type = other DNA
ttccgattctcgacggtaacgtcaaacgcgtgctggcgcgctgctatgctgtaagcggctggccagggaaaaaag

SEQ ID NO: 418205 - DNA, 75 bp, synthetic construct
  source 1..75: mol_type = other DNA
tgcgccgctcgacgaagttctccacttgtggaccgggcttggctattacgcccgcgcgcgcaacctgcataaagc

SEQ ID NO: 418206 - DNA, 75 bp, synthetic construct
  source 1..75: mol_type = other DNA
actttttactgttacagcatgatgatgaggtattgctggcgcagcgcccgccgagtggattgtggggcggtttat

SEQ ID NO: 418207 - DNA, 75 bp, synthetic construct
  source 1..75: mol_type = other DNA
cgaaggtaaagtggtgccgaaagtcgccctgcgtccgttagcggacatcaacaccatctttactgagatggaaga

SEQ ID NO: 418208 - DNA, 75 bp, synthetic construct
  source 1..75: mol_type = other DNA
gtcgccctgcgtccgttagcggacatcaacaccatctttaccgagatggaagaaggcaaaatccgtggccgtatg

SEQ ID NO: 418209 - DNA, 75 bp, synthetic construct
  source 1..75: mol_type = other DNA
ggatgccaaagggatggcaaattaaatcattagatcatattgctaatttccagaatggtttggctttacaaaaat

SEQ ID NO: 418210 - DNA, 75 bp, synthetic construct
  source 1..75: mol_type = other DNA
atgatcgaagagggggccgagtacctgctggcgctgcgcggcgatccggtttctgaaacggcattactctccacc

SEQ ID NO: 418211 - DNA, 75 bp, synthetic construct
  source 1..75: mol_type = other DNA
aagtcacaaccgagcgtctgcttgctggcgcgttatttagcgagcaaatcgaaaagatcgcccttgacgatgact

SEQ ID NO: 418212 - DNA, 75 bp, synthetic construct
  source 1..75: mol_type = other DNA
gtgccgcaagcttgacgactatatgctcacggcggccggaagaaaaattcgtatcggtgccttttttggcgatac

SEQ ID NO: 418213 - DNA, 75 bp, synthetic construct
  source 1..75: mol_type = other DNA
ctctgtccgctacaaaacgggtgtattgccaccgccaacaatagctggtcgctttatccgggcaaaaaaccaaag

SEQ ID NO: 418214 - DNA, 75 bp, synthetic construct
  source 1..75: mol_type = other DNA
ttggctggctggcgttagtgctgggtacgctgggcgtgatattgccggttttgccgacgacgccgtttatcctgc

SEQ ID NO: 418215 - DNA, 75 bp, synthetic construct
  source 1..75: mol_type = other DNA
accgtggctctctctcacgttcacgcatatgtcgtttgatgggcgtaacagatcgtggtttacgcgcatggaaac

SEQ ID NO: 418216 - DNA, 75 bp, synthetic construct
  source 1..75: mol_type = other DNA
tgatgtcaatgatgagcagttaaaactggcaaccgaaatgggcgcagatttagcgattaactcacgcaccgaaga

SEQ ID NO: 418217 - DNA, 75 bp, synthetic construct
  source 1..75: mol_type = other DNA
cattagagtcggccattgagaaatgtctggctgggatcagtactgaagagcttaaagagggactgagtcagcagt

SEQ ID NO: 418218 - DNA, 75 bp, synthetic construct
  source 1..75: mol_type = other DNA
ttaccctgccgcagccagtatggtcgaagttgaatctggcctgggcagtcttttttatcctttgcgggctggcaa

SEQ ID NO: 418219 - DNA, 75 bp, synthetic construct
  source 1..75: mol_type = other DNA
gtagccgcattgctcgccgtgaatatggttccctgctgtcggcactgatagaccagccacaaaatccggcgttac

SEQ ID NO: 418220 - DNA, 75 bp, synthetic construct
  source 1..75: mol_type = other DNA
atgttttccgcattgcgccaccgtaccgctgccctggcgctcggcgtatgctttatcctccctgtccaggctgcc

SEQ ID NO: 418221 - DNA, 75 bp, synthetic construct
  source 1..75: mol_type = other DNA
tatctccgcgctggttattttgctgttcttcaccatttattgcgcttcaggcattgtggcaggcgcgcgtctgtt

SEQ ID NO: 418222 - DNA, 75 bp, synthetic construct
  source 1..75: mol_type = other DNA
atattcgaacttaacaacaaacgcttcacgcttctcaataccggctccgggtctttagccgtcagaatctgttaa

SEQ ID NO: 418223 - DNA, 75 bp, synthetic construct
  source 1..75: mol_type = other DNA
acgaaggatgcggtcattgcgaatactgtaacagtggtaacgaaacgctctgccgttcagttaaaaatgccggat

SEQ ID NO: 418224 - DNA, 75 bp, synthetic construct
  source 1..75: mol_type = other DNA
gctaaagctgcgtttaactcggcagttgatgctgtccgtgcaggcggtcgtgttgtggctgtcggtctgccgccg

SEQ ID NO: 418225 - DNA, 75 bp, synthetic construct
  source 1..75: mol_type = other DNA
cgccgccaaaattgtgcaggaaaaaaccggtggcgctcacgctgcggtggtgacagcggtagctaaagctgcgtt

SEQ ID NO: 418226 - DNA, 75 bp, synthetic construct
  source 1..75: mol_type = other DNA
tgaaagaaggtgcgcaagtcgatctgactgcgaaccagttaacgctggccaccgcgaaacagacattaacctata

SEQ ID NO: 418227 - DNA, 75 bp, synthetic construct
  source 1..75: mol_type = other DNA
gctttgtgctggaaagtgtcaacggtcaacctgttaccagcgataaaaacccgccagaaatcagctttggtgaaa

SEQ ID NO: 418228 - DNA, 75 bp, synthetic construct
  source 1..75: mol_type = other DNA
ccgccagaaatcagctttggtgaaaaaatgatgatttccggcagcatgtgtaaccgctttagcggtgaaggcaaa

SEQ ID NO: 418229 - DNA, 75 bp, synthetic construct
  source 1..75: mol_type = other DNA
tcctgaatgtccaactgctgcagaacagcatggatgcgccgaaaatcatcggttcctttccatgcaaaaaggttt

SEQ ID NO: 418230 - DNA, 75 bp, synthetic construct
  source 1..75: mol_type = other DNA
gtaccgaaacgcgtttcctgaacgtccagcttctgcagaacagcatggatgcaccgaaaatcatcggatctttcc

SEQ ID NO: 418231 - DNA, 75 bp, synthetic construct
  source 1..75: mol_type = other DNA
gggttcgagtatatccatcgaccgggcaccgaaacgcgattcctgagcgtccagcttctgcaaaacagcatggat

SEQ ID NO: 418232 - DNA, 75 bp, synthetic construct
  source 1..75: mol_type = other DNA
gttggtactcgtctgaccaactctcgtcatggtctggctgataacggcggcgcatgggtaaactacttcggtggt

SEQ ID NO: 418233 - DNA, 75 bp, synthetic construct
  source 1..75: mol_type = other DNA
aacaaagctgacctgggtgcatacacctatcaggctgagcagcgtggtaacaccgttgttctgcaacagatggag

SEQ ID NO: 418234 - DNA, 75 bp, synthetic construct
  source 1..75: mol_type = other DNA
ggttatggcttaatcgcgatgaactctgatggtcacctgatggatttgcccctatatttccagacacctgttatc

SEQ ID NO: 418235 - DNA, 75 bp, synthetic construct
  source 1..75: mol_type = other DNA
tcatccaattgctgcgcgaagggaaaaaagtcgaaattattgtcggtgataaaaccgcaaatgacttctacattc

SEQ ID NO: 418236 - DNA, 75 bp, synthetic construct
  source 1..75: mol_type = other DNA
cagattgaagaaacactgctgcgttatgaaccacgcctgagtcagatacaggtggaattactccccagccccgtc

SEQ ID NO: 418237 - DNA, 75 bp, synthetic construct
  source 1..75: mol_type = other DNA
gacttcaaactgggtgatgctggttatgtgactccttacggcagcatttctggtctgttccagtctggtgatgac

SEQ ID NO: 418238 - DNA, 75 bp, synthetic construct
  source 1..75: mol_type = other DNA
tggtgctgatggcattaagattgatatggggctaatgcctgccaaagacggcaacaactacggctttgaatacat

SEQ ID NO: 418239 - DNA, 75 bp, synthetic construct
  source 1..75: mol_type = other DNA
accgagcttggtaccaatggtttgaaagtagacatggtgcttatgcctgccaaagacggtaacaactacggcttt

SEQ ID NO: 418240 - DNA, 75 bp, synthetic construct
  source 1..75: mol_type = other DNA
gccgaagagcttcaggaatatctggatgctggctggtttgcacatcctgatgatcttctgaaggatgttgcagag

SEQ ID NO: 418241 - DNA, 75 bp, synthetic construct
  source 1..75: mol_type = other DNA
tgatggtgtttcaacaaataccaatgccaatagtctgaccatcaaaaacagcaccattcacggtatgatcacttc

SEQ ID NO: 418242 - DNA, 75 bp, synthetic construct
  source 1..75: mol_type = other DNA
agtattccagagcggtgtgtttaacgtcactctgaataatggttctgaatggaataccgttaacgcttcaaacat

SEQ ID NO: 418243 - DNA, 75 bp, synthetic construct
  source 1..75: mol_type = other DNA
accaacggctcctcactgaatattggtgaagatggtttggttgctacagaccacctgactgttgatagctacagt

SEQ ID NO: 418244 - DNA, 75 bp, synthetic construct
  source 1..75: mol_type = other DNA
tcttgactggagcaagatggatttaccgggtactgtagatggtaactatgtgaattatagtggttttgtctacta

SEQ ID NO: 418245 - DNA, 75 bp, synthetic construct
  source 1..75: mol_type = other DNA
gtgttcagctatgcctgcccgttctgctacaagtatgacaaagcagtgactggccctgtctctgaaaaagtgaaa

SEQ ID NO: 418246 - DNA, 75 bp, synthetic construct
  source 1..75: mol_type = other DNA
gaaaaatggaaagcagcctatgatgtcgcaaaaattcagggcgttccggcgtatgttgttaatggcaagtacttg

SEQ ID NO: 418247 - DNA, 75 bp, synthetic construct
  source 1..75: mol_type = other DNA
gctggtatcagttatctggctgatggtactgtagatccggcaaacgcagccattgcaggctgggtgaatgtgttc

SEQ ID NO: 418248 - DNA, 75 bp, synthetic construct
  source 1..75: mol_type = other DNA
acagcgttgatggcgggatggcggaagagtgcatcgtggtcgccgattacgcggtaaaagtgccagatggtctgg

SEQ ID NO: 418249 - DNA, 75 bp, synthetic construct
  source 1..75: mol_type = other DNA
cagtaaacataatctatgccgctctcataagaaccagccctgagaacccacagaggaaacttgatgtatccatag

SEQ ID NO: 418250 - DNA, 75 bp, synthetic construct
  source 1..75: mol_type = other DNA
aatacgacttactgagataaataaaaaagagcaggaggaagtctatcgtgtgtattttgaatctgtaaaaccggg

SEQ ID NO: 418251 - DNA, 75 bp, synthetic construct
  source 1..75: mol_type = other DNA
gtttactataacaatgccaatggtgatttcgacaccgtctttaaaggcgatactgttaacggtaccatttctact

SEQ ID NO: 418252 - DNA, 75 bp, synthetic construct
  source 1..75: mol_type = other DNA
tctttaacgccaaagtgatcgccattgatgtcaatgatgtcaatgatgtcaatgatgtcaatgatgaacagttaa

SEQ ID NO: 418253 - DNA, 75 bp, synthetic construct
  source 1..75: mol_type = other DNA
ggcgctcacgctgcggtggtaacagcggtagctaaagctgcgtttaactcggcagttgatgctgtccgtgcaggc

SEQ ID NO: 418254 - DNA, 75 bp, synthetic construct
  source 1..75: mol_type = other DNA
gcgttgggatgcgcaagctggaacgctttggcaaaccgtttatggcgctgattcgtgcgcatgtcgatggtgacg

SEQ ID NO: 418255 - DNA, 75 bp, synthetic construct
  source 1..75: mol_type = other DNA
caccatgcgctcaaaaatgcgctccgtatcgggaggcagggggaaattcgcgatcgcacgacagaggggcagcac

SEQ ID NO: 418256 - DNA, 75 bp, synthetic construct
  source 1..75: mol_type = other DNA
tttgcaacagtgcctttctgcgtaccctgaatatcaatcatagtgctttggccagcatacctgcccatcgcattg

SEQ ID NO: 418257 - DNA, 75 bp, synthetic construct
  source 1..75: mol_type = other DNA
cctggacaaacttctgagtgaaatgctcgccggcaatatcagtcgtttcatctggcttcgcaacttcgaggttgg

SEQ ID NO: 418258 - DNA, 75 bp, synthetic construct
  source 1..75: mol_type = other DNA
atagcatttataaatcgcatatcaaatatgaatatgatgttctcgatagaaagatatttcctcatgaaagcacca

SEQ ID NO: 418259 - DNA, 75 bp, synthetic construct
  source 1..75: mol_type = other DNA
aatctacctgttttctcgtgtgtgtcacaggcgcaatacataaatagtctggccattaagttcgtaacggatttc

SEQ ID NO: 418260 - DNA, 75 bp, synthetic construct
  source 1..75: mol_type = other DNA
atgtggaacgacctaacactaccgaagccactaatgccgaagccgtttacccgcgtatgggtgaagactgacacc

SEQ ID NO: 418261 - DNA, 75 bp, synthetic construct
  source 1..75: mol_type = other DNA
gctgtttatcgaactgggtgggaagaacttgttaatcactaacccgcgcgatattcctggtttggtgaaagagtt

SEQ ID NO: 418262 - DNA, 75 bp, synthetic construct
  source 1..75: mol_type = other DNA
gggggaggtgatgaccttccgcaaactggaagagcgtagccgcgcatttgccgcttatttgcaacaaggcctggg

SEQ ID NO: 418263 - DNA, 75 bp, synthetic construct
  source 1..75: mol_type = other DNA
cgaaatctaacgtcggaaaaattttgcgacgagaattacgtgacgaagcgcgcggcaaagtggacaataaagcct

SEQ ID NO: 418264 - DNA, 75 bp, synthetic construct
  source 1..75: mol_type = other DNA
aaccagaaacgcgatggaaagctgctatcgcccgatctcttggcccatgtttcgccgctcggatgggaacacatc

SEQ ID NO: 418265 - DNA, 75 bp, synthetic construct
  source 1..75: mol_type = other DNA
atagccacgtctccgaccaatatgcgccgttcgcaacccaggtgattcctgcaacggcaagcgaagcgccttaca

SEQ ID NO: 418266 - DNA, 75 bp, synthetic construct
  source 1..75: mol_type = other DNA
cccggcgcacctgcgagcgttgatcggcggaaaggtcaaccaagccatgatcgagcgcaattggcccgacatcct

SEQ ID NO: 418267 - DNA, 75 bp, synthetic construct
  source 1..75: mol_type = other DNA
tgaaagatcccaccgatctggtcgttgcaatggtcaccagcatgctgaccatcgtgctggtgcgccagccaagac

SEQ ID NO: 418268 - DNA, 75 bp, synthetic construct
  source 1..75: mol_type = other DNA
agccttggtatatacaggcactgcgtcccgatggttcgccattaacctttggctatgacgtactggatctccagg

SEQ ID NO: 418269 - DNA, 75 bp, synthetic construct
  source 1..75: mol_type = other DNA
gcgcttgatggactcaccaataaaaaacgcccggcggcaaccgagcgttctgaacaaatccagatggagttctga

SEQ ID NO: 418270 - DNA, 75 bp, synthetic construct
  source 1..75: mol_type = other DNA
atggaacaaacaagttacagcaaactatcacagcgcgatatcgatcgcgctgaaacggatttactcatcaacctg

SEQ ID NO: 418271 - DNA, 75 bp, synthetic construct
  source 1..75: mol_type = other DNA
ggcgctggacggtgcgacatttagttcagaaacaaccctgaataacggaaccaacaccattccgttccaggcgcg

SEQ ID NO: 418272 - DNA, 75 bp, synthetic construct
  source 1..75: mol_type = other DNA
gcctgtaataacgttgagtgcggtcatactttcgtcgttaatataacattttctcacacattaagccccagcgcg

SEQ ID NO: 418273 - DNA, 75 bp, synthetic construct
  source 1..75: mol_type = other DNA
gattagcagggcttttaagtatgcgcttgatgaagtcacaaagaaaaaatccccggccgccaccgaggattttaa

SEQ ID NO: 418274 - DNA, 75 bp, synthetic construct
  source 1..75: mol_type = other DNA
tggctcgcgaaatgtgggacgaggcggaaaacgccgatgacgtaaaagaaagctgctgttgtttcggcgtcggta

SEQ ID NO: 418275 - DNA, 75 bp, synthetic construct
  source 1..75: mol_type = other DNA
acaaactgctgaatctctttggtgatgatccgtggtatgccgactggccaacggtaccaaacccgaaataccagt

SEQ ID NO: 418276 - DNA, 75 bp, synthetic construct
  source 1..75: mol_type = other DNA
tttgtcggcattggcgtgaatggtaatgactccaacttattgatagtgttttatgttcagataatgcccgatgaa

SEQ ID NO: 418277 - DNA, 75 bp, synthetic construct
  source 1..75: mol_type = other DNA
gatcagccgggctttccagcatgccattcgcgttcatgcaaataaaaaacgtccggttggggccggacgttctga

SEQ ID NO: 418278 - DNA, 75 bp, synthetic construct
  source 1..75: mol_type = other DNA
gaccctcaactgcgaagcacggtcgacgatgacaacgatgcaaatctgcttttcgtgaagtcagaaatcataaag

SEQ ID NO: 418279 - DNA, 75 bp, synthetic construct
  source 1..75: mol_type = other DNA
tggccaaaggcaccaaacccgaaataccagtatctggaacgcgtacttaatgcagtgagagacggtcttaagcaa

SEQ ID NO: 418280 - DNA, 75 bp, synthetic construct
  source 1..75: mol_type = other DNA
tttgaaggcacgtatatcgttctgcccgcgaagccatttggcccgtatgaagagggcgggaacgaagaggagtag

SEQ ID NO: 418281 - DNA, 75 bp, synthetic construct
  source 1..75: mol_type = other DNA
cgccgattcgccattttttgatgataaaacctgtcgccactctggatgacattctgcatcgcggcgactggtgcg

SEQ ID NO: 418282 - DNA, 75 bp, synthetic construct
  source 1..75: mol_type = other DNA
ggcaaaaatttatcaccaccatgccggaaaccggcaatcagaatccgcaccacacgctgtttgccgggagtttat

SEQ ID NO: 418283 - DNA, 75 bp, synthetic construct
  source 1..75: mol_type = other DNA
gtggcaagcgttgctgcaatcactggcgcacgatcttgaacagggcgttgccttttccaatgccttattacccta

SEQ ID NO: 418284 - DNA, 75 bp, synthetic construct
  source 1..75: mol_type = other DNA
cactacagcaacagatggttaccccactaagcctgaagcgaattgctatcaattctgcgcagtggcgaggagata

SEQ ID NO: 418285 - DNA, 75 bp, synthetic construct
  source 1..75: mol_type = other DNA
cgccaagctggggtttgtcaatcagggagaaatcaccacgcctaccaccacgccgattcgccattttctgatgat

SEQ ID NO: 418286 - DNA, 75 bp, synthetic construct
  source 1..75: mol_type = other DNA
acaagctggatgccataaaaacgatgggaaccaacgccaaaaaagaggcgctggccaaccttgataaatttgagc

SEQ ID NO: 418287 - DNA, 75 bp, synthetic construct
  source 1..75: mol_type = other DNA
gtcacgagaaaacgccggatggcagcttacgccacccacgactgaaatggccgcgttgcttacgcgatacagaag

SEQ ID NO: 418288 - DNA, 75 bp, synthetic construct
  source 1..75: mol_type = other DNA
cgtggcgtcaatgtgcgccgatgggcaggacgtcttccgtcgtttcctcttaaaagatccgaaagctggcgttgg

SEQ ID NO: 418289 - DNA, 75 bp, synthetic construct
  source 1..75: mol_type = other DNA
attggtctggtgccggttatcgccctggtactgtatggcattttccgaatgacgcggagcacggtttatgcctga

SEQ ID NO: 418290 - DNA, 75 bp, synthetic construct
  source 1..75: mol_type = other DNA
ggcctggatatcgccgttgccgtaggtaacccggcgattatctccaccgccctgctgctgacgccaatctcggtc

SEQ ID NO: 418291 - DNA, 75 bp, synthetic construct
  source 1..75: mol_type = other DNA
cccattcattcgattcggtgtgaagaagtacaaagtggtcgagccactcgatacttccgtacccatcgaccagaa

SEQ ID NO: 418292 - DNA, 75 bp, synthetic construct
  source 1..75: mol_type = other DNA
atgccagacagaatgggcttttttgctcatgaaaattctgtcatttccgaattagaggcagatcacaaaatggac

SEQ ID NO: 418293 - DNA, 75 bp, synthetic construct
  source 1..75: mol_type = other DNA
caggtgtctttcccgtatgccggtgagtggctgaccgaagacgaaatcagggctgtacttgcggcggtgcgcgat

SEQ ID NO: 418294 - DNA, 75 bp, synthetic construct
  source 1..75: mol_type = other DNA
acgtttttcgtcggtggaaatgtacctggtctgtgagtgtgtggagcatatcctggccagtggtctggtctggtc

SEQ ID NO: 418295 - DNA, 75 bp, synthetic construct
  source 1..75: mol_type = other DNA
gacggatgttgaccagcgaaatccgaactatccgggctggatcagcatttacgtgcggctggatgcgccccggct

SEQ ID NO: 418296 - DNA, 75 bp, synthetic construct
  source 1..75: mol_type = other DNA
ttttacatgaggtcatggcagaagcgcgtgcagaaatcagtcttgtccgcaatgccctgtcagcaatacggccag

SEQ ID NO: 418297 - DNA, 75 bp, synthetic construct
  source 1..75: mol_type = other DNA
tgtgctgcgtattccgggcgagcctccgcgccggtggatggatttaacccttttacatgaggtcatggcagaagc

SEQ ID NO: 418298 - DNA, 75 bp, synthetic construct
  source 1..75: mol_type = other DNA
atgaacgaaacgctgaatgcactgatttgtcgccacgcccgtaacctgctggatgcgccccggctggcgacgtta

SEQ ID NO: 418299 - DNA, 75 bp, synthetic construct
  source 1..75: mol_type = other DNA
cggtggaaatgtacctggtcagtgagtgtgtggagcatatcctggccagtgggctggcctgcgatgtgctgcgta

SEQ ID NO: 418300 - DNA, 75 bp, synthetic construct
  source 1..75: mol_type = other DNA
gcgctggaggagtttgacagcgatcccgcgctatttctctcgcggatgaatgaagcagatacgcaggcggcgatc

SEQ ID NO: 418301 - DNA, 75 bp, synthetic construct
  source 1..75: mol_type = other DNA
aggaaaagggaacaccgccgtggaacgggaagggctgtacgacactcagctgtcgattcccaacgctcgcttacc

SEQ ID NO: 418302 - DNA, 75 bp, synthetic construct
  source 1..75: mol_type = other DNA
ctccgccattcagaaactgaccggaaccggggcggaactggtactgtccggcagtcagtggcagtcgctgccggt

SEQ ID NO: 418303 - DNA, 75 bp, synthetic construct
  source 1..75: mol_type = other DNA
gttgtaatgacgcagaaatattcgacaaagcgggcattgctgtactttcggttgaagcgactaactggaatcttg

SEQ ID NO: 418304 - DNA, 75 bp, synthetic construct
  source 1..75: mol_type = other DNA
ggcgctgaccaccaccggtcagacgttgctgacccgccagacgcgccgctttcgcctggtcgtgaaggaaagcga

SEQ ID NO: 418305 - DNA, 75 bp, synthetic construct
  source 1..75: mol_type = other DNA
cttgcgtcatccacgtctgaagtggcctaaatgggggaaccgcagaattcggaaaaaatcgtacgctaagctaac

SEQ ID NO: 418306 - DNA, 75 bp, synthetic construct
  source 1..75: mol_type = other DNA
gctcggttccgatatctggctgctcggtgtgattggctttggcctgctggccgggattattccgctgcacggctg

SEQ ID NO: 418307 - DNA, 75 bp, synthetic construct
  source 1..75: mol_type = other DNA
cagaatgtggctgacgtttaaacgagataaaaagttttggattgactctccagtttatttctttgaaatcagacc

SEQ ID NO: 418308 - DNA, 75 bp, synthetic construct
  source 1..75: mol_type = other DNA
atgggcataagagaactaaacctcaccaaagaacagcacgattggctgaatggctggcttgaactgtggggcgca

SEQ ID NO: 418309 - DNA, 75 bp, synthetic construct
  source 1..75: mol_type = other DNA
gcgccgtggctgctgccgatgctctctgctgctgtacctctgccgctggagcctgctaacaccaccgtttctcaa

SEQ ID NO: 418310 - DNA, 75 bp, synthetic construct
  source 1..75: mol_type = other DNA
gttcctcaccagcaacagcaaagagggcaaactgtggtttgcgctggggcgtcttggcactctgctgctggcgat

SEQ ID NO: 418311 - DNA, 75 bp, synthetic construct
  source 1..75: mol_type = other DNA
gtgccgggctggcagtgcgaggggagtgcgttgctgttccgccggatggcgctggttgaactggcggtactggtg

SEQ ID NO: 418312 - DNA, 75 bp, synthetic construct
  source 1..75: mol_type = other DNA
cctgatccgctactacgacgatcattccggacggctgaaccgtcgggatatctgtacaggcctgctctggtgcgc

SEQ ID NO: 418313 - DNA, 75 bp, synthetic construct
  source 1..75: mol_type = other DNA
atggctctgacattcttttttgtaccggcaggaacgcttgctgccttagccctgatccgctactacgacgatcat

SEQ ID NO: 418314 - DNA, 75 bp, synthetic construct
  source 1..75: mol_type = other DNA
cggctggtacgcttgctgccttcgccctgatccgctactacgacgatcattccggacagctgaaccgtcgggata

SEQ ID NO: 418315 - DNA, 75 bp, synthetic construct
  source 1..75: mol_type = other DNA
agatccggctgcttttatcaaaaccggtctggatgccgcaggtatgagtcaggcggattttgaagctgcactgaa

SEQ ID NO: 418316 - DNA, 75 bp, synthetic construct
  source 1..75: mol_type = other DNA
tcctcagctactacgctcatggttcatctaagcgagcaattgcatcctactatcacgagactgcaaagccacgca

SEQ ID NO: 418317 - DNA, 75 bp, synthetic construct
  source 1..75: mol_type = other DNA
tgtgcttacataccggctcaataaacgcgagcagatgaagcgcacgaagatattgcaggacatattggataaaac

SEQ ID NO: 418318 - DNA, 75 bp, synthetic construct
  source 1..75: mol_type = other DNA
tttcaaaaggcgctaagcggctggatagccggaattggcggcgcggttggtagtctgtatacggcagccgcgggc

SEQ ID NO: 418319 - DNA, 75 bp, synthetic construct
  source 1..75: mol_type = other DNA
catttattatgagttttagtgtgttacctgtatgggcaatggactgctatgccgagcacgaaggtggaaataccg

SEQ ID NO: 418320 - DNA, 75 bp, synthetic construct
  source 1..75: mol_type = other DNA
ccaaagaacagcacgattggctgaatggctggcttgaactgtggggcgcatgggtttattcaggtcgcctggaaa

SEQ ID NO: 418321 - DNA, 75 bp, synthetic construct
  source 1..75: mol_type = other DNA
gccagcgaaatgctcagcgttaacggcgttgggatgcgcaagctggaggaacgctttggcaaaccgtttatggcg

SEQ ID NO: 418322 - DNA, 75 bp, synthetic construct
  source 1..75: mol_type = other DNA
cgtggacgcatcgttgaggttcactgccatgagaaaacgccagatggtagcttgcgtcatccacgtctgaagtgg

SEQ ID NO: 418323 - DNA, 75 bp, synthetic construct
  source 1..75: mol_type = other DNA
accgtgactacggcgttcgctttcgcatgatcgccggcaatcacgatctggaaaccaaagactcatgtcctatgg

SEQ ID NO: 418324 - DNA, 75 bp, synthetic construct
  source 1..75: mol_type = other DNA
accattcagggcagaactgagtgcgaacccggcagaaacggttgttgagggaccgtttagtaaagacgtaatcct

SEQ ID NO: 418325 - DNA, 75 bp, synthetic construct
  source 1..75: mol_type = other DNA
ctgggcggtaatgcgccgctgtggtggggaattgcgctgctggtgctcggcatgatcaccgcgttcgtcggtggt

SEQ ID NO: 418326 - DNA, 75 bp, synthetic construct
  source 1..75: mol_type = other DNA
ttgccggaattggcggcgcggtgggtagcctgtatacggcagccgcaggcttcactgtgctgactggcgcggttg

SEQ ID NO: 418327 - DNA, 75 bp, synthetic construct
  source 1..75: mol_type = other DNA
gtgcgttgctgttccgccggatggcgctggttgaactggcggtgctggtggtgattattgtttcacgaggagcct

SEQ ID NO: 418328 - DNA, 75 bp, synthetic construct
  source 1..75: mol_type = other DNA
gactatggtcatgacaaactgaaagtctatggcatgggccgtgataaaagccatgaacattgggtgagcgtgatc

SEQ ID NO: 418329 - DNA, 75 bp, synthetic construct
  source 1..75: mol_type = other DNA
aacggcgttgggatgcgcaagctggaacgctttggcaaaccgtttatggcgctgattcgtgcgcatgttgatggc

SEQ ID NO: 418330 - DNA, 75 bp, synthetic construct
  source 1..75: mol_type = other DNA
cacgcgcaggtgaagtgcaacggcttgcagatcaatatgttgatggctgctgccgtctgtgccgtcatcgccagc

SEQ ID NO: 418331 - DNA, 75 bp, synthetic construct
  source 1..75: mol_type = other DNA
ggttgtacgttcttcattgcgcgtgaacacacccaggcagaatatcgctggattgaaatgttcgggcatggcaag

SEQ ID NO: 418332 - DNA, 75 bp, synthetic construct
  source 1..75: mol_type = other DNA
atatcctggtcaataacgcaggcaatcactgcaaaaaaccgattgaagagatgagcgtcagtgattttgagtcag

SEQ ID NO: 418333 - DNA, 75 bp, synthetic construct
  source 1..75: mol_type = other DNA
gggaagaggaacaaacgattaatcgcggtttacatcagcgcggcgttaatcgggtgattttcatcagacacgttt

SEQ ID NO: 418334 - DNA, 75 bp, synthetic construct
  source 1..75: mol_type = other DNA
tatcatacatggcgtgaattggcggatgccttcgaactggatattcatgacttcagcgtctctgaagtgaatcgt

SEQ ID NO: 418335 - DNA, 75 bp, synthetic construct
  source 1..75: mol_type = other DNA
gatgagaaagggcaaaagttacccggtggggtacatgcgaggctttctgaatatctttgcggcgagaatgcagct

SEQ ID NO: 418336 - DNA, 75 bp, synthetic construct
  source 1..75: mol_type = other DNA
gccggaggatatcggttgggctgcggtttatctggcttcagacgcagcggcgtttgtcagtggtcaggtgctggt

SEQ ID NO: 418337 - DNA, 75 bp, synthetic construct
  source 1..75: mol_type = other DNA
caggctggatcgatacaccaatgttgcgtaaggccattgaaggtgatgacgaacgccgtaacaaaatcctgggtc

SEQ ID NO: 418338 - DNA, 75 bp, synthetic construct
  source 1..75: mol_type = other DNA
tcacatcatatttcgctgcctgccgcgttggtagcggtgccatcaggtagcctgatttgggctgctatcgttggc

SEQ ID NO: 418339 - DNA, 75 bp, synthetic construct
  source 1..75: mol_type = other DNA
ctaagcgaagctaaaacttcggatccgagtgttttgtcagctatggcgaatgcagttagtggtcagggtgggcaa

SEQ ID NO: 418340 - DNA, 75 bp, synthetic construct
  source 1..75: mol_type = other DNA
cttgaacttcagtccagaggaggtttttcacttgatgcagaagataatgataattactatcttaccaagggattt

SEQ ID NO: 418341 - DNA, 75 bp, synthetic construct
  source 1..75: mol_type = other DNA
ataccgcaaaacgtgaggtcagcgtcgatgtcgatgccctgctggcggcgatcaatgaaattagcgaaagcgaag

SEQ ID NO: 418342 - DNA, 75 bp, synthetic construct
  source 1..75: mol_type = other DNA
tcgagagaggaattgcttaagagaaagagtttctgctctgttaatgataacaaatatctgaatgcgatgtggcgg

SEQ ID NO: 418343 - DNA, 75 bp, synthetic construct
  source 1..75: mol_type = other DNA
atgccatcgagagaggaattgcttaagagaaattcttctccgtcagtgaatcaaaacaaatatctgaatgcgatg

SEQ ID NO: 418344 - DNA, 75 bp, synthetic construct
  source 1..75: mol_type = other DNA
gtaaagcgcttgtcaaactgattaccgccacgccagagttagtatgcgacgtcattccctgggttaatgctaaag

SEQ ID NO: 418345 - DNA, 75 bp, synthetic construct
  source 1..75: mol_type = other DNA
tgtttaacttcgccagctacctcaccatcgggttgccgctcgctgtattaccgggctatgtccatgatgtgatgg

SEQ ID NO: 418346 - DNA, 75 bp, synthetic construct
  source 1..75: mol_type = other DNA
ctgtggggcgttggcgtggttggctcgctgcatatcgggcgggtgatttcgtggaacggcattgtcacttacggg

SEQ ID NO: 418347 - DNA, 75 bp, synthetic construct
  source 1..75: mol_type = other DNA
cgatgatttgctttagcgttgagataatcggcctgctactggttggcgtggcgactatgccgtggatggcgaaaa

SEQ ID NO: 418348 - DNA, 75 bp, synthetic construct
  source 1..75: mol_type = other DNA
cgacaccaaaagcggttaaggcggtaatggatgaaacgaacaagaaagcgcccttaaatagtcctgcactgaccg

SEQ ID NO: 418349 - DNA, 75 bp, synthetic construct
  source 1..75: mol_type = other DNA
gtcagcgacttccagcgcaggaacggcattaacaaaggccactgaagcatcaaaaagtgctgccgctgcagagtc

SEQ ID NO: 418350 - DNA, 75 bp, synthetic construct
  source 1..75: mol_type = other DNA
tggcgttaatgtactgggattcgctgtagcaggctatgttgctgttagcacaaataaatggttctatgaaaaaga

SEQ ID NO: 418351 - DNA, 75 bp, synthetic construct
  source 1..75: mol_type = other DNA
cgcattaacttcgatttatggcgtcggcaagacccgttctaaagccatcttggctgcagcgggtatcgctgaaga

SEQ ID NO: 418352 - DNA, 75 bp, synthetic construct
  source 1..75: mol_type = other DNA
aaagagaacgttaacggcaatattcacttcaatttcggcgcgcagggtaaaggctcgatggtggtcgaaggttac

SEQ ID NO: 418353 - DNA, 75 bp, synthetic construct
  source 1..75: mol_type = other DNA
actttaactttggcagccagggtaaaggttcgatggtgctcgaaggctacacggactctgccgctggctggctgt

SEQ ID NO: 418354 - DNA, 75 bp, synthetic construct
  source 1..75: mol_type = other DNA
gcgctttctgggcaggattggttatcagcctgcaatatttcgccaccttgctgagccgccctcatgccggacgtt

SEQ ID NO: 418355 - DNA, 75 bp, synthetic construct
  source 1..75: mol_type = other DNA
ccaaaacctcggtttacaggaaacggtaaacaaggctggtaacgccgttcagcgttccggcgataaaatgaccgg

SEQ ID NO: 418356 - DNA, 75 bp, synthetic construct
  source 1..75: mol_type = other DNA
tgatctgcgccgtgaaatcagcatgagcatcaagcgcctgatggatcttggttgctatcgcggtttgcgtcatcg

SEQ ID NO: 418357 - DNA, 75 bp, synthetic construct
  source 1..75: mol_type = other DNA
ccctacctgcagatcttcctttaggggattattctgttacaattccatacacttccggcatgcagcgtcatttcg

SEQ ID NO: 418358 - DNA, 75 bp, synthetic construct
  source 1..75: mol_type = other DNA
cggtttgctgcctgcgctggtgttaattcagggcgtggtatttgcttttgcctccatcgaaatggtcggaactgc

SEQ ID NO: 418359 - DNA, 75 bp, synthetic construct
  source 1..75: mol_type = other DNA
agcagcggatgtcagttttaaactgcctggcgcgcccttcacttcctggctgacattactgtttttactgagtgt

SEQ ID NO: 418360 - DNA, 75 bp, synthetic construct
  source 1..75: mol_type = other DNA
tatcacaaagcgatgggtaatcgccaggtgcagatgatcgccattggcggcgcgattgggactggtttgttttta

SEQ ID NO: 418361 - DNA, 75 bp, synthetic construct
  source 1..75: mol_type = other DNA
accgggcgtattctgcgctcgatggcgatgggcggatctgcgccgggttttatggcgaaaatgagtcgccagcat

SEQ ID NO: 418362 - DNA, 75 bp, synthetic construct
  source 1..75: mol_type = other DNA
tcctggctgacgttattgtttttgctgagcgtactggtgctgatggcgttcgattacccgaacgggacttatacc

SEQ ID NO: 418363 - DNA, 75 bp, synthetic construct
  source 1..75: mol_type = other DNA
tcgcgtcgctgggaatcatcgcttcatgggcgtttatcatcgtttgccagatgcgtctgcgtaaggctattaaag

SEQ ID NO: 418364 - DNA, 75 bp, synthetic construct
  source 1..75: mol_type = other DNA
aaggctgcatgttcggcaagaacatcaccagtcccgcaaatccgcgcgagacgcagccgcatttcttcgaatccc

SEQ ID NO: 418365 - DNA, 75 bp, synthetic construct
  source 1..75: mol_type = other DNA
acgcaacaacgtctttctccacctaaaataactccccccccgagagtcagcgtgccagagacagtaaaaacagca

SEQ ID NO: 418366 - DNA, 75 bp, synthetic construct
  source 1..75: mol_type = other DNA
gcatgttcggcaagaacatcaccagtcccgcaaatccgcgcgagacgcagccgcacttcttcgaatcccgattcc

SEQ ID NO: 418367 - DNA, 75 bp, synthetic construct
  source 1..75: mol_type = other DNA
cgtctgggtaagcgcttcttaatgcgcgttgctgccgtgggtggcgtctgtttttacgcaggaatgctgatggcg

SEQ ID NO: 418368 - DNA, 75 bp, synthetic construct
  source 1..75: mol_type = other DNA
tcatcaacatgccgctatttattatcaacgaactgcatcttcccgagaaactggccggtgtgatgatggggaccg

SEQ ID NO: 418369 - DNA, 75 bp, synthetic construct
  source 1..75: mol_type = other DNA
ttgccggctggatgtactttatcaactgggcgatgacgggcattgtcgatatcaccgcggtcgcgctgtatatgc

SEQ ID NO: 418370 - DNA, 75 bp, synthetic construct
  source 1..75: mol_type = other DNA
caacttcttccagccgaccattctggtggacgttccggccaacgctaaagtgtcgaaagaagagacgttcggccc

SEQ ID NO: 418371 - DNA, 75 bp, synthetic construct
  source 1..75: mol_type = other DNA
gcgatttaaccggagaggcagtcatccaggcgcggcaatgcgttattaatgctgagatcgaagcggcccgggaaa

SEQ ID NO: 418372 - DNA, 75 bp, synthetic construct
  source 1..75: mol_type = other DNA
ctcgatgcctgtattaccgagaatctttgtatgttctcgccagagggttatctgtacctgtttatgcaacgccgc

SEQ ID NO: 418373 - DNA, 75 bp, synthetic construct
  source 1..75: mol_type = other DNA
ttgtttcggttaacggggtggacacaggagagacaacgatgagatggtacaaagcaggtacacaaaacctgacca

SEQ ID NO: 418374 - DNA, 75 bp, synthetic construct
  source 1..75: mol_type = other DNA
gaatctgtttgttttttccgttcgacgcacacgcgttcaggtcaatcgcatgatgcaggcgcaggacaaaggagg

SEQ ID NO: 418375 - DNA, 75 bp, synthetic construct
  source 1..75: mol_type = other DNA
atattgataattatcatatgctgtctgcattagctgggattgcgggatttgacaggagcattaagtttacatgtg

SEQ ID NO: 418376 - DNA, 75 bp, synthetic construct
  source 1..75: mol_type = other DNA
accggacgtattttgcgctcaatggcgatgggcggttctgcacctggttttatggcgaaaatgagccgccagcat

SEQ ID NO: 418377 - DNA, 75 bp, synthetic construct
  source 1..75: mol_type = other DNA
tgtgttgaacttcgcgtcgctgggaatcatcgcttcatgggcgtttatcatcgtgtgccagatgcgcctgcgtaa

SEQ ID NO: 418378 - DNA, 75 bp, synthetic construct
  source 1..75: mol_type = other DNA
attcctcaattatctggtgccgtcgcgcgtttttgagattgtgttgaactttgcgtcgctgggaattatcgcttc

SEQ ID NO: 418379 - DNA, 75 bp, synthetic construct
  source 1..75: mol_type = other DNA
ctaccggctcaatggctcagcgcattctgtccagcggcatgatgtccggcatcacgagcccggcacgtccatggt

SEQ ID NO: 418380 - DNA, 75 bp, synthetic construct
  source 1..75: mol_type = other DNA
actaacccgccgatggtcgcacctacctcgctaaaaacacagcgtgtttccctgctgcctggtgatgtgacgtac

SEQ ID NO: 418381 - DNA, 75 bp, synthetic construct
  source 1..75: mol_type = other DNA
ggtatgctggcactcggtcaggttaaagcacttcaggttgagcagaagcgcaaagctcagctgatcgataaagcc

SEQ ID NO: 418382 - DNA, 75 bp, synthetic construct
  source 1..75: mol_type = other DNA
gactgtggtttttcacctttttccttggtatcagtgaactggccttaccaatggcgcaacggttgcagaaaaaaa

SEQ ID NO: 418383 - DNA, 75 bp, synthetic construct
  source 1..75: mol_type = other DNA
caacgcgctgtagatgccctgttacgctttgactttcctgcactggatgctgaatttacgcaattccatgacaat

SEQ ID NO: 418384 - DNA, 75 bp, synthetic construct
  source 1..75: mol_type = other DNA
cgccgctggtcaccggaaaactttcagctcttcctggttgagcatccgctagttcgccacttaacccgccgtctg

SEQ ID NO: 418385 - DNA, 75 bp, synthetic construct
  source 1..75: mol_type = other DNA
aatctcattgccctctgttacctgcctggtcaacaggccatttcttttcttaaccagatagtcaaagaagataac

SEQ ID NO: 418386 - DNA, 75 bp, synthetic construct
  source 1..75: mol_type = other DNA
catcttatctgaatgtcgtccgcagccagtagctgaagaatgtgaatatgccactgtggatatgttgccggagct

SEQ ID NO: 418387 - DNA, 75 bp, synthetic construct
  source 1..75: mol_type = other DNA
gtctggaagaaagcggcagcgtctatgcgatgcgcaaatctaccccttatggcgatctcgaacttgaaacagaac

SEQ ID NO: 418388 - DNA, 75 bp, synthetic construct
  source 1..75: mol_type = other DNA
ttttatcgtaataaacaatatcaccagcccggcgatacagcagacagactgaactatcagaaaatggcgcaggtg

SEQ ID NO: 418389 - DNA, 75 bp, synthetic construct
  source 1..75: mol_type = other DNA
caacacgacgtagaggcaatctggctgggcgatatacaagaacatcctgcaatcgcgcgcagatttgtgaattag

SEQ ID NO: 418390 - DNA, 75 bp, synthetic construct
  source 1..75: mol_type = other DNA
taacgctgctggttatcctgtatataacggacagattgccaagttcgtaactgtgcaaggccattctatggctgt

SEQ ID NO: 418391 - DNA, 75 bp, synthetic construct
  source 1..75: mol_type = other DNA
ggtttttcaccttcttccttggtgtcaatgaactggcattgccaatggcgcaacgacttcagaaaaaaatgtcgt

SEQ ID NO: 418392 - DNA, 75 bp, synthetic construct
  source 1..75: mol_type = other DNA
ggttacggtgccagtcgcttactggcggatattgactggcaggctctggtggctcgccaacaaaatgatccgttg

SEQ ID NO: 418393 - DNA, 75 bp, synthetic construct
  source 1..75: mol_type = other DNA
gctcgcgtgaaactgtgggtaataacgcttcattccattgccataacggcaatggttacagctctgatatcgatc

SEQ ID NO: 418394 - DNA, 75 bp, synthetic construct
  source 1..75: mol_type = other DNA
tccaccgtgggtaataaataagaaaaagaatgtaatacccgtatttgatttaccggtacttcccatccctgccgt

SEQ ID NO: 418395 - DNA, 75 bp, synthetic construct
  source 1..75: mol_type = other DNA
gccgactccactctgaacagcttcagtttgagcaggcacaaacccagcaagccgctgtacaggtgccaggaattc

SEQ ID NO: 418396 - DNA, 75 bp, synthetic construct
  source 1..75: mol_type = other DNA
acaccgcgcgtaaactaaccccgcttatccgggcctggccgggtgaatcccagcataaacgcgcggtttctgggc

SEQ ID NO: 418397 - DNA, 75 bp, synthetic construct
  source 1..75: mol_type = other DNA
gcggagctgaagctgattgcggagaaaacgaaaaaaggctatgtggaagacgcttcggcaaatgtgaatctcccg

SEQ ID NO: 418398 - DNA, 75 bp, synthetic construct
  source 1..75: mol_type = other DNA
gtttgagcaggcccaaacccagcaagccgctgtacaggtgccaggaattcaaactttaggaacgcaatcgcagta

SEQ ID NO: 418399 - DNA, 75 bp, synthetic construct
  source 1..75: mol_type = other DNA
tttgagcaggcgcaaacccagcaagccgctgtacaggtgccaggacttcaaactttaggaacgcaatcgcagtaa

SEQ ID NO: 418400 - DNA, 75 bp, synthetic construct
  source 1..75: mol_type = other DNA
gcagcatgcgtatcgcttgcagttatcgttggcgtccagcactataatggacaatctgaaacgtcccagcagccc

SEQ ID NO: 418401 - DNA, 75 bp, synthetic construct
  source 1..75: mol_type = other DNA
gcgcagcgattacagaaaacaatgtctgctgaagactcccgaaaatggctggttaaattcccacgccatgctgcc

SEQ ID NO: 418402 - DNA, 75 bp, synthetic construct
  source 1..75: mol_type = other DNA
ctcaacagatgaactggtcgatgacttagtcgttcgttgtggcctggaaactaccgttgaaatcgcccttctcgc

SEQ ID NO: 418403 - DNA, 75 bp, synthetic construct
  source 1..75: mol_type = other DNA
gcagagctgaagctaatcgcggagaaaatgaagaagggttatgtggaaggcgactcggtaaatatggttctcccg

SEQ ID NO: 418404 - DNA, 75 bp, synthetic construct
  source 1..75: mol_type = other DNA
atgaatggcggcattgcgaggatgacttgcatgaaaaaaaatatataccgcaaagcgctgttgatgccttgttgc

SEQ ID NO: 418405 - DNA, 75 bp, synthetic construct
  source 1..75: mol_type = other DNA
tcgggctggacgtgctagccagtatcggtagcgatattgcgctgatgttactgaatggcatcgcgcaaaaaatta

SEQ ID NO: 418406 - DNA, 75 bp, synthetic construct
  source 1..75: mol_type = other DNA
cctgaatccgccgctgcattcaggcaaatttacgttgattacgaactgcttccccctttccaacagctcgagcga

SEQ ID NO: 418407 - DNA, 75 bp, synthetic construct
  source 1..75: mol_type = other DNA
ttcgcgccgacgtggcggaggtggccaatgccatgtgtgaccttcgggccaggctgaacgatatggagcatcgct

SEQ ID NO: 418408 - DNA, 75 bp, synthetic construct
  source 1..75: mol_type = other DNA
acaaaaacgccgggagcgggggaaaacttactttttcccgtttccggggggggacaactgagcattgcgaacgcg

SEQ ID NO: 418409 - DNA, 75 bp, synthetic construct
  source 1..75: mol_type = other DNA
ttacccccatttacctgtttttgttacagaaacgccgggagcggggaaaacttgctttttcccgtttccggggtt

SEQ ID NO: 418410 - DNA, 75 bp, synthetic construct
  source 1..75: mol_type = other DNA
gaaaagggatagttcagctcagtagcgccactaacagcacatctgaaacgctggctgcgacgccaaaagctgtta

SEQ ID NO: 418411 - DNA, 75 bp, synthetic construct
  source 1..75: mol_type = other DNA
atgatatagatttttgcggattgtggcctatggttggtcttctaagacaacaacataaaaagggtcagtttatgc

SEQ ID NO: 418412 - DNA, 75 bp, synthetic construct
  source 1..75: mol_type = other DNA
cgatatatcagcagacatattttactcgcagagataaaaaacaaaatttatcagagagcattaaaaattataggg

SEQ ID NO: 418413 - DNA, 75 bp, synthetic construct
  source 1..75: mol_type = other DNA
ttacccccatttacctgtttttgttacagaaacgccggggacggggaaaacttgctttttcccgtttccggggtt

SEQ ID NO: 418414 - DNA, 75 bp, synthetic construct
  source 1..75: mol_type = other DNA
gcgcaatgaccatacgcgttactacgtcgagcacgtccagcggtggcggaattactaacgctcaattcacttata

SEQ ID NO: 418415 - DNA, 75 bp, synthetic construct
  source 1..75: mol_type = other DNA
atttaaccatccttactggatgtgcaaaggctcatgggcttatgcaaataataaggttattacagatacaggttg

SEQ ID NO: 418416 - DNA, 75 bp, synthetic construct
  source 1..75: mol_type = other DNA
gcaagtacggcttatgtgatggccgcgattgccgcccttgtagactcgtcgcctgacgcactgaatacgctgaac

SEQ ID NO: 418417 - DNA, 75 bp, synthetic construct
  source 1..75: mol_type = other DNA
agcatcagaggcagctggtagtgcgacggcggcagctcagagcaaaagtacggcggaatccgcggcaacgcgcgc

SEQ ID NO: 418418 - DNA, 75 bp, synthetic construct
  source 1..75: mol_type = other DNA
gcgcccttaaatagtcctgcactgaccggaacgccaacaacaccaactgcgcgacagggaacgaataatacccaa

SEQ ID NO: 418419 - DNA, 75 bp, synthetic construct
  source 1..75: mol_type = other DNA
tttacaccacaacacgcaaaccctctgcgggggatgttggtgcatatacgcaggcagaatgtaactcaaggttta

SEQ ID NO: 418420 - DNA, 75 bp, synthetic construct
  source 1..75: mol_type = other DNA
aaatttgatggaggcgatcagatggtggttgcctggtgcggaggtggatttattgatttacatattggtaattat

SEQ ID NO: 418421 - DNA, 75 bp, synthetic construct
  source 1..75: mol_type = other DNA
gtgctcggcgtggtacgtagtgacaaccagtgtcaggtgattatcggcaataccgtttcacaagcctttcaggaa

SEQ ID NO: 418422 - DNA, 75 bp, synthetic construct
  source 1..75: mol_type = other DNA
tttgtacgtgaaggtgacacggtcgtggtacacagcatggatcgccttgctcgcaacttggatgatctgcgccga

SEQ ID NO: 418423 - DNA, 75 bp, synthetic construct
  source 1..75: mol_type = other DNA
attgccgagttgaaacggcgagttgcggcaggcgaccagaaaaccttggtggcccgtgacttcggcatcagccgc

SEQ ID NO: 418424 - DNA, 75 bp, synthetic construct
  source 1..75: mol_type = other DNA
agcgccatttcggcgctggtttacaccattcatggttatctgggctggctttcagtcgccattatgggcgcgctg

SEQ ID NO: 418425 - DNA, 75 bp, synthetic construct
  source 1..75: mol_type = other DNA
ttcctgttgaggaagcggctgccgaggcgcgaaagcatcagagcgtacaaccgaccgtcgccaaagaagtaagtc

SEQ ID NO: 418426 - DNA, 75 bp, synthetic construct
  source 1..75: mol_type = other DNA
taccagcgtgcagttcttcgatccggcgaatccaatgagcatcgtctgggtgttcgccgtcatggcgctggcggt

SEQ ID NO: 418427 - DNA, 75 bp, synthetic construct
  source 1..75: mol_type = other DNA
gttcccgtttcccgctgcttggcgagctgcaaagcattcttaagcaagccgtggaagaagcaaccgtcaaagcgc

SEQ ID NO: 418428 - DNA, 75 bp, synthetic construct
  source 1..75: mol_type = other DNA
tggaaaaccagaccgccagttcgcttggcgggatcgcggcgatggaaacattactgcctgcgctattccacctgc

SEQ ID NO: 418429 - DNA, 75 bp, synthetic construct
  source 1..75: mol_type = other DNA
cagcgtgagggcatcgccttggccaagcagcgtggcgcgtaccggggccgcaagaaagccctgtccgatgagcag

SEQ ID NO: 418430 - DNA, 75 bp, synthetic construct
  source 1..75: mol_type = other DNA
cggccggcgagcccaaggcgcagcttgcccgcgagttcaacatcagccggaaaccctctaccagtacctccgcac

SEQ ID NO: 418431 - DNA, 75 bp, synthetic construct
  source 1..75: mol_type = other DNA
acaatgcggtagaaatttttgacgaagtaaacaccggcaaaaataccggcagcggcgtaccgtgggtcacctggg

SEQ ID NO: 418432 - DNA, 75 bp, synthetic construct
  source 1..75: mol_type = other DNA
cagtaaataagctgacagatattgtcgctaactttactgcaatgatttccactcgtatgcccgacgacgtagtgg

SEQ ID NO: 418433 - DNA, 75 bp, synthetic construct
  source 1..75: mol_type = other DNA
cgccgcttattgatccccgcggcaaacatccagatgtgctaccgctttttactgaagacggaagaaattggtatg

SEQ ID NO: 418434 - DNA, 75 bp, synthetic construct
  source 1..75: mol_type = other DNA
ttgtcattaccggaatcgtggatggtaagccggaatattcccgtattgaggtaaataacggctgcctctgtttga

SEQ ID NO: 418435 - DNA, 75 bp, synthetic construct
  source 1..75: mol_type = other DNA
ccgcctacagtttgcttttattaaagcgacggaaggcgagaaactggtcgatccgtatttctcacgtaactggct

SEQ ID NO: 418436 - DNA, 75 bp, synthetic construct
  source 1..75: mol_type = other DNA
ttgtaattggtaccgctgctgttccgtttaagtttgagttgtcacaactggtggaggtacgtatcagtgatgaat

SEQ ID NO: 418437 - DNA, 75 bp, synthetic construct
  source 1..75: mol_type = other DNA
ggggtgaggttaaagcccgcgcgcagtatgcggatggcgaaaaccagtacttgatccactacaaagcagctgatg

SEQ ID NO: 418438 - DNA, 75 bp, synthetic construct
  source 1..75: mol_type = other DNA
aacggcattatccgcagtgtttcgaaagatgtatcgttgctttgcccggatgggatgagtgttattgagttacct

SEQ ID NO: 418439 - DNA, 75 bp, synthetic construct
  source 1..75: mol_type = other DNA
atgcagttgagaatcaccagtcgaaaaaaattcaccgctttattatgcgctcttgggctaatttccatcgttgca

SEQ ID NO: 418440 - DNA, 75 bp, synthetic construct
  source 1..75: mol_type = other DNA
tctctacccaacctgccgacgcgcgctggggagaaaaagcaacttacagcattaataatgatggcattaccctgc

SEQ ID NO: 418441 - DNA, 75 bp, synthetic construct
  source 1..75: mol_type = other DNA
taccgtaaagcgccggttgaacagtggtctgcgggcgcgaccgggctgggtgtgcgcacgattgctaatctgtta

SEQ ID NO: 418442 - DNA, 75 bp, synthetic construct
  source 1..75: mol_type = other DNA
tgctggacgtagaagaacggggaaaattatcggcaaaagaattacgcaagcgggtaagtcagtggctaaaaatgg

SEQ ID NO: 418443 - DNA, 75 bp, synthetic construct
  source 1..75: mol_type = other DNA
atgcagctaaaaatcgtcagtcgcaaaaaattcaccgccttgttatgcgctttggggctaatttccatcgtggcg

SEQ ID NO: 418444 - DNA, 75 bp, synthetic construct
  source 1..75: mol_type = other DNA
ggatggcgtaaatggtccggtggattttaatgtgtttaatggcacggtggaggagctgcaggcatttgttgatgg

SEQ ID NO: 418445 - DNA, 75 bp, synthetic construct
  source 1..75: mol_type = other DNA
attgtattttattgataaatcccatcctgcatggtacatgataaaatttcttgaaatgatatcaatgatttatat

SEQ ID NO: 418446 - DNA, 75 bp, synthetic construct
  source 1..75: mol_type = other DNA
taagcctgtagaaaatgatatgtcgttaagtgaagaactggcccatgtgttattttttacattattgcattcgga

SEQ ID NO: 418447 - DNA, 75 bp, synthetic construct
  source 1..75: mol_type = other DNA
ggttcatttcatcatggctcagacgggaaaatatttattgctaaagtagcggaagtctatatgcttcaccataca

SEQ ID NO: 418448 - DNA, 75 bp, synthetic construct
  source 1..75: mol_type = other DNA
gcaacggtgcgtatctggcggagtacgctatgcaacggtatggagcaagtcgggtgcagcaggtgatgttaagcg

SEQ ID NO: 418449 - DNA, 75 bp, synthetic construct
  source 1..75: mol_type = other DNA
gttcagcaggtgatgccaaccgaaggctggtaccgggagcatatgcctccggtcaaagctgcactggaagacggt

SEQ ID NO: 418450 - DNA, 75 bp, synthetic construct
  source 1..75: mol_type = other DNA
gtttctgccagtgaaacgctgaatatgtctgttgaggcatcaggtggtgtgcctccttattcatatgtctggaag

SEQ ID NO: 418451 - DNA, 75 bp, synthetic construct
  source 1..75: mol_type = other DNA
tggtgttgtggctgcaacgttttccctgcgtctgaaaggtaaacctgtgctgacgacagagccgctgaaagtgaa

SEQ ID NO: 418452 - DNA, 75 bp, synthetic construct
  source 1..75: mol_type = other DNA
gtatgtggtaccactggattttgtgcgtaaccttccggaagcgcatgtggtgacgacaggatcattactgacgct

SEQ ID NO: 418453 - DNA, 75 bp, synthetic construct
  source 1..75: mol_type = other DNA
ggcaacttctacaataatccagcgcaggacgccttgcgtgatgcgtatgacaacgacaccacttacggcttccag

SEQ ID NO: 418454 - DNA, 75 bp, synthetic construct
  source 1..75: mol_type = other DNA
atgtctgcactttatgaaaaatcgcagctgacgaagatccttatttcctccctgccgtccaccaaagaaacgatg

SEQ ID NO: 418455 - DNA, 75 bp, synthetic construct
  source 1..75: mol_type = other DNA
aggatacctccgggcttgatgcgccggtggcgctgatgccctaccagcaacgctgggtggcggatgactccccgc

SEQ ID NO: 418456 - DNA, 75 bp, synthetic construct
  source 1..75: mol_type = other DNA
tggcttgatacacatctgaaaccgttgctggaggcgctccccgctgacgcacgttctttcctgggtcgcgacttt

SEQ ID NO: 418457 - DNA, 75 bp, synthetic construct
  source 1..75: mol_type = other DNA
cgttcaggtggtgaacggtgtccccgcgtaccggagcaacgctcaaaagcaaaggctgacggtggtaaacgccac

SEQ ID NO: 418458 - DNA, 75 bp, synthetic construct
  source 1..75: mol_type = other DNA
attgatggtctgggcatcaaacatgttcagctaagcggtgaaggctgggatgcggatcgctgctgggcattctgg

SEQ ID NO: 418459 - DNA, 75 bp, synthetic construct
  source 1..75: mol_type = other DNA
cgtcaaaacggggagcgtgaacataagtttgccctcctgaatagcgatcagtttgattacatgtgtcgcattgtg

SEQ ID NO: 418460 - DNA, 75 bp, synthetic construct
  source 1..75: mol_type = other DNA
gcactgggtatggacgggccgtactatacggaagccacagtaggtttgtttgccggactggatcttgatttgtga

SEQ ID NO: 418461 - DNA, 75 bp, synthetic construct
  source 1..75: mol_type = other DNA
tctgttcttgctggggagcgaagcgctggagtcaatgattaagcacgaagcgacccgtccgcttgaattctcatc

SEQ ID NO: 418462 - DNA, 75 bp, synthetic construct
  source 1..75: mol_type = other DNA
aattgaaggggattgatggagttccaatatttcattggtttactggcacaaaaactgagctggataaagccatag

SEQ ID NO: 418463 - DNA, 75 bp, synthetic construct
  source 1..75: mol_type = other DNA
ggcattcgcaaaacatcgcgctaccgagcctgtacgccgtgaatatctgccaggctatcacgaaagccgtgacgg

SEQ ID NO: 418464 - DNA, 75 bp, synthetic construct
  source 1..75: mol_type = other DNA
ctgaaaatcgcttcgctgggctggctgtaggcgagcgtcagagcgcgggagagcaacagttaggcttactgatag

SEQ ID NO: 418465 - DNA, 75 bp, synthetic construct
  source 1..75: mol_type = other DNA
gagagttattgcctggaccggggaacgtgaaacacctgtcaccatttatagctgggtcgcgtcagcaacgcgtta

SEQ ID NO: 418466 - DNA, 75 bp, synthetic construct
  source 1..75: mol_type = other DNA
tatcgcacaccagcgcctgcgcgatgcgccgatcccggttaacgatgatttatcggcattccaccgacaaatgcg

SEQ ID NO: 418467 - DNA, 75 bp, synthetic construct
  source 1..75: mol_type = other DNA
ggaagtaaaagtagagtcagccgagcgtcatcatgcgatggtcaatttctggcgcacaacactttcctgcattct

SEQ ID NO: 418468 - DNA, 75 bp, synthetic construct
  source 1..75: mol_type = other DNA
ggtattaaaagcatgcggtgcggtggattatttctgccaatatgggcacggtttaatttctaaaacacgcgttga

SEQ ID NO: 418469 - DNA, 75 bp, synthetic construct
  source 1..75: mol_type = other DNA
ataatcaatccatcctgaaagaacgcgcgcggcaggcgattgagaatccgcttaagcagtccgaacagggcacac

SEQ ID NO: 418470 - DNA, 75 bp, synthetic construct
  source 1..75: mol_type = other DNA
tttgcttgccagtatatgactgattgggtctccggggatgaggctgtcgaattacagtacatgctggaaatgttt

SEQ ID NO: 418471 - DNA, 75 bp, synthetic construct
  source 1..75: mol_type = other DNA
atgggcgtttatcatcgtttgccagatgcgcctgcgtaaagcgattaaagaaggcaaagcagcggatgtcagttt

SEQ ID NO: 418472 - DNA, 75 bp, synthetic construct
  source 1..75: mol_type = other DNA
attcgcatcgtgaaacagcacggtcacgaagagtttatttatctgtctggcggcattcttgaagtgcagcctggc

SEQ ID NO: 418473 - DNA, 75 bp, synthetic construct
  source 1..75: mol_type = other DNA
attcgcatcgtgaaacagcacggccacgaagagtttatctatctgtctggcggcattcttgaagtgcagcctggc

SEQ ID NO: 418474 - DNA, 75 bp, synthetic construct
  source 1..75: mol_type = other DNA
gccaattgtttatcatctttggatgctctactcacagcagaagtccagaaactggatgcgttaaagaaatataaa

SEQ ID NO: 418475 - DNA, 75 bp, synthetic construct
  source 1..75: mol_type = other DNA
gcagcctgggtgggcagctggccccggagccaaaacgctggtttgcacttggtacgattagtgcttcttttctgt

SEQ ID NO: 418476 - DNA, 75 bp, synthetic construct
  source 1..75: mol_type = other DNA
gcgtgaactgtccgttcaggcaaccaacggcactaattcccagtctgacctggactccatccagaatgaaatcac

SEQ ID NO: 418477 - DNA, 75 bp, synthetic construct
  source 1..75: mol_type = other DNA
cgctggccgcaaactataacaaggaaggttatatcaagcgtctgcctgccgatccctggggcaatgattatgtcc

SEQ ID NO: 418478 - DNA, 75 bp, synthetic construct
  source 1..75: mol_type = other DNA
gtataacttccgtctggaatggagccactggagctggatgcgagttgtgctgggtggtgagatcttctctgctct

SEQ ID NO: 418479 - DNA, 75 bp, synthetic construct
  source 1..75: mol_type = other DNA
ggaatagtagtccaggacctgatccgcaaaacagcgatgaggttcgttattttctgcctcgtttactggagtttg

SEQ ID NO: 418480 - DNA, 75 bp, synthetic construct
  source 1..75: mol_type = other DNA
atgctcgaaacaattaaggggaaagcgttagttttgaaaattcctaaatcacgcattcttacagaaaccgatggg

SEQ ID NO: 418481 - DNA, 75 bp, synthetic construct
  source 1..75: mol_type = other DNA
tttttaggagagaaagccgcttacgttgcaggctggatgtacttcatcaactgggcgatgacggggattgtcgat

SEQ ID NO: 418482 - DNA, 75 bp, synthetic construct
  source 1..75: mol_type = other DNA
cggggcccgcactggcactggtctatttgatctgcggcctgttttcgttttttattctgcgtgcattgggtgagc

SEQ ID NO: 418483 - DNA, 75 bp, synthetic construct
  source 1..75: mol_type = other DNA
tgtatcccggactggcaaaagcctaccccgcaaataaattaccggatttacggggagaatttattcgcggctggg

SEQ ID NO: 418484 - DNA, 75 bp, synthetic construct
  source 1..75: mol_type = other DNA
tcaatatagagcataaccgcgctcatgcggttttttcgtatcatgagcattgctacgtccaaattatggtggggc

SEQ ID NO: 418485 - DNA, 75 bp, synthetic construct
  source 1..75: mol_type = other DNA
agaggcctacatcgctgagttcgaccgcatggaagcagaactacgccagaataataccactcccacaaacaaaat

SEQ ID NO: 418486 - DNA, 75 bp, synthetic construct
  source 1..75: mol_type = other DNA
acgtgctgcccagttcaaagaggcatacatcaatgcctttaaccagatggaacaggcgctgatcggaaaggttga

SEQ ID NO: 418487 - DNA, 75 bp, synthetic construct
  source 1..75: mol_type = other DNA
tgtagatgtgaagtaccgcgtctggaaggcggaagagaaaattgacaacgcggtagttcaggcctacaccgctgt

SEQ ID NO: 418488 - DNA, 75 bp, synthetic construct
  source 1..75: mol_type = other DNA
gcgtgaatccagtgaacacacactgcgtctggcgactgctgttgcagccctggcggtaagtcaaagcaatgtggg

SEQ ID NO: 418489 - DNA, 75 bp, synthetic construct
  source 1..75: mol_type = other DNA
ccgctggctataagtctgtatgaccgcatcaacgacgcggcggtactggccagtctcataaatctgtcactgaac

SEQ ID NO: 418490 - DNA, 75 bp, synthetic construct
  source 1..75: mol_type = other DNA
actgtacgaccgtgtaggtgatgctgtttttggtgctgcacttgttgattccaggctgaatggttctgacaagga

SEQ ID NO: 418491 - DNA, 75 bp, synthetic construct
  source 1..75: mol_type = other DNA
acatcaacgcctttaacctgatggagaagagtttatcaggtgccgatgcgtctgatatgtcagctgtcgcacgaa

SEQ ID NO: 418492 - DNA, 75 bp, synthetic construct
  source 1..75: mol_type = other DNA
tttatatcttgctgttaatattgctaaactgagacggcgaaagcgtgatagattcttactaatgtttgctctact

SEQ ID NO: 418493 - DNA, 75 bp, synthetic construct
  source 1..75: mol_type = other DNA
tgtgcccgcaattttgcggagacatcaattttggtacgccagcccaacggcggtactcgcaaactaccttgctat

SEQ ID NO: 418494 - DNA, 75 bp, synthetic construct
  source 1..75: mol_type = other DNA
atgagcaaaccagtaatgattgattctgataattctgggcgttatattgttctggcagcggcaaaatccgttgcc

SEQ ID NO: 418495 - DNA, 75 bp, synthetic construct
  source 1..75: mol_type = other DNA
tgagaccccggaattgttacaggcgacaaatgacgcgccagcgtcttttttgttgtcagcgtccttgcacgccag

SEQ ID NO: 418496 - DNA, 75 bp, synthetic construct
  source 1..75: mol_type = other DNA
ctgccattccgggacgttacactgttcaggcaccttataaagcgggtgccgggattggcgtcctggagaaggcta

SEQ ID NO: 418497 - DNA, 75 bp, synthetic construct
  source 1..75: mol_type = other DNA
ctgtcagaaactccaggaggctgttggcttaccgaatctggcaccgcgctatgccattgatgctcctgctgatgc

SEQ ID NO: 418498 - DNA, 75 bp, synthetic construct
  source 1..75: mol_type = other DNA
acagcgaaaggttgcatgttcggcaagaacatcaccagtcccgcaaatccgcgcgagacgcagccgcatttcttc

SEQ ID NO: 418499 - DNA, 75 bp, synthetic construct
  source 1..75: mol_type = other DNA
cttaccgaatctggcaccgcgctatgccattgatgctcctgctgacgcgcctgatggctcaagtcgccccacgct

SEQ ID NO: 418500 - DNA, 75 bp, synthetic construct
  source 1..75: mol_type = other DNA
gtttgccctcaagcatgttattgatagccgtgaaacagtggctgcgtctgagcaggaagagactaaaacgacctg

SEQ ID NO: 418501 - DNA, 75 bp, synthetic construct
  source 1..75: mol_type = other DNA
aagcagctcgctcctggcacagacacagcggcggctgagtccgccgcccgtcagccgcccggtttccgcgacaaa

SEQ ID NO: 418502 - DNA, 75 bp, synthetic construct
  source 1..75: mol_type = other DNA
caccagatggtgaagctggggatcgtcgagcagcgcgaacgatacagtcgtaccgcgattaacaacatcaaaaaa

SEQ ID NO: 418503 - DNA, 75 bp, synthetic construct
  source 1..75: mol_type = other DNA
cagtcgtaccgcgattaacaacatcaaaaaattctggtcgctgaccgcgaaaggctgcatgttcggcaagaacat

SEQ ID NO: 418504 - DNA, 75 bp, synthetic construct
  source 1..75: mol_type = other DNA
gtattgaagttcgtcgtgatgcttatgggcgttacagcctgaacgatctgcatcgcgcagcagtcgcatctggtg

SEQ ID NO: 418505 - DNA, 75 bp, synthetic construct
  source 1..75: mol_type = other DNA
gagcgcggaatatgatgaatggggcaaccagcttaatgaggagaacccgcatcacctgcaccagccgtaccggct

SEQ ID NO: 418506 - DNA, 75 bp, synthetic construct
  source 1..75: mol_type = other DNA
gatggttcaagccgccctacgctgtcgctgagtgcactgctgaagcagtatggtatccgcctgacggctagtcag

SEQ ID NO: 418507 - DNA, 75 bp, synthetic construct
  source 1..75: mol_type = other DNA
caatgagcaaactgagcgtttaataagcgagttgcagatttgcaactcggttaatatagagccagttaacgttat

SEQ ID NO: 418508 - DNA, 75 bp, synthetic construct
  source 1..75: mol_type = other DNA
agaatataactccattcattctaaaccgcacaacaacaaccctattggtttctttacttgtgaaaactgtagcgt

SEQ ID NO: 418509 - DNA, 75 bp, synthetic construct
  source 1..75: mol_type = other DNA
ctgcgtacaatggtgagcaatggattcaagagcaaattagttctatattgaaacagaaaaatgttgatgtgacat

SEQ ID NO: 418510 - DNA, 75 bp, synthetic construct
  source 1..75: mol_type = other DNA
atccaaaagtcgatattttgaatgtgattctggatggagaagcagaataccgcgacagtgaaggcaatcatgttc

SEQ ID NO: 418511 - DNA, 75 bp, synthetic construct
  source 1..75: mol_type = other DNA
cgcttaatatgagcaagcagcaattaatcgcctcgccagaaggtgggatgggaagcctgcaattgcgccagcaag

SEQ ID NO: 418512 - DNA, 75 bp, synthetic construct
  source 1..75: mol_type = other DNA
ttggctggacgcctgcccgcagcgagagaatccgctgattcaaaaactggcgcttaatatgggcaagcagcaatt

SEQ ID NO: 418513 - DNA, 75 bp, synthetic construct
  source 1..75: mol_type = other DNA
gcaggagctgcgggcgcgatttctggttcggcaattgttaaaatcatcgagcaacatattaatgagccagagaaa

SEQ ID NO: 418514 - DNA, 75 bp, synthetic construct
  source 1..75: mol_type = other DNA
caacgcaaaaactgactccatcgaaaaaggtctgccgattccggtagtaatcaccgtttacgctgaccgttcttt

SEQ ID NO: 418515 - DNA, 75 bp, synthetic construct
  source 1..75: mol_type = other DNA
ggggaacaaaaatcacagaccgattactggcaggatttgacagaaggcttctccgttattgttgtgctcagcaat

SEQ ID NO: 418516 - DNA, 75 bp, synthetic construct
  source 1..75: mol_type = other DNA
tgttgctgatagctgccggtgcacaggcgtccacgctggaagaactgcgccagcttgaagcgcataagacaacgc

SEQ ID NO: 418517 - DNA, 75 bp, synthetic construct
  source 1..75: mol_type = other DNA
ggtaccgaagagatttactttgccaccttccaccttggggtagatggtggcatcgaggtgacagcgagccacaat

SEQ ID NO: 418518 - DNA, 75 bp, synthetic construct
  source 1..75: mol_type = other DNA
ctgcagaagcagccgggagcgaaaatcattcacgacccgcgcctgacgtggaacacggtggacatcgtgacccgc

SEQ ID NO: 418519 - DNA, 75 bp, synthetic construct
  source 1..75: mol_type = other DNA
tacccgtcgtcgcaaattaggaaaacacttcgcgaccggcttacaaacagccttttgaaaattatgcgtaccaca

SEQ ID NO: 418520 - DNA, 75 bp, synthetic construct
  source 1..75: mol_type = other DNA
ccagtatgcggacgtaatgttaactttaagttagagacgatccccgcagataaagtagaaatggcaacaatggta

SEQ ID NO: 418521 - DNA, 75 bp, synthetic construct
  source 1..75: mol_type = other DNA
cagcttgaagcgcacaaaacaacgccgggtaaggccagccagatgcagacggcagccacttcttcatcacctgtg

SEQ ID NO: 418522 - DNA, 75 bp, synthetic construct
  source 1..75: mol_type = other DNA
cccagttgaagaagcgcaaagaaggcgcatttgtccctttcgtcaccctcggcgatccgggcgttgagcagtcac

SEQ ID NO: 418523 - DNA, 75 bp, synthetic construct
  source 1..75: mol_type = other DNA
ctcgtttccggaattgtcgatacaaaaacaacaacgcaaaacgaaattctgcgtcttgcgtctttgcacctttaa

SEQ ID NO: 418524 - DNA, 75 bp, synthetic construct
  source 1..75: mol_type = other DNA
ggtattgtttatatctcgcataaaatggaagaaatcttccagttatgtgatgaagttaccgtattgcgcgacggt

SEQ ID NO: 418525 - DNA, 75 bp, synthetic construct
  source 1..75: mol_type = other DNA
tgtttgggatccgtgagaaatcttccggcaccattacactgcacggcaaaaagattaataaccataatgccaacg

SEQ ID NO: 418526 - DNA, 75 bp, synthetic construct
  source 1..75: mol_type = other DNA
atgagcaaaccagtaatgattgattctgccattccgggacgttacactgttcaggcaccttataaagcgggtgcc

SEQ ID NO: 418527 - DNA, 75 bp, synthetic construct
  source 1..75: mol_type = other DNA
tgtttggtatctatcaaaaagactccggcactattttattccagggtaaggaaatcgattttcactcagccaaag

SEQ ID NO: 418528 - DNA, 75 bp, synthetic construct
  source 1..75: mol_type = other DNA
ggaaaatcgacattattaaaatgcctgtttggtatctatcaaaaagactccggcactattttattccagggtaag

SEQ ID NO: 418529 - DNA, 75 bp, synthetic construct
  source 1..75: mol_type = other DNA
ccggcagatgctctttaaggccttgctgggctggaacccggaagcgtgcggtaacccgattacctatgacggcgg

SEQ ID NO: 418530 - DNA, 75 bp, synthetic construct
  source 1..75: mol_type = other DNA
ggaacaggttaaagcagcgattgatgcgggtgcagcaggcgcgatttctggttctgcgattgtgaaaatcattga

SEQ ID NO: 418531 - DNA, 75 bp, synthetic construct
  source 1..75: mol_type = other DNA
ctcttacggtcgtggttacacctatttattgtcgcgtgcgggcgtgaccggagctgaaaaccgcgccgcgttacc

SEQ ID NO: 418532 - DNA, 75 bp, synthetic construct
  source 1..75: mol_type = other DNA
tatagctcaatcacatttgttatcatggtatggcatactgagaggggactctgttataagttataaaagccctgt

SEQ ID NO: 418533 - DNA, 75 bp, synthetic construct
  source 1..75: mol_type = other DNA
aaccctgtacgtctcaccacctctgtgattggcgtcccatgtggtgagttttctaaaaaactgactaccggggct

SEQ ID NO: 418534 - DNA, 75 bp, synthetic construct
  source 1..75: mol_type = other DNA
tggtcgtgctgtcactacatctcttgcagttgctaactactttactaaacggcatgagcgggttttagatagaat

SEQ ID NO: 418535 - DNA, 75 bp, synthetic construct
  source 1..75: mol_type = other DNA
atcaccgacatattctctgccacagcgcctgcgattaacttcttcctgttatgggtttttgttattgggtttcag

SEQ ID NO: 418536 - DNA, 75 bp, synthetic construct
  source 1..75: mol_type = other DNA
ctttgaagacgtggaaagtatcattcagtcggctgcatccagctatgaaagcacggtacagcaggccatcaacaa

SEQ ID NO: 418537 - DNA, 75 bp, synthetic construct
  source 1..75: mol_type = other DNA
caggatgtcagcggtatctatgacgcccagaaaaaagcgctcggcacgatgattaacacgatggactcggctgca

SEQ ID NO: 418538 - DNA, 75 bp, synthetic construct
  source 1..75: mol_type = other DNA
atcagcaattatcatccctcttagtattacactttcatctcatattgctttttggacgctggggtcggaaaaata

SEQ ID NO: 418539 - DNA, 75 bp, synthetic construct
  source 1..75: mol_type = other DNA
ttaaatggtgttattaactccccggttggtccggggattgttcgttttactgcagaaaatcataggaaaggatta

SEQ ID NO: 418540 - DNA, 75 bp, synthetic construct
  source 1..75: mol_type = other DNA
tttttaccgggatgttaacttttttcaagatgatttccggttttataatatctaaaattgttgctatttacactg

SEQ ID NO: 418541 - DNA, 75 bp, synthetic construct
  source 1..75: mol_type = other DNA
acttgcgactacgctggtactgacgctaaccaacctgaccatttcgacgctgcgtcactggacgccagccgagat

SEQ ID NO: 418542 - DNA, 75 bp, synthetic construct
  source 1..75: mol_type = other DNA
atcgcctcggtggtcagcgccgtacagatgctgatcaacgcctacgccttcggcctgtatcaatcgttagggatt

SEQ ID NO: 418543 - DNA, 75 bp, synthetic construct
  source 1..75: mol_type = other DNA
ctcaccaacctgaccatctctacgctgcgtcactggactccggctgagattcgtattccgatttacgtcatgatc

SEQ ID NO: 418544 - DNA, 75 bp, synthetic construct
  source 1..75: mol_type = other DNA
acaccacctctgggcactgttacatcagccaatgagcaacgaatggccaatgcgcaagatcctaagtctgcctta

SEQ ID NO: 418545 - DNA, 75 bp, synthetic construct
  source 1..75: mol_type = other DNA
tgggggcaaatgaggcgaaagacgccaatacggcgttgttcgatttagtaaaagcttcctggggaatacgattcg

SEQ ID NO: 418546 - DNA, 75 bp, synthetic construct
  source 1..75: mol_type = other DNA
tattctggatgatcggcgtgggtaactgggttgtcagtgtactgattggctgtgcagccggcccactctgggcag

SEQ ID NO: 418547 - DNA, 75 bp, synthetic construct
  source 1..75: mol_type = other DNA
ccaactccatcaccgaaggtctcccgcgtgaaatcgagttgcgccagaaacagtacgaatattatcgagatatgc

SEQ ID NO: 418548 - DNA, 75 bp, synthetic construct
  source 1..75: mol_type = other DNA
ctgaaggtcttccgcgtgaaatcgagttgcgccagaaacaatacgaatactaccgtgatttactgttcagtttcc

SEQ ID NO: 418549 - DNA, 75 bp, synthetic construct
  source 1..75: mol_type = other DNA
attttggcagatgacaaattctttgaatacaacatgcagcatgctaaaggagcaaaaatgccgcgtggcagtaaa

SEQ ID NO: 418550 - DNA, 75 bp, synthetic construct
  source 1..75: mol_type = other DNA
gatttatgcccgcgcctgtaccacactggttgcgggcgtttttgcgcttcaggcttatctgccagaccatgtgat

SEQ ID NO: 418551 - DNA, 75 bp, synthetic construct
  source 1..75: mol_type = other DNA
aaaatcgctacctattgataacggagaacaatccaggaaagaagctctcaagtcttatctcacaacctatggatg

SEQ ID NO: 418552 - DNA, 75 bp, synthetic construct
  source 1..75: mol_type = other DNA
taaaatggacaaaccaagctgctactgaatggtcaggaacaggaacaaccagcaaccaagttaacccattaatta

SEQ ID NO: 418553 - DNA, 75 bp, synthetic construct
  source 1..75: mol_type = other DNA
tccaaatccttcacctgaagataaagagcgaatagtttctattctggacaaatttgatgcgctaacaaactccat

SEQ ID NO: 418554 - DNA, 75 bp, synthetic construct
  source 1..75: mol_type = other DNA
ggcgatttatctaaaattaaaattccaattcccagttcaaacaatccagaaaagtccctcgccatccagtctgaa

SEQ ID NO: 418555 - DNA, 75 bp, synthetic construct
  source 1..75: mol_type = other DNA
agatgtagttaaacctttagcctggcttggcgataacgttgctatttccggagatatgatgttatttcgccacga

SEQ ID NO: 418556 - DNA, 75 bp, synthetic construct
  source 1..75: mol_type = other DNA
gacgtaataaatctcgaaaatctgaaggtgaatatcctgtttatggctccactggtttgattggctctactgata

SEQ ID NO: 418557 - DNA, 75 bp, synthetic construct
  source 1..75: mol_type = other DNA
tactgtgagtggcgtctcgtcactgggcgaagccggggatacggaattcctgaaggaagtcaagggggcttacca

SEQ ID NO: 418558 - DNA, 75 bp, synthetic construct
  source 1..75: mol_type = other DNA
ccagtccgcgctggactattttttcaatcccttcattgaaacggagtatcagggagtcctgacggcacaacggtc

SEQ ID NO: 418559 - DNA, 75 bp, synthetic construct
  source 1..75: mol_type = other DNA
agagggcgaggttgagtggaaaactttgggagaagtggctcaatactcgaaaacaagaattagtttcgaactact

SEQ ID NO: 418560 - DNA, 75 bp, synthetic construct
  source 1..75: mol_type = other DNA
gcctgcatttgctcaatgaagcgcagaacgagctggaactgtcagaaggcagcgacgataacgaaggtattaaag

SEQ ID NO: 418561 - DNA, 75 bp, synthetic construct
  source 1..75: mol_type = other DNA
cttgatgatcaatcgctggaagagaaactggtgacagcccgtcgtggcggttactgttttgagcagaatggcgtg

SEQ ID NO: 418562 - DNA, 75 bp, synthetic construct
  source 1..75: mol_type = other DNA
gaccaatttccattttacccattatgaaaatggatacgcgatagagcagcggaacctgccggatgtggcgtcgtt

SEQ ID NO: 418563 - DNA, 75 bp, synthetic construct
  source 1..75: mol_type = other DNA
ttttgcagtttaatcatcatcagcactggcagtcgatgtaccgttttgatctctgcgagcagcaacaaagcgatt

SEQ ID NO: 418564 - DNA, 75 bp, synthetic construct
  source 1..75: mol_type = other DNA
aatttagcgatatttgggatgatcatcttcatgtcgtacaagaaaagacagggagcaaaatcgcaattccgcttt

SEQ ID NO: 418565 - DNA, 75 bp, synthetic construct
  source 1..75: mol_type = other DNA
acggctgagcctcgaagaatggaaaaaaatattcgatatcgcagatgccagccatcgttacatgggaaatgccat

SEQ ID NO: 418566 - DNA, 75 bp, synthetic construct
  source 1..75: mol_type = other DNA
acagggggtagacacacaaaaactacttggccataaaacgcaacaacaaaccgatcgttatcatgacgatcgagg

SEQ ID NO: 418567 - DNA, 75 bp, synthetic construct
  source 1..75: mol_type = other DNA
tggatgttctgataccaggaaggcttcagacaaaaagccgggtggagccgctgtactctggttcaagcgtggtga

SEQ ID NO: 418568 - DNA, 75 bp, synthetic construct
  source 1..75: mol_type = other DNA
tggatgttctgataccaggaaggcttcagacaaaaagccgggtgtagccgctgtactctggatcaagcgtggtga

SEQ ID NO: 418569 - DNA, 75 bp, synthetic construct
  source 1..75: mol_type = other DNA
tggatgttctgataccaggaaggcttcagacaaaaagccgggtgaagccgctgttctctggctcaagcgtggtga

SEQ ID NO: 418570 - DNA, 75 bp, synthetic construct
  source 1..75: mol_type = other DNA
cgagcagcaacaaagcgattatgtgatgggcaatttctggtcggcgcactggccgcagtcgcattttcgccatca

SEQ ID NO: 418571 - DNA, 75 bp, synthetic construct
  source 1..75: mol_type = other DNA
aaaatggattgctgatgtcggtttcggtggacagacgctaaccgcgccgattcgtttagttcccgatctcgtgca

SEQ ID NO: 418572 - DNA, 75 bp, synthetic construct
  source 1..75: mol_type = other DNA
gaaaatgggcacgcggtggagcagcgaaatctaccggatgtggtgtcgttatatgccgtgatgcaggaacagttt

SEQ ID NO: 418573 - DNA, 75 bp, synthetic construct
  source 1..75: mol_type = other DNA
tacttggcggatttgtccccaacgctaatgctcttatcgccacacaagtaccgcgtaataaaagcggctgggcgc

SEQ ID NO: 418574 - DNA, 75 bp, synthetic construct
  source 1..75: mol_type = other DNA
acgcgtctatttccggtgcggaagtcggttgccagggcgaagtaggtgttgcctgttcaatggctgctgcgggcc

SEQ ID NO: 418575 - DNA, 75 bp, synthetic construct
  source 1..75: mol_type = other DNA
gtgctggcttactatgaccactttattgaatcagttagcccggacatctatacccgttactttatggcagcgggc

SEQ ID NO: 418576 - DNA, 75 bp, synthetic construct
  source 1..75: mol_type = other DNA
agcggtatttctcgtcaccgctggcgtagtgttattcaacgcagtctattcatggaacagtctacgtcgtcgtcg

SEQ ID NO: 418577 - DNA, 75 bp, synthetic construct
  source 1..75: mol_type = other DNA
tctggcggcaatggcaaaaatatcgggtagaaaatctcgactcaaccgatgcgttggatgcaatgatgcaggtta

SEQ ID NO: 418578 - DNA, 75 bp, synthetic construct
  source 1..75: mol_type = other DNA
agcgcacggcgaagttcgtctcactgtacggtgtcgttaaatttaattcgaccgtgcgcttccggttgtggcaac

SEQ ID NO: 418579 - DNA, 75 bp, synthetic construct
  source 1..75: mol_type = other DNA
aaaaagacgcctgcgtactggtcgagcaagatctgaatagtgatggtcaggcggagcggatcctgtttgctttta

SEQ ID NO: 418580 - DNA, 75 bp, synthetic construct
  source 1..75: mol_type = other DNA
tcagtggcatgatcgcctcggtgccaggcgtggcggctctgctgagtgcaccacgactcggcaaacttggcgatc

SEQ ID NO: 418581 - DNA, 75 bp, synthetic construct
  source 1..75: mol_type = other DNA
ttgggttacttggcggatttgtcccccaacgctaatgctcttatcgccacacaagtaccgcgtaataaaagcggc

SEQ ID NO: 418582 - DNA, 75 bp, synthetic construct
  source 1..75: mol_type = other DNA
agcagcgatttcagcgaactacggtttcagagcggtatttctcgtcaccgctggcgtagtgttattcaacgcagt

SEQ ID NO: 418583 - DNA, 75 bp, synthetic construct
  source 1..75: mol_type = other DNA
gacgctgtatgtccgtgaactggcgggtaacgtcagtaacgtcgcctttatcagtggcatgatcgcctcggtgcc

SEQ ID NO: 418584 - DNA, 75 bp, synthetic construct
  source 1..75: mol_type = other DNA
atggggctggcacaaaatatctggcagtttttgatcctgcgggcgctgcttggtttgcttggcggatttgttccc

SEQ ID NO: 418585 - DNA, 75 bp, synthetic construct
  source 1..75: mol_type = other DNA
aaacgccactgcaattgggtattttacgttttctactcggtgctgccgacggtgcgctgcttcccgccgtgcaaa

SEQ ID NO: 418586 - DNA, 75 bp, synthetic construct
  source 1..75: mol_type = other DNA
tcactctggcaggatgccagtcaaatgctgacgatcatgccgccgatgtttatcaaaccgatcaactgaatacca

SEQ ID NO: 418587 - DNA, 75 bp, synthetic construct
  source 1..75: mol_type = other DNA
atgaaatttaaaaaatgtcttctgcctgtggcaatgttagcgtcattcactctggcaggatgccagtcaaatgct

SEQ ID NO: 418588 - DNA, 75 bp, synthetic construct
  source 1..75: mol_type = other DNA
ctctacaagctcggccggagcacactcgcacgttgatggtcgcaggtttaatacaagcacttttaaagacaccta

SEQ ID NO: 418589 - DNA, 75 bp, synthetic construct
  source 1..75: mol_type = other DNA
ggcgtgatccctgatatgcgtggctggacgattaagggcaagcccgccagtggtcgtgccgtattgtctcaggaa

SEQ ID NO: 418590 - DNA, 75 bp, synthetic construct
  source 1..75: mol_type = other DNA
ccgtgaaagcatttcttgatatgcaggatgataatctgccaaagctggtggtttgccagtctttatccgttatgc

SEQ ID NO: 418591 - DNA, 75 bp, synthetic construct
  source 1..75: mol_type = other DNA
ccagttcacgacgggtttagccgttgttattaccactacgtataacgaaacgcgtattcagccaaatacaaaatg

SEQ ID NO: 418592 - DNA, 75 bp, synthetic construct
  source 1..75: mol_type = other DNA
ccggcaaagcttactatcgttattcacaaagataagatagataaaataaacttattggatataaaatcagcgaga

SEQ ID NO: 418593 - DNA, 75 bp, synthetic construct
  source 1..75: mol_type = other DNA
actgaatgaaaacgaagattttcgccgctggtacggtgctgacctgcctgatgctgtgcgccggttgcaccagcg

SEQ ID NO: 418594 - DNA, 75 bp, synthetic construct
  source 1..75: mol_type = other DNA
atgtcaaagctgatgactgtgctggtcgtgttgttatcgctggcggtggccggtctgtttctggtgaaacacaaa

SEQ ID NO: 418595 - DNA, 75 bp, synthetic construct
  source 1..75: mol_type = other DNA
cacgcactccgttgcgattggttcacatggacacaccatcaccgttaacgctgctggtaacgcggaaaacaccgt

SEQ ID NO: 418596 - DNA, 75 bp, synthetic construct
  source 1..75: mol_type = other DNA
ggctcagtaggtatgtctacggggtggttagctaataccagtacagatggtaatcatagccactcactgtccggc

SEQ ID NO: 418597 - DNA, 75 bp, synthetic construct
  source 1..75: mol_type = other DNA
tagatcgtattatcaacgtattcagacacagtcagcaggtgctcatacccactcgctgtctggtactgcagcaag

SEQ ID NO: 418598 - DNA, 75 bp, synthetic construct
  source 1..75: mol_type = other DNA
agtgtgaaggggcggttaatatttcgtcggtggtggtcgcatcgggcagtgccggaactcacgccggactggctg

SEQ ID NO: 418599 - DNA, 75 bp, synthetic construct
  source 1..75: mol_type = other DNA
ggaatgaaaattaataaaatatgcgcatggtctaataagacgccacattctattgctgctattgaattgagtaat

SEQ ID NO: 418600 - DNA, 75 bp, synthetic construct
  source 1..75: mol_type = other DNA
gtgcttaatatctttgccgtactgaccgcattctttggcatttatctcggtttccacgagccattaaaggcatta

SEQ ID NO: 418601 - DNA, 75 bp, synthetic construct
  source 1..75: mol_type = other DNA
cactgattttgattgatgttggcctgcctaaatctatccggcgtcattatgggcatggatgcccgcgcctcgatg

SEQ ID NO: 418602 - DNA, 75 bp, synthetic construct
  source 1..75: mol_type = other DNA
cagcggtgagcttctaccgcgcgtgtccagaagtggtgatagtggcccggcatttaccactccggctgcttttga

SEQ ID NO: 418603 - DNA, 75 bp, synthetic construct
  source 1..75: mol_type = other DNA
tattattccgttgaagcaattgataaaggaggcaacattctgcgccttcgttcggttgcagatggaagcagggtg

SEQ ID NO: 418604 - DNA, 75 bp, synthetic construct
  source 1..75: mol_type = other DNA
tttggtgctcctgtaatcggtcttattgctggtcgtaagtttatcaactcattaatcaaagcaaaggggaaataa

SEQ ID NO: 418605 - DNA, 75 bp, synthetic construct
  source 1..75: mol_type = other DNA
ttccacggttggagtttatcggcacaccgacaccgctcgaatatctgccacgtttttctgattatctcggtcggg

SEQ ID NO: 418606 - DNA, 75 bp, synthetic construct
  source 1..75: mol_type = other DNA
atgtcactgcataatttaacccgttttccacggctggagtttatgccactgcataatttaacccgttttccacgg

SEQ ID NO: 418607 - DNA, 75 bp, synthetic construct
  source 1..75: mol_type = other DNA
cacgtaaatgtcgctccatctctattgcataataaaaaattcatatccacctgtataaacgctgcaaaaaaaaca

SEQ ID NO: 418608 - DNA, 75 bp, synthetic construct
  source 1..75: mol_type = other DNA
caatcccgtggccatcagataccgttccgtctggctatgccctgatgcaggggcagacttttgacaaatctgcat

SEQ ID NO: 418609 - DNA, 75 bp, synthetic construct
  source 1..75: mol_type = other DNA
acagggcgaacaacgtcgccagtgaacagcagacgaccattaccatgctgaaaaaccagcttcatgttgccctta

SEQ ID NO: 418610 - DNA, 75 bp, synthetic construct
  source 1..75: mol_type = other DNA
gcgtgctgatgacgacgaactggtctggcagcaggttctggagtacgccaagagaaaacctataggtgctccaat

SEQ ID NO: 418611 - DNA, 75 bp, synthetic construct
  source 1..75: mol_type = other DNA
tactttcacgttttatgaactctgccaggatttaggatggtcttataacgggcgttacatcagcaaagctgagga

SEQ ID NO: 418612 - DNA, 75 bp, synthetic construct
  source 1..75: mol_type = other DNA
tgacaagcgcggcattcaatatgggatgcaatagcttacggacctactacagcaaagcgcgaggcatgcgagtag

SEQ ID NO: 418613 - DNA, 75 bp, synthetic construct
  source 1..75: mol_type = other DNA
tcagaagccacgatgccagaaaactgctgcagatgaccggagaatggctgaatacaacaggggctgatcagcagt

SEQ ID NO: 418614 - DNA, 75 bp, synthetic construct
  source 1..75: mol_type = other DNA
ctggttactgtgaccgcacggctcgatgagagtgtgcggcaagctctgttcgtcgatctcttgggggtttccgtt

SEQ ID NO: 418615 - DNA, 75 bp, synthetic construct
  source 1..75: mol_type = other DNA
cttttatttgcacgaaatgtaactggaaaaaaacaattacccatattaactgtataagatctttttcttcatgcc

SEQ ID NO: 418616 - DNA, 75 bp, synthetic construct
  source 1..75: mol_type = other DNA
gctacccactgataacggagagcaatccagaaaagaggctcttaaatcttatctcacaacctacgggtgggtaac

SEQ ID NO: 418617 - DNA, 75 bp, synthetic construct
  source 1..75: mol_type = other DNA
tggcagagctggctgacagagctccagctgtaacttcaatgtcatcacttggggaagttggcgatactgatttat

SEQ ID NO: 418618 - DNA, 75 bp, synthetic construct
  source 1..75: mol_type = other DNA
gatcaggtcaatccattgataaagatgaaaaatattggtgattatacattaggaacaacagagattctctggagt

SEQ ID NO: 418619 - DNA, 75 bp, synthetic construct
  source 1..75: mol_type = other DNA
gtaacggcgtgcccctgcgaggtttaaagattcgccgtgaaaaagaacgccagctttgcctgacggggctggtca

SEQ ID NO: 418620 - DNA, 75 bp, synthetic construct
  source 1..75: mol_type = other DNA
gaaaacaagaattagtttcgaactacttgatgaaaggaattatgttggcgtagataatctgctgcaaaacagagc

SEQ ID NO: 418621 - DNA, 75 bp, synthetic construct
  source 1..75: mol_type = other DNA
gccactcacctggcaagctcgcattgtcgaaatactcgataaattcgacaccctgaccaactccatcactgaagg

SEQ ID NO: 418622 - DNA, 75 bp, synthetic construct
  source 1..75: mol_type = other DNA
ttgctcagaagccacgatgccagaaaactgctacagatgactggagaatggctgaatacaacaggaactgatcag

SEQ ID NO: 418623 - DNA, 75 bp, synthetic construct
  source 1..75: mol_type = other DNA
aaaaacgcggtgctcgccgcatcatctgatgtgacttctctggtggcggatggggtacagaccgcaacaatgacg

SEQ ID NO: 418624 - DNA, 75 bp, synthetic construct
  source 1..75: mol_type = other DNA
caagccgcttacaggcgataatgtgtgggtgaaagccaacgatgaggggaaagcggagttgcaggtggtttccgt

SEQ ID NO: 418625 - DNA, 75 bp, synthetic construct
  source 1..75: mol_type = other DNA
ggactgcgcagatttctctcggcactacggcgggtgaattagacgttatgccgaagctcaatgggcaggacgcgg

SEQ ID NO: 418626 - DNA, 75 bp, synthetic construct
  source 1..75: mol_type = other DNA
gcagcagacgaccatcaccatgctgaaaaatcagcttcatgttgcgctcaccagggcagacaaaaacgagctggc

SEQ ID NO: 418627 - DNA, 75 bp, synthetic construct
  source 1..75: mol_type = other DNA
atgtcaaagctgatgattgcactggtcgtgttgttatcgctggcggtggcggggctgtttctggtgaagcatgaa

SEQ ID NO: 418628 - DNA, 75 bp, synthetic construct
  source 1..75: mol_type = other DNA
gcaccgtcattatcgggcgcagctgctgctggttctacggcatcaggctggacggataatggcgacgggacctgg

SEQ ID NO: 418629 - DNA, 75 bp, synthetic construct
  source 1..75: mol_type = other DNA
aagccacgatgccagaaaactgctgcagatgaccggagaatggctgaataggggtcagtttggatatcgaaaatt

SEQ ID NO: 418630 - DNA, 75 bp, synthetic construct
  source 1..75: mol_type = other DNA
tatcgtccagctgaacgggaatatccggccacgatcccgtccgtggtggcagttattcaggatggtgtctcagtg

SEQ ID NO: 418631 - DNA, 75 bp, synthetic construct
  source 1..75: mol_type = other DNA
attgtggatatgaagcggtggtatctgtgcccgcaggtacgggtcgctgatatcgtccagctgaacgggaatatc

SEQ ID NO: 418632 - DNA, 75 bp, synthetic construct
  source 1..75: mol_type = other DNA
aaatgtgcaatgggaagcgccgtctttgctggccgcaggcggaaaaattacggggcagggcaatcagtggcaagt

SEQ ID NO: 418633 - DNA, 75 bp, synthetic construct
  source 1..75: mol_type = other DNA
aagccacgatgccagaaaactgctgcagatgaccggagaatggctgaatacaacaggggctgatcagcagccacc

SEQ ID NO: 418634 - DNA, 75 bp, synthetic construct
  source 1..75: mol_type = other DNA
ttcgtgtggccgatattgtcagagtggcccccgaccggaagccgggcagccgggaatggtggcagttatttcgtc

SEQ ID NO: 418635 - DNA, 75 bp, synthetic construct
  source 1..75: mol_type = other DNA
atgagtacagccctttctccgatagtttcagaattcgaaactatcgaacaagaaaacagttacaacgaatggttg

SEQ ID NO: 418636 - DNA, 75 bp, synthetic construct
  source 1..75: mol_type = other DNA
ctggtgctgttgctatggttctggtttcttttggtgctaatgcagctgatcaggggcatggcaaagttaatttta

SEQ ID NO: 418637 - DNA, 75 bp, synthetic construct
  source 1..75: mol_type = other DNA
ctttacctcttgggtgaaaaaagctactggggccccagctgttgctgaaggggcattctcagcaacagctaactt

SEQ ID NO: 418638 - DNA, 75 bp, synthetic construct
  source 1..75: mol_type = other DNA
atgccgttggctgcttgctgctggcacagaaagccagcgtggagacagtaaccgttgagctggatgaggatattg

SEQ ID NO: 418639 - DNA, 75 bp, synthetic construct
  source 1..75: mol_type = other DNA
tacccggcgcagaaaaaaacaaactggtgggtttcaagattcctatgattttgaccagcgcttccatattggagc

SEQ ID NO: 418640 - DNA, 75 bp, synthetic construct
  source 1..75: mol_type = other DNA
attccacatgacgaggtaatggctgaaatggagaatcttattgctcaaattgctgtaactaacaggagcgagtaa

SEQ ID NO: 418641 - DNA, 75 bp, synthetic construct
  source 1..75: mol_type = other DNA
acaactggcgattcgggcgataaaatcggtcctgcgccaggactacagtaactgggagatgatcatcgtggatga

SEQ ID NO: 418642 - DNA, 75 bp, synthetic construct
  source 1..75: mol_type = other DNA
cgaatgctactaaattaatggatggcgataacaccctgcattaccaggcatgggttcagaaaggtactaaaaatg

SEQ ID NO: 418643 - DNA, 75 bp, synthetic construct
  source 1..75: mol_type = other DNA
ctaggaatgccttgggctctttgctctgaagctaaaaaatatcgaaatcaaaagaaagatattgtgcataataat

SEQ ID NO: 418644 - DNA, 75 bp, synthetic construct
  source 1..75: mol_type = other DNA
actatcgactttggccagatttccaaagcgcatttgactaatggcggtacatcccagcacaaaaatgtagatatc

SEQ ID NO: 418645 - DNA, 75 bp, synthetic construct
  source 1..75: mol_type = other DNA
aacgagttaggtactgctggtgataccggtacagcaattgttatttccagtgaggacggctctttagtgactttt

SEQ ID NO: 418646 - DNA, 75 bp, synthetic construct
  source 1..75: mol_type = other DNA
tacaaacgcaatatcattggcaatcaggtctttacctgggcgtggcgtttcaaagagtgcttgttcgataccgaa

SEQ ID NO: 418647 - DNA, 75 bp, synthetic construct
  source 1..75: mol_type = other DNA
attttctcttctgacgcagatttacatcaagcttaacgatgtcatgacgctcatcgctctatctggtgaagagct

SEQ ID NO: 418648 - DNA, 75 bp, synthetic construct
  source 1..75: mol_type = other DNA
ctggcagtcgatgtaccgttttgatctctgcgagcagcaacaaagcgattatgtgatgggcaatttctggtcggc

SEQ ID NO: 418649 - DNA, 75 bp, synthetic construct
  source 1..75: mol_type = other DNA
ggtgggcagacgctaaccgcgccgattcgtttaatgccggatatcatgcaaaccacgccacacggagagtatcgg

SEQ ID NO: 418650 - DNA, 75 bp, synthetic construct
  source 1..75: mol_type = other DNA
gtcgaagcactggaaatcgaagtggcagaactgaaacagcgtcttgattcattgctggcccatctgggagattaa

SEQ ID NO: 418651 - DNA, 75 bp, synthetic construct
  source 1..75: mol_type = other DNA
gtgcaggttggcggcggcgtgcgtagcgaagaagacgtggcggcgttactggaagcgggcgttgcgcgcgtggtg

SEQ ID NO: 418652 - DNA, 75 bp, synthetic construct
  source 1..75: mol_type = other DNA
accggaggagacatggtacggctgggacggcgacaggctgacgacggtacagaccgacaccacgcgtatccagac

SEQ ID NO: 418653 - DNA, 75 bp, synthetic construct
  source 1..75: mol_type = other DNA
aaaattgatgatacaacctggagtgaggtgctggaagcggaaatggaatgcagagctgaaatataccgcgaacag

SEQ ID NO: 418654 - DNA, 75 bp, synthetic construct
  source 1..75: mol_type = other DNA
cgattatcaatcattaaatgcctttgcgttggatgatgaacaactaaaacaatgggttgaatgctttagtcaagc

SEQ ID NO: 418655 - DNA, 75 bp, synthetic construct
  source 1..75: mol_type = other DNA
tttatgtatgccaccgcactggctattttcggctactggctgtggcagttttttctgcgctatcagttttgctta

SEQ ID NO: 418656 - DNA, 75 bp, synthetic construct
  source 1..75: mol_type = other DNA
ttgggaccgttgccttactgaccgcacatgaaaacccaccacaagatgctgatcaatcaaccaggcgctggcgaa

SEQ ID NO: 418657 - DNA, 75 bp, synthetic construct
  source 1..75: mol_type = other DNA
ttgacggtgatttacaggcccgcgtcgaagccctggaaatcgaagtggcagaactgaaacagcgtcttgattcgt

SEQ ID NO: 418658 - DNA, 75 bp, synthetic construct
  source 1..75: mol_type = other DNA
tctgcgcacggtgagtggctttggtaatcgagtcaccaaatatgaacaacgtttttgtaattcagaatttggcga

SEQ ID NO: 418659 - DNA, 75 bp, synthetic construct
  source 1..75: mol_type = other DNA
ggaaaatggcactcccagccagatatctggtttcctaatcttgccgaaatgcattttggcggcacaaaaccgcag

SEQ ID NO: 418660 - DNA, 75 bp, synthetic construct
  source 1..75: mol_type = other DNA
cccaggaagatttagagagcttttatttaaacaagaaaaatttagaaaaagagcttaaaattaaggaatgccatc

SEQ ID NO: 418661 - DNA, 75 bp, synthetic construct
  source 1..75: mol_type = other DNA
ggaacgtctggtgcgtcagacgttgtttcgcgcaaaccgcctcctgatggaggcatacaccgaaattctggaact

SEQ ID NO: 418662 - DNA, 75 bp, synthetic construct
  source 1..75: mol_type = other DNA
ctgctgccggtggggacggatatttttgtcgttggcgagaaccgcagcggcgtgcgcagcgccgagcagatgctg

SEQ ID NO: 418663 - DNA, 75 bp, synthetic construct
  source 1..75: mol_type = other DNA
cctattacgtcgataaaatgcgtaaagaggggatgatccagaagatcgacaagtcgaagttaacgaacttcagca

SEQ ID NO: 418664 - DNA, 75 bp, synthetic construct
  source 1..75: mol_type = other DNA
ataataaccactgaagaagataatgcgagtttccagcggttactcggtgatggcagtaattttggtattcggctt

SEQ ID NO: 418665 - DNA, 75 bp, synthetic construct
  source 1..75: mol_type = other DNA
ttattggatttaggtatccaattaagcaaaaatcattacggtcaatatctaataaaactggcaaagcatatatga

SEQ ID NO: 418666 - DNA, 75 bp, synthetic construct
  source 1..75: mol_type = other DNA
aggttctgaatttattggggctgataaggtttgcttagtgctaggagataatatcttttttggacaagcatttgg

SEQ ID NO: 418667 - DNA, 75 bp, synthetic construct
  source 1..75: mol_type = other DNA
tcaggccgcgaacaaagctgcggtcaccatgccttcttccaagctgaaagtggcaatcgccaacgtgctgaagga

SEQ ID NO: 418668 - DNA, 75 bp, synthetic construct
  source 1..75: mol_type = other DNA
tcatccggcggcattggcgacattgatgatgtggcggccctgcgtggtactggcgtgcgcggcgtaatagttggt

SEQ ID NO: 418669 - DNA, 75 bp, synthetic construct
  source 1..75: mol_type = other DNA
cgcgccgacgtggcggaggtggccaacaccatgtgtgaccttcgggccaggctgaacgatatggagcatcgctgt

SEQ ID NO: 418670 - DNA, 75 bp, synthetic construct
  source 1..75: mol_type = other DNA
agaagggatgatccagaagatcgataagtcgaagttaagcaacttcagcaacctcgatccagacatgctcaacaa

SEQ ID NO: 418671 - DNA, 75 bp, synthetic construct
  source 1..75: mol_type = other DNA
ggcatgatctggaacggttctgctttcgttgcacgccaggcgggtacgccaattgacgtggtgtggccgaaagaa

SEQ ID NO: 418672 - DNA, 75 bp, synthetic construct
  source 1..75: mol_type = other DNA
tcgcggcgggtgctctggcactgggcatgagcgccgctcacgccgatgacaacaacacgctgtatttctacaact

SEQ ID NO: 418673 - DNA, 75 bp, synthetic construct
  source 1..75: mol_type = other DNA
tgagcttagccaaaatttaattaagaaccaatatggcatttatcttcttaaactattagaaaataaatatataga

SEQ ID NO: 418674 - DNA, 75 bp, synthetic construct
  source 1..75: mol_type = other DNA
gagttggagttagcgcatgagcctataaacgtaattaacgctgaaagtgttgaagctgccgaaaacgagccagaa

SEQ ID NO: 418675 - DNA, 75 bp, synthetic construct
  source 1..75: mol_type = other DNA
acaaataaaaaagcgcgtactgcaagaggtcctcgttttactttaagtgataaagatgattcgtttttcaataaa

SEQ ID NO: 418676 - DNA, 75 bp, synthetic construct
  source 1..75: mol_type = other DNA
gtgtgttgatgttaatgatgaattaaaagttcaacagtcaaatgatagcaacacaaataaaaaagcgcgtactgc

SEQ ID NO: 418677 - DNA, 75 bp, synthetic construct
  source 1..75: mol_type = other DNA
atacaagagattcatccaactaaggcttttgaaaattttatgcaacaacaggatgtgagttataaactaataacc

SEQ ID NO: 418678 - DNA, 75 bp, synthetic construct
  source 1..75: mol_type = other DNA
aaatggtggcgcaaagtgacagtaccgtgctgatcctcggtgaaactggcacgggtaaagagctgattgcccgtg

SEQ ID NO: 418679 - DNA, 75 bp, synthetic construct
  source 1..75: mol_type = other DNA
ttgctgcgtgtattacaggaacaggagtttgaacgtctcggcagcaacaaaatcattcagacggatgtgcgtcta

SEQ ID NO: 418680 - DNA, 75 bp, synthetic construct
  source 1..75: mol_type = other DNA
atgaaatattccttagggccagtgctgtggtactggccaaaagagacgctggaagaattttatcagcaggccgcc

SEQ ID NO: 418681 - DNA, 75 bp, synthetic construct
  source 1..75: mol_type = other DNA
tgcaccactgccgttgacggcgaacagcgactgtaacggctactggcggcggctggcaggactggagctgcaagc

SEQ ID NO: 418682 - DNA, 75 bp, synthetic construct
  source 1..75: mol_type = other DNA
gatatcaggtaatggatccagagagatttggtgttgtggaatttgatgataattacaaagctatatctattgaag

SEQ ID NO: 418683 - DNA, 75 bp, synthetic construct
  source 1..75: mol_type = other DNA
ttatttttcaatgtgctttgtttaaaaatctcgagagggaggtgttcatgacacatggatatgttgatagtcata

SEQ ID NO: 418684 - DNA, 75 bp, synthetic construct
  source 1..75: mol_type = other DNA
tgcgccactaccgttgacggcaaacagcgactgtaacggctactggcggcgactggccgggctggagctgcaagc

SEQ ID NO: 418685 - DNA, 75 bp, synthetic construct
  source 1..75: mol_type = other DNA
tgcgccactgccgttgacggcaaacagcgattgtaacggctactggagacggttggcggggctggagctgcaagc

SEQ ID NO: 418686 - DNA, 75 bp, synthetic construct
  source 1..75: mol_type = other DNA
cgcaagcagaatcccgccaatctttttaccgctgcagaggaaacggtgagcgaactggaagaaatccaggaggac

SEQ ID NO: 418687 - DNA, 75 bp, synthetic construct
  source 1..75: mol_type = other DNA
gcccgaagtttgctgatacgggcaaagcctacctggttggcctggctgccactgatgatccagccagtctgggta

SEQ ID NO: 418688 - DNA, 75 bp, synthetic construct
  source 1..75: mol_type = other DNA
gcgtaccgaaaaatccctgtctgagctggagactgccctgcaggcacagcagaccgcctttaacgaactggtgaa

SEQ ID NO: 418689 - DNA, 75 bp, synthetic construct
  source 1..75: mol_type = other DNA
cagacaaaaagtctggtgaagccgctgtgctctgggtcaagcgtggtgatgtggaagcgatgcagaaagcccgga

SEQ ID NO: 418690 - DNA, 75 bp, synthetic construct
  source 1..75: mol_type = other DNA
gtgggccggggcgtctactggatggcaagtgcccctgtaaaacaagcatccggtgcctgagtgtataccacggtc

SEQ ID NO: 418691 - DNA, 75 bp, synthetic construct
  source 1..75: mol_type = other DNA
gattcagcggtgatttctcgttttttcgaatccctgaaagccaaaatccaggcttaccagcggaaaaaacgacgt

SEQ ID NO: 418692 - DNA, 75 bp, synthetic construct
  source 1..75: mol_type = other DNA
atgaaacaacgcggcgagctttgatcaacgaccttttggaaacttcggcttcccctggagagagcgagattctcc

SEQ ID NO: 418693 - DNA, 75 bp, synthetic construct
  source 1..75: mol_type = other DNA
tgccagggcgaagtctattcccaaccggcaagcttgccgctgtatcccaaatcgccgtattcacgccgcctgttc

SEQ ID NO: 418694 - DNA, 75 bp, synthetic construct
  source 1..75: mol_type = other DNA
aggtctttacctgggcgtggcgtttcaaagagtgtttgttcgataccgaactgaaagcagcacaggattacgaca

SEQ ID NO: 418695 - DNA, 75 bp, synthetic construct
  source 1..75: mol_type = other DNA
gcccgaagtttgctgatacgggtaaagcctacctggttggcctggccgccactgatgatccagccagtctgggta

SEQ ID NO: 418696 - DNA, 75 bp, synthetic construct
  source 1..75: mol_type = other DNA
cgacggacgcgaaatccagcgtgaatggttggaacagatggcagccagctacaacccggcggtgtataccgcgct

SEQ ID NO: 418697 - DNA, 75 bp, synthetic construct
  source 1..75: mol_type = other DNA
ctgagccgtgaagacagccgcaaggattaccgccagcgcgcgccgggcggtgacgcactggcaggcaccctgacc

SEQ ID NO: 418698 - DNA, 75 bp, synthetic construct
  source 1..75: mol_type = other DNA
gcgacgctgatccaactggcatggtgcagtgctctgcatcttgagccctggcagggtaatggactggttcatttt

SEQ ID NO: 418699 - DNA, 75 bp, synthetic construct
  source 1..75: mol_type = other DNA
gtgccgccagcacggggacagagcgaccttcagcaggagactggacagaaacaagtaatggggtctacgtggcga

SEQ ID NO: 418700 - DNA, 75 bp, synthetic construct
  source 1..75: mol_type = other DNA
tgatacgccgacaaatatgttgttcactcagggggcaatacatcgtaccgacgatcgtactcagtcaaatattgg

SEQ ID NO: 418701 - DNA, 75 bp, synthetic construct
  source 1..75: mol_type = other DNA
gtaacaaccaatgcggcaggtaaggcggatattgagttgatatcaaccgttgcaggggaacttgaaatcgcggcc

SEQ ID NO: 418702 - DNA, 75 bp, synthetic construct
  source 1..75: mol_type = other DNA
gttcggcaagatgtatggcaggaaacattatcacgtgatattactgctcaacaaagatacctggtgctcgatcgg

SEQ ID NO: 418703 - DNA, 75 bp, synthetic construct
  source 1..75: mol_type = other DNA
aagcagcatgacggttcaggtcaacgtaattatggttgcagtcgtggagcggggcgtctactggatggcaggtga

SEQ ID NO: 418704 - DNA, 75 bp, synthetic construct
  source 1..75: mol_type = other DNA
ctgatatggaatctctggtggcagatggggaatcgaccgcaacgctgaaggttaccctgatgtcggcaaacaacc

SEQ ID NO: 418705 - DNA, 75 bp, synthetic construct
  source 1..75: mol_type = other DNA
agctcagtcccagaaagcgatctattcaaggcactggccgatactctgaagctatggaactcgccgccagattgg

SEQ ID NO: 418706 - DNA, 75 bp, synthetic construct
  source 1..75: mol_type = other DNA
atttgcccgctcgtgcggatcaggtggcggcgctcattaaattcgtgaagtatgaagcagttaaactgcttggtg

SEQ ID NO: 418707 - DNA, 75 bp, synthetic construct
  source 1..75: mol_type = other DNA
tgagacgaagcagcatgacggttcaggtcaacgtaattatggttgcagtcgtggaccggggcgtctactggatgg

SEQ ID NO: 418708 - DNA, 75 bp, synthetic construct
  source 1..75: mol_type = other DNA
aagcagagttgcaggtggtttcagtgactgccggaacgtatgagatcacggcatcggcagggaatagccagcctt

SEQ ID NO: 418709 - DNA, 75 bp, synthetic construct
  source 1..75: mol_type = other DNA
tcggcaagtttgacggggaccgcctctgaaggggcgaccgtttccagttggaccgaaaaaggtgactgttcctat

SEQ ID NO: 418710 - DNA, 75 bp, synthetic construct
  source 1..75: mol_type = other DNA
ggcttaccagcggaaaaaaagatgtgccaatcagcgtgtgcatgcaaccagcctgcgttatttctggtgtcggga

SEQ ID NO: 418711 - DNA, 75 bp, synthetic construct
  source 1..75: mol_type = other DNA
agactgccctgcaggcacagcagaccgcctttaacgaactggtggacaagttgagccaagaagacagccgccagg

SEQ ID NO: 418712 - DNA, 75 bp, synthetic construct
  source 1..75: mol_type = other DNA
cactgtataaacgtcataaatggatgttaagtcttggtatcgtgctggcaattgtcacgctgctcgccagtatcg

SEQ ID NO: 418713 - DNA, 75 bp, synthetic construct
  source 1..75: mol_type = other DNA
attgttaaaggtattgatgttggatcaactggagattattttttatctttatgtcgcatcgaacctgaaaacaat

SEQ ID NO: 418714 - DNA, 75 bp, synthetic construct
  source 1..75: mol_type = other DNA
gtgggttcgacggcggtaaaatcccccgagatagtcaagagctggtttgcccgttttggtgccgatgcgctggta

SEQ ID NO: 418715 - DNA, 75 bp, synthetic construct
  source 1..75: mol_type = other DNA
tatttgagactgattccggttttttgcgcagcgaactggcgattaaaacctggatccaactggcgaaggaagcgg

SEQ ID NO: 418716 - DNA, 75 bp, synthetic construct
  source 1..75: mol_type = other DNA
taccgggcccggttctacagcgcaggagagttgttacaggaactacgtaaagccagagctcagttgaaactgaat

SEQ ID NO: 418717 - DNA, 75 bp, synthetic construct
  source 1..75: mol_type = other DNA
cgggaaaaagcaccgggcaaaatctgactcatcttcgcgggcagtatcgccaacaactgacggcctggctgcaag

SEQ ID NO: 418718 - DNA, 75 bp, synthetic construct
  source 1..75: mol_type = other DNA
tggcgtgcgcggcgtaattgtcggtcgcgcattactggaaggtaaattcaccgtgaaggaggccatcgcatgctg

SEQ ID NO: 418719 - DNA, 75 bp, synthetic construct
  source 1..75: mol_type = other DNA
cctatctgcccgtcggcctgaaacatgtgctgtgtaccgatatctcgcgcgacggcacgctggcaggttctaacg

SEQ ID NO: 418720 - DNA, 75 bp, synthetic construct
  source 1..75: mol_type = other DNA
gacggtacgctggcaggctctaacgtctctttatatgaagaagtgtgcgccagatatccgcaagtagcatttcag

SEQ ID NO: 418721 - DNA, 75 bp, synthetic construct
  source 1..75: mol_type = other DNA
atgattattccggcattagatttaatcgacggcacggtggtgcgtcttcatcagggcaattacgctaagcaacgt

SEQ ID NO: 418722 - DNA, 75 bp, synthetic construct
  source 1..75: mol_type = other DNA
gtgcaggttggcggcggcgtgcgtagcgaagaagacgtggcagcattactggacgcaggcgttgcccgcgtggtc

SEQ ID NO: 418723 - DNA, 75 bp, synthetic construct
  source 1..75: mol_type = other DNA
aacaaggcgcgaagcaagtcgcggtgagcggctggcaggaaaactccggcgtcacgctggaagaactggttgaaa

SEQ ID NO: 418724 - DNA, 75 bp, synthetic construct
  source 1..75: mol_type = other DNA
tttcctgccgaaaatgacgctctgaagattggtaaacataacggtggtcaggtgattcattccgcggatgaacga

SEQ ID NO: 418725 - DNA, 75 bp, synthetic construct
  source 1..75: mol_type = other DNA
cgcctttaacgaactggtgaataagctgagtcatgaagacagtcgccaggactaccgccagcgtgtaacaggcgg

SEQ ID NO: 418726 - DNA, 75 bp, synthetic construct
  source 1..75: mol_type = other DNA
caggaagaacgcctgtctgagctggagactgctctgcaggagcagcaaaccgcctttaacgaactggtggataag

SEQ ID NO: 418727 - DNA, 75 bp, synthetic construct
  source 1..75: mol_type = other DNA
ccgacgttgagccaacggagtccctggtggaactggtgaaaaaaggccagaaattattcacctctatggaagtca

SEQ ID NO: 418728 - DNA, 75 bp, synthetic construct
  source 1..75: mol_type = other DNA
gcccgaagtttgctgatacgggcaaagcctacttggtcggcctggctgccactgatgatcccgccagtctgggta

SEQ ID NO: 418729 - DNA, 75 bp, synthetic construct
  source 1..75: mol_type = other DNA
caggaagaacgcctgtctgaactggagactgctctgcaggagcagcaaaccgcctttaacgaactggtgaataag

SEQ ID NO: 418730 - DNA, 75 bp, synthetic construct
  source 1..75: mol_type = other DNA
gtccgatgacgccaggttctctgatgtgcataaggccgtggaactggtcgccactgagcagcagaacctgagtgc

SEQ ID NO: 418731 - DNA, 75 bp, synthetic construct
  source 1..75: mol_type = other DNA
tgtatgtgctgattttgaagctgaactggttgaaatggatggcgaaccagatcacgtccatttgttaattaacta

SEQ ID NO: 418732 - DNA, 75 bp, synthetic construct
  source 1..75: mol_type = other DNA
ttcaccggctctaccactatcgcagcgacatatacactcacggcgaaagtggaacaggccaacggtcaggtatcg

SEQ ID NO: 418733 - DNA, 75 bp, synthetic construct
  source 1..75: mol_type = other DNA
caaaagatgctaatgacaaccctgtaactggtctcaatccggatgcaccgtcattatcgggcgcagctgctgtag

SEQ ID NO: 418734 - DNA, 75 bp, synthetic construct
  source 1..75: mol_type = other DNA
actgatgacccagccagtctgggtacggaaatgctgacattcagcgccagcgcagcccataacccgctggcaaac

SEQ ID NO: 418735 - DNA, 75 bp, synthetic construct
  source 1..75: mol_type = other DNA
aggtattcaaggcagggttaagacgtaagatgcgaaatgcagctatggacagaaactatctggcgtcagtccttg

SEQ ID NO: 418736 - DNA, 75 bp, synthetic construct
  source 1..75: mol_type = other DNA
cgcaagcagaatcccgccaatctttttaccgcagcagaggaaacgattatcgaactggaagaaatccaggatgac

SEQ ID NO: 418737 - DNA, 75 bp, synthetic construct
  source 1..75: mol_type = other DNA
ggatgaagaactaccagctgttactgccctggctgtttcccacaaaaccagcctgctcgatccgctggaaattcg

SEQ ID NO: 418738 - DNA, 75 bp, synthetic construct
  source 1..75: mol_type = other DNA
ccggtaacgcacgtttcacgcgatgaactccaggcattacacattgctcgggatgaagaactaccagctgttact

SEQ ID NO: 418739 - DNA, 75 bp, synthetic construct
  source 1..75: mol_type = other DNA
aggaaaacaggatgatgaagaaaaaccgcaaccatcttgcgcaatggcagatgaacaggcaacggctgaaacagt

SEQ ID NO: 418740 - DNA, 75 bp, synthetic construct
  source 1..75: mol_type = other DNA
gaaaatcagaatgaatatcaggaaaaagatccggaggaaatggaaggcgctgaacatccgcacaatgagaatgct

SEQ ID NO: 418741 - DNA, 75 bp, synthetic construct
  source 1..75: mol_type = other DNA
aatcatgtggccgtcatatttcgagcctggccgctatgaaaacctcccgaacgaggtttatcactccgccaacgg

SEQ ID NO: 418742 - DNA, 75 bp, synthetic construct
  source 1..75: mol_type = other DNA
acaaaagagcaattaaccgaaatcgcacggaaaattcgcccggaactggtgacactggaagactggcaaaaacgc

SEQ ID NO: 418743 - DNA, 75 bp, synthetic construct
  source 1..75: mol_type = other DNA
tcgtgtttcacacatcactcgcacggcttccggtgctaatgctggcggcggaaacctcaccgatcgcggcgaagg

SEQ ID NO: 418744 - DNA, 75 bp, synthetic construct
  source 1..75: mol_type = other DNA
taacggcgaagacatgacggagattgaggagagtatgcttctgccggtttcaggtcaggaagtgcccattcgctg

SEQ ID NO: 418745 - DNA, 75 bp, synthetic construct
  source 1..75: mol_type = other DNA
ccaccaaatttattgccgtcgggcagaaggcgctgtcttcgctgaatatcattcatatcgccgctccgcatcttg

SEQ ID NO: 418746 - DNA, 75 bp, synthetic construct
  source 1..75: mol_type = other DNA
gagccagaaacgaaacaacctgaaccagtagtgcaacaggaaccggaaaagatctgcaccgcctgcggtcagagc

SEQ ID NO: 418747 - DNA, 75 bp, synthetic construct
  source 1..75: mol_type = other DNA
acgctggcggcggaaatattaccgatcgtggtgaaggattcaaacatgataagacatcactcgcacgagatgtag

SEQ ID NO: 418748 - DNA, 75 bp, synthetic construct
  source 1..75: mol_type = other DNA
aactgacgggagggcaggaagaaaacacactggcagacgctcacggggattgccaggattgcgaagtttctgtat

SEQ ID NO: 418749 - DNA, 75 bp, synthetic construct
  source 1..75: mol_type = other DNA
ccggtaacgcacgtttcacgcgacggactacaggcattacacattgcacgagctgaagaactaccagctgttact

SEQ ID NO: 418750 - DNA, 75 bp, synthetic construct
  source 1..75: mol_type = other DNA
ctgtcgttaatgaccttccccctgaaggtgagatcgattttacgtggtgtgaacgctatcaactcggcaaggact

SEQ ID NO: 418751 - DNA, 75 bp, synthetic construct
  source 1..75: mol_type = other DNA
gaaatatcagaaactgcgggcagaactccatgaagcccggaaaaccattccgcccaaaaatcctgtcgatgccga

SEQ ID NO: 418752 - DNA, 75 bp, synthetic construct
  source 1..75: mol_type = other DNA
acgattgcagtgatgaaactggtgaagcgtcagctcatgtagcaactgaaatcatgtggccatcatatttcgagc

SEQ ID NO: 418753 - DNA, 75 bp, synthetic construct
  source 1..75: mol_type = other DNA
gctaaggaaaatgatccggaggaaatggaaggcgctgaacatccgcacaaggagaacgctggcaaccatccgcat

SEQ ID NO: 418754 - DNA, 75 bp, synthetic construct
  source 1..75: mol_type = other DNA
gaaagcggaacaaaacagccgaaatgcgcaacaaaacgagccagaaacgaaacaatccgagccaataacgcaaca

SEQ ID NO: 418755 - DNA, 75 bp, synthetic construct
  source 1..75: mol_type = other DNA
tggattattcccgcgccaccgtggttgcgtccgtgaaagaagcaccaattgggatcgaggtcatccccgcgcacg

SEQ ID NO: 418756 - DNA, 75 bp, synthetic construct
  source 1..75: mol_type = other DNA
acctgaatttaaccgccgtacaaacgccggaaaagaagaagagaaagcgtttctgatggaatgcgcaagcacagg

SEQ ID NO: 418757 - DNA, 75 bp, synthetic construct
  source 1..75: mol_type = other DNA
agcacttcgcgcaatcccgggtatcctggattattcccgcgccgctatttttgcacttatccgaagcgcacaccc

SEQ ID NO: 418758 - DNA, 75 bp, synthetic construct
  source 1..75: mol_type = other DNA
attccgggtattgcaatgatgattgcaaacaaacttgaaaattttggggtgacggatgatgagtacatgcccaat

SEQ ID NO: 418759 - DNA, 75 bp, synthetic construct
  source 1..75: mol_type = other DNA
gggcgacgcaacataccaggaaacattcgatgaagagaatcaggttgaagctaaggaaaatgatccggaggaaat

SEQ ID NO: 418760 - DNA, 75 bp, synthetic construct
  source 1..75: mol_type = other DNA
gaatacaacgcaagcctccctcctctgttgaaaaccagtggagcacgggagcagcttctggatcaaattgaaact

SEQ ID NO: 418761 - DNA, 75 bp, synthetic construct
  source 1..75: mol_type = other DNA
gcccggaaaaccattccgcccaaaaatcctgtcgatgccgacaaattgctggctgcctctcgcggagaatttgtt

SEQ ID NO: 418762 - DNA, 75 bp, synthetic construct
  source 1..75: mol_type = other DNA
cccgccgcagggagttaccgcctgactaccaaatttattgccgtcgggcagaaggcgctgtcttcgctgaatatc

SEQ ID NO: 418763 - DNA, 75 bp, synthetic construct
  source 1..75: mol_type = other DNA
aatcacaatgtgaaatcatcacccccaaaaaacctggcgaagcgattcttcatgcttttaatgccacctaccagc

SEQ ID NO: 418764 - DNA, 75 bp, synthetic construct
  source 1..75: mol_type = other DNA
ggggaaagccatagacttcgatgccagaactgctatcccattcgaaggtgagcgccataatgcacttgatgacgc

SEQ ID NO: 418765 - DNA, 75 bp, synthetic construct
  source 1..75: mol_type = other DNA
gctggcggagtcattgatcgtgacgtcattaaatggtggctgaagcaatcacgtgaagcgcagtctgccattatg

SEQ ID NO: 418766 - DNA, 75 bp, synthetic construct
  source 1..75: mol_type = other DNA
gaagagtcgcgccgctgggcggagatcatcgaaatgtcgctcaaccttgaacaggcctccgatatcgtcgagcgc

SEQ ID NO: 418767 - DNA, 75 bp, synthetic construct
  source 1..75: mol_type = other DNA
tgggcggagatcatcgaaatgtcgcttaaccttgagcaggcctccgatattgtcgaacgtatgggcagtgaaatt

SEQ ID NO: 418768 - DNA, 75 bp, synthetic construct
  source 1..75: mol_type = other DNA
atggccgagtttgcacgttgccattatggttatatacaaatccctcccgtaacaactttccgcgccgacggacca

SEQ ID NO: 418769 - DNA, 75 bp, synthetic construct
  source 1..75: mol_type = other DNA
gattcccctggtgccgtcgagatggcaatcaaagtgcgggctgcactggagcaggaaggtatccaaattgcgcct

SEQ ID NO: 418770 - DNA, 75 bp, synthetic construct
  source 1..75: mol_type = other DNA
gcagcggttacctggcgggcatgaagctgggcgggacgccgctggtcgagtatacgcgggacaggctgcaccgtg

SEQ ID NO: 418771 - DNA, 75 bp, synthetic construct
  source 1..75: mol_type = other DNA
gcgcgccatcagggcgatgtcacccatttcctgccggagaatgtccatcaggcgctgatggcgaagttagcgtag

SEQ ID NO: 418772 - DNA, 75 bp, synthetic construct
  source 1..75: mol_type = other DNA
tgatgtaagaacgattgttgccctggggctggtgatggatttcgatgctcgaagtgtcatcacatttgagggtga

SEQ ID NO: 418773 - DNA, 75 bp, synthetic construct
  source 1..75: mol_type = other DNA
tcaggctgaagctcaggaagaaatggaaggctctggcggcgatcactaccacaccacagataatgaaagtggcga

SEQ ID NO: 418774 - DNA, 75 bp, synthetic construct
  source 1..75: mol_type = other DNA
cagcaaggaaactctcacagctgcccggcatacgccggaaaaagatatcctggaaaaaattaaccgcgaggtggt

SEQ ID NO: 418775 - DNA, 75 bp, synthetic construct
  source 1..75: mol_type = other DNA
ctgccgtcgccctgctggtctgggggacacatattgttcgtaccggcgtaatgcgcgtcttcggtgcgcgcctgc

SEQ ID NO: 418776 - DNA, 75 bp, synthetic construct
  source 1..75: mol_type = other DNA
aactattccgaacgaggaaagtgatgcactactgcgtgggcggatcattcacagctatgttctggaaacggataa

SEQ ID NO: 418777 - DNA, 75 bp, synthetic construct
  source 1..75: mol_type = other DNA
tctgaaatcagctatttcgggtttgatgaagaaaccgggctggaaatcagggtccgtcctgatatcgaaatccgg

SEQ ID NO: 418778 - DNA, 75 bp, synthetic construct
  source 1..75: mol_type = other DNA
agcaagaagaaaacgccgggaaaacgtttatcagtccggatatgtatgaacaggcaaaaaatattcacgctgcac

SEQ ID NO: 418779 - DNA, 75 bp, synthetic construct
  source 1..75: mol_type = other DNA
ttatcacctcagcgccgcaatgtattgcgatgtggcaaacctggaaaaatttttctggatcttcgtcaacaaaga

SEQ ID NO: 418780 - DNA, 75 bp, synthetic construct
  source 1..75: mol_type = other DNA
aagcccggaaaaacattccgcccaaaaatcctgtcgatgcagacaaattactggctgcctatcgcggagaatttg

SEQ ID NO: 418781 - DNA, 75 bp, synthetic construct
  source 1..75: mol_type = other DNA
ccacccgtgaacaacgcgaacacatcactgctcttgagatggatcaggaaaacagctatgtccagaatctgctgt

SEQ ID NO: 418782 - DNA, 75 bp, synthetic construct
  source 1..75: mol_type = other DNA
tcgttcgttgcctggccatgctgccgtttgttgacccgatggcgcgattctgtaaaaccattattcgcgatgaac

SEQ ID NO: 418783 - DNA, 75 bp, synthetic construct
  source 1..75: mol_type = other DNA
cgctctgtctggtgattggcgctaacctcggctccggtctgctggcaatgctcaacaacagcgccgccaatgctg

SEQ ID NO: 418784 - DNA, 75 bp, synthetic construct
  source 1..75: mol_type = other DNA
cgcgccgggcaactggggcgcgtcggtatcggtcttgggctgattttgctggcactggagttgattgtgcaggca

SEQ ID NO: 418785 - DNA, 75 bp, synthetic construct
  source 1..75: mol_type = other DNA
ccagcaccgatgacaccagagcagatgaaagagtggatcgaaagctacaacagcactcttatacagccactgtcg

SEQ ID NO: 418786 - DNA, 75 bp, synthetic construct
  source 1..75: mol_type = other DNA
taatggcgaagacatgacggagattgaggagaatatgctactcccgatttctggccaggagctgcccattcgctg

SEQ ID NO: 418787 - DNA, 75 bp, synthetic construct
  source 1..75: mol_type = other DNA
tcagctactccagccttgccgcggtactgctgaccgcgactttgaccgccgcaggcattatctctttcccagtgg

SEQ ID NO: 418788 - DNA, 75 bp, synthetic construct
  source 1..75: mol_type = other DNA
ttacgcggtaattttgaccatcactttttctgcaatgctaagagagacgattgaaaaaaaccaagaggttgattt

SEQ ID NO: 418789 - DNA, 75 bp, synthetic construct
  source 1..75: mol_type = other DNA
ataatctggaaatatttgattcaatatataaaccaggaatgaagccgcaagactggatcaatacatatctttccc

SEQ ID NO: 418790 - DNA, 75 bp, synthetic construct
  source 1..75: mol_type = other DNA
cattaaaaaatctaccgaaagaattcgtcggatttcttgagatattttcaggttcaattaaagatgaccaaattt

SEQ ID NO: 418791 - DNA, 75 bp, synthetic construct
  source 1..75: mol_type = other DNA
tgtcggtactgaccttcatcatccgccaagcgcgggagtgtcaggaaaagatggaacaggcggagatactgtatc

SEQ ID NO: 418792 - DNA, 75 bp, synthetic construct
  source 1..75: mol_type = other DNA
taaatatgaacatacctgggcgtagcgctcttcttttagggaaaacaggagaaccgccgaactatctctatttgt

SEQ ID NO: 418793 - DNA, 75 bp, synthetic construct
  source 1..75: mol_type = other DNA
tggtgatttgatcgtttctcagcagtctgctatgcaagttttgccaatggtacgaattatacagtcaaataacca

SEQ ID NO: 418794 - DNA, 75 bp, synthetic construct
  source 1..75: mol_type = other DNA
ccgaaaagacgctcttgcgaatgccttcccggctattaactttgacaatggacgttccgattcacctgatttttg

SEQ ID NO: 418795 - DNA, 75 bp, synthetic construct
  source 1..75: mol_type = other DNA
tggcagagaaattttccagcccgttgctgacaataaatggtgatgggcatacattagctcttaccggagtcaatt

SEQ ID NO: 418796 - DNA, 75 bp, synthetic construct
  source 1..75: mol_type = other DNA
ctggcgctgccggaagaagagaaagcgcgcctgaaagcgatgacccctgctaactacattggtcgcgccatcaca

SEQ ID NO: 418797 - DNA, 75 bp, synthetic construct
  source 1..75: mol_type = other DNA
actccgaaggtaacctggggctttccaacgcggtgttgcagcacctggcaagcaaactgccggtttcccgctggc

SEQ ID NO: 418798 - DNA, 75 bp, synthetic construct
  source 1..75: mol_type = other DNA
ttgctgccgacgcaatcggttaccttgatgcaattgtcgccagtttcagcgaagaagatgccgcacgcatcaaaa

SEQ ID NO: 418799 - DNA, 75 bp, synthetic construct
  source 1..75: mol_type = other DNA
tttctgactttgagttaaagtcgatcttagccttaactgaacgttttacgtggcatatcgccagaccaattattg

SEQ ID NO: 418800 - DNA, 75 bp, synthetic construct
  source 1..75: mol_type = other DNA
tatgcgctgttgaaaggcggtctggcgctctctaacgaagagctggcgcaaaccttcaccgaatggaacgaaggt

SEQ ID NO: 418801 - DNA, 75 bp, synthetic construct
  source 1..75: mol_type = other DNA
tgatatgcagctgattgcagaagcgtactctctgttaaaaggtggcctgaacctgtctaatgacgagctggcgaa

SEQ ID NO: 418802 - DNA, 75 bp, synthetic construct
  source 1..75: mol_type = other DNA
taagggcgatatcattattgatggtggtaacactttcttccaggacaccatccgtcgcaatcgtgagctttctgc

SEQ ID NO: 418803 - DNA, 75 bp, synthetic construct
  source 1..75: mol_type = other DNA
aaagtgctgtctggtccgcaggctaaactggctggtgataaagcagagttcgttgagaaagtccgtcgcgcgctg

SEQ ID NO: 418804 - DNA, 75 bp, synthetic construct
  source 1..75: mol_type = other DNA
gccgtgtgtgacttatatcggtgctgacggtgcaggccattatgtgaagatggttcataatggtatcgagtatgg

SEQ ID NO: 418805 - DNA, 75 bp, synthetic construct
  source 1..75: mol_type = other DNA
tcaccaaagatatcttcaccaaaaaagatgaagacggtaactacctggttgatgtgatcctggatgaagcggcta

SEQ ID NO: 418806 - DNA, 75 bp, synthetic construct
  source 1..75: mol_type = other DNA
aattgtacttacaaaaaatcacctcaagaacactcactttcatttataaaacaattaccaaatacggtgaactta

SEQ ID NO: 418807 - DNA, 75 bp, synthetic construct
  source 1..75: mol_type = other DNA
gtttaagttataaggtgttcgatttgtcatttttaacttatgagggaaccactcataaggaaaagaaaaatgtgg

SEQ ID NO: 418808 - DNA, 75 bp, synthetic construct
  source 1..75: mol_type = other DNA
ttttgcgaaaacgaattttattcgtgagttatataattgcgcaggttatcaatttaattcatcggaaaaggattt

SEQ ID NO: 418809 - DNA, 75 bp, synthetic construct
  source 1..75: mol_type = other DNA
ggcaccggcggtattgctgcaggtactgcggtgaagttcgctggtgatgacaatcagtatctggttgttgcggct

SEQ ID NO: 418810 - DNA, 75 bp, synthetic construct
  source 1..75: mol_type = other DNA
aaaaccatcctggttggcagcgtgacgggtttttttctctggcatcactggccgcagatgatgcgcttaatggcc

SEQ ID NO: 418811 - DNA, 75 bp, synthetic construct
  source 1..75: mol_type = other DNA
cgcgctgctggtggtgcttggtgtcattccaatggtgggatttgacgtctttttccaaatcttcagccacctgaa

SEQ ID NO: 418812 - DNA, 75 bp, synthetic construct
  source 1..75: mol_type = other DNA
atcgcggtaattacctggaaatatacgatcatgaatctcttaacgatatcaacgatgcgttatatgaatactgtg

SEQ ID NO: 418813 - DNA, 75 bp, synthetic construct
  source 1..75: mol_type = other DNA
agaacttttgtctttttatggtattttgctatgccctctaattgcgcaaaatagatatatttcggttaactggaa

SEQ ID NO: 418814 - DNA, 75 bp, synthetic construct
  source 1..75: mol_type = other DNA
ccctgtaagtaccacagggcgacgccctgctgcaggccgttataatgccctggctgttttgcgggtggaatacca

SEQ ID NO: 418815 - DNA, 75 bp, synthetic construct
  source 1..75: mol_type = other DNA
acttggtcgacaggaatatcgccggacgctacgacagataaacgaagcgctggagacaaacaactggccagcacc

SEQ ID NO: 418816 - DNA, 75 bp, synthetic construct
  source 1..75: mol_type = other DNA
gtcattcgccatattggatctcatgaggctgtatatgatattgaacgcatcagacaagcactgggagataaacaa

SEQ ID NO: 418817 - DNA, 75 bp, synthetic construct
  source 1..75: mol_type = other DNA
gtgtcggtcagtcctttcctgccataaactgccagcaacccaatcaagaaagatcggtgaatgtaagcgaaaagc

SEQ ID NO: 418818 - DNA, 75 bp, synthetic construct
  source 1..75: mol_type = other DNA
tgcacttaatttttccatagcatcggaaaaagtcagtgatgctctgggcgtaatattatgtgttgatcagggtga

SEQ ID NO: 418819 - DNA, 75 bp, synthetic construct
  source 1..75: mol_type = other DNA
tggaaggcgctgaacatccgcacaaggagaacgctggcagcaatccgcattgcgattgcagtgatgaagctggtg

SEQ ID NO: 418820 - DNA, 75 bp, synthetic construct
  source 1..75: mol_type = other DNA
actgacagagttttccctaatccaggcaattcaagcctggggctgatgactgcttttttcgaagcatacctggac

SEQ ID NO: 418821 - DNA, 75 bp, synthetic construct
  source 1..75: mol_type = other DNA
cacccggatcgcaaatctgaaatcagctatttcgggtttgatgaagaaaccgggctggaaatcagggtccgtcct

SEQ ID NO: 418822 - DNA, 75 bp, synthetic construct
  source 1..75: mol_type = other DNA
tcctttacggttcgcttccggtggaatttcggcgtattcctgagggggaaaaacatacagcatcagcaatgaaag

SEQ ID NO: 418823 - DNA, 75 bp, synthetic construct
  source 1..75: mol_type = other DNA
ggcacaaaagagcaattaaccgaaatcgcgcggaaaattcgcccggaactggtgacgctggaggactggcaaaaa

SEQ ID NO: 418824 - DNA, 75 bp, synthetic construct
  source 1..75: mol_type = other DNA
tcgcctgcaccgtgaaattattgagcgtgattatcacctcagcgccgcaatgtattgcgatgtggcaaacctgga

SEQ ID NO: 418825 - DNA, 75 bp, synthetic construct
  source 1..75: mol_type = other DNA
taatttatgtgtggatgaggctgttgttcgtcacctcctgtttccggggaaatctgaagatataacgtgtcaggg

SEQ ID NO: 418826 - DNA, 75 bp, synthetic construct
  source 1..75: mol_type = other DNA
cttccgcgtgaaatcgagttgcgccagaaacaatacgagtactatcgtgatttactgttcagtttcccgaaacct

SEQ ID NO: 418827 - DNA, 75 bp, synthetic construct
  source 1..75: mol_type = other DNA
gtatcagcaaaacgctgcgtggtggtgcgaagtttctatatcatggcattcagcgccagcaacgttatgtggcgg

SEQ ID NO: 418828 - DNA, 75 bp, synthetic construct
  source 1..75: mol_type = other DNA
tggtttgcggaagagacggctgccgtcgagcgtgctgttgatgccctgaccaaacggctggaaaaactggaggct

SEQ ID NO: 418829 - DNA, 75 bp, synthetic construct
  source 1..75: mol_type = other DNA
ttccactgccgggtacttgaaccggaagaattcagtaaccgctttatcgtagcacctgaatttaaccgccgtaca

SEQ ID NO: 418830 - DNA, 75 bp, synthetic construct
  source 1..75: mol_type = other DNA
aggaaaaacggttatcactgcggaagaaggccggaaaattgaactcatgtatcaaagcgttatggctttgccgct

SEQ ID NO: 418831 - DNA, 75 bp, synthetic construct
  source 1..75: mol_type = other DNA
gatatgaatcaacctgagccagtagtgcaacaggaaccggaaatagcctgcaatgcctgcggccagactggcggg

SEQ ID NO: 418832 - DNA, 75 bp, synthetic construct
  source 1..75: mol_type = other DNA
gtgggtacgacctatcgtctgaccgagcacttccacacctggaccaagcacgcgttgctcaacgcaattgctcag

SEQ ID NO: 418833 - DNA, 75 bp, synthetic construct
  source 1..75: mol_type = other DNA
acctgaacgatataaattagtcataataggtgaaggtgaagccagaaatgaagtcgagcgtacgattttaaatta

SEQ ID NO: 418834 - DNA, 75 bp, synthetic construct
  source 1..75: mol_type = other DNA
tttgtagcccacaaatatgatccaacaaccccatggattaatgcacgtaaaatggcagatagattttcagctccg

SEQ ID NO: 418835 - DNA, 75 bp, synthetic construct
  source 1..75: mol_type = other DNA
aggcttttcgacctcgctgattttggtatttagcgaacgtcaggtcgatgttctgggagaatgggcgggtgatgc

SEQ ID NO: 418836 - DNA, 75 bp, synthetic construct
  source 1..75: mol_type = other DNA
caaagaaacaactttgtttatggcaggcgcaaagagagcgcatgaatgagcgcgaatttctttcctgcccatccg

SEQ ID NO: 418837 - DNA, 75 bp, synthetic construct
  source 1..75: mol_type = other DNA
cggtggcggtggtaacgcgccgtctgaaaccgctgaatgtaaacggtcagcaggttgaaacggtgggtattccaa

SEQ ID NO: 418838 - DNA, 75 bp, synthetic construct
  source 1..75: mol_type = other DNA
gcattgtgtgaactggaaaatctggagcaactgcttgaggccagtccggttttaccggccaaaattcaccgtcct

SEQ ID NO: 418839 - DNA, 75 bp, synthetic construct
  source 1..75: mol_type = other DNA
cagggtgctgtgtgaggccgttgctgcgctggcggaggtgtgccggctgtataccatcactgcggtcagtgaaga

SEQ ID NO: 418840 - DNA, 75 bp, synthetic construct
  source 1..75: mol_type = other DNA
cgttctgtcaacgcagatgaaaccgggatactggtcaagaacgtcttcaggatggaagccggtcagcagggaggg

SEQ ID NO: 418841 - DNA, 75 bp, synthetic construct
  source 1..75: mol_type = other DNA
taagtggttccggccgactcaacgaacaaacgatgccgctcgctgaagtggatttaacaatcaattctgacgtga

SEQ ID NO: 418842 - DNA, 75 bp, synthetic construct
  source 1..75: mol_type = other DNA
tatcttcatagagggagcgatgtacatcagcgggccagggcggtgctggagcattatcattttgttcagacgttg

SEQ ID NO: 418843 - DNA, 75 bp, synthetic construct
  source 1..75: mol_type = other DNA
tcattaccagtttgtccggacactgccggaaccggtaaggcgttatctgcagggttaccgggaaacaccactggt

SEQ ID NO: 418844 - DNA, 75 bp, synthetic construct
  source 1..75: mol_type = other DNA
ggatactggtcgagaacctcttcaggatggaaaccggtcagccgggagggcagaaatgatgtggcttactgtgag

SEQ ID NO: 418845 - DNA, 75 bp, synthetic construct
  source 1..75: mol_type = other DNA
ctcgatgatgcggcaattgccggactggaatataccttgccaaaaaactggcaacagttgtggatggaaacgaca

SEQ ID NO: 418846 - DNA, 75 bp, synthetic construct
  source 1..75: mol_type = other DNA
tggtagctggcaggtagaaaatctgcgcctggccgatatccgtctgcaaagcgaaaaatctctgaccgatttctt

SEQ ID NO: 418847 - DNA, 75 bp, synthetic construct
  source 1..75: mol_type = other DNA
gatggaaaccggtcagccgggagggcagaaatgatgtggcttactgtgagtttgtcactaaatatgcaaaatctt

SEQ ID NO: 418848 - DNA, 75 bp, synthetic construct
  source 1..75: mol_type = other DNA
tggtgcatatgatggcgcagcagtgcgatctggaagtgggtgattttgtctggaccggtggcgacacgcacctgt

SEQ ID NO: 418849 - DNA, 75 bp, synthetic construct
  source 1..75: mol_type = other DNA
tatccgatatcagtcgtttcggtgaagatgtgaagctgaaagttctgtataaaacttccccgcttgccggagcca

SEQ ID NO: 418850 - DNA, 75 bp, synthetic construct
  source 1..75: mol_type = other DNA
agggtatcatctgaagtatttttattcacgggcgcagtaccgcaattcatgttatcacgtagataatattatgca

SEQ ID NO: 418851 - DNA, 75 bp, synthetic construct
  source 1..75: mol_type = other DNA
atgaggtcattacaatggcggtcccgtgcggaggcattggtgaccgtgacggctggcggttgctgaaagaccacg

SEQ ID NO: 418852 - DNA, 75 bp, synthetic construct
  source 1..75: mol_type = other DNA
ggcaaaggatacggtaagggaatgccgcgaacggtggcgcaacctgataccggatagctacggcgagcaggtcca

SEQ ID NO: 418853 - DNA, 75 bp, synthetic construct
  source 1..75: mol_type = other DNA
taaaacactggcgcacggtggcaatcagcaccggagaaatggacgttgagacattcctcaaaacggaggggataa

SEQ ID NO: 418854 - DNA, 75 bp, synthetic construct
  source 1..75: mol_type = other DNA
atggcaggaaaaacgatgataccgttactcgcctttgccgcgtggagtggcactggaaaaactacgctgctgaaa

SEQ ID NO: 418855 - DNA, 75 bp, synthetic construct
  source 1..75: mol_type = other DNA
gcgttactggatattaatgatgttgaggggctggctgattttgtggtggagtggatgcaaaagcagaacggataa

SEQ ID NO: 418856 - DNA, 75 bp, synthetic construct
  source 1..75: mol_type = other DNA
cagcgatgtaccgctaaatattgatgtcgccttactggatattaatgatgttgaggggctgaccgattttgtggt

SEQ ID NO: 418857 - DNA, 75 bp, synthetic construct
  source 1..75: mol_type = other DNA
ttgcttgaatgggcttgtggattatatttctggtaacctcatggaggttgaacaactctatgcagatttgctggc

SEQ ID NO: 418858 - DNA, 75 bp, synthetic construct
  source 1..75: mol_type = other DNA
tgtccgttctggccttctgagattaagtccaggagaagatgatactttggctgcatatttgagcgggcatggggt

SEQ ID NO: 418859 - DNA, 75 bp, synthetic construct
  source 1..75: mol_type = other DNA
gctgatttactggcacagtatgaaaagaaacgcattgcacgttctctggcttatacaccaccaggatccgtggtc

SEQ ID NO: 418860 - DNA, 75 bp, synthetic construct
  source 1..75: mol_type = other DNA
gggcgaggtacttacttttgctcacattgtggcgcaggtacggggctggatctggtgatgaaggtcaggcagtgc

SEQ ID NO: 418861 - DNA, 75 bp, synthetic construct
  source 1..75: mol_type = other DNA
gacgacaacgggcgcggcagctttatctgcaaccagtgcggcgcgggcgatggcttagacctgattaagaaggtg

SEQ ID NO: 418862 - DNA, 75 bp, synthetic construct
  source 1..75: mol_type = other DNA
atgaagtcggacagggcgcagacccgataagcgtttctcagtctgcctatgccctgtttaacggcgtggggaaat

SEQ ID NO: 418863 - DNA, 75 bp, synthetic construct
  source 1..75: mol_type = other DNA
catctcatatcgtgctggagaacgtcacattcggtcgcgatggtcaacccgccactctggtggcgaaaagtgtcg

SEQ ID NO: 418864 - DNA, 75 bp, synthetic construct
  source 1..75: mol_type = other DNA
gccggtgatgggcgttgagttcagcgaagatatgctggatttccccgcgctttttggccgtgaagcgccggtgac

SEQ ID NO: 418865 - DNA, 75 bp, synthetic construct
  source 1..75: mol_type = other DNA
atcacaggtcccattgaaggcactcagctggcataccgcctgacgggggaagtgcaggatgaagattactggcga

SEQ ID NO: 418866 - DNA, 75 bp, synthetic construct
  source 1..75: mol_type = other DNA
ccgggggcggtcgccaatggatacacactaaacttgaacgcatcaccaacaatgccacatttgcggctggtgggc

SEQ ID NO: 418867 - DNA, 75 bp, synthetic construct
  source 1..75: mol_type = other DNA
aaacctgtggtacggggatttattgccgggcagcatgtacaaagtctgtttacaggttccagccagatttgctcc

SEQ ID NO: 418868 - DNA, 75 bp, synthetic construct
  source 1..75: mol_type = other DNA
gcttcgctggtagcaatggcgaaagaacgcccggagcaggactttctcggcattgaagtgcattcaccgggggtc

SEQ ID NO: 418869 - DNA, 75 bp, synthetic construct
  source 1..75: mol_type = other DNA
caaactgcagctggggggcgtattccatatggcgaccgactgggaaccttatgcggaacatatgcttgaagtgat

SEQ ID NO: 418870 - DNA, 75 bp, synthetic construct
  source 1..75: mol_type = other DNA
atgtcaaagcaacagatcggcgtagtcggtatggcagtgatggggcgcaacctggcgctcaacatcgaaagccgt

SEQ ID NO: 418871 - DNA, 75 bp, synthetic construct
  source 1..75: mol_type = other DNA
aaacctgtggtacggggatttattgcagagcggcatgtacgaagtatgtttacagataccagccagatttgttcc

SEQ ID NO: 418872 - DNA, 75 bp, synthetic construct
  source 1..75: mol_type = other DNA
tgaaaatattattcatctttgtttgagggttactaacgagcgtagtgatatactggagaatttatgtaaaagtaa

SEQ ID NO: 418873 - DNA, 75 bp, synthetic construct
  source 1..75: mol_type = other DNA
cgctgaaaggcccatctatcatgcctggcggccagaaagaagcgtacgagcttgttgcgccaatcctgaccaaaa

SEQ ID NO: 418874 - DNA, 75 bp, synthetic construct
  source 1..75: mol_type = other DNA
aaagttctctctggcccgcaagcacagccagcaggcgacaaggctgagttcatcgaaaaagttcgccgtgcgctg

SEQ ID NO: 418875 - DNA, 75 bp, synthetic construct
  source 1..75: mol_type = other DNA
gcctattacgacagctaccgtgctgctgttctgcctgcgaacttgatccaggcgcagcgtgactattttggtgca

SEQ ID NO: 418876 - DNA, 75 bp, synthetic construct
  source 1..75: mol_type = other DNA
tacattgaggatatggcgatgtttttatcgccattaccgaccgtgctggagtggcattgtgtgatgtgcgagagg

SEQ ID NO: 418877 - DNA, 75 bp, synthetic construct
  source 1..75: mol_type = other DNA
gcgtgataaccgtctggcgtatcgtattgcccgccgcgatgcacacaaccgtgatgctgaactggcgtcggtggt

SEQ ID NO: 418878 - DNA, 75 bp, synthetic construct
  source 1..75: mol_type = other DNA
ccgcgagcagacagcaaggagcctctggttgtacaacaaatcgggttattgattgcattactgccagaaattggc

SEQ ID NO: 418879 - DNA, 75 bp, synthetic construct
  source 1..75: mol_type = other DNA
gttcatcacacttttggtgctactgtgttttaacttgctgggtgaaggttttgaagtggcgttacctcgcgtaat

SEQ ID NO: 418880 - DNA, 75 bp, synthetic construct
  source 1..75: mol_type = other DNA
gcaacgcgacgggaaaacactgatcctcgacgatgcagcgattgtcgggctggaatataccttgccgaaaaactg

SEQ ID NO: 418881 - DNA, 75 bp, synthetic construct
  source 1..75: mol_type = other DNA
gcgcttttacgcatattgatgctgcgctggagcggatgcgcgataacggcgcgcctgccgatttactcaaaacac

SEQ ID NO: 418882 - DNA, 75 bp, synthetic construct
  source 1..75: mol_type = other DNA
ttccgtggtggctgggtgatgtaaaactgacgattccgctgacgctggggatggtggcagcggcgctgaccgatc

SEQ ID NO: 418883 - DNA, 75 bp, synthetic construct
  source 1..75: mol_type = other DNA
aggcctgtggtacggggatttattgcagagcggtatgtacgaagtctgtttacagctaccagccagatttgtacc

SEQ ID NO: 418884 - DNA, 75 bp, synthetic construct
  source 1..75: mol_type = other DNA
tatcgccattaccggtcgtgctggagtggcattgtatgatgtgtgagcagtttttttcatgggaagaaattctgt

SEQ ID NO: 418885 - DNA, 75 bp, synthetic construct
  source 1..75: mol_type = other DNA
aatatccggcattgtttctgcctttcctgtcgtggtcggttgattttgcagacagatgctcagggggcgtggttt

SEQ ID NO: 418886 - DNA, 75 bp, synthetic construct
  source 1..75: mol_type = other DNA
ctcggtgctcaccgggagcagttaactaatcctgaaattctggcgtttcttgatgacgcagtttgctatgttgat

SEQ ID NO: 418887 - DNA, 75 bp, synthetic construct
  source 1..75: mol_type = other DNA
gaatcagacgaaactctcgctgctgacccgcttacgtggcgatcgtggtcaacggggaacgcgtcgcacgctgca

SEQ ID NO: 418888 - DNA, 75 bp, synthetic construct
  source 1..75: mol_type = other DNA
tgctatgaacaactggcgcgttatcttgagctcaagtcgcgcatgtttgatcctgatattgaagatgaaagccag

SEQ ID NO: 418889 - DNA, 75 bp, synthetic construct
  source 1..75: mol_type = other DNA
attgaacaggctggatccctgcgtggtctgtcgctgtctgatgtgctgaatctgaaagcggataccatgttaaag

SEQ ID NO: 418890 - DNA, 75 bp, synthetic construct
  source 1..75: mol_type = other DNA
tgctggcgcagagccatatgcgtggctccctgttcagctttgcccgccagatgcagggaagccgggaatccctgg

SEQ ID NO: 418891 - DNA, 75 bp, synthetic construct
  source 1..75: mol_type = other DNA
gttacctgccctcgctgtttaacgggctggtcaaagcgatgaacgccgcgccgccggagagtgaagaaaaactcg

SEQ ID NO: 418892 - DNA, 75 bp, synthetic construct
  source 1..75: mol_type = other DNA
attgaccaggctggatccctgcgtggtctgtcgctgtctgatgtgctgaatctgaaagcggataccatgttcaag

SEQ ID NO: 418893 - DNA, 75 bp, synthetic construct
  source 1..75: mol_type = other DNA
attgatcaggctggatccctgcgtggtctgtcgctgtctgatgtgctgaatctgaaagcggataccatgttgatg

SEQ ID NO: 418894 - DNA, 75 bp, synthetic construct
  source 1..75: mol_type = other DNA
attgaacaggctggatccctgcgtggtctgtcgctgtctgatgtgctgaatctgaaagcggataccatgttgagg

SEQ ID NO: 418895 - DNA, 75 bp, synthetic construct
  source 1..75: mol_type = other DNA
cgggcgacggtgacgccatcagccgctggacgccatatgacaagcccgtggtatcagcacagaaagaactgagca

SEQ ID NO: 418896 - DNA, 75 bp, synthetic construct
  source 1..75: mol_type = other DNA
gaacgccgcgccgccagaaagcgaggcaaaactcgccgtgctgcgcgtaatgcgaatgctggaggacaaaagcgg

SEQ ID NO: 418897 - DNA, 75 bp, synthetic construct
  source 1..75: mol_type = other DNA
gtgcttaagcaggccaaagcctttatggatgtgccgcctccgcagggggaagatgactatggcaacctgcaactg

SEQ ID NO: 418898 - DNA, 75 bp, synthetic construct
  source 1..75: mol_type = other DNA
agccgctgaacgggattattctgacactcgatttacccgatctgcttaccgcagacaaacgccgccgcgagcatc

SEQ ID NO: 418899 - DNA, 75 bp, synthetic construct
  source 1..75: mol_type = other DNA
ggacgcaattattccgcccatctggtatggccgaataacatgcgggaaggtaatgaaagcaagctaacactgata

SEQ ID NO: 418900 - DNA, 75 bp, synthetic construct
  source 1..75: mol_type = other DNA
tacaaaaggataaagaaagtacgatgcaggcggtgtaccaacagttaacagagctgcaccgctatctgctggcga

SEQ ID NO: 418901 - DNA, 75 bp, synthetic construct
  source 1..75: mol_type = other DNA
attgagcaggctggatccctgcgtggtctgtcgctgtctgatgtgctgaatctgaaagcggataccatgttgaag

SEQ ID NO: 418902 - DNA, 75 bp, synthetic construct
  source 1..75: mol_type = other DNA
tatttggcgagaaatgagtaactttactccagattgtgtgttaatgattttggcgagtaatgaatatgatgagtc

SEQ ID NO: 418903 - DNA, 75 bp, synthetic construct
  source 1..75: mol_type = other DNA
gactgtgtcctgatggtattggctagtgattattatgatcctgatgattatattcacgattataatagttttttg

SEQ ID NO: 418904 - DNA, 75 bp, synthetic construct
  source 1..75: mol_type = other DNA
ttggtgatgaacgcggttcattgatttcgtttgagtcaaataaaaatataccttttgagattaaaagagtttatt

SEQ ID NO: 418905 - DNA, 75 bp, synthetic construct
  source 1..75: mol_type = other DNA
tctgatgccgtcgaaagagtggtcgtttatctcttcatcgttggtgaaagaggtggcgcgccatcagggcgatgt

SEQ ID NO: 418906 - DNA, 75 bp, synthetic construct
  source 1..75: mol_type = other DNA
tttttctggtgcacttggacgtattcagcgtacccatcagacggtaaacaggctaatccctttttatacatctaa

SEQ ID NO: 418907 - DNA, 75 bp, synthetic construct
  source 1..75: mol_type = other DNA
tttttctaattcactggggcgctttcagaaggttaatcatgctgtaagtagactagctcctttctatatagcaaa

SEQ ID NO: 418908 - DNA, 75 bp, synthetic construct
  source 1..75: mol_type = other DNA
aaaagcatggcgatgaacgcggcatattagttgcactggaagaaaatagaaatgttccttttgaaataaaaagag

SEQ ID NO: 418909 - DNA, 75 bp, synthetic construct
  source 1..75: mol_type = other DNA
aatatggcatgaaatgtatgattttagtgatgattgcgtactaatggtaatagcagatgatttttacaatgagtc

SEQ ID NO: 418910 - DNA, 75 bp, synthetic construct
  source 1..75: mol_type = other DNA
catactacgatcctgattggattaaaggtgagcatacgcttctcgccctcaaaaggaatactgtcgagccgcttg

SEQ ID NO: 418911 - DNA, 75 bp, synthetic construct
  source 1..75: mol_type = other DNA
tggtgttggctgatgacttatacgatgaaagtgattatattcgtgattatgctgaatttataagggagataacta

SEQ ID NO: 418912 - DNA, 75 bp, synthetic construct
  source 1..75: mol_type = other DNA
caccggtcacggtcgttgaagagatcaaaaagagccgcttcataacgctgttggcgcataccgatggcgttgagg

SEQ ID NO: 418913 - DNA, 75 bp, synthetic construct
  source 1..75: mol_type = other DNA
gcgggcagaacaccctgatgcccgccaccattgcgtggcgtgggtagctggcgcaccggatgattctcaacaact

SEQ ID NO: 418914 - DNA, 75 bp, synthetic construct
  source 1..75: mol_type = other DNA
gaaaaactcgccgtgctgcgcgtgatgcgaatgctggaggacaaaagcggacgtaacaatgaggtggtgaagcag

SEQ ID NO: 418915 - DNA, 75 bp, synthetic construct
  source 1..75: mol_type = other DNA
atctgcgaaccctgtctgactgcctgaataccgatgaatggccagctattaagatattatcactgccccgctggg

SEQ ID NO: 418916 - DNA, 75 bp, synthetic construct
  source 1..75: mol_type = other DNA
gcggaacaaaacagcccaaatgcgttacaagacgagccagaaacgaaacaatccgaaccagtagcgcaacaggaa

SEQ ID NO: 418917 - DNA, 75 bp, synthetic construct
  source 1..75: mol_type = other DNA
atcaccacgtattcagggacgacaaataaacgtttatgtactcaattaccagccaggagattataactcatctga

SEQ ID NO: 418918 - DNA, 75 bp, synthetic construct
  source 1..75: mol_type = other DNA
cgtggtacggaaccgcgctggggctggcaaatgaggccgccgcccacaatgacggactaatgccgcttgatgaag

SEQ ID NO: 418919 - DNA, 75 bp, synthetic construct
  source 1..75: mol_type = other DNA
acaaaattatgcaggcagccaatatcagccagcctgacgccgataagttgcttgctgcatcgcgtggtgagttcg

SEQ ID NO: 418920 - DNA, 75 bp, synthetic construct
  source 1..75: mol_type = other DNA
taccagaatcagccagaaacggaacagaacgaccagaaagcggaacagaacagcccaaatacgcaacaaaacgag

SEQ ID NO: 418921 - DNA, 75 bp, synthetic construct
  source 1..75: mol_type = other DNA
ctgagagttggcgggattcagtggcatatctggcaggaggcaacccatcgatgatgctgggtgtggctgcggcat

SEQ ID NO: 418922 - DNA, 75 bp, synthetic construct
  source 1..75: mol_type = other DNA
ctggagtgaacaagccagccgggatgctattcagcatagcttcaatgcctgggtaaaagaattcggaacaggtaa

SEQ ID NO: 418923 - DNA, 75 bp, synthetic construct
  source 1..75: mol_type = other DNA
ttaagtgtctgccaaaggacaagtttactgaggcgattatttttgcgggggaagatgcttattcacacgcgcagc

SEQ ID NO: 418924 - DNA, 75 bp, synthetic construct
  source 1..75: mol_type = other DNA
aactgttgcgatcagtaccggggaaatggatattgaaacattcctggctgctggtggaattagggtgaaagctgg

SEQ ID NO: 418925 - DNA, 75 bp, synthetic construct
  source 1..75: mol_type = other DNA
ggagccaaagcctgaaccgggtgatgaactgaaaccccgcgtagagagccgtaacgatggcctgtactggatcac

SEQ ID NO: 418926 - DNA, 75 bp, synthetic construct
  source 1..75: mol_type = other DNA
cttgatgaggtagggcagggcagcagtgctaaagatgtcgccacgtctgcttacactttgtttaacggggctggg

SEQ ID NO: 418927 - DNA, 75 bp, synthetic construct
  source 1..75: mol_type = other DNA
gacggactaatgccgcttgatgaagttggtcagggcgctgatcctgtcagcgtttcacagtctgcctatgcgtta

SEQ ID NO: 418928 - DNA, 75 bp, synthetic construct
  source 1..75: mol_type = other DNA
tgtttagcggactcaaatcagccctgcgcccggcgatgccccggtttaaggtttctgccttctggctgctgatac

SEQ ID NO: 418929 - DNA, 75 bp, synthetic construct
  source 1..75: mol_type = other DNA
tgaacccggtacgcgatgccacactggcctatggcgactggggcgaccgcagccgtctggccgatatgggactgt

SEQ ID NO: 418930 - DNA, 75 bp, synthetic construct
  source 1..75: mol_type = other DNA
agcaggcgaaagcgtttatggatatcacgcccccgcaggggatggatgactatggcaacctgcaactgccgctgc

SEQ ID NO: 418931 - DNA, 75 bp, synthetic construct
  source 1..75: mol_type = other DNA
gatgaaagtggaagtgcgcagtctgacagagaatcccccacaggccagtgtgataaagcaaggcagtacggtaag

SEQ ID NO: 418932 - DNA, 75 bp, synthetic construct
  source 1..75: mol_type = other DNA
cgattacagccagggccgtaactataccgcccatctggtctggcctaacaatatgcgcgaaggcaacgaaagtaa

SEQ ID NO: 418933 - DNA, 75 bp, synthetic construct
  source 1..75: mol_type = other DNA
acctggcaacggagagccggacctggctgaccagcagtcgccgccgcctgaccgccttttccgcaacgggcggcg

SEQ ID NO: 418934 - DNA, 75 bp, synthetic construct
  source 1..75: mol_type = other DNA
attgttttattcttccgtcattatctgaaccgtggggattagtagtagaggaggctttgacattagggcttccgg

SEQ ID NO: 418935 - DNA, 75 bp, synthetic construct
  source 1..75: mol_type = other DNA
ccgatgttcaggagagggcgggtactgattgagcctgcaccggaaaaatacagcgactacgcaaccggcgccatc

SEQ ID NO: 418936 - DNA, 75 bp, synthetic construct
  source 1..75: mol_type = other DNA
gatttcgacccatctgttaggttctaacgcctcaagcgttatccgccacgccaatctgccggtgctggttgtgcg

SEQ ID NO: 418937 - DNA, 75 bp, synthetic construct
  source 1..75: mol_type = other DNA
ctaggatggagtaagtactggggagttttgggggtacttcctgtaacaaatattgttctttttcttatcttaatt

SEQ ID NO: 418938 - DNA, 75 bp, synthetic construct
  source 1..75: mol_type = other DNA
tccttgttctatttattttaagcctgactacgacattaaatttaagaagtataggtatagggggtaatgactcca

SEQ ID NO: 418939 - DNA, 75 bp, synthetic construct
  source 1..75: mol_type = other DNA
cgagtgacatcaccgcgactggatgaagtgacgatcaaaaaaatggcatcccgtgactttattcagttatgtgtg

SEQ ID NO: 418940 - DNA, 75 bp, synthetic construct
  source 1..75: mol_type = other DNA
tgcgcagagaggccgttggtgcctgctccagtatttcacgggaaccatcactgggagttattggtgaaaagtatg

SEQ ID NO: 418941 - DNA, 75 bp, synthetic construct
  source 1..75: mol_type = other DNA
tatctacggggtggggttatcgacgctctaccggtattttccggtagatagtcagaggaaggatgacgcggtagg

SEQ ID NO: 418942 - DNA, 75 bp, synthetic construct
  source 1..75: mol_type = other DNA
aacaggcattacagcccggtgctgttgttgcccggatcgccagagagcacggtatcaatgataacctgctgttaa

SEQ ID NO: 418943 - DNA, 75 bp, synthetic construct
  source 1..75: mol_type = other DNA
tgctgaccaccttcacccaggtgaaacgcaaaatgaacagcaagctggaatttattggtatggttccaagtaagg

SEQ ID NO: 418944 - DNA, 75 bp, synthetic construct
  source 1..75: mol_type = other DNA
ttaatcaggtcaaacgccagatgaacaaaaaacttgagttcattgggatggtgccgagtaaggttgacgggcgta

SEQ ID NO: 418945 - DNA, 75 bp, synthetic construct
  source 1..75: mol_type = other DNA
gaatgcttcttacaccctgcaggagctgtcttctggcatccgtgcaagtgaattgtggggcgatatcgagcaaga

SEQ ID NO: 418946 - DNA, 75 bp, synthetic construct
  source 1..75: mol_type = other DNA
taggttatattggttctcatatcgttgtggatttattaaattcacaattcaaggttgcagttgttgacaatttat

SEQ ID NO: 418947 - DNA, 75 bp, synthetic construct
  source 1..75: mol_type = other DNA
ttagtgtgggggagaatcagatatctaaagatttaacgttaaatgctcaggtcatctctgttaataaaactggag

SEQ ID NO: 418948 - DNA, 75 bp, synthetic construct
  source 1..75: mol_type = other DNA
gagcaattatctgtccgggctatcgccctgcagttaggtctcagtcattccaccattcataatctctttcaacga

SEQ ID NO: 418949 - DNA, 75 bp, synthetic construct
  source 1..75: mol_type = other DNA
aaaagaacgacgaacctcctacagtcgtgaatttaaaatcaggctggtaaaacaggcattacagcctggtacagt

SEQ ID NO: 418950 - DNA, 75 bp, synthetic construct
  source 1..75: mol_type = other DNA
cggatttagcttatctgctttacagccagagtggtaatcctggaaataacttttcattccaagccatctggaaaa

SEQ ID NO: 418951 - DNA, 75 bp, synthetic construct
  source 1..75: mol_type = other DNA
acgcaaaagaaacagatgtgcgtactgccttgatcagtgctaaaattgaacatggtcagtatttaaagcaatatg

SEQ ID NO: 418952 - DNA, 75 bp, synthetic construct
  source 1..75: mol_type = other DNA
ttcaaaaatgacggtgatagcaatactgtaagagactgtaataatcacagcgcccccaagatccggtggtgctat

SEQ ID NO: 418953 - DNA, 75 bp, synthetic construct
  source 1..75: mol_type = other DNA
aagattgtcaaagccgcaatggataatgatgatagattaattgttgtggatgcaacaaataataatgcttattgg

SEQ ID NO: 418954 - DNA, 75 bp, synthetic construct
  source 1..75: mol_type = other DNA
gacagttctttatttcaccgcaaactatgtttctactttagctgctgtaactactggttatggtaatgctcaggt

SEQ ID NO: 418955 - DNA, 75 bp, synthetic construct
  source 1..75: mol_type = other DNA
caggcgcggcgaaaggcgtaggtatcggtatttatgataacagcaacaccctggttgcgatgaatagtggtgaat

SEQ ID NO: 418956 - DNA, 75 bp, synthetic construct
  source 1..75: mol_type = other DNA
gacctccaggagtttgaatctctggtttcttccgccggtgtcgaagcattgcaggtgattaccggtagccgtaaa

SEQ ID NO: 418957 - DNA, 75 bp, synthetic construct
  source 1..75: mol_type = other DNA
aggcccatacctgttgtatggtctgtagttcccgcgacaacaaccctgatacggtgaacttaatgttttcagagc

SEQ ID NO: 418958 - DNA, 75 bp, synthetic construct
  source 1..75: mol_type = other DNA
cgacaaagctgctgcacagaaagcatttaacgaaatgcaaccgatcgtggaccgtcaggctgctaaagggctgat

SEQ ID NO: 418959 - DNA, 75 bp, synthetic construct
  source 1..75: mol_type = other DNA
gcggcgaagtatctggcgatgcctcaacattattctcatgcagcgatgttactggcgggcgttattacgtttgtg

SEQ ID NO: 418960 - DNA, 75 bp, synthetic construct
  source 1..75: mol_type = other DNA
tctgctcctgcaacataaggcgactatcgttaatggcgttttactcgctattggtagcacggtcgcaacctatat

SEQ ID NO: 418961 - DNA, 75 bp, synthetic construct
  source 1..75: mol_type = other DNA
ggtctatatcagcacgctattttttccgcccagtgcagataaaaacgtcgcgctactgctggcgtttgccacttt

SEQ ID NO: 418962 - DNA, 75 bp, synthetic construct
  source 1..75: mol_type = other DNA
ctggaagattgcgataacagcacgttgaaaaaggccaatgtgagctttagtggtgtcggcgatgcaattaaatct

SEQ ID NO: 418963 - DNA, 75 bp, synthetic construct
  source 1..75: mol_type = other DNA
cgggcgcggccaaaggtgttggtatcggtatttatgataacagcaataccctggtcgctcttaacggtggtaaag

SEQ ID NO: 418964 - DNA, 75 bp, synthetic construct
  source 1..75: mol_type = other DNA
cttgaagatgtgtttaaatcgtttatatctgcacatctgcagactgttttggattttgccgaaggtacaactttc

SEQ ID NO: 418965 - DNA, 75 bp, synthetic construct
  source 1..75: mol_type = other DNA
gcgggcagggaacgtcaggatatcgtcaccctggtgaaacgacagctgacgcgtgaaatctcggaagggcgcttt

SEQ ID NO: 418966 - DNA, 75 bp, synthetic construct
  source 1..75: mol_type = other DNA
tcgtgaggcggtaaaacgcgaagtggagcgtcgtgtgaaggagcgcatgattctgtcacgtaaccgcaattacag

SEQ ID NO: 418967 - DNA, 75 bp, synthetic construct
  source 1..75: mol_type = other DNA
tcaccctggtgaaacgacagctgacgcgtgaaatctcggaagggcgcttcactgccaatcgtgaggcggtaaaac

SEQ ID NO: 418968 - DNA, 75 bp, synthetic construct
  source 1..75: mol_type = other DNA
ctacattccgtataccgaccgtatcgaatatctcggtggctgtgttaacgagatgccgtatgtactggcggtaga

SEQ ID NO: 418969 - DNA, 75 bp, synthetic construct
  source 1..75: mol_type = other DNA
gatcgcgttaacgtcattcgcgtaatgctttctgagctgttccgcatcaacagccatctgctgtatatctcgacc

SEQ ID NO: 418970 - DNA, 75 bp, synthetic construct
  source 1..75: mol_type = other DNA
ttttgcaactcgacggtgaagagatcgtcgactgtgtaccagacatcggttaccaccaccgtggcgcggaaaaga

SEQ ID NO: 418971 - DNA, 75 bp, synthetic construct
  source 1..75: mol_type = other DNA
caggaaaactctccatcacccgtgccacccgtgcgctgacgttcctgtcagagctggggctgattagctaccaga

SEQ ID NO: 418972 - DNA, 75 bp, synthetic construct
  source 1..75: mol_type = other DNA
caggaaaactctccatcacccgtgccacccgagctctgacgttcctgtcagagctggggctgattagctaccaga

SEQ ID NO: 418973 - DNA, 75 bp, synthetic construct
  source 1..75: mol_type = other DNA
gcgtgaaatcgcggaagggcgcttcactgccagtcgtgaggcggtaaaacgtgaagtggagcgtcgtgtgaagga

SEQ ID NO: 418974 - DNA, 75 bp, synthetic construct
  source 1..75: mol_type = other DNA
cgctatacccaaaagaaagcggcttatcggtcagtttcacctggtttacgtaaaaacccgcttcggcgggttttt

SEQ ID NO: 418975 - DNA, 75 bp, synthetic construct
  source 1..75: mol_type = other DNA
gtgaagtggagcgtcgtgtgaaggagcgcatgatactgtcacgtaaccgcaattacacccgactggctactttcc

SEQ ID NO: 418976 - DNA, 75 bp, synthetic construct
  source 1..75: mol_type = other DNA
tcggcgggtttttgcttttggaggggcagaaagatgaatgactgtccacgacgctatacccaaaagaaagcggct

SEQ ID NO: 418977 - DNA, 75 bp, synthetic construct
  source 1..75: mol_type = other DNA
gtgtttctgactgctacacccgcgtaatgcttaaagtggaagagctgcgtcagagtctgcgcattcttgagcagt

SEQ ID NO: 418978 - DNA, 75 bp, synthetic construct
  source 1..75: mol_type = other DNA
tatgccgtaaagcgattaggtgcagggctgacagaacagcaaaaacaaaggctgatagaacaggttccctctcga

SEQ ID NO: 418979 - DNA, 75 bp, synthetic construct
  source 1..75: mol_type = other DNA
cgccagccagtttgtggcatcatccgggtttggtgttgattcatgcggagggagtggaaacgcctcagccggaac

SEQ ID NO: 418980 - DNA, 75 bp, synthetic construct
  source 1..75: mol_type = other DNA
taaaaccgtcacgccagccagtttgtggcatcatccgggtttggtgctgagagatcccctcataatttccccaaa

SEQ ID NO: 418981 - DNA, 75 bp, synthetic construct
  source 1..75: mol_type = other DNA
gcgggcagggaacgtcaggatatcgtcaccctggtgaaacgacagctgacccgtgaaatcgcggaagggcgcttc

SEQ ID NO: 418982 - DNA, 75 bp, synthetic construct
  source 1..75: mol_type = other DNA
gaagcgtgcccgtgcgcgtcgtgatgcggacaggcagcgtcaggatattgtcaccctggtgaaacggcaactgac

SEQ ID NO: 418983 - DNA, 75 bp, synthetic construct
  source 1..75: mol_type = other DNA
gtggcgcatgcccgttcgcgtggtctgcgtcggcgcatgccaccggtgctgcgtcgacgggctattgatgcgctg

SEQ ID NO: 418984 - DNA, 75 bp, synthetic construct
  source 1..75: mol_type = other DNA
tttcaaccatcaccacgctatctcgttttattaaacgttcttctaatcaacgctatgctataaagcgattagacg

SEQ ID NO: 418985 - DNA, 75 bp, synthetic construct
  source 1..75: mol_type = other DNA
ctgcaggggctctgttttcactatgatccgctggccaaccgtgtccagtgctccatcaccacgctggccattgag

SEQ ID NO: 418986 - DNA, 75 bp, synthetic construct
  source 1..75: mol_type = other DNA
gtcttatgagaaagcggcgctgcaaaacaccattttgaaaggccgttcccagggcgtagccgcctacggcgcgaa

SEQ ID NO: 418987 - DNA, 75 bp, synthetic construct
  source 1..75: mol_type = other DNA
ttaccctgctgaatatgaaattggagatatcgtctttacatgtataggtgctgccttatttggtcaaatatcagc

SEQ ID NO: 418988 - DNA, 75 bp, synthetic construct
  source 1..75: mol_type = other DNA
tcacgtcgggatcattatcggtcataacggtgaagactttctggttgcagaaagccgtgttcccctctcaaccat

SEQ ID NO: 418989 - DNA, 75 bp, synthetic construct
  source 1..75: mol_type = other DNA
aattgttgaacaggttccctcccggctacgcaaactttaccacaccggtggtaatgctgccaacttactgattta

SEQ ID NO: 418990 - DNA, 75 bp, synthetic construct
  source 1..75: mol_type = other DNA
tcgacaatgcgttgtggatccgccttgagggcggcgaaggatcggtaaaagcggcgcgtgaactgctggggggcg

SEQ ID NO: 418991 - DNA, 75 bp, synthetic construct
  source 1..75: mol_type = other DNA
aggtgttactggagcaggtgaatcaggcgattagtgataaaacgccgctggtaattcagggaagcaatagcaaag

SEQ ID NO: 418992 - DNA, 75 bp, synthetic construct
  source 1..75: mol_type = other DNA
gtgattcagggcagcaatagcaaagcctttttaggtcgccctgtcaccgggcaaacgctggatgtgcgttgtcat

SEQ ID NO: 418993 - DNA, 75 bp, synthetic construct
  source 1..75: mol_type = other DNA
atgtctgatatcacagcctaccgtccggaagtggttggatttgcccctatatttccagacatctgttatcactta

SEQ ID NO: 418994 - DNA, 75 bp, synthetic construct
  source 1..75: mol_type = other DNA
atcattaccggcactggaaaacatctgcgttttggtggcgaagtgatgaaaaacgttgccggatacgatctctcg

SEQ ID NO: 418995 - DNA, 75 bp, synthetic construct
  source 1..75: mol_type = other DNA
tgctcccctgcgagccaccgcattatggtgaagaagccacctggggcggtatggtcgcctgcgggctggcagggc

SEQ ID NO: 418996 - DNA, 75 bp, synthetic construct
  source 1..75: mol_type = other DNA
taaccagccagtgcattttgatggctaccgggtggatgaccagaccacgttcgcgctcgattacctgaaaaatcg

SEQ ID NO: 418997 - DNA, 75 bp, synthetic construct
  source 1..75: mol_type = other DNA
agacgcaatactctcacttcccatcgacgacaagtcacctcacgaagtccacattaaagaaccaaagcggagcaa

SEQ ID NO: 418998 - DNA, 75 bp, synthetic construct
  source 1..75: mol_type = other DNA
gcaccatcagttgctgcggcggctgaaaaatggaaccggagagcaggagatgaagcaaacctttctgcttcgcaa

SEQ ID NO: 418999 - DNA, 75 bp, synthetic construct
  source 1..75: mol_type = other DNA
atgaatacagcattcgcactcgttctgacagtttttcttaataccggcgaaccacttgatcttattgttgatata

SEQ ID NO: 419000 - DNA, 75 bp, synthetic construct
  source 1..75: mol_type = other DNA
ctactggaccagcggcagtggcagcctttgtgggtcaggacggtaaaattactaccactgataaagagattgtga

SEQ ID NO: 419001 - DNA, 75 bp, synthetic construct
  source 1..75: mol_type = other DNA
taaccagccggtgcatttcgatggctaccgggtggatgaccagaccaccttcgcgctcgattacctgaaacagcg

SEQ ID NO: 419002 - DNA, 75 bp, synthetic construct
  source 1..75: mol_type = other DNA
aagacgctgggctgtgcgcactgaatcctgctcgtcaggaacgcgagacgattaccaaagctggcgagacgaaag

SEQ ID NO: 419003 - DNA, 75 bp, synthetic construct
  source 1..75: mol_type = other DNA
cgcatctggcaagcgccaccgcaggtgacggaaccggttcatcggctggcggggatgctccataagtatcaacat

SEQ ID NO: 419004 - DNA, 75 bp, synthetic construct
  source 1..75: mol_type = other DNA
tacttcaacccggttggcgcgcatccgtcgggcgatatgggcgaagatccgcaaggcattccgaataacctgatg

SEQ ID NO: 419005 - DNA, 75 bp, synthetic construct
  source 1..75: mol_type = other DNA
cctgattagcgccatgcgcgccgctaacgtcaaaaactttatttttagctcctccgccaccgtttatggcgatca

SEQ ID NO: 419006 - DNA, 75 bp, synthetic construct
  source 1..75: mol_type = other DNA
gtttcaccgacaaatgcgccgcacagcagaccatgtgatatctgcccgtagcgatgataaacgtcgtcggtactt

SEQ ID NO: 419007 - DNA, 75 bp, synthetic construct
  source 1..75: mol_type = other DNA
gtacagaaacggcgactgggttcaatgggggcgctggccagcaccatcaatattatcgtgctggataacccgatg

SEQ ID NO: 419008 - DNA, 75 bp, synthetic construct
  source 1..75: mol_type = other DNA
agcacattcgctttgcggttaaactggcgaccgctatcgtactggcgttgtttgttggttttcactttcagctcg

SEQ ID NO: 419009 - DNA, 75 bp, synthetic construct
  source 1..75: mol_type = other DNA
ggtttactggcagttattgcaattatcagtgtctggaccccattgactcatcctgagattgccagtcgctggttc

SEQ ID NO: 419010 - DNA, 75 bp, synthetic construct
  source 1..75: mol_type = other DNA
taccgccttctgtaaccatctggcaggccgcgtcacctcctcagagtcagggctttatgctaataggtggcttgt

SEQ ID NO: 419011 - DNA, 75 bp, synthetic construct
  source 1..75: mol_type = other DNA
tccggcgatcgccgaccgttggtttacgcttcccaatctgggctatctgctgccggttccggtgctggtgatcgc

SEQ ID NO: 419012 - DNA, 75 bp, synthetic construct
  source 1..75: mol_type = other DNA
gcggttacattggaagtcatacctgcgtgcaattactgcaaaacggtcatgatgtcatcattcttgataacctct

SEQ ID NO: 419013 - DNA, 75 bp, synthetic construct
  source 1..75: mol_type = other DNA
gttgctggcgctgacctggggcggcgtagccttcttgctgtggtatggttttggcgcttttaaaacagcaatgag

SEQ ID NO: 419014 - DNA, 75 bp, synthetic construct
  source 1..75: mol_type = other DNA
accgctcggtccacaaaatgcttttgtgatgaatcagggcattcgtcgtcagtaccacattatgattgccttact

SEQ ID NO: 419015 - DNA, 75 bp, synthetic construct
  source 1..75: mol_type = other DNA
gatttaacgttcacaaaaccagacttacaaaattctttgccaatcacctaccggatacagaaaactgatgataat

SEQ ID NO: 419016 - DNA, 75 bp, synthetic construct
  source 1..75: mol_type = other DNA
tggaagcctttatcaaccacgtacaaggtaagcccgtgatgatagccgacgccgagcagggatacatcatccagc

SEQ ID NO: 419017 - DNA, 75 bp, synthetic construct
  source 1..75: mol_type = other DNA
tgcgaaaagccgcctgctatgacgccggaacaggctcgggtcatgcgcgataccgcgcgcagacaaggaaaagta

SEQ ID NO: 419018 - DNA, 75 bp, synthetic construct
  source 1..75: mol_type = other DNA
ctggagacatcatttgcactcaacatccgcgaacagtcgattatgaacgtcagcttttgcggcgataaagcggga

SEQ ID NO: 419019 - DNA, 75 bp, synthetic construct
  source 1..75: mol_type = other DNA
ctggtttatcagctaccccacctgaagaagataggcatgttggttttgccacgcattaacttccacgatgcgggt

SEQ ID NO: 419020 - DNA, 75 bp, synthetic construct
  source 1..75: mol_type = other DNA
ccaggacattaaaacgccagtgaaaattgccatcgttacgctgattttaacgcaattgatgaacctggcgtttat

SEQ ID NO: 419021 - DNA, 75 bp, synthetic construct
  source 1..75: mol_type = other DNA
gactctgatgcaacgggaaatggcggatgacaaccgccatttgcgcagcatggaagcctttatcaatcacgtaca

SEQ ID NO: 419022 - DNA, 75 bp, synthetic construct
  source 1..75: mol_type = other DNA
tgagatcccggcgcgacagttaggtttgcctctgtggttctggcgcaatgtgctggtggccgcgaccggctggat

SEQ ID NO: 419023 - DNA, 75 bp, synthetic construct
  source 1..75: mol_type = other DNA
acgtgagcttgctgttcaggctactaacggcacgaactctcagtctgatctaaactccattcaagacgaaattac

SEQ ID NO: 419024 - DNA, 75 bp, synthetic construct
  source 1..75: mol_type = other DNA
gtgtaaaagtattggcaactaaccaaacgatgaaaattcaggttggcgcaaatgacggtcagactatagaaattg

SEQ ID NO: 419025 - DNA, 75 bp, synthetic construct
  source 1..75: mol_type = other DNA
cgcaacgctggcggtcatgcgacccgctttagtgccggagatggtggctttgccccgctaccggctcctttattc

SEQ ID NO: 419026 - DNA, 75 bp, synthetic construct
  source 1..75: mol_type = other DNA
ccattaacaagagaaaacaagaacgggagctattaaataaagtatgcattgtttcaatgctggcccgtttacgtc

SEQ ID NO: 419027 - DNA, 75 bp, synthetic construct
  source 1..75: mol_type = other DNA
ctggttgccgggatattgtggactgtttcgttaggcgcgatagatgagtgggtggcgtcgccattgcagcaatag

SEQ ID NO: 419028 - DNA, 75 bp, synthetic construct
  source 1..75: mol_type = other DNA
tcgtgctggcgggaattgccgcgtacttcgctgcactggcggtgttgggcttcaaagttaaagagtttgcccgtc

SEQ ID NO: 419029 - DNA, 75 bp, synthetic construct
  source 1..75: mol_type = other DNA
tgacagtttttcttgtttccggagtgccagttgatattgcagtcagtgttcacaggacaatgcaggagtgtatga

SEQ ID NO: 419030 - DNA, 75 bp, synthetic construct
  source 1..75: mol_type = other DNA
atgaatacatcatttgcactcgttctgacggtttttcttaatacgggcgagccgcttgaccttattattgacata

SEQ ID NO: 419031 - DNA, 75 bp, synthetic construct
  source 1..75: mol_type = other DNA
tcaggtggatcaagacagccagactgcctacatctactcttctgctcacttcgcgaacaacgtctttgttgatgg

SEQ ID NO: 419032 - DNA, 75 bp, synthetic construct
  source 1..75: mol_type = other DNA
gatttaacgtttacaaaaccagatctacaaaactctttaccaataacttaccggattcagaaaactgatgagggg

SEQ ID NO: 419033 - DNA, 75 bp, synthetic construct
  source 1..75: mol_type = other DNA
tcgtagatattgccagaaagaccatcgagaaaggtatgacgctggataaggatgtgcgtatttctgtagaaaatg

SEQ ID NO: 419034 - DNA, 75 bp, synthetic construct
  source 1..75: mol_type = other DNA
aaaatgttgtcaggcaattaaagccgggttttcgaccctctttcccgatgcgaactatatctgtttgccgatagc

SEQ ID NO: 419035 - DNA, 75 bp, synthetic construct
  source 1..75: mol_type = other DNA
tatttatgctttcggtattggtctggcgaatgcgggactggtgcgattaaccctgtttgccagcgatatgagtaa

SEQ ID NO: 419036 - DNA, 75 bp, synthetic construct
  source 1..75: mol_type = other DNA
ggcgagaaactgtcgctgaaagaactcggtcgtgactataagctggtgctgaagaacggccgctttgtggcgggg

SEQ ID NO: 419037 - DNA, 75 bp, synthetic construct
  source 1..75: mol_type = other DNA
gaattttcaacctatatcggcaacgatatgattcaacccggtatgttggccgtggtggaacaatatcaggcgggc

SEQ ID NO: 419038 - DNA, 75 bp, synthetic construct
  source 1..75: mol_type = other DNA
gcaaccggtaactacaaagttcgtatcgacaacgcaacaggcgctggcgctatcgctgattacaaagataaagaa

SEQ ID NO: 419039 - DNA, 75 bp, synthetic construct
  source 1..75: mol_type = other DNA
gaccgtacctgggatacttccaagtctaactacggttacggtattgttgctatgaactctgatggtcacctgact

SEQ ID NO: 419040 - DNA, 75 bp, synthetic construct
  source 1..75: mol_type = other DNA
catcgcacgcgtatttatggatgaccgccgggttaagtatttatgcttttggtattggcctggcgaatgcggggc

SEQ ID NO: 419041 - DNA, 75 bp, synthetic construct
  source 1..75: mol_type = other DNA
cctgtgccggtaactctgcgctggtgtatatcgaaaaatatacgggcaatgcaccgaagttaacggcgtttgatc

SEQ ID NO: 419042 - DNA, 75 bp, synthetic construct
  source 1..75: mol_type = other DNA
cacaatttgaagctcgcaatgattttgatgtgtttgccgaccttgcggaattgctgaaacccggtggtaaagaga

SEQ ID NO: 419043 - DNA, 75 bp, synthetic construct
  source 1..75: mol_type = other DNA
actggctacccgcaatttgaagaatatctgacaggcaagaatgataatacgccgaagagtgcggcctgggcggca

SEQ ID NO: 419044 - DNA, 75 bp, synthetic construct
  source 1..75: mol_type = other DNA
ccggcgaaaggtcgcggcgacgacagttacgttcaggtgagctgggaacaagcattaaaactgattcatgagcaa

SEQ ID NO: 419045 - DNA, 75 bp, synthetic construct
  source 1..75: mol_type = other DNA
catccggcacaccgtttacacagtcagcttaactatgcggaactgcgtaaaaaatatgcggttgccgatcgtgaa

SEQ ID NO: 419046 - DNA, 75 bp, synthetic construct
  source 1..75: mol_type = other DNA
cgtggtgtgcgtacatgaaggcgcatggcctgatctggaaaatggtttgtgcaaaaatggttgtgcgaacgtatt

SEQ ID NO: 419047 - DNA, 75 bp, synthetic construct
  source 1..75: mol_type = other DNA
ttttaatgaaactgtcaatgccgcgatagcccggggaatacgacaggaaaaggagcaacttgccagacgccgtga

SEQ ID NO: 419048 - DNA, 75 bp, synthetic construct
  source 1..75: mol_type = other DNA
cccggaaaaccttagcgtacgattttttccgaattctgcgggctccccaatttaagcgtgatgcagttcgcatag

SEQ ID NO: 419049 - DNA, 75 bp, synthetic construct
  source 1..75: mol_type = other DNA
attcctacccaagacactgatcttctgcgtgagaatgaacgtttacgcaaagagaaccgtatccttcgggaggag

SEQ ID NO: 419050 - DNA, 75 bp, synthetic construct
  source 1..75: mol_type = other DNA
cccgaactccttacagtctacggcggcggatcaggtacacaccacggcgcgtattcagcatccgatggtgagaaa

SEQ ID NO: 419051 - DNA, 75 bp, synthetic construct
  source 1..75: mol_type = other DNA
ggcgtggctgaaatttttctatgatgccgctcagaaaggtgctcgtgcgcaacgcgtgactatgccgatgtttaa

SEQ ID NO: 419052 - DNA, 75 bp, synthetic construct
  source 1..75: mol_type = other DNA
agcagtaccgatgagcaagggctggaatacttccatcagctgaaaaaatctggcaaaccagtgattgctattgat

SEQ ID NO: 419053 - DNA, 75 bp, synthetic construct
  source 1..75: mol_type = other DNA
gccaaaaaggggcagggaaagcccccatgtttaacgttagaatatcgccagatttgaaagaacagtttgaaatac

SEQ ID NO: 419054 - DNA, 75 bp, synthetic construct
  source 1..75: mol_type = other DNA
tgctggtggaagttaaccgcgattacgtcaccgcgtctcgcgtggcgggtgccggggcgatgcgccagatgttta

SEQ ID NO: 419055 - DNA, 75 bp, synthetic construct
  source 1..75: mol_type = other DNA
gagacagagctaggctgggggttccggaaagctttcagctttgagccagttattaaaaccccttttgatttgtta

SEQ ID NO: 419056 - DNA, 75 bp, synthetic construct
  source 1..75: mol_type = other DNA
tatgtgcgcttaacccgcgccgccgtgctggtggaggtgaatcgcgattacgtcaccgcgtctcgcgtggcgggt

SEQ ID NO: 419057 - DNA, 75 bp, synthetic construct
  source 1..75: mol_type = other DNA
tgctggtggaggtgaatcgcgattacgttaccgcgtctcgcgtggcaggtgccggggcgatgcgtcagatgttta

SEQ ID NO: 419058 - DNA, 75 bp, synthetic construct
  source 1..75: mol_type = other DNA
tatgtgcgcttaacccgcgccgccgtgctggtggaagttaaccgcgattacgtcaccgcgtctcgcgtggcaggt

SEQ ID NO: 419059 - DNA, 75 bp, synthetic construct
  source 1..75: mol_type = other DNA
ccgctccgggtcaccagggcggcgtcggtttcaccaaaacgcctgccggacgtttctatcatgactactatggtg

SEQ ID NO: 419060 - DNA, 75 bp, synthetic construct
  source 1..75: mol_type = other DNA
aacaaccgaaaggtgcaggtaaagcaccagcattccaagtccgtattaacccagaattaaaagaacaaatggtta

SEQ ID NO: 419061 - DNA, 75 bp, synthetic construct
  source 1..75: mol_type = other DNA
ctgaccgacgcagaggtatgggtgttctggaatatatgggactacttcaatgtgtgcgctggtacaaaatgggcg

SEQ ID NO: 419062 - DNA, 75 bp, synthetic construct
  source 1..75: mol_type = other DNA
gtcaagcgatggcacggctgtataaagagttcacccatgacggtagctggttcttcaaaccgtggaacaaagaag

SEQ ID NO: 419063 - DNA, 75 bp, synthetic construct
  source 1..75: mol_type = other DNA
tggctgtatcaatgatggacggcaacagcggtctgtcactgactcaggaagtgatcgacgaagcggtcgatttcc

SEQ ID NO: 419064 - DNA, 75 bp, synthetic construct
  source 1..75: mol_type = other DNA
gcaagtaagttatttacgctcgctgcaatcctgggaccatcatttccctggatttgaacacgaaactgaagggac

SEQ ID NO: 419065 - DNA, 75 bp, synthetic construct
  source 1..75: mol_type = other DNA
taacatcgacgacgacacggtgattgagctggataaactcgccggggagccgctggatattaaagtgaacaatat

SEQ ID NO: 419066 - DNA, 75 bp, synthetic construct
  source 1..75: mol_type = other DNA
agccggctggtgataaagctgaatttatcgaaaaagtacgtcgtgcgttgtacctcgggaaaatcgtttcctatg

SEQ ID NO: 419067 - DNA, 75 bp, synthetic construct
  source 1..75: mol_type = other DNA
tcttgcactaaatatcgaaagtcacggctatactgtttcaatttttaaccgttctcgtgaaaaaacagaaaaaat

SEQ ID NO: 419068 - DNA, 75 bp, synthetic construct
  source 1..75: mol_type = other DNA
ccgctgtcgctcattaccgagtctgtgtttgcacgatacatctcttctctgaaagagcagcgcgttgcggcgtcc

SEQ ID NO: 419069 - DNA, 75 bp, synthetic construct
  source 1..75: mol_type = other DNA
ctggttgctccgattctgaagcagatcgcggcggttgctgaagacggtgagccgtgtgtgacttatataggtgct

SEQ ID NO: 419070 - DNA, 75 bp, synthetic construct
  source 1..75: mol_type = other DNA
ttcgtcgtaaccgtgagctttctgccgaaggctttaacttcattggtaccggtgtttccggtggtgaagaaggcg

SEQ ID NO: 419071 - DNA, 75 bp, synthetic construct
  source 1..75: mol_type = other DNA
gccatgtgtcacctatatcggtgctgacggtgctggccattatgtgaagatggttcataacggcatcgagtatgg

SEQ ID NO: 419072 - DNA, 75 bp, synthetic construct
  source 1..75: mol_type = other DNA
tgcgcagttcctgcagaaaatcaccgatgcttatgccgaaaatccgcagatcgctaacctgctgctggctccgta

SEQ ID NO: 419073 - DNA, 75 bp, synthetic construct
  source 1..75: mol_type = other DNA
cgcgtctgacgaatacaactgggatctgaactacggcgaaatcgcgaagatcttccgcgcgggctgcatcattcg

SEQ ID NO: 419074 - DNA, 75 bp, synthetic construct
  source 1..75: mol_type = other DNA
tggcggtcagaaagaagcctatgaactggttgcgccgatcctgaccaaaatcgccgccgtagctgaagatggcga

SEQ ID NO: 419075 - DNA, 75 bp, synthetic construct
  source 1..75: mol_type = other DNA
ccgctgtcgctgattaccgagtctgtgtttgcacgttatatctcgtctctgaaagatcagcgtgttgccgcgtct

SEQ ID NO: 419076 - DNA, 75 bp, synthetic construct
  source 1..75: mol_type = other DNA
tcggtatggcagtgatgggacgcaaccttgcgctcaatatcgaaagccgtggttataccgtctctattttcaacc

SEQ ID NO: 419077 - DNA, 75 bp, synthetic construct
  source 1..75: mol_type = other DNA
agtacctaccttctctgcagcggttgcttattatgacagctatcgtgccgcagtactgcctgcaaacctgatcca

SEQ ID NO: 419078 - DNA, 75 bp, synthetic construct
  source 1..75: mol_type = other DNA
cgcagggcttctcgcagttacgtgccgcgtctgaagagtacaactgggatctgaattatggtgaaatcgcgaaga

SEQ ID NO: 419079 - DNA, 75 bp, synthetic construct
  source 1..75: mol_type = other DNA
atgtccaaacaacagatcggggttgtcggtatggccgtgatggggcgtaaccttgcgctgaatatcgaaagccgt

SEQ ID NO: 419080 - DNA, 75 bp, synthetic construct
  source 1..75: mol_type = other DNA
cctacgctgtacagaacggtattccggttccgaccttcggcgctgcggttgcctactatgacagctaccgttcag

SEQ ID NO: 419081 - DNA, 75 bp, synthetic construct
  source 1..75: mol_type = other DNA
tggtggccagaaagaagcctatgatctggttgctcctattctgaagcagattgctgctgttgctgaagacggtga

SEQ ID NO: 419082 - DNA, 75 bp, synthetic construct
  source 1..75: mol_type = other DNA
ggtaacaccttcttccaggacaccattcgtcgtaaccgtgagctttctgccgaaggttttaactttatcggtacc

SEQ ID NO: 419083 - DNA, 75 bp, synthetic construct
  source 1..75: mol_type = other DNA
tggttcacaacggtattgaatacggcgatatgcagttgattgctgaagcctattctctgcttaaaggtggcctga

SEQ ID NO: 419084 - DNA, 75 bp, synthetic construct
  source 1..75: mol_type = other DNA
taaaggcgacatcatcattgatggcggcaacaccttcttccaagacaccatccgtcgtaaccgtgaactgtctgc

SEQ ID NO: 419085 - DNA, 75 bp, synthetic construct
  source 1..75: mol_type = other DNA
tcgattccctgaagccttacctcgataaaggcgacatcatcattgatggcggcaacaccttcttccaagacacca

SEQ ID NO: 419086 - DNA, 75 bp, synthetic construct
  source 1..75: mol_type = other DNA
ctcagggcttctcccaactgcgcgctgcttctgacgagtacaactgggatctgaactacggcgaaattgctaaga

SEQ ID NO: 419087 - DNA, 75 bp, synthetic construct
  source 1..75: mol_type = other DNA
tatctgggcaaaatcgtttcttacgctcagggcttttctcagctgcgtgctgcgtctgaagagtacaactgggat

SEQ ID NO: 419088 - DNA, 75 bp, synthetic construct
  source 1..75: mol_type = other DNA
tggttcacaacggtattgaatacggtgatatgcagttgattgctgaagcttattcactgctgaaaggtggcctga

SEQ ID NO: 419089 - DNA, 75 bp, synthetic construct
  source 1..75: mol_type = other DNA
caacgtcctgaacaacccactcatcttccggtgccggaagccctggattttatcaacgagaaaccgtcccatgag

SEQ ID NO: 419090 - DNA, 75 bp, synthetic construct
  source 1..75: mol_type = other DNA
cgttggcgcgcgcgctgtatcgacacgcagaaatcggccaacaaattcccggtcaactgtatgccgccgtggcgg

SEQ ID NO: 419091 - DNA, 75 bp, synthetic construct
  source 1..75: mol_type = other DNA
ttttccaaatcttcagccacctgaaaaagctgcgtatgtcgcggcaggatattcgtgatgagttcaaacaaagcg

SEQ ID NO: 419092 - DNA, 75 bp, synthetic construct
  source 1..75: mol_type = other DNA
tgattacgttggcggcatgaaggatctgaaagacggcgttatccgtctgattggtaacccggaaacgcgctaccg

SEQ ID NO: 419093 - DNA, 75 bp, synthetic construct
  source 1..75: mol_type = other DNA
gctacaagcgggctacggttacgaaacctataagctgctgtgtgaatatcatctgttccagccgctgttcccgac

SEQ ID NO: 419094 - DNA, 75 bp, synthetic construct
  source 1..75: mol_type = other DNA
actggagatgtgatttcattgaactctggcaataatcttattttctccgatacaagcttaattgccacagttggt

SEQ ID NO: 419095 - DNA, 75 bp, synthetic construct
  source 1..75: mol_type = other DNA
tcccgttttgatttttccgttcatgtggcgttcgtgcgttcactcggtaagcgtcatcgcatgccgccactgttg

SEQ ID NO: 419096 - DNA, 75 bp, synthetic construct
  source 1..75: mol_type = other DNA
gacgatatttactggggttgtgtgcagcaaacgctggagcaaggttttaacatcgcccgtaacgcggcgctgttg

SEQ ID NO: 419097 - DNA, 75 bp, synthetic construct
  source 1..75: mol_type = other DNA
gaaaaaagcggggctttctgccagcgatatcggcgtatttgaaatgaatgaagcctttgccgcgcagatcctgcc

SEQ ID NO: 419098 - DNA, 75 bp, synthetic construct
  source 1..75: mol_type = other DNA
gagtcccccatttctgccatgactaatgcgatggagctggtgggattatgcgcgctgctgatcgtgcctggcgtt

SEQ ID NO: 419099 - DNA, 75 bp, synthetic construct
  source 1..75: mol_type = other DNA
gtgtctgacgagagcgacgacaaaacagaagcccccacacctcaccgactagaaaaagcgcgggaagaggggcaa

SEQ ID NO: 419100 - DNA, 75 bp, synthetic construct
  source 1..75: mol_type = other DNA
gtccgaacgtaaacagcatggcctgaaacgtgcccgtgcacgtcgtgacgcggaaagaacccgcaaggacattgt

SEQ ID NO: 419101 - DNA, 75 bp, synthetic construct
  source 1..75: mol_type = other DNA
tgttccgtaactgtcgtctggtaggtcgccgtttccgtctcgcccacgtgatgtttggcccggaaattatcgaag

SEQ ID NO: 419102 - DNA, 75 bp, synthetic construct
  source 1..75: mol_type = other DNA
agcaaacttattaccgccaggtgaagaacccgaatccggtattcacaccacgtgaaggtgccaggacgctgccgt

SEQ ID NO: 419103 - DNA, 75 bp, synthetic construct
  source 1..75: mol_type = other DNA
gtgaagtggagcgtcgtgtgaaagagcgcatgattctgtcacgtaaccgtaattacagccggctggccaccgctt

SEQ ID NO: 419104 - DNA, 75 bp, synthetic construct
  source 1..75: mol_type = other DNA
cccgcttatcgggtgctacattccgaccgacatcacgttcacactggctctgtttgctgcccttgatgtgtctga

SEQ ID NO: 419105 - DNA, 75 bp, synthetic construct
  source 1..75: mol_type = other DNA
caggaaaactctccatcacccgtgccacccgggctctgacgttcctgtcagagctgggactgattacctaccaga

SEQ ID NO: 419106 - DNA, 75 bp, synthetic construct
  source 1..75: mol_type = other DNA
ggaacgctgaagttctgcgaaaaactgatggaaaaggcggtgggtttcacctcccgttttgatttcgccattcat

SEQ ID NO: 419107 - DNA, 75 bp, synthetic construct
  source 1..75: mol_type = other DNA
acgttgacgcctcgtttttttgagtttttagggatatttccgttggcgctgactgaagcacgtctggctgtctta

SEQ ID NO: 419108 - DNA, 75 bp, synthetic construct
  source 1..75: mol_type = other DNA
aaagcgtgcccgtgcgcgtcgtgatgcgggcagggaacgtcaggatatcgtcactctggtgaaacgacagctgac

SEQ ID NO: 419109 - DNA, 75 bp, synthetic construct
  source 1..75: mol_type = other DNA
ctgcaggggctgtgtttccactatgacccgctggccaaccgcgtccagtgctccattaccacgctggccattgag

SEQ ID NO: 419110 - DNA, 75 bp, synthetic construct
  source 1..75: mol_type = other DNA
atgcttaacgaactggatgaagaaccgtcagctcgtcgtcgtactcgccgcccacgcaaacgcgcaccacgtcgt

SEQ ID NO: 419111 - DNA, 75 bp, synthetic construct
  source 1..75: mol_type = other DNA
tgccagatatatttggtcgcgatgcactctacgacgactcgtttacctggccattaatcaaatttgagcgagttg

SEQ ID NO: 419112 - DNA, 75 bp, synthetic construct
  source 1..75: mol_type = other DNA
atgcgctcctgcaggggctgtgtttccaccattgagtgcggactggcgacggagtctgctgccggaaaactctcc

SEQ ID NO: 419113 - DNA, 75 bp, synthetic construct
  source 1..75: mol_type = other DNA
atgggaaaacaaacagcgcaaaagcaggggctggataccctgggtatggatgagctgatagcgaaagcctggcgt

SEQ ID NO: 419114 - DNA, 75 bp, synthetic construct
  source 1..75: mol_type = other DNA
atcagcagggcattatccggaatgacggattctggccggacattaatgcgggagactttgaaaaaagtcgcacca

SEQ ID NO: 419115 - DNA, 75 bp, synthetic construct
  source 1..75: mol_type = other DNA
agttctgcgaaaaactgatggaaaaggcggtgggcttcacctcccgttttgattttgccgcacatgtggcgtatg

SEQ ID NO: 419116 - DNA, 75 bp, synthetic construct
  source 1..75: mol_type = other DNA
gggggggggggtaacgtaaagattataaatataaattttacaaaacgtaaaaatatactacgtcattcggtaaga

SEQ ID NO: 419117 - DNA, 75 bp, synthetic construct
  source 1..75: mol_type = other DNA
gcctaatgatagaaaatggcattcaacgttgggcatctaagctatgtccaaaaattgatgttgaagaaaataaag

SEQ ID NO: 419118 - DNA, 75 bp, synthetic construct
  source 1..75: mol_type = other DNA
tcagcgctccatcaccaatctggccatcgagtgcggtctcgccaccgagtcgaaaagcggtaatctgtccatcac

SEQ ID NO: 419119 - DNA, 75 bp, synthetic construct
  source 1..75: mol_type = other DNA
agagcatggcgttttgtgcgcgagcgtttccgcagttaccaggcagagcgcagggcccacggcatgaaacgtgcc

SEQ ID NO: 419120 - DNA, 75 bp, synthetic construct
  source 1..75: mol_type = other DNA
ggagtctgctgccggaaaactctccatcacccgtgccacccgtgccctgacgttcctgtcagagctggggttgat

SEQ ID NO: 419121 - DNA, 75 bp, synthetic construct
  source 1..75: mol_type = other DNA
atacttctgcagctcgaaacaaattataccgctctgcaacaagcgatcacattggcgcaaaaaaacagtatcccg

SEQ ID NO: 419122 - DNA, 75 bp, synthetic construct
  source 1..75: mol_type = other DNA
cgtgcccggtctgggtgcattactgctgaaaatgaaccttcaggggtacgactaccgccgcgatgatgagtttat

SEQ ID NO: 419123 - DNA, 75 bp, synthetic construct
  source 1..75: mol_type = other DNA
gattttcctaacaatggtaatcttttcaatgactttctatttaaccatcaacaagatgaacaattagcaatggca

SEQ ID NO: 419124 - DNA, 75 bp, synthetic construct
  source 1..75: mol_type = other DNA
cactgaacttaagacctcttttctgaagctcacaatggatccgccggtacccataacatccccggtgttcatgga

SEQ ID NO: 419125 - DNA, 75 bp, synthetic construct
  source 1..75: mol_type = other DNA
ggatgcgacagtcgaagcaagcgaaactcctgcaacaacagtcgccgcagaaattatcagttgtaatttgtgtct

SEQ ID NO: 419126 - DNA, 75 bp, synthetic construct
  source 1..75: mol_type = other DNA
attcattcgccagcgtttccagcggtcgttaaaaatacggcaggagccggggatgcgtttaacggcgctctggca

SEQ ID NO: 419127 - DNA, 75 bp, synthetic construct
  source 1..75: mol_type = other DNA
tggcctgaagcgcgcccgcgcccgacgtgacgcggacagagcccgtaaggacattgtgacgctggtgaaacagca

SEQ ID NO: 419128 - DNA, 75 bp, synthetic construct
  source 1..75: mol_type = other DNA
caaaccgtccccaaaagataagtatgttgcatatgctattaacattcctgactatgaactggcagctgatgtata

SEQ ID NO: 419129 - DNA, 75 bp, synthetic construct
  source 1..75: mol_type = other DNA
tcatgatggactagttataataaataaaggaaacgaagaagttgaaggtacctggcctaacaaattgcaacctgg

SEQ ID NO: 419130 - DNA, 75 bp, synthetic construct
  source 1..75: mol_type = other DNA
ggtatcggtggcctgggcgtctgcttctaccttccgtggtggcgacaaacgtggtggtgccaacggtgcgcgtct

SEQ ID NO: 419131 - DNA, 75 bp, synthetic construct
  source 1..75: mol_type = other DNA
caccggctttaagaaagtggattatgcgcagtggtgtggcgcatattccacagttgaaagattatccaacgcgct

SEQ ID NO: 419132 - DNA, 75 bp, synthetic construct
  source 1..75: mol_type = other DNA
ccgcctactggcgcgccacccgcaaattgcgtttaaaactctacggcaagatattaaaaagccgatgcctgactg

SEQ ID NO: 419133 - DNA, 75 bp, synthetic construct
  source 1..75: mol_type = other DNA
gtggctgatcttcagcaaacttattatcgccaggtaaagaacccgaatccggtgttcacaccccgtgaaggtgcc

SEQ ID NO: 419134 - DNA, 75 bp, synthetic construct
  source 1..75: mol_type = other DNA
cggcggcgccgggcgtggtcagcaacgttttgctccgctcaactcctggcctgataacgtcagcctggataaagc

SEQ ID NO: 419135 - DNA, 75 bp, synthetic construct
  source 1..75: mol_type = other DNA
gttgagaaagccgcaagcgccgcaggtttgagcattcatgtaccgtttgcgccgggtcgcgttgatgcgcgtcag

SEQ ID NO: 419136 - DNA, 75 bp, synthetic construct
  source 1..75: mol_type = other DNA
gtgactgatatccttcaaaaccactattcacaggttaaaaacccgaacccggttttcacgccgcgagaagggaaa

SEQ ID NO: 419137 - DNA, 75 bp, synthetic construct
  source 1..75: mol_type = other DNA
attctggtctgtctgtcagcgaactggtgtcggtggcctgggcgtctgcttcaaccttccgtggtggagacaaac

SEQ ID NO: 419138 - DNA, 75 bp, synthetic construct
  source 1..75: mol_type = other DNA
cgcgtcaggatcagactgacatcgagatgttcgagctgctggagccgattgctgacggcttccgtaactatcgcg

SEQ ID NO: 419139 - DNA, 75 bp, synthetic construct
  source 1..75: mol_type = other DNA
tcccggatccgttcgatccgtcgaagaaacgtaaaccgacaatgctggtgaccgacctgacgctgcgttttgatc

SEQ ID NO: 419140 - DNA, 75 bp, synthetic construct
  source 1..75: mol_type = other DNA
aaatcagcattcactggctggtctttttgctggttatcgcagcgtattgcgcaatggagtttcggggtttcttcc

SEQ ID NO: 419141 - DNA, 75 bp, synthetic construct
  source 1..75: mol_type = other DNA
acgacgcaatggtggcggagttgaaccgacgctatgtcgcacagattccaggctttcagtgctgcggcaccgcct

SEQ ID NO: 419142 - DNA, 75 bp, synthetic construct
  source 1..75: mol_type = other DNA
tcgccgatacgtagcacaaatcccaggctttcaatgctgtggaacagcctcgacgctggagaaagccaaagagat

SEQ ID NO: 419143 - DNA, 75 bp, synthetic construct
  source 1..75: mol_type = other DNA
tgagttacaggtaaagctgttaaaccgtagtacacgcagcattggcctgaccgaagccggtagaatttactacca

SEQ ID NO: 419144 - DNA, 75 bp, synthetic construct
  source 1..75: mol_type = other DNA
atttgtgactaatgatccgatgacgctggtgcgctggttaaccgcaggggcaggaatcgcctatgtaccgctgat

SEQ ID NO: 419145 - DNA, 75 bp, synthetic construct
  source 1..75: mol_type = other DNA
gtcagacggtgtcaaaactggaagatgagttgcaggtaaagctgttaaaccgtagcacacgcagcattggcctga

SEQ ID NO: 419146 - DNA, 75 bp, synthetic construct
  source 1..75: mol_type = other DNA
taacaattcctgagattattaatatcacaggtaggttgataaattataaaattaataaaaatatttcatttgttg

SEQ ID NO: 419147 - DNA, 75 bp, synthetic construct
  source 1..75: mol_type = other DNA
gctttttgatgcttgccccatcattattatatgcatccattaatggtataaccttgagtccaaccagggtaattc

SEQ ID NO: 419148 - DNA, 75 bp, synthetic construct
  source 1..75: mol_type = other DNA
cagatggaaaagagataaaaggtcatctgcaatttgcaataaatagcaggataaaattgatataccggcccgcaa

SEQ ID NO: 419149 - DNA, 75 bp, synthetic construct
  source 1..75: mol_type = other DNA
gtgttcgttttaaagacactgtaaatcttgaggttcgcagagccaggcgctgggaagtctggcagtggttctgga

SEQ ID NO: 419150 - DNA, 75 bp, synthetic construct
  source 1..75: mol_type = other DNA
ggatcaaagtgttcaactgtcaatcaaactgggcgtggttggcgctgtgttaggagtcatgggcttcttgaccgg

SEQ ID NO: 419151 - DNA, 75 bp, synthetic construct
  source 1..75: mol_type = other DNA
aaaatgatcggaaggcgtgtgctgcgtgattttgtcattcgtagaaacggcgatgagtttgacgaggcaaaggta

SEQ ID NO: 419152 - DNA, 75 bp, synthetic construct
  source 1..75: mol_type = other DNA
tgattgccgatggccttgacgtggtgatccgcgttggcgcattacaagattccagcctgttttcccgccgcctgg

SEQ ID NO: 419153 - DNA, 75 bp, synthetic construct
  source 1..75: mol_type = other DNA
gcgtacttgccaccggcagtgccgacgttaaaggaaccacgctgaataataccggtacgcttcagggtgcggagc

SEQ ID NO: 419154 - DNA, 75 bp, synthetic construct
  source 1..75: mol_type = other DNA
ccagaagcatactgtggtgggagtccgtcaccatcaacggacagacagtcatggttccgaaactgtatctgtctc

SEQ ID NO: 419155 - DNA, 75 bp, synthetic construct
  source 1..75: mol_type = other DNA
aaccacaacagacagcggtaaaaccgtcaccatcaacagtggtcgggatacggtactgaacggtgctcaggtcaa

SEQ ID NO: 419156 - DNA, 75 bp, synthetic construct
  source 1..75: mol_type = other DNA
taaccgttcactgctgcagggctatacggaagtggccggcaaagcggcgaatgtgatggttgccaacccgtatgg

SEQ ID NO: 419157 - DNA, 75 bp, synthetic construct
  source 1..75: mol_type = other DNA
gcttcttggagcgaaaccgggtcaggcgccacgtgaaacggctccgtcgtataccgatgaaaaacagtttctggg

SEQ ID NO: 419158 - DNA, 75 bp, synthetic construct
  source 1..75: mol_type = other DNA
cgggcagagagttaagcaatcagagctggcagacggggacagagaatgaatatctggtataccgctacgacccga

SEQ ID NO: 419159 - DNA, 75 bp, synthetic construct
  source 1..75: mol_type = other DNA
ctacaagattttgcaaattcaacatattgcaggaagtatgtaggcctgataagcgtagcgcatcaggcagttttg

SEQ ID NO: 419160 - DNA, 75 bp, synthetic construct
  source 1..75: mol_type = other DNA
tcaggaaatcagtacccactttgtttccatcgagaaactcattgctgacttcctccatgatgtagaatccattcg

SEQ ID NO: 419161 - DNA, 75 bp, synthetic construct
  source 1..75: mol_type = other DNA
gttaccagtcagatcctcgcccggtttatgcgctatataccgaaaaagataagttgccgttaaaggtgcaggtag

SEQ ID NO: 419162 - DNA, 75 bp, synthetic construct
  source 1..75: mol_type = other DNA
taatgagtttgagtctgaaaaccggcgcggacgcatttcacgacgtaagacggtactggtccggcaggcatccgg

SEQ ID NO: 419163 - DNA, 75 bp, synthetic construct
  source 1..75: mol_type = other DNA
tcgccagcggtggtgacaccaccatcaccgcaggacgggatatcaccgctgttgcgtcatccgttaccgcaaccg

SEQ ID NO: 419164 - DNA, 75 bp, synthetic construct
  source 1..75: mol_type = other DNA
tatactggaatgttggaacacaaaaagtacgagcaccggttagaagcaaaaggtccaactattgaagaaatagct

SEQ ID NO: 419165 - DNA, 75 bp, synthetic construct
  source 1..75: mol_type = other DNA
actaagggaggtaacacgtctcgacatgtcaagttccattatccagcgggccatgccaatgctgaaaagcctgcg

SEQ ID NO: 419166 - DNA, 75 bp, synthetic construct
  source 1..75: mol_type = other DNA
gttgttccactgattcaccatatccagaagctgactgaaagagttgatgaacttgagtcagaattaaagttgtta

SEQ ID NO: 419167 - DNA, 75 bp, synthetic construct
  source 1..75: mol_type = other DNA
ggaaaaggcaccgtcagccgtgactgggttggtcgcgatgcggcgaaaatcgcggcggcaatcggcctgaacgtg

SEQ ID NO: 419168 - DNA, 75 bp, synthetic construct
  source 1..75: mol_type = other DNA
cgcgcggcacaccaggcgttgagtgcctctctccgcaagtgctgactggcgacaacggcctgaccctaattgaaa

SEQ ID NO: 419169 - DNA, 75 bp, synthetic construct
  source 1..75: mol_type = other DNA
tgccgaaggtgtaatgtacgaacgtctggttgttccactgattcaccatatccagaaactgaccgaaagagttga

SEQ ID NO: 419170 - DNA, 75 bp, synthetic construct
  source 1..75: mol_type = other DNA
tacactgccgatgctggtttattacggtatgttactggttgcgcccgcatggctttatgccatagcgttttttct

SEQ ID NO: 419171 - DNA, 75 bp, synthetic construct
  source 1..75: mol_type = other DNA
gggcggattcctgtcatttattatctgcgccatgatgtttgctggcatcctgacgggaacaggaatgatggatgt

SEQ ID NO: 419172 - DNA, 75 bp, synthetic construct
  source 1..75: mol_type = other DNA
cgcaggtgctgaccggtgataacggcctgaccttgattgaaaacgcaccctggggcgtggtggcttcggtgacac

SEQ ID NO: 419173 - DNA, 75 bp, synthetic construct
  source 1..75: mol_type = other DNA
atcgagaacatgaaccagatggcgaacgccattgataccagcattttcgttaagaacggaccgtgcattgccggg

SEQ ID NO: 419174 - DNA, 75 bp, synthetic construct
  source 1..75: mol_type = other DNA
gcacgcggtgaaactgaccgcagagcaggcgcagcaactgcaaccggtgttgctgaaaaatatcgacgagcgcgg

SEQ ID NO: 419175 - DNA, 75 bp, synthetic construct
  source 1..75: mol_type = other DNA
tggggcgtggtggcttcggtgacgccttccactaacccggcggcaaccgtaattaataacgccatcagcctgatt

SEQ ID NO: 419176 - DNA, 75 bp, synthetic construct
  source 1..75: mol_type = other DNA
acgccgggcgttgagtgtctctctgcgcaggtgctgaccggcgacaacggcctgaccctaattgaaaacgcgccc

SEQ ID NO: 419177 - DNA, 75 bp, synthetic construct
  source 1..75: mol_type = other DNA
cgaagcggtagtggaagcggcgcgcaaacacaccaataaacgtctgattgccgcaggcgctggcaacccgccggt

SEQ ID NO: 419178 - DNA, 75 bp, synthetic construct
  source 1..75: mol_type = other DNA
ctccgaccgctcggttcgtagccgagtactctatccagctgagctacggatgcatcgggaaatttattttactgc

SEQ ID NO: 419179 - DNA, 75 bp, synthetic construct
  source 1..75: mol_type = other DNA
ggggtgaaggttaagttactgtggcctggtaaactcgcgatgaccatgatctcttctgcaaacagtctggtggta

SEQ ID NO: 419180 - DNA, 75 bp, synthetic construct
  source 1..75: mol_type = other DNA
cggcattcaacaagctggcaaagaacgccttcaacgagaagacgggctgccggatgctcgaagcctttaagcgca

SEQ ID NO: 419181 - DNA, 75 bp, synthetic construct
  source 1..75: mol_type = other DNA
atggaagttcaggcggcttttggcttcgtgaagaacgttcgtcgttacgcctcaattctccatgcccggccaatg

SEQ ID NO: 419182 - DNA, 75 bp, synthetic construct
  source 1..75: mol_type = other DNA
tcctctggacagaacgaggcgcagcacgccacgccaaaatgctcgaaaccgatcaggcatgggatgtgttcgaaa

SEQ ID NO: 419183 - DNA, 75 bp, synthetic construct
  source 1..75: mol_type = other DNA
gaccagaacggcaggccgtgtccctgctggcagtcaggtgcatcgcctggttcccctgtccgatacacaatacgt

SEQ ID NO: 419184 - DNA, 75 bp, synthetic construct
  source 1..75: mol_type = other DNA
gggttaaaggttaagttactgtggccaggtaaactcgcgatgaccatgacttcttcagcaaacagtctggttgta

SEQ ID NO: 419185 - DNA, 75 bp, synthetic construct
  source 1..75: mol_type = other DNA
ctgccggtgttcaacaccgtgcgtgaagccgttgctgccactggcgctaccgcttctgttatctacgtaccagca

SEQ ID NO: 419186 - DNA, 75 bp, synthetic construct
  source 1..75: mol_type = other DNA
aagcgctgctcaagctgcaagagcagaacgacagtctgcaagcgcagattgctgccgcccagactggcggtaatg

SEQ ID NO: 419187 - DNA, 75 bp, synthetic construct
  source 1..75: mol_type = other DNA
tttactgcagattttttgataccgctactaaagccgtatcaagtaagagatggtgcatccgggaggattcgaacc

SEQ ID NO: 419188 - DNA, 75 bp, synthetic construct
  source 1..75: mol_type = other DNA
gaaacaatcaaaggcaatcgtgacgtgaaagcattcgagcaactgtgctacgagctgaatttccgttcgttcctt

SEQ ID NO: 419189 - DNA, 75 bp, synthetic construct
  source 1..75: mol_type = other DNA
cgtttttgattattcccgcacactcgcgcagaaggagttccccgtcgggctacggtctctgttaatacgggaata

SEQ ID NO: 419190 - DNA, 75 bp, synthetic construct
  source 1..75: mol_type = other DNA
tacggtcatggttaatgcgggaatacagcgacgatacagcgcatgatgtgtcaggcttgaatacatttatccgtt

SEQ ID NO: 419191 - DNA, 75 bp, synthetic construct
  source 1..75: mol_type = other DNA
tacccgggcgtagatccgtcgaaactgacagaagatcagaagcaaactgtaagcacgctggcaacgctgtcagcg

SEQ ID NO: 419192 - DNA, 75 bp, synthetic construct
  source 1..75: mol_type = other DNA
aacggacaaacagtcatggtcccgaaactgtatctgtcgccggaagatatcaccctgcataacggcagcgttatc

SEQ ID NO: 419193 - DNA, 75 bp, synthetic construct
  source 1..75: mol_type = other DNA
aacaggggcgataaccgcggagatattgtgattgcaggaagccagcttaaggccggtggtaacacaagcctggat

SEQ ID NO: 419194 - DNA, 75 bp, synthetic construct
  source 1..75: mol_type = other DNA
gggagtcagccaccatcaacggacagacagtcatggtcccgaaactgtatctgtcgccggaagatatcaccctgc

SEQ ID NO: 419195 - DNA, 75 bp, synthetic construct
  source 1..75: mol_type = other DNA
tcaataatgcggtcaccagtgcacaggagacgaaggagagcagtgacagccgtctgaaagccctgcaggccacaa

SEQ ID NO: 419196 - DNA, 75 bp, synthetic construct
  source 1..75: mol_type = other DNA
tcctctccggcagtaacctcacgctgacggcgcaggtgctggcgaataccggcagtggactggtacaggctgcca

SEQ ID NO: 419197 - DNA, 75 bp, synthetic construct
  source 1..75: mol_type = other DNA
agacacactgaccaccacagaaaaatcggtcacaaacagtgacggtaacctcatgctggacagcgcgtcttccac

SEQ ID NO: 419198 - DNA, 75 bp, synthetic construct
  source 1..75: mol_type = other DNA
ggtattgcggggggacttgccggcaacagtacaagtgctgccggtacgggggcacaggcaggcaggaactcggct

SEQ ID NO: 419199 - DNA, 75 bp, synthetic construct
  source 1..75: mol_type = other DNA
gtaaagcagagctggcccgttttcttaatgagtacggaacacaattacagctttacagaggaatgagtgaagcag

SEQ ID NO: 419200 - DNA, 75 bp, synthetic construct
  source 1..75: mol_type = other DNA
gatatcctggccggcaacagtctgtgggtacagaaggatgcttccggcggtgcaaacacagagattatcaatacc

SEQ ID NO: 419201 - DNA, 75 bp, synthetic construct
  source 1..75: mol_type = other DNA
gtggttttaccggcacggcaggcagtctgacaatgaatgtggccggtaccctgctgaacagtgcgctgatttatg

SEQ ID NO: 419202 - DNA, 75 bp, synthetic construct
  source 1..75: mol_type = other DNA
tcgttgcatgataagtacggttccggggctgcctcgaatccgaatatcggtaaagatctgaccgatgcggaaaaa

SEQ ID NO: 419203 - DNA, 75 bp, synthetic construct
  source 1..75: mol_type = other DNA
ccggagaggcattcaccaacaatggaacgctgactgccggtaaaggcaacagtgttttcagcgcacagcgtcttt

SEQ ID NO: 419204 - DNA, 75 bp, synthetic construct
  source 1..75: mol_type = other DNA
gtaaaaaacgggaggccgcataatgcgtattcgctacggttgggaactggctcttgccgcactgctcgttattga

SEQ ID NO: 419205 - DNA, 75 bp, synthetic construct
  source 1..75: mol_type = other DNA
gctgcatggcggcactggcggggattgtgtttgcttcgcagattggttttatccccaaccagaccggtaccgggc

SEQ ID NO: 419206 - DNA, 75 bp, synthetic construct
  source 1..75: mol_type = other DNA
ccgtgaccggcagcagttcatactcgaaaaggaaaacggtcattgatgaaaccgttcgccagcagggagcggaaa

SEQ ID NO: 419207 - DNA, 75 bp, synthetic construct
  source 1..75: mol_type = other DNA
gcgaacctgagccgtgaccctgcgcacgctaatgacagtatcagcccgatatttgacaaggagaaagagcagagg

SEQ ID NO: 419208 - DNA, 75 bp, synthetic construct
  source 1..75: mol_type = other DNA
tctggtgcgtattaatcgtgtgctgcacgttgttgatattcacactcctgacccggaatcgcctgtgcgaaatac

SEQ ID NO: 419209 - DNA, 75 bp, synthetic construct
  source 1..75: mol_type = other DNA
atgctgaagtttattcagaacaaccgtgaaatcacggcactgctggcaatgggcgcgacgctggtaatgcttacg

SEQ ID NO: 419210 - DNA, 75 bp, synthetic construct
  source 1..75: mol_type = other DNA
gaccgggaaagtgctgggtaaccagggattaatcagcgcgaagacgctggaagtgaatggtgattcgctcagcaa

SEQ ID NO: 419211 - DNA, 75 bp, synthetic construct
  source 1..75: mol_type = other DNA
agtggctccgtgctggcaaccggtaaccttactgcttcagcaaccggtcagttgaccagtaccggcgatatcatg

SEQ ID NO: 419212 - DNA, 75 bp, synthetic construct
  source 1..75: mol_type = other DNA
tgcgcaggcgctgagctccggtaaaaaatcggtcacccacagcgatgctgcgatgacgctgaatgtgacaacagt

SEQ ID NO: 419213 - DNA, 75 bp, synthetic construct
  source 1..75: mol_type = other DNA
caacatcactgtccgggccgggcgcgatgttaatctgctggcggaagagtccgtgaccggcagcagttcatactc

SEQ ID NO: 419214 - DNA, 75 bp, synthetic construct
  source 1..75: mol_type = other DNA
tcacaggtaacagtctgaccaaccgtggcctgttccaggccgcacaactgaacgtcaacacgcagaccatcacca

SEQ ID NO: 419215 - DNA, 75 bp, synthetic construct
  source 1..75: mol_type = other DNA
ctcagtcagaatgcatttgtccttactgcacccgtgctgaccaacaacggcaccattcagggcaacggtaaaacc

SEQ ID NO: 419216 - DNA, 75 bp, synthetic construct
  source 1..75: mol_type = other DNA
gtcactgccacggggaaaaataaggaccataacaacagcggcgatattctcattaccgggagccagattaagtcc

SEQ ID NO: 419217 - DNA, 75 bp, synthetic construct
  source 1..75: mol_type = other DNA
gatattgtgattgccggaagccagcttaaggccggtggtaacacaagcctggatgccgcgaatgatattctgttg

SEQ ID NO: 419218 - DNA, 75 bp, synthetic construct
  source 1..75: mol_type = other DNA
gggaatataggttcttcaattggttcagaaggatcaggagctataatccaagaacagttaaaaaatcagcaggag

SEQ ID NO: 419219 - DNA, 75 bp, synthetic construct
  source 1..75: mol_type = other DNA
acactcattgatggacgaatccaagctaaaatagataagcaaaacaagcctcttcctaacggcaatatggctaca

SEQ ID NO: 419220 - DNA, 75 bp, synthetic construct
  source 1..75: mol_type = other DNA
ttgaacaaatcctcaagccagagaaaaactgggaaactgctcgaaacaaggcattggatcttgtaggtaatttag

SEQ ID NO: 419221 - DNA, 75 bp, synthetic construct
  source 1..75: mol_type = other DNA
cggtgcattaaacgtcaacgccagagacatcagcaatagtgggcagcttcagggggcggataaccgaatcaccgc

SEQ ID NO: 419222 - DNA, 75 bp, synthetic construct
  source 1..75: mol_type = other DNA
caggtcgcgaaagaacgcgttgaagcagaaaacgaacgctacaggaaagaaaattgtgagggaatgagtgctgat

SEQ ID NO: 419223 - DNA, 75 bp, synthetic construct
  source 1..75: mol_type = other DNA
tgctaaaatacctgtcgataagattgaactatatatgcgtggtaaagcttctggtgaccttgattctttgcaagc

SEQ ID NO: 419224 - DNA, 75 bp, synthetic construct
  source 1..75: mol_type = other DNA
agacacactgaccaccacagaaaaatcagtcacaaacagtgacggtaacctcatgctgaacagcgcgtcttccac

SEQ ID NO: 419225 - DNA, 75 bp, synthetic construct
  source 1..75: mol_type = other DNA
cagctgcgtgatgaacgggggcgttttgcaccggcttcccgtcgcaggaaagcgccggagatacgttttaagccc

SEQ ID NO: 419226 - DNA, 75 bp, synthetic construct
  source 1..75: mol_type = other DNA
ggcaggcaggaacgcggttgagaataactatcttagcgtgtctgaaaagacagagcttgagatagcaaaacagac

SEQ ID NO: 419227 - DNA, 75 bp, synthetic construct
  source 1..75: mol_type = other DNA
agcagcaaaggtggcggcgtgggcgtcagctttggtggtggaaccaatggcggaggcctcagtatcttcgccggt

SEQ ID NO: 419228 - DNA, 75 bp, synthetic construct
  source 1..75: mol_type = other DNA
aacgctcagcaacagtggctccctgctcagtggcggtcgcctgaccgtgaatacccgcgactttacccagagcgg

SEQ ID NO: 419229 - DNA, 75 bp, synthetic construct
  source 1..75: mol_type = other DNA
ccaggccagtggtgtgcttctcagccagaacgtatcagcgctttccgcacccgtgctgaccaatgacggcaccat

SEQ ID NO: 419230 - DNA, 75 bp, synthetic construct
  source 1..75: mol_type = other DNA
caggctatatcgctggcaacataatcaaagttccttttgagaaagtgcttaatccagtgtcaaagcagtatgaat

SEQ ID NO: 419231 - DNA, 75 bp, synthetic construct
  source 1..75: mol_type = other DNA
aggcgcaattggcgcgggtactggcgaagtgatcgcgtcagccattgcaaaaagcctctacccggacgtagatcc

SEQ ID NO: 419232 - DNA, 75 bp, synthetic construct
  source 1..75: mol_type = other DNA
aggtcacagcggacatgcggaaggaacgactcaggccgcagtggcagaaggcactatcaccatccgggacaggga

SEQ ID NO: 419233 - DNA, 75 bp, synthetic construct
  source 1..75: mol_type = other DNA
cagccaccacggacaaccggggcagtctgctttcggccggcacgctctctcttgatggaaattcactggataacc

SEQ ID NO: 419234 - DNA, 75 bp, synthetic construct
  source 1..75: mol_type = other DNA
cgtatagaggattttgtttttccggatgcggaagcactgatcctgaaaaattttgagcatgaactgaaattccgg

SEQ ID NO: 419235 - DNA, 75 bp, synthetic construct
  source 1..75: mol_type = other DNA
tgtctccctcagcaatccgggaaaaatcatcgctgacacgctgagcgtcagggcgaccacgctggatggtgacgg

SEQ ID NO: 419236 - DNA, 75 bp, synthetic construct
  source 1..75: mol_type = other DNA
accgggatgtgtcactggcggcgggtaaccatgttgatgttcttgctgccaccaatacagatacgtcctggcgct

SEQ ID NO: 419237 - DNA, 75 bp, synthetic construct
  source 1..75: mol_type = other DNA
cagcagtctgtttgccggactgtatgacctgctcaggatgcaccccgggcaggcaccacgtgaaacagacctggc

SEQ ID NO: 419238 - DNA, 75 bp, synthetic construct
  source 1..75: mol_type = other DNA
aaaatcatacattccggttgagaatgtcgcagtacctgatggtgcaaattctgtttcagtcagagtgggcgattt

SEQ ID NO: 419239 - DNA, 75 bp, synthetic construct
  source 1..75: mol_type = other DNA
taagcagccagcaggacaccagtaagtacgacagtaaacagaccagcgtggctgccggcggcagttttacctttg

SEQ ID NO: 419240 - DNA, 75 bp, synthetic construct
  source 1..75: mol_type = other DNA
gcagcgagaaaggtaacggtactgagtggactgaaaccacaacagacagcggtaaaaccgtcaccatcaacagtg

SEQ ID NO: 419241 - DNA, 75 bp, synthetic construct
  source 1..75: mol_type = other DNA
ttgccctttccggcacagtgggcagtgccatcaataatgcggtcaccagtgcacaggagacgaaggagagcagtg

SEQ ID NO: 419242 - DNA, 75 bp, synthetic construct
  source 1..75: mol_type = other DNA
gaccaggtgtctgcaaatactcttacaacggcttttaaaaaggccagggaaaaatgtggcataaaatgggagcaa

SEQ ID NO: 419243 - DNA, 75 bp, synthetic construct
  source 1..75: mol_type = other DNA
gtgcggacggcgatatggaaggcattccggtggcgctaatggaagcgatggcggtcggcattccggtggtttcta

SEQ ID NO: 419244 - DNA, 75 bp, synthetic construct
  source 1..75: mol_type = other DNA
ttacagtttcttcatggctcgacaaatatgaattggtgcaggaggaaagattgaaacacaacgaactgcgcccaa

SEQ ID NO: 419245 - DNA, 75 bp, synthetic construct
  source 1..75: mol_type = other DNA
tgcgtctggccggatggccggataacaaaccggtctggacaggaagttgcccgtgccagcctttcagctcggctg

SEQ ID NO: 419246 - DNA, 75 bp, synthetic construct
  source 1..75: mol_type = other DNA
aagagtcccctagaggaactgaaagctaacaagcctgacgaatacaacaagatgattggcaatatcgtctggaag

SEQ ID NO: 419247 - DNA, 75 bp, synthetic construct
  source 1..75: mol_type = other DNA
atataattctatccaggaggacaggctgcaacataatgaactaagacccaactcctatcggcaaaaaggcaaacc

SEQ ID NO: 419248 - DNA, 75 bp, synthetic construct
  source 1..75: mol_type = other DNA
ctttatctgaacgcctttacaaggagcaagggatagataccagaaaactgctgggccataaaacccagcagcaaa

SEQ ID NO: 419249 - DNA, 75 bp, synthetic construct
  source 1..75: mol_type = other DNA
aaaatctttgatatcgcagatgccagtcatcgttatatggggaatgccatgctgttagcactggttaccggccag

SEQ ID NO: 419250 - DNA, 75 bp, synthetic construct
  source 1..75: mol_type = other DNA
tgccgtgactatgcagtcagcccataccttgtacatttttttcgtacgacttcacaggctgaacgtggcgcgcag

SEQ ID NO: 419251 - DNA, 75 bp, synthetic construct
  source 1..75: mol_type = other DNA
cttggtcacaaaacacaacaacaaaccgatcgttatcatgacgaccgaggcaaaggatggagcaaagtagcatgg

SEQ ID NO: 419252 - DNA, 75 bp, synthetic construct
  source 1..75: mol_type = other DNA
acgcctcagcctggaagaatggcaaaaaatattcgatatcgcagacgccactcatcgttacatgggaaatgccat

SEQ ID NO: 419253 - DNA, 75 bp, synthetic construct
  source 1..75: mol_type = other DNA
cctgccacattccatgagcaacgatctttatctgaacgcctttacaaggaacagggattagatacacaaaaacta

SEQ ID NO: 419254 - DNA, 75 bp, synthetic construct
  source 1..75: mol_type = other DNA
aatgggttatgtttttgccttgttctaaagaagaggttgagccgcgccacgtttttgatattgtttttggtgtgc

SEQ ID NO: 419255 - DNA, 75 bp, synthetic construct
  source 1..75: mol_type = other DNA
gtcttcctgttgccatcggtaacgggcgcggatggcgatatggaaggcattccggtagcgctgatggaggcgatg

SEQ ID NO: 419256 - DNA, 75 bp, synthetic construct
  source 1..75: mol_type = other DNA
ctaaacagatcctcaagcatgtgccgctccagagcattgcggcagaacaggtttacgcctcagcagtggcgcagc

SEQ ID NO: 419257 - DNA, 75 bp, synthetic construct
  source 1..75: mol_type = other DNA
ttgtcgctttgcaaaaaggcgatacagagaacacccacgcggcctggacgaaatacaaccttgctgtcagaaccc

SEQ ID NO: 419258 - DNA, 75 bp, synthetic construct
  source 1..75: mol_type = other DNA
atcgtaaaaatacctggcaggcgctcaacctcaaacgctatggcgctgagtcgcggaacctgattttgtctgcca

SEQ ID NO: 419259 - DNA, 75 bp, synthetic construct
  source 1..75: mol_type = other DNA
aaatacaaccttgccgcaagaacccgttggttacaggacgaacctgcgggcaaagtagcgaaattgcgccaccgc

SEQ ID NO: 419260 - DNA, 75 bp, synthetic construct
  source 1..75: mol_type = other DNA
aaatataaccttgccgccagaacccgctggttacaggacgaaccacaaggcaaagtggcgaaactgcgccaccgc

SEQ ID NO: 419261 - DNA, 75 bp, synthetic construct
  source 1..75: mol_type = other DNA
attctgcaatttcgggacgttacactgtctctgcaccttataaagcgggtgccgggattggcgtcctgaaattgt

SEQ ID NO: 419262 - DNA, 75 bp, synthetic construct
  source 1..75: mol_type = other DNA
ttcactgtcaacggaggctgccatcatggctacgatcccagccctcactcaacctgaaatcaccattgacaacgg

SEQ ID NO: 419263 - DNA, 75 bp, synthetic construct
  source 1..75: mol_type = other DNA
ggtgggtgatgtttttgccttgttcgaaagctgcagtggaatttcgtcatgttgtcgatttagtctttggtgtga

SEQ ID NO: 419264 - DNA, 75 bp, synthetic construct
  source 1..75: mol_type = other DNA
agcctgccgtcagttgaaagagcagggcgtggcatttcgctatcgcatcctcggcattggcccgtgggaacgacg

SEQ ID NO: 419265 - DNA, 75 bp, synthetic construct
  source 1..75: mol_type = other DNA
atttccgtcgcacgcttaaccgagaaaaaaggcctgcatgtggcgatcgaagcctgccggcagttgaaagagcag

SEQ ID NO: 419266 - DNA, 75 bp, synthetic construct
  source 1..75: mol_type = other DNA
gagctgcattgaagcattccaggaggcagggaacagcctgaatcttaccgctttccgccgtaatcagtgggaggc

SEQ ID NO: 419267 - DNA, 75 bp, synthetic construct
  source 1..75: mol_type = other DNA
acaaaaatatgcccgattcacgccgcggtcccaaccgcttccgtcggaaaaaagcaccgactctgtgtgcactgc

SEQ ID NO: 419268 - DNA, 75 bp, synthetic construct
  source 1..75: mol_type = other DNA
cgtgctcaaccagattgtggcctttatcgaaatgggccacgaggtcgaaattatcgccctgcaaaagggcgatat

SEQ ID NO: 419269 - DNA, 75 bp, synthetic construct
  source 1..75: mol_type = other DNA
ctgccgtggctgcacagcaaactggttccggcaggcaccgggcacgccaccgtaagctggatcgtgccagagtaa

SEQ ID NO: 419270 - DNA, 75 bp, synthetic construct
  source 1..75: mol_type = other DNA
cgccagcaaattaagcgcatgatccacgacctggaagcgaccggcattcgcaaaattctgcaaattgaactggcg

SEQ ID NO: 419271 - DNA, 75 bp, synthetic construct
  source 1..75: mol_type = other DNA
caggcttaacgcaactggtgctcaagctggaaacgctgggctggaaagtggcgattgcctccggcggctttactt

SEQ ID NO: 419272 - DNA, 75 bp, synthetic construct
  source 1..75: mol_type = other DNA
gattgatacgggaaaatccggttggttagttcctgagaatgatcctgatgaattggcaaatcaacttgctgagtt

SEQ ID NO: 419273 - DNA, 75 bp, synthetic construct
  source 1..75: mol_type = other DNA
aaaaagttgaaaccgagttcaatcagcaggtgattaaccgccagctcgcgagcctgctgcaaaccctttgctatt

SEQ ID NO: 419274 - DNA, 75 bp, synthetic construct
  source 1..75: mol_type = other DNA
agcgccgggcgacacgctgcaaattatctctgtggcccgcctgacggagaaaaaagggctgcatgtggcgattga

SEQ ID NO: 419275 - DNA, 75 bp, synthetic construct
  source 1..75: mol_type = other DNA
gatagacgccaacgcctccggctggctggtggcggagaacgacgctccggcgctggcgggcaaactcagcgaact

SEQ ID NO: 419276 - DNA, 75 bp, synthetic construct
  source 1..75: mol_type = other DNA
tcgtccgtatccgaccacatcacagccggacatggttcgccaggtggggacggataagaacttcccgggtgacgc

SEQ ID NO: 419277 - DNA, 75 bp, synthetic construct
  source 1..75: mol_type = other DNA
gcggagctggaggcgtacatcaatgtggtaaaacacttcaaccgtagcgggcagttgcgttattaccccggttcg

SEQ ID NO: 419278 - DNA, 75 bp, synthetic construct
  source 1..75: mol_type = other DNA
attgagtcgctgaaagagaaagataaaccgtttctctatctcgacacccacgcaggggccgggcgttatcagtta

SEQ ID NO: 419279 - DNA, 75 bp, synthetic construct
  source 1..75: mol_type = other DNA
atttctgtcgcacggttaaccgagaaaaaagggctgcatgtcgctattgacgcttgtcggcgactcaaagcgcag

SEQ ID NO: 419280 - DNA, 75 bp, synthetic construct
  source 1..75: mol_type = other DNA
gtgattcgtctggcaggttcgcttaccgcccgggctacgcgcctggcccatgaagcacaactggatgtcgcgccg

SEQ ID NO: 419281 - DNA, 75 bp, synthetic construct
  source 1..75: mol_type = other DNA
ggtggaggccgataaatccggctggctggtgcctgagaacgatgctcgagcactggcgcaacgactggcggcgtt

SEQ ID NO: 419282 - DNA, 75 bp, synthetic construct
  source 1..75: mol_type = other DNA
aagtgctcaaccactacactcccgaatatcagcaactgttccgccgtggcgacctgatgctaccgatcagcgatc

SEQ ID NO: 419283 - DNA, 75 bp, synthetic construct
  source 1..75: mol_type = other DNA
agtaatgaaacacaaacggtctattatgcaggcttttgtgagatgaatcgcgatacccgcagccagcttatgaat

SEQ ID NO: 419284 - DNA, 75 bp, synthetic construct
  source 1..75: mol_type = other DNA
cggtgcctatttcctgacgcaaatcgacagcgtactggtccttttgcgcattccggcatggtggaatgactttat

SEQ ID NO: 419285 - DNA, 75 bp, synthetic construct
  source 1..75: mol_type = other DNA
cgtcgcgacgctgctgctgggactgctggcggggtttatcaacggcgtgctggttgcctggctgaagatcccggc

SEQ ID NO: 419286 - DNA, 75 bp, synthetic construct
  source 1..75: mol_type = other DNA
gcgaggccaccgccctgttagccgtgctgctgctgttcgtgctgccagggatgctggacagccagtacctcagcg

SEQ ID NO: 419287 - DNA, 75 bp, synthetic construct
  source 1..75: mol_type = other DNA
ggaaaacatccacgctgcccagcactgtaacgagctgcagcgcagtgatgacatcaccctgaatctcgaccacca

SEQ ID NO: 419288 - DNA, 75 bp, synthetic construct
  source 1..75: mol_type = other DNA
tgtaacgaactgcagcgcagtgatgacatcaccctgaatcttgaccaccaactgcttggcctcggctctaactcc

SEQ ID NO: 419289 - DNA, 75 bp, synthetic construct
  source 1..75: mol_type = other DNA
gtggtcggcggggatcttccgcgatgtttatctgatcggaaaacaactcacgcatattaacgatttcaccgttcg

SEQ ID NO: 419290 - DNA, 75 bp, synthetic construct
  source 1..75: mol_type = other DNA
gcaaaacacccacgcggcatggacgaaatataaccttgccgccagaactagctggttacaggacgaaccacaagg

SEQ ID NO: 419291 - DNA, 75 bp, synthetic construct
  source 1..75: mol_type = other DNA
cgcatattaacgatttcaccgtgcgcaccgactttgacgaagcctattgcgatgccacgctttcctgcgaagtgg

SEQ ID NO: 419292 - DNA, 75 bp, synthetic construct
  source 1..75: mol_type = other DNA
ctggtggttccgcagcgcccaattaacttcagcgcctggcactacacccaggagaacatccacgccgcgcaacac

SEQ ID NO: 419293 - DNA, 75 bp, synthetic construct
  source 1..75: mol_type = other DNA
gaatcggcttatgacgttgcacgccaccgcctggcctctgacgagagcacgcccgacaatcctggtgaggatgga

SEQ ID NO: 419294 - DNA, 75 bp, synthetic construct
  source 1..75: mol_type = other DNA
ttaatttttctcgcctgatgaacgaagctcatgatgccggtgttcagtatgcgttggtgaaagtgaaccagtaca

SEQ ID NO: 419295 - DNA, 75 bp, synthetic construct
  source 1..75: mol_type = other DNA
ccttcacaattctctgttcacaggaacaggcacagatggcactggacgcgattgcgtatgttacagacacggatg

SEQ ID NO: 419296 - DNA, 75 bp, synthetic construct
  source 1..75: mol_type = other DNA
ggaacaccgaagcaacattgatgaatgagaaaaaggccccggtttatccccgctggcgcggggaacactctaaac

SEQ ID NO: 419297 - DNA, 75 bp, synthetic construct
  source 1..75: mol_type = other DNA
aaacttcccggaagagcagatgaagatgttacgggagaacttctctgaagcctcccgccagctggaagggctgca

SEQ ID NO: 419298 - DNA, 75 bp, synthetic construct
  source 1..75: mol_type = other DNA
gggacgctgatttttgatgataaaggtgaaattaaatttattggcccgcaggctaatcatcagggactcattcgt

SEQ ID NO: 419299 - DNA, 75 bp, synthetic construct
  source 1..75: mol_type = other DNA
tcgaagaaccggctcttcgacggcaataaggagctgaaggaattcatcatgacgctcaccggtacgctgattttc

SEQ ID NO: 419300 - DNA, 75 bp, synthetic construct
  source 1..75: mol_type = other DNA
ggctccgctttacccggccatgcggggcatggccttgtgggttttcagttatgtggcctcagcgtcgtgtgcggg

SEQ ID NO: 419301 - DNA, 75 bp, synthetic construct
  source 1..75: mol_type = other DNA
ggggccaacctgagccggctgaaagagtggatttttgaccccaataaggtgatcgaagaaccgcccctggatatt

SEQ ID NO: 419302 - DNA, 75 bp, synthetic construct
  source 1..75: mol_type = other DNA
gtcagtgatgacccgctgaccagtcaggaaaaaggctttattgaaagtaccagtgtacccattctgcgttacctg

SEQ ID NO: 419303 - DNA, 75 bp, synthetic construct
  source 1..75: mol_type = other DNA
cacgcaactgatgagtcgttatgagcagaacctgcattatacctcagtatcttctgcacagctgacgacaggagg

SEQ ID NO: 419304 - DNA, 75 bp, synthetic construct
  source 1..75: mol_type = other DNA
gttttgtgaagcagctgatggggaacgctgtggggtacttttttgacctggctctgcagactgccgtaccgggga

SEQ ID NO: 419305 - DNA, 75 bp, synthetic construct
  source 1..75: mol_type = other DNA
acaaagagctgaaagagttcattatgacgctcacaggtacgctgatttttggtgaagacagcgagattacccccc

SEQ ID NO: 419306 - DNA, 75 bp, synthetic construct
  source 1..75: mol_type = other DNA
cacgactacagcggcggcaaacctttatcttaatcctgaccccgcaatttcgtctgtactgcggtcaacatcgtc

SEQ ID NO: 419307 - DNA, 75 bp, synthetic construct
  source 1..75: mol_type = other DNA
cgcttcagactgatatgaccagtgcaaagcaggatatcagctccagatacacaaaaactgaagttgataataagc

SEQ ID NO: 419308 - DNA, 75 bp, synthetic construct
  source 1..75: mol_type = other DNA
gtacaggtcgcaatgcgaaaatgacaggcgtgactggggcttctagggattgattgccgaggaagtaggagaaat

SEQ ID NO: 419309 - DNA, 75 bp, synthetic construct
  source 1..75: mol_type = other DNA
ggcaaacccggatatcgaaaccgcgcaacgcttgttcaggttttcgggcatcggcctgcttgtggtgactggcgg

SEQ ID NO: 419310 - DNA, 75 bp, synthetic construct
  source 1..75: mol_type = other DNA
acaaaaactgaagtggataataagctgaaaaacaaactggaagtgaatgctctggaaagcggtaattatggtgga

SEQ ID NO: 419311 - DNA, 75 bp, synthetic construct
  source 1..75: mol_type = other DNA
gtgcaaagcaggatatcagctccagatacacaaaaactgaagttgataataagctgaaaaacaaagtggaagtga

SEQ ID NO: 419312 - DNA, 75 bp, synthetic construct
  source 1..75: mol_type = other DNA
gatcctcgtcgcttgccaaaaggcttaacgccgcagacgttacgcacgctgtgccagtggattgacgcgcatcag

SEQ ID NO: 419313 - DNA, 75 bp, synthetic construct
  source 1..75: mol_type = other DNA
cgtttattattccctgcactcaggagcaggcaaaaatggcacaagaagcaatcacattcgttaccgaagcagaaa

SEQ ID NO: 419314 - DNA, 75 bp, synthetic construct
  source 1..75: mol_type = other DNA
ttcctgcacgaaccactgaccgcgatattgtccgagcgattatggaagggggtaccgcgaaaatttatcactgca

SEQ ID NO: 419315 - DNA, 75 bp, synthetic construct
  source 1..75: mol_type = other DNA
gtacaggtcgcaatgcgaaaatgacaggcgtgactggggcttctaaggattgattgccgaggaagtgggagaaat

SEQ ID NO: 419316 - DNA, 75 bp, synthetic construct
  source 1..75: mol_type = other DNA
gtacaggtcgcaatgcgaaaatgacaggcgtgactggggattctacggattgattgccgaggaagtcggagaaat

SEQ ID NO: 419317 - DNA, 75 bp, synthetic construct
  source 1..75: mol_type = other DNA
gatcttactgtggcaaaattaattatcgccttagcttttgcgatttacgttattatcggcggttattcggcggta

SEQ ID NO: 419318 - DNA, 75 bp, synthetic construct
  source 1..75: mol_type = other DNA
ctgaacagcgtcattcggcaggcgataaagaagcgcaaggtgttcccaacggacgactcggtgcgaaaagtgatt

SEQ ID NO: 419319 - DNA, 75 bp, synthetic construct
  source 1..75: mol_type = other DNA
gagagaaaggggacacggggccagcaggtccagcaggaccgcagggacctaaaggggatacgggagctgctggcc

SEQ ID NO: 419320 - DNA, 75 bp, synthetic construct
  source 1..75: mol_type = other DNA
gtgatgatgaaacgaaggcagccaccccgaaagcggtgaaagcggcaatggacaaagcggacggatgcctggaga

SEQ ID NO: 419321 - DNA, 75 bp, synthetic construct
  source 1..75: mol_type = other DNA
cgggagcaacaggtcccgctggtccgcggggagcgcagggaccgaaaggggagaaaggcgacccggtccagaggt

SEQ ID NO: 419322 - DNA, 75 bp, synthetic construct
  source 1..75: mol_type = other DNA
atactaacagtaatgacgaaacaaaggcagccacgccgaaggccgtgaaggcggcaatggatgtggcaaatgaag

SEQ ID NO: 419323 - DNA, 75 bp, synthetic construct
  source 1..75: mol_type = other DNA
ccggtgaatggaccacgaccgagtttgtcgcctggctgaaagccaaaggggcatttgaccagccttactggatga

SEQ ID NO: 419324 - DNA, 75 bp, synthetic construct
  source 1..75: mol_type = other DNA
gatatatgaggctagctatcagttaaatctgtttgactctttgcttcctgattttgtggcggatattcatcctct

SEQ ID NO: 419325 - DNA, 75 bp, synthetic construct
  source 1..75: mol_type = other DNA
acctggctatcggcgacaaaattgaattcagtggaaaacggataatggaggttacccaaaaaactgaccgcgacc

SEQ ID NO: 419326 - DNA, 75 bp, synthetic construct
  source 1..75: mol_type = other DNA
atccgtggtaaagatccaattaaatatgatgggagtatttatattcgtaaaatggctaatacagaccctacccca

SEQ ID NO: 419327 - DNA, 75 bp, synthetic construct
  source 1..75: mol_type = other DNA
tttggccctgcgggggtaaccgcagcaaaactccgcgaactgggtgtcattcgcggcaaaattgccactatcttc

SEQ ID NO: 419328 - DNA, 75 bp, synthetic construct
  source 1..75: mol_type = other DNA
gggccaaaaggcgataccggcgagcgggggccaaagggtgagcgtggtgagagggggccgcaggggcttcagggt

SEQ ID NO: 419329 - DNA, 75 bp, synthetic construct
  source 1..75: mol_type = other DNA
ggaatgcaacacctcaaggatattaccgcacttgatattgccgaaataattgatgctgtaaaggctgaaggtcat

SEQ ID NO: 419330 - DNA, 75 bp, synthetic construct
  source 1..75: mol_type = other DNA
caaaagccacagtcgaaagcgctcgcatcaatcttgcttataccaaagtgactgcgccaattagcggacgtatcg

SEQ ID NO: 419331 - DNA, 75 bp, synthetic construct
  source 1..75: mol_type = other DNA
tctactggacacacacgtttgcgaatttattcaaaacacgcctgccttccataatacgccaatgcttcttgaggc

SEQ ID NO: 419332 - DNA, 75 bp, synthetic construct
  source 1..75: mol_type = other DNA
ggcattaaaagcgttaggtatgccgttgaaacgggcagaggcactgattcatctggcaaatgcggcgctggaggg

SEQ ID NO: 419333 - DNA, 75 bp, synthetic construct
  source 1..75: mol_type = other DNA
ggagtggaaacagttgcggacaattattatgcccgtagtctggcggtgggcgaacattgcggcgtgataacggtg

SEQ ID NO: 419334 - DNA, 75 bp, synthetic construct
  source 1..75: mol_type = other DNA
cgtattcgaaacgcgcgggttacgacattattggccaggccatgagcggactgatgagcaccaccggttggcctg

SEQ ID NO: 419335 - DNA, 75 bp, synthetic construct
  source 1..75: mol_type = other DNA
tctgggatgaaaaatacccgcaaatcagcaagagctggcgcacacactgggaaaatctcaacaccttcttcggtt

SEQ ID NO: 419336 - DNA, 75 bp, synthetic construct
  source 1..75: mol_type = other DNA
gtgggagaacatcgaggcgtggtgacggttgtgccagatatcgacaaccattcactacagttgaacttgagtacg

SEQ ID NO: 419337 - DNA, 75 bp, synthetic construct
  source 1..75: mol_type = other DNA
agaaccagtggcgaccgggtgcctggcgaaaataagccgcctgtttgatctgcaatgtaatccgcagattgttaa

SEQ ID NO: 419338 - DNA, 75 bp, synthetic construct
  source 1..75: mol_type = other DNA
ctcccggggcaaaaggtgagaaaggagccaccggcgcaaccgggccacagggagcaaaaggggataaaggtgatc

SEQ ID NO: 419339 - DNA, 75 bp, synthetic construct
  source 1..75: mol_type = other DNA
taaccgctggattagagaaaaaggctggaaaacggaaaaatttcccggcgtgaagggcggccgtgccagacttat

SEQ ID NO: 419340 - DNA, 75 bp, synthetic construct
  source 1..75: mol_type = other DNA
tatgactcacagtgagcaggaaaaagttgcgcaatttttgtcacgtgaagggattcgtaatttccttgcccgtct

SEQ ID NO: 419341 - DNA, 75 bp, synthetic construct
  source 1..75: mol_type = other DNA
acaaacgtttcgccacgggcacttacgcattgtggtatccggtggtgctgcgtcagcaaatcaagcgcatgatcc

SEQ ID NO: 419342 - DNA, 75 bp, synthetic construct
  source 1..75: mol_type = other DNA
gcagaactggaggcgtacatcaatgtggtaaaacacttcaaccgtagcggtcagttgcgttactaccccggttcg

SEQ ID NO: 419343 - DNA, 75 bp, synthetic construct
  source 1..75: mol_type = other DNA
acaccgtgggagcagccagagtatacgggcgggacattcatacgggggccggtgaatggaccacgagcgagtttg

SEQ ID NO: 419344 - DNA, 75 bp, synthetic construct
  source 1..75: mol_type = other DNA
agggcgaaaacgtggtgggtagcgaaacccgcgtgaaagtggtgaagaacaaaatcgctgcgccgtttaaacagg

SEQ ID NO: 419345 - DNA, 75 bp, synthetic construct
  source 1..75: mol_type = other DNA
tgggccgtatcgtcgaaatctacggaccggaatcttccggtaaaaccacgctgacgttgcaggtgatcgccgcag

SEQ ID NO: 419346 - DNA, 75 bp, synthetic construct
  source 1..75: mol_type = other DNA
tgatcgagaaagcgggtgcatggtacagctacaaaggcgagaaaatcggccagggtaaagcgaatgcaactgcat

SEQ ID NO: 419347 - DNA, 75 bp, synthetic construct
  source 1..75: mol_type = other DNA
ctatggtattcgagcaaggatgaatggagtacttgaaccagctattgaacaacttcgtgctttaggcggctggtc

SEQ ID NO: 419348 - DNA, 75 bp, synthetic construct
  source 1..75: mol_type = other DNA
agccattatgaaacgcaactgcgcccgcccttcttccgcgcactggtcgattatgttaatcagggcaatagtgct

SEQ ID NO: 419349 - DNA, 75 bp, synthetic construct
  source 1..75: mol_type = other DNA
gttgatctgggtgtgaaagagaagctgatcgagaaagctggcgcgtggtacagctacaaaggcgagaagatcggc

SEQ ID NO: 419350 - DNA, 75 bp, synthetic construct
  source 1..75: mol_type = other DNA
tccacggtcaacgatatattacatcgggtatggtcaggacgtgcaggacgatttaacagaggagttttctttaga

SEQ ID NO: 419351 - DNA, 75 bp, synthetic construct
  source 1..75: mol_type = other DNA
ctcaagtatgaggatgtagagggacagtctcacctcaaggtgaagcaggagaaaaccggaaacgtggtgaggcca

SEQ ID NO: 419352 - DNA, 75 bp, synthetic construct
  source 1..75: mol_type = other DNA
aaagccatcgtgctgtttaaagtcgtgactttcctgccgatcatctggattgctggtttactgattttgctgaaa

SEQ ID NO: 419353 - DNA, 75 bp, synthetic construct
  source 1..75: mol_type = other DNA
gcgcttggggcaggtggtctgccgatgggccgtatcgtcgaaatctacggaccggaatcttccggtaaaaccacg

SEQ ID NO: 419354 - DNA, 75 bp, synthetic construct
  source 1..75: mol_type = other DNA
atgacaccgtatatccagacgctgatcgctatgaccggcgacaaactccagcaacgggtgcaaaaggatccgaca

SEQ ID NO: 419355 - DNA, 75 bp, synthetic construct
  source 1..75: mol_type = other DNA
atgaaccgctgagtgtgctggatgccgtgcgtttcgatgccagctatcttcatttgctggagcagtgctcgcgac

SEQ ID NO: 419356 - DNA, 75 bp, synthetic construct
  source 1..75: mol_type = other DNA
cgcgcatagagattcttgaaaaagagaatgcgagtctaaaaggaatgctggcgcgggcggaaagggaattatcag

SEQ ID NO: 419357 - DNA, 75 bp, synthetic construct
  source 1..75: mol_type = other DNA
ggaagccaatctgaatcatgcagtcgccgcgctgactcaatcgtgggtaacagcaatcagggaggccgccaccac

SEQ ID NO: 419358 - DNA, 75 bp, synthetic construct
  source 1..75: mol_type = other DNA
atgagttccggggggtcagattatgagatcaccacagcacagtttggcaccattggcatttacagcaataaagcc

SEQ ID NO: 419359 - DNA, 75 bp, synthetic construct
  source 1..75: mol_type = other DNA
gaaggcgaagaacagcgatttcccgggtaactggtggattatcgagacaaaacacaacgtggcggacgttctggc

SEQ ID NO: 419360 - DNA, 75 bp, synthetic construct
  source 1..75: mol_type = other DNA
gagatctacgacagtaacgttattgaactttataaaaatattaaacttcgctcttcattacaagaagttataagt

SEQ ID NO: 419361 - DNA, 75 bp, synthetic construct
  source 1..75: mol_type = other DNA
tcttggtgcttcggcatccgacaaaatatattcagcaaaagaaatattactgaaccttgaagtaggtagttttca

SEQ ID NO: 419362 - DNA, 75 bp, synthetic construct
  source 1..75: mol_type = other DNA
tatttcagcattagcagataccctggagtttccttcgctcaatgaacgtccagttacaactggaaccacagaaac

SEQ ID NO: 419363 - DNA, 75 bp, synthetic construct
  source 1..75: mol_type = other DNA
ggccagcgagaaagacgccgttcgcgccgaccaaagagcggctgaagaagcggcagagaaaggcaaacgctgggt

SEQ ID NO: 419364 - DNA, 75 bp, synthetic construct
  source 1..75: mol_type = other DNA
ccttctacgccagttgcgagaaggttttcagcccggatttgcgcggcaaacctgtcgtcgttctcagtaacaacg

SEQ ID NO: 419365 - DNA, 75 bp, synthetic construct
  source 1..75: mol_type = other DNA
tatagtatgctgattttatcatttctgcccggggtgcctacaagaatatttatgccaattgtctttattttgtat

SEQ ID NO: 419366 - DNA, 75 bp, synthetic construct
  source 1..75: mol_type = other DNA
atattgatataatcaaaaaaaacgacgacggaagttatagtcttagtgaaactatagacaatattatttcaaaaa

SEQ ID NO: 419367 - DNA, 75 bp, synthetic construct
  source 1..75: mol_type = other DNA
tagtgataagttttatatggtctatgataataatcctgaagtagtcgccaacaatattaaatcactcttacaacg

SEQ ID NO: 419368 - DNA, 75 bp, synthetic construct
  source 1..75: mol_type = other DNA
tcaataagttttgctagggtttatggaatatttaaaagtaaaccttttaattttgctcatcctgcagctactgtt

SEQ ID NO: 419369 - DNA, 75 bp, synthetic construct
  source 1..75: mol_type = other DNA
ccgcctgctgccagcaatgggtgggattgatttctcgccgatgatcctcgttctgctgctgtatgtcattaatat

SEQ ID NO: 419370 - DNA, 75 bp, synthetic construct
  source 1..75: mol_type = other DNA
gctacagcctcgtaaaaaagtagaccgctgcgatgtctgtactgaaggagctcgcggcggatgtggaacatgtgc

SEQ ID NO: 419371 - DNA, 75 bp, synthetic construct
  source 1..75: mol_type = other DNA
gcgtggaggtttcgcagtggcccgaatgcatggtggcagttggcaagtcgcggtgatattgacggagaggttgag

SEQ ID NO: 419372 - DNA, 75 bp, synthetic construct
  source 1..75: mol_type = other DNA
tgcgggttggttactgtcttcatcctgctggtttcgtttggtggcggtaccgcatcggcgttctttaacaagctg

SEQ ID NO: 419373 - DNA, 75 bp, synthetic construct
  source 1..75: mol_type = other DNA
acggcgaggtgttctatcgcatcacgccggaccggaactgcgggatcacggaggcggtgacggtgcctgcccggg

SEQ ID NO: 419374 - DNA, 75 bp, synthetic construct
  source 1..75: mol_type = other DNA
agaagtgatgttatggctggcctggccattcgatccaacactgaaatttgagttctggcgttacttcacccacgc

SEQ ID NO: 419375 - DNA, 75 bp, synthetic construct
  source 1..75: mol_type = other DNA
taagcggctatgtgcagcaaaagttcagtgggccgtggtttggcgggctttctggtgtggtttatgcactgatgg

SEQ ID NO: 419376 - DNA, 75 bp, synthetic construct
  source 1..75: mol_type = other DNA
cgctggctttcccgttttttaaagcgcgtcaggatctcgacagaccgtttgttatttttaaaacgcacatgtcgg

SEQ ID NO: 419377 - DNA, 75 bp, synthetic construct
  source 1..75: mol_type = other DNA
tggttttcctcttatatcatctggatggtgagcacctccgcgaaagtttgggtaccgttctcaacattcctctat

SEQ ID NO: 419378 - DNA, 75 bp, synthetic construct
  source 1..75: mol_type = other DNA
aatatgcacctggtgatcatacgacagaaataaccgagcatgatattgatattgagagcatggcaactatccgca

SEQ ID NO: 419379 - DNA, 75 bp, synthetic construct
  source 1..75: mol_type = other DNA
ttctcgctgttagcaatggcgatttaccagaactattgcggccgcatggcgaataagcctgagttaaccttagat

SEQ ID NO: 419380 - DNA, 75 bp, synthetic construct
  source 1..75: mol_type = other DNA
cctcgcgctggctttcccattctttaaagcacgtcaggatctcgacagaccgtttgtgattttcaaaacgcatat

SEQ ID NO: 419381 - DNA, 75 bp, synthetic construct
  source 1..75: mol_type = other DNA
acggtcctgtatcactcgatcgcctgcaccagatacgtgaaatactcagcaaagcagcagcacaaagcgacggcg

SEQ ID NO: 419382 - DNA, 75 bp, synthetic construct
  source 1..75: mol_type = other DNA
gccggaccggaactgcgggatcacggaggcggtgacggtgcctgcccgggaagtgatccacgaccggtttaactg

SEQ ID NO: 419383 - DNA, 75 bp, synthetic construct
  source 1..75: mol_type = other DNA
ggaatacgcagctggtactgaccacgcaggcgcagcgggcagaagaagcccggcagcaggccatttccggcggga

SEQ ID NO: 419384 - DNA, 75 bp, synthetic construct
  source 1..75: mol_type = other DNA
cgccaggagggcgcatctgacggtaataaggccataagcgaaacagagcatgatgcagtgaaagcgatgttcagg

SEQ ID NO: 419385 - DNA, 75 bp, synthetic construct
  source 1..75: mol_type = other DNA
ccagcctgtttcaggcggtggctgagcccttttccggcgcctggcagcagggtgtgaaagccgatccggaaagtg

SEQ ID NO: 419386 - DNA, 75 bp, synthetic construct
  source 1..75: mol_type = other DNA
gaaaaaaccagaaatcaggacgtgacgtaagagaggcgggctggaccagcctgtttcaggcggtagctgagccct

SEQ ID NO: 419387 - DNA, 75 bp, synthetic construct
  source 1..75: mol_type = other DNA
gatttgttgattgctacagactgtatctctgaagggcagaacttacaggattgcgattacttaattaactttgat

SEQ ID NO: 419388 - DNA, 75 bp, synthetic construct
  source 1..75: mol_type = other DNA
tccccggcagtataacggaagaaaatgcgaaaaaactgaagagcaactgggacagcgggtataccggcgaaaatg

SEQ ID NO: 419389 - DNA, 75 bp, synthetic construct
  source 1..75: mol_type = other DNA
gtatcttcagcagcagaactatagtctggaagcgttgtcccgccgtgatgcccgtgaagatccgttcgcgtcgtc

SEQ ID NO: 419390 - DNA, 75 bp, synthetic construct
  source 1..75: mol_type = other DNA
cctgtattacaaccgccaccgctattatgacccgctgcaggggcggtatatcactcaggatccgattggactgaa

SEQ ID NO: 419391 - DNA, 75 bp, synthetic construct
  source 1..75: mol_type = other DNA
agaaaatgcgaaaaaactgaagagcaactgggacagcgggtatacaggcgaaaatgcggggaaaacggccattct

SEQ ID NO: 419392 - DNA, 75 bp, synthetic construct
  source 1..75: mol_type = other DNA
aaccgcctgacagcgcatctgacggtaataaggcaatcactgaaacagagcatgatgcggtgaaggcgatgttca

SEQ ID NO: 419393 - DNA, 75 bp, synthetic construct
  source 1..75: mol_type = other DNA
cctgacggcgcatctgacggtaataaggcaatcagtgaaacagagcatggtgcggtgaaagcgatgttgaggggg

SEQ ID NO: 419394 - DNA, 75 bp, synthetic construct
  source 1..75: mol_type = other DNA
gcgggatccctgaggcggtgacggtgcctgcccgggaagtgatccacgaccggtttaactgtttttttcatccgc

SEQ ID NO: 419395 - DNA, 75 bp, synthetic construct
  source 1..75: mol_type = other DNA
gagctgggtgagtgccggattgatagagaggccagaaacttcaaaggattggcggaagattcatttgtagggaat

SEQ ID NO: 419396 - DNA, 75 bp, synthetic construct
  source 1..75: mol_type = other DNA
tgactccgcatggcgctatgtcacgatccttgatctcccattctctttagtctttgataccttactgctaccgat

SEQ ID NO: 419397 - DNA, 75 bp, synthetic construct
  source 1..75: mol_type = other DNA
tcctggaaaccggaaaatcatcgtgttcacggcgtttgctgacaccgctcagtatctgtacgagcagttgtcacc

SEQ ID NO: 419398 - DNA, 75 bp, synthetic construct
  source 1..75: mol_type = other DNA
taatgagagaattgagaaatttaaagaggttatccataaaaacaagataaaaacatattctctggatgatgaatt

SEQ ID NO: 419399 - DNA, 75 bp, synthetic construct
  source 1..75: mol_type = other DNA
aaacaaaacattgttttcaccattaagaaaaatagtagataagagcggtaattctattaatgtatatgatataaa

SEQ ID NO: 419400 - DNA, 75 bp, synthetic construct
  source 1..75: mol_type = other DNA
gtaacttcgttacctcatcatatatcagaaaataacaatagaaatttaacacctactggtatcaaagaacatcct

SEQ ID NO: 419401 - DNA, 75 bp, synthetic construct
  source 1..75: mol_type = other DNA
ttaatattgatacttcagatttaaatataacgatcagacaaggccttgattcattaacagaagccattgatgaaa

SEQ ID NO: 419402 - DNA, 75 bp, synthetic construct
  source 1..75: mol_type = other DNA
tatctgaaaatgcacatctttcagaaagtgatcatcgatttttgaaaaacactgtatcacaaattgaatattatc

SEQ ID NO: 419403 - DNA, 75 bp, synthetic construct
  source 1..75: mol_type = other DNA
cttcaaaggattggcggaagattcatttgtagggaatcttaaagtgattgaaggtgcaaaaggtgttcattatga

SEQ ID NO: 419404 - DNA, 75 bp, synthetic construct
  source 1..75: mol_type = other DNA
tgcgattattgagaagcgtcgacaggaaggggcaagggaaaaagatgtcagtttttcagcaacagcttcaatgct

SEQ ID NO: 419405 - DNA, 75 bp, synthetic construct
  source 1..75: mol_type = other DNA
catatcagcgatagaccatgcggattttatgtcagatataaaaacagtagtagagaaagttgttggcacaagcct

SEQ ID NO: 419406 - DNA, 75 bp, synthetic construct
  source 1..75: mol_type = other DNA
gaatttgattttggtaattatagagttgtttcttcccaagacacgtttatatacaaagtaacaaatccgggggcg

SEQ ID NO: 419407 - DNA, 75 bp, synthetic construct
  source 1..75: mol_type = other DNA
cctgtattggataatgatattttttctcctaagaatagtgatgatttatataagttaagcactcattggttcact

SEQ ID NO: 419408 - DNA, 75 bp, synthetic construct
  source 1..75: mol_type = other DNA
cactttgcgctgtggtcgcacaggtactggttggtctttttaccggaaactgggcttacggtgcgatagccggtt

SEQ ID NO: 419409 - DNA, 75 bp, synthetic construct
  source 1..75: mol_type = other DNA
caccaattcttcacgcactttgcgctgttgtcgcacaagttctggttggtctttttaccggaaactgggcttacg

SEQ ID NO: 419410 - DNA, 75 bp, synthetic construct
  source 1..75: mol_type = other DNA
gccggttgtacgttcttcattgcgcgtgaacacacccaggcagaatatcgctggattgaaatgttcgggcatggc

SEQ ID NO: 419411 - DNA, 75 bp, synthetic construct
  source 1..75: mol_type = other DNA
aaaagtatcgggtgttgctgtcctcggatgttgtgctaattgggtgataacagatcctgtgtatgggagtttccc

SEQ ID NO: 419412 - DNA, 75 bp, synthetic construct
  source 1..75: mol_type = other DNA
gcagaatatcgctggattgaaatgttcgggcatggcaagcgaatgaatatgccgtggtggggcggttttgatccg

SEQ ID NO: 419413 - DNA, 75 bp, synthetic construct
  source 1..75: mol_type = other DNA
atggctaaggtgaacctgtatatcagcaatgatgcttatgaaaagataaatgtaattattgaaaaacgccgacag

SEQ ID NO: 419414 - DNA, 75 bp, synthetic construct
  source 1..75: mol_type = other DNA
ctgcatttaatcagactgagtttaataaattacttcttgaatgcgttgtaaaaacacaatcatcagtagcgaaaa

SEQ ID NO: 419415 - DNA, 75 bp, synthetic construct
  source 1..75: mol_type = other DNA
tttaataatttccccaaaagctacagataatccagttttattgaaactggaggctcctggtcatgcaatggctgc

SEQ ID NO: 419416 - DNA, 75 bp, synthetic construct
  source 1..75: mol_type = other DNA
atatattcaagcaaaaatcccttgattttatgttatcaggtgatgctgatattactaactttttaagtaaatcaa

SEQ ID NO: 419417 - DNA, 75 bp, synthetic construct
  source 1..75: mol_type = other DNA
gagcggcgagtcgtttggaacaccattgaatcgcatcaactggggcaactacgacctcgtcgtcatcgacgagtc

SEQ ID NO: 419418 - DNA, 75 bp, synthetic construct
  source 1..75: mol_type = other DNA
gtaatgatgcctatgaaaaaataaattcgattattgagaagcgtcgacaggaaggggcaagggaaaaagatgtca

SEQ ID NO: 419419 - DNA, 75 bp, synthetic construct
  source 1..75: mol_type = other DNA
gaatatgccaatatggttgaagatatcagggagaaggtgtcatatgagatggagcgattttttccaaaaaatgat

SEQ ID NO: 419420 - DNA, 75 bp, synthetic construct
  source 1..75: mol_type = other DNA
ttgattatatcaacaaatctttctgaggatgatttcttaaaggctaaattaatcgacattgaaaacaaagcattg

SEQ ID NO: 419421 - DNA, 75 bp, synthetic construct
  source 1..75: mol_type = other DNA
atgcgcaattacatattaagaaaaatgataagcaaagataatggcgataattttatcataaaggctttgttttat

SEQ ID NO: 419422 - DNA, 75 bp, synthetic construct
  source 1..75: mol_type = other DNA
ttgtacacaacggcaaggcttatgttactggcggtgttaaccagaacatcttcaatggctattttgaagatctca

SEQ ID NO: 419423 - DNA, 75 bp, synthetic construct
  source 1..75: mol_type = other DNA
ctcgacatggtttacccggcactaaaacagatcgaggtcgtgaaccctgccgtcgtgctggtggaaaacgtcccg

SEQ ID NO: 419424 - DNA, 75 bp, synthetic construct
  source 1..75: mol_type = other DNA
caacaaatctcattttatataaagaacaatatttctaaatataaacaatcagatgaagaatttcatttagaaagc

SEQ ID NO: 419425 - DNA, 75 bp, synthetic construct
  source 1..75: mol_type = other DNA
cggtgaaatattacagaatgataaaaaaataccgcaagcacacatctattttaaagcagcaaaaatattttatcc

SEQ ID NO: 419426 - DNA, 75 bp, synthetic construct
  source 1..75: mol_type = other DNA
aatctttatctttccataaataacaaggaggctgcaaaaaaaatcatagatgaatcaccaattgatatcaataat

SEQ ID NO: 419427 - DNA, 75 bp, synthetic construct
  source 1..75: mol_type = other DNA
ggaagggtcatcttaagcatacaggggtggttaacaggaagtcattatcataatattcggtcatgggacgcgtgg

SEQ ID NO: 419428 - DNA, 75 bp, synthetic construct
  source 1..75: mol_type = other DNA
caaggctgcatatgatttggctaatggaaagcaagcggcagacgctacgctcactgctctagcggcactagctac

SEQ ID NO: 419429 - DNA, 75 bp, synthetic construct
  source 1..75: mol_type = other DNA
tctgaaacattagctgcaactccaaaagcggttaaagctgcatacgatctagctgccggaaaggcaccatccagt

SEQ ID NO: 419430 - DNA, 75 bp, synthetic construct
  source 1..75: mol_type = other DNA
gcgttgtcagggcgacgctatcagtgaaacatggctgtatcagtatttcccgccagcgccggataaacgtcagta

SEQ ID NO: 419431 - DNA, 75 bp, synthetic construct
  source 1..75: mol_type = other DNA
acgtcagtcggtcgcgatattctggctaaaacaagcacactggccgttatccaataccttggtttaagagaactc

SEQ ID NO: 419432 - DNA, 75 bp, synthetic construct
  source 1..75: mol_type = other DNA
tgctaatatcgacctgccgggtgtgaataaaacaggcaatcagagcactaccggcaatgctgcaactgcaacaaa

SEQ ID NO: 419433 - DNA, 75 bp, synthetic construct
  source 1..75: mol_type = other DNA
tctggctaaaaaccagaatagccgtgacatccgaaatattaaaaatttttcctcacatcaacattcactgggcga

SEQ ID NO: 419434 - DNA, 75 bp, synthetic construct
  source 1..75: mol_type = other DNA
ttcttataatttacagcaggaccccaaagatgtaacttcgttacctcatcatataccagaaaataacaaagagaa

SEQ ID NO: 419435 - DNA, 75 bp, synthetic construct
  source 1..75: mol_type = other DNA
ctgcgccgcgttattccggcaatggggccaattgacagcgcctcgctgctggttgcctatattctcagttttatc

SEQ ID NO: 419436 - DNA, 75 bp, synthetic construct
  source 1..75: mol_type = other DNA
attgatttctcgccgatgatcctcgttctgctgctgtatgtcatcaatatgggtgtcgcagaagtattacaggca

SEQ ID NO: 419437 - DNA, 75 bp, synthetic construct
  source 1..75: mol_type = other DNA
tggaatggggaaacttttatgggcacaatgctagattatggtatgaaaccgcgataaactactccagtagtgagc

SEQ ID NO: 419438 - DNA, 75 bp, synthetic construct
  source 1..75: mol_type = other DNA
gatattggcatattggatccttttaatattttagagaataataatctttatttcgtcaaagaaaatatcagtgaa

SEQ ID NO: 419439 - DNA, 75 bp, synthetic construct
  source 1..75: mol_type = other DNA
ttttcatgccaaattaaaaacgctttttgaaactaacttattaaagtctgttattcagatccaggacgctgtaat

SEQ ID NO: 419440 - DNA, 75 bp, synthetic construct
  source 1..75: mol_type = other DNA
cctggcaactttatataaaatgctgataagcgaaagagaagtttcagaatatgaatgccagttattatatttaac

SEQ ID NO: 419441 - DNA, 75 bp, synthetic construct
  source 1..75: mol_type = other DNA
ggcattttactatcatattcattcttttctcactcagataccggataatgaggatgatatatatcatgctgcaag

SEQ ID NO: 419442 - DNA, 75 bp, synthetic construct
  source 1..75: mol_type = other DNA
atgtataattttatcactataatgtatgatgtcttttcatattttggtgttctggctaaaaaccagaatacccgt

SEQ ID NO: 419443 - DNA, 75 bp, synthetic construct
  source 1..75: mol_type = other DNA
ccgtgataaagggtttgttcatgtgatgcaggaacgttgcattggttgcaaaacctgcgttgtggcttgcccgta

SEQ ID NO: 419444 - DNA, 75 bp, synthetic construct
  source 1..75: mol_type = other DNA
gcgaatccatgtcattaaaggtgtgaacatttccacggcgacagtctgccgtcagtgtgaagatgcaccgtgcgc

SEQ ID NO: 419445 - DNA, 75 bp, synthetic construct
  source 1..75: mol_type = other DNA
actgaaaattgacagtgcattatcgtgggatgccattgacgcaatacgagactatagtatttctgatatttatct

SEQ ID NO: 419446 - DNA, 75 bp, synthetic construct
  source 1..75: mol_type = other DNA
ggtcgtatattggcggcggtaagacggggaatatgtttaaccagttgctggcgtcaaaaaaattgacgaaaacag

SEQ ID NO: 419447 - DNA, 75 bp, synthetic construct
  source 1..75: mol_type = other DNA
atcacaccgagcgaggcatctatcatcgcatgcgatatcgccacaaagtcgggcgctgtagagatcggctttctt

SEQ ID NO: 419448 - DNA, 75 bp, synthetic construct
  source 1..75: mol_type = other DNA
gacggatccaggaatatgtccctggtaaacagatcacactggcgcatctgatagctaatccaggtaaagatctgt

SEQ ID NO: 419449 - DNA, 75 bp, synthetic construct
  source 1..75: mol_type = other DNA
tatgaagggagggggatgaccaagcgcaaaatggctgaactgttgaatgatgcacaccccgagtggtgtttccgg

SEQ ID NO: 419450 - DNA, 75 bp, synthetic construct
  source 1..75: mol_type = other DNA
ggcaaactgcgtatgtgggggcgctggtcgtatattggcggtggcaggtcaggaaatatgttcaatcagttgttg

SEQ ID NO: 419451 - DNA, 75 bp, synthetic construct
  source 1..75: mol_type = other DNA
tgatatttatgaagccatgctgaaccgtatagaggattttgtttttccggatgcggaagcactgatcctgaaaaa

SEQ ID NO: 419452 - DNA, 75 bp, synthetic construct
  source 1..75: mol_type = other DNA
atgactataaaaaatctacctgccgactatttattggctgcacaacagggtgatatcgataaagtaaaaacctgc

SEQ ID NO: 419453 - DNA, 75 bp, synthetic construct
  source 1..75: mol_type = other DNA
gaattattttaccggctaaacccgatcttaattgcgtaacccgttttggcggtgtcggcctgacgcctgcctgtg

SEQ ID NO: 419454 - DNA, 75 bp, synthetic construct
  source 1..75: mol_type = other DNA
atggacagacgaaaaaaagaacttgcccctgaaaagcgggattctccaggatgttgagaaatacctggcggataa

SEQ ID NO: 419455 - DNA, 75 bp, synthetic construct
  source 1..75: mol_type = other DNA
atgagcaaacacactttaacccgtatttcagaggaagcttttaacgagcttgccagaattaaacgagcaactaac

SEQ ID NO: 419456 - DNA, 75 bp, synthetic construct
  source 1..75: mol_type = other DNA
ttgcctcatcagactgtgatgcagcttgcaattgctaaagaggtcactgagtcggatttacttagacatccagtt

SEQ ID NO: 419457 - DNA, 75 bp, synthetic construct
  source 1..75: mol_type = other DNA
tctaaaggccgcaaacacatccgaattactcaggacgctttagatactttgaagggactaaacaactttaaaatt

SEQ ID NO: 419458 - DNA, 75 bp, synthetic construct
  source 1..75: mol_type = other DNA
tcttgcgagagatgatcgctggcagacagaagagctggttgtctcactgtactgatgcagaggcgttacgcattg

SEQ ID NO: 419459 - DNA, 75 bp, synthetic construct
  source 1..75: mol_type = other DNA
tcaccattggttgaaatcggttcacatacctggaactctcacttcggtatacaggcgaatccttacggtaattta

SEQ ID NO: 419460 - DNA, 75 bp, synthetic construct
  source 1..75: mol_type = other DNA
cagttaatgaggttttgcgcagaatgaagaaatccgggctggaaaaaccggaacttgaggcattttttcgggata

SEQ ID NO: 419461 - DNA, 75 bp, synthetic construct
  source 1..75: mol_type = other DNA
aacgctggaaagtgtctggatccaggggaaactgcgtatgtgggggcgttggtcgtatattggcgacggtaagac

SEQ ID NO: 419462 - DNA, 75 bp, synthetic construct
  source 1..75: mol_type = other DNA
acatgcgaaaagcgaattgctaattggttggctgttgctgagtgtgcgctatacattcccatgcgagaatcattt

SEQ ID NO: 419463 - DNA, 75 bp, synthetic construct
  source 1..75: mol_type = other DNA
acatgccgacgtcgtgttgagcagtggttgcgtgttgctgagttcattttgtattcacctatgagagaagcgttc

SEQ ID NO: 419464 - DNA, 75 bp, synthetic construct
  source 1..75: mol_type = other DNA
gtgcatattttactgaccacgcacggtatgaaaccgcagcagaataccgggaaagaattcgtctggatgctgtaa

SEQ ID NO: 419465 - DNA, 75 bp, synthetic construct
  source 1..75: mol_type = other DNA
acgaaggtgcattgctggtactttcacagggacgagtcgtcgatatcgatgacgcggtggcacgtcatctgcacg

SEQ ID NO: 419466 - DNA, 75 bp, synthetic construct
  source 1..75: mol_type = other DNA
tgaaaatggcacaacagttaaatgagtatcgccctggctggagcttgaaaacttgcagaaatcgcattgacgcat

SEQ ID NO: 419467 - DNA, 75 bp, synthetic construct
  source 1..75: mol_type = other DNA
atgatttacccaacaaatacaggcaaaagcggggaacgccttcgtctcaccacgctggaaagtgtctggattcag

SEQ ID NO: 419468 - DNA, 75 bp, synthetic construct
  source 1..75: mol_type = other DNA
tgatcaacggtaagcaaaaaagctggctggtgcattgtaatgatgcagaggcgttatgcattgatcgtgtgatta

SEQ ID NO: 419469 - DNA, 75 bp, synthetic construct
  source 1..75: mol_type = other DNA
gagctggaagcatttttacgtgagatgatcaacgggaagcaaaagagctggctggtgcattgtactgatgcagag

SEQ ID NO: 419470 - DNA, 75 bp, synthetic construct
  source 1..75: mol_type = other DNA
gtgaagtgctggcagaacacccaggattgatttgtatcctccggcaacgatatgaagggagggggatgactaagc

SEQ ID NO: 419471 - DNA, 75 bp, synthetic construct
  source 1..75: mol_type = other DNA
ggctgggcttacgatatcggctttggcggtctggatcatgtattgagtttgacggaaaacgtcaacattctggtg

SEQ ID NO: 419472 - DNA, 75 bp, synthetic construct
  source 1..75: mol_type = other DNA
caacgcagagtcagagtgccagtaccatcggctccactgccggtaatgtcagtattaccgcgggcaaacaggctc

SEQ ID NO: 419473 - DNA, 75 bp, synthetic construct
  source 1..75: mol_type = other DNA
acgcaggcttacaggaatgaaatggcgaagtatggtaccggcagtgaaattcagcggggtatccaggctgcaacg

SEQ ID NO: 419474 - DNA, 75 bp, synthetic construct
  source 1..75: mol_type = other DNA
acctccgggaatattgagacgcatcagggcgatattgttgtaaggaccgggcatcttctgaaccagcgggaggga

SEQ ID NO: 419475 - DNA, 75 bp, synthetic construct
  source 1..75: mol_type = other DNA
aataggagtgccctttgaacaaagagcactgccatcgtctcatgaaactacgaaaccttattttcagtacgaaat

SEQ ID NO: 419476 - DNA, 75 bp, synthetic construct
  source 1..75: mol_type = other DNA
accctgaaaacgccaacggcagcattgcaccgatatttgacagggagaaagagcagaagcgtctgcaggaagcgc

SEQ ID NO: 419477 - DNA, 75 bp, synthetic construct
  source 1..75: mol_type = other DNA
tataccaggaacatttggtggatttgttggttcattcgtatcagaaggtgcaagcagcgcaacgcaaaaagaagt

SEQ ID NO: 419478 - DNA, 75 bp, synthetic construct
  source 1..75: mol_type = other DNA
cgacttataccacaatagacgttgaagcagtcatgcgacgcatcacagctgacttagtgatgattgccgccagta

SEQ ID NO: 419479 - DNA, 75 bp, synthetic construct
  source 1..75: mol_type = other DNA
gtgaaacagacccggtgtatatcgatgaaaaacagtttctgggctcatcgtacattcttgaccgtcttggcctga

SEQ ID NO: 419480 - DNA, 75 bp, synthetic construct
  source 1..75: mol_type = other DNA
tttagcaggtgctctggccggagcttcagcaccggaactggcacatctgctgaaatcaacagaaaaagacccggc

SEQ ID NO: 419481 - DNA, 75 bp, synthetic construct
  source 1..75: mol_type = other DNA
ggcgggcgacctctccctccggggtaaaacactgcataccgcagggaccacgcagggacagaatctcaccgtgca

SEQ ID NO: 419482 - DNA, 75 bp, synthetic construct
  source 1..75: mol_type = other DNA
gcggcaaaaggcagcgagaaaggtaacggtactgagtggactgaaaccacaacagacagcggtaaaaccgtcacc

SEQ ID NO: 419483 - DNA, 75 bp, synthetic construct
  source 1..75: mol_type = other DNA
gaacgctacgtttctgtatgccgtaaacactataaagaggcgttacaagtcggctcattaacggctattcaggaa

SEQ ID NO: 419484 - DNA, 75 bp, synthetic construct
  source 1..75: mol_type = other DNA
gtcagaaagggcaaggtactcaatatgaattaccaaaacccgttcagtggtacttggataaagactatataaaga

SEQ ID NO: 419485 - DNA, 75 bp, synthetic construct
  source 1..75: mol_type = other DNA
ctcggacacaatttcttgcagtcggcactgtacggtttttctgctgctgtcggcttctcgctggtgatggtgctt

SEQ ID NO: 419486 - DNA, 75 bp, synthetic construct
  source 1..75: mol_type = other DNA
aatgctgaagaaccggttatctcaatgagatatattccttataacggaggtgctgtaaaggaaacatggtgggac

SEQ ID NO: 419487 - DNA, 75 bp, synthetic construct
  source 1..75: mol_type = other DNA
gggttatggattctgcaaatgaagttgatgctgatatcattttgcaacttgcaataaatgctcgtactggtttac

SEQ ID NO: 419488 - DNA, 75 bp, synthetic construct
  source 1..75: mol_type = other DNA
tgatacagcggtaccgtgaagcggaaatagccgtactggagggaaagtctgtcaccttcaacgggcagcaactga

SEQ ID NO: 419489 - DNA, 75 bp, synthetic construct
  source 1..75: mol_type = other DNA
tgattcagcgttatatcgatgcggaaatggctgtgctggacggtaaatccgtcacctttaatggtcagcagatga

SEQ ID NO: 419490 - DNA, 75 bp, synthetic construct
  source 1..75: mol_type = other DNA
acagggccgccaggagtgggagcggcggcttgctgccctgactgcgcggcggcggggggatcctgggtataaact

SEQ ID NO: 419491 - DNA, 75 bp, synthetic construct
  source 1..75: mol_type = other DNA
tgggccacgacctgctgataagcagccagcaggacaccagtaagtacgacagtaaacagaccagcgtggctgccg

SEQ ID NO: 419492 - DNA, 75 bp, synthetic construct
  source 1..75: mol_type = other DNA
gaaataatgccgcagcaggttcagtcggtgctgtgagcggtgaacttatcgcaggtgcaatcgcgaaggttttat

SEQ ID NO: 419493 - DNA, 75 bp, synthetic construct
  source 1..75: mol_type = other DNA
ccagaagcaggacgtggcgaacctaagccgagacaccgaacatgccaacgacagcatcagcccgatcttcgacaa

SEQ ID NO: 419494 - DNA, 75 bp, synthetic construct
  source 1..75: mol_type = other DNA
tctttaagcaatgcttacaggcggcatggagtcagcggtccactatgtgatttagcatggattgatgttgctccc

SEQ ID NO: 419495 - DNA, 75 bp, synthetic construct
  source 1..75: mol_type = other DNA
gtgatttggtaaatcgcctgctttatgatgattcactacgcttctgttcagatcaggtagccgctgaaatggctg

SEQ ID NO: 419496 - DNA, 75 bp, synthetic construct
  source 1..75: mol_type = other DNA
ttggtccggcatgcccattggttgctgctaaatatagaattccttcagtgatgctggctgttggattcgcgcata

SEQ ID NO: 419497 - DNA, 75 bp, synthetic construct
  source 1..75: mol_type = other DNA
ccgtgccaaagcgcgcaagctggaacagcaacaggctaatgcagaaccagaagaacaggttgatccgcgcaaagc

SEQ ID NO: 419498 - DNA, 75 bp, synthetic construct
  source 1..75: mol_type = other DNA
atccgcgcaaagccgccgtcgaagccgctattgcccgcgctcaggccaaaaaagccgcccagcagaaggttgtaa

SEQ ID NO: 419499 - DNA, 75 bp, synthetic construct
  source 1..75: mol_type = other DNA
aaaacccagtccaacggtacacccctgcgccaggtaccactggcgcagcgttttgttattccactgaaacagcat

SEQ ID NO: 419500 - DNA, 75 bp, synthetic construct
  source 1..75: mol_type = other DNA
atttatattttttgtctcttttagccgttgtgttatgtattacactattgacacgatataactatttttctcaca

SEQ ID NO: 419501 - DNA, 75 bp, synthetic construct
  source 1..75: mol_type = other DNA
ggctaatgcggaaccagaagaacaggtcgatccgcgcaaagccgccgtcgaagccgctattgcccgtgccaaagc

SEQ ID NO: 419502 - DNA, 75 bp, synthetic construct
  source 1..75: mol_type = other DNA
cgttaattgaacgcattcatcagtttggcgtcgccgggcttggcggcgcaggcttcccgacaggcgttaaattgc

SEQ ID NO: 419503 - DNA, 75 bp, synthetic construct
  source 1..75: mol_type = other DNA
gatagaatcatggtggatgctggaagatacgcggtggcaaaggctgaacatgccgtttcctgcggcaaataacag

SEQ ID NO: 419504 - DNA, 75 bp, synthetic construct
  source 1..75: mol_type = other DNA
caggcatagttttttcagagctgccgctggagcaactggcctcccggcttgctgtggggtgcatggcaaaaacgc

SEQ ID NO: 419505 - DNA, 75 bp, synthetic construct
  source 1..75: mol_type = other DNA
ttggcggcaaaattcgccagctctggcgcgcgttacaactggagtggcacctgtctaaacgtgaaattctgacgc

SEQ ID NO: 419506 - DNA, 75 bp, synthetic construct
  source 1..75: mol_type = other DNA
gttaaaaaacagtttgattatcaggagccggtgcagaatatgccggcgcaacaacctactactggcagtaatttt

SEQ ID NO: 419507 - DNA, 75 bp, synthetic construct
  source 1..75: mol_type = other DNA
ctttttggtgcgcgtccttcaaaccagtcatgcggggaaccatcgatcttttctgcggcaagcgttggtccaaag

SEQ ID NO: 419508 - DNA, 75 bp, synthetic construct
  source 1..75: mol_type = other DNA
tgaagcactaaaatttgcttctgccacagcagcaataaatattactgcattaggtgccagaggtcatctgccgac

SEQ ID NO: 419509 - DNA, 75 bp, synthetic construct
  source 1..75: mol_type = other DNA
tgttcagcaagcagacaaattgacccaattacgtcgcttagcctgtagtgtatcgcaacgggataataaaacagc

SEQ ID NO: 419510 - DNA, 75 bp, synthetic construct
  source 1..75: mol_type = other DNA
atgatcgcctgcgtggtggtgtttattgccatgcaaattctcggcgatcaggaagtgatgttatggctggcctgg

SEQ ID NO: 419511 - DNA, 75 bp, synthetic construct
  source 1..75: mol_type = other DNA
tactcgtggccgttcttattatgctctttattcatcttcaaaggcagcaattgtaaactttacccaagcaattgc

SEQ ID NO: 419512 - DNA, 75 bp, synthetic construct
  source 1..75: mol_type = other DNA
tttaagtcatattaaaggaaaaaatattgttatctttgggggaaatagtggaataggattggaaatacaaaagtc

SEQ ID NO: 419513 - DNA, 75 bp, synthetic construct
  source 1..75: mol_type = other DNA
cccatttccgccgttggtacagccagtccggtacgccggttgtgaccgtcaaagacgactacaatccagaaactg

SEQ ID NO: 419514 - DNA, 75 bp, synthetic construct
  source 1..75: mol_type = other DNA
taactgttccggagtattacaaaaatggtggagtgctcgactttgaactggatgctttagaggtgggcgggaata

SEQ ID NO: 419515 - DNA, 75 bp, synthetic construct
  source 1..75: mol_type = other DNA
gccactccatcgccgcctggtttcgcgaccgcgggcatcacgtcttactgctggtggattccctgacccgctacg

SEQ ID NO: 419516 - DNA, 75 bp, synthetic construct
  source 1..75: mol_type = other DNA
gcgaataatgtcattattattctgccgtctggcattgcacctgactacttggggcaatatgaggtgtactggcaa

SEQ ID NO: 419517 - DNA, 75 bp, synthetic construct
  source 1..75: mol_type = other DNA
gcggagcttaagctgattgcggagaaggtgaagaaggggtatgtggagcaagcgaaggttaattctttgcaacct

SEQ ID NO: 419518 - DNA, 75 bp, synthetic construct
  source 1..75: mol_type = other DNA
ttgctcgtgaaattgctgtacccaatagtgatgtccgaaaaaacctccgttctcacatgaaacagccatatgcaa

SEQ ID NO: 419519 - DNA, 75 bp, synthetic construct
  source 1..75: mol_type = other DNA
aattagtaattgtatcgaatctctgaaaatttttgaggctgtagatgttgttattccatcggcagataccttagt

SEQ ID NO: 419520 - DNA, 75 bp, synthetic construct
  source 1..75: mol_type = other DNA
gacggacgtgggcgcggtgaaggtggttaaaaaagagatggcccaggggcaaaagcagagtcgctttattgcctg

SEQ ID NO: 419521 - DNA, 75 bp, synthetic construct
  source 1..75: mol_type = other DNA
aaatgaaatgcacaagatataaagtgcgtgaggatgttatggatcagatcgtccaggaaggcggtctgggtaatg

SEQ ID NO: 419522 - DNA, 75 bp, synthetic construct
  source 1..75: mol_type = other DNA
tctcggcggcgctggtgcaaaactggaagatatggcggcagcgtataccgcgtttgctcgccacggcaaggcagg

SEQ ID NO: 419523 - DNA, 75 bp, synthetic construct
  source 1..75: mol_type = other DNA
acctgtcgacgtcgtatcgatcaatggctgatgattgctgaatttatgctttataaaccaatgttcacggcaaaa

SEQ ID NO: 419524 - DNA, 75 bp, synthetic construct
  source 1..75: mol_type = other DNA
ggattgcaaaaaatctgaccctgaaggcgaactcactgaccagtgcgggtgacatcaccggtgtggatgctctca

SEQ ID NO: 419525 - DNA, 75 bp, synthetic construct
  source 1..75: mol_type = other DNA
aggggctggcggggggtaatttagcgggtgctctggccggaacttcggctccggaactggcgcacctgctgaaat

SEQ ID NO: 419526 - DNA, 75 bp, synthetic construct
  source 1..75: mol_type = other DNA
gattgcctgtcggccaaaactgctgattgccgatgaaccgaccactgcgctggacgtgaccattcaggcgcaaat

SEQ ID NO: 419527 - DNA, 75 bp, synthetic construct
  source 1..75: mol_type = other DNA
tgaaaatggccgaaaggttaaatgcagatcatcctgattggtcgttggttacgtgcagacacgaattgaacaatg

SEQ ID NO: 419528 - DNA, 75 bp, synthetic construct
  source 1..75: mol_type = other DNA
gctgctcaatgttctgagtcagcgttatgtggggcgggggatgactaagcgcaaaatggctgaattgctgaatga

SEQ ID NO: 419529 - DNA, 75 bp, synthetic construct
  source 1..75: mol_type = other DNA
cggatacgctgaaggatatcccgggtgcgctgtcgctgtccggggcaagtgtaagcaactatcccctgccatccg

SEQ ID NO: 419530 - DNA, 75 bp, synthetic construct
  source 1..75: mol_type = other DNA
ggcgaagtatggtaccggcagtgaaattcagcggggtatccaggccgcgacagcggcgcttcaggggctggcggg

SEQ ID NO: 419531 - DNA, 75 bp, synthetic construct
  source 1..75: mol_type = other DNA
caacgcatcagaagttggaatgcagtggggacagggaaatatgaaacagggtatgccgtgggaggattatgttgg

SEQ ID NO: 419532 - DNA, 75 bp, synthetic construct
  source 1..75: mol_type = other DNA
tcacaaacggcgggcatctgcagggcgaaacgctgacgctggccgcctccggtggcgtgaacaaccgttccggtg

SEQ ID NO: 419533 - DNA, 75 bp, synthetic construct
  source 1..75: mol_type = other DNA
taccaccctgtcaggggctcaggtcagtggcgagaaagtcacagcagatgtcggcaacaacctgaccatttcgag

SEQ ID NO: 419534 - DNA, 75 bp, synthetic construct
  source 1..75: mol_type = other DNA
acgccggtggtgcactgaacctgaaggccatcggggatatcggcaatatcagctcagtcatcagcggtaaaaccg

SEQ ID NO: 419535 - DNA, 75 bp, synthetic construct
  source 1..75: mol_type = other DNA
gcctgcttaacccgcgctgcccctatgccactgacagatgtcgcgctgaagaaccggcgctgaatatgctcgctg

SEQ ID NO: 419536 - DNA, 75 bp, synthetic construct
  source 1..75: mol_type = other DNA
tacctgctgtgcaggtgctggaagcctatggaccgaaacggtttgcggcaaagttacgcaatgttggattgccgt

SEQ ID NO: 419537 - DNA, 75 bp, synthetic construct
  source 1..75: mol_type = other DNA
tctggactggcagaccggacggcacgcccgttgttggtcagtttggctttgccagtgccgtaccattgttgaatc

SEQ ID NO: 419538 - DNA, 75 bp, synthetic construct
  source 1..75: mol_type = other DNA
gccttgccgcgcgtcgccccactggcatggaaaacgggcaccagctatggctatcgtgacgcctgggcgattggg

SEQ ID NO: 419539 - DNA, 75 bp, synthetic construct
  source 1..75: mol_type = other DNA
tggctgcccgcatcagaacgtcgcgctgtgcgcttaccaccggcctcgacaatttgcccgccatacggtcacgat

SEQ ID NO: 419540 - DNA, 75 bp, synthetic construct
  source 1..75: mol_type = other DNA
tgaagcgcagcccttgccggacggtgccttgccgcgcgtcgtacccctggcgtggaaaacgggcaccagctacgg

SEQ ID NO: 419541 - DNA, 75 bp, synthetic construct
  source 1..75: mol_type = other DNA
ggaacgccgggctgtgcgtttgcctccggcatcgacaatgtgcccgccatacggtcgcgatgcccaactcccgtt

SEQ ID NO: 419542 - DNA, 75 bp, synthetic construct
  source 1..75: mol_type = other DNA
ccgtgcgccacgtcatccatatacccaggcattgttgcgtgcgttgccggaatttgcccaggacaaagaacgtct

SEQ ID NO: 419543 - DNA, 75 bp, synthetic construct
  source 1..75: mol_type = other DNA
acccgccgtcagcgagcgattgacctgctgaatctggtcggtattcccgatccggcatcgcgtctggatgtttac

SEQ ID NO: 419544 - DNA, 75 bp, synthetic construct
  source 1..75: mol_type = other DNA
gaaccgacgctgaatatgcttgcagacgggcgtcagtccaaatgccactatccactcgatgatgccgggaggccc

SEQ ID NO: 419545 - DNA, 75 bp, synthetic construct
  source 1..75: mol_type = other DNA
aacggtattcgctttcccatctggctggatgaaaagggcaaacgtgtcgccgccgattgccctcaggcacggcaa

SEQ ID NO: 419546 - DNA, 75 bp, synthetic construct
  source 1..75: mol_type = other DNA
acgtaacatcggtttgccgttgtatctgccgaacggcgccgcgccgaacctgtcgctgatcctcggaggggcagg

SEQ ID NO: 419547 - DNA, 75 bp, synthetic construct
  source 1..75: mol_type = other DNA
gccatttctcctttttcttgcagcgtggggagcagataaactctggcctctaccgctgcatgaagtcaatcccgc

SEQ ID NO: 419548 - DNA, 75 bp, synthetic construct
  source 1..75: mol_type = other DNA
ttgatgaggttgatttgcaccttcatccaacttggcagcagaaaattatagagcggctattaacaacctttccta

SEQ ID NO: 419549 - DNA, 75 bp, synthetic construct
  source 1..75: mol_type = other DNA
agtctacctgtgatggcttattattcaattgttaggtctgtcgttggtggtggtattgataatagaagaagaagc

SEQ ID NO: 419550 - DNA, 75 bp, synthetic construct
  source 1..75: mol_type = other DNA
aagttaatatacatagaggattaattgagaaaatatattggattgctaataataagcatgtattttcatctatgg

SEQ ID NO: 419551 - DNA, 75 bp, synthetic construct
  source 1..75: mol_type = other DNA
agatgcgcaacaactctcacaaggtgagaaaaccatacttactctggtaggtgatttagctcgccgactttccct

SEQ ID NO: 419552 - DNA, 75 bp, synthetic construct
  source 1..75: mol_type = other DNA
caagccgctgtacaaggaccttatcggtcgaacaaaagcagcactgaagaggaacccgaaaaatgtgctgtttgc

SEQ ID NO: 419553 - DNA, 75 bp, synthetic construct
  source 1..75: mol_type = other DNA
cttctgctgactgatatcacgaaggtagcaacgtatacgctgctgattgacagcgtgaaggtggaagtgaacaac

SEQ ID NO: 419554 - DNA, 75 bp, synthetic construct
  source 1..75: mol_type = other DNA
tctcgtgaaaacttccttgttaatttttatgcgactaatccggattgtgcattgcgacctgattataccattgat

SEQ ID NO: 419555 - DNA, 75 bp, synthetic construct
  source 1..75: mol_type = other DNA
acctctcccggaaagttacgataaacccgattcgcgcattcgccagctggcacgccgcagcaccgtaaccccggg

SEQ ID NO: 419556 - DNA, 75 bp, synthetic construct
  source 1..75: mol_type = other DNA
gctgttaaagatttagttcaatatttcaatggattatacaaagagaagattaaatcagaaaatgttggtaaaacg

SEQ ID NO: 419557 - DNA, 75 bp, synthetic construct
  source 1..75: mol_type = other DNA
atacactgtttggtgcgatttcaggttcagccgttgcggtcagccgcagcggtaggtgggattatgtcaccactg

SEQ ID NO: 419558 - DNA, 75 bp, synthetic construct
  source 1..75: mol_type = other DNA
tgccggaaataacagcatcagcgtgacaccggtcatcaacggtcagacccaggcggcctttaatctggcgaaatg

SEQ ID NO: 419559 - DNA, 75 bp, synthetic construct
  source 1..75: mol_type = other DNA
aacagataaagtacaattagtcccattcgaaaaagagaaactactggcttcaatggaagtcattaatagcatgag

SEQ ID NO: 419560 - DNA, 75 bp, synthetic construct
  source 1..75: mol_type = other DNA
gaactggttaacggtcagtttgtctttggtctgtactggccggtgtcgcagtgggcgtcaggcgcgacagcaaac

SEQ ID NO: 419561 - DNA, 75 bp, synthetic construct
  source 1..75: mol_type = other DNA
atcaatttgtatgtatacgaaccattgcgaagcctgatcgagttaaggggggttacgttgttgagcggtttcatt

SEQ ID NO: 419562 - DNA, 75 bp, synthetic construct
  source 1..75: mol_type = other DNA
atgcagggaaaacatcagtaataaaagcaatgcagttagcaatgggagactattcacgttacttatcggatgaag

SEQ ID NO: 419563 - DNA, 75 bp, synthetic construct
  source 1..75: mol_type = other DNA
atgaatttgacgaactggctggcgaccgcgcgtatgcagacgataaagctatcgtcggtggtatcgcccgtctcg

SEQ ID NO: 419564 - DNA, 75 bp, synthetic construct
  source 1..75: mol_type = other DNA
ttgttaactggactaatttaaaagatggcaatgttaacgtaaaaattggtgctcttggcactgatggacttggtg

SEQ ID NO: 419565 - DNA, 75 bp, synthetic construct
  source 1..75: mol_type = other DNA
taattatcagcacacactcaccttatattgctggtttggcagagttgcatgaaattaggttcataagtaagcaag

SEQ ID NO: 419566 - DNA, 75 bp, synthetic construct
  source 1..75: mol_type = other DNA
taaaaatcacgaagaagaggcggagccattttttccaattatggccgcagaggaacctgaggcacatttgcaccc

SEQ ID NO: 419567 - DNA, 75 bp, synthetic construct
  source 1..75: mol_type = other DNA
cgaaaaatggattgatgttttcggtgataatattgcagtagatgcaaatggacatgagtttgtggctattcgtac

SEQ ID NO: 419568 - DNA, 75 bp, synthetic construct
  source 1..75: mol_type = other DNA
attcttctggttccgtgctgccgtggtggttctgcatttttggcgggcgatgaaggtactttcagcgaatccacc

SEQ ID NO: 419569 - DNA, 75 bp, synthetic construct
  source 1..75: mol_type = other DNA
atatcaattgtagacttcaaaagattaagggatgttattgtaaatcttgaagatgatctcacagtttttgttgct

SEQ ID NO: 419570 - DNA, 75 bp, synthetic construct
  source 1..75: mol_type = other DNA
ccgcgcgtatgcagacgataaagctatcgtcggtggtatcgcccgtcttgacggtcgtccggtgatgatcattgg

SEQ ID NO: 419571 - DNA, 75 bp, synthetic construct
  source 1..75: mol_type = other DNA
gtgcatggcagattgcgcaactggcacgccatccacagcgtccttataccctggattacgttcgcctggcatttg

SEQ ID NO: 419572 - DNA, 75 bp, synthetic construct
  source 1..75: mol_type = other DNA
tcggagatgaagaaaaccattcattttcaatggaatatcatggcacggggacgagaagttgggcttcaatgctta

SEQ ID NO: 419573 - DNA, 75 bp, synthetic construct
  source 1..75: mol_type = other DNA
tctcgtgaaaacttccttgttaatttttatgcaactaatccagactgtgctccgcgacctgattatgaaactatt

SEQ ID NO: 419574 - DNA, 75 bp, synthetic construct
  source 1..75: mol_type = other DNA
tttgtgtgttggctatatcgtttcgttatgtctgggaatggttgacttcagcagtatgcgcaatctaccgctcat

SEQ ID NO: 419575 - DNA, 75 bp, synthetic construct
  source 1..75: mol_type = other DNA
tggtggttggcacgatttatctgcttagcgtgctggaagctgtcggcgatatcaccgccacggcaatggtttccc

SEQ ID NO: 419576 - DNA, 75 bp, synthetic construct
  source 1..75: mol_type = other DNA
attgcgctgggcagcagcatgaaaagcgacggttttcacgaagagttaatcatgtcgtcgctgcttggcgtctcc

SEQ ID NO: 419577 - DNA, 75 bp, synthetic construct
  source 1..75: mol_type = other DNA
tctggggggtgcaatgacgttaatgttttccatgattgccattgccggtatccgcatcattatcaccaatggctt

SEQ ID NO: 419578 - DNA, 75 bp, synthetic construct
  source 1..75: mol_type = other DNA
ctctggcattggcacctggttacaggtaaaccgttacggtattgtgggttccggtttgctctcaattcaatccgt

SEQ ID NO: 419579 - DNA, 75 bp, synthetic construct
  source 1..75: mol_type = other DNA
gctatgtgtcggctatatcgcatcgttatgcctgggcatggtggatttcagcagtatgcgcaatttgccgttaat

SEQ ID NO: 419580 - DNA, 75 bp, synthetic construct
  source 1..75: mol_type = other DNA
gaagaacaggttgatccgcgcaaagcggcagttgccgcggctattgcccgcgctcaggccaaaaaagccgcccag

SEQ ID NO: 419581 - DNA, 75 bp, synthetic construct
  source 1..75: mol_type = other DNA
ttgcgctggatggcatagagcggagcgacgccatgcttcatgccggaaactttagggaaaacgcgaattcgtcaa

SEQ ID NO: 419582 - DNA, 75 bp, synthetic construct
  source 1..75: mol_type = other DNA
gtcttaccactcaggctattcttaattgtatgtttgatttagcagaaataaagtcggattcgcgccataactacc

SEQ ID NO: 419583 - DNA, 75 bp, synthetic construct
  source 1..75: mol_type = other DNA
cctctatttatgtattagttgaaaaccctatttgtgctggcgggttaactgcgattttattaaatattatcctcc

SEQ ID NO: 419584 - DNA, 75 bp, synthetic construct
  source 1..75: mol_type = other DNA
gattggcggcttcttcacgaccattccctcggcagttctgggaggcgcaatgacgttgatgttttccatgattgc

SEQ ID NO: 419585 - DNA, 75 bp, synthetic construct
  source 1..75: mol_type = other DNA
ggctgcctcatcgctaactttgcaacagtgccgtccggtggaggtaaaggtaaggggcgcttgccggaaccggtc

SEQ ID NO: 419586 - DNA, 75 bp, synthetic construct
  source 1..75: mol_type = other DNA
gaggcagttttattgatgtcacccgtacggtcgataacccggaagaaattgcctctgcgctgcggtttattgagg

SEQ ID NO: 419587 - DNA, 75 bp, synthetic construct
  source 1..75: mol_type = other DNA
cccggctctgtcacgatgaactgcggcgtaagaaaatcagcgcgcttatccctccccgaaaaggtgcgggttact

SEQ ID NO: 419588 - DNA, 75 bp, synthetic construct
  source 1..75: mol_type = other DNA
atcagaacgtgcttatttcggtgaatttcgatagtgatctggttgagccgctaatatgctcagcacgctataccg

SEQ ID NO: 419589 - DNA, 75 bp, synthetic construct
  source 1..75: mol_type = other DNA
gcagacttttgacaaatctgcatacccgaaacttgcagttgcttatccgtcaggcgtgatccctgatatgcgtgg

SEQ ID NO: 419590 - DNA, 75 bp, synthetic construct
  source 1..75: mol_type = other DNA
caaacaactatattagactctcaaaatcaaaatacatccctcgcataagagggttaaccaacaaaaccattgaaa

SEQ ID NO: 419591 - DNA, 75 bp, synthetic construct
  source 1..75: mol_type = other DNA
atgaaaaaactcgctataatttcagtaatgatattatctgttatgagtggttcaacactggctgataatcatacg

SEQ ID NO: 419592 - DNA, 75 bp, synthetic construct
  source 1..75: mol_type = other DNA
aacgattaagccgggtaatggtattgagcaggcaactcactggatgcctctaccagaaccgccgcaggaggtgaa

SEQ ID NO: 419593 - DNA, 75 bp, synthetic construct
  source 1..75: mol_type = other DNA
ctcaaaaagcgcggcggccaccagtgccgctgcggcaaaaacgtcagaaacgaatgcggcagcgtcacaacaatc

SEQ ID NO: 419594 - DNA, 75 bp, synthetic construct
  source 1..75: mol_type = other DNA
gcaactggaaacagtacaaccaagccttggtgcaacgtggttcgttgaccgtctggatggatgagcaagccatcc

SEQ ID NO: 419595 - DNA, 75 bp, synthetic construct
  source 1..75: mol_type = other DNA
tgactgcggtaatattcatctcgccggagctgtcattgaagtaatggggataaagtcagcgatgacgatccgcat

SEQ ID NO: 419596 - DNA, 75 bp, synthetic construct
  source 1..75: mol_type = other DNA
gacacaccatcaccgttaacgctacgggtaacgaagaaaacaccgtaaaaaacatcgcatttaactatattgtga

SEQ ID NO: 419597 - DNA, 75 bp, synthetic construct
  source 1..75: mol_type = other DNA
atgtatatatcggtgcccataaccacactatcggcattggtgctcatgcccattctgtcattattggtccccacg

SEQ ID NO: 419598 - DNA, 75 bp, synthetic construct
  source 1..75: mol_type = other DNA
ggaaggcaccaacaaggagcaactgcaaaaatgggtggacgactacggcgaggacagcgatttcgtcaaagtacg

SEQ ID NO: 419599 - DNA, 75 bp, synthetic construct
  source 1..75: mol_type = other DNA
ctggggcatgtcgacctgtgaagactgcaaggtagtggtgacagccaacaccgacaaccagttacgcaccaaaac

SEQ ID NO: 419600 - DNA, 75 bp, synthetic construct
  source 1..75: mol_type = other DNA
gcggaaaacaaagagaaatatgcaaataaaatgtcttcgctaaagcaagatttgcaggctctactgggtaaggaa

SEQ ID NO: 419601 - DNA, 75 bp, synthetic construct
  source 1..75: mol_type = other DNA
ggtctgagcacaacacagaggcgttcgccggtctgcacaacgagcgtaagcgcatcatcgtcgtattcgacgagg

SEQ ID NO: 419602 - DNA, 75 bp, synthetic construct
  source 1..75: mol_type = other DNA
ggtctgaacacaacaccgaggcgttcgcagggctgcacaacgagcgcaagcgcatcatcgtggtattcgacgaag

SEQ ID NO: 419603 - DNA, 75 bp, synthetic construct
  source 1..75: mol_type = other DNA
ctgcactgcaaaaaactcggggagtggcagcgtaccactgacgatgtgctgtttgcgaaagtgattgccgacttc

SEQ ID NO: 419604 - DNA, 75 bp, synthetic construct
  source 1..75: mol_type = other DNA
ctgttatatgacggcggcctgaaatggtcggctacaacgtgcgcagccgctggcgcaatcacggtgctgataaac

SEQ ID NO: 419605 - DNA, 75 bp, synthetic construct
  source 1..75: mol_type = other DNA
tactggcctgcgtttatgtcgccgttttcgtgatcatcaaccttattgttaaccattgcggcccgtgggtaattc

SEQ ID NO: 419606 - DNA, 75 bp, synthetic construct
  source 1..75: mol_type = other DNA
cgtcatttgtcgcggttgtttccggtgcgcttatttctggcggcgtttaccgggttttgcctggtgactttgatt

SEQ ID NO: 419607 - DNA, 75 bp, synthetic construct
  source 1..75: mol_type = other DNA
accagacgaaaacgccactttaacgcagaacatcagcatacgcgcaagaaatctatcgatttggaattcatggtc

SEQ ID NO: 419608 - DNA, 75 bp, synthetic construct
  source 1..75: mol_type = other DNA
atgaaatatcaacaacttgaaaatctggaaagcggttggaaatggaagtatctggtgaagaaacaccgtgaaggg

SEQ ID NO: 419609 - DNA, 75 bp, synthetic construct
  source 1..75: mol_type = other DNA
gcggaaaacaaagagaaatacgcgaataaaatgtcttctttgaagcaggatctgcaggcattgctgggtaaggaa

SEQ ID NO: 419610 - DNA, 75 bp, synthetic construct
  source 1..75: mol_type = other DNA
cctgagtacagggttaagctcgatgggcgcatcgtccttgaggccaaagaggacatgaagcgccgtggggttcct

SEQ ID NO: 419611 - DNA, 75 bp, synthetic construct
  source 1..75: mol_type = other DNA
ctcgaaacgcataaatataccaggacagcaaagccagcagggaagggccataacggattatgacccttatgctta

SEQ ID NO: 419612 - DNA, 75 bp, synthetic construct
  source 1..75: mol_type = other DNA
gcggcagagtacaaagttcgagtggacggtaaaatcgttatcgaaccgaaggaagatatcaaggagcggcttggg

SEQ ID NO: 419613 - DNA, 75 bp, synthetic construct
  source 1..75: mol_type = other DNA
ccaggaaacagcggacgacctgtcggcggcagagtacaaagttcgcgtggacggtaaaatcgttatcgaaccgaa

SEQ ID NO: 419614 - DNA, 75 bp, synthetic construct
  source 1..75: mol_type = other DNA
ggctgtattaatcacgcgatgttgacggcacaggcaatacaacacgccggactgactctggcgggttgggtggcg

SEQ ID NO: 419615 - DNA, 75 bp, synthetic construct
  source 1..75: mol_type = other DNA
cgttctcctggcaagggtgatgcgctgctgctgacgtttgctttcccggtgtcgaaacgtatgaatataccagga

SEQ ID NO: 419616 - DNA, 75 bp, synthetic construct
  source 1..75: mol_type = other DNA
tcacctgcaccgccaccgcgatgtacagcaacgatcccggtcacgacaaacgctggcgcgctgatgctattccat

SEQ ID NO: 419617 - DNA, 75 bp, synthetic construct
  source 1..75: mol_type = other DNA
tactgctgacgtttgctttcccggtctcgaaacgcataaatatacctggacagcaaagccagcagggaagggcca

SEQ ID NO: 419618 - DNA, 75 bp, synthetic construct
  source 1..75: mol_type = other DNA
cgcaaatataaacaccgctggaaaactgcgcagattgacagccggacggtggaaggcaccaacaaacagcagttg

SEQ ID NO: 419619 - DNA, 75 bp, synthetic construct
  source 1..75: mol_type = other DNA
tgtttttgcgacggatgaagagctagcagcgcatgaatctcgtctcgatctggtgcagaagaagggcggaagctg

SEQ ID NO: 419620 - DNA, 75 bp, synthetic construct
  source 1..75: mol_type = other DNA
aacaagatcttcatcgccatgctgatccttttccttttaacgaagagccctcctcacaggatctggattcattgc

SEQ ID NO: 419621 - DNA, 75 bp, synthetic construct
  source 1..75: mol_type = other DNA
acacagaaagagcatcgcatcatcggcattgacagccattaccggataaacccggcacaacacggagagatatct

SEQ ID NO: 419622 - DNA, 75 bp, synthetic construct
  source 1..75: mol_type = other DNA
gattgaatgggggctgtcctcctggcgtcttgttcgtggcaatccaccccctcccgttccgcgcgccgaaaagac

SEQ ID NO: 419623 - DNA, 75 bp, synthetic construct
  source 1..75: mol_type = other DNA
cgaggacaacccttgtttgaagttcactctttgatccaccaacataaagtgaaggtattttcgtcaaattacact

SEQ ID NO: 419624 - DNA, 75 bp, synthetic construct
  source 1..75: mol_type = other DNA
gataaaccaatcagtcaggatggtggtgtctatgatatgaataatatcagagtgaccacacctaagcgacatatt

SEQ ID NO: 419625 - DNA, 75 bp, synthetic construct
  source 1..75: mol_type = other DNA
ggatatgccgagcgcctcaaggaagaggctaaggcactcaatgaacgcgctgccgtaatcaacaacaaggtcgat

SEQ ID NO: 419626 - DNA, 75 bp, synthetic construct
  source 1..75: mol_type = other DNA
atccagctcctaaaactgaggatattaaaggtttgggggaattaaaagaggggaggccaaaaactccaaagcaag

SEQ ID NO: 419627 - DNA, 75 bp, synthetic construct
  source 1..75: mol_type = other DNA
atggctaaaatctatgagtttccgctgggagccgaacgaagtaagctgaaaaatgaaatcatccaggaacgtaaa

SEQ ID NO: 419628 - DNA, 75 bp, synthetic construct
  source 1..75: mol_type = other DNA
atgatccagcaacagtgtatggttctcctggtaaatatgttgttgtcaatgatcgtactggtgaggttactcaga

SEQ ID NO: 419629 - DNA, 75 bp, synthetic construct
  source 1..75: mol_type = other DNA
agtgatggcgaacacctcggggcatttgacccaaaaacgggtaaacaaattaaaggtccggatccgaaagggcga

SEQ ID NO: 419630 - DNA, 75 bp, synthetic construct
  source 1..75: mol_type = other DNA
aaggcgacgggtaaaggaaaaccagttggtgataaatggcttgatgatgcgggtaaagattcaggagcgccaatt

SEQ ID NO: 419631 - DNA, 75 bp, synthetic construct
  source 1..75: mol_type = other DNA
tcacgagaacaggtcgttcagcaaacacctcttgagaagtctgacgagacactggtcacaaataccaacaatggc

SEQ ID NO: 419632 - DNA, 75 bp, synthetic construct
  source 1..75: mol_type = other DNA
tattactgattgccgcgttatttgtgatcattatcttgtttaaagttctttcacgagaacaggtcgttcagcaaa

SEQ ID NO: 419633 - DNA, 75 bp, synthetic construct
  source 1..75: mol_type = other DNA
aaacaatttagtaggaacaataatgatcgaatgaaggttggaaaagcgcccaagactagaacccaggatgtttca

SEQ ID NO: 419634 - DNA, 75 bp, synthetic construct
  source 1..75: mol_type = other DNA
tgagcaggtctataattctcgtaaaagtgaacttgatgcggcaaataaaacctttgctgatgcaatagctgaaat

SEQ ID NO: 419635 - DNA, 75 bp, synthetic construct
  source 1..75: mol_type = other DNA
tcctggtgccggaactcttggtatttccgtatctggtgaggctttatctgcggcaatagcggatatctttgcagc

SEQ ID NO: 419636 - DNA, 75 bp, synthetic construct
  source 1..75: mol_type = other DNA
atgaagaaaacaatgatggcagccgcccttgttttaagtgcgttcagtattcagtctgcactgtccgctgaatac

SEQ ID NO: 419637 - DNA, 75 bp, synthetic construct
  source 1..75: mol_type = other DNA
atttaaatacttaatattctatccaagtaatgttccgtcattacgatttaaaagacattcaggttttgcgtctaa

SEQ ID NO: 419638 - DNA, 75 bp, synthetic construct
  source 1..75: mol_type = other DNA
tttctcccatcattttatgaattactattatcagatgctttaacatctacctgttacggttatgagaaatcagaa

SEQ ID NO: 419639 - DNA, 75 bp, synthetic construct
  source 1..75: mol_type = other DNA
gttaatacaaaatttaaataatgagaattacaacaaaatactcttttcttcaagagattcaagagttatttttga

SEQ ID NO: 419640 - DNA, 75 bp, synthetic construct
  source 1..75: mol_type = other DNA
tcatcgctcatcactgggcattcgctatctttcttatcgttgccattggcctgtgttgcctgatgctggtaggcg

SEQ ID NO: 419641 - DNA, 75 bp, synthetic construct
  source 1..75: mol_type = other DNA
tgaggccacagaatgtgaaaatatccttgagcaaaaaaataaatgtttgatcgaatacatttctaatattacaga

SEQ ID NO: 419642 - DNA, 75 bp, synthetic construct
  source 1..75: mol_type = other DNA
cttggcatgattgctaataaagttttcgataatccatttattccatttgattataaaacatctatcaataattct

SEQ ID NO: 419643 - DNA, 75 bp, synthetic construct
  source 1..75: mol_type = other DNA
ttttaattgatgaaattgatttgcatttgcatccgcaatggcaacagacaattattgagcgtttgacatctacat

SEQ ID NO: 419644 - DNA, 75 bp, synthetic construct
  source 1..75: mol_type = other DNA
gtggagacatgacacctcttcccggcagcctgctcatccgcaacgcagagtctagggctgcatcaggtggcttgg

SEQ ID NO: 419645 - DNA, 75 bp, synthetic construct
  source 1..75: mol_type = other DNA
ccctggtcctgaccgcactcagtattcagtccgccccagcggctgaatacagcgtgaagacccagtgtctgggtg

SEQ ID NO: 419646 - DNA, 75 bp, synthetic construct
  source 1..75: mol_type = other DNA
atatacgtaaattatgaacaaactaactttgagaaaatacttgggtacttgattaatgacaatatcaaaaatatc

SEQ ID NO: 419647 - DNA, 75 bp, synthetic construct
  source 1..75: mol_type = other DNA
gattctgttttggaaaaaagagaaataagacagaatttaacaaagaataatgtgacagtaattaacatttcagat

SEQ ID NO: 419648 - DNA, 75 bp, synthetic construct
  source 1..75: mol_type = other DNA
tatatttcaaacgcaagttttataaaagtgaaattacaaaaatcatttgggataaggggcgtgaaatgtatgtga

SEQ ID NO: 419649 - DNA, 75 bp, synthetic construct
  source 1..75: mol_type = other DNA
tcggcagaaagcgccgcatcgtccgcttcaacagccacaacgaaggctggcgaagccactgaacaggccagcgca

SEQ ID NO: 419650 - DNA, 75 bp, synthetic construct
  source 1..75: mol_type = other DNA
tgcaggtgcacacgcgcatactgtcggtattggtgctcatacgcactccgttgcgattggttcacatggacacac

SEQ ID NO: 419651 - DNA, 75 bp, synthetic construct
  source 1..75: mol_type = other DNA
ctggcaataccgagcagggcgataaagccctcaaaggtgcgtctcgtgcaggctcgagtactggcacatcgtcag

SEQ ID NO: 419652 - DNA, 75 bp, synthetic construct
  source 1..75: mol_type = other DNA
gcgcatccagtacggatttggggacgaaaaccacatcgtcgtttgattacggtactaaaacgaccagttcatttg

SEQ ID NO: 419653 - DNA, 75 bp, synthetic construct
  source 1..75: mol_type = other DNA
tgtctccccggttgaatctttccctgtagaaaaatggaacgccattatcgctatcaatctctcttctgtctttca

SEQ ID NO: 419654 - DNA, 75 bp, synthetic construct
  source 1..75: mol_type = other DNA
taagccaacggcatcagagatcggggcgttaccgtcaggtggaacagcagtatcatcagttaatctgtcttcaaa

SEQ ID NO: 419655 - DNA, 75 bp, synthetic construct
  source 1..75: mol_type = other DNA
tactgccgaatccgcggcaacgcgcgccgagacagcagcaaaacgggcagaggatattgcatccgccgtggcgct

SEQ ID NO: 419656 - DNA, 75 bp, synthetic construct
  source 1..75: mol_type = other DNA
gtctgcttcaaaagatgaggcgaccagacaagcgtcagcagcgaatggcagggccacgacggcagcgacgaaggc

SEQ ID NO: 419657 - DNA, 75 bp, synthetic construct
  source 1..75: mol_type = other DNA
gtctgcttcaaaagatgaggcgaccagacaagcgtcagcagcgaatggcagcgccacgacagcaacgacgaaggc

SEQ ID NO: 419658 - DNA, 75 bp, synthetic construct
  source 1..75: mol_type = other DNA
tccggctgaatccgcggcaacgcgcgccgagacagcagcaaaacgggcagaggatattgcatccgccgtggcgct

SEQ ID NO: 419659 - DNA, 75 bp, synthetic construct
  source 1..75: mol_type = other DNA
tcctgcagaatccgcggcaacgcgcgccgagacagcagcaaaacgggcagaggatattgcatccgccgtggcgct

SEQ ID NO: 419660 - DNA, 75 bp, synthetic construct
  source 1..75: mol_type = other DNA
ttccgcggaatccgcggcaacgcgcgccgagacagcagcaaaacgggcagaggatattgcatccgccgtggcgct

SEQ ID NO: 419661 - DNA, 75 bp, synthetic construct
  source 1..75: mol_type = other DNA
aaagacgagcgaaaccaacgcaaagtccagccagacggcagcgaaaacaagcgaaacgaatgccaaagccagtga

SEQ ID NO: 419662 - DNA, 75 bp, synthetic construct
  source 1..75: mol_type = other DNA
ggtcaaacaaggcaatgacttttttcgtctgcttccttgccgctctggcgggattactctttggcctggatatcg

SEQ ID NO: 419663 - DNA, 75 bp, synthetic construct
  source 1..75: mol_type = other DNA
cgtgggattgccgcttcattgacctttgtctgcctggcatttctgataggaccgagcattaagaactccagcccg

SEQ ID NO: 419664 - DNA, 75 bp, synthetic construct
  source 1..75: mol_type = other DNA
cagcgtgctggtattctgggtgccgaccgactggagccatagcagcaaagtagtgtatgcatatttgacctacat

SEQ ID NO: 419665 - DNA, 75 bp, synthetic construct
  source 1..75: mol_type = other DNA
agacagtcagtttgctcagcgactgggccggcgattattctcacccggcactgaaatatattgaaacccgctggg

SEQ ID NO: 419666 - DNA, 75 bp, synthetic construct
  source 1..75: mol_type = other DNA
gcagatgcagtggagtagaaagggggcgcattatttgttacagaccagaactgcagtcctgaataacgaactaca

SEQ ID NO: 419667 - DNA, 75 bp, synthetic construct
  source 1..75: mol_type = other DNA
aaagaacgggcgatcatgattcatgccggaggggataatcattccgattcacctgctcctctgggggggggggcg

SEQ ID NO: 419668 - DNA, 75 bp, synthetic construct
  source 1..75: mol_type = other DNA
gccaacagtcaaagagctgcaaaaaccagtgaagacaacgcaaaggcgagcgagactacagcggcgaactcggcg

SEQ ID NO: 419669 - DNA, 75 bp, synthetic construct
  source 1..75: mol_type = other DNA
ccagcacgtcagccggacaggccgcgacgtcggctcaggaggctttttccagcgcaggaacggcatcagcaaaag

SEQ ID NO: 419670 - DNA, 75 bp, synthetic construct
  source 1..75: mol_type = other DNA
acgtctgcagaaagatcagaacggtgcggatatccctggcaaagacacctttacgaaaaatattggtgcctgccg

SEQ ID NO: 419671 - DNA, 75 bp, synthetic construct
  source 1..75: mol_type = other DNA
tttgaacacattgatgcgggttccgccgaaaatggtcagcacaattgcccctacgtaaagccagacgcgagtgaa

SEQ ID NO: 419672 - DNA, 75 bp, synthetic construct
  source 1..75: mol_type = other DNA
gcgagagtgccgcagctggttctgcaagcgcggcggctgcttctgccactgcatcagccaacagccaaaaagcag

SEQ ID NO: 419673 - DNA, 75 bp, synthetic construct
  source 1..75: mol_type = other DNA
gttataacagcaagggattaaaacttggatttatcgaacttaacgcaaattgcgagaatcatagattgattttca

SEQ ID NO: 419674 - DNA, 75 bp, synthetic construct
  source 1..75: mol_type = other DNA
gtctgcttcaaaagatgaggcgaccagacaagcgtcagcagcgaatggcagagccacgaccgcaacgacgaaggc

SEQ ID NO: 419675 - DNA, 75 bp, synthetic construct
  source 1..75: mol_type = other DNA
cgtgatgatttacaacgttcccggcttgatgaagtcgcggaagaagttcccgttgcgttggtctacaacggcatt

SEQ ID NO: 419676 - DNA, 75 bp, synthetic construct
  source 1..75: mol_type = other DNA
gcatggatgtcgttccttcctgtaatggtctggaagttcaaattgagctttccagccgccgctttatggggttga

SEQ ID NO: 419677 - DNA, 75 bp, synthetic construct
  source 1..75: mol_type = other DNA
gtggaacagcttaacgatatcggaaaaccggtgcagccgctgccgttcacccagacgtttgatctcaacaaactg

SEQ ID NO: 419678 - DNA, 75 bp, synthetic construct
  source 1..75: mol_type = other DNA
tataccagtaatgccagcgtgacgattcatacgtcaccagcatattctgctaataagccggaagggttaacggac

SEQ ID NO: 419679 - DNA, 75 bp, synthetic construct
  source 1..75: mol_type = other DNA
cgagacagcagctaaacgggcagaggatattgcatccgccgtggcgcttgaggatgcgagcacgacgaaaaaggg

SEQ ID NO: 419680 - DNA, 75 bp, synthetic construct
  source 1..75: mol_type = other DNA
ttgggtattacagacagagcatctgaggatcgaattaaaccagttaaacggaaaataaaagaattttttgaacac

SEQ ID NO: 419681 - DNA, 75 bp, synthetic construct
  source 1..75: mol_type = other DNA
ggcaaattaatccgtttcctgattatccattttttgcgttaaatcagagtggaagtaatacaaatacttctgata

SEQ ID NO: 419682 - DNA, 75 bp, synthetic construct
  source 1..75: mol_type = other DNA
tttttccagagaagataaacccttatccggagagagttatatacgtctgcaggttgaaatttttctttcatcact

SEQ ID NO: 419683 - DNA, 75 bp, synthetic construct
  source 1..75: mol_type = other DNA
ggaccagggcgtatttatgaccatggttcagctgccagcaggtgcaacgcaggaacgtacgcagaaagtgctcaa

SEQ ID NO: 419684 - DNA, 75 bp, synthetic construct
  source 1..75: mol_type = other DNA
tggttgtacgcacgccgctgcctggatgctgccttctggtgaactggtgggcggacatgaagacgtgggtcgcca

SEQ ID NO: 419685 - DNA, 75 bp, synthetic construct
  source 1..75: mol_type = other DNA
aatttgacgctggtgggcttttgtaaaccgggtcgggcaacggtttatacccatccgcagcgtttgagcaattaa

SEQ ID NO: 419686 - DNA, 75 bp, synthetic construct
  source 1..75: mol_type = other DNA
aatcctttatgccaatggggcttttattgaactcttttccagagaagataaacccttatccggagagagttatat

SEQ ID NO: 419687 - DNA, 75 bp, synthetic construct
  source 1..75: mol_type = other DNA
caacgccaaaggcagtaaaagcagccaatgacaatgctgagaaacgtctgcagaaagatcagaacggtgcggata

SEQ ID NO: 419688 - DNA, 75 bp, synthetic construct
  source 1..75: mol_type = other DNA
ggcgctttcagcggatataacactgacgccgaaagatattggtacgcttaactcaacaacaatgtcattcagcgg

SEQ ID NO: 419689 - DNA, 75 bp, synthetic construct
  source 1..75: mol_type = other DNA
aaacaaagaaatcaagacatatatggagtctttggctgggtatagagaatttgtggttatttcatttagcaacgg

SEQ ID NO: 419690 - DNA, 75 bp, synthetic construct
  source 1..75: mol_type = other DNA
cagtggtcgtgccgtattgtctcaggaacaggacggcattaaatcgcacacccacagcgccagcgcatccagtac

SEQ ID NO: 419691 - DNA, 75 bp, synthetic construct
  source 1..75: mol_type = other DNA
gtctgcttcaaaagatgaggcgaccagacaagcgtcagcagcgaatggcagagccacgacagcaccgacgaaggc

SEQ ID NO: 419692 - DNA, 75 bp, synthetic construct
  source 1..75: mol_type = other DNA
ctgttgtttcaattacgttgattggtggcgcgggatttaacgtggggtcacctcaacaggcaggtatatctgaac

SEQ ID NO: 419693 - DNA, 75 bp, synthetic construct
  source 1..75: mol_type = other DNA
tcattaacattgcctctgtgcatgggctggtagcgtcgaaagacaaatcagcttatgttgcggcaaaacatggcg

SEQ ID NO: 419694 - DNA, 75 bp, synthetic construct
  source 1..75: mol_type = other DNA
ctgaccggaacgccaacaacgccaactgcgccaaaaggtactaataatactcagatcgcaagtacggcttatgtg

SEQ ID NO: 419695 - DNA, 75 bp, synthetic construct
  source 1..75: mol_type = other DNA
ctgcaggtgcacacgcacatactgtcggtattggtgcacacacgcactccgttgcgattggttcacatggacaca

SEQ ID NO: 419696 - DNA, 75 bp, synthetic construct
  source 1..75: mol_type = other DNA
agcagccacttctgcatccaccgcgaccacgaaagcgtcagaagcagccacttcagcacgggatgcgtcggcttc

SEQ ID NO: 419697 - DNA, 75 bp, synthetic construct
  source 1..75: mol_type = other DNA
gcactgccaacaaccggaggaacagtttcaggtccgttgtctgttacaggtggattaactggttcattgaatggt

SEQ ID NO: 419698 - DNA, 75 bp, synthetic construct
  source 1..75: mol_type = other DNA
cactcgctgtctggtactgcagcaagttctggcgcacatgcacatactgtaggtattggtgcgcatacgcactcc

SEQ ID NO: 419699 - DNA, 75 bp, synthetic construct
  source 1..75: mol_type = other DNA
gctgaacgagttagcggcggcgctgggcaacgacccgaattttgcgaccaccatgactaacgcgcttgcgggtaa

SEQ ID NO: 419700 - DNA, 75 bp, synthetic construct
  source 1..75: mol_type = other DNA
cgccctattccgcttatcgctgaaaccggtgggatgaacgcgatgattgtcgattcttcagcactgactgaacaa

SEQ ID NO: 419701 - DNA, 75 bp, synthetic construct
  source 1..75: mol_type = other DNA
aaggcgcgtactgggatagtgaaatcaagcgtgcgcagatggacggccttgaaggctatccggtttatacccgca

SEQ ID NO: 419702 - DNA, 75 bp, synthetic construct
  source 1..75: mol_type = other DNA
ggaaccgaaagatattgtgggctatgtgcgtgaagccacgccacgtgaagtggaccaggcactggaaaatgccgt

SEQ ID NO: 419703 - DNA, 75 bp, synthetic construct
  source 1..75: mol_type = other DNA
tgttttggatgatgttatcagtctggctgacgttattgagagtcggttgaatggaggaagctcatttcttgatgt

SEQ ID NO: 419704 - DNA, 75 bp, synthetic construct
  source 1..75: mol_type = other DNA
ttaaagagcaccgcgatctgctgaaccagttgctggaaaaaccaggaatgccggccagcctggcaacagccgtga

SEQ ID NO: 419705 - DNA, 75 bp, synthetic construct
  source 1..75: mol_type = other DNA
gatgcaagttggatatacttttcttgtttaaccctagccctgagcacctttgcgatgagctgctatcgcctgagt

SEQ ID NO: 419706 - DNA, 75 bp, synthetic construct
  source 1..75: mol_type = other DNA
agctggacgacgcgacgcgtgagcgtattaagtctgccgcgacacgtatcgatcgcacgccacactggttaatta

SEQ ID NO: 419707 - DNA, 75 bp, synthetic construct
  source 1..75: mol_type = other DNA
agttccagtgcctgcacggcatgggagagccactctatgagcaggtcaccggaaaagtcgccgacggtaaactta

SEQ ID NO: 419708 - DNA, 75 bp, synthetic construct
  source 1..75: mol_type = other DNA
cgattcttcagcactgaccgaacaagtcgtaatagatgtgctggcctcggcgttcgacagtgcaggccagcgttg

SEQ ID NO: 419709 - DNA, 75 bp, synthetic construct
  source 1..75: mol_type = other DNA
acgcgattggtaaagcctctaacggacgcggtatctacgaaggcccggggatctcaattaagctctccgccctac

SEQ ID NO: 419710 - DNA, 75 bp, synthetic construct
  source 1..75: mol_type = other DNA
gggaaagttgccgacggcaaacttaaccgtccgtgtcgtatttatgccccggttggcacacatgaaacgctgctg

SEQ ID NO: 419711 - DNA, 75 bp, synthetic construct
  source 1..75: mol_type = other DNA
tttgtcgccccgacgctgatcgaactggaaaacttcaccgaattgcaaaaagagatctttggtccggtgctgcat

SEQ ID NO: 419712 - DNA, 75 bp, synthetic construct
  source 1..75: mol_type = other DNA
atgccatttacattttatttgtcgtccgagaatcaattgtcaatacaagatgttgaagttttgcaaaacgcagcc

SEQ ID NO: 419713 - DNA, 75 bp, synthetic construct
  source 1..75: mol_type = other DNA
ctcctgttttttatacagttgacgtggaacataccgaaaacactctgagacttaccagtgaagattcggtagccg

SEQ ID NO: 419714 - DNA, 75 bp, synthetic construct
  source 1..75: mol_type = other DNA
cctggaaagaccggttgcgaatggtcgtctggatattgatacgccactgacactgatggctgaaaatgccctggg

SEQ ID NO: 419715 - DNA, 75 bp, synthetic construct
  source 1..75: mol_type = other DNA
ctgacctctttcgccgccatcctgactggatactgtcaatgccggggtacacacaaccaaccgggagacatcagt

SEQ ID NO: 419716 - DNA, 75 bp, synthetic construct
  source 1..75: mol_type = other DNA
gatccttcgatacaggttcagggagtcgtcagccctgatcagtctcaggcactttttatgatcagccagcttgca

SEQ ID NO: 419717 - DNA, 75 bp, synthetic construct
  source 1..75: mol_type = other DNA
ggctggagctggatccggtggccgcagatgcgaaggaatctgacggttatcgccggtatgccttgctctataaag

SEQ ID NO: 419718 - DNA, 75 bp, synthetic construct
  source 1..75: mol_type = other DNA
aaggacgtaacgatgaccgcgcggctctgggcgactggtataccgatgaacagaaatacccgaacgggctgatgc

SEQ ID NO: 419719 - DNA, 75 bp, synthetic construct
  source 1..75: mol_type = other DNA
ttgtcaaatctataaagaatctagatttaagcaatttgcaggtaagaataaacataatgcgaaaggcttaatgca

SEQ ID NO: 419720 - DNA, 75 bp, synthetic construct
  source 1..75: mol_type = other DNA
ctggcgcagcgtctgccccagcacgaggacaacattatgacactggctgaacgcattgagcagaaaggtattgcc

SEQ ID NO: 419721 - DNA, 75 bp, synthetic construct
  source 1..75: mol_type = other DNA
gggagccaataacagcatcaatgattgtaaagtctgaagattgtatttttgacgcctcaaagggaaacttcatta

SEQ ID NO: 419722 - DNA, 75 bp, synthetic construct
  source 1..75: mol_type = other DNA
cttatagtgacccaaaagcgtgggaatcatatttcaaaaatattgtttggctacattataagcctgctaactgtt

SEQ ID NO: 419723 - DNA, 75 bp, synthetic construct
  source 1..75: mol_type = other DNA
ccgacgtagagttgtttacgcagcaagcgcggagtatgtcatcagggtcaagaattgaaattgagagatgcctga

SEQ ID NO: 419724 - DNA, 75 bp, synthetic construct
  source 1..75: mol_type = other DNA
atgccacactttgcgtcttattcctccgacgtaaagttgtttacgcagcaagcgcggagtatgtcatcagggtca

SEQ ID NO: 419725 - DNA, 75 bp, synthetic construct
  source 1..75: mol_type = other DNA
tttgttgctccgacgctgatcgaactggatgactttgccgaattgcaaaaagaggtctttggtccggtgctgcat

SEQ ID NO: 419726 - DNA, 75 bp, synthetic construct
  source 1..75: mol_type = other DNA
gcattatttattgtgatacgttactgagccatccgcaaaagcacttacctaaacgcaaactaaccgcaggtcagt

SEQ ID NO: 419727 - DNA, 75 bp, synthetic construct
  source 1..75: mol_type = other DNA
tatccaaggctttatctctcattgagcagtcccgattccgcatgggcacttctcggtttgttgaggcctttattg

SEQ ID NO: 419728 - DNA, 75 bp, synthetic construct
  source 1..75: mol_type = other DNA
tgaattactcaaccgtgtcgtggcggatgttgatacgctcgaccatctttatctgcgcgttatttcgccgctggt

SEQ ID NO: 419729 - DNA, 75 bp, synthetic construct
  source 1..75: mol_type = other DNA
ttttatcacagcaacctgcggcggaaagagttgttgttgagaataactatcttagcgtgtctgaaaagactgagc

SEQ ID NO: 419730 - DNA, 75 bp, synthetic construct
  source 1..75: mol_type = other DNA
ccgcagaaagctacaccgaaacaaagcagggcttggagatcattgcggcttcggtaacgcctcttatagggcaag

SEQ ID NO: 419731 - DNA, 75 bp, synthetic construct
  source 1..75: mol_type = other DNA
caaaagtggataccatcttttcaactcgactccttatgtgaaactctggcacatcgtctgaatgggaaagtgatc

SEQ ID NO: 419732 - DNA, 75 bp, synthetic construct
  source 1..75: mol_type = other DNA
ccgaaaattagaagaagggattaaacaaatacaaacaatagcagcatcagtaaataaactttatactaacagcgt

SEQ ID NO: 419733 - DNA, 75 bp, synthetic construct
  source 1..75: mol_type = other DNA
actattataatcatgcccaggaaaaccgaaaattagaagaagggattaaacaaatacaaacaatagcagcatcag

SEQ ID NO: 419734 - DNA, 75 bp, synthetic construct
  source 1..75: mol_type = other DNA
ggcatggcaatgttgtcgctgcgctggaacatattgatgattgcgtcatatattgcgatgatcctgaactcagct

SEQ ID NO: 419735 - DNA, 75 bp, synthetic construct
  source 1..75: mol_type = other DNA
ggatgcggaaaatcaacgctgttacaactgctaacccgcgcatgggacccgcaacggggtgagattttgcttaac

SEQ ID NO: 419736 - DNA, 75 bp, synthetic construct
  source 1..75: mol_type = other DNA
ctgctatttctggcattccgacaaaaaaaggaccaggtaatttaacgatgtttagtaccccatcaggacaatggg

SEQ ID NO: 419737 - DNA, 75 bp, synthetic construct
  source 1..75: mol_type = other DNA
aggcgatttctgctatttctggcattccgacaaaaaaactatcagataacggggcaaaggtgtttaccaccccat

SEQ ID NO: 419738 - DNA, 75 bp, synthetic construct
  source 1..75: mol_type = other DNA
gaaaaggcgcagcagaaatatgatgcattgcttgaaaaagatattagcagcgataaagaagttattgatgcctgc

SEQ ID NO: 419739 - DNA, 75 bp, synthetic construct
  source 1..75: mol_type = other DNA
ctcatcggaagaggggatgacgacacagcagaaaaaagaatggctgcattggtacagaagcaaattgaaagcctc

SEQ ID NO: 419740 - DNA, 75 bp, synthetic construct
  source 1..75: mol_type = other DNA
tgcctggctggaagagtatcccgatcaacttggcattgcgttaaccgactgcatcactatggatgctttcctgcg

SEQ ID NO: 419741 - DNA, 75 bp, synthetic construct
  source 1..75: mol_type = other DNA
ctttaccagaaaggctgggcaaagcgtgaaatggtgctatttatgggcttcgctaagtctggtaaatcgacggcg

SEQ ID NO: 419742 - DNA, 75 bp, synthetic construct
  source 1..75: mol_type = other DNA
gccagcctctcccgttcgctgaatcgcattatcggtaagagcggtgagccactgatccgcaaaggtgtggatatg

SEQ ID NO: 419743 - DNA, 75 bp, synthetic construct
  source 1..75: mol_type = other DNA
tgccggagctgatcgagcagattaacgcttccggttatggtctgacgcttggcgtccatacgcgcattgatgaaa

SEQ ID NO: 419744 - DNA, 75 bp, synthetic construct
  source 1..75: mol_type = other DNA
tttgtcgccccgacgctgatcgaactggatgactttgccgaattgcaaaaagaggtctttggtccggtgctgcat

SEQ ID NO: 419745 - DNA, 75 bp, synthetic construct
  source 1..75: mol_type = other DNA
atgcacagaatcagcagcaggtgaaaaatgtcatgattaactatttcatggtcaccaaaggggtggatcgtcaga

SEQ ID NO: 419746 - DNA, 75 bp, synthetic construct
  source 1..75: mol_type = other DNA
gtgcagcaggcgcagcaacgggagagctggcagccagagcgatcggaatgctgtatccgggagtgaagctgtctg

SEQ ID NO: 419747 - DNA, 75 bp, synthetic construct
  source 1..75: mol_type = other DNA
catggtcaccaaaggggtggatcgtcagaccgcagaaagctacaccgaaacaaagcagggcttggagatcattgc

SEQ ID NO: 419748 - DNA, 75 bp, synthetic construct
  source 1..75: mol_type = other DNA
ttaccggaagattttgtgtttgacaaacatgattatgaatggttgcttcgtaataaagtaacactgattcctgtc

SEQ ID NO: 419749 - DNA, 75 bp, synthetic construct
  source 1..75: mol_type = other DNA
ttttctgcagtgtcggggagttatttgtttgacaaaaagaccagataattatcttatgtggtcgcattatgcgca

SEQ ID NO: 419750 - DNA, 75 bp, synthetic construct
  source 1..75: mol_type = other DNA
atctgtgggacagcgcccgggcgcttaatcagaatgcgctggggcgggcgttgctgcgggaaaccgggttaccgg

SEQ ID NO: 419751 - DNA, 75 bp, synthetic construct
  source 1..75: mol_type = other DNA
cttccggttgcagacggactgaaaatcagtcagggatacgtgaccacgcccggaaaaacggtgagtgaacagggc

SEQ ID NO: 419752 - DNA, 75 bp, synthetic construct
  source 1..75: mol_type = other DNA
tggctgaaggtgaaaagctgatgctgctcggcagtcacggaaaactgcgtgcaggtgacagtgtcacggttgaac

SEQ ID NO: 419753 - DNA, 75 bp, synthetic construct
  source 1..75: mol_type = other DNA
gatgagctgattgccggacgtcttcccaatggtgtcagtctggagagaatggaaggcggcattaatgtgcaccgc

SEQ ID NO: 419754 - DNA, 75 bp, synthetic construct
  source 1..75: mol_type = other DNA
ataccgacgcagaactgctcagtctgcagacgtcggaagagcgggcacgccaggaggcagaaaaagccgtcaggg

SEQ ID NO: 419755 - DNA, 75 bp, synthetic construct
  source 1..75: mol_type = other DNA
tgaagcagcatgtgcaagtgtataccgatgatatcgggaaatggcaggcatccgtggcggccagtaaaagcaggg

SEQ ID NO: 419756 - DNA, 75 bp, synthetic construct
  source 1..75: mol_type = other DNA
gatgtatgggatctactaatttgtctcaaggaggcgcgattagaagctattttgagcaataatagcgatccgaca

SEQ ID NO: 419757 - DNA, 75 bp, synthetic construct
  source 1..75: mol_type = other DNA
aagaaaaatcagttcactgccgccaatattaatgatggaataataaatgacggagcaataacaagctgtaagggg

SEQ ID NO: 419758 - DNA, 75 bp, synthetic construct
  source 1..75: mol_type = other DNA
ttgttccggccggctttacgctcatgtggatgacggtgtttggtaacagcgcaatctatctcattatgaaccagg

SEQ ID NO: 419759 - DNA, 75 bp, synthetic construct
  source 1..75: mol_type = other DNA
cagatactggagcggtatgatgcagaacgccggacgtctgagcgttacaccattgaccgggtgacggcccgcagt

SEQ ID NO: 419760 - DNA, 75 bp, synthetic construct
  source 1..75: mol_type = other DNA
acggtgaatatttcgaccagatgaagtcaggcgagaaaatggaagagtatcgcctgtgtaatgactactggaata

SEQ ID NO: 419761 - DNA, 75 bp, synthetic construct
  source 1..75: mol_type = other DNA
ggcgtatgaaccggcaaccaaaggcctgtggccagaagagcagttgtggtcttcagaaaagtatctcgattttac

SEQ ID NO: 419762 - DNA, 75 bp, synthetic construct
  source 1..75: mol_type = other DNA
atcacacatccgcactttggcgataaaccggtaaaggtgttcgctcttagggtaaatatcagcactgaatgtcaa

SEQ ID NO: 419763 - DNA, 75 bp, synthetic construct
  source 1..75: mol_type = other DNA
aaagtgaatacttcgatgccatgattcgcggagagaaaacggaagagtatcgccttgttaatgactactggaaaa

SEQ ID NO: 419764 - DNA, 75 bp, synthetic construct
  source 1..75: mol_type = other DNA
gtgataacgtggcaagtattgcaacaaaagacagcatttgttcggggcacggaggattactgccatgctaatgag

SEQ ID NO: 419765 - DNA, 75 bp, synthetic construct
  source 1..75: mol_type = other DNA
cagcgcagttgccgctttggttcctgattctgttcttgatgaattaaacaaaagcggcacagtaacaaaggactt

SEQ ID NO: 419766 - DNA, 75 bp, synthetic construct
  source 1..75: mol_type = other DNA
ccagcctgcttagcgtagccgggcaactctgccagaaacaggcaactcgctttgtggcggtaagtaaacggcgca

SEQ ID NO: 419767 - DNA, 75 bp, synthetic construct
  source 1..75: mol_type = other DNA
cgcctgtgtaatgactactggaataagagaatcatgttccgggaatatgaccgcctgattatcacaaagggatat

SEQ ID NO: 419768 - DNA, 75 bp, synthetic construct
  source 1..75: mol_type = other DNA
gaattgatgttccgtatgacggatatgaaatcaagacaatcacacatccgcacttcggtgataaaccggtaaagg

SEQ ID NO: 419769 - DNA, 75 bp, synthetic construct
  source 1..75: mol_type = other DNA
atcacacatccgcactttggcgataaaccggtaagggtgttcgctcttaaggtaaatatcagcactgaatgtcaa

SEQ ID NO: 419770 - DNA, 75 bp, synthetic construct
  source 1..75: mol_type = other DNA
atcacacatccgcactttggcgataaaccggtaatggtgttcgctcttagggtaaataacagcactgaatgtcaa

SEQ ID NO: 419771 - DNA, 75 bp, synthetic construct
  source 1..75: mol_type = other DNA
atcacacatccgcactttggcgataaaccggtaatggtgttcgctcttaaggtaaatagcagcactgaatgtcaa

SEQ ID NO: 419772 - DNA, 75 bp, synthetic construct
  source 1..75: mol_type = other DNA
gtggctaacctgaaacttgccgtcaaaggtgaatacttcgatgctatgattcgcggggagaaaacagaagagtat

SEQ ID NO: 419773 - DNA, 75 bp, synthetic construct
  source 1..75: mol_type = other DNA
gaaaacccaaacatttgccgggcaatttagcaaagtattcaatgttgaagcccccgactggaagttgccgtatga

SEQ ID NO: 419774 - DNA, 75 bp, synthetic construct
  source 1..75: mol_type = other DNA
ggcggcattgctggtattagccggttgattctcgactggtcgccactggggctgttctacagcgccttttccggt

SEQ ID NO: 419775 - DNA, 75 bp, synthetic construct
  source 1..75: mol_type = other DNA
atgagtgaaaatgatacaatcccgaagaagtctacaagccagattaacaaagcggtattttttacatctgctttg

SEQ ID NO: 419776 - DNA, 75 bp, synthetic construct
  source 1..75: mol_type = other DNA
atgaacccgcaaccaaaggacagtggccggaagagcagctgtggtcgacggagaaatacctcgatttcatgccga

SEQ ID NO: 419777 - DNA, 75 bp, synthetic construct
  source 1..75: mol_type = other DNA
tgttctggatggaagatccaacgcctgccgagaatcaggaatgtttccgtttgattcgccagcataccgtgacgc

SEQ ID NO: 419778 - DNA, 75 bp, synthetic construct
  source 1..75: mol_type = other DNA
catgggttattccgaacaaatgcttgaggtcttcccgcatagctggcgcttcgacgcgggttatatgcacccagg

SEQ ID NO: 419779 - DNA, 75 bp, synthetic construct
  source 1..75: mol_type = other DNA
gggcggataggtgctgttttttcgtttctaactatatttgcatatattgtaacgttctttcccctttctaagata

SEQ ID NO: 419780 - DNA, 75 bp, synthetic construct
  source 1..75: mol_type = other DNA
atcttgcacttatttgctctcttttcctgtttgataaaaacaacaatggtgttaaaaaaaagaaaaaaattatat

SEQ ID NO: 419781 - DNA, 75 bp, synthetic construct
  source 1..75: mol_type = other DNA
aatttcggtgtccaggaatacatgggttattccgaacaaatgctcgaagtcttcccgcacaactggactttcgat

SEQ ID NO: 419782 - DNA, 75 bp, synthetic construct
  source 1..75: mol_type = other DNA
atgattgagaatcatctctactctcaggtgactgttgtgaaatacaaattactgccatgcttactcgcgatatta

SEQ ID NO: 419783 - DNA, 75 bp, synthetic construct
  source 1..75: mol_type = other DNA
tggcgacgtggccccgtcacgatgtcagccatttctgccattgatatggcgttgtgggatatcaaagctaaagcg

SEQ ID NO: 419784 - DNA, 75 bp, synthetic construct
  source 1..75: mol_type = other DNA
atgggttattccgaacaaatgctcgaagtcttcccgcacaactggactttcgataacggctatatgcatccggga

SEQ ID NO: 419785 - DNA, 75 bp, synthetic construct
  source 1..75: mol_type = other DNA
gccgattttgcatcgctttatcaggtgcgtaccggttcgcatggcccttctgatttatcgcccatttgccatgcg

SEQ ID NO: 419786 - DNA, 75 bp, synthetic construct
  source 1..75: mol_type = other DNA
atcaccatacatttattaacagactgatgcccgcttatcggggactcattaataaatccgcggctgatttactta

SEQ ID NO: 419787 - DNA, 75 bp, synthetic construct
  source 1..75: mol_type = other DNA
gggtgagttgggaaaccgatgataatggtttcgtgattaaagccagcagcaaacagatgcagatggaatatcgct

SEQ ID NO: 419788 - DNA, 75 bp, synthetic construct
  source 1..75: mol_type = other DNA
ggaatccctggtatgaaaaccacctacggcatgtcgaaaggtaaaggtctggcttatgaacccgcaaccaaagga

SEQ ID NO: 419789 - DNA, 75 bp, synthetic construct
  source 1..75: mol_type = other DNA
aaaattatgatgtaatgggctggaatcaggaactgaaccgccccgggtttcctggagagtgttttatctgtgaac

SEQ ID NO: 419790 - DNA, 75 bp, synthetic construct
  source 1..75: mol_type = other DNA
cgctggataatgatgagcagcagagtgaacaacatcgatattatcgcgctgaagtctatctcaaagagggcggcc

SEQ ID NO: 419791 - DNA, 75 bp, synthetic construct
  source 1..75: mol_type = other DNA
ccctggcagagaaggttacgcaatatcgcgtatttgccgaagcgctctcttgtgaaacgttttatggacgacatt

SEQ ID NO: 419792 - DNA, 75 bp, synthetic construct
  source 1..75: mol_type = other DNA
gtagcctttcaaataggattgatgtgaagttcgataacgaatcactactacgcgcggcggggtatcataaaaatg

SEQ ID NO: 419793 - DNA, 75 bp, synthetic construct
  source 1..75: mol_type = other DNA
tctactgagtgtctcgttcctgggactctcacgctacggtgatatcaaactgggtccggaccatgcgcagcctga

SEQ ID NO: 419794 - DNA, 75 bp, synthetic construct
  source 1..75: mol_type = other DNA
ccttggcagagaaggttacgcaatatcgcgtatctgccgaagcgatctcttgtgaaacgttttatggtcgacgtc

SEQ ID NO: 419795 - DNA, 75 bp, synthetic construct
  source 1..75: mol_type = other DNA
atgactacttttaccgacaaagaaatgattaaagaaatcaaagagcgtataggcagcctggacgtccgagacaat

SEQ ID NO: 419796 - DNA, 75 bp, synthetic construct
  source 1..75: mol_type = other DNA
gatggtgatgaatttttcgaaacacagagccgcaatgtaaccgactggatgccgctaccggaaccgccgcagggg

SEQ ID NO: 419797 - DNA, 75 bp, synthetic construct
  source 1..75: mol_type = other DNA
ctggtgagtaaaacgttcaacctttacgcgtatgagcccaagtcgagcaactggctggggggctggacattactg

SEQ ID NO: 419798 - DNA, 75 bp, synthetic construct
  source 1..75: mol_type = other DNA
cgcgcgagtatcccggggcaggacaattcgtgagtttgtcactggagtgctgtttgttccggctggttttacact

SEQ ID NO: 419799 - DNA, 75 bp, synthetic construct
  source 1..75: mol_type = other DNA
tcgcgtatctgccgaagcgatctcttgtgaaacgttttatggacgacgttatccagcccgccatgacgctggttc

SEQ ID NO: 419800 - DNA, 75 bp, synthetic construct
  source 1..75: mol_type = other DNA
gcctgtcagtcagcgcgccggttttttcccggaagaagccacatggggcgggctggttccgtcactggcgcggga

SEQ ID NO: 419801 - DNA, 75 bp, synthetic construct
  source 1..75: mol_type = other DNA
aataaagaaaggcaatattccggaaggctacattggctaccgccagctggcggcgaaatgtggcctgactgaagc

SEQ ID NO: 419802 - DNA, 75 bp, synthetic construct
  source 1..75: mol_type = other DNA
tggaaagggtggcaggattacaaaaatattctccgtccggcagaagataacttcatgaaaaaggtcgatgacctt

SEQ ID NO: 419803 - DNA, 75 bp, synthetic construct
  source 1..75: mol_type = other DNA
aaggagctggcgggtaatcttgctcagtccggtgttgacccgtccagtggtcgctttaacgcggtaatgaatgcg

SEQ ID NO: 419804 - DNA, 75 bp, synthetic construct
  source 1..75: mol_type = other DNA
caggagaacaacaaaacagacagtaatcagagcagcagaaaaaagaagaacagtagcagtagcagtagcaggaac

SEQ ID NO: 419805 - DNA, 75 bp, synthetic construct
  source 1..75: mol_type = other DNA
gggacccgccgcaacgacgtgaagcgcggtttgcgaaacggcgttgctccttacatcccggcgtcttttgccggg

SEQ ID NO: 419806 - DNA, 75 bp, synthetic construct
  source 1..75: mol_type = other DNA
tggtatggcccgaaggtggatcacgaaagcactggcgcaccatccgggacgggaaaatccatgctattgatttag

SEQ ID NO: 419807 - DNA, 75 bp, synthetic construct
  source 1..75: mol_type = other DNA
gtaattatcttccctcaaaatgaatacgtcggcgtttacagtggccccacaaacgcttctgaggaaatagcctca

SEQ ID NO: 419808 - DNA, 75 bp, synthetic construct
  source 1..75: mol_type = other DNA
tattgttctgacacccggtattgccgtttccggaaagctggtactcctcgaacctaaagatgattctgcgcagca

SEQ ID NO: 419809 - DNA, 75 bp, synthetic construct
  source 1..75: mol_type = other DNA
tgcttcgctaatagccaccgtcacaccacatacaggaaatataccagcgggtatctatactgcgagtttacctat

SEQ ID NO: 419810 - DNA, 75 bp, synthetic construct
  source 1..75: mol_type = other DNA
cgtgagggagacttaaagcaaggtgatattgtcacagtagaaaaccagcgtttcaaagttcaatacgttaagcgc

SEQ ID NO: 419811 - DNA, 75 bp, synthetic construct
  source 1..75: mol_type = other DNA
aacagtgagcagcagtacgaaaatatcgcaggcacaacaaatcttgggtatcagaaacagtttggtgaagcgcga

SEQ ID NO: 419812 - DNA, 75 bp, synthetic construct
  source 1..75: mol_type = other DNA
tagcggagctggcggcgctaaaacagatggcaccggcgctaacgccattcagcatcaggctcagaactggagact

SEQ ID NO: 419813 - DNA, 75 bp, synthetic construct
  source 1..75: mol_type = other DNA
gtgtttaaagatggctccaacggacataaatcgctgtttatgggttatgcgaccccgaaagcattttatgaagcc

SEQ ID NO: 419814 - DNA, 75 bp, synthetic construct
  source 1..75: mol_type = other DNA
atggccaagcaacgaaaagtgttgataccgatgtggtgtgtggtgggggtctgtgtggccgcaaccggtatggca

SEQ ID NO: 419815 - DNA, 75 bp, synthetic construct
  source 1..75: mol_type = other DNA
attttgaagtgcgcagcccgctgacgtcggttcaggcgggggacagtgagctgctgacagtgggggaaatcacat

SEQ ID NO: 419816 - DNA, 75 bp, synthetic construct
  source 1..75: mol_type = other DNA
agtgatagggtggtcccatacgttgaaactggatataaaggcatagtctccttaagtgagattactgaagagtta

SEQ ID NO: 419817 - DNA, 75 bp, synthetic construct
  source 1..75: mol_type = other DNA
acaaaacacccacgcggcatggacgaaatacaaccttgctgccagaacccgctggttacaggacgaacctacggg

SEQ ID NO: 419818 - DNA, 75 bp, synthetic construct
  source 1..75: mol_type = other DNA
gaaagcgatgctcgacgacgcggatgtcttcctgttgccatcgataacgggtgcggatggcgatatggaaggtat

SEQ ID NO: 419819 - DNA, 75 bp, synthetic construct
  source 1..75: mol_type = other DNA
ttaatatcggaaaaacaatatccaaaagactttcaaaaccaacattaacttatagcgaatggtactcacaagagc

SEQ ID NO: 419820 - DNA, 75 bp, synthetic construct
  source 1..75: mol_type = other DNA
gcgctgtggttaaagttccgctgttcgtgcagatcggcgaagtcatcaaagtggatacccgctctggtgaatacg

SEQ ID NO: 419821 - DNA, 75 bp, synthetic construct
  source 1..75: mol_type = other DNA
atggcaccggacacaacaacgggcagggacccgccgcaacgacgtgaagcgcggtttgcgaaacggcgttgctta

SEQ ID NO: 419822 - DNA, 75 bp, synthetic construct
  source 1..75: mol_type = other DNA
atacgttttcgctcgttttttatcgccaccgggcttggtcagttaccggcaatattgtttattcctgggcgggca

SEQ ID NO: 419823 - DNA, 75 bp, synthetic construct
  source 1..75: mol_type = other DNA
gccagggcggagacagctccgctggctccgttcacgacagcccgccccgcctgggggacgcccgggaaagccata

SEQ ID NO: 419824 - DNA, 75 bp, synthetic construct
  source 1..75: mol_type = other DNA
cccgtcagggcggagacagcttcgctggctccgttcacgacagcccgccccgccagggggacgcccggaaaaggc

SEQ ID NO: 419825 - DNA, 75 bp, synthetic construct
  source 1..75: mol_type = other DNA
tacaacgacggggagttctggcacttcatgaacaacgaaactttcgagcagctgtctgctgatgcaaaagcaatt

SEQ ID NO: 419826 - DNA, 75 bp, synthetic construct
  source 1..75: mol_type = other DNA
atgtctcagcaatttaaagatatttttactggtggtctggtaagtctgttctatcacgccgataccactaacacc

SEQ ID NO: 419827 - DNA, 75 bp, synthetic construct
  source 1..75: mol_type = other DNA
accgggatgcacagacgctggagaaaagagtacgtctacagggaaaatgccagttagcagaattaccttctgccg

SEQ ID NO: 419828 - DNA, 75 bp, synthetic construct
  source 1..75: mol_type = other DNA
ggatctggaaaataataccgtggtcgctctggtactggacgccaattattaccgtgatgccgagacgctggagaa

SEQ ID NO: 419829 - DNA, 75 bp, synthetic construct
  source 1..75: mol_type = other DNA
ctggtattagggaggctgttcttgaatcagatatgccgaagacaatgcgcttttcgatgcctgatggtagtgaat

SEQ ID NO: 419830 - DNA, 75 bp, synthetic construct
  source 1..75: mol_type = other DNA
attcagtctgtctcagatcggcataatgcaattttaagtgattgcgagcgaccagaagacgaacagaaagccagt

SEQ ID NO: 419831 - DNA, 75 bp, synthetic construct
  source 1..75: mol_type = other DNA
ttacacagcggttactttactgaataatcaacgggttggtaatgtaaaaagagctgtgaatatgacagtcacgct

SEQ ID NO: 419832 - DNA, 75 bp, synthetic construct
  source 1..75: mol_type = other DNA
aatcaacaggttggtaatgtcagacagacttgtgaatatgacagccacgcgaatccagtggactgccaattaatc

SEQ ID NO: 419833 - DNA, 75 bp, synthetic construct
  source 1..75: mol_type = other DNA
ggaatccatctatggtgaagaaagctggaacgctaatccctgggtgtgggtaatcgagtttgagcgtattcaggg

SEQ ID NO: 419834 - DNA, 75 bp, synthetic construct
  source 1..75: mol_type = other DNA
tggtgattacggtttgtggtcgatacccgatgatgccgactggaaacctcacactgtgaatgaaaagtatgaagg

SEQ ID NO: 419835 - DNA, 75 bp, synthetic construct
  source 1..75: mol_type = other DNA
tgaagtgaagacaatcacacatccgcacttcggcgataaaccggtaaaggtttacgcgataaaggtaaatatcgg

SEQ ID NO: 419836 - DNA, 75 bp, synthetic construct
  source 1..75: mol_type = other DNA
tatttccctgctacagaagatattcttcaactgttgaaagataagtctgataacaaactgtataagctgactaag

SEQ ID NO: 419837 - DNA, 75 bp, synthetic construct
  source 1..75: mol_type = other DNA
gtggtcatcaccactcgtttatcaaccgtttgatgccagcatatcgcggaatgatcaataagttgaatgcggatc

SEQ ID NO: 419838 - DNA, 75 bp, synthetic construct
  source 1..75: mol_type = other DNA
ggaaacactgctggaaattatgcaaaaagagcagtgcgacctccttgtctgtggtcatcaccactcatttatcaa

SEQ ID NO: 419839 - DNA, 75 bp, synthetic construct
  source 1..75: mol_type = other DNA
tgcaataggtgtcagacgggctacagggaaaattgaaattttggatggttcccggcgtcgagcttctgccatctt

SEQ ID NO: 419840 - DNA, 75 bp, synthetic construct
  source 1..75: mol_type = other DNA
gaagcgatagagtccgttccgcgttctgagcgtggtgagctgttccggaatgcatttatttctggaatggcgtta

SEQ ID NO: 419841 - DNA, 75 bp, synthetic construct
  source 1..75: mol_type = other DNA
gctggaaacgctgggctggaaagtggcgattgcctccggcggctttactttctttgctgaatacctgcgcgacaa

SEQ ID NO: 419842 - DNA, 75 bp, synthetic construct
  source 1..75: mol_type = other DNA
tgccattattggtgtcagtaaccttgataagcggttgcacagtacttccgggcagtaatatgtctacgctgggta

SEQ ID NO: 419843 - DNA, 75 bp, synthetic construct
  source 1..75: mol_type = other DNA
agcaaactggatatttcggtcaactggcaaggggcggcaaaagcgtattccttcgatgaagtgattgttgaccgt

SEQ ID NO: 419844 - DNA, 75 bp, synthetic construct
  source 1..75: mol_type = other DNA
cacttgtggtttatcagcgtatccatagcaccatcatccgccagattgagcgaatcggcttaaagtttgatggcg

SEQ ID NO: 419845 - DNA, 75 bp, synthetic construct
  source 1..75: mol_type = other DNA
agagttacctcaatgttctatataacgattcggtccccatacctggaacggtaactctcaatctgataggttcct

SEQ ID NO: 419846 - DNA, 75 bp, synthetic construct
  source 1..75: mol_type = other DNA
gcagattgaagatttatctgctcgcagcaatgcgctgcaatcgatggtgacgcaatttaatctgggcgaaatgtt

SEQ ID NO: 419847 - DNA, 75 bp, synthetic construct
  source 1..75: mol_type = other DNA
ctgtctatcttcatccggatcagacggcagacaatctgtccctggacataattgcgtctgtaccgcggaatgaga

SEQ ID NO: 419848 - DNA, 75 bp, synthetic construct
  source 1..75: mol_type = other DNA
cgttcagacagcattgcagcacagcattcgagaaataggtctgcgtttgatgcgaatgaaaaatgatgggatgag

SEQ ID NO: 419849 - DNA, 75 bp, synthetic construct
  source 1..75: mol_type = other DNA
cgcaggtggacgttaatatcgccgccttccgctcgcaaaaagcctatatctccggtcaggtgaataaatccggtc

SEQ ID NO: 419850 - DNA, 75 bp, synthetic construct
  source 1..75: mol_type = other DNA
cggtggaaccgtctgatcaatcagttgctgccaactattagcggtgtccgttacatgacggatacagccagcgac

SEQ ID NO: 419851 - DNA, 75 bp, synthetic construct
  source 1..75: mol_type = other DNA
cgtaatgatgatctgaaagtatttgtgatgggtgaagttaaaaaacagagcaccctgaaaatggactttagcggc

SEQ ID NO: 419852 - DNA, 75 bp, synthetic construct
  source 1..75: mol_type = other DNA
gtttggagtgcagccaactttcgtttttctggttgccagcacaactattgaatgcggacgttatccggttgaaat

SEQ ID NO: 419853 - DNA, 75 bp, synthetic construct
  source 1..75: mol_type = other DNA
tcagctcgatgacattgctgatactccggcactgtatttgtggcgtaaaaatgcccccgtggacaccacaaagac

SEQ ID NO: 419854 - DNA, 75 bp, synthetic construct
  source 1..75: mol_type = other DNA
catcgcgattgcagtgatgaaactggcgaagtcgcagatcccgtaatcgtagaagacatagagccaggtatttat

SEQ ID NO: 419855 - DNA, 75 bp, synthetic construct
  source 1..75: mol_type = other DNA
gatatcatctcgacgtttaccagcacgtaaacaacgcccgctacctggagtttcttgaagaagcccgctgggatg

SEQ ID NO: 419856 - DNA, 75 bp, synthetic construct
  source 1..75: mol_type = other DNA
actatcgccgtccggcagtattgagcgacctgttaactatcaccagtcagttgcagcaattaaatggaaagagcg

SEQ ID NO: 419857 - DNA, 75 bp, synthetic construct
  source 1..75: mol_type = other DNA
tcgtggttgcgtccgtgaaagaagcaccaattgggatcgaggtcacccccgcgcacgtcactgaatatctgaaca

SEQ ID NO: 419858 - DNA, 75 bp, synthetic construct
  source 1..75: mol_type = other DNA
ggcggtatggacctcggcgagacggcggatattggttccaatatcctgacgcagttcggcctctctgctgaccag

SEQ ID NO: 419859 - DNA, 75 bp, synthetic construct
  source 1..75: mol_type = other DNA
gtaccgaccgcgtgatgaacagccgtctcgagttcaacaacgacaaccgtaaactgcgcattaccgaagctgttt

SEQ ID NO: 419860 - DNA, 75 bp, synthetic construct
  source 1..75: mol_type = other DNA
cattcattgaaaacaatctgccggcacgcgcacgcattccgttcaccagtgacatggatgacataacgctcgttc

SEQ ID NO: 419861 - DNA, 75 bp, synthetic construct
  source 1..75: mol_type = other DNA
atctgcggaccctggctgactgcctaaataccgatgaatggccagctattaagacgttatcactgccccgctggg

SEQ ID NO: 419862 - DNA, 75 bp, synthetic construct
  source 1..75: mol_type = other DNA
gttcaggaaaatgatctggaggaaatggaaggcgctgaacatccacacaaggagaaccctggcggcaatcagcat

SEQ ID NO: 419863 - DNA, 75 bp, synthetic construct
  source 1..75: mol_type = other DNA
cacggcttgcagttaaacagccgcgaattgcccgaccatctgccgctgtatctggagtacctggcgcagctgccg

SEQ ID NO: 419864 - DNA, 75 bp, synthetic construct
  source 1..75: mol_type = other DNA
gacgcgcttatcacctttgtctgtatcgatctcaaaacgcagaaagctttagctctggaaggggaattgcgcgaa

SEQ ID NO: 419865 - DNA, 75 bp, synthetic construct
  source 1..75: mol_type = other DNA
aatcccgtgaccgcggccaggcgatggtggacctgctggcgcagtacgagcagcacggcttgcagttaaacagcc

SEQ ID NO: 419866 - DNA, 75 bp, synthetic construct
  source 1..75: mol_type = other DNA
atgatcgaactcgtgattgtatcgcgtctccttgaatatccggatgctgccttatggcagcatcaacaagagatg

SEQ ID NO: 419867 - DNA, 75 bp, synthetic construct
  source 1..75: mol_type = other DNA
accatacccaggctatcagggcccaaagtaataactctgaagctgtcaacgatataattagaagacgtgatgaaa

SEQ ID NO: 419868 - DNA, 75 bp, synthetic construct
  source 1..75: mol_type = other DNA
gttgcgggcttgctggtaagaaaactttcacagcgtgcattcagcgatctgttgttctccccgccttctctgccc

SEQ ID NO: 419869 - DNA, 75 bp, synthetic construct
  source 1..75: mol_type = other DNA
agcagcgtttcggtatgcgttcctccagcctgctgaatgttattggttctaacactattgccatctacaccaccc

SEQ ID NO: 419870 - DNA, 75 bp, synthetic construct
  source 1..75: mol_type = other DNA
cttatggcagcatcaacaagagatgtttgaggcgattgctgcgtcggaaaatctgtcgaaagaggatgcccatgc

SEQ ID NO: 419871 - DNA, 75 bp, synthetic construct
  source 1..75: mol_type = other DNA
ggcgagagtggtttttaatggtctgaagaaaggcactacacgcctccctgaaactcaggcagctatcaatcagct

SEQ ID NO: 419872 - DNA, 75 bp, synthetic construct
  source 1..75: mol_type = other DNA
gagcgtaaaatagacagcagtcgggaagaggtgctctcgacagaaaacggtatcactatctttgcgtcatttagc

SEQ ID NO: 419873 - DNA, 75 bp, synthetic construct
  source 1..75: mol_type = other DNA
actatcgccgcccggcggtgttgagcgacctgctgaccattaccagtcagttgcagcaattaaacggtaaaagcg

SEQ ID NO: 419874 - DNA, 75 bp, synthetic construct
  source 1..75: mol_type = other DNA
gagcaagctcgttttgcaaaaatggtaggctccttcaacgttgagttttttcagcgagaacttgctaaaaaaccc

SEQ ID NO: 419875 - DNA, 75 bp, synthetic construct
  source 1..75: mol_type = other DNA
cactaacccggatacccacgggcgcggtttttatcccgcctgtggcgcgctgtgcgcaggtattgagaaaatctc

SEQ ID NO: 419876 - DNA, 75 bp, synthetic construct
  source 1..75: mol_type = other DNA
aaacccagcccgtggatcatccgtgcagcattaaacaaaatgcaggcgcactcggaagaaacggtgattgttggc

SEQ ID NO: 419877 - DNA, 75 bp, synthetic construct
  source 1..75: mol_type = other DNA
cacttcatcaggtacgtacaccccgacaccaggaactaaacgaatcagggtcacaattacgggcggcggtggcgg

SEQ ID NO: 419878 - DNA, 75 bp, synthetic construct
  source 1..75: mol_type = other DNA
tcaatctgtgcatttcttatttttttcatatctacaatctttactattagatatttaattttcatttcaaagttc

SEQ ID NO: 419879 - DNA, 75 bp, synthetic construct
  source 1..75: mol_type = other DNA
ccactgagcgtcagaccccttatagaagcccccatgaataaatcgctcatcattttcggcatcgtcaacataacc

SEQ ID NO: 419880 - DNA, 75 bp, synthetic construct
  source 1..75: mol_type = other DNA
cttgctatgttgattttttagagttggaatcacatgtgataaacgaggattatttgaaggagtctgttgagcttc

SEQ ID NO: 419881 - DNA, 75 bp, synthetic construct
  source 1..75: mol_type = other DNA
ccttaccgctcagaatgtaccggtgaaattgtgcaaaacctgtaccgacgggcgcgggattagcacacttcctct

SEQ ID NO: 419882 - DNA, 75 bp, synthetic construct
  source 1..75: mol_type = other DNA
gattgatggagttgaaattggcacactggtcgaactggcgcaatggacgctggttgccgataaagtgctcacgtt

SEQ ID NO: 419883 - DNA, 75 bp, synthetic construct
  source 1..75: mol_type = other DNA
ttacggattcagggcgaatccaatgaccctttacccgcattcagcggaaccgttgaatatgggcaaattcaggga

SEQ ID NO: 419884 - DNA, 75 bp, synthetic construct
  source 1..75: mol_type = other DNA
tcttgctgggaagcctgttcagcttaagcgcctgtgtacagcaaagcgaagtacgacagatgaaacaaagcgtca

SEQ ID NO: 419885 - DNA, 75 bp, synthetic construct
  source 1..75: mol_type = other DNA
acagcggatcttcttcgagcaactggcgattcatgccggatatcaactgagctggcagggtatcgaaaaagaagc

SEQ ID NO: 419886 - DNA, 75 bp, synthetic construct
  source 1..75: mol_type = other DNA
ttcgcggaaatataccgccaaatcaacgacgaaaacagcgtcagtaacgccgccgccagtggttccgaaatcttc

SEQ ID NO: 419887 - DNA, 75 bp, synthetic construct
  source 1..75: mol_type = other DNA
tggttatggccaacgagtggaaaagttatcatgccttactcaatggctgatggtggtaataaagggattgatatt

SEQ ID NO: 419888 - DNA, 75 bp, synthetic construct
  source 1..75: mol_type = other DNA
tcctgctgggaagcctattcagccttagcgcctgtgtgcagcaaagtgaagtgcgacagatgaaacacagcgtca

SEQ ID NO: 419889 - DNA, 75 bp, synthetic construct
  source 1..75: mol_type = other DNA
tgttgttgcaggcgatgcagcagtttaccggtatgaacatcatcatgtactacgcgccgcgtatcttcaaaatgg

SEQ ID NO: 419890 - DNA, 75 bp, synthetic construct
  source 1..75: mol_type = other DNA
ctcgcttgaaagcgcaatggctcaaggcgcggtaccggatggagatacaattctttggtggctaaaacaaagccc

SEQ ID NO: 419891 - DNA, 75 bp, synthetic construct
  source 1..75: mol_type = other DNA
cgtgttcttcgatccgcaaagcggtgaactgggtcaggagttttacagcgccgttaaccttgaaagcgctatgga

SEQ ID NO: 419892 - DNA, 75 bp, synthetic construct
  source 1..75: mol_type = other DNA
ttgccgatgggcgtctgaagatgcacgaaaacgccgcgtggctggatggtcaacgcctgccgccgcagggttacg

SEQ ID NO: 419893 - DNA, 75 bp, synthetic construct
  source 1..75: mol_type = other DNA
cagcctgaagttcaggaaaatgatccggaggaaatggaaggcactgcgcatcagcacaaggagaacactggcggc

SEQ ID NO: 419894 - DNA, 75 bp, synthetic construct
  source 1..75: mol_type = other DNA
atgaaatgggggccgacatcagctaactgttctccggcacggatcgtgtttatccgcactgcagaaggaaaagaa

SEQ ID NO: 419895 - DNA, 75 bp, synthetic construct
  source 1..75: mol_type = other DNA
tcaccggcatgcatataatctcaaatacatgaaggtctggggtaacggggccacctttgacaatgtgattctgcg

SEQ ID NO: 419896 - DNA, 75 bp, synthetic construct
  source 1..75: mol_type = other DNA
tattctggtggtcttcctgccgaatagcccgcgctggctggcggagaaagggcgtcatattgaggcggaagaagt

SEQ ID NO: 419897 - DNA, 75 bp, synthetic construct
  source 1..75: mol_type = other DNA
attccggaaaccaaaaatgtcacgctggaacatatcgaacgcaaactgatggcaggcgagaagttgagaaatatc

SEQ ID NO: 419898 - DNA, 75 bp, synthetic construct
  source 1..75: mol_type = other DNA
agcattggcgctgccggtacgttctggctctacactgcgctgaacattgcgtttgtgggcatcactttctggctc

SEQ ID NO: 419899 - DNA, 75 bp, synthetic construct
  source 1..75: mol_type = other DNA
gaaaacggcgatgaggaacatggtacatcggtgcatttcgtgaccgatgtactggatggcggcccggttatttta

SEQ ID NO: 419900 - DNA, 75 bp, synthetic construct
  source 1..75: mol_type = other DNA
gcagaactgcttcaacgtgctgtatggaatgaaaaatgttcatcccgcaatctcgtgcttcattctgataacgga

SEQ ID NO: 419901 - DNA, 75 bp, synthetic construct
  source 1..75: mol_type = other DNA
aggaaacaaatcccgagacaaattgatatcattaaacactaacaaaaccatatatgagcagttatgccacaacgt

SEQ ID NO: 419902 - DNA, 75 bp, synthetic construct
  source 1..75: mol_type = other DNA
gcacgggtgccggttccggtggtcagcatgcggtgggtactggcgtaatgggcgggatgatttcagctactattc

SEQ ID NO: 419903 - DNA, 75 bp, synthetic construct
  source 1..75: mol_type = other DNA
aatatatcagaaacagttgagatagttatcatttttttattatggctactaatgattctgtctttttatctttgc

SEQ ID NO: 419904 - DNA, 75 bp, synthetic construct
  source 1..75: mol_type = other DNA
atggatggtagccagaaattaccgcaacgtatgctggcaggtattcgcatacatctggggcgcgaaacggactgg

SEQ ID NO: 419905 - DNA, 75 bp, synthetic construct
  source 1..75: mol_type = other DNA
tgcagatattcatggacgggttgttcgtgtactggacggtgataccatcgaggtcatggactcacggaaggcggt

SEQ ID NO: 419906 - DNA, 75 bp, synthetic construct
  source 1..75: mol_type = other DNA
gaaatattacttcacccatgaaaaagacaacatcatgtcggtgtttgccaccgtgggttctggccctgggggtaa

SEQ ID NO: 419907 - DNA, 75 bp, synthetic construct
  source 1..75: mol_type = other DNA
ggggttatcggcgcgctgctggcaacctggatgcgcgggctggaaaacgacgtttacttccaggtgggcctgtta

SEQ ID NO: 419908 - DNA, 75 bp, synthetic construct
  source 1..75: mol_type = other DNA
acgtttaccgggcgcagcggaagcgactttgccgttgcaatcaagtggaggggcaggtgaacgctggtggtttct

SEQ ID NO: 419909 - DNA, 75 bp, synthetic construct
  source 1..75: mol_type = other DNA
ggtgctcaaaccgtttgtttatggtctggcgctggatgaaggcttgatccacccggcatcgctgttgcaagacgt

SEQ ID NO: 419910 - DNA, 75 bp, synthetic construct
  source 1..75: mol_type = other DNA
tcgaaggtagccagccaccaacattacttttaccggagcaggaaggaataagtgggattcgtttccccatctggc

SEQ ID NO: 419911 - DNA, 75 bp, synthetic construct
  source 1..75: mol_type = other DNA
tgatgatgccggaaatgccattgatgttcgcgatccgcttagcgataaaattcgtgaacttgttgcggtcagcag

SEQ ID NO: 419912 - DNA, 75 bp, synthetic construct
  source 1..75: mol_type = other DNA
tctgggtggcaacgggtcaatttttattaagaactgtacacagaaaatttaatatatctgaaacagttgagatgg

SEQ ID NO: 419913 - DNA, 75 bp, synthetic construct
  source 1..75: mol_type = other DNA
cccgcgatcgcggtcaggcgatggtggacctgctggcgcagtatgagcagcacggtttgcagttaaacagccggg

SEQ ID NO: 419914 - DNA, 75 bp, synthetic construct
  source 1..75: mol_type = other DNA
gtaaacagttttccattaaacgactcaatgaaatggagatttaccctggtgtgactttttcagaagagttagagg

SEQ ID NO: 419915 - DNA, 75 bp, synthetic construct
  source 1..75: mol_type = other DNA
tgttcggtgccgatggttctgacggtacccacggtgcagataccctgccaggtcctgagagatcccctcataatt

SEQ ID NO: 419916 - DNA, 75 bp, synthetic construct
  source 1..75: mol_type = other DNA
atgtcagacaaactcataacgctggcgaagatcctctgtgtaattgtcggcatttcattttcactcatgctggtt

SEQ ID NO: 419917 - DNA, 75 bp, synthetic construct
  source 1..75: mol_type = other DNA
ggtggcgtcgaactcggcgagacggcggatataggctccaatatcctcacacagttcaacctgacagccgatcaa

SEQ ID NO: 419918 - DNA, 75 bp, synthetic construct
  source 1..75: mol_type = other DNA
cttcagatttatcgcctgtttgtcatgcggcggcgctgcattttgacctctgggtgccaaactttggcgttcagg

SEQ ID NO: 419919 - DNA, 75 bp, synthetic construct
  source 1..75: mol_type = other DNA
gcgggcgctgaacagtgttgaagcgtcacaaccgcatcaggatcaaatggagaaatcagcaaaagcgttaaccca

SEQ ID NO: 419920 - DNA, 75 bp, synthetic construct
  source 1..75: mol_type = other DNA
gcgcgtccgaagcgtgaaagccagagtctgcttaatgggccacaggttgatagcagcaaagcgggtgtggtagcc

SEQ ID NO: 419921 - DNA, 75 bp, synthetic construct
  source 1..75: mol_type = other DNA
gaaggagtgaatgttaatcagtttatggttcgggccggggttgcctgggtatatgagcagtacaacacagatccc

SEQ ID NO: 419922 - DNA, 75 bp, synthetic construct
  source 1..75: mol_type = other DNA
ttatcttttcatggccggtattgtctgaagatattcatggacgggttgttcgtgtactggacggtgataccatcg

SEQ ID NO: 419923 - DNA, 75 bp, synthetic construct
  source 1..75: mol_type = other DNA
gcacgacagcagaaacgtggtctgtgggcagacagcgctcctgttccgccctgggtatggagctcacggaaataa

SEQ ID NO: 419924 - DNA, 75 bp, synthetic construct
  source 1..75: mol_type = other DNA
aggctgaacgcacggcaaaggttatggccaataaccttgatggcgacctgaaatcactcggcagtgcatgggaag

SEQ ID NO: 419925 - DNA, 75 bp, synthetic construct
  source 1..75: mol_type = other DNA
gaatggcgtaaagaccaaagtgaacctctatgcgctgatgcagcgtggcgacttgcgccagaacaaactgctgca

SEQ ID NO: 419926 - DNA, 75 bp, synthetic construct
  source 1..75: mol_type = other DNA
atgtcagacaaactcataacgccggcaaaggtcctgtgtgtgattgtcggtatttcattttcactaatgctggtt

SEQ ID NO: 419927 - DNA, 75 bp, synthetic construct
  source 1..75: mol_type = other DNA
cgtggaaaacaggaaccagttatggctatcgcgatgcatgggctattggcgttaacgctcgttacgtaattggga

SEQ ID NO: 419928 - DNA, 75 bp, synthetic construct
  source 1..75: mol_type = other DNA
cgcttaatgcccggaaaatcctgctgatgcatacgccaaccgtattaacggaaacagtagccgatacgctgatgg

SEQ ID NO: 419929 - DNA, 75 bp, synthetic construct
  source 1..75: mol_type = other DNA
cttcaatatgccgattctctataacgcgcgtcgccaccataaagaagcggaagaacgctttaacgcccgctattg

SEQ ID NO: 419930 - DNA, 75 bp, synthetic construct
  source 1..75: mol_type = other DNA
ggttcaaatgaaaacgttgacgccgcattactggaaaaaatgccaaaactgcgggccacttcaacgatctccgta

SEQ ID NO: 419931 - DNA, 75 bp, synthetic construct
  source 1..75: mol_type = other DNA
atcgctatcgctcaccgcaggccgacgttgcgcaagccctcgatacgctggaaagcaaattagtcgacttctcgg

SEQ ID NO: 419932 - DNA, 75 bp, synthetic construct
  source 1..75: mol_type = other DNA
tcaggctcacgaatggttccaggcgcatcaacaaatcagcccggatcttgccaacagccaacgtgccgcacttgc

SEQ ID NO: 419933 - DNA, 75 bp, synthetic construct
  source 1..75: mol_type = other DNA
actatctgccacgacaaagcgtttgtccgtgcgctacgtaaagcgttcgatcttccgcatattaaaaaagccagt

SEQ ID NO: 419934 - DNA, 75 bp, synthetic construct
  source 1..75: mol_type = other DNA
ctttcacggcgcgcattcagcgatctgttgttctccccgccttcactgcccgctgccgtcagttactcccgctaa

SEQ ID NO: 419935 - DNA, 75 bp, synthetic construct
  source 1..75: mol_type = other DNA
catggtttggcgcaacattaatgacctgtgttaaagaggtgccgttgcgccgccatctgctgatggcttctttgc

SEQ ID NO: 419936 - DNA, 75 bp, synthetic construct
  source 1..75: mol_type = other DNA
gtgcctggttgtttactatctcgctgctgttgtcgctggtatcgattgtggtgatcatgaagctgttttatcagt

SEQ ID NO: 419937 - DNA, 75 bp, synthetic construct
  source 1..75: mol_type = other DNA
gaaaccgtcgccgatacgctgatggcgctggtgttgtctaccgctcgtcgggttgtggaggtagcagaacgggta

SEQ ID NO: 419938 - DNA, 75 bp, synthetic construct
  source 1..75: mol_type = other DNA
caggacaaatctggcactgaataagacgggcaatatagccgataatgcgttgaatcattggctacatcgtatacg

SEQ ID NO: 419939 - DNA, 75 bp, synthetic construct
  source 1..75: mol_type = other DNA
ataaacgcatctggaacatcttctgggtgctggcgctttggggcgtggtgcagtggctggcgctaagtgcactaa

SEQ ID NO: 419940 - DNA, 75 bp, synthetic construct
  source 1..75: mol_type = other DNA
ccgcgtgcaattaagttttggtattgggactcgcctgacctgcgatatcccccaggtaaaacccctgaatattgt

SEQ ID NO: 419941 - DNA, 75 bp, synthetic construct
  source 1..75: mol_type = other DNA
aaacgagtacgactggctgagctcagacgccgctgtggatgaggtcctgctcatcaacgaatacacctttaccga

SEQ ID NO: 419942 - DNA, 75 bp, synthetic construct
  source 1..75: mol_type = other DNA
gcgccccatctggctcaatatttacgaccacgcggtagtgccgtttgaaaacgatcagattaccctgaccgatgc

SEQ ID NO: 419943 - DNA, 75 bp, synthetic construct
  source 1..75: mol_type = other DNA
atgatgacctgctttacgcgctttattatcgtgctgtcgctgctgcgccaggcgctggggctgcaacaaacgccg

SEQ ID NO: 419944 - DNA, 75 bp, synthetic construct
  source 1..75: mol_type = other DNA
cctgcatttgacggataaaggcgattatcaattgctggtgatggatgaggtggggcaaatcgcgacagtgaaatt

SEQ ID NO: 419945 - DNA, 75 bp, synthetic construct
  source 1..75: mol_type = other DNA
tcttcaacgacgtctggaagaactggcgcaaaactggaaaggacgattaccaccgcgcagctcactggcgatgat

SEQ ID NO: 419946 - DNA, 75 bp, synthetic construct
  source 1..75: mol_type = other DNA
tcattctggcagcatgggcagcagataaactctggcctctgccattgcaagaagtgaatcctgcacgcgtggtgg

SEQ ID NO: 419947 - DNA, 75 bp, synthetic construct
  source 1..75: mol_type = other DNA
cctgacgctgaacgatagcgtgcttaactaccgtaaaacactgcaaccgcaagccgacgcctctttctacatcag

SEQ ID NO: 419948 - DNA, 75 bp, synthetic construct
  source 1..75: mol_type = other DNA
tgctggccttactacagcaggattgcaccctctctttgcaggcactggcagaagccgttaatctgacaaccacgc

SEQ ID NO: 419949 - DNA, 75 bp, synthetic construct
  source 1..75: mol_type = other DNA
gaaactttctgacagtcctggcaaaactatctgccatgacaaagcgtttgtccgtgcgctgcgtaaagcgttcga

SEQ ID NO: 419950 - DNA, 75 bp, synthetic construct
  source 1..75: mol_type = other DNA
ggcgcagaccgacaaaaaagcgatggcgcaaatcatgaccatcggaggcgcgaagggcaatgccgccgaccagga

SEQ ID NO: 419951 - DNA, 75 bp, synthetic construct
  source 1..75: mol_type = other DNA
tctgatacagttagctgtttactgctacagagactatttatatcattacgaaccatcacagataaactggataac

SEQ ID NO: 419952 - DNA, 75 bp, synthetic construct
  source 1..75: mol_type = other DNA
tgtggctgatcaaattattctgtttattatgtcaatgttattgttgaatataaggatttgcagtaaggggatttt

SEQ ID NO: 419953 - DNA, 75 bp, synthetic construct
  source 1..75: mol_type = other DNA
gatatcgcggtttcactttcaaatatctgccgctttgcaggacatctttcacacttctacagcgtcgcccaacat

SEQ ID NO: 419954 - DNA, 75 bp, synthetic construct
  source 1..75: mol_type = other DNA
cgactggcataaaaagcacgagagttttaatagggcaaatattattacgacaatcatttcagtgtatgtgttcat

SEQ ID NO: 419955 - DNA, 75 bp, synthetic construct
  source 1..75: mol_type = other DNA
gttatttcttcatataaaggaaacaaaataatatattatcacaaagaaaatggtggtgtttcatcggcaagaaat

SEQ ID NO: 419956 - DNA, 75 bp, synthetic construct
  source 1..75: mol_type = other DNA
ttcctgacatgaactggtctcaaggagcagaattaataaataaagcaaaacatggagaagccgtctcatttacag

SEQ ID NO: 419957 - DNA, 75 bp, synthetic construct
  source 1..75: mol_type = other DNA
aaatatgcgggcggaaagatccagacatccgctggcggtgtggatgccccgccagtacaacaacatatcatttct

SEQ ID NO: 419958 - DNA, 75 bp, synthetic construct
  source 1..75: mol_type = other DNA
atcagacgatttatgacgacgtgattaaaatcatccgagcgatgaaatcccgcacgcaatttatctttgctactc

SEQ ID NO: 419959 - DNA, 75 bp, synthetic construct
  source 1..75: mol_type = other DNA
gatgagtggtttatcaatccacagcagacgaaccatattgaaagtttccttacggccacgtttgcgggcgttgat

SEQ ID NO: 419960 - DNA, 75 bp, synthetic construct
  source 1..75: mol_type = other DNA
atgcgtcgcctgcgggaaaaactcgcccaggccaacctgaagctggggcgtaactacccggagccaaaactctct

SEQ ID NO: 419961 - DNA, 75 bp, synthetic construct
  source 1..75: mol_type = other DNA
tacccggagccaaaactctcttacacccagcgcggaacctctgccggaacagcctggctggaaagctatgaaatt

SEQ ID NO: 419962 - DNA, 75 bp, synthetic construct
  source 1..75: mol_type = other DNA
atcttttcttcgctctatcctctgccgctatgaaaacatcccgtctccctatcgccatccaacaggccgttatgc

SEQ ID NO: 419963 - DNA, 75 bp, synthetic construct
  source 1..75: mol_type = other DNA
aataattagagctataattatatggttcttatttaccgatagatttaaattcctaagcaccacatcaaaaatctt

SEQ ID NO: 419964 - DNA, 75 bp, synthetic construct
  source 1..75: mol_type = other DNA
tggcgattgttctttctctttcattttgtggacaatccatggcggcatttgtgctgaacggtacccgctttattt

SEQ ID NO: 419965 - DNA, 75 bp, synthetic construct
  source 1..75: mol_type = other DNA
cttaccgtacgccgtcataatcgcgtagttcgtggcgaagccgtctatcgctgtgttcactgcggcgaacagctg

SEQ ID NO: 419966 - DNA, 75 bp, synthetic construct
  source 1..75: mol_type = other DNA
ggtgccagaaaagccgccagctatctgaaactgggtcattacagttttgaagctgtccgctttgcgctccaagat

SEQ ID NO: 419967 - DNA, 75 bp, synthetic construct
  source 1..75: mol_type = other DNA
aaaaggttcttcttcatcctcttccggtggaggctcaggcggcgggtttagcggcggtggcggttcttctggcgg

SEQ ID NO: 419968 - DNA, 75 bp, synthetic construct
  source 1..75: mol_type = other DNA
tgcgtctgattttcgtcgcatttacaacgacgcggtcaaaaatgcacagtttgaagatccggttgaggcgctgat

SEQ ID NO: 419969 - DNA, 75 bp, synthetic construct
  source 1..75: mol_type = other DNA
atgaaggtatctacatttccggaatcgtctttttttgacgatctgcactctctcacgcaactgcatcacctctca

SEQ ID NO: 419970 - DNA, 75 bp, synthetic construct
  source 1..75: mol_type = other DNA
ccaatcatcgcgctgggtctggcatttagctttgccttctatggtctggtgcgtaagaagatagcggtagaagca

SEQ ID NO: 419971 - DNA, 75 bp, synthetic construct
  source 1..75: mol_type = other DNA
gcgaagcggtgcacaacgtgatgaccaataccctgcttccacccgacagcaaaggcgtgatggtggccctgcgcc

SEQ ID NO: 419972 - DNA, 75 bp, synthetic construct
  source 1..75: mol_type = other DNA
aagaaagagcttcaagaaaaggttcttcttcatcctcttccggtggaggttcaagtggcggcggatttagcggag

SEQ ID NO: 419973 - DNA, 75 bp, synthetic construct
  source 1..75: mol_type = other DNA
cgtttcgtaacgttgatggcgtggtgaaaacctggcgttctctggcccatctggcaaacgatccctgcctcactt

SEQ ID NO: 419974 - DNA, 75 bp, synthetic construct
  source 1..75: mol_type = other DNA
tcaggcgttactggagaaaaatctgacagaagcgctgagccgattgcatgaactgtgggtggaagagtatcagga

SEQ ID NO: 419975 - DNA, 75 bp, synthetic construct
  source 1..75: mol_type = other DNA
ggacagtctgcaggacgggatcagggaaactctcgatgggctgaagcaggagcagaaatatgagtcagcgcataa

SEQ ID NO: 419976 - DNA, 75 bp, synthetic construct
  source 1..75: mol_type = other DNA
cgcgagaatggtgtttggaattgcaaaaagacataaataaaagaactgtcttgggggaacgcgcaaaagaaattg

SEQ ID NO: 419977 - DNA, 75 bp, synthetic construct
  source 1..75: mol_type = other DNA
ggtatcgtgatgctggctaacaaaaactatcccaatccagcgagagtcgccgccgcctggcagattctcaacgct

SEQ ID NO: 419978 - DNA, 75 bp, synthetic construct
  source 1..75: mol_type = other DNA
aaaaagataacatgatgatcaccggcgatgcgctgctggattttggcgacgggcataaaattaaacgtagcgcca

SEQ ID NO: 419979 - DNA, 75 bp, synthetic construct
  source 1..75: mol_type = other DNA
gtgcgccgccataaccgtgtggtgcgtggagaggccgtctatcgctgcgttcattgcggcgaacaactggttgcg

SEQ ID NO: 419980 - DNA, 75 bp, synthetic construct
  source 1..75: mol_type = other DNA
ggttcctgaacaagcgagcaaggaagcgactaaatactaatctattcaggatccaaccatatccaaaatcaactc

SEQ ID NO: 419981 - DNA, 75 bp, synthetic construct
  source 1..75: mol_type = other DNA
gtatccgtcagtggagtgggttcagtcctttgctgacgaacgctgcggacgcgcaggcgttgtgtatcaggcgtc

SEQ ID NO: 419982 - DNA, 75 bp, synthetic construct
  source 1..75: mol_type = other DNA
ccatatcctgctggctggcccgcacaatcattcagacaaaacactattcccgccgttttgtgaataactcctacc

SEQ ID NO: 419983 - DNA, 75 bp, synthetic construct
  source 1..75: mol_type = other DNA
aactgatttaccgcccagcatccgttaaggatggtcgtaaaaatgcggaaaaactgctgaaactggaacagcgtg

SEQ ID NO: 419984 - DNA, 75 bp, synthetic construct
  source 1..75: mol_type = other DNA
atcggcgtactgctggaaatctggctcggggccagcgcagggagtaaacctgaacaagattttgcagctctgggc

SEQ ID NO: 419985 - DNA, 75 bp, synthetic construct
  source 1..75: mol_type = other DNA
taaccggagctatatggaactgaaccgcatgtggttacacgacgacatgccccgcaattctgaatcacgggccat

SEQ ID NO: 419986 - DNA, 75 bp, synthetic construct
  source 1..75: mol_type = other DNA
tcaatactcagatgaggttacacatcaaattgatggcgatatttggttaagtgaagataaccccctaaatatggg

SEQ ID NO: 419987 - DNA, 75 bp, synthetic construct
  source 1..75: mol_type = other DNA
tccttaattgcctcgatcgcgtcggtatccgccaagcagcaaaacggctgacagactacccgcatcagctctccg

SEQ ID NO: 419988 - DNA, 75 bp, synthetic construct
  source 1..75: mol_type = other DNA
ttacctattcgtcatcgcattcaggtggtatttcaggatccaaactcctcgctcaacccacgactcaacgttttg

SEQ ID NO: 419989 - DNA, 75 bp, synthetic construct
  source 1..75: mol_type = other DNA
cgaagaaaaaggatttatcgccagcgtagttatcgacaataaaactttcaccgggaggcagttgaaagcgttata

SEQ ID NO: 419990 - DNA, 75 bp, synthetic construct
  source 1..75: mol_type = other DNA
agcgtcgttattgacaacaaaaccttcaccggaaggcagttgaaagcgttacacgcgcgggaatttcctgacgca

SEQ ID NO: 419991 - DNA, 75 bp, synthetic construct
  source 1..75: mol_type = other DNA
cccgcaactctgaatcacgggccatcagttatgcactgaaaaccataaggttactgtatccgtcagtggagtggg

SEQ ID NO: 419992 - DNA, 75 bp, synthetic construct
  source 1..75: mol_type = other DNA
tggctgccctcctttccctttctttctgcagtcaatccatggcggcgtttgtgctgaacggaacccgtttcattt

SEQ ID NO: 419993 - DNA, 75 bp, synthetic construct
  source 1..75: mol_type = other DNA
cgtttgtccgtgccggacgctttcagcgcgtccccgcagtctggttttatggtgcgacgctctcggcaatgcact

SEQ ID NO: 419994 - DNA, 75 bp, synthetic construct
  source 1..75: mol_type = other DNA
cctggcaaggggaaaccaacttctggggcagtaccgccgtcagtatcgatcgtctggcggcgtataaagacgttg

SEQ ID NO: 419995 - DNA, 75 bp, synthetic construct
  source 1..75: mol_type = other DNA
gacggcaagcagccactgatgatggcgcgtaaatcactgatggaaatggcggatttgctcaacctgcaaagcgcg

SEQ ID NO: 419996 - DNA, 75 bp, synthetic construct
  source 1..75: mol_type = other DNA
aaagtgaacggtcaggatattgcgctgacgcagaaggaagacaaggacctgtccatgatggcaccgttcggtgag

SEQ ID NO: 419997 - DNA, 75 bp, synthetic construct
  source 1..75: mol_type = other DNA
ggtgtgcaaaccaatggcagggagctgaaactcagcgataaggttacaaaagaattaacgctgctggcacccttt

SEQ ID NO: 419998 - DNA, 75 bp, synthetic construct
  source 1..75: mol_type = other DNA
ctttcagcgcgtacccgcagtctggttttatggtgcaacgctttcggcaatgcactttgtgcgtgttctggataa

SEQ ID NO: 419999 - DNA, 75 bp, synthetic construct
  source 1..75: mol_type = other DNA
aaaacctacggtggccaggtgtggattgataacacgaaccaggggaacggcgtctacatggtgccacagccgccg

SEQ ID NO: 420000 - DNA, 75 bp, synthetic construct
  source 1..75: mol_type = other DNA
aacgtgaagcatgacggtaaggacataacactcagtgacaaagtgatgaaagaagtcgcgcaacttaagccgttc

SEQ ID NO: 420001 - DNA, 75 bp, synthetic construct
  source 1..75: mol_type = other DNA
ggacagcaatctgccgaaggaccgtgaatctttgttctggctgaacgtccaggaagtgccacccaaacctgaggt

SEQ ID NO: 420002 - DNA, 75 bp, synthetic construct
  source 1..75: mol_type = other DNA
ttgtgttcctgttgtccttagttgtaagtgggcaagcaatggcagcttttgtgttgaatggaactcgttttatct

SEQ ID NO: 420003 - DNA, 75 bp, synthetic construct
  source 1..75: mol_type = other DNA
aaagataaaggtaaaagtcttggtctgagtgactcagtaatgactgagcttgccaagtttgctccttttagtgaa

SEQ ID NO: 420004 - DNA, 75 bp, synthetic construct
  source 1..75: mol_type = other DNA
ggacgtcgcacagcttaaaccgttcagcgatgtgaatctgggtaaaaaggtgaatggaaacatcagcgtggatgc

SEQ ID NO: 420005 - DNA, 75 bp, synthetic construct
  source 1..75: mol_type = other DNA
gcgaggccaaacttgttcaagccgtacaggctgtaggtcattcggctaagaaagtacaggcatggcttaaagacc

SEQ ID NO: 420006 - DNA, 75 bp, synthetic construct
  source 1..75: mol_type = other DNA
ttctttctgctactgctttcggtgctaatgctgcgtcctttgattgcactaaggctactactaaatcagagaagt

SEQ ID NO: 420007 - DNA, 75 bp, synthetic construct
  source 1..75: mol_type = other DNA
acaatgatcaatatcgggcagattcagccactggaggctgtatacaacgctcaaatccaaaacttgatgaatgta

SEQ ID NO: 420008 - DNA, 75 bp, synthetic construct
  source 1..75: mol_type = other DNA
cgagcagctaccggagcttatgcgggctttatccgtatcggcaacagaacggcagacaagactactgattgagtg

SEQ ID NO: 420009 - DNA, 75 bp, synthetic construct
  source 1..75: mol_type = other DNA
agatgaaagcatcgatatggggcttgcgatgattaattctaacaatttgagttcgttaggtatcacggttgagca

SEQ ID NO: 420010 - DNA, 75 bp, synthetic construct
  source 1..75: mol_type = other DNA
cggtatgtatctccggcctttcttttcaggggggcgctcacgcggcttctgcctcggatacgatcgccagccttg

SEQ ID NO: 420011 - DNA, 75 bp, synthetic construct
  source 1..75: mol_type = other DNA
ccttctggcatgatttagcggctccggtcattgctggcattcttgccagtctgatcgtgaactcgctgaataagc

SEQ ID NO: 420012 - DNA, 75 bp, synthetic construct
  source 1..75: mol_type = other DNA
gcttgatgacaaagaaatcgagatcgatcttgccgcagcaccgatgggcgttgaaattatggctcctccgggaat

SEQ ID NO: 420013 - DNA, 75 bp, synthetic construct
  source 1..75: mol_type = other DNA
ctggggacagaccgaacagcagcaggaaccgtccgctgctcgtcaggcattccgcaaaaaactgcgtgaaggcca

SEQ ID NO: 420014 - DNA, 75 bp, synthetic construct
  source 1..75: mol_type = other DNA
tgatgctgcgtcctttgattgcactaaggctactaccaaatcagagaagtttatttgtgctaatgagtcaatctc

SEQ ID NO: 420015 - DNA, 75 bp, synthetic construct
  source 1..75: mol_type = other DNA
gacaagagtgattatctagaagaacagcgtaaagcctaccaggcatggtgggagagagttgaatcgattgttact

SEQ ID NO: 420016 - DNA, 75 bp, synthetic construct
  source 1..75: mol_type = other DNA
ctaaagcggcccattattgaaccggttgaagagcttataaaatacgttatctctatgaacaacggttccgatatg

SEQ ID NO: 420017 - DNA, 75 bp, synthetic construct
  source 1..75: mol_type = other DNA
tgctggtgtctcacggattacgcgccatattcagtacagcagcgaacgaggaaggattcgagccggacgtaatcg

SEQ ID NO: 420018 - DNA, 75 bp, synthetic construct
  source 1..75: mol_type = other DNA
cgaattaaaagataaaacacatcaaaactataaaaagttgattacagaaaacacgcttctcatccattatacagg

SEQ ID NO: 420019 - DNA, 75 bp, synthetic construct
  source 1..75: mol_type = other DNA
acagtactgttcacttacgtgaaaaaaatggagaatggcttttagtgcaaattattagaaacgacgacattacat

SEQ ID NO: 420020 - DNA, 75 bp, synthetic construct
  source 1..75: mol_type = other DNA
taacgcaaagcaggcccatgtctgggcgtataagagaaagtttattgaaactcgcccgctgtcggacatcacggg

SEQ ID NO: 420021 - DNA, 75 bp, synthetic construct
  source 1..75: mol_type = other DNA
cagcctggcctgtgaactctttcctgagtggaaaccggcgtttgacgggctgctggaaaacggaggaattcgtca

SEQ ID NO: 420022 - DNA, 75 bp, synthetic construct
  source 1..75: mol_type = other DNA
ccaaaggtggcgaaggaaaatcaacccagtctgctaatcttgccggttttctggcggatgccggcctccgtactc

SEQ ID NO: 420023 - DNA, 75 bp, synthetic construct
  source 1..75: mol_type = other DNA
atgacaatatttttgcctcgtggatataatacaatttatacaattaaaagtgaattaaaagacaaaacggtaatg

SEQ ID NO: 420024 - DNA, 75 bp, synthetic construct
  source 1..75: mol_type = other DNA
ggcgtggtggggggattttgtagaggcagctgccagcgggagcgtaagcgccacgggtggctatcgtgggttaaa

SEQ ID NO: 420025 - DNA, 75 bp, synthetic construct
  source 1..75: mol_type = other DNA
gcgaaaagccagcaacgaaaaaaaggaccttttcatcactgacggcgaagggctggaactggtgattaagcacaa

SEQ ID NO: 420026 - DNA, 75 bp, synthetic construct
  source 1..75: mol_type = other DNA
accgtcagaagaacggcgcagcgaatcaatgaggtcatgtattacgccgttaataccggaatgattaccgcgaat

SEQ ID NO: 420027 - DNA, 75 bp, synthetic construct
  source 1..75: mol_type = other DNA
actgccaggggtatggcaagtttatgacaagagcgattatctagaagaacagcgtaaagcctaccaagcgtggtg

SEQ ID NO: 420028 - DNA, 75 bp, synthetic construct
  source 1..75: mol_type = other DNA
gacaagagcgattatctagaagaacagcgtaaagcctaccaagcgtggtgggagagggttgaatcgatcgttact

SEQ ID NO: 420029 - DNA, 75 bp, synthetic construct
  source 1..75: mol_type = other DNA
gagcgtcttgatatcggaacttacccggcaactggattaaaagaggccagagaagaagttatccgtctccgtggt

SEQ ID NO: 420030 - DNA, 75 bp, synthetic construct
  source 1..75: mol_type = other DNA
gactacggcctgaaagagttcaaattcttcccggctgaagctaacggcggcgtgaaagccctgcaggcgatcgca

SEQ ID NO: 420031 - DNA, 75 bp, synthetic construct
  source 1..75: mol_type = other DNA
tcgtggccgggggcaatcggaggacgtgaaaatactccgggccgtcgccgggtttatcgcccgccatgcctcacg

SEQ ID NO: 420032 - DNA, 75 bp, synthetic construct
  source 1..75: mol_type = other DNA
tgaactggctgttctggttacagggcgcggcaccgttcctcggcggtggttttggtcacttttaccattacgcac

SEQ ID NO: 420033 - DNA, 75 bp, synthetic construct
  source 1..75: mol_type = other DNA
gctgggcgttactggcgcagagtacgatgcctggctgatacgcataggcgatggcgatcaattctccagcggctt

SEQ ID NO: 420034 - DNA, 75 bp, synthetic construct
  source 1..75: mol_type = other DNA
aagagtttagttaaacagtttggaacagttaaaaaacaagaattaattaatgattgttttcgaaaagaacttgag

SEQ ID NO: 420035 - DNA, 75 bp, synthetic construct
  source 1..75: mol_type = other DNA
actaatggttatattttctcaagttgtgtttggtgcctttattgattacggaaaggagaaaaccttattgggaat

SEQ ID NO: 420036 - DNA, 75 bp, synthetic construct
  source 1..75: mol_type = other DNA
ggctggaataggcagcaagtatcgtgaacatatcgcgattttacagaaacagactcaggctcttttccctcatga

SEQ ID NO: 420037 - DNA, 75 bp, synthetic construct
  source 1..75: mol_type = other DNA
gtattgttggcgtgggtaatcagccatcagggggtgatggcgattccaaaagcggcaactgtcgcacatgtccaa

SEQ ID NO: 420038 - DNA, 75 bp, synthetic construct
  source 1..75: mol_type = other DNA
acgcggtcgtcaacgaaatcgcacatgcccacaatgtcagcgcggcgcaagttctgctggcgtgggtaatcagcc

SEQ ID NO: 420039 - DNA, 75 bp, synthetic construct
  source 1..75: mol_type = other DNA
tgttgctgcccttcagacgcttaatgaaatgcgtatatctccacgcccgacattaatacatatgattctgtccag

SEQ ID NO: 420040 - DNA, 75 bp, synthetic construct
  source 1..75: mol_type = other DNA
cttcgcaggcgaatgttgatactgcggccactactacaccggcggctccggttgcaacaacgacgccagatgccg

SEQ ID NO: 420041 - DNA, 75 bp, synthetic construct
  source 1..75: mol_type = other DNA
caaactgaaaattggtgccccagctgcagtgcagatccagtatcaagggaaacctgtcgatctgagtcgttttat

SEQ ID NO: 420042 - DNA, 75 bp, synthetic construct
  source 1..75: mol_type = other DNA
cacggtacgcgacattgaagaagataaggcgccagccgatcttgcttcaacattcttgcgcgggtatatccgctc

SEQ ID NO: 420043 - DNA, 75 bp, synthetic construct
  source 1..75: mol_type = other DNA
tcgacgcgctgctgcgcgacacgtttctgacggtggtggaactgcgtcagggaaccaccgtgcgtcacggtatgg

SEQ ID NO: 420044 - DNA, 75 bp, synthetic construct
  source 1..75: mol_type = other DNA
atggattacgccggtggcgttaagttcggcatcatgctgaccgaaatgcacggcacacaacaagatacgcaagcc

SEQ ID NO: 420045 - DNA, 75 bp, synthetic construct
  source 1..75: mol_type = other DNA
atggcgttatcggtgcctcaggcgcgggtaagagtacgcttatacgttgtgtaaacctgctggagcgcccaaccg

SEQ ID NO: 420046 - DNA, 75 bp, synthetic construct
  source 1..75: mol_type = other DNA
tgccgcgacgacggctccatcgccaaccgtcgattcacaacagaatgcggttgttccaccttcgcaggcaaatgt

SEQ ID NO: 420047 - DNA, 75 bp, synthetic construct
  source 1..75: mol_type = other DNA
atgaaaaactggaaaacaagtgcagaatcaatcctgaccaccggcccggttgtaccggttattgtggtaaaaaaa

SEQ ID NO: 420048 - DNA, 75 bp, synthetic construct
  source 1..75: mol_type = other DNA
tgtttccgaactgatgctgggtatggactacggtttgaaagagttcaaattcttcccggctgaagctaacggcgg

SEQ ID NO: 420049 - DNA, 75 bp, synthetic construct
  source 1..75: mol_type = other DNA
tggacaacacgccgaaagacgagattaaacgtcgcgtgacagaattactgtcattggttggtcttggcgataagc

SEQ ID NO: 420050 - DNA, 75 bp, synthetic construct
  source 1..75: mol_type = other DNA
attgccggacttatcgtcgcactgattgtcgctatctggtgggcgggcgatatcaaacctgcgaatatccccttc

SEQ ID NO: 420051 - DNA, 75 bp, synthetic construct
  source 1..75: mol_type = other DNA
tctctacgcgctgatcatgctggcggggttatggctgtttctgccaaaacgaaaaacgccgggaaatggcataac

SEQ ID NO: 420052 - DNA, 75 bp, synthetic construct
  source 1..75: mol_type = other DNA
tcgcgccatttggcgtgctgccggaaacggcggtactgaacgtgccgttatccacccgtcagcaccctttgctgc

SEQ ID NO: 420053 - DNA, 75 bp, synthetic construct
  source 1..75: mol_type = other DNA
atgacgctcgcgcagttaggcatggccttctggcacgatttagcggctccggtcattgctggcattctcgccagc

SEQ ID NO: 420054 - DNA, 75 bp, synthetic construct
  source 1..75: mol_type = other DNA
catgggaaatggcggtcaggccaactacgctgcggcgaaagcgggcttgatcggcttcagtaaatcactggcgcg

SEQ ID NO: 420055 - DNA, 75 bp, synthetic construct
  source 1..75: mol_type = other DNA
taacctgttaatgcgaatgaaagatgaagagtggaacgatattatcgaaaccaacctttcatctgttttccgtct

SEQ ID NO: 420056 - DNA, 75 bp, synthetic construct
  source 1..75: mol_type = other DNA
tagtaatgtgtttattacgtttgccttagagtataacgaaaatgcgttttttcttttttcaatgcccttgcccct

SEQ ID NO: 420057 - DNA, 75 bp, synthetic construct
  source 1..75: mol_type = other DNA
aggccatgaaggcaacaggaaatatgccagccaccgatgcttttctggctgaagtgcgggcacagggggggatat

SEQ ID NO: 420058 - DNA, 75 bp, synthetic construct
  source 1..75: mol_type = other DNA
tatacgcatgtgttgggtcagcattttgccggcaccaccagtcctgcggatggactgatgctacttatcaatcag

SEQ ID NO: 420059 - DNA, 75 bp, synthetic construct
  source 1..75: mol_type = other DNA
tggatggatttctgaaaggtaaatgcatcccccgagatttaaaggttaacgaaacaaacgctgaatatctggtgc

SEQ ID NO: 420060 - DNA, 75 bp, synthetic construct
  source 1..75: mol_type = other DNA
atgaatcttttaattaaaagaaatgtagaagagtttttaaggttgttagggagtgatttttatttatttgataat

SEQ ID NO: 420061 - DNA, 75 bp, synthetic construct
  source 1..75: mol_type = other DNA
tttctttttttattgaaataattgataataatgtttttgttacgtttgctttagagtataacgaaaacgcatttt

SEQ ID NO: 420062 - DNA, 75 bp, synthetic construct
  source 1..75: mol_type = other DNA
gttttcatattggaattaattttagcgcctcgcatattatttcgccgacgtttgtcgacgagtgcttaaattacc

SEQ ID NO: 420063 - DNA, 75 bp, synthetic construct
  source 1..75: mol_type = other DNA
gaaagtctggttcagcggttgaacattctgcatgaaaatggttttgtcatcgcactggatgattttggtactggc

SEQ ID NO: 420064 - DNA, 75 bp, synthetic construct
  source 1..75: mol_type = other DNA
gcgacagcttcactcgccatgatttgaatctcgttcttgaagttactgagcgtgaagcgttacatgttgatgaaa

SEQ ID NO: 420065 - DNA, 75 bp, synthetic construct
  source 1..75: mol_type = other DNA
gcactgtgcaagaactcttagggcataccgatgttaagaccacgcaaatctatacgcatgtgttgggtcagcatt

SEQ ID NO: 420066 - DNA, 75 bp, synthetic construct
  source 1..75: mol_type = other DNA
ttatatccctgcaagcaagcctagacggctaccctctgttatctctgcaaatgaagtgcaacgcattttgcaggt

SEQ ID NO: 420067 - DNA, 75 bp, synthetic construct
  source 1..75: mol_type = other DNA
accaaaataatatcacatttcagcagggttattatttctataacctgttacatacatcgacctggtcaaaattat

SEQ ID NO: 420068 - DNA, 75 bp, synthetic construct
  source 1..75: mol_type = other DNA
cagaaagcgattgagtcaattaagcaggctgatgcggctgttaagttggcacacgagaagttttcagcgctggcg

SEQ ID NO: 420069 - DNA, 75 bp, synthetic construct
  source 1..75: mol_type = other DNA
gacaattacgacggcctacactaggttcgcgcctgcctgcgtgggcgttccatgcgtcaccgtgtctacaatccg

SEQ ID NO: 420070 - DNA, 75 bp, synthetic construct
  source 1..75: mol_type = other DNA
gagctggttgatatatatctctggatcttcaaacgctttatggaagggaaggagttaaccagactgaaccgcccc

SEQ ID NO: 420071 - DNA, 75 bp, synthetic construct
  source 1..75: mol_type = other DNA
agtgcagggctggagctggttgatatatatctctggatcttcaaacgctttatggaagggaaggagttaacctga

SEQ ID NO: 420072 - DNA, 75 bp, synthetic construct
  source 1..75: mol_type = other DNA
ctgaagccactttttacaactggaagaaaaagtttggcgggatgggcgtgatagaattgcgccgtctgcggcaac

SEQ ID NO: 420073 - DNA, 75 bp, synthetic construct
  source 1..75: mol_type = other DNA
aacagattgcgtttgccctgaaacaggccgaaaccggcacccgcgtcggggaagtgtgcagaaaaatggggattt

SEQ ID NO: 420074 - DNA, 75 bp, synthetic construct
  source 1..75: mol_type = other DNA
gaagtctgcagaaagatgggtatttctgaggccaccttttacaactggaagaagaaatttgccggtctgggcgtg

SEQ ID NO: 420075 - DNA, 75 bp, synthetic construct
  source 1..75: mol_type = other DNA
agtgaagcagcaaaaacagcattaattaaaaaaggcttccagcttgaaggctttaatacagttttcacttcttaa

SEQ ID NO: 420076 - DNA, 75 bp, synthetic construct
  source 1..75: mol_type = other DNA
tctgaatgttgaaggcgctattaaagaagccgctattgctgctctggctgctaaaggcttccagatggctggttt

SEQ ID NO: 420077 - DNA, 75 bp, synthetic construct
  source 1..75: mol_type = other DNA
cagaaagcgattgagtcaattaagcaggctgatgcggctgttaagttggcacacgagaagttttcggcgctggca

SEQ ID NO: 420078 - DNA, 75 bp, synthetic construct
  source 1..75: mol_type = other DNA
gagaaagccaaaggggatgagggattaacgcgtgaacaaattgaatcgcgcattgtcgtgccgcatcatactatc

SEQ ID NO: 420079 - DNA, 75 bp, synthetic construct
  source 1..75: mol_type = other DNA
atgtccgctgccagatgtacgacggaagaccatcaacaagtgctttttcctggagagtttattgtgcgcctgttt

SEQ ID NO: 420080 - DNA, 75 bp, synthetic construct
  source 1..75: mol_type = other DNA
gtgcgcctgtttaatcctgttactttgactgaagtaatccccggtcttcatgacgtgaccggggctgttgaatta

SEQ ID NO: 420081 - DNA, 75 bp, synthetic construct
  source 1..75: mol_type = other DNA
tagcttctacagacttatcgataaaggctttgggattttgatatttattctgttaatcgcctgcgccgctgcctt

SEQ ID NO: 420082 - DNA, 75 bp, synthetic construct
  source 1..75: mol_type = other DNA
tcattatcgtcctgaaaggattatggttacgccgcaaagcgaaagccgcgcaacaggagcttgtccatgaacatt

SEQ ID NO: 420083 - DNA, 75 bp, synthetic construct
  source 1..75: mol_type = other DNA
ccaatgattaccgccaatacgctggcgggcggcattaccggcgtgctggtgatcgctttcggaatcaaacgtctg

SEQ ID NO: 420084 - DNA, 75 bp, synthetic construct
  source 1..75: mol_type = other DNA
attgtggtcggtgccacagtcgcaaccgaaccggctattccttacgctctggcagctccgttgccgatgattacc

SEQ ID NO: 420085 - DNA, 75 bp, synthetic construct
  source 1..75: mol_type = other DNA
atgacagggatggttatatcagggagctttttttttctgtattcattgaaagtaaaaattgaggaaagtagacaa

SEQ ID NO: 420086 - DNA, 75 bp, synthetic construct
  source 1..75: mol_type = other DNA
aatgggtgaaatgcgtcgctatatcattaccatgatcgacgaacgtgaatttggcaaaaaattacaggcaggcag

SEQ ID NO: 420087 - DNA, 75 bp, synthetic construct
  source 1..75: mol_type = other DNA
ataccgttgcgccaacggtcaccatcgccacggtggcgggtgacgatattatcaacaacgccgagcagcttgccg

SEQ ID NO: 420088 - DNA, 75 bp, synthetic construct
  source 1..75: mol_type = other DNA
acacaaacacccgccgggcctcatttgatttaaaagttagagccgtaagtaaaggtaatgccggtgcgggaagta

SEQ ID NO: 420089 - DNA, 75 bp, synthetic construct
  source 1..75: mol_type = other DNA
agcatcggttatctgattggccgtagtgagtcagccgtcaggacgaaagcgcgggaactgggtatcagtctgatg

SEQ ID NO: 420090 - DNA, 75 bp, synthetic construct
  source 1..75: mol_type = other DNA
tactgattctacggcagtgtgcgggaacaatgacggtggaatgtatcgggatgcttattggtcgtagtgaggctg

SEQ ID NO: 420091 - DNA, 75 bp, synthetic construct
  source 1..75: mol_type = other DNA
gtcgcggcgggtcttgcgacgttcattgcgcccaaactgtttacccgacaggaaaaagaggctgccagtagtgcc

SEQ ID NO: 420092 - DNA, 75 bp, synthetic construct
  source 1..75: mol_type = other DNA
tgctcggttccatgctgatcccgttcgttactctgctggtttttggcgtactgacttactacgttatcggaccgg

SEQ ID NO: 420093 - DNA, 75 bp, synthetic construct
  source 1..75: mol_type = other DNA
atggtggtggaaagcggtggtcagtttcaggtggtcataggtaaccatgtggccgatgtcttcctggcggttaac

SEQ ID NO: 420094 - DNA, 75 bp, synthetic construct
  source 1..75: mol_type = other DNA
cttcaaaaaagtgcccgcgagttaaaactcagtcatattgccaagggtagttttttggacatgcttaaatctgat

SEQ ID NO: 420095 - DNA, 75 bp, synthetic construct
  source 1..75: mol_type = other DNA
atgcgcaatacacttatccccatcctcgttgcggtgtgcttgtttcttactggtgtgtctattttgaattttcag

SEQ ID NO: 420096 - DNA, 75 bp, synthetic construct
  source 1..75: mol_type = other DNA
gatgtggcgcatgtgcatataactccagatacgttaacctttttaaagccggatgatgttatcaagcaaaattat

SEQ ID NO: 420097 - DNA, 75 bp, synthetic construct
  source 1..75: mol_type = other DNA
tatgatgtaacacctgtgcatataactcctgatacattgacttttttaaaacctgatgaagttatcaagcaaagt

SEQ ID NO: 420098 - DNA, 75 bp, synthetic construct
  source 1..75: mol_type = other DNA
ccgagcgtgagccattgaatgttgatgaaagtctggttcagcggttgaacattctgcatgaaaatggttttgtca

SEQ ID NO: 420099 - DNA, 75 bp, synthetic construct
  source 1..75: mol_type = other DNA
atgccagcgcgagcgaatgaatggcattttcatgtattaaaccctttggccgggacaagcacactcatacccatc

SEQ ID NO: 420100 - DNA, 75 bp, synthetic construct
  source 1..75: mol_type = other DNA
gcatgaaaatggttttgtcatcgcgctggatgatttcggtactggctactcagggctttcttatcttcatgacct

SEQ ID NO: 420101 - DNA, 75 bp, synthetic construct
  source 1..75: mol_type = other DNA
actcctgatgtgaatgaagatgtggggtgtatctataacgaagagtctcaggcggtagtgttgttaattaatccg

SEQ ID NO: 420102 - DNA, 75 bp, synthetic construct
  source 1..75: mol_type = other DNA
tgcgtgaggcggcagaaaaagcaacgtgtggtgagcggtcgctcgaatatggagagagccgatttgatggtgatg

SEQ ID NO: 420103 - DNA, 75 bp, synthetic construct
  source 1..75: mol_type = other DNA
attctcgtctacttaaggaacgcgttatttttctgactggccaggttgaagaccatatggctaacctgattgtgg

SEQ ID NO: 420104 - DNA, 75 bp, synthetic construct
  source 1..75: mol_type = other DNA
agtgggcagtatggttcaaattttgcgataaccagaaatggatttttttggggggagggaaaaggcgatgcttcc

SEQ ID NO: 420105 - DNA, 75 bp, synthetic construct
  source 1..75: mol_type = other DNA
attttactgaaagtcgaaataatgtatcacctgctttcatcagtcagcaagcgatatctctgagctatgctgcac

SEQ ID NO: 420106 - DNA, 75 bp, synthetic construct
  source 1..75: mol_type = other DNA
cattatcgcgttaccaggcgccatcaggctcaaatggaatgagtagtgataccagtttgcagataaatgcggcaa

SEQ ID NO: 420107 - DNA, 75 bp, synthetic construct
  source 1..75: mol_type = other DNA
ttcattgggtgggtcaacgtgactgggaagtgcgtgattttcacggcacggaatataaaacgctgcgcggcagca

SEQ ID NO: 420108 - DNA, 75 bp, synthetic construct
  source 1..75: mol_type = other DNA
caatccttatgagtccggcgagaaaggttttaaattactactgaccgagactgataaagacagtttactggcgtt

SEQ ID NO: 420109 - DNA, 75 bp, synthetic construct
  source 1..75: mol_type = other DNA
ctctgccgacggaggtccgccgctggctggagcgggcactgacggagaataacttcagtggatatgcccggctgg

SEQ ID NO: 420110 - DNA, 75 bp, synthetic construct
  source 1..75: mol_type = other DNA
cgatttagataattattctatttttgttaaacctatcgccgatagtttacaagatgatagtaaattttatgttat

SEQ ID NO: 420111 - DNA, 75 bp, synthetic construct
  source 1..75: mol_type = other DNA
aatgtcttccgctcaaaaggcgtgctggtcggcacttcgacgatgaataatgtgatgatgccgaaaatcgccggg

SEQ ID NO: 420112 - DNA, 75 bp, synthetic construct
  source 1..75: mol_type = other DNA
gacctcggcccacggatgcagtgcagcgtctgccagtggatttacgatccggcaaaaggcgagccaatgcaggac

SEQ ID NO: 420113 - DNA, 75 bp, synthetic construct
  source 1..75: mol_type = other DNA
agtccctgctgcgtgagcagggttatgtcatcagcaaatcggctatccatcgctatggccagaagattgagcgcc

SEQ ID NO: 420114 - DNA, 75 bp, synthetic construct
  source 1..75: mol_type = other DNA
cggagaaaacccaggatctgaccatcagcggcggctccagcggtctggcgactggcaccacggtcaccgtgatgt

SEQ ID NO: 420115 - DNA, 75 bp, synthetic construct
  source 1..75: mol_type = other DNA
agaatcacttcaaaatgagttaaataaactaccaataccagcaagtctacatgaacaatataactccatgttttt

SEQ ID NO: 420116 - DNA, 75 bp, synthetic construct
  source 1..75: mol_type = other DNA
ccgtcaacctcaagaagttccagtctgaagtccgggccagagcgcagcaggcggccagcaacgccgagaaaattg

SEQ ID NO: 420117 - DNA, 75 bp, synthetic construct
  source 1..75: mol_type = other DNA
gccataacgtgctggtcaacagcgcgctgcctgccgtcaccattaacgcggtggcgaccgacgatattattaacg

SEQ ID NO: 420118 - DNA, 75 bp, synthetic construct
  source 1..75: mol_type = other DNA
gttcggaggcggtgatcgccctgattcagaccgagctgttcgagagcatcgtccagctgcaggaagcggaagaag

SEQ ID NO: 420119 - DNA, 75 bp, synthetic construct
  source 1..75: mol_type = other DNA
gcagcaaaacggcgcagacagagttgaattatgcgcagccccaaaagaggggggcttaacgccgtcgttgggggt

SEQ ID NO: 420120 - DNA, 75 bp, synthetic construct
  source 1..75: mol_type = other DNA
ctggatgttgaacagcttcaggttgccttccccattcgcaaagggattttgaagcgcattgtggatcataatgtg

SEQ ID NO: 420121 - DNA, 75 bp, synthetic construct
  source 1..75: mol_type = other DNA
gacacactttaaccagcatctggattcattattcggggtctattcgaaactgttaccgttcagaatggattttgc

SEQ ID NO: 420122 - DNA, 75 bp, synthetic construct
  source 1..75: mol_type = other DNA
tgcgtatcgatcacgtgatgcactatagtgataagtccgcggtagacaacttacgttacgcccttagctatctgg

SEQ ID NO: 420123 - DNA, 75 bp, synthetic construct
  source 1..75: mol_type = other DNA
tcagcaaaacgtacgtaccgtagtaaatgatgtttcactacacattgaagctggcgaaacgctggcgctggtggg

SEQ ID NO: 420124 - DNA, 75 bp, synthetic construct
  source 1..75: mol_type = other DNA
aaaatttgtcggtgggtttccgccatcagcaaaacgtacgtaccgtagtaaatgatgtttcactacacattgaag

SEQ ID NO: 420125 - DNA, 75 bp, synthetic construct
  source 1..75: mol_type = other DNA
taagccctcgctgatcattcttgatgaaccaacatcatcgctcgacaaaacggtacaggcgcaaatattgacgct

SEQ ID NO: 420126 - DNA, 75 bp, synthetic construct
  source 1..75: mol_type = other DNA
ggagaacgaggatattgcgcttacggtagggaagctgcgcgttgagctggaagctgcagagaagcgcattgcaga

SEQ ID NO: 420127 - DNA, 75 bp, synthetic construct
  source 1..75: mol_type = other DNA
ggattcgacgaacagaagaacgcagagaacaacgctcgttatatcgcagctttcaaccctgaagtagtacaggca

SEQ ID NO: 420128 - DNA, 75 bp, synthetic construct
  source 1..75: mol_type = other DNA
acaggtacaaggggaatacgtggagttgagcgacggcactttatcgtggttagggaacgccttgtactggatgcc

SEQ ID NO: 420129 - DNA, 75 bp, synthetic construct
  source 1..75: mol_type = other DNA
tgttgctggatgataatacagatgtcccagatctcaggcaggttatcttcaagtgcgtacccaaaaacagactgg

SEQ ID NO: 420130 - DNA, 75 bp, synthetic construct
  source 1..75: mol_type = other DNA
gtctgatcccccaatatccgtagctttacgtcaaaagacggaaacagttacatcgaaatgccatataccaaactg

SEQ ID NO: 420131 - DNA, 75 bp, synthetic construct
  source 1..75: mol_type = other DNA
tggaagcacgctttgtgctggaagataagctgattctgctggtgcttgatgctgcccgcgtcaaacatcttgctt

SEQ ID NO: 420132 - DNA, 75 bp, synthetic construct
  source 1..75: mol_type = other DNA
cgagtttatttatcatatggagattagaacaaaaaacttaagagaaaacatgatagattcatgggcatattttgg

SEQ ID NO: 420133 - DNA, 75 bp, synthetic construct
  source 1..75: mol_type = other DNA
tcagcgtacacgtgttagctattctgcgtgcttcaataaaataaggcttacagagaacatggtagataaacgcga

SEQ ID NO: 420134 - DNA, 75 bp, synthetic construct
  source 1..75: mol_type = other DNA
ttattgaatcagtcaaaaatgaccttcgacctaaactgtcatcaataaaaacatatccatcagtagccgccttta

SEQ ID NO: 420135 - DNA, 75 bp, synthetic construct
  source 1..75: mol_type = other DNA
attcccggtttggttggggaatacaatggcgggcgtgagtggtgataaaacaaatttggttgatgggctaataag

SEQ ID NO: 420136 - DNA, 75 bp, synthetic construct
  source 1..75: mol_type = other DNA
aatcaatgagctacatgaaagacttgtggagcgaggaagagaaacaagaatttgcaaaactggataaaatgggcg

SEQ ID NO: 420137 - DNA, 75 bp, synthetic construct
  source 1..75: mol_type = other DNA
tgaagtggcaaaatccttcagccttgacgaacacactatggttcccgatgtggttctgatgagcaatgctgcgtt

SEQ ID NO: 420138 - DNA, 75 bp, synthetic construct
  source 1..75: mol_type = other DNA
tgctggttgatggtcgtttgatctataccgccagcgaccttaaagtgggtctgttccaggatacgtctgcattct

SEQ ID NO: 420139 - DNA, 75 bp, synthetic construct
  source 1..75: mol_type = other DNA
tatgtttattgatatgggtgttctttctgtagaggcacgggacgggcaaacatcactctataaagcattaccctt

SEQ ID NO: 420140 - DNA, 75 bp, synthetic construct
  source 1..75: mol_type = other DNA
ccgaagcaaaagcgcaatgcctcaataagaaagatagtaaacaaacatatgtagtagttgaacaatggctgaaga

SEQ ID NO: 420141 - DNA, 75 bp, synthetic construct
  source 1..75: mol_type = other DNA
cagcgcggcgcagacttgccccggactatgtgctgagctttgccggtcgcattccctgtggaggtgaacatgcgt

SEQ ID NO: 420142 - DNA, 75 bp, synthetic construct
  source 1..75: mol_type = other DNA
attccctttatggttggctaatacaattgcaggagttaacaatgattcgtcaaatttagttgatatggtaataaa

SEQ ID NO: 420143 - DNA, 75 bp, synthetic construct
  source 1..75: mol_type = other DNA
gcacggtgatttttttgaaaataaaacgcgacggaaacgagaaatttttatggcaagaccacccaaaccgccagc

SEQ ID NO: 420144 - DNA, 75 bp, synthetic construct
  source 1..75: mol_type = other DNA
catcgttagcctataagcacaggttaaagctaccaaatggtattgaggcatattttgctaagaaacatcccaaag

SEQ ID NO: 420145 - DNA, 75 bp, synthetic construct
  source 1..75: mol_type = other DNA
cgcctgcggcagctcctgcgaaacaggaagcggcagcgccggctccggcagcaaaagctgaagccccggcagcag

SEQ ID NO: 420146 - DNA, 75 bp, synthetic construct
  source 1..75: mol_type = other DNA
tctcaccggactattcagaatgaaagggcggtgatgagagctattttacagaaggacggtcgttataaattagcc

SEQ ID NO: 420147 - DNA, 75 bp, synthetic construct
  source 1..75: mol_type = other DNA
atgacaactgtttatgtcagtgaagaaaatttaaaatcactggtgcaccacaaattacataccgccgggctggat

SEQ ID NO: 420148 - DNA, 75 bp, synthetic construct
  source 1..75: mol_type = other DNA
gataaaactaaagaatattctaacggtgaactggttatccgaatttacccaaatgccacattaggtaacgaacgt

SEQ ID NO: 420149 - DNA, 75 bp, synthetic construct
  source 1..75: mol_type = other DNA
taaactaccaataccagcaagtctacatgagcaatataactccatgttttttgataacgttcaattatggctacc

SEQ ID NO: 420150 - DNA, 75 bp, synthetic construct
  source 1..75: mol_type = other DNA
atgatttaagatatatatatgttccattagattcatattcgctactttgtgcaacgccaaatccagaagataaac

SEQ ID NO: 420151 - DNA, 75 bp, synthetic construct
  source 1..75: mol_type = other DNA
ggctggattaaccggagagaaatcacctcacagtatgcgttaccatttttctcaggaggccagacgtttttatcg

SEQ ID NO: 420152 - DNA, 75 bp, synthetic construct
  source 1..75: mol_type = other DNA
ggtggtgactcgcgccgccgctggcgatacggtcaccgtgacgcttggcggcaacacttatactgcacaagttca

SEQ ID NO: 420153 - DNA, 75 bp, synthetic construct
  source 1..75: mol_type = other DNA
acgttccggatatcggcagcgacgaagttgaagtgaccgaaatcctggtgaaagtgggcgataaagttgaagctg

SEQ ID NO: 420154 - DNA, 75 bp, synthetic construct
  source 1..75: mol_type = other DNA
tcatcatgaaagccgttgctgcggcacttgagcagatgcctcgcttcaacagttcgctgtcggaagacggtcagc

SEQ ID NO: 420155 - DNA, 75 bp, synthetic construct
  source 1..75: mol_type = other DNA
gataaagagcgcacggcattattaaaagcagccgatgagtcaatgatgcagatgaaggacgtcatttggcctgcg

SEQ ID NO: 420156 - DNA, 75 bp, synthetic construct
  source 1..75: mol_type = other DNA
ttgttcgcaccttccctagaatcatttgctccagattacagccttttcagtctgccgttcttattccgcgaccgt

SEQ ID NO: 420157 - DNA, 75 bp, synthetic construct
  source 1..75: mol_type = other DNA
gttattccatttctaaaagagaaaatggaaaattcaagtaaggtaatatcatcaagagctgaagatgcgcttgat

SEQ ID NO: 420158 - DNA, 75 bp, synthetic construct
  source 1..75: mol_type = other DNA
ataagcgcctggccaggtttggcattgacgaacagaccgtaactcaccccgttacgcccaaatacgcgaagctga

SEQ ID NO: 420159 - DNA, 75 bp, synthetic construct
  source 1..75: mol_type = other DNA
aagccaccagcgaagacgacgacagtgatgattcaatcacgcagcaatcgcaatactccctgatagataagggcg

SEQ ID NO: 420160 - DNA, 75 bp, synthetic construct
  source 1..75: mol_type = other DNA
gcttgatgagctcagaactgtttacggtctgagaacaggagagttttttgaaatgctgattacagagaaatatct

SEQ ID NO: 420161 - DNA, 75 bp, synthetic construct
  source 1..75: mol_type = other DNA
ttaagctggatggctctatttcagacgagctgacaggaaagctggttacgcatgactccagcgccagttatgact

SEQ ID NO: 420162 - DNA, 75 bp, synthetic construct
  source 1..75: mol_type = other DNA
gatgaaaaaacgcaacaccagaagctcaagcgcattatctgcaatgctcttaaccttgaaccttcaaaggtgggg

SEQ ID NO: 420163 - DNA, 75 bp, synthetic construct
  source 1..75: mol_type = other DNA
ccctggtggatgaaggcactcttgaatcggcaaatgtgctttggccaacgtttatttctggcaagtggtttgaaa

SEQ ID NO: 420164 - DNA, 75 bp, synthetic construct
  source 1..75: mol_type = other DNA
gattacataaagctggtgcagcgtatggataagcacatcatttgccatataggggcaattccccttgataagtgt

SEQ ID NO: 420165 - DNA, 75 bp, synthetic construct
  source 1..75: mol_type = other DNA
aacggtgcctggagcgtgcaggtaccgaccgccgatgcgcaggcgttaggcgaagggaatcaggcagtgctggtc

SEQ ID NO: 420166 - DNA, 75 bp, synthetic construct
  source 1..75: mol_type = other DNA
ggctggcagagggtaaaaacccccgttatgagttgtgcaccacagtaaaggaagcactaaaacccgttacggtga

SEQ ID NO: 420167 - DNA, 75 bp, synthetic construct
  source 1..75: mol_type = other DNA
ttcgcgagagggtgcacagtaacagcgaattaaaggaaattttacgcgctattgatggtgatgtgttcgcgcctt

SEQ ID NO: 420168 - DNA, 75 bp, synthetic construct
  source 1..75: mol_type = other DNA
cgtccatcacacagaccgtacgttgttagcacagtatcgcgcgtcgttgaaaagcgccattcagcgcaaggctaa

SEQ ID NO: 420169 - DNA, 75 bp, synthetic construct
  source 1..75: mol_type = other DNA
tgagccaatgcgagcagcagagccgttgaactggaggcagaaagagtatctgcgagggctgattaacgatatagc

SEQ ID NO: 420170 - DNA, 75 bp, synthetic construct
  source 1..75: mol_type = other DNA
gtaatatcaatgttcaggataaagggactgtcaccctcggaggggaaggggaactgagtcctgacctgactcttc

SEQ ID NO: 420171 - DNA, 75 bp, synthetic construct
  source 1..75: mol_type = other DNA
atgaatcaagttagtcacgacaccaagtcacgcattccgcgtaacaccgccacaggtcaaagactggcacttcga

SEQ ID NO: 420172 - DNA, 75 bp, synthetic construct
  source 1..75: mol_type = other DNA
atgccccgttcgggacattattgggctacgccccaggtggggtagcaatctactcttcagattacagttctctcg

SEQ ID NO: 420173 - DNA, 75 bp, synthetic construct
  source 1..75: mol_type = other DNA
tattagataaaaaaataagagcagagattgaattaataaagaaaataatcgctgaatttgatgtcgtaaaagaaa

SEQ ID NO: 420174 - DNA, 75 bp, synthetic construct
  source 1..75: mol_type = other DNA
tattagataaaaaaataagatcagaaattgaggcgataaaaaaaataatcgccgaatttgatgtcgtaaaagaaa

SEQ ID NO: 420175 - DNA, 75 bp, synthetic construct
  source 1..75: mol_type = other DNA
cggtcagtaccataacttcagcgaaaagctattcatccagaaagaggcacagaaattcgccgcacagcttcgcaa

SEQ ID NO: 420176 - DNA, 75 bp, synthetic construct
  source 1..75: mol_type = other DNA
ctctggcgatccgcttgggttgaagggattaagcggtaagcgccagccatttgattaccagaatagcgaagtgcg

SEQ ID NO: 420177 - DNA, 75 bp, synthetic construct
  source 1..75: mol_type = other DNA
ggctaccgcgagcagatggcactgcttgaggaccagttcaataagtggatcaagacgcacgatcgctacgatgaa

SEQ ID NO: 420178 - DNA, 75 bp, synthetic construct
  source 1..75: mol_type = other DNA
attttgttggtacctatacggacccactgaagcatgcggtttacccggatcgccgtgacggcgcgctgaagtcgt

SEQ ID NO: 420179 - DNA, 75 bp, synthetic construct
  source 1..75: mol_type = other DNA
aagcggaacttgaaaagaccaccgccgacgtcgccaaattcaaacaggcggcaatggccaaggcagcggataacg

SEQ ID NO: 420180 - DNA, 75 bp, synthetic construct
  source 1..75: mol_type = other DNA
tgaagactgaagcacgcaaggagggcgcttactttgtggcgaacagaatgctggctgcctgggaagctggtttta

SEQ ID NO: 420181 - DNA, 75 bp, synthetic construct
  source 1..75: mol_type = other DNA
tattgctatcaactattggcgggccggagggattaactcattttctgcgtagcactggtgatagttatacaaggc

SEQ ID NO: 420182 - DNA, 75 bp, synthetic construct
  source 1..75: mol_type = other DNA
aagtttctggcggcagctacgaatacttcgaaggcatgggcttgccggagctgatcagcgaagtgaaaaaggtgg

SEQ ID NO: 420183 - DNA, 75 bp, synthetic construct
  source 1..75: mol_type = other DNA
gcaccggcccgttccagttacagcagtaccagaaagattcccgtattcgctacaaagcgtttgatggctactggg

SEQ ID NO: 420184 - DNA, 75 bp, synthetic construct
  source 1..75: mol_type = other DNA
gtgatttatctggtttcaccgctgattcaggtgaagaacgtcggcggaaaaatgttgctggtgctaatggtggtg

SEQ ID NO: 420185 - DNA, 75 bp, synthetic construct
  source 1..75: mol_type = other DNA
cgacgcgtgaactgaacgccgatgacgtggtgttctcgttcgaccgtcagaaaaacgcgcaaaacccgtaccata

SEQ ID NO: 420186 - DNA, 75 bp, synthetic construct
  source 1..75: mol_type = other DNA
atgaagcaggataaatccatcaacctgatggaaatgccggggctgaacgtcggctacctctcgtataacgtgcag

SEQ ID NO: 420187 - DNA, 75 bp, synthetic construct
  source 1..75: mol_type = other DNA
cgccaaccatgtggggctataacgacgacgttcaggactacacctacgatcctgaaaaagcgaaagccttgctga

SEQ ID NO: 420188 - DNA, 75 bp, synthetic construct
  source 1..75: mol_type = other DNA
caccgctaccgtgcaggggaatttaagctggagcgtggacgttccggcggcggatattcaggccatcggtaatgg

SEQ ID NO: 420189 - DNA, 75 bp, synthetic construct
  source 1..75: mol_type = other DNA
aacgctcaacattttataagtatatgtcattgaataccgcgaagattgttcttgattcatgcagccttagatgga

SEQ ID NO: 420190 - DNA, 75 bp, synthetic construct
  source 1..75: mol_type = other DNA
gcaaatctgctgtgcgtcgcaatagcttgatgatcactctgtcgcagtctggcgaaaccgcggataccctggcgg

SEQ ID NO: 420191 - DNA, 75 bp, synthetic construct
  source 1..75: mol_type = other DNA
acggtgatactctggttaccggagggatgagtgagccggagagaacatcatttctgtccacactgaataaaatgg

SEQ ID NO: 420192 - DNA, 75 bp, synthetic construct
  source 1..75: mol_type = other DNA
attatatgatgctgttgcttctggtactaaagaattatatgaggaagctgacgcatgccattatgatatttatga

SEQ ID NO: 420193 - DNA, 75 bp, synthetic construct
  source 1..75: mol_type = other DNA
ctgaaggtattactctgacatttcgtgttcctgaaggaaatatgaaacatcctttgattatcttatgccatggat

SEQ ID NO: 420194 - DNA, 75 bp, synthetic construct
  source 1..75: mol_type = other DNA
tgccctcaatgcagtgctcggctgttgcgtggtgagcacgttggtgattcacactttagagatcaatctggacgc

SEQ ID NO: 420195 - DNA, 75 bp, synthetic construct
  source 1..75: mol_type = other DNA
gtaactatcgttataacagcacggaatcagccctccttactcatcgggaaaaagagatcctgaataagctgcgta

SEQ ID NO: 420196 - DNA, 75 bp, synthetic construct
  source 1..75: mol_type = other DNA
gcacctcaaaaacaccatcatacactaaatcagtaagttggcagcatcacccattattgttgatcactaaacctt

SEQ ID NO: 420197 - DNA, 75 bp, synthetic construct
  source 1..75: mol_type = other DNA
agcttgccagttacctgattacgcattcaggtaactatcgttataacagcacggaatcagccctccttactcatc

SEQ ID NO: 420198 - DNA, 75 bp, synthetic construct
  source 1..75: mol_type = other DNA
ggataccctgctggcggcacgttctggtagcccgctggtgattggcctgggcatgggcgaaaactttatcgcttc

SEQ ID NO: 420199 - DNA, 75 bp, synthetic construct
  source 1..75: mol_type = other DNA
tctcgaaggtttacgtcgtctggaataccgtggttatgactctgccggtctggctgttgtcgacgcaaacggaaa

SEQ ID NO: 420200 - DNA, 75 bp, synthetic construct
  source 1..75: mol_type = other DNA
tgccctcaatgcggtgctcggctgctgcgtggtgagcacgttggcgatccatatgttagagatcaatctggacgc

SEQ ID NO: 420201 - DNA, 75 bp, synthetic construct
  source 1..75: mol_type = other DNA
tcctgaccactacctggcacgcctctcttctcgccatatcccgaataatgccctcaatgcggtgctcggctgctg

SEQ ID NO: 420202 - DNA, 75 bp, synthetic construct
  source 1..75: mol_type = other DNA
gaactcggtacgctggcgttggtgtggtatatcggtactcgcggtgccagttccagtgctaatctacaaaccgtt

SEQ ID NO: 420203 - DNA, 75 bp, synthetic construct
  source 1..75: mol_type = other DNA
taatcttttcaagaagatagcagtcaagaaccggactcaagcagtctcatgggcaaacgataacctcaggcgata

SEQ ID NO: 420204 - DNA, 75 bp, synthetic construct
  source 1..75: mol_type = other DNA
ttcaggtaactatcgttataacagcacggaatcaggtaatgactccaacttactgatagtgttttatgttcagat

SEQ ID NO: 420205 - DNA, 75 bp, synthetic construct
  source 1..75: mol_type = other DNA
attaacaccgtctccggcgatgacattatcagtggcgcagaaaaaggtgcgccactgacccttaccggtagcact

SEQ ID NO: 420206 - DNA, 75 bp, synthetic construct
  source 1..75: mol_type = other DNA
cgaccgtgaatatcgtcaactggaagcgcagctacacgacgccaacgaacgtaacgacgggcacgccattgcgac

SEQ ID NO: 420207 - DNA, 75 bp, synthetic construct
  source 1..75: mol_type = other DNA
ccaaatccagactggaagagtgcgaaatggcgtggctggaagcccaggaacaacttgagctgatgctgcaggaag

SEQ ID NO: 420208 - DNA, 75 bp, synthetic construct
  source 1..75: mol_type = other DNA
aagagaacgcgaacagcgcccaggcacgtaaagatcagaagcgtcgggaagcggagctgcgtgcgcaaacccagc

SEQ ID NO: 420209 - DNA, 75 bp, synthetic construct
  source 1..75: mol_type = other DNA
cgctcccgcgccgcaagtctgttgcacggcctcggtttcagcaatgaacaactcgagcgtccggtaagtgatttc

SEQ ID NO: 420210 - DNA, 75 bp, synthetic construct
  source 1..75: mol_type = other DNA
tcgatccgatcgtcgataaaatcattcatatcgaacagcaaaatatgttcgagtacaccggtaactacagctcct

SEQ ID NO: 420211 - DNA, 75 bp, synthetic construct
  source 1..75: mol_type = other DNA
gcacagctggcgcaggcggaagagaaactcggcgacagcgaactgtatgaccagagccgtaaagcagaactgacc

SEQ ID NO: 420212 - DNA, 75 bp, synthetic construct
  source 1..75: mol_type = other DNA
cactctgtaatgcgctgtttcagggggaggtcaccccggtcagtgatgttcacgccggcactgcgtattaccgtg

SEQ ID NO: 420213 - DNA, 75 bp, synthetic construct
  source 1..75: mol_type = other DNA
tctgttgcacgcacagttctgcgtgccgtccgtgacacggtggtctctgttgcccgcgcggtatggaactggatt

SEQ ID NO: 420214 - DNA, 75 bp, synthetic construct
  source 1..75: mol_type = other DNA
atgaatccgtctgatgccattgaggcaattgaaaaaccactctcctccctgcctaattcgctttcccgccatatc

SEQ ID NO: 420215 - DNA, 75 bp, synthetic construct
  source 1..75: mol_type = other DNA
tcattgatggcgaccgcgaatatcgccaactggaagcacaactccacgacgccaacgaacgtaacgacgggcacg

SEQ ID NO: 420216 - DNA, 75 bp, synthetic construct
  source 1..75: mol_type = other DNA
tggcattatgggcaaaagcggggccggtaaatcctcactctgtaatgcactgtttcagggggaggtcaccccggt

SEQ ID NO: 420217 - DNA, 75 bp, synthetic construct
  source 1..75: mol_type = other DNA
catctgcgcaaactcaccagtcacgaacccgtgattggcattatgggtaaaagcggggccggtaaatcctcactc

SEQ ID NO: 420218 - DNA, 75 bp, synthetic construct
  source 1..75: mol_type = other DNA
ccatcgccaccattcatggcaagctggatgctatcgacgcatggagtattcgctcccgcgccgccagcctgctgc

SEQ ID NO: 420219 - DNA, 75 bp, synthetic construct
  source 1..75: mol_type = other DNA
gcacggaatctgtccgcgctcaggccggcactgttgcaaagttagcgatgaggcagccttttgtcttattcaaag

SEQ ID NO: 420220 - DNA, 75 bp, synthetic construct
  source 1..75: mol_type = other DNA
tcagggggaggtcaccccggtcagtgatgttcacgccggcacccgggaagtgcggcgcttccgtctgagtggcca

SEQ ID NO: 420221 - DNA, 75 bp, synthetic construct
  source 1..75: mol_type = other DNA
tgttgcctctgttgcccgtacggttctgcgtgccgtccgtgacacggtggtctctgttgcccgcgctgtatggaa

SEQ ID NO: 420222 - DNA, 75 bp, synthetic construct
  source 1..75: mol_type = other DNA
agcctttgcaatgctctgtttgtcggcgaaatatcgccggtcagcgatgtggcagcctgtacccgtgaacctttg

SEQ ID NO: 420223 - DNA, 75 bp, synthetic construct
  source 1..75: mol_type = other DNA
ccgcccgccggtacgtctggatttccagtggcgcaaaaattcccaaactggcaactggcaggcttacgacatgat

SEQ ID NO: 420224 - DNA, 75 bp, synthetic construct
  source 1..75: mol_type = other DNA
tcacgccggcacccgggaagtgcggcgcttccgtctgagtggacatggtcacagcatggttatcactgacctgcc

SEQ ID NO: 420225 - DNA, 75 bp, synthetic construct
  source 1..75: mol_type = other DNA
ctctgtaatgcactgtttcagggggaggtcaccccggtcagtgatgttcacgccggcacccgggaagtgcagcgc

SEQ ID NO: 420226 - DNA, 75 bp, synthetic construct
  source 1..75: mol_type = other DNA
cctggtactgtggctgattaaagccgatgaccgtgccctgtctgtggatgagtatttctggcgacacatcctgca

SEQ ID NO: 420227 - DNA, 75 bp, synthetic construct
  source 1..75: mol_type = other DNA
tgcccgtctggaaaaagagatggagaagctgaacgcgcaactggcgcaggcggaagagaaactcggcgacagcga

SEQ ID NO: 420228 - DNA, 75 bp, synthetic construct
  source 1..75: mol_type = other DNA
tggtcagtgcgctcatgacagcgcttcccggacatgccgccagtcccctgatgacccgcctgcaggacgggctgc

SEQ ID NO: 420229 - DNA, 75 bp, synthetic construct
  source 1..75: mol_type = other DNA
cctgccatgaatgggatatggccggtattcagccttctcctgcacaggcacagaatattcgcgaaaaaacggagg

SEQ ID NO: 420230 - DNA, 75 bp, synthetic construct
  source 1..75: mol_type = other DNA
cctgccatgaatgggatatggccggcattcagccctctcccgcacaggcacagaacattcgcgaaaaaacggagg

SEQ ID NO: 420231 - DNA, 75 bp, synthetic construct
  source 1..75: mol_type = other DNA
caccctcagcagtaatctgagctataacttcggcgtctataacaaccagttgcgtaacggcgggagcaacacctc

SEQ ID NO: 420232 - DNA, 75 bp, synthetic construct
  source 1..75: mol_type = other DNA
atgctccattcgcgagccagaaccatgttgttattatcgcttcccgccctggcaattgggattgcgtccagtctt

SEQ ID NO: 420233 - DNA, 75 bp, synthetic construct
  source 1..75: mol_type = other DNA
tggcttaccatgtcgcgctgatcaaaggcaccgacgttgaccagccgcgtaacctggcaaaatcggtaacggttg

SEQ ID NO: 420234 - DNA, 75 bp, synthetic construct
  source 1..75: mol_type = other DNA
cagtgatcatggactcccgtcacccggataccctgctggcggcacgttctggtagcccgctggtgattggcctgg

SEQ ID NO: 420235 - DNA, 75 bp, synthetic construct
  source 1..75: mol_type = other DNA
ttgatgaaatggcagctaaagaacaacgctcatcctctaacatggcgcgcatgatcttccttcgcggcctagagc

SEQ ID NO: 420236 - DNA, 75 bp, synthetic construct
  source 1..75: mol_type = other DNA
ttctttttactggcggtgattaaacttgccgcgctggtcgttgccgccgccagtggttttcgcggtgggcgaatt

SEQ ID NO: 420237 - DNA, 75 bp, synthetic construct
  source 1..75: mol_type = other DNA
attctgattgtggtgatgaaaatcgcctcggtattacagaatttgctctggcaacgactgccgggaactctgggg

SEQ ID NO: 420238 - DNA, 75 bp, synthetic construct
  source 1..75: mol_type = other DNA
attcgctggtggacggcgcgacactgacagatgaacagcgccagatcctggctgggtacaccggtgaaggcggca

SEQ ID NO: 420239 - DNA, 75 bp, synthetic construct
  source 1..75: mol_type = other DNA
atcatttcctgtgacgatttctaccgtttccagcagcgcggcatgatcaaaatcactgactcgtacggcgttcag

SEQ ID NO: 420240 - DNA, 75 bp, synthetic construct
  source 1..75: mol_type = other DNA
gccgcgctgactcaatcgtgggtaacagcaatcagggaggccgccaccacagggaaaatcacaccggcaattgcg

SEQ ID NO: 420241 - DNA, 75 bp, synthetic construct
  source 1..75: mol_type = other DNA
acacattgtggtggtgcataacggcatcatcgaaaaccatgaaccgctgcgtgaagagttaaaagcgcgtggcta

SEQ ID NO: 420242 - DNA, 75 bp, synthetic construct
  source 1..75: mol_type = other DNA
cggaagaacatcctctgcatggcggcaccggtattgctcacactcgctgggcgacccacggtgaaccttcagaag

SEQ ID NO: 420243 - DNA, 75 bp, synthetic construct
  source 1..75: mol_type = other DNA
catcctgggcttcggcaccgggctgggtaaaaccacgaccgcgctggcgcttgaggcgttcaactatgagaacgg

SEQ ID NO: 420244 - DNA, 75 bp, synthetic construct
  source 1..75: mol_type = other DNA
atggaatgaatagcgaagagtgtttattctggttcactataaaccaaaataacatcgctgaaaagtatagagaaa

SEQ ID NO: 420245 - DNA, 75 bp, synthetic construct
  source 1..75: mol_type = other DNA
gcacggagtctgtccgctctcaggcccgtgaacagtttaccggtgcggtggaccggatatttgacacagcggaga

SEQ ID NO: 420246 - DNA, 75 bp, synthetic construct
  source 1..75: mol_type = other DNA
acctttctattctggaagataaaaccagagaaccgggatagttatcagttttatcagttcatgcagcattaccat

SEQ ID NO: 420247 - DNA, 75 bp, synthetic construct
  source 1..75: mol_type = other DNA
cacggtcacagcatggttatcactgacctgcccggggtgggcgagagccgggacagggatgcagagtatgaagcc

SEQ ID NO: 420248 - DNA, 75 bp, synthetic construct
  source 1..75: mol_type = other DNA
ctgactgacaacgcgcagttggatctcagcttgcgccaactgctgctgcagctggtggtcaagcgcgaagcgctg

SEQ ID NO: 420249 - DNA, 75 bp, synthetic construct
  source 1..75: mol_type = other DNA
cgcttccgtctgagtggccacggtcacagcatggttatcactgacctgccacggggtgggcgagagccgggacag

SEQ ID NO: 420250 - DNA, 75 bp, synthetic construct
  source 1..75: mol_type = other DNA
gggaggtcaccccggtcagtgatgttcacgccggcacccgggaagtgcagcgcttccgtctgagtggccacggtc

SEQ ID NO: 420251 - DNA, 75 bp, synthetic construct
  source 1..75: mol_type = other DNA
tgttgtcaggataccgacgaagacaggagtactgtgctgtacttgcaggactgcgctcagcaggctgggcaggag

SEQ ID NO: 420252 - DNA, 75 bp, synthetic construct
  source 1..75: mol_type = other DNA
atgctgagacacaacgttcctgtgcggcgggatctggaccagatcgccgccgacaacggtttcgactttcatatc

SEQ ID NO: 420253 - DNA, 75 bp, synthetic construct
  source 1..75: mol_type = other DNA
cagaaaaaatcagttttgatatttataagcatgatattcattttgatgagaaagcttttcaatcagggatgttga

SEQ ID NO: 420254 - DNA, 75 bp, synthetic construct
  source 1..75: mol_type = other DNA
gttccggcccgtacatccggttgtggccgtatcggcctgcaccggctgggaactggatacgctggtcagtgcgct

SEQ ID NO: 420255 - DNA, 75 bp, synthetic construct
  source 1..75: mol_type = other DNA
atgctgagacacaacgttcctgtgcggcgggatctggacggaattcccgccgataacggatttgactttcatatc

SEQ ID NO: 420256 - DNA, 75 bp, synthetic construct
  source 1..75: mol_type = other DNA
gtcaccattttcgacggtcagaataacgtcgttgaccacgctgatggtgattacgccgatgaaccgatgatctac

SEQ ID NO: 420257 - DNA, 75 bp, synthetic construct
  source 1..75: mol_type = other DNA
caatgtcatggcgccgggtgagaagaaactgctgaaacattcactggagcaggatgggttcacgcagcctgtggt

SEQ ID NO: 420258 - DNA, 75 bp, synthetic construct
  source 1..75: mol_type = other DNA
gaagggaaagcgcgaattaagggcgtcgaggcgaccgccaattttgataccggaccactgacgcatactgtgagt

SEQ ID NO: 420259 - DNA, 75 bp, synthetic construct
  source 1..75: mol_type = other DNA
cttcaatgtctgaaattgtcagggacctgtcacgtctgggctggacagatgaacgaattggaacagaggctgggc

SEQ ID NO: 420260 - DNA, 75 bp, synthetic construct
  source 1..75: mol_type = other DNA
attggcacagagctggggatggaccaagatgaagtgctgagactgaaacagattagcgggctgacggagctgttt

SEQ ID NO: 420261 - DNA, 75 bp, synthetic construct
  source 1..75: mol_type = other DNA
cactatctggtggtggatggttttcatcgtcagttactgggcagggaagcaggtacaggaaaacgcctgaaaggc

SEQ ID NO: 420262 - DNA, 75 bp, synthetic construct
  source 1..75: mol_type = other DNA
ggtggtggtgtcagaggagaagaatcattatctggtggtggatggttttcatcgtcagttattgggcagagaatc

SEQ ID NO: 420263 - DNA, 75 bp, synthetic construct
  source 1..75: mol_type = other DNA
cgcgccagggggaaacaccagataacgtcaatgtctgaaattgtcagggacctttcccgtctgggctggacggat

SEQ ID NO: 420264 - DNA, 75 bp, synthetic construct
  source 1..75: mol_type = other DNA
taaccccaatgtcatggcgccgggtgagaagaaactgctgaagcagtcactggagaaagatggtttcacccaacc

SEQ ID NO: 420265 - DNA, 75 bp, synthetic construct
  source 1..75: mol_type = other DNA
acgagcatttgatgtcgctgaaatatgttgccggacgttctggtcgggtggtgatgactgaagagttactgccag

SEQ ID NO: 420266 - DNA, 75 bp, synthetic construct
  source 1..75: mol_type = other DNA
cttcaatgtctgaaattgtcagggacctttcacgtctgggctggacagatgatcgaattggaacagaggctgggc

SEQ ID NO: 420267 - DNA, 75 bp, synthetic construct
  source 1..75: mol_type = other DNA
cttcaatgtctgaaattgtcagggacctatcacgtctgggctggacagatgagcgaattggaacagaggctgggc

SEQ ID NO: 420268 - DNA, 75 bp, synthetic construct
  source 1..75: mol_type = other DNA
cgcgccagggggaaacaccagataacgtcaatgtctgaaattgtcagggacctttcccggctgggctggactgat

SEQ ID NO: 420269 - DNA, 75 bp, synthetic construct
  source 1..75: mol_type = other DNA
ggtgtcagaagagaagaaccattacctggtggtggatggttttcaccgtcagttactggggcgggaagcagatac

SEQ ID NO: 420270 - DNA, 75 bp, synthetic construct
  source 1..75: mol_type = other DNA
gtggtaaaggcggaaaacgtaaaggttcttcgctgcagcagagcttccagaaaccagctcaggctgttaaccgtg

SEQ ID NO: 420271 - DNA, 75 bp, synthetic construct
  source 1..75: mol_type = other DNA
gtatgctgtctccggaactgaaacaacagattatcggtctggcggaagttcgtgacgtgttcaaatcaccgaaat

SEQ ID NO: 420272 - DNA, 75 bp, synthetic construct
  source 1..75: mol_type = other DNA
gtttacttcaatgcgtgcacgtggtgcgcaggcaacggacatcgtagtcctggttgttgctgccgacgacggcgt

SEQ ID NO: 420273 - DNA, 75 bp, synthetic construct
  source 1..75: mol_type = other DNA
gtagaagcgatttccgactccttgctgaaactgtctactgacgaagtaaaagtgaagatcatcggttctggtgta

SEQ ID NO: 420274 - DNA, 75 bp, synthetic construct
  source 1..75: mol_type = other DNA
gcaaattccgtgaagttaaactggcgcgtcagcagaaatctaaactggagaacatgttcgccaacatgactgaag

SEQ ID NO: 420275 - DNA, 75 bp, synthetic construct
  source 1..75: mol_type = other DNA
aagcgatgatgaagctgggtgcaatggcaaccatcaaccaggtcattgaccaggaaaccgcacagttagttgccg

SEQ ID NO: 420276 - DNA, 75 bp, synthetic construct
  source 1..75: mol_type = other DNA
ccctggctgcggcgtccaacgccatcctggttggcttcaacgtacgtgctgatgcctctgcacgtaaagtgattg

SEQ ID NO: 420277 - DNA, 75 bp, synthetic construct
  source 1..75: mol_type = other DNA
agcacgcgaaagcggcgggtgttccggtggtggttgctgtgaacaaaatcgataaaccagaagccgatccggatc

SEQ ID NO: 420278 - DNA, 75 bp, synthetic construct
  source 1..75: mol_type = other DNA
ccctggcggcagcatccaacgctattctggttggctttaacgttcgtgccgatgcatctgcgcgtaaagtgattg

SEQ ID NO: 420279 - DNA, 75 bp, synthetic construct
  source 1..75: mol_type = other DNA
tcgtgaggcagaagaattggccaaacgcgaagcgcaacaaaaagctgaacgtgaggccgcagaacaagctaaacg

SEQ ID NO: 420280 - DNA, 75 bp, synthetic construct
  source 1..75: mol_type = other DNA
gtggaagctatctccgactccttgctgaaactgtctactgacgaagttaaagtgaagatcatcggttctggcgta

SEQ ID NO: 420281 - DNA, 75 bp, synthetic construct
  source 1..75: mol_type = other DNA
cctggttggcttcaacgtacgtgctgatgcctctgcacgtaaagtgattgaatccgaaagcctggatctacgtta

SEQ ID NO: 420282 - DNA, 75 bp, synthetic construct
  source 1..75: mol_type = other DNA
gcggttgggctggacggatgaacatattggtacagagctgggtatggaccaggatgaagtgctgagactgaaaca

SEQ ID NO: 420283 - DNA, 75 bp, synthetic construct
  source 1..75: mol_type = other DNA
cgtcggtgatgctggaaaccattctgttagctgccacagattacgctgtcgggataatcaaacctattttgccgg

SEQ ID NO: 420284 - DNA, 75 bp, synthetic construct
  source 1..75: mol_type = other DNA
tccgcatgatcgcctcccggcggctatattacatgcgcctgatggcagaatgcgtctacgtaatattctgcaaca

SEQ ID NO: 420285 - DNA, 75 bp, synthetic construct
  source 1..75: mol_type = other DNA
ccaaaggtggcgaaggaaaatcaacccagtctgctaatcttgccggttttctggcggatgctggtctccgtactc

SEQ ID NO: 420286 - DNA, 75 bp, synthetic construct
  source 1..75: mol_type = other DNA
gtgttattgaagaaatgtctttcccgatacagcgctttcagacagaccggggaagagtattttttgccgttaaag

SEQ ID NO: 420287 - DNA, 75 bp, synthetic construct
  source 1..75: mol_type = other DNA
ccgtcatgctggaaatgattgtgctgtctgccacggagtctgtggtggggatggtgaatccggttctgccggatg

SEQ ID NO: 420288 - DNA, 75 bp, synthetic construct
  source 1..75: mol_type = other DNA
cagcttggcctgtgaactctttcctgagtggaaaccggcgtttgacgggttgctggaaaacggaggaattcgtca

SEQ ID NO: 420289 - DNA, 75 bp, synthetic construct
  source 1..75: mol_type = other DNA
tgactgagctttccctcctgtcctctaccggtaatgtgatgggcgttgttaaacctatccttccggatgtccgtg

SEQ ID NO: 420290 - DNA, 75 bp, synthetic construct
  source 1..75: mol_type = other DNA
atattgcatgcgcctgatggcagaatgcgtctgcgtaatattctgcaacatccgttattcgcttcttacgatgtg

SEQ ID NO: 420291 - DNA, 75 bp, synthetic construct
  source 1..75: mol_type = other DNA
atgaccagaattgttccaattatatcaacaaaaggcggagctggaaagtcaaccaaagccggtaatatcgcgggt

SEQ ID NO: 420292 - DNA, 75 bp, synthetic construct
  source 1..75: mol_type = other DNA
cttcatgcgccggatggtcgcctccgtctgcgtaatgtgctccagcatccgcttttccagagttatgacgtcatt

SEQ ID NO: 420293 - DNA, 75 bp, synthetic construct
  source 1..75: mol_type = other DNA
aaggtggcgaaggaaaatcaacccagtctgctaatcttgccggttttctggcggatgccggcctccgtaccctgc

SEQ ID NO: 420294 - DNA, 75 bp, synthetic construct
  source 1..75: mol_type = other DNA
caaaaggcggtgaaggtaaatcgactttcgctgcttacctcgctggttttcttgccgatgctggtgtgaagacac

SEQ ID NO: 420295 - DNA, 75 bp, synthetic construct
  source 1..75: mol_type = other DNA
gtatatattatccattgcctgaagcagcaaagaagctgggatgtacgcttaatgatatatatcattttgctgcta

SEQ ID NO: 420296 - DNA, 75 bp, synthetic construct
  source 1..75: mol_type = other DNA
cacgccagagggctgtccgggaaatgcgccgggcggttgcccgctctgtgcgcctgacagccaccgtgcggcact

SEQ ID NO: 420297 - DNA, 75 bp, synthetic construct
  source 1..75: mol_type = other DNA
tgatgccgattacaacacggactggcgaggacgatacagcgaataccgtgtccgggggcacgggcgcggtggtgg

SEQ ID NO: 420298 - DNA, 75 bp, synthetic construct
  source 1..75: mol_type = other DNA
tgcgaccatccgacataaccgggccagggggaaacaccagataacctcaatgtctgatattgtcagggacctttc

SEQ ID NO: 420299 - DNA, 75 bp, synthetic construct
  source 1..75: mol_type = other DNA
atattgaagatggcaaaaataataggtcatccatatgatgatatcgcattccaaggaatttctcatagagcacgt

SEQ ID NO: 420300 - DNA, 75 bp, synthetic construct
  source 1..75: mol_type = other DNA
cagaaagacactgtttttacattggttttactgtctatattccaaaagtagaacgtagagatataagtgtttatg

SEQ ID NO: 420301 - DNA, 75 bp, synthetic construct
  source 1..75: mol_type = other DNA
gtcggccacggtaatgttggcgctggtatcgactggcaaaaacaatccacttcacctggaactggatatctgcca

SEQ ID NO: 420302 - DNA, 75 bp, synthetic construct
  source 1..75: mol_type = other DNA
ccatcagtgatgagcagatcggtcgttaccggccgaaaatcatccttgccgatcatcagattgacaccaccggcg

SEQ ID NO: 420303 - DNA, 75 bp, synthetic construct
  source 1..75: mol_type = other DNA
ttggcagccagatttttaccggctgggtgacggtcagtgtacgacgttctcttgaacatcttgcgggatcattcg

SEQ ID NO: 420304 - DNA, 75 bp, synthetic construct
  source 1..75: mol_type = other DNA
atggaactgctttcaaagcgccaaatctggggcagctatatggtatgtatggtaatccgaatctggctccggaaa

SEQ ID NO: 420305 - DNA, 75 bp, synthetic construct
  source 1..75: mol_type = other DNA
cgagaaggaattcgtgaagcgcctgaaattaatccgcgccgatattcactcacaactggcttcagtaggttgcga

SEQ ID NO: 420306 - DNA, 75 bp, synthetic construct
  source 1..75: mol_type = other DNA
ctgatttcgatgaaggcaacaggcgataacggtagcctgtacaactgcaacgctgaagaggaacgttttgtccgt

SEQ ID NO: 420307 - DNA, 75 bp, synthetic construct
  source 1..75: mol_type = other DNA
cgacactgaaaaagagttcgttaaacggcttaaattaatccgcagggatattcattcactgctcgcgtctgttga

SEQ ID NO: 420308 - DNA, 75 bp, synthetic construct
  source 1..75: mol_type = other DNA
atgttagccttacgcgtagtgatgggaattgcccgcaccatatccgaacgagttacagatctacgccgctcgcca

SEQ ID NO: 420309 - DNA, 75 bp, synthetic construct
  source 1..75: mol_type = other DNA
atcgacatgaaatcggggccgagcaaccagagcgcggaggaaatggagttcatcaggcgtttaattctcattcgc

SEQ ID NO: 420310 - DNA, 75 bp, synthetic construct
  source 1..75: mol_type = other DNA
ctcatcgcactgaaactgaaggacaatggcagtacctatgaatgttcccaggaagaggaactgttcatcaagagg

SEQ ID NO: 420311 - DNA, 75 bp, synthetic construct
  source 1..75: mol_type = other DNA
ctgaatggaaaggcggtgataacggtattaatgaacttctaaacatcggtgttattaacaaaagcgaccttaaaa

SEQ ID NO: 420312 - DNA, 75 bp, synthetic construct
  source 1..75: mol_type = other DNA
gacaaaacattgcaaatctgaaacagagtgcagcacaacaagctttcaaggctccttcttacacctttgcacctg

SEQ ID NO: 420313 - DNA, 75 bp, synthetic construct
  source 1..75: mol_type = other DNA
tgatcgaccatcattagagaaagcaaaagcagaagtagaaaaacttcgtaaacaaatggcggcggtgaaagatat

SEQ ID NO: 420314 - DNA, 75 bp, synthetic construct
  source 1..75: mol_type = other DNA
caattttgtcggctgattttgcccgtctgggtgaagataccgaaaaggctctggcagctggcgctgatgtcgtgc

SEQ ID NO: 420315 - DNA, 75 bp, synthetic construct
  source 1..75: mol_type = other DNA
aatggaaaggcggtgataacgctattaatgaacttctaaacatcggtgttattaacaaaagcgaccttaaaaaat

SEQ ID NO: 420316 - DNA, 75 bp, synthetic construct
  source 1..75: mol_type = other DNA
tgtagctgaacaatacaaagctattgcacaggctagagagatagcaaaacaatatgagcaaggggctatctcgct

SEQ ID NO: 420317 - DNA, 75 bp, synthetic construct
  source 1..75: mol_type = other DNA
actgtcgagcttgatgaggatattgagctgaaatccaaacaggaacgtctctacattcaggttaaaacccgttca

SEQ ID NO: 420318 - DNA, 75 bp, synthetic construct
  source 1..75: mol_type = other DNA
ttctacaccgttccgctgcagctgctggcttaccacgttgcgctgatcaaaggcaccgacgttgaccagccgcgt

SEQ ID NO: 420319 - DNA, 75 bp, synthetic construct
  source 1..75: mol_type = other DNA
cagtgatcatggactcccgtcatccggataccctgctggcggcacgttctggtagtccgctggtgattggcctgg

SEQ ID NO: 420320 - DNA, 75 bp, synthetic construct
  source 1..75: mol_type = other DNA
cgctgattgacgcggatatgccggttatcgtcgtcgcaccgaacaacgaattgctggaaaaactgaaatccaaca

SEQ ID NO: 420321 - DNA, 75 bp, synthetic construct
  source 1..75: mol_type = other DNA
gatgcgggttttgtgagcagtgataatatgcacatcatcgagatgccgcatgtggaagaggtgattgcaccgatc

SEQ ID NO: 420322 - DNA, 75 bp, synthetic construct
  source 1..75: mol_type = other DNA
cggaagaacatcctctgcatggcggcaccgggattgctcacactcgctgggcgacgcacggcgaaccttcagaag

SEQ ID NO: 420323 - DNA, 75 bp, synthetic construct
  source 1..75: mol_type = other DNA
gcggttcgcgagatattactatcgacgccaatttgcctggtctgcgcgtcgataccgtggcgggcgatgatgtgg

SEQ ID NO: 420324 - DNA, 75 bp, synthetic construct
  source 1..75: mol_type = other DNA
agcatgggtgccaacattacggaaagcaggtattcgatacagaaatccatatcaaactaggcatacattcgccac

SEQ ID NO: 420325 - DNA, 75 bp, synthetic construct
  source 1..75: mol_type = other DNA
cagccatatcagccgaggagcaaacctgttttggcttgcagctcaaatggggcataaagggccggagatgctttt

SEQ ID NO: 420326 - DNA, 75 bp, synthetic construct
  source 1..75: mol_type = other DNA
gcaaagactaaattaactgaagtttttggtgcggtcggccggaatgaacaatgcccctgtggctcgggaataaag

SEQ ID NO: 420327 - DNA, 75 bp, synthetic construct
  source 1..75: mol_type = other DNA
atggcaacgggctttacctgggatacacaaaaccgcgagtctgataccgccgcctgccgcgaagtctggcaacat

SEQ ID NO: 420328 - DNA, 75 bp, synthetic construct
  source 1..75: mol_type = other DNA
tgggcgtcgtgcagtttattaaaggcacctggcctaatggcgaacgaaatctgctggagccacacggcgttgagt

SEQ ID NO: 420329 - DNA, 75 bp, synthetic construct
  source 1..75: mol_type = other DNA
atgagtgacgaacgctaccaacaacgtcagcaacgagtgaaagaaaaagtagatgctcgtgtggctcaggcccag

SEQ ID NO: 420330 - DNA, 75 bp, synthetic construct
  source 1..75: mol_type = other DNA
cgatggtggcctgcgtgtctctgcgcggccgcgagcagggccttgcagcggagctgggcggcagcgtagcggcca

SEQ ID NO: 420331 - DNA, 75 bp, synthetic construct
  source 1..75: mol_type = other DNA
tgcgtgctgtgggtgaaagcggatgaggtggtggccaacgattataatcctaatgtcatggcgccaggtgagaag

SEQ ID NO: 420332 - DNA, 75 bp, synthetic construct
  source 1..75: mol_type = other DNA
agactgctgaagcagtcactggagcaggatggtttcacacaaccagtcgtggtatcggaagaaaaagaccattat

SEQ ID NO: 420333 - DNA, 75 bp, synthetic construct
  source 1..75: mol_type = other DNA
gggaaaacgtctgaagggctggctgccggtggtctgtattaatccggagagaaagggacaggcctcacgtattgc

SEQ ID NO: 420334 - DNA, 75 bp, synthetic construct
  source 1..75: mol_type = other DNA
agagggaaacaccagataacttcaatgtctgatattgtcagggacctgtcgcgcctgggctggacggatgaacgc

SEQ ID NO: 420335 - DNA, 75 bp, synthetic construct
  source 1..75: mol_type = other DNA
tgtgtgttatgggtgaaatcggatgaggtggtagccaacgattataatcccaatgtcatggcgccgggtgagaag

SEQ ID NO: 420336 - DNA, 75 bp, synthetic construct
  source 1..75: mol_type = other DNA
attggcacagaactgggaatggaccaggatgaagtgctgagactgaaacagattagcgggctgactgaattattt

SEQ ID NO: 420337 - DNA, 75 bp, synthetic construct
  source 1..75: mol_type = other DNA
cattgctcgcccgtcgatgttgctgggcgatcgtagcaaacagcggatgaacgaaacgctttttgcgccgctgtt

SEQ ID NO: 420338 - DNA, 75 bp, synthetic construct
  source 1..75: mol_type = other DNA
aggcgtgttcaatccccatgatccacaactgaccgacgcgctggcgcaggtcaccgatccgatagatattgtgtt

SEQ ID NO: 420339 - DNA, 75 bp, synthetic construct
  source 1..75: mol_type = other DNA
ctactccgtcatctataacctgatcgatgaagtgaaagcggcgatgagcggtatgctctctccggaactgaaaca

SEQ ID NO: 420340 - DNA, 75 bp, synthetic construct
  source 1..75: mol_type = other DNA
tgaaaggctggctaccgatagcctgtattaatccggagagaaatggacaggccgcacgcattgccgcaaccatac

SEQ ID NO: 420341 - DNA, 75 bp, synthetic construct
  source 1..75: mol_type = other DNA
tccttttgcacaggagcctgtggactgtgtgttgtgggtgaaagcggatgaggtggtggccaacgattacaaccc

SEQ ID NO: 420342 - DNA, 75 bp, synthetic construct
  source 1..75: mol_type = other DNA
tactgggtaacatgattcgtcagtatttcagtcaggtacgaactgaagaggaaaccatacaggctctgaatcatc

SEQ ID NO: 420343 - DNA, 75 bp, synthetic construct
  source 1..75: mol_type = other DNA
gaaacagattagcgggctgacggagctgtttcaggaagaggatttcagcccggcatggactgtttctgggctacc

SEQ ID NO: 420344 - DNA, 75 bp, synthetic construct
  source 1..75: mol_type = other DNA
tgagccgtaactgggtgatgatcccgcatgttactcacttcgacaaaaccgatatcaccgagctggaagcgttcc

SEQ ID NO: 420345 - DNA, 75 bp, synthetic construct
  source 1..75: mol_type = other DNA
ggcgctggtgctggcgtgggcacaggagatgaatctgccgtgcaaaacgttgttgaaagggttggatgaagctat

SEQ ID NO: 420346 - DNA, 75 bp, synthetic construct
  source 1..75: mol_type = other DNA
cggtcaggtgtaccggatccggcgaatacgcgacctgaatggtcagcgccgttttttattgctggaatgtgagga

SEQ ID NO: 420347 - DNA, 75 bp, synthetic construct
  source 1..75: mol_type = other DNA
ccgtacgcagccggattaagttttttttccgtcctgatggtctgcctttttctcctgatgatgcatataagaaag

SEQ ID NO: 420348 - DNA, 75 bp, synthetic construct
  source 1..75: mol_type = other DNA
aacagtcgctgatcaccgttgaaggcgacaaggcttctatggaagttccggcgccgtttgcaggcaccgtgaaag

SEQ ID NO: 420349 - DNA, 75 bp, synthetic construct
  source 1..75: mol_type = other DNA
ctccggcagcaaaagctgaagccccggcagcagcaccggctgcaaaagccgaaggcaaatctgaatttgctgaaa

SEQ ID NO: 420350 - DNA, 75 bp, synthetic construct
  source 1..75: mol_type = other DNA
atgacaacattttcagaaaaatatcagcctgtctttgaagttgtatgccgtattcttgggaacggctggcgtgtt

SEQ ID NO: 420351 - DNA, 75 bp, synthetic construct
  source 1..75: mol_type = other DNA
agaagagattgccgagggcccgctaaagggcaaactggcgcttctggtgaaggtggacgccacggacgaactggt

SEQ ID NO: 420352 - DNA, 75 bp, synthetic construct
  source 1..75: mol_type = other DNA
aggtggtggccaacgattacaatcccaatgtcatggcgccgggtgagaagaaactgctgaagcagtcactggaga

SEQ ID NO: 420353 - DNA, 75 bp, synthetic construct
  source 1..75: mol_type = other DNA
acagcaaccaaccgctggcgcacacggttgtgctgctcaatagtggaggcgacgctacccaggcggccgctattt

SEQ ID NO: 420354 - DNA, 75 bp, synthetic construct
  source 1..75: mol_type = other DNA
taaccatgctgggcggctggtgtgtgttagttgtgttcatatccctgccggggctacgtcagattggctcctggc

SEQ ID NO: 420355 - DNA, 75 bp, synthetic construct
  source 1..75: mol_type = other DNA
atgaaaggcagttacaaaaaaaacgggagcaaacgcaaattctgaaaggaatgctatctcgtttaatacgtcttg

SEQ ID NO: 420356 - DNA, 75 bp, synthetic construct
  source 1..75: mol_type = other DNA
ttctgtgacggcccagcgtatgccggacggcatgatcctgctggagatggcgccgatggataaccagcgccgctt

SEQ ID NO: 420357 - DNA, 75 bp, synthetic construct
  source 1..75: mol_type = other DNA
tggtgtcgatggaactgccggacaacgtgcggttgattcgtgattacgaccccagcctgccggaactggcgcacg

SEQ ID NO: 420358 - DNA, 75 bp, synthetic construct
  source 1..75: mol_type = other DNA
taatacggtgtgttgtccgtattgtggctctgtcgatccctccggttattaccggaataccgatcgtttgctctg

SEQ ID NO: 420359 - DNA, 75 bp, synthetic construct
  source 1..75: mol_type = other DNA
aactggactcccagcacatggatcagcgatctttctgtaattgttactaagaaagccgcgactggtatttctgtt

SEQ ID NO: 420360 - DNA, 75 bp, synthetic construct
  source 1..75: mol_type = other DNA
ttacagatacaacggtttcaattccgataacagccagttactacgtctacgatacaaacaaagttaaatctggcg

SEQ ID NO: 420361 - DNA, 75 bp, synthetic construct
  source 1..75: mol_type = other DNA
aaagaaattgcggcaaagtcaaaacttacagatacaacggtttcaattccgataacggccagttactacgtctac

SEQ ID NO: 420362 - DNA, 75 bp, synthetic construct
  source 1..75: mol_type = other DNA
gaagccgggcgaaggcggtcagttaccgggcgataaagtcacgccttacatcgccaaactgcgctattcggtgcc

SEQ ID NO: 420363 - DNA, 75 bp, synthetic construct
  source 1..75: mol_type = other DNA
ttccagggcgcggtcagccgcattggcggggcaggcttcgaagacttccagcaggatctgctgaatctgtcaaaa

SEQ ID NO: 420364 - DNA, 75 bp, synthetic construct
  source 1..75: mol_type = other DNA
aaacacgctcgaagcgacggtcaaagagctgtgcgataaagccgaaaaaatggtgcgtagcggcaccgtgctgct

SEQ ID NO: 420365 - DNA, 75 bp, synthetic construct
  source 1..75: mol_type = other DNA
ctgcactcggcagaaaccgatgacgatctgaaaagccgccatccatataaagagtggatggagaaaaacgtccgc

SEQ ID NO: 420366 - DNA, 75 bp, synthetic construct
  source 1..75: mol_type = other DNA
tggatatcacctttgacgttagcaaaaccacgcttgaagcgacggttaaagagctgtgcgataaagccgaaaaaa

SEQ ID NO: 420367 - DNA, 75 bp, synthetic construct
  source 1..75: mol_type = other DNA
ctccggcgtatctggtcaatgccgacgtcattcagattaaagtcgcccagggcgcgaagccgggcgaaggcggtc

SEQ ID NO: 420368 - DNA, 75 bp, synthetic construct
  source 1..75: mol_type = other DNA
cggcaatgctgcgatcaatactgcgaagattcaggacggcgcgatcaccaatgccaagattgtaaatggtgcaat

SEQ ID NO: 420369 - DNA, 75 bp, synthetic construct
  source 1..75: mol_type = other DNA
agcattgaacgaaataaatctcgtattactcaggttatcaacttcactactaccgatgcattcagcgcggaagtt

SEQ ID NO: 420370 - DNA, 75 bp, synthetic construct
  source 1..75: mol_type = other DNA
ggactcccagcacatggatcagcgatctttctgtaattgttactaagaaagccgctacgggtatttctgtttctt

SEQ ID NO: 420371 - DNA, 75 bp, synthetic construct
  source 1..75: mol_type = other DNA
caggttaaagctgaactgaaaggcgatatcaccaaagaagttagcgcatctgctactaccctgaaacaagcaatt

SEQ ID NO: 420372 - DNA, 75 bp, synthetic construct
  source 1..75: mol_type = other DNA
cgatccgaaagcggtgataccagtcgttttcggtactacccgcactggcacaaactgtgtttacaaagcagtttc

SEQ ID NO: 420373 - DNA, 75 bp, synthetic construct
  source 1..75: mol_type = other DNA
aggttatcagctttatgactactgacgcgttcactgccgaagtgtgggatgttattagcgttacctatgatgaat

SEQ ID NO: 420374 - DNA, 75 bp, synthetic construct
  source 1..75: mol_type = other DNA
ttggcgtattatctctattgagcgtagcattgattctggtattgctggtattttgtctatcaccgccacagaata

SEQ ID NO: 420375 - DNA, 75 bp, synthetic construct
  source 1..75: mol_type = other DNA
aaatcgaccattacaaagcactgtttatcgataacaaaaatgttcttgttggtaagaacatgacgatccgtgatg

SEQ ID NO: 420376 - DNA, 75 bp, synthetic construct
  source 1..75: mol_type = other DNA
atcgcggtagctccacaagacggatcagaagtttgtccgtttggtatcgaagataacaaggtttatctcgataat

SEQ ID NO: 420377 - DNA, 75 bp, synthetic construct
  source 1..75: mol_type = other DNA
taaccgacaaatcattattccagctatccatcacaatgggtctgttaggaaatatgatagcgcggatttatggga

SEQ ID NO: 420378 - DNA, 75 bp, synthetic construct
  source 1..75: mol_type = other DNA
atcaaacgatccgaaagcggtgataccagttattttcggtgttactcgcactggtacaaactgtgtttacaaagc

SEQ ID NO: 420379 - DNA, 75 bp, synthetic construct
  source 1..75: mol_type = other DNA
taaaatccgtaaccttgaaaccaatgctattgaggctagcactaacggcgtggatcagattttccactacctaac

SEQ ID NO: 420380 - DNA, 75 bp, synthetic construct
  source 1..75: mol_type = other DNA
aggtaacaaggtttatctcgataatgcgatgattcgtaatgcctcaatcggatcagcacagattactgatgctag

SEQ ID NO: 420381 - DNA, 75 bp, synthetic construct
  source 1..75: mol_type = other DNA
ctgactccagttcaatggataacatgctggaactgctgctggcaggcgggatggatatcatccgcgccatgcgtc

SEQ ID NO: 420382 - DNA, 75 bp, synthetic construct
  source 1..75: mol_type = other DNA
gatattaccgaagaacaattaaaaattatgagatttgcaattataaaatctataccaagagcaactcttacagat

SEQ ID NO: 420383 - DNA, 75 bp, synthetic construct
  source 1..75: mol_type = other DNA
tatcaaagaaaatgcttatctggtcgtcggtaatgactccaacttattgatagtgttttatgttcagataatgcc

SEQ ID NO: 420384 - DNA, 75 bp, synthetic construct
  source 1..75: mol_type = other DNA
atataaaagctcatcgaaaatcatcaattgcttgaacagaattaaattaccagagatgaaagaattctcatcaga

SEQ ID NO: 420385 - DNA, 75 bp, synthetic construct
  source 1..75: mol_type = other DNA
cgaattgcccgatccctatgacggtttgattccagggcaggagagtctgaaggttcacgcctgcgttggtctgcc

SEQ ID NO: 420386 - DNA, 75 bp, synthetic construct
  source 1..75: mol_type = other DNA
atgctattcatcgggcggtggtgctggcgagagcgacccgcagcggcgatgaagtgattctcgaggcgcaacatt

SEQ ID NO: 420387 - DNA, 75 bp, synthetic construct
  source 1..75: mol_type = other DNA
cggggaatataacacatatgaagcatataactcagagaatcaatattttaccagagaggactatacgtataatta

SEQ ID NO: 420388 - DNA, 75 bp, synthetic construct
  source 1..75: mol_type = other DNA
tcaaaacaaaacaccacaatctcctgggattatttactaaaaataacgcctgttctaaggaaggtgcgaataagc

SEQ ID NO: 420389 - DNA, 75 bp, synthetic construct
  source 1..75: mol_type = other DNA
tcgaaagttgtttaaatgagcttggagatattaccgaagaacaattaaaaactatgagatttgcaattataaaat

SEQ ID NO: 420390 - DNA, 75 bp, synthetic construct
  source 1..75: mol_type = other DNA
acgccgccgagaaaggcactgatttgcagctttccggcaccacctcagatgtggaagcggggcagactattaccg

SEQ ID NO: 420391 - DNA, 75 bp, synthetic construct
  source 1..75: mol_type = other DNA
tatctggtcattccccaaattaattatactatggatttaaacatagaagactctagctcagaagagttactttca

SEQ ID NO: 420392 - DNA, 75 bp, synthetic construct
  source 1..75: mol_type = other DNA
gtggaaaatgcattatcactggtgattttcaaaaagaattagcgtacttacaaaatgtaattctttataatgatt

SEQ ID NO: 420393 - DNA, 75 bp, synthetic construct
  source 1..75: mol_type = other DNA
cgaaaatcaacaattgcttgaacagaattaaattaccaaagatgaaagaattctcatcaaaaaaatatatgatta

SEQ ID NO: 420394 - DNA, 75 bp, synthetic construct
  source 1..75: mol_type = other DNA
aggcatgacgcaattgaaaaaagagattgagattgtggcggcgtccgatctcaacgtcctgatcagcggtgagac

SEQ ID NO: 420395 - DNA, 75 bp, synthetic construct
  source 1..75: mol_type = other DNA
ccggcgctttctgtgaaattttatccaggtaaaaaatcgctggcagaagcggtaattgctaaagcaaaagctgat

SEQ ID NO: 420396 - DNA, 75 bp, synthetic construct
  source 1..75: mol_type = other DNA
gatttgagcttttttgccaaaacgcacccaaaggtgcggggagaactgctgtacttcccgacgcggatggaccct

SEQ ID NO: 420397 - DNA, 75 bp, synthetic construct
  source 1..75: mol_type = other DNA
tgttcatcagcagtttggcgatacggtaaaagtggtggtgccgatggggtatccgcccaataacgatgtgtatat

SEQ ID NO: 420398 - DNA, 75 bp, synthetic construct
  source 1..75: mol_type = other DNA
gatacgctggatatcacctttgacgtcactaaaaccacgctcgaagcgacggtcaaagagctgtgcgacaaagcc

SEQ ID NO: 420399 - DNA, 75 bp, synthetic construct
  source 1..75: mol_type = other DNA
ccgccagcgcccgtgatccgcaccacttcgccgtgttgctgggtttcggcgcgacggctatttatccgtaccttg

SEQ ID NO: 420400 - DNA, 75 bp, synthetic construct
  source 1..75: mol_type = other DNA
ggtcaacattgctgatgttgaaccggcaagcgaactgtttaaacgctttgataccgccgcgatgtctatcggcgc

SEQ ID NO: 420401 - DNA, 75 bp, synthetic construct
  source 1..75: mol_type = other DNA
tgcgctatcgcgatatggatttcatccagaacgtgttaaacggcatggcaagccgtcgcccacgtctggatgccc

SEQ ID NO: 420402 - DNA, 75 bp, synthetic construct
  source 1..75: mol_type = other DNA
accgaaataccgatcgtctgctttgtctactgacgttactgcctgtgctgattctggctgtcatttcaggcgtca

SEQ ID NO: 420403 - DNA, 75 bp, synthetic construct
  source 1..75: mol_type = other DNA
aaatttactgcaacactacagttttccggggaacgtgcgcgaactggaacatgctattcatcgggcggtagtact

SEQ ID NO: 420404 - DNA, 75 bp, synthetic construct
  source 1..75: mol_type = other DNA
cgcccattacgacgccctcgaaatccgcttctggcagttttatccacggatgatggcacaggcgtcacgcaaggc

SEQ ID NO: 420405 - DNA, 75 bp, synthetic construct
  source 1..75: mol_type = other DNA
ttccggcaatttactggcagatttcgttcgcggaaaccccgatgaaatttatccacccgacgtcgtggctggtat

SEQ ID NO: 420406 - DNA, 75 bp, synthetic construct
  source 1..75: mol_type = other DNA
cgctttccggcaatttactggctgatttcgtacgcggaaatcctgaagaaagttttccgcccgacgtcgtggctg

SEQ ID NO: 420407 - DNA, 75 bp, synthetic construct
  source 1..75: mol_type = other DNA
aacacatatactctcagagcatttcgagaatgttaaaaccaaggttcaaggtactgtagtaatgttttccgcttc

SEQ ID NO: 420408 - DNA, 75 bp, synthetic construct
  source 1..75: mol_type = other DNA
tactattgagcatgctgttaatagcctgtggcttcctgatatgcgcttgtataaaaaaagcccccagtctgaact

SEQ ID NO: 420409 - DNA, 75 bp, synthetic construct
  source 1..75: mol_type = other DNA
gccataaatcactgtctcagctacctcatccacctgccggatgtcaggaataccgcgatactttgtgtccccatc

SEQ ID NO: 420410 - DNA, 75 bp, synthetic construct
  source 1..75: mol_type = other DNA
tctggaaaccgccgccagcggtcagccgaccgaaggcgtgccgggcgaagatgggcttggcaccttgcaggacaa

SEQ ID NO: 420411 - DNA, 75 bp, synthetic construct
  source 1..75: mol_type = other DNA
caacaccatcgccagcgacgatactcttaacgtgagcgaagcgggcgcggggataaccatcagcggtaccaccac

SEQ ID NO: 420412 - DNA, 75 bp, synthetic construct
  source 1..75: mol_type = other DNA
acccgctgagcctggcaacgccacaccatcatttttagttaccgataatcagggcgatcagcgcggtattctttc

SEQ ID NO: 420413 - DNA, 75 bp, synthetic construct
  source 1..75: mol_type = other DNA
ggcgtgatccccaaggttctgaagaatactcgacgataaagcgcgtatggatctacatcactggtgtgaccgatc

SEQ ID NO: 420414 - DNA, 75 bp, synthetic construct
  source 1..75: mol_type = other DNA
agtcaggttcgtactggtggccgcatcggggcgggcaccaagagggcatgttacttgaacagctaaaaactggtg

SEQ ID NO: 420415 - DNA, 75 bp, synthetic construct
  source 1..75: mol_type = other DNA
ggctttccgcgctgtatgccggactgcactggcctgaacgctttggctgtgtattaagccagtcaggatcgtact

SEQ ID NO: 420416 - DNA, 75 bp, synthetic construct
  source 1..75: mol_type = other DNA
aaaactggcgaagttagcgccgaaggtctgcgtattgttctggaggcggggattcgtgagccgctgatcatgcga

SEQ ID NO: 420417 - DNA, 75 bp, synthetic construct
  source 1..75: mol_type = other DNA
ggcgtgacccacaaggttctgaagaacgctcagcgataaagcgcgtatgggtctatatcactggtgttaccgatc

SEQ ID NO: 420418 - DNA, 75 bp, synthetic construct
  source 1..75: mol_type = other DNA
gcgggcgagggcacgctgtttctgcactcgaaatgccgcaagcgcctctgcaaccgggatgggattgtccgcaag

SEQ ID NO: 420419 - DNA, 75 bp, synthetic construct
  source 1..75: mol_type = other DNA
ttacggtgcaacgtgcgtacgagatgaacgccaaaatggtgtcggcagcggacgatatgttgcagtacatcagcc

SEQ ID NO: 420420 - DNA, 75 bp, synthetic construct
  source 1..75: mol_type = other DNA
tcctgatggcgattttgcagtaaatactctcgaagttgatgtatcttctgctcgaggtattgggaggattgttgc

SEQ ID NO: 420421 - DNA, 75 bp, synthetic construct
  source 1..75: mol_type = other DNA
atgacagacattacagccaatgttgtagtgagtatgccttcgcaactcttcactatggcgcgttcttttaaagca

SEQ ID NO: 420422 - DNA, 75 bp, synthetic construct
  source 1..75: mol_type = other DNA
cctttgacaaggtatgtggtgataaaaggggcctccttgccgtcacccaaaaacaaaacggtatgtttatgcgct

SEQ ID NO: 420423 - DNA, 75 bp, synthetic construct
  source 1..75: mol_type = other DNA
gccggaaggctatatagcccgtccgttttatcgctggggcgatgctgtgggcataaagggtaatctgccggaatt

SEQ ID NO: 420424 - DNA, 75 bp, synthetic construct
  source 1..75: mol_type = other DNA
cgtttcagcgtcgataaaacgcccaacgagccgaaccgctttggctgggtggtggagattgacccctacgatccg

SEQ ID NO: 420425 - DNA, 75 bp, synthetic construct
  source 1..75: mol_type = other DNA
cataaaattagccatgatgtttttgaaccttatcccgcggcgttacatggtcaatttgattccatttccatgttt

SEQ ID NO: 420426 - DNA, 75 bp, synthetic construct
  source 1..75: mol_type = other DNA
tccacactttctggaacatgtaggtaacaaccatctggatattggtgttggaactgggttttaccttactcacgt

SEQ ID NO: 420427 - DNA, 75 bp, synthetic construct
  source 1..75: mol_type = other DNA
aggcttaacacatatactctcagagcatttcgagaatgttaaaaccaagattaaaggtactgtagtaatgttttc

SEQ ID NO: 420428 - DNA, 75 bp, synthetic construct
  source 1..75: mol_type = other DNA
tttggtgaggacggcacggtgacggcgatcttacccggcgacagcgacgtgaccgagttagggcaactgacgctg

SEQ ID NO: 420429 - DNA, 75 bp, synthetic construct
  source 1..75: mol_type = other DNA
caatagcttcggtcaaaaactgatgcgcatttacaatcagaaaggcatcttttcaaacacaaaagattccgaaga

SEQ ID NO: 420430 - DNA, 75 bp, synthetic construct
  source 1..75: mol_type = other DNA
cctgctgccgtcagtctctatctcgctggcggtatggcgttacagtggctgctggggccactttccgacaggatt

SEQ ID NO: 420431 - DNA, 75 bp, synthetic construct
  source 1..75: mol_type = other DNA
ctgaagaagacaaactggtggtagcgcgcgctcgtaagatccagcgtttcctgtcccagccgttcttcgtggcag

SEQ ID NO: 420432 - DNA, 75 bp, synthetic construct
  source 1..75: mol_type = other DNA
agagctggtggcagtcgaaacatggcccggaatggcagcgtctgaatgacgaaatatatcaggtcactttctggt

SEQ ID NO: 420433 - DNA, 75 bp, synthetic construct
  source 1..75: mol_type = other DNA
cagctttaccactgaccacgtattaccggttaccgcgcgttctatcgcaatcgtcattccgccgattggtctggg

SEQ ID NO: 420434 - DNA, 75 bp, synthetic construct
  source 1..75: mol_type = other DNA
ctcagctttatccgcagggtaaaaccgccatgttccttgcctttatggggatcagtgaaggtgcgattccgtttg

SEQ ID NO: 420435 - DNA, 75 bp, synthetic construct
  source 1..75: mol_type = other DNA
ttaaccggcaaacgcctgttcaacgcacaactttatccgcagggtaagaccgcgatgttccttgcctttatgggg

SEQ ID NO: 420436 - DNA, 75 bp, synthetic construct
  source 1..75: mol_type = other DNA
ccagtggagtggctgacagataatggttcatgctaccgggctaatgaaacacgcctgtccgctcggatgttggga

SEQ ID NO: 420437 - DNA, 75 bp, synthetic construct
  source 1..75: mol_type = other DNA
acaaagcggctggattcgttgctttcagctttaccactgaccatgttttacccgttacagcgcgctctattgcca

SEQ ID NO: 420438 - DNA, 75 bp, synthetic construct
  source 1..75: mol_type = other DNA
ggcgatgtactacgtcatcaccccctttggtggctggatcaacggcggtatccgtaccgtgctgactgccgcagg

SEQ ID NO: 420439 - DNA, 75 bp, synthetic construct
  source 1..75: mol_type = other DNA
gaacttctccgtaaagataaagccctggcggaagcagctgctcttttgatgttaagggaaaagttcaatgccctc

SEQ ID NO: 420440 - DNA, 75 bp, synthetic construct
  source 1..75: mol_type = other DNA
tggtccatgatccgtaatgcctcaatcggcacagcccagattactgatgcggcaatcaccacggctaaaatcggc

SEQ ID NO: 420441 - DNA, 75 bp, synthetic construct
  source 1..75: mol_type = other DNA
aaattgatgcaatgcataaacagattactaccgagacagggcagacggtccaagcctcagccgatactctcaaga

SEQ ID NO: 420442 - DNA, 75 bp, synthetic construct
  source 1..75: mol_type = other DNA
aatttaccggtttcgacctctcgttactgaaatttgcctggctgtcgcagtcgtttggcggcgtgctatttggct

SEQ ID NO: 420443 - DNA, 75 bp, synthetic construct
  source 1..75: mol_type = other DNA
gtccgctatctgggcatggccgctggtcactaacctgggcgtctatatggcggggatcgcgctgggggcagtcat

SEQ ID NO: 420444 - DNA, 75 bp, synthetic construct
  source 1..75: mol_type = other DNA
accagcgaacaaaaggcgcgttcccgtcaacatacgcgcttgcagcaaagattgattacctgttgcagcaggaaa

SEQ ID NO: 420445 - DNA, 75 bp, synthetic construct
  source 1..75: mol_type = other DNA
ggcaatctgctgtcaccgcacgtctggctgtggtcggtgctgggcaccagtctgtatgctttcgggattggtttg

SEQ ID NO: 420446 - DNA, 75 bp, synthetic construct
  source 1..75: mol_type = other DNA
tttcgacagcaagctggcggaactgggcggtgaacgcctgctcgaccgtgtcgatgccgatgttgaataccaggc

SEQ ID NO: 420447 - DNA, 75 bp, synthetic construct
  source 1..75: mol_type = other DNA
tcttcggcaatccgcactttacggaagatttcctctaccaggtggaatggcagcgttatgtcaaagagggcgtgc

SEQ ID NO: 420448 - DNA, 75 bp, synthetic construct
  source 1..75: mol_type = other DNA
actgctgtggctgaaaggcgatgaaactgtcaccgttgacggcaaaacgctgaccctgagcgaagcgctccagtg

SEQ ID NO: 420449 - DNA, 75 bp, synthetic construct
  source 1..75: mol_type = other DNA
gcccaggtactggtattgcgccgttccgcgcctttatgcagcaacgtgccgccgacgaagcgccgggcaaaaact

SEQ ID NO: 420450 - DNA, 75 bp, synthetic construct
  source 1..75: mol_type = other DNA
aagtccgcgtatttatcgaacataacgacaacttccgcctgcccgctaacccgcaaacgccagtgattatgattg

SEQ ID NO: 420451 - DNA, 75 bp, synthetic construct
  source 1..75: mol_type = other DNA
gccgacgaagcaccgggtaaaaactggctgttctttggcaacccgcactttacggaagatttcctctaccaggtg

SEQ ID NO: 420452 - DNA, 75 bp, synthetic construct
  source 1..75: mol_type = other DNA
gccagtatggcattgtaatcagctcattcgttacatgtcagatcaaaatatctgttcaatggatgtaagattgta

SEQ ID NO: 420453 - DNA, 75 bp, synthetic construct
  source 1..75: mol_type = other DNA
tcccgtgaaaaaagaaattaagtggaaaggccgtgacaggaaagagcatatcgcaaccgtctatgtgcgcccgat

SEQ ID NO: 420454 - DNA, 75 bp, synthetic construct
  source 1..75: mol_type = other DNA
ccgccacactgtttttcccgatggcgttgattttgtatgactttgccgcctatctttcgacggacctgatccagc

SEQ ID NO: 420455 - DNA, 75 bp, synthetic construct
  source 1..75: mol_type = other DNA
gcaaaccgtcaccgtcacctttggcggcaaaacctacacctccacggtggcggctaacggtagctggagcaccac

SEQ ID NO: 420456 - DNA, 75 bp, synthetic construct
  source 1..75: mol_type = other DNA
acggcctgctccaaccgccggccgcgcgctgggccgaggccgtggcgcgtgtcggcgtaccggccgtcgtcacac

SEQ ID NO: 420457 - DNA, 75 bp, synthetic construct
  source 1..75: mol_type = other DNA
acaaaacatttcaggatatagttaaaaatctggtgttaccgcttctgtcgggcattattattcctcttgtcaaat

SEQ ID NO: 420458 - DNA, 75 bp, synthetic construct
  source 1..75: mol_type = other DNA
ccagcttgcgcaggttgaagtatgtggtatcaagcgcgacgtgaatatcgccctgatttgtgaaggtaaccctgc

SEQ ID NO: 420459 - DNA, 75 bp, synthetic construct
  source 1..75: mol_type = other DNA
cgataccgatgtttacccagtaccggtaatcaactatgaaggcgataacttctggttccgtggcttaggtggtgg

SEQ ID NO: 420460 - DNA, 75 bp, synthetic construct
  source 1..75: mol_type = other DNA
aaaccagaacgaatactattatggcgtatcgcgtaaagagtctgcgcgcagcggtctgcgtggctataacccgaa

SEQ ID NO: 420461 - DNA, 75 bp, synthetic construct
  source 1..75: mol_type = other DNA
cccggatacggagtgtctggtggagcaggcactggcgcggttgcctgaacaaccttgccgtattctcgatctcgg

SEQ ID NO: 420462 - DNA, 75 bp, synthetic construct
  source 1..75: mol_type = other DNA
tgcgggactgattaaacaactttccgcaaatgtggcggtatggttaatgacggaggaagaaaaacgcgctgaaca

SEQ ID NO: 420463 - DNA, 75 bp, synthetic construct
  source 1..75: mol_type = other DNA
gtgcacgtcgggtttgccatgagcatcatcgatgaagatgaagccaaagccacattagacgcgctgcgcaatatg

SEQ ID NO: 420464 - DNA, 75 bp, synthetic construct
  source 1..75: mol_type = other DNA
atgaaacacttatccccccgtgcagccactgcggataataatcgtatcgttacaattgaagacgtttacacaatc

SEQ ID NO: 420465 - DNA, 75 bp, synthetic construct
  source 1..75: mol_type = other DNA
attgaaactggcgctgacgcgattgtcgtctcctctatctatgggcatggcgatatcgactgtctgggcatgcgc

SEQ ID NO: 420466 - DNA, 75 bp, synthetic construct
  source 1..75: mol_type = other DNA
tcgaaagttgtttaaatgagcttggagatttaaccgaagatcaattaaaaatcatgagatatgcgattataaaat

SEQ ID NO: 420467 - DNA, 75 bp, synthetic construct
  source 1..75: mol_type = other DNA
aatcgtcttaagtctctggagaaatcagaacgtaagaaagttgaaacaaggctaaagattattcttggtgcggaa

SEQ ID NO: 420468 - DNA, 75 bp, synthetic construct
  source 1..75: mol_type = other DNA
aaccgccttaagtctctggaaaaatcagagcgaaagaaagttgaaacaaggctaaaaattatacttggtgcggaa

SEQ ID NO: 420469 - DNA, 75 bp, synthetic construct
  source 1..75: mol_type = other DNA
gaacagaaaaaacattaaaacaaaaggtggcttttgctcagcttgaactaaaccgccttaagtctctggaaaaat

SEQ ID NO: 420470 - DNA, 75 bp, synthetic construct
  source 1..75: mol_type = other DNA
aggctactgccgcgacgatagccacgagctcaggtttcggttatatgcattactgggagccaggctggtttgaat

SEQ ID NO: 420471 - DNA, 75 bp, synthetic construct
  source 1..75: mol_type = other DNA
tttgcccgtactctgtgtgatatcgattacgcacatatgccagatcttgccccgacgcgggaaatgtttgagcga

SEQ ID NO: 420472 - DNA, 75 bp, synthetic construct
  source 1..75: mol_type = other DNA
ttcgaacgtaaacctatttactggatcatgagcgaagtagccaaacgtctcggtccagacgtctatcagaagttc

SEQ ID NO: 420473 - DNA, 75 bp, synthetic construct
  source 1..75: mol_type = other DNA
tatctggaattatgccggtaacacgttggttaatcagcattctgatatcaataagactcacgacatcctgcaaga

SEQ ID NO: 420474 - DNA, 75 bp, synthetic construct
  source 1..75: mol_type = other DNA
ggaacacgactggaattagcgcgattattggcggatatcgaacctggcacacatgtttatacctgtggccccgag

SEQ ID NO: 420475 - DNA, 75 bp, synthetic construct
  source 1..75: mol_type = other DNA
ggaacctgcgaaacagcaatactggaaggtgaagctgaccatcgggatcagtattttagcgatgaagagcgagcc

SEQ ID NO: 420476 - DNA, 75 bp, synthetic construct
  source 1..75: mol_type = other DNA
aaggtgaagccgatcatcgggaccagtattttagcgatgaagagcgcgccagccagcagagtatgttgatctgtt

SEQ ID NO: 420477 - DNA, 75 bp, synthetic construct
  source 1..75: mol_type = other DNA
ggcaatgaggctgtatatattcagtactcttcggggattgttggcggcaatatgacccgctcttcaccatcagcc

SEQ ID NO: 420478 - DNA, 75 bp, synthetic construct
  source 1..75: mol_type = other DNA
tgatatgccgctgaattttccagcgttcagtgacgtactctcgccattagccaagcgtgcacccacgttcgctat

SEQ ID NO: 420479 - DNA, 75 bp, synthetic construct
  source 1..75: mol_type = other DNA
aggttgccgccgcgacgttagctgcgggatctggtttcggttatatacattacatggaaccaggctggcttgaat

SEQ ID NO: 420480 - DNA, 75 bp, synthetic construct
  source 1..75: mol_type = other DNA
gatcaaccttttctcgataaatactgcgtcggctatgacgaaaaaaccttacccgcagatgcaccaaaaaatggt

SEQ ID NO: 420481 - DNA, 75 bp, synthetic construct
  source 1..75: mol_type = other DNA
tcaataatcggccgtctgatgaattgttatggcggctaccttagccattatggctcctacagtacggcccagata

SEQ ID NO: 420482 - DNA, 75 bp, synthetic construct
  source 1..75: mol_type = other DNA
gatgttgcctattctgacgggcaatgtcggcatcagcggcggaaatagtggcgcgcgtgaatcgacctataccat

SEQ ID NO: 420483 - DNA, 75 bp, synthetic construct
  source 1..75: mol_type = other DNA
atgttcccggtttcatcaataggtaatgacttaggtaatgatttagtacgtataaaaatgaatgacattcctgaa

SEQ ID NO: 420484 - DNA, 75 bp, synthetic construct
  source 1..75: mol_type = other DNA
tatcaagaagcgtatcaagaagtaagacaggaggtaagtcaggaattcgcccagcgtcttctgagtaaaggaatg

SEQ ID NO: 420485 - DNA, 75 bp, synthetic construct
  source 1..75: mol_type = other DNA
ccaacgttttctgaataaagggatgtctcgggaagacgttgcagaggtgacagctttatctcttgcagagattga

SEQ ID NO: 420486 - DNA, 75 bp, synthetic construct
  source 1..75: mol_type = other DNA
caacgcggtcatactgaacaagcggatttgttttatggtgtgctgagagacagggaaacgggaggggagtctatg

SEQ ID NO: 420487 - DNA, 75 bp, synthetic construct
  source 1..75: mol_type = other DNA
tccctgtattttctctgcccgcttttctaccgatttgcgcaattctctcagttactggtgcctccctgttaacgc

SEQ ID NO: 420488 - DNA, 75 bp, synthetic construct
  source 1..75: mol_type = other DNA
gccctgaatttatctggcgcttttactcctgccagaaacgtcactatcacttcgttatcgcaccaacagaagatg

SEQ ID NO: 420489 - DNA, 75 bp, synthetic construct
  source 1..75: mol_type = other DNA
ttttctaccgattcgcgcaattctctcagttactggtgcctccctgttaacgcttctgctcaggagggactatga

SEQ ID NO: 420490 - DNA, 75 bp, synthetic construct
  source 1..75: mol_type = other DNA
cggtgcggtaattgacttgtttgaattagacctcacgcccctgggtggcgagattatccgcttccattccggcgc

SEQ ID NO: 420491 - DNA, 75 bp, synthetic construct
  source 1..75: mol_type = other DNA
taacgatttcaacgacctgcgaggaatgaaagttacacgccgccaggtggaagtaaaatacctggacgccatcaa

SEQ ID NO: 420492 - DNA, 75 bp, synthetic construct
  source 1..75: mol_type = other DNA
gatccatctattgaggctgtatctttttacgtcgttgaagcaatgagcgaagaaacagcggatcaggtgcagtat

SEQ ID NO: 420493 - DNA, 75 bp, synthetic construct
  source 1..75: mol_type = other DNA
tcagtttccgccgtatttatgaatatgctggcggcgactggcaggaagataacggtgtctggcaccagaacgtgt

SEQ ID NO: 420494 - DNA, 75 bp, synthetic construct
  source 1..75: mol_type = other DNA
ttcctgaattaattgcagcgtccgccattaagcttactgaagagatttaccctcctcaaaaatcttcacaaaatt

SEQ ID NO: 420495 - DNA, 75 bp, synthetic construct
  source 1..75: mol_type = other DNA
acccaatcgaggctactggcttcgaaatgaaaaacgaaggcgtttactcgcgcccgcaaatggtagtagccaaca

SEQ ID NO: 420496 - DNA, 75 bp, synthetic construct
  source 1..75: mol_type = other DNA
tccctgcattttctctgcccgtttttccactgatttgcgcaactctctcagttactggtgtctccctgttaacgc

SEQ ID NO: 420497 - DNA, 75 bp, synthetic construct
  source 1..75: mol_type = other DNA
atggttacgctttggggaaattatgaggggatctctcaggacacagtaccggatgatgttaagaggctatatact

SEQ ID NO: 420498 - DNA, 75 bp, synthetic construct
  source 1..75: mol_type = other DNA
agagaaattacgccgtgagagagcattagcggatgcagccgaacgagagaaccaggaagcgatgaatctcctgat

SEQ ID NO: 420499 - DNA, 75 bp, synthetic construct
  source 1..75: mol_type = other DNA
aattaacgccgctaagaaatggcaagaacgaggaatgccatttaataccaatacacgacgcgtaccagccaaaga

SEQ ID NO: 420500 - DNA, 75 bp, synthetic construct
  source 1..75: mol_type = other DNA
ccgtgtggcgctggcgcttaacctgggcgatacgctggcgcaggaagattttaaccagatagccaccgggctgat

SEQ ID NO: 420501 - DNA, 75 bp, synthetic construct
  source 1..75: mol_type = other DNA
gtctgcatgacaaagcgggtatcgggattgtcctggcgggtatgcctcaccttctgattaaccttaagggccgtt

SEQ ID NO: 420502 - DNA, 75 bp, synthetic construct
  source 1..75: mol_type = other DNA
ccgcgtggcgctggcgcttaacctgggcgacacgctggcgcaggaagattttaaccagatagccaccgggctgat

SEQ ID NO: 420503 - DNA, 75 bp, synthetic construct
  source 1..75: mol_type = other DNA
cgcagatccgattgtcgcatactgccaggaagacgtaaccctggaagcggaagactttatccgcgttcgcgtcgc

SEQ ID NO: 420504 - DNA, 75 bp, synthetic construct
  source 1..75: mol_type = other DNA
ctaatggaaacttcattaatcaaggagcgcgttctcaatattttcaagataataatggtcctgtgaatattgata

SEQ ID NO: 420505 - DNA, 75 bp, synthetic construct
  source 1..75: mol_type = other DNA
ttgatattcaatttgcatctcatcaagcactattaatcaatagtgtagaacatgtacttgcactagcgaaaagac

SEQ ID NO: 420506 - DNA, 75 bp, synthetic construct
  source 1..75: mol_type = other DNA
gaagaagggcgcgaattcgcaattcttcttcctgaaggtacttacaccaaagacgcaggaatcaccattggtgct

SEQ ID NO: 420507 - DNA, 75 bp, synthetic construct
  source 1..75: mol_type = other DNA
ttgatggtaaatccattaccgaaacctatgcagcaggcgaagaagtattgccgggtaaactggttaaactggttg

SEQ ID NO: 420508 - DNA, 75 bp, synthetic construct
  source 1..75: mol_type = other DNA
cgaatgtacagatggtcgatattcacggtggcgatggtcaatatgaaagccataaaggttatcagttctggccga

SEQ ID NO: 420509 - DNA, 75 bp, synthetic construct
  source 1..75: mol_type = other DNA
gcccgatgctgtcgccctggcacaacgtaatgcccagcatctggctatcaaaaatatccacattctgcaaagcga

SEQ ID NO: 420510 - DNA, 75 bp, synthetic construct
  source 1..75: mol_type = other DNA
atccacgcgggatatcatgacgtcgaaacctgtcgggactatggtgataacgagcgcgtaacgctcggccgctat

SEQ ID NO: 420511 - DNA, 75 bp, synthetic construct
  source 1..75: mol_type = other DNA
ggttctaactatattataaatgaaataagtatggaacctttattaaatataatatttactattttattaaatgcc

SEQ ID NO: 420512 - DNA, 75 bp, synthetic construct
  source 1..75: mol_type = other DNA
tcattagctcaggttctaattgatagtggatttagtgcagcattaattagaaaatcggagcgtactgaaaaagat

SEQ ID NO: 420513 - DNA, 75 bp, synthetic construct
  source 1..75: mol_type = other DNA
atgcaggcgggttatcgtgatgtcgaaacctgccgggactacggtgataacgagcgcgtgacgcttggtcgctat

SEQ ID NO: 420514 - DNA, 75 bp, synthetic construct
  source 1..75: mol_type = other DNA
gtctgcgtaaaactcaggcgattcccgcgttgcctgcgccgaaatataaagtgggcaatttcccgtttaccgtag

SEQ ID NO: 420515 - DNA, 75 bp, synthetic construct
  source 1..75: mol_type = other DNA
attcaggaagccagttcaatgttgcccgtcgccgccttgtttgctgacggtaatgcaccacagcgggtgatggat

SEQ ID NO: 420516 - DNA, 75 bp, synthetic construct
  source 1..75: mol_type = other DNA
ttaaactgggatgaaaacctgcgactctggcagcgcgacaaagaagtgtggttgtttccggtagacattgaagcc

SEQ ID NO: 420517 - DNA, 75 bp, synthetic construct
  source 1..75: mol_type = other DNA
aagcgactggtttagcgcgctagccgggcagcagtttgcgatgattgtcagcaatccgccgtatattgacgagca

SEQ ID NO: 420518 - DNA, 75 bp, synthetic construct
  source 1..75: mol_type = other DNA
cccggatactgaatgtctggtagaacaggcgctggtacgcttgcctgagcagccttgtcgcattctcgatctcgg

SEQ ID NO: 420519 - DNA, 75 bp, synthetic construct
  source 1..75: mol_type = other DNA
cggcagacagcggtatggcggatatcgttcacatcatcgaaaagtctcgtaacgcactgacatctggcggatttc

SEQ ID NO: 420520 - DNA, 75 bp, synthetic construct
  source 1..75: mol_type = other DNA
ttgctgccggtctggtatttggtctgtggcgcgtggtttcgcaggcagggaactatctgggctcatccattaaca

SEQ ID NO: 420521 - DNA, 75 bp, synthetic construct
  source 1..75: mol_type = other DNA
gcagtttaattatggggtttttttatcggatacaaatccaatattatcagaacattataatttgaataaagctat

SEQ ID NO: 420522 - DNA, 75 bp, synthetic construct
  source 1..75: mol_type = other DNA
gagaaaagcagaagccttttgcctggaattcagataaagataaagagaatatgcaacgtctgagggatgctgcaa

SEQ ID NO: 420523 - DNA, 75 bp, synthetic construct
  source 1..75: mol_type = other DNA
ttcggtgaggctctggcgcaggaaagagaaaagcagaagccttttgcctggaattcagataaagataaagagaat

SEQ ID NO: 420524 - DNA, 75 bp, synthetic construct
  source 1..75: mol_type = other DNA
gcgatagattacacaccgacctggaccaccaccagcaaatccaccgcatgggggctgacctacggcctcgacaca

SEQ ID NO: 420525 - DNA, 75 bp, synthetic construct
  source 1..75: mol_type = other DNA
ttattggatggaattcgctgtaaataacggtaatattgatgcaaagagcaaacttcaagagctcaaaaagctaaa

SEQ ID NO: 420526 - DNA, 75 bp, synthetic construct
  source 1..75: mol_type = other DNA
agaaaagttgatgaaactgaagtataaatcacaacatggtgattcagaggcatcatttcgactatatcaatatta

SEQ ID NO: 420527 - DNA, 75 bp, synthetic construct
  source 1..75: mol_type = other DNA
ggcggcatttaatggcgtggccacgcttatcggcacatccacatgggactccctgtttcatattgtgggattctt

SEQ ID NO: 420528 - DNA, 75 bp, synthetic construct
  source 1..75: mol_type = other DNA
actgaaaggctatgtgttctcccttgtttatctgcagagctggccaccactgtatgccattctgaactacgcgat

SEQ ID NO: 420529 - DNA, 75 bp, synthetic construct
  source 1..75: mol_type = other DNA
tctgcatgatggtaaatcggcgatttccagtctggcgacggatatccagtttggccgcatgctcagcagcagcta

SEQ ID NO: 420530 - DNA, 75 bp, synthetic construct
  source 1..75: mol_type = other DNA
caccatccagcagactcacagtgatatcgggttgatggcagcctggctgtcaaattcaattccgtttattgctgc

SEQ ID NO: 420531 - DNA, 75 bp, synthetic construct
  source 1..75: mol_type = other DNA
caacaaaaacagcaggtggtggcattctgcatgatggtaaatcggcgacttccagtctggcgacggatattcagt

SEQ ID NO: 420532 - DNA, 75 bp, synthetic construct
  source 1..75: mol_type = other DNA
ctggagttagcggaggggggaaactgtataccgatttggggtatacaggtacgaatggctcggcgcatggcatta

SEQ ID NO: 420533 - DNA, 75 bp, synthetic construct
  source 1..75: mol_type = other DNA
gcgtgaactggtgcgcgatgggaaactttttaccggtaacgccagacagcgcacaaaaaaagcgcactttttgac

SEQ ID NO: 420534 - DNA, 75 bp, synthetic construct
  source 1..75: mol_type = other DNA
tgcctctgaacgaagcgctacagtggcacttcgaactgaccgtcaacaccgccaacattgttgagaactatgcca

SEQ ID NO: 420535 - DNA, 75 bp, synthetic construct
  source 1..75: mol_type = other DNA
cgcctgtcgcggcaccttcgcaatccgtcgctactggcacggtaaatgaaatccacaccagcccgtatagcaaag

SEQ ID NO: 420536 - DNA, 75 bp, synthetic construct
  source 1..75: mol_type = other DNA
atgacaatactcgtgacggcacagactcaactcatagttggtgaggctatggcgataaaaagtttagctcctgat

SEQ ID NO: 420537 - DNA, 75 bp, synthetic construct
  source 1..75: mol_type = other DNA
tgaggattctcggtgctatgtggatggtggcgacgttcattgtggttgccagcagttttgtccggttggtaggcg

SEQ ID NO: 420538 - DNA, 75 bp, synthetic construct
  source 1..75: mol_type = other DNA
agcagttttgtccggttggtaggcgaaggtaaagacctggtgggtgtgcttttcggtagcattttcctgtgggtg

SEQ ID NO: 420539 - DNA, 75 bp, synthetic construct
  source 1..75: mol_type = other DNA
tttcggtagcattttcctgtgggtgattctcggtgttgcgcctgtcgctgtagcaaaaaatggcgtggcgttttg

SEQ ID NO: 420540 - DNA, 75 bp, synthetic construct
  source 1..75: mol_type = other DNA
cctcatctgaagttatgaactatgacccgtatctgacgttgtacggacgcatggcaaaacaaactgttctattaa

SEQ ID NO: 420541 - DNA, 75 bp, synthetic construct
  source 1..75: mol_type = other DNA
gagctatggcttgccggaatgcttatctcagcagaaattatcagtattgaacccgctacaaacatacggctctga

SEQ ID NO: 420542 - DNA, 75 bp, synthetic construct
  source 1..75: mol_type = other DNA
ctaccttactttcatgcctttatgacgaacagcatcccatcggcaatctggggcgcggaacccattattcaatat

SEQ ID NO: 420543 - DNA, 75 bp, synthetic construct
  source 1..75: mol_type = other DNA
aacgtagtaaacctgtctttaggtttctctcacccagttgaccatcagctgccagcgggaatcactgctgaatgt

SEQ ID NO: 420544 - DNA, 75 bp, synthetic construct
  source 1..75: mol_type = other DNA
gcttcgatgccgtacagggcaaacagctggtgctctcgccggatgcgcgagatggttcgctgaaagtgcatcagg

SEQ ID NO: 420545 - DNA, 75 bp, synthetic construct
  source 1..75: mol_type = other DNA
aacgtggtcatgcaaatcatggctggctggactcctggcatactttctcttttgccaactattacgatccgaact

SEQ ID NO: 420546 - DNA, 75 bp, synthetic construct
  source 1..75: mol_type = other DNA
tttaggtagcattttcctgtgggggattatcggtgttatgcctgttgtcgtagcaaaaatagcgtggcgttttgt

SEQ ID NO: 420547 - DNA, 75 bp, synthetic construct
  source 1..75: mol_type = other DNA
tttgggaaactaattttgttcgcatccttggcaacgcagttactttttttgcgcatgccatgtggcaacatttct

SEQ ID NO: 420548 - DNA, 75 bp, synthetic construct
  source 1..75: mol_type = other DNA
cagtgggatatctcccgagatgcgccttacttcggttttgaaattccgaacgcgccgggcaaatatttctacgtc

SEQ ID NO: 420549 - DNA, 75 bp, synthetic construct
  source 1..75: mol_type = other DNA
gttcagtcgctgcctcctgaattgatgcgagctggccgctgggaccgagcattcttcattgatctgccaagtgtg

SEQ ID NO: 420550 - DNA, 75 bp, synthetic construct
  source 1..75: mol_type = other DNA
caccgctgggaacgcgtctggtattaacgacggtgctgccgctctggtgattatggaagaatctgcggcgctggc

SEQ ID NO: 420551 - DNA, 75 bp, synthetic construct
  source 1..75: mol_type = other DNA
taaaagtgtggcgcttgccgcccaggcaattcaggcaggtcaggcgcagagcattgtggcggggggtatggaaaa

SEQ ID NO: 420552 - DNA, 75 bp, synthetic construct
  source 1..75: mol_type = other DNA
cttcctcatcaggtaacaagcgtgcataccggaaaggtaacccggttccggccagagagaggcaaagggcttctc

SEQ ID NO: 420553 - DNA, 75 bp, synthetic construct
  source 1..75: mol_type = other DNA
tgttttacccgggctgtgcagtgctgtcatttggagcagctctggcaacacccgcttatcaacttctactgaatg

SEQ ID NO: 420554 - DNA, 75 bp, synthetic construct
  source 1..75: mol_type = other DNA
ttgtctgccttatctgctttgcgcaatattactggctgcggcggtgagcatgatgcagcttggactttcgcctgc

SEQ ID NO: 420555 - DNA, 75 bp, synthetic construct
  source 1..75: mol_type = other DNA
tggttacactcgtattctgaagtgtggcttccgtgcaggcgataacgcgccgatggcttacatcgagctggttga

SEQ ID NO: 420556 - DNA, 75 bp, synthetic construct
  source 1..75: mol_type = other DNA
gcaacaatatgggctgtgtatgcgctttcgcagtataagacggaacagaaaatccgcgaagccacggggaaatga

SEQ ID NO: 420557 - DNA, 75 bp, synthetic construct
  source 1..75: mol_type = other DNA
ttccctggctgacttttttcaccattggccggcctctgacggggattttttgtctggtgttacagataacgctgc

SEQ ID NO: 420558 - DNA, 75 bp, synthetic construct
  source 1..75: mol_type = other DNA
atgcatttatcttcaaaacatcttagcactatccgctttctcgttattgctgcattcgttgtggctattagttac

SEQ ID NO: 420559 - DNA, 75 bp, synthetic construct
  source 1..75: mol_type = other DNA
ccaagaacgcggtcgaaaaccacttcgacacctcatatgaattagaatctctccttgaactgcgcgtaaaacgcc

SEQ ID NO: 420560 - DNA, 75 bp, synthetic construct
  source 1..75: mol_type = other DNA
gggatgcatatgttgcctgccacaaaggcgattcctaaagaaatgctgccgatcgtcgataagccgatgattcaa

SEQ ID NO: 420561 - DNA, 75 bp, synthetic construct
  source 1..75: mol_type = other DNA
cacggatttatcaataagtctttacgtgaagttttcgacgttacacgcatgattctgtcagcgaaagaagagttg

SEQ ID NO: 420562 - DNA, 75 bp, synthetic construct
  source 1..75: mol_type = other DNA
ctgcccaccgggcgtgaccattatgaacgtgcgtcagggtgaaccattaggtttaggccactctattttgtgtgc

SEQ ID NO: 420563 - DNA, 75 bp, synthetic construct
  source 1..75: mol_type = other DNA
gtgaagtatgggctgcgcaacctcaaagaaggggcgaagttccgtaaaggtattgagaagctgttaagcgaataa

SEQ ID NO: 420564 - DNA, 75 bp, synthetic construct
  source 1..75: mol_type = other DNA
gtttaggccactccattttatgtgcacgacccgccattggtgacaatccatttgtcgtggtgctgccagacgttg

SEQ ID NO: 420565 - DNA, 75 bp, synthetic construct
  source 1..75: mol_type = other DNA
gcagaaacgctgcgtgcttataccatctcttccacacctggtatgagtgaatacatcaccctgaccgtgcggcgg

SEQ ID NO: 420566 - DNA, 75 bp, synthetic construct
  source 1..75: mol_type = other DNA
accgacgccgaaatcgccgagggttacgtactggcctgctcctgccatccgcagggggatatggttctcgcctaa

SEQ ID NO: 420567 - DNA, 75 bp, synthetic construct
  source 1..75: mol_type = other DNA
cctccacgccaggcgtgagtgaatacatcaccctgactgtgcggcggattgatgacggtgtcggctcccggtggc

SEQ ID NO: 420568 - DNA, 75 bp, synthetic construct
  source 1..75: mol_type = other DNA
cgtcttgctgctgcgttcaatcacggatttatcaataagtctttacgtgaagttttcgacgttacgcgcatgatt

SEQ ID NO: 420569 - DNA, 75 bp, synthetic construct
  source 1..75: mol_type = other DNA
cgtgacaagttgtcaccgtatgacaccgaagagatgcttgaagctatgcgtatttttctggaagaacagggaggt

SEQ ID NO: 420570 - DNA, 75 bp, synthetic construct
  source 1..75: mol_type = other DNA
cctgtctgaagtgcgggcgcagggggtagagatgatgcgcgaacatccagcaatcaaactttgttgtttgacgca

SEQ ID NO: 420571 - DNA, 75 bp, synthetic construct
  source 1..75: mol_type = other DNA
gagcgcactcagcctggtgcatgggggcgaattcagctaacagatgccattgctgaactggcgaaaaaacagtcc

SEQ ID NO: 420572 - DNA, 75 bp, synthetic construct
  source 1..75: mol_type = other DNA
tcagtacaagcgtacgtgataacgccgaaatcaccattgtcggtgaactgccgccgcaaacggcgaaacgcattg

SEQ ID NO: 420573 - DNA, 75 bp, synthetic construct
  source 1..75: mol_type = other DNA
cattagtgacaggtagcctgttattctctgctaacgcctcggccactcccgcgtccggggcgttattacagcaga

SEQ ID NO: 420574 - DNA, 75 bp, synthetic construct
  source 1..75: mol_type = other DNA
gtggagatgtttgctgaccatctgttgtgcccaaaccttgatgacactatccgtgactttgctgcccagcttcgc

SEQ ID NO: 420575 - DNA, 75 bp, synthetic construct
  source 1..75: mol_type = other DNA
tgcggagtgtgcatacacacttgaacatcatgatcacgcagtagcttttgccgccgagctgcgcaaaggaggcaa

SEQ ID NO: 420576 - DNA, 75 bp, synthetic construct
  source 1..75: mol_type = other DNA
atgaaactaatgtcactaattgagatggatggttttctgaaaggtaaatgcatcccaagtgatttaaaggttaac

SEQ ID NO: 420577 - DNA, 75 bp, synthetic construct
  source 1..75: mol_type = other DNA
ccgtcctcttgcacagttgttgcaaatggatggcccgcgccgggaagtggtacagcgcggcaatgaaatcagcta

SEQ ID NO: 420578 - DNA, 75 bp, synthetic construct
  source 1..75: mol_type = other DNA
ggatcgccgcacgttcattatgaatggcgtgcagcttggttttatcaaagtgccaacagtggaaatagatccagc

SEQ ID NO: 420579 - DNA, 75 bp, synthetic construct
  source 1..75: mol_type = other DNA
gtcagcgaaagaagagttggctaatgaaccgcacccgattgatggcctgtccggtgaatatgcagagaaatccct

SEQ ID NO: 420580 - DNA, 75 bp, synthetic construct
  source 1..75: mol_type = other DNA
gggctatatgcaggcgtttgtaaaatatgggctgcgcaacctgaaagaaggggcgaagttccgcaaaggcattga

SEQ ID NO: 420581 - DNA, 75 bp, synthetic construct
  source 1..75: mol_type = other DNA
gcgctggcggcggagaattcacttgctcgtaaagcagttcaggcattctgcgatgttgttggcgacaacaccgag

SEQ ID NO: 420582 - DNA, 75 bp, synthetic construct
  source 1..75: mol_type = other DNA
tgaacaagttcatcaaagatgattgctggatttgggatgacaaaagtgaagagtatttcgacgctgctgactgta

SEQ ID NO: 420583 - DNA, 75 bp, synthetic construct
  source 1..75: mol_type = other DNA
aagttttcagctctggcggcggagaatgcggggctgaataaatttatcgcacagagttgctacgtgtttgatggc

SEQ ID NO: 420584 - DNA, 75 bp, synthetic construct
  source 1..75: mol_type = other DNA
gggtggaacaggaagtaaaagcgctcggcgtaacgcgtttctttaaagagaagttctttacgccagtagctgaag

SEQ ID NO: 420585 - DNA, 75 bp, synthetic construct
  source 1..75: mol_type = other DNA
gggctatatgcaggcgtttgtgaagtatgggctacgtaacctgaaggaaggggcgaagttccgcaaaggtattga

SEQ ID NO: 420586 - DNA, 75 bp, synthetic construct
  source 1..75: mol_type = other DNA
gctgcgttacaaccttgctgccatgattgcacgcttcaacgaaacgggccgcagccaggtgctggcaaaacgtat

SEQ ID NO: 420587 - DNA, 75 bp, synthetic construct
  source 1..75: mol_type = other DNA
cagattaaacagaaagctcaagagttaggaatatcttattggcaacttgaagatggttttattggctatatcggg

SEQ ID NO: 420588 - DNA, 75 bp, synthetic construct
  source 1..75: mol_type = other DNA
ctgtagcgggtcttgggatgcatatgttgcctgccactaaggcgatacccaaagagatgctaccgatcgtcgaca

SEQ ID NO: 420589 - DNA, 75 bp, synthetic construct
  source 1..75: mol_type = other DNA
gggctatatgcaggcgtttgtgaagtatggcctacgcaacctgaaagaaggggcgaaattccgcaaaggcattga

SEQ ID NO: 420590 - DNA, 75 bp, synthetic construct
  source 1..75: mol_type = other DNA
ctgtccgcctggcgtgaccattatgaatgtgcgtcagggcgaacctttaggtttaggccactccattttatgtgc

SEQ ID NO: 420591 - DNA, 75 bp, synthetic construct
  source 1..75: mol_type = other DNA
ctaccggcggatgaatccggtcgggctggtgccgacgctgctgaccgatgatggcgagtcactcggtcaatcgct

SEQ ID NO: 420592 - DNA, 75 bp, synthetic construct
  source 1..75: mol_type = other DNA
tcgtcaaaaaggaatcctggaagcgtttcgggcttaaagccggtgtgacgctgctggttctctggggggctggtg

SEQ ID NO: 420593 - DNA, 75 bp, synthetic construct
  source 1..75: mol_type = other DNA
atgagccagtcagagtttgattcagcgcttccgaacggtatagggttagcgccttacctgcgaatgaagcaggaa

SEQ ID NO: 420594 - DNA, 75 bp, synthetic construct
  source 1..75: mol_type = other DNA
ggtccaggataggttagagatcagcaaagcaaccttctaccgacttaagtcgttcttgcaactccctgatatttg

SEQ ID NO: 420595 - DNA, 75 bp, synthetic construct
  source 1..75: mol_type = other DNA
gccgaacactgccatccccacgccctgctgaatagcgtagaggcggtttataccgtctcctcccagatgggcttt

SEQ ID NO: 420596 - DNA, 75 bp, synthetic construct
  source 1..75: mol_type = other DNA
aatttactacgatgcccgccagccgagccgccttgaagagctgatcgcgaccccctgcgatgacagcatgctggc

SEQ ID NO: 420597 - DNA, 75 bp, synthetic construct
  source 1..75: mol_type = other DNA
gtcattcagaccaaagagccgctggaccgcgaaggtaaagtcagccgcattgttgaatttatcgaaaaaccggat

SEQ ID NO: 420598 - DNA, 75 bp, synthetic construct
  source 1..75: mol_type = other DNA
atgctgcgcgttctgggtaaagctggtgctgcacgctggcgtggtgttcgtccgaccgttcgcggtaccgcgatg

SEQ ID NO: 420599 - DNA, 75 bp, synthetic construct
  source 1..75: mol_type = other DNA
gccggaaggcgattttgaccgctcattctctgatggcgttctcgaagatatcgccgaacagcttcgtaaaggagt

SEQ ID NO: 420600 - DNA, 75 bp, synthetic construct
  source 1..75: mol_type = other DNA
gcgggaaggcgattttgaccgctcattctctgatggcgttctcgaagatatcgccgaacagcttagaaaaggaag

SEQ ID NO: 420601 - DNA, 75 bp, synthetic construct
  source 1..75: mol_type = other DNA
tgactatctctggctttcggacgcgatgggggaatttacctgcgacgataaatctgaagataaattcctgttact

SEQ ID NO: 420602 - DNA, 75 bp, synthetic construct
  source 1..75: mol_type = other DNA
aacccggtagaccacccacatggtggtgaaggtcgtaactttggtaagcacccggtaactccgtggggcgttcag

SEQ ID NO: 420603 - DNA, 75 bp, synthetic construct
  source 1..75: mol_type = other DNA
ccaggtaacaccctgccgatgcgcaacatcccggttggttctactgttcacaacgtagaaatgaaaccaggtaaa

SEQ ID NO: 420604 - DNA, 75 bp, synthetic construct
  source 1..75: mol_type = other DNA
aagttctgaccatcgttgttgacggtaaagaaatcaaagttaaagctcaggacgtacagcgccacccgtacaaac

SEQ ID NO: 420605 - DNA, 75 bp, synthetic construct
  source 1..75: mol_type = other DNA
atgtcatcactgaatattaaacagggaagtgaagctcattttcccgagtatcctctggcgtcgcccagtaataat

SEQ ID NO: 420606 - DNA, 75 bp, synthetic construct
  source 1..75: mol_type = other DNA
acagaagcatttaacctgtttatcaagaagtttcagtcggttagcttgctgggtgatgctgccaacttactgatt

SEQ ID NO: 420607 - DNA, 75 bp, synthetic construct
  source 1..75: mol_type = other DNA
ttattcatgtggatcacacttatacagccgaagatatgatgcgggcaggtcgtgacgtcgagaaaaacgtattaa

SEQ ID NO: 420608 - DNA, 75 bp, synthetic construct
  source 1..75: mol_type = other DNA
cacctggcggttttggcgtacgttgggagtctcatatctacgcgggctacaccgtaccgccgtactatgactcaa

SEQ ID NO: 420609 - DNA, 75 bp, synthetic construct
  source 1..75: mol_type = other DNA
tcttcgtgcctgtaaagaactgggcattaagactgtcgctgtgcactccagcgcggatcgcgatttaaaacacgt

SEQ ID NO: 420610 - DNA, 75 bp, synthetic construct
  source 1..75: mol_type = other DNA
caagcctttcttccaaatcagaaccaatgccagtaacgatgcgtattaaaaaagatgtcatcatgcccaataatt

SEQ ID NO: 420611 - DNA, 75 bp, synthetic construct
  source 1..75: mol_type = other DNA
ataagaccgtcagactttctgttattggcgctctgctggtagtgattgtttatattattagccagtctatttttt

SEQ ID NO: 420612 - DNA, 75 bp, synthetic construct
  source 1..75: mol_type = other DNA
acaataacacagagttcaattaagacaaacggcactgatggtgtcattcaggtgatgccgatatcagagaaccgg

SEQ ID NO: 420613 - DNA, 75 bp, synthetic construct
  source 1..75: mol_type = other DNA
tgccgaccgccgatgcacaggcgttaggcgaagggaatcaggcggtgctggtcagtgggaaagacgccacaggca

SEQ ID NO: 420614 - DNA, 75 bp, synthetic construct
  source 1..75: mol_type = other DNA
cagagaggcatgcaaagaagggaaattgccagaaaattaggcatgccgctgcacatagtgaataactacgtttat

SEQ ID NO: 420615 - DNA, 75 bp, synthetic construct
  source 1..75: mol_type = other DNA
actctctgggagaaattgtttaagctctgttttatccgtggaagtaaatggggaaaaacaaattttttaaatttc

SEQ ID NO: 420616 - DNA, 75 bp, synthetic construct
  source 1..75: mol_type = other DNA
ttgtggcacgcttcccgaataagatcatcaatattcaccattcattcctgccagcgtttatcggcgcacgtcctt

SEQ ID NO: 420617 - DNA, 75 bp, synthetic construct
  source 1..75: mol_type = other DNA
tggcgcagatattggcaaaatcgccgtgcatccggcgcatgtctatgtcgcggtgcgtcaggctgttgctcataa

SEQ ID NO: 420618 - DNA, 75 bp, synthetic construct
  source 1..75: mol_type = other DNA
tccctacaattgaaaaattaagggaagcatttttgccgatactctttacggatgctgacgctatcagccgttatg

SEQ ID NO: 420619 - DNA, 75 bp, synthetic construct
  source 1..75: mol_type = other DNA
gatctggcatctcagcgtgcgtacattagggcaacctccatatcgtgtgtcaactcgaaaggaaaagcattcgac

SEQ ID NO: 420620 - DNA, 75 bp, synthetic construct
  source 1..75: mol_type = other DNA
gttgccgttgctctgcaacaccggagggaacgatccggaagaactgctgaatgatacagaaaccactgccagtgc

SEQ ID NO: 420621 - DNA, 75 bp, synthetic construct
  source 1..75: mol_type = other DNA
atcggcgcacgtccttatcaccaggcctatgaacgtggtgtgaagattattggcgcaaccgctcactatgtgaat

SEQ ID NO: 420622 - DNA, 75 bp, synthetic construct
  source 1..75: mol_type = other DNA
ttttgagtattcagacagaaagttaaaaatgctcgacaaaaaatggcgcgacattcaactatttaaaataattaa

SEQ ID NO: 420623 - DNA, 75 bp, synthetic construct
  source 1..75: mol_type = other DNA
gtgtgcgggaacgatgagagtcgaaagcatcggttatctgattggccgtagtgagtcagccgtcaggacgaaagc

SEQ ID NO: 420624 - DNA, 75 bp, synthetic construct
  source 1..75: mol_type = other DNA
tggtgatcagcggcaccaccaccgccccagtcgggcagacgctgaccctgaccttaaacggcaaaacctacacca

SEQ ID NO: 420625 - DNA, 75 bp, synthetic construct
  source 1..75: mol_type = other DNA
atgatactccggcagtgtgcgggaacgatgacggtcgaaagcattgggaggctgaccggtcgtacaggtgatgct

SEQ ID NO: 420626 - DNA, 75 bp, synthetic construct
  source 1..75: mol_type = other DNA
agcatcggcagtctgattggccgtagtggggctgccgtcaggacgaaagcgcgggaactgggtatctgcatgatg

SEQ ID NO: 420627 - DNA, 75 bp, synthetic construct
  source 1..75: mol_type = other DNA
gttccccgccgtgagatcgcagaaaaactcgaaatgcccttgagcatgattaatcagtacgtttatttcgaaagg

SEQ ID NO: 420628 - DNA, 75 bp, synthetic construct
  source 1..75: mol_type = other DNA
gggctgaaatcatgatactccggcagtgtgcgggaacgatgacagtcgaaagcatcgggaggctgactggtcgca

SEQ ID NO: 420629 - DNA, 75 bp, synthetic construct
  source 1..75: mol_type = other DNA
cgcaccgcctacagtgttccttacggttcacctgcctgtaaggcagcgatacgggtttaccaggttccgcttaac

SEQ ID NO: 420630 - DNA, 75 bp, synthetic construct
  source 1..75: mol_type = other DNA
gacatacagacacgggaactggtgatgttgatcaagcgactggcatcatcgctgaaagcggtgaaaacctgcccc

SEQ ID NO: 420631 - DNA, 75 bp, synthetic construct
  source 1..75: mol_type = other DNA
ggattttttccttactcgcttctggggagacataacagaaccgccatgcatcacaaaaacaatgagtgcagtcct

SEQ ID NO: 420632 - DNA, 75 bp, synthetic construct
  source 1..75: mol_type = other DNA
cgccacgccgaccattgtgtcgtataccgatgatgtcgggcagcggcaggggacattaagcagttcgcaggccac

SEQ ID NO: 420633 - DNA, 75 bp, synthetic construct
  source 1..75: mol_type = other DNA
gggcggaaattatgatactccggcagtgtgcgggaacgatgacagtcgaaagcatcggcagtctgattggccgta

SEQ ID NO: 420634 - DNA, 75 bp, synthetic construct
  source 1..75: mol_type = other DNA
atacagaaggtcagggcgggttctgtctcttcaccggggatcgttatgcccatgtgctctcgtgtccagagaagc

SEQ ID NO: 420635 - DNA, 75 bp, synthetic construct
  source 1..75: mol_type = other DNA
tatcataacttaagccgtccaggttatgcacttgctcgccatggcgttaccatcatcccaccgggttcattaaaa

SEQ ID NO: 420636 - DNA, 75 bp, synthetic construct
  source 1..75: mol_type = other DNA
tcgccgtcgtcagtgccattacccaggcgacagactggcgtgcggcaacagctcagttgttggaaattgcaggag

SEQ ID NO: 420637 - DNA, 75 bp, synthetic construct
  source 1..75: mol_type = other DNA
taccgatctcaatgccatccgcgcggcaggcctgcggctgggcgtttcgacacatgacgatatggaaatcgacgt

SEQ ID NO: 420638 - DNA, 75 bp, synthetic construct
  source 1..75: mol_type = other DNA
tcggcgcgatgaagaggtggaagccgatgtcgtggcggcaattgcgctgggccgccgctataacgcgcgattgtt

SEQ ID NO: 420639 - DNA, 75 bp, synthetic construct
  source 1..75: mol_type = other DNA
ggataaaaaccgtgccattgctaaacgcataggttatccggtgattatcaaagcctccggcggcggcggcggtcg

SEQ ID NO: 420640 - DNA, 75 bp, synthetic construct
  source 1..75: mol_type = other DNA
ttcaccggtcgcgatatgatgcgtaccgatgtggtcaatgccgtgctggaaaaagagtgcgaagcgatagtcctg

SEQ ID NO: 420641 - DNA, 75 bp, synthetic construct
  source 1..75: mol_type = other DNA
ggttagcgtaaccgatctggcaaaagccactggagtttctgaagttaccattcgccaggatctcaacaccctcga

SEQ ID NO: 420642 - DNA, 75 bp, synthetic construct
  source 1..75: mol_type = other DNA
ggcgaaatgctgtttgccgagcaccatttttcggctggtcctttgcagatcaccacctgtatgcatcgccgtgcc

SEQ ID NO: 420643 - DNA, 75 bp, synthetic construct
  source 1..75: mol_type = other DNA
acattacggatatgcgcgaatggcgtgaggagcgtgggcagggcgtagtgaataaaccgattcctggttggcaga

SEQ ID NO: 420644 - DNA, 75 bp, synthetic construct
  source 1..75: mol_type = other DNA
catctgatatgcatgaggttgttggctggaagatggttctccagcaggccaataatcgcgcctcccagcttcgca

SEQ ID NO: 420645 - DNA, 75 bp, synthetic construct
  source 1..75: mol_type = other DNA
cctgccaatttgtgaaagctggcgcattccttatgccgattcgttatccagccttgccgccagttgtgatgcggt

SEQ ID NO: 420646 - DNA, 75 bp, synthetic construct
  source 1..75: mol_type = other DNA
cgataaacccctggcagaaaatctgcgcgatgccgagcggctggtggaactggcggcgcggaaaaaactgacgtt

SEQ ID NO: 420647 - DNA, 75 bp, synthetic construct
  source 1..75: mol_type = other DNA
cgcgcgaaagccctgccaatttgtgaaagctggcgcattccttatgccgattcgttatccagccttgccgccagt

SEQ ID NO: 420648 - DNA, 75 bp, synthetic construct
  source 1..75: mol_type = other DNA
gttatctgaacatcccggcaatcatcagcgccgctgaaatcaccggcgcagtagcaatccatccgggttacggct

SEQ ID NO: 420649 - DNA, 75 bp, synthetic construct
  source 1..75: mol_type = other DNA
ggtaccacgcaactgaaaggccatgtgatgaacgctctgccggaagacgccaaagcgtgggtcgaagcgcacgtt

SEQ ID NO: 420650 - DNA, 75 bp, synthetic construct
  source 1..75: mol_type = other DNA
cgtaggccgtcagccgctgcgtaaactgagtgctggcgaccgtctgatcaagccactgctcggtacgctggaata

SEQ ID NO: 420651 - DNA, 75 bp, synthetic construct
  source 1..75: mol_type = other DNA
gtaatatcggtcgtggctttatcggtaaactgctggcagacgcgggtatccaactgacgtttgccgatgtcaatc

SEQ ID NO: 420652 - DNA, 75 bp, synthetic construct
  source 1..75: mol_type = other DNA
ggaagaaagcggcgcggtactgatcaagcgctacggctttgatgctgacaaacatgcggcatacatccagaaaat

SEQ ID NO: 420653 - DNA, 75 bp, synthetic construct
  source 1..75: mol_type = other DNA
gtagaaaccttcagcgaatggattgtcgataaaactcaattcaaaggcgcgctgccaaacatcccaggtatggag

SEQ ID NO: 420654 - DNA, 75 bp, synthetic construct
  source 1..75: mol_type = other DNA
gcgatggaagaaagcggtgcggttctgattaaacgctatggttttgacgctgacaaacacgcggcatatatccag

SEQ ID NO: 420655 - DNA, 75 bp, synthetic construct
  source 1..75: mol_type = other DNA
cgttacggtgaaagaagcgacggacgccctgttgcattgtgcggaacagcttcgcaaaggaggtgagcaaaaatg

SEQ ID NO: 420656 - DNA, 75 bp, synthetic construct
  source 1..75: mol_type = other DNA
ggcagcggagagtgcggtgatgaaggcgggacattcatatttctcatatggctctgagcataatttcgaatggca

SEQ ID NO: 420657 - DNA, 75 bp, synthetic construct
  source 1..75: mol_type = other DNA
accgcggcgagattgcattgcgtattcttcgtgcctgtaaagaactaggcatcaagactgtcgctgtgcactcca

SEQ ID NO: 420658 - DNA, 75 bp, synthetic construct
  source 1..75: mol_type = other DNA
tgcgtgaggcagcagaagcaataaaagtcgtggcaacgccgcaaaaattgcttgcgtttcgtatgaaagtcacac

SEQ ID NO: 420659 - DNA, 75 bp, synthetic construct
  source 1..75: mol_type = other DNA
ccgatgcttttctggctgaaattcgtgcggaggctcgcaacgaggggattaactataccgcaagccgtcttgctg

SEQ ID NO: 420660 - DNA, 75 bp, synthetic construct
  source 1..75: mol_type = other DNA
gctggttttattgatgatactgcgaagaacgccgcggatattgcccggatgattcttacctctactgagtttatg

SEQ ID NO: 420661 - DNA, 75 bp, synthetic construct
  source 1..75: mol_type = other DNA
tgggtttcgtgaacctgcaaagcattatgccttcctgacgaaagcccaactgacagcaatgattacactaaagaa

SEQ ID NO: 420662 - DNA, 75 bp, synthetic construct
  source 1..75: mol_type = other DNA
cattttgcgcgttaattgctctttttttagggctttcaatatatcgtacacgtgaaaaggctatgctaacctcat

SEQ ID NO: 420663 - DNA, 75 bp, synthetic construct
  source 1..75: mol_type = other DNA
ttgcccataatgattaaacctctttatttcatatcttgcgtaatgtttcctctccattctatccctaaaatatac

SEQ ID NO: 420664 - DNA, 75 bp, synthetic construct
  source 1..75: mol_type = other DNA
gtggtgaaagatggcgcgaacattcaggataattgcgttatgcacggttttcccgagcaggatactgtcgtggaa

SEQ ID NO: 420665 - DNA, 75 bp, synthetic construct
  source 1..75: mol_type = other DNA
aagtcgagccattgcgggaaattgaacctggcaggaaacgcctggtatttgatgagaatctgcgaccgaaacagt

SEQ ID NO: 420666 - DNA, 75 bp, synthetic construct
  source 1..75: mol_type = other DNA
atttcacattgtcaaatataactcttattataatgacttggactttacttgtggttttttccttaggcataggct

SEQ ID NO: 420667 - DNA, 75 bp, synthetic construct
  source 1..75: mol_type = other DNA
aatactatctctaaaactactgtcggtttaatcacactgtcaggaacggcaaccgaaaacggctcgcttgtgact

SEQ ID NO: 420668 - DNA, 75 bp, synthetic construct
  source 1..75: mol_type = other DNA
tgggcggcctccatttgtgcggtctgtgcgccgtcactgtctgccgatcctgcccgcccgctccagacgctggcg

SEQ ID NO: 420669 - DNA, 75 bp, synthetic construct
  source 1..75: mol_type = other DNA
cactggatgagcagatggaagacttatggcgcgatgtgcgctggtccgtggcagatattctgggtcgcccccgtc

SEQ ID NO: 420670 - DNA, 75 bp, synthetic construct
  source 1..75: mol_type = other DNA
atttctctatgtccaaattagtattacttttcacaacatggttattactaattattttctccttggggactggat

SEQ ID NO: 420671 - DNA, 75 bp, synthetic construct
  source 1..75: mol_type = other DNA
agaaagccgccgttcatgctctatttttacgtgagcttagaactaggtttggcaaatatcgcttgggttatttat

SEQ ID NO: 420672 - DNA, 75 bp, synthetic construct
  source 1..75: mol_type = other DNA
gcagacgttacatcaagtcgagccattgcgggaagttgaacctggcaggaaacgcctggtatttgatgagaatct

SEQ ID NO: 420673 - DNA, 75 bp, synthetic construct
  source 1..75: mol_type = other DNA
ccatatgcacaataaccgacacagaagctaaagagtttcaaactcattgggactgggaaccgcataagccaagtg

SEQ ID NO: 420674 - DNA, 75 bp, synthetic construct
  source 1..75: mol_type = other DNA
ataatgcagagtaccccgtgcgttgaatcacaaacaacatctgccggaagctgggaacctgccacggaactgatc

SEQ ID NO: 420675 - DNA, 75 bp, synthetic construct
  source 1..75: mol_type = other DNA
gcgggactgaagctgattgcggagaaggtgaagaagggatatgtggagcaagcgaaggataattctttgcaacct

SEQ ID NO: 420676 - DNA, 75 bp, synthetic construct
  source 1..75: mol_type = other DNA
attgccgcaattccacatattccagaatggcggcaaccattaattgctttgttattacccgaaaaaccagaaatt

SEQ ID NO: 420677 - DNA, 75 bp, synthetic construct
  source 1..75: mol_type = other DNA
ccgggcaaagcaaaaccgaagagtgatacagagaaacaaccccacaaaccagaggcaaaagaggatttgtcccct

SEQ ID NO: 420678 - DNA, 75 bp, synthetic construct
  source 1..75: mol_type = other DNA
atcaaacgacctggtgtttacgactgagcctcctgcggctgttgctgcggaagttgttggtgatgttgaggacgc

SEQ ID NO: 420679 - DNA, 75 bp, synthetic construct
  source 1..75: mol_type = other DNA
gttgccagcttccgaatcacaccaccaccgtggcgctggtggtctgttccgacatgggcttgaagtggccttctg

SEQ ID NO: 420680 - DNA, 75 bp, synthetic construct
  source 1..75: mol_type = other DNA
ctggagaaagcagtaaaagcatggaatgcccttactctatctccacataccgataccgaatacgccatgttacat

SEQ ID NO: 420681 - DNA, 75 bp, synthetic construct
  source 1..75: mol_type = other DNA
tcgccctgatgcagcttaacggcatcgcccagaaactgaaattcaaagcattacaggagcgggcaaaagaaaaaa

SEQ ID NO: 420682 - DNA, 75 bp, synthetic construct
  source 1..75: mol_type = other DNA
gagcgggcaaaagaaaaaattgccgacattgccgagagccgcgaactcacggtggcggagcttgaagatcggtta

SEQ ID NO: 420683 - DNA, 75 bp, synthetic construct
  source 1..75: mol_type = other DNA
tgatgcagcttaacggcattgctcagaaactgaaattcaaagctttacaggagcgggcgaaagagaaaattgccg

SEQ ID NO: 420684 - DNA, 75 bp, synthetic construct
  source 1..75: mol_type = other DNA
tacgaactgctaccgccgttccgccagctcgaccgtaacagttacgccctgacagaaaccgagcgcaatgccagc

SEQ ID NO: 420685 - DNA, 75 bp, synthetic construct
  source 1..75: mol_type = other DNA
gaaactgaaattcaaagcattacaggagcgggcgaaagagaaaattgccgacattgccgaaagtcgcgaactgac

SEQ ID NO: 420686 - DNA, 75 bp, synthetic construct
  source 1..75: mol_type = other DNA
atgaaactgatgtttgcatcggacattcatgggtcgttaccggcgacggaacgtgttctggagttgtttgtccaa

SEQ ID NO: 420687 - DNA, 75 bp, synthetic construct
  source 1..75: mol_type = other DNA
gcttatttaagcagccctctggataaaatcgaagcgcattatgatggcggtgaatgggagttttatgagctttca

SEQ ID NO: 420688 - DNA, 75 bp, synthetic construct
  source 1..75: mol_type = other DNA
ttctccgaacggtgtaatgattattatcatcggttatttgattatgcttacgggcataatgaatatacgcagttt

SEQ ID NO: 420689 - DNA, 75 bp, synthetic construct
  source 1..75: mol_type = other DNA
ccggctgccgtcagtctctatctcgcgggcggtatggcgttacagtggctgctggggccgctttccgacaggatt

SEQ ID NO: 420690 - DNA, 75 bp, synthetic construct
  source 1..75: mol_type = other DNA
cagcgacacgacgcttgcggtaagcggcacgctgggcgcggcgctttctgccggtgagttcgcgcaaatcagcat

SEQ ID NO: 420691 - DNA, 75 bp, synthetic construct
  source 1..75: mol_type = other DNA
cggataccgacgcgctggcggcgtctgcgaccgcctataacgtcaccgcgcaggtaaaaagctcggcgggcaacg

SEQ ID NO: 420692 - DNA, 75 bp, synthetic construct
  source 1..75: mol_type = other DNA
cgacgcggcgggcaactggaccttaaccgtgccggtgagcgatctggcggctctaggtcaggccaactataccgt

SEQ ID NO: 420693 - DNA, 75 bp, synthetic construct
  source 1..75: mol_type = other DNA
gttcctctttggcgcggcaaccatcgccctcagctacatccccatgatgagttgggttgcggtgtcaccggttat

SEQ ID NO: 420694 - DNA, 75 bp, synthetic construct
  source 1..75: mol_type = other DNA
cccataatcggccctctttccggcgcggcgttaatgcactttgtccactggaaagtgctttttgctattattgcg

SEQ ID NO: 420695 - DNA, 75 bp, synthetic construct
  source 1..75: mol_type = other DNA
gatctgctgatcaaaacgcgccttgctgccgatacggtgggcgcaacaaaaatggatcgcccggaatggatagcc

SEQ ID NO: 420696 - DNA, 75 bp, synthetic construct
  source 1..75: mol_type = other DNA
gccaaaagcgtattacgcgattttcgtaatgtcttttgcaatcggctgttcctctttggcgcagcaaccatctct

SEQ ID NO: 420697 - DNA, 75 bp, synthetic construct
  source 1..75: mol_type = other DNA
gttgattttgtatgactttgctgcgtatctgtcgacggatctgatccagcctgggatcattaatgtggtacgtga

SEQ ID NO: 420698 - DNA, 75 bp, synthetic construct
  source 1..75: mol_type = other DNA
aaagatccgaccgaaccgcgctttatctggcgtgccgtacccattcaactggtcggcctcgcgctgttgattatc

SEQ ID NO: 420699 - DNA, 75 bp, synthetic construct
  source 1..75: mol_type = other DNA
ttcaataatcccaaaaagtttattcattgcgataagtgctcttttgtccgcgatcctcataataatcagaatagc

SEQ ID NO: 420700 - DNA, 75 bp, synthetic construct
  source 1..75: mol_type = other DNA
acgggaccagcctgtgttgaagcctgcccgacaaaggcgttgcaatgtatggatgttgagaaagtgcagcggaat

SEQ ID NO: 420701 - DNA, 75 bp, synthetic construct
  source 1..75: mol_type = other DNA
gggaccggcctgtgttgaagcctgcccgacaaaggcgttgcagtgcatggatgtcgagaaagtgcagcggcatcg

SEQ ID NO: 420702 - DNA, 75 bp, synthetic construct
  source 1..75: mol_type = other DNA
atgagtatggttgccagaactgaacccagacccgcagaggacgacatcaccgataccgatgatggcgacactcgc

SEQ ID NO: 420703 - DNA, 75 bp, synthetic construct
  source 1..75: mol_type = other DNA
catacccatctaccagtagcggaaaagcggggggatattttccactttaaccccggttcggtaagcattccgaaa

SEQ ID NO: 420704 - DNA, 75 bp, synthetic construct
  source 1..75: mol_type = other DNA
ccccggctcggtgagtattccgaaaggcggtaatccggcgagttatggcatgctggataatgacgtacttagtgt

SEQ ID NO: 420705 - DNA, 75 bp, synthetic construct
  source 1..75: mol_type = other DNA
gcgtaatgctttaccggagggttacgcgccagccaaagtcgctgaacggcttaatgaagtggcacataaggttat

SEQ ID NO: 420706 - DNA, 75 bp, synthetic construct
  source 1..75: mol_type = other DNA
atggactccttcgcgaaatatacgacaggaggtgaagtgatggactccttcgcgaaatatacgattattgactgg

SEQ ID NO: 420707 - DNA, 75 bp, synthetic construct
  source 1..75: mol_type = other DNA
ataatggaggtgctcatattgtttttactcacgcaatagatcagaaactggtgacggtgaaccgagggaaaaatg

SEQ ID NO: 420708 - DNA, 75 bp, synthetic construct
  source 1..75: mol_type = other DNA
attgttaccagtaaagaagctaatgcactggctgaattcgacctaaattcatttcagtgcgtagctgaggatctt

SEQ ID NO: 420709 - DNA, 75 bp, synthetic construct
  source 1..75: mol_type = other DNA
gactcgcagcatggcgttatacgaagcctgtattggtcgctgagattaacacccttgctaaccagctgcagatta

SEQ ID NO: 420710 - DNA, 75 bp, synthetic construct
  source 1..75: mol_type = other DNA
ggcaacatcggcagcggcacgcgggatatcaccattgacgccaacctgccaggtctgcgggtggataccgtggcg

SEQ ID NO: 420711 - DNA, 75 bp, synthetic construct
  source 1..75: mol_type = other DNA
ttactgagcgcggtgtacacggtggaacatatggcgggaagtttgttgcttatgattatgcagcatggctaaacc

SEQ ID NO: 420712 - DNA, 75 bp, synthetic construct
  source 1..75: mol_type = other DNA
gcgcacaggtctggttcatgtgatgaatgagattattccctcggtgggaggggaacaggcgacagtaatcaatag

SEQ ID NO: 420713 - DNA, 75 bp, synthetic construct
  source 1..75: mol_type = other DNA
ggctggcgggggcggcggtaggtggtggcgcgcttggtgcactgctggcaagcggtggcgatgactcgaaaactg

SEQ ID NO: 420714 - DNA, 75 bp, synthetic construct
  source 1..75: mol_type = other DNA
aacgtgcgtcagggcgaacctttaggtttaggccactccattttgtgtgcgcgacctgccattggtgacaaccca

SEQ ID NO: 420715 - DNA, 75 bp, synthetic construct
  source 1..75: mol_type = other DNA
aagatgaccaccagcaatatctgcataaaaacccgtatggttactgtggaattggcggaattggcgtctgtctgc

SEQ ID NO: 420716 - DNA, 75 bp, synthetic construct
  source 1..75: mol_type = other DNA
actcaatgaccaatgtacctgacggaatggagattgccatttttgcgatgggttgtttctggggtgtggagcgtc

SEQ ID NO: 420717 - DNA, 75 bp, synthetic construct
  source 1..75: mol_type = other DNA
cgtggccaaaactcccgacacggcaatgaaggaagtttttcagcataaaacagggctcagggaatcagatctcga

SEQ ID NO: 420718 - DNA, 75 bp, synthetic construct
  source 1..75: mol_type = other DNA
gaaaaaccgaaagcggatgttgcgccgtctaatctcgctattgtgggtcgttacgtacttagcgcggatatttgg

SEQ ID NO: 420719 - DNA, 75 bp, synthetic construct
  source 1..75: mol_type = other DNA
ccggacgagccgcagatcctggactccgatctgatggcggtggggcgctatgtgctgtcggcggatatctgggcc

SEQ ID NO: 420720 - DNA, 75 bp, synthetic construct
  source 1..75: mol_type = other DNA
agcgccagctgctggcggaagtccaggccatttgcccgccgggcgtaaccatcatgaacgtgcgtcaggcacagc

SEQ ID NO: 420721 - DNA, 75 bp, synthetic construct
  source 1..75: mol_type = other DNA
gtcaactactggcggaagtgcaatctatctgcccgccgggcgtgactattatgaacgtgcgtcagggcgaacctt

SEQ ID NO: 420722 - DNA, 75 bp, synthetic construct
  source 1..75: mol_type = other DNA
gaacgtactcagcctggtgcatggggacgtattcagctgactgatgctattgctgagctggcgaaaaaacagtca

SEQ ID NO: 420723 - DNA, 75 bp, synthetic construct
  source 1..75: mol_type = other DNA
ttatcgatgacgccagcgccgacccgctgcgttacaaccttgctgccatgattgcacgtttcaacgaaacgggtc

SEQ ID NO: 420724 - DNA, 75 bp, synthetic construct
  source 1..75: mol_type = other DNA
tcatgccgaagcggtgcgcattgtttacgatccttccgtcatcagctatgagcagttgctacaagtattttggga

SEQ ID NO: 420725 - DNA, 75 bp, synthetic construct
  source 1..75: mol_type = other DNA
tgatgccatctttggtactggctattttgtcgttggcaaaatcgaaaaaaataaacgccgctatccgtgggcgca

SEQ ID NO: 420726 - DNA, 75 bp, synthetic construct
  source 1..75: mol_type = other DNA
aatcgaaaaaataaacgccgctatccgtgggcgcaattcgttattgacggcaatggacagggacgcgttgcctgg

SEQ ID NO: 420727 - DNA, 75 bp, synthetic construct
  source 1..75: mol_type = other DNA
aatcgaaaaaaataaacgccgctatccgtgggcgcaattcgttattgacggcaatggacagggacgcgttgcctg

SEQ ID NO: 420728 - DNA, 75 bp, synthetic construct
  source 1..75: mol_type = other DNA
ggctggaacagcaacgcgggaaaatcgatgtggactgcggttgtgtgtctgcggaaacattcatgcactggttgc

SEQ ID NO: 420729 - DNA, 75 bp, synthetic construct
  source 1..75: mol_type = other DNA
cgatgtggactgcggttgtgtgtctgcggaaacattcatgcactggttgcgggtagcttatgtggctggcaacca

SEQ ID NO: 420730 - DNA, 75 bp, synthetic construct
  source 1..75: mol_type = other DNA
aaaatgaagcttatcgacttgttagtgaaggagctgcctaagtgcggcgggtggcctgatggtatgatcgattgt

SEQ ID NO: 420731 - DNA, 75 bp, synthetic construct
  source 1..75: mol_type = other DNA
acgaatgatctgtcaatggcctcgctcggcgttgcggctgtcgcgatagccgtactcgccgcattgaatatttgt

SEQ ID NO: 420732 - DNA, 75 bp, synthetic construct
  source 1..75: mol_type = other DNA
agtatcgttcagcgatttatccgctgaccccagaacaggatgccgccgctcgcgccagtctggaacgttttcagg

SEQ ID NO: 420733 - DNA, 75 bp, synthetic construct
  source 1..75: mol_type = other DNA
gggaagtgtgttctggtgataccggccacgccgaagcggtacgcgtggtttacgatccgtcagtgatcagctacg

SEQ ID NO: 420734 - DNA, 75 bp, synthetic construct
  source 1..75: mol_type = other DNA
accgtattgaggctgttaaggctgttttgcgtagactggctggcaactatccggatattccggatagttcggtgc

SEQ ID NO: 420735 - DNA, 75 bp, synthetic construct
  source 1..75: mol_type = other DNA
gtgaaacatctgcatcgattctttagcagtgatgcctcgggaggcattattcttatcattgccgctattctggcg

SEQ ID NO: 420736 - DNA, 75 bp, synthetic construct
  source 1..75: mol_type = other DNA
tgcggtattgaagtcgggagtccatgcaacgctggcaggcgtcattgtcggcttctttattccgttgaaagagaa

SEQ ID NO: 420737 - DNA, 75 bp, synthetic construct
  source 1..75: mol_type = other DNA
atcatgaacgtgcgtcaggcgcagccgctgggcctgggacattccatcctctgcgcccgcccggtagtcggcgac

SEQ ID NO: 420738 - DNA, 75 bp, synthetic construct
  source 1..75: mol_type = other DNA
ggttcgacaaacgtcgctggcagattgtgaaccagaacgatcgtcaggtgctgtttgccctgacttcagatgatg

SEQ ID NO: 420739 - DNA, 75 bp, synthetic construct
  source 1..75: mol_type = other DNA
ctgtttgccctgacttcagaagatggcgatcaaggctttccggggaatctcggcgcgacggtgcagtatcgtctg

SEQ ID NO: 420740 - DNA, 75 bp, synthetic construct
  source 1..75: mol_type = other DNA
cagccagtctggatttaacaagagcggcagcttttgccattcgtattgtagccattgctgttctggtctgggcaa

SEQ ID NO: 420741 - DNA, 75 bp, synthetic construct
  source 1..75: mol_type = other DNA
gaaggccgtagtgaagaagatttactcacagagttgatgcttaagcgtggcattgacctgagtgtagacattgaa

SEQ ID NO: 420742 - DNA, 75 bp, synthetic construct
  source 1..75: mol_type = other DNA
tgcatttgctaatgctggcgtttcactgcaaggcgtcacgctggatggcttgacctccattctgccattggggat

SEQ ID NO: 420743 - DNA, 75 bp, synthetic construct
  source 1..75: mol_type = other DNA
accaccgctccggctttgcaattttactccggcaacttccttggcggcacaccctcgcggggaactgaaccttac

SEQ ID NO: 420744 - DNA, 75 bp, synthetic construct
  source 1..75: mol_type = other DNA
ccaaaacccatcgagcgcagttacgccagtccggctctgctggcccgcataatcatggcgaagttcgccgagcat

SEQ ID NO: 420745 - DNA, 75 bp, synthetic construct
  source 1..75: mol_type = other DNA
gcgttgacggtggtgattaataaccaaacttacgccgccacggtgctggcaaacggcagctggagcgtcggcgtt

SEQ ID NO: 420746 - DNA, 75 bp, synthetic construct
  source 1..75: mol_type = other DNA
aagttgttggcgatgttgaagacgctgagattgagttcgttgacccagaggaagctgacgaggaccaagcagaag

SEQ ID NO: 420747 - DNA, 75 bp, synthetic construct
  source 1..75: mol_type = other DNA
accatcgccagtgacgatattctcaacgtgagcgaagcgggcgcggggatcaccatcagcggcaccaccacggcg

SEQ ID NO: 420748 - DNA, 75 bp, synthetic construct
  source 1..75: mol_type = other DNA
gagtgcggcagtgatgtacagcctgatcggtagctgcaaacttaacggaatcgagccggaaacgtggctacgcca

SEQ ID NO: 420749 - DNA, 75 bp, synthetic construct
  source 1..75: mol_type = other DNA
cggcgacgccacggtacaggccagcgtcagcaatattaacggcaacacggcttcggcaacccacgcctacagcgt

SEQ ID NO: 420750 - DNA, 75 bp, synthetic construct
  source 1..75: mol_type = other DNA
gtttacctgctttgctaaacaaatccctgcatcttcagtagaagaactgaccaaggggatcatcgactggcataa

SEQ ID NO: 420751 - DNA, 75 bp, synthetic construct
  source 1..75: mol_type = other DNA
ttccgctgatatctggcctgaactggcgaagaccgtgccgggggcgtggggccgaattcaactgacggatgcgat

SEQ ID NO: 420752 - DNA, 75 bp, synthetic construct
  source 1..75: mol_type = other DNA
tggacggtgaatgtgccgcctgccgatctcgctgcgctaccggacggcgcgggcaacgtgcaggcgagcgtcagc

SEQ ID NO: 420753 - DNA, 75 bp, synthetic construct
  source 1..75: mol_type = other DNA
tgacgcaattgatatgctgatcgaaaaagaaacggttgaagcctatcatatgaaagggaagagccatgactgcgg

SEQ ID NO: 420754 - DNA, 75 bp, synthetic construct
  source 1..75: mol_type = other DNA
tcatcgataccgcttctgcggatccgctgcgctacaacctggcggcgatggtggcgcgtttcaacgaaacaggcc

SEQ ID NO: 420755 - DNA, 75 bp, synthetic construct
  source 1..75: mol_type = other DNA
gttgatgccatgctgatgaccggcgacagctacgactgcggtaagaagatgggctatatgcaggcattcgttaag

SEQ ID NO: 420756 - DNA, 75 bp, synthetic construct
  source 1..75: mol_type = other DNA
gcagccaggtgctggcgaaacgtatgccgggcgatctttctgaatactcggttattcagactaaagagccgctga

SEQ ID NO: 420757 - DNA, 75 bp, synthetic construct
  source 1..75: mol_type = other DNA
atgtcatttacggctcccgggggaaaaagcctatccatgccattctgacggaaagcgcttattccgctgcgtatg

SEQ ID NO: 420758 - DNA, 75 bp, synthetic construct
  source 1..75: mol_type = other DNA
ggttcagttggtgtgatcactatgcaccttgactggacccagcggataaaagatgacggcctcaaagtcaccatc

SEQ ID NO: 420759 - DNA, 75 bp, synthetic construct
  source 1..75: mol_type = other DNA
ttgaaaataacgtcgctaaaacaaatctttgcgccattctggaacaacacggcctgactaacctgcacagcctgt

SEQ ID NO: 420760 - DNA, 75 bp, synthetic construct
  source 1..75: mol_type = other DNA
tcggcatgatgatatagagaattttgttcgacgtagtttcacgaaaaataaaatggatatacaaccatttgtccg

SEQ ID NO: 420761 - DNA, 75 bp, synthetic construct
  source 1..75: mol_type = other DNA
ctacgactggccgggcaatattcgtgaactgcgcaatatgatggagcgactggcgctgtttttaagtgtggaacc

SEQ ID NO: 420762 - DNA, 75 bp, synthetic construct
  source 1..75: mol_type = other DNA
agatgaagcgctggcggctattcagcaggacatcaacaccatgggcgaattgtttgtgaataccgtcgccagaaa

SEQ ID NO: 420763 - DNA, 75 bp, synthetic construct
  source 1..75: mol_type = other DNA
cgcaacagcgtgcgcccgcgaaaccagaacgcgcgaaaagtgagccgacccgcgtgatcgtgcgccctccagtgg

SEQ ID NO: 420764 - DNA, 75 bp, synthetic construct
  source 1..75: mol_type = other DNA
tgcgagcccgtagggctgcgaaaaaaatattgcgcaaagggatggcgctctcgctggtctttttccatcgttacc

SEQ ID NO: 420765 - DNA, 75 bp, synthetic construct
  source 1..75: mol_type = other DNA
taatatgaatgacattatggaaagtatcattaaaaaacgagatatcatttttatgatgacaccgaagaaggtaaa

SEQ ID NO: 420766 - DNA, 75 bp, synthetic construct
  source 1..75: mol_type = other DNA
gatatgggcgctttgcttgcgggagccagtgtcagaggggaatttgaaaatcgcttaaaatcgctgttaaccgaa

SEQ ID NO: 420767 - DNA, 75 bp, synthetic construct
  source 1..75: mol_type = other DNA
cagagagaaggaagtcagacaacttatcgatattttgcttcgtcgcagacagaataatccaatactgaccggtga

SEQ ID NO: 420768 - DNA, 75 bp, synthetic construct
  source 1..75: mol_type = other DNA
tcaatattaccttacaatgtggtcgatgcgttatattgtaatgtggatattgcagagaagttactgctgtcttta

SEQ ID NO: 420769 - DNA, 75 bp, synthetic construct
  source 1..75: mol_type = other DNA
cagaagcggagaacagttttgttgtttctgttaacgggcaggaggtggatttaagtaagctcacctcagcacggc

SEQ ID NO: 420770 - DNA, 75 bp, synthetic construct
  source 1..75: mol_type = other DNA
tcgtattttaaaatctttataataagatcaacttttgctgttggctgtgcagccttggcctcatttgttcctgga

SEQ ID NO: 420771 - DNA, 75 bp, synthetic construct
  source 1..75: mol_type = other DNA
gagtgcgcctcttctcatcgctgatgcatgcttacgctgagctttcgtggtggtctcgcaaacacagtgacggtg

SEQ ID NO: 420772 - DNA, 75 bp, synthetic construct
  source 1..75: mol_type = other DNA
gaaacggctgatgcatttcgtgtccgtgtgcgtgaggcatttcgccgtcgtgttgcggagactgaacagcatggc

SEQ ID NO: 420773 - DNA, 75 bp, synthetic construct
  source 1..75: mol_type = other DNA
gcagttgcggcaggcacagcaggcgcaggaaagagtgcttgctgcgcgggcagaagcggagaacagttttgttgt

SEQ ID NO: 420774 - DNA, 75 bp, synthetic construct
  source 1..75: mol_type = other DNA
gaacaggttgctcttacagaagcggagaacagttttgtggttagcgttggtggtcaggatgtggatttgagcaaa

SEQ ID NO: 420775 - DNA, 75 bp, synthetic construct
  source 1..75: mol_type = other DNA
attgctgagactcttaatgagttatctttatttaatcctggtagaattctgaaagctattgaaagtgaacttatc

SEQ ID NO: 420776 - DNA, 75 bp, synthetic construct
  source 1..75: mol_type = other DNA
ttacgatgccattatccaggtcggcggatcgttttttgtcgatctctacggcgtgccgcagtttgaacacgcgct

SEQ ID NO: 420777 - DNA, 75 bp, synthetic construct
  source 1..75: mol_type = other DNA
cgtactggaacgcagtcggggaggcgaaatgaaggtcggcttcttcttattgaaatttccgctgtcgtcggaaac

SEQ ID NO: 420778 - DNA, 75 bp, synthetic construct
  source 1..75: mol_type = other DNA
accagcatcaggtattgctctcacgcgtcaccgacactggcaagctgcgtaatatcgccatcgcccagggattca

SEQ ID NO: 420779 - DNA, 75 bp, synthetic construct
  source 1..75: mol_type = other DNA
ttcccagcgaattccatgtaaaagacacatgggaaaactataaaatcgcagcgagtttcatatccagacgctatc

SEQ ID NO: 420780 - DNA, 75 bp, synthetic construct
  source 1..75: mol_type = other DNA
cgaactggcaccgttcgacaaacgccttggcaccactcaacaagcgtatgaaaaagcctttgccggggtggtcaa

SEQ ID NO: 420781 - DNA, 75 bp, synthetic construct
  source 1..75: mol_type = other DNA
acttccggcgctgaacgcacgacttaacgaagctgtcagtagtgagcgtcagacaggaatgctgatggtgcaatc

SEQ ID NO: 420782 - DNA, 75 bp, synthetic construct
  source 1..75: mol_type = other DNA
tgccaaatttggtgccagagatatagatgctgtacttaatacatctgttctccctgttcttgcaagacatttaat

SEQ ID NO: 420783 - DNA, 75 bp, synthetic construct
  source 1..75: mol_type = other DNA
ggaaaagcaccataatgtctctatcagggaagaagccataactgcaacggtacatttatcagaccgttatctgca

SEQ ID NO: 420784 - DNA, 75 bp, synthetic construct
  source 1..75: mol_type = other DNA
tttcataataatgacatcaaaccttgccagtgaaaaaatcacaagtctatggaatgatggtgagataaataaaga

SEQ ID NO: 420785 - DNA, 75 bp, synthetic construct
  source 1..75: mol_type = other DNA
gccgtcagtcgcgaacgtcagacgggaatgcagatggtgcagtctgtgcttgagcgcatcggggaggcgaaatga

SEQ ID NO: 420786 - DNA, 75 bp, synthetic construct
  source 1..75: mol_type = other DNA
gaaggtttagccctgcaagttgcatccggccgtgtgcctgacgcactgaagaatgtcaggatccttgcgcttgat

SEQ ID NO: 420787 - DNA, 75 bp, synthetic construct
  source 1..75: mol_type = other DNA
aactctgctggaaaaaacatggatacatgccagcactaaatggcagtctaatcatatagatatccctgtcttgtt

SEQ ID NO: 420788 - DNA, 75 bp, synthetic construct
  source 1..75: mol_type = other DNA
ccagaagaaaaacagcgtaaaaagcctggtcgaaaacctaaggcggcagcagatgaacctgacaacgaagggtga

SEQ ID NO: 420789 - DNA, 75 bp, synthetic construct
  source 1..75: mol_type = other DNA
cgtgattgcatttggcgataactttaatgatatcagtatgctggaagctgctggcacaggtgtggcaatgggcaa

SEQ ID NO: 420790 - DNA, 75 bp, synthetic construct
  source 1..75: mol_type = other DNA
caacagcagatctccaccatccgtctcgatccaccgtcgcttggcaagctcgagatcgccgtacaactcgacaac

SEQ ID NO: 420791 - DNA, 75 bp, synthetic construct
  source 1..75: mol_type = other DNA
cgaaccagagaaagcagacaagaagacgatgaaagactcagagtcaaaatcggttgaagacgaagatattattcg

SEQ ID NO: 420792 - DNA, 75 bp, synthetic construct
  source 1..75: mol_type = other DNA
cctgatgatcttccagcaggcggttgaggatcttattgtcgaaaacgatcgtgtggtcggtgctgtcacccaaat

SEQ ID NO: 420793 - DNA, 75 bp, synthetic construct
  source 1..75: mol_type = other DNA
acagcatggcgataatccaatgccagtgttttcgttcatgggcaatgtagcgcaacatccgcaacaggtaccgtg

SEQ ID NO: 420794 - DNA, 75 bp, synthetic construct
  source 1..75: mol_type = other DNA
tgctgatgacgcggtaaaagctcgcgctaacattgtgattggtgacaataccactgacagcattgcccagttcat

SEQ ID NO: 420795 - DNA, 75 bp, synthetic construct
  source 1..75: mol_type = other DNA
cgaaccagagaaagcagacaataagacgataaaagacttagagtcaaaatcggttgaagacgaagatattattcg

SEQ ID NO: 420796 - DNA, 75 bp, synthetic construct
  source 1..75: mol_type = other DNA
tgttacgtcgtttgtgcgaagcaagcgaacctgaaaaaacgaatgccagtgctgctgagaaccaaaaagctgctg

SEQ ID NO: 420797 - DNA, 75 bp, synthetic construct
  source 1..75: mol_type = other DNA
cgaacctgaaaaaacagataccagtgctgcagagaaccaaaaagcggctgaagatgacgatatcatccgcctggt

SEQ ID NO: 420798 - DNA, 75 bp, synthetic construct
  source 1..75: mol_type = other DNA
cgaaccagagaaagcagacaagaagacgatcaaagactgagagtcaaaatcggttgaagacgaagatattattcg

SEQ ID NO: 420799 - DNA, 75 bp, synthetic construct
  source 1..75: mol_type = other DNA
cgaaccagagaaagcagacaacaagacgatgaaagactgagagtcaaaatcggttgaagacgaagatattattcg

SEQ ID NO: 420800 - DNA, 75 bp, synthetic construct
  source 1..75: mol_type = other DNA
cgaaccagagaaagcagacaataagacgattaaagactaagagtcaaaatcggttgaagacgaagatattattcg

SEQ ID NO: 420801 - DNA, 75 bp, synthetic construct
  source 1..75: mol_type = other DNA
atggccgcggcgcgtatgggtcaacagactttgcttttgacacacaatatcgacactctggggcagatgagctgc

SEQ ID NO: 420802 - DNA, 75 bp, synthetic construct
  source 1..75: mol_type = other DNA
tattattgcactgttgctgttcccgcccaaagctcccgtcgtagtgcattggcatagcgatatagtaaaacagaa

SEQ ID NO: 420803 - DNA, 75 bp, synthetic construct
  source 1..75: mol_type = other DNA
atacctagatgataactatattattataataggtggacaaggccaattaacatcatcattaaatgaaaagatcag

SEQ ID NO: 420804 - DNA, 75 bp, synthetic construct
  source 1..75: mol_type = other DNA
cagtaccgacaaccccgccaccgatgcggtgcgctttcgtccccatcccggaatgggctttccggtcagcgagtt

SEQ ID NO: 420805 - DNA, 75 bp, synthetic construct
  source 1..75: mol_type = other DNA
gcggagataccaaaatctgggggcgcaagctgaaaacgaaaaccgttgatcctgatgatgtagctgtgcacttag

SEQ ID NO: 420806 - DNA, 75 bp, synthetic construct
  source 1..75: mol_type = other DNA
gcgggcgaaattacttatcaaactatcaatgattacggtgccacaacggccaggcaaaagggaacgatgcaataa

SEQ ID NO: 420807 - DNA, 75 bp, synthetic construct
  source 1..75: mol_type = other DNA
ctattaaagcatctaaaagaaaaatataaaaataaaaagatagttttctctcttgggaggctggtttattacaaa

SEQ ID NO: 420808 - DNA, 75 bp, synthetic construct
  source 1..75: mol_type = other DNA
cagacgaacaggcggcggaacaggttgagattcaggttaaatacgaaggttatattgcgcgccagcaagatgaga

SEQ ID NO: 420809 - DNA, 75 bp, synthetic construct
  source 1..75: mol_type = other DNA
ggtgatccgccgtccattccgctctctcgccgtttgcgtgaactgccgctgcgcgttggtcgtctgaaaaccggg

SEQ ID NO: 420810 - DNA, 75 bp, synthetic construct
  source 1..75: mol_type = other DNA
aacccggcgatcggcggtattgggaagggacatctggtaaaagaagtggatgcactcggcggtctgatggcgaaa

SEQ ID NO: 420811 - DNA, 75 bp, synthetic construct
  source 1..75: mol_type = other DNA
cggtaaagagattaaaagcgccatcccgatgggctgtgtgctgacgctgccagcaaccggttcagaatccaacgc

SEQ ID NO: 420812 - DNA, 75 bp, synthetic construct
  source 1..75: mol_type = other DNA
atgcacggtctggatcacgcgcaaacactggctatcgtcctgcctgcactgtggaatgaaaaacgcgagaccaag

SEQ ID NO: 420813 - DNA, 75 bp, synthetic construct
  source 1..75: mol_type = other DNA
gcgtaccgcaggactgggcaacgcatatgctgggccacgaactgactgcgatgcacggtctggatcacgcgcaaa

SEQ ID NO: 420814 - DNA, 75 bp, synthetic construct
  source 1..75: mol_type = other DNA
cagaggcagatcattgacctgctcgataacgaagccggactaacagaacaggagcgcaaactactccacgtcctg

SEQ ID NO: 420815 - DNA, 75 bp, synthetic construct
  source 1..75: mol_type = other DNA
aggcacaggagagcgaacgaaaacaggcggtccaaaaacgaaatcgagggaaaaaaacaacgacgagaacgcaat

SEQ ID NO: 420816 - DNA, 75 bp, synthetic construct
  source 1..75: mol_type = other DNA
accggctctttctcgcggctgggctactgatcgaagcaggactggtagacacaaaaacaggcgagctatgctata

SEQ ID NO: 420817 - DNA, 75 bp, synthetic construct
  source 1..75: mol_type = other DNA
cgtcgctgctgtttagcagcgccaccgtatacggtgctgaagagttcgtagtgaaagacattcatttcgaaggcc

SEQ ID NO: 420818 - DNA, 75 bp, synthetic construct
  source 1..75: mol_type = other DNA
tgcctacccacgtgtacagtcgcagcctgaaattaacgatgctgacaaaaccgttaaattacatgtgaatgttga

SEQ ID NO: 420819 - DNA, 75 bp, synthetic construct
  source 1..75: mol_type = other DNA
ggtacgggttatgctgttggtattaacggtactaaaaacgattaccagacctatgctgaactgtccgttaccaac

SEQ ID NO: 420820 - DNA, 75 bp, synthetic construct
  source 1..75: mol_type = other DNA
ctgatcgaagcaggactggtagacacaaaaacaggcgagctatgctataaaaaagacaggatattacaagcactt

SEQ ID NO: 420821 - DNA, 75 bp, synthetic construct
  source 1..75: mol_type = other DNA
atgccacctgctttgacagtgaaggtaagaagaaatattcgcgacgcaaggatgttgtgcatttactgacctacc

SEQ ID NO: 420822 - DNA, 75 bp, synthetic construct
  source 1..75: mol_type = other DNA
aggtaaatcaggagcaggtcacgctggaaaccgacggtcttctgaaatcagaaatcaatccgctggtacaggttc

SEQ ID NO: 420823 - DNA, 75 bp, synthetic construct
  source 1..75: mol_type = other DNA
aggcacaggagagcgaacgaaaacaggcggtccaaaaacgaatcgagggaaaaaaacaacgacgggaacgaaatc

SEQ ID NO: 420824 - DNA, 75 bp, synthetic construct
  source 1..75: mol_type = other DNA
gaagctcggagaacagaccgcgcgacagagacagattattgacctgctagacaacgaatccggactcacagaaca

SEQ ID NO: 420825 - DNA, 75 bp, synthetic construct
  source 1..75: mol_type = other DNA
acctgctagacaacgaatccggactcacagaacaggaacgcaaacttctccacgtactggcaacagcggaaaaaa

SEQ ID NO: 420826 - DNA, 75 bp, synthetic construct
  source 1..75: mol_type = other DNA
gcttttctgctgacgatttcacctttaactatggctggacgtacaacaaactcgaccgtggttatttcccaacgg

SEQ ID NO: 420827 - DNA, 75 bp, synthetic construct
  source 1..75: mol_type = other DNA
aacctcattgatagtgaatgccatgttgctgaactggaagaagcgctacgcgataagcaggcgttacttgaagca

SEQ ID NO: 420828 - DNA, 75 bp, synthetic construct
  source 1..75: mol_type = other DNA
gcgaacaggaacttaaagattacggtgtggatattgatgcgctcaacgccttcaaatttctgaccggaccagaaa

SEQ ID NO: 420829 - DNA, 75 bp, synthetic construct
  source 1..75: mol_type = other DNA
aatccgtgctgcgggtaaagcggctggttttctggctgtggctcctgatatggcgcagcaatgcctggcgtgggg

SEQ ID NO: 420830 - DNA, 75 bp, synthetic construct
  source 1..75: mol_type = other DNA
cgggaaagaaaccagcaatacataaaacgccgcgatcaggagaacgaggatattgcgctaacggtagggaaactg

SEQ ID NO: 420831 - DNA, 75 bp, synthetic construct
  source 1..75: mol_type = other DNA
tgcgagaggcggcacagaacgcggaagatttaggtgggattaagaattacaagcgagctgagcaagctgttgccg

SEQ ID NO: 420832 - DNA, 75 bp, synthetic construct
  source 1..75: mol_type = other DNA
cgaagttcttgtcgttgtttctggttttactggttgcggaaaaagcgccattgccggggaaatagaaatcgcgat

SEQ ID NO: 420833 - DNA, 75 bp, synthetic construct
  source 1..75: mol_type = other DNA
cgatagaggaaattgtggccgcctgttgccatttccaccagcaggcggacgattatcaaatcaatatgtcacgca

SEQ ID NO: 420834 - DNA, 75 bp, synthetic construct
  source 1..75: mol_type = other DNA
gtattcgatatgcagatgttgatgtcatgaaaattgctggagatgcccagctttctaccccatgcactgacagca

SEQ ID NO: 420835 - DNA, 75 bp, synthetic construct
  source 1..75: mol_type = other DNA
cgaggatattgcgctaacggtagggaagttgcgcgttgagcttgaggcagaaaaacagcgggcaaaggatctgtt

SEQ ID NO: 420836 - DNA, 75 bp, synthetic construct
  source 1..75: mol_type = other DNA
cgccgaacgcgatgctcttcgtgaaggtgagatgggcgacgcaggcatagcaacacacgggccgcagctgatatc

SEQ ID NO: 420837 - DNA, 75 bp, synthetic construct
  source 1..75: mol_type = other DNA
agtcaggtatagccggtctgatacacctcggtattcgatatgcagatgttgaggtcatgagaattgctggagatg

SEQ ID NO: 420838 - DNA, 75 bp, synthetic construct
  source 1..75: mol_type = other DNA
cgcctttttgcattattcacggatgatgaaaaccgccgacgatgctctacgcgacggtgctcgattctttagcga

SEQ ID NO: 420839 - DNA, 75 bp, synthetic construct
  source 1..75: mol_type = other DNA
aatcaatccgctggtacaggttcgtcgttatgcctgtgataccgtaaatgctttacctgcagactcacgtttgcg

SEQ ID NO: 420840 - DNA, 75 bp, synthetic construct
  source 1..75: mol_type = other DNA
tggtctcttctgtcgtcattggtttttccctatcgggttgtgccggtgacaccggcactacgccaggcaccgctc

SEQ ID NO: 420841 - DNA, 75 bp, synthetic construct
  source 1..75: mol_type = other DNA
tggtttcagctttagttgcaagtgcgtctctggtagggtgtgctgggaacgcaggtcaatcccctaactccgccc

SEQ ID NO: 420842 - DNA, 75 bp, synthetic construct
  source 1..75: mol_type = other DNA
tcctgccttgtccagcttggtccgttgccggtgttgattccggcgatcatctggctttactggaccggcgatacc

SEQ ID NO: 420843 - DNA, 75 bp, synthetic construct
  source 1..75: mol_type = other DNA
gatcctccggcgctggcgtttgctaataatcttcatccaaccagcggtgcggcggcgctctcttacgccactgtc

SEQ ID NO: 420844 - DNA, 75 bp, synthetic construct
  source 1..75: mol_type = other DNA
gttatctgcgggaatgcattgaagccagagggttggcgtcacgggttacggtatcccattttcacagctggtgtg

SEQ ID NO: 420845 - DNA, 75 bp, synthetic construct
  source 1..75: mol_type = other DNA
gcatcgtgtcattcatggtgtggccggttccggaaaaaccatgattcttttgttccgttgcctttacctggcaga

SEQ ID NO: 420846 - DNA, 75 bp, synthetic construct
  source 1..75: mol_type = other DNA
aactcgtctggcaggcgctcgcggtgatgccgcagtcctgctggcggcgcaggctatccgcgcggtggcgctggg

SEQ ID NO: 420847 - DNA, 75 bp, synthetic construct
  source 1..75: mol_type = other DNA
gtattgttacgcttgcaaaagatcatgtttggtcgccgttcgctcgccgttctggtgatgacgctgttattagtg

SEQ ID NO: 420848 - DNA, 75 bp, synthetic construct
  source 1..75: mol_type = other DNA
tgtggtggtgacagcgttagtacaggcagtgcttggcggtatcggcctcgccgtatccggcgtaccttatgcaac

SEQ ID NO: 420849 - DNA, 75 bp, synthetic construct
  source 1..75: mol_type = other DNA
tgtttggtcgccgctctctcgccgttctggtgatgacgctgttattagtgatggtgtttatcatccctattgctt

SEQ ID NO: 420850 - DNA, 75 bp, synthetic construct
  source 1..75: mol_type = other DNA
tgcgtgggtggaagaagtcccgccaccgactgaccagccggaagaaattctcgaagaactgggcgaaattgaaaa

SEQ ID NO: 420851 - DNA, 75 bp, synthetic construct
  source 1..75: mol_type = other DNA
tggtttgattgctttcgggatgatcggtctgtttattggtccggttctgttagccgtttcctggcgtctgtttgc

SEQ ID NO: 420852 - DNA, 75 bp, synthetic construct
  source 1..75: mol_type = other DNA
atccggattttgtcattattgacccggagaacggactggtatttctggaggtcaaggactggacgatttccacgc

SEQ ID NO: 420853 - DNA, 75 bp, synthetic construct
  source 1..75: mol_type = other DNA
aggcccgtgatcagaggggccttaacgccctgaaagaggcggttccagcgacggcacaactacagatgcgggtta

SEQ ID NO: 420854 - DNA, 75 bp, synthetic construct
  source 1..75: mol_type = other DNA
agtcttcctgccaagcgaaatactggaacaacggctatggctggtcgcaggtaatttctgaactgaaaacgctgg

SEQ ID NO: 420855 - DNA, 75 bp, synthetic construct
  source 1..75: mol_type = other DNA
attttgatcaccaggattttctgcaatgtcccaggcacaaaggtactgagcggcagtatgagtgctcccggctga

SEQ ID NO: 420856 - DNA, 75 bp, synthetic construct
  source 1..75: mol_type = other DNA
ctggagtgatatggctgtgctgtgtccggcagagttttcagtgaaacaactgacagaggttatgacacagcgtgg

SEQ ID NO: 420857 - DNA, 75 bp, synthetic construct
  source 1..75: mol_type = other DNA
gatgtggtgcatttactgacgtaccagagcagtaaggggctggagtttccgtatgtggcggttatcaatgcttct

SEQ ID NO: 420858 - DNA, 75 bp, synthetic construct
  source 1..75: mol_type = other DNA
atatggataacgtgtgtgatctggcaggccagcccgacacaaccatgtacaaagatgatggagaaacaagtggcc

SEQ ID NO: 420859 - DNA, 75 bp, synthetic construct
  source 1..75: mol_type = other DNA
ggggcgcaaactgactgcagttaaaccgatcattattgatgttaaaaacgcgggcgcggaattttacgatcagga

SEQ ID NO: 420860 - DNA, 75 bp, synthetic construct
  source 1..75: mol_type = other DNA
tggcgagaatattccctgtaaatcggatgaatttggcgtattgaaaataagctcggtaacttctggaatattcaa

SEQ ID NO: 420861 - DNA, 75 bp, synthetic construct
  source 1..75: mol_type = other DNA
gtgacggctgacagaaagaattacccggagaaatgcttcagcgcactggaagaggctgtgaacagaggaaaaatc

SEQ ID NO: 420862 - DNA, 75 bp, synthetic construct
  source 1..75: mol_type = other DNA
cagtttgaatgcacccgacttattacagggaaacaggtgtgtggggttattgattccctgcacaattatttaatt

SEQ ID NO: 420863 - DNA, 75 bp, synthetic construct
  source 1..75: mol_type = other DNA
tgggtatcgggttttgtgtattgaccggaatgctcatgccggtaatggttttgtctggaatcatattccatgggg

SEQ ID NO: 420864 - DNA, 75 bp, synthetic construct
  source 1..75: mol_type = other DNA
agtggtggtcgataaagatcagctggttaccagccgcacaccggacgatctgccagcgtttaaccgcgaggcatt

SEQ ID NO: 420865 - DNA, 75 bp, synthetic construct
  source 1..75: mol_type = other DNA
tcggatgtcttcgctgcggaagcagacctcgctgctgagctggcctgtacagcggcttcgccagccttcgttgtg

SEQ ID NO: 420866 - DNA, 75 bp, synthetic construct
  source 1..75: mol_type = other DNA
gaagctgcgctgctggcgctcgaggctgcgctcgtttctgatgattttgccgcctcttttgaagccgacgcatcc

SEQ ID NO: 420867 - DNA, 75 bp, synthetic construct
  source 1..75: mol_type = other DNA
atgtcttcgctgcggaagcagacctcgctgctgctggcctgttcagtggcttcgccagccttcgttgtggctgtt

SEQ ID NO: 420868 - DNA, 75 bp, synthetic construct
  source 1..75: mol_type = other DNA
atgcgttcgtttctgatgattttgccgcctcttttgaagccgacgcatcccgggctgaggtggcagcttctgacg

SEQ ID NO: 420869 - DNA, 75 bp, synthetic construct
  source 1..75: mol_type = other DNA
tcgtttctgacgttttcgcggcaccggcactggtggccgccgcgctttttgaggactctgcagcggcagcacttt

SEQ ID NO: 420870 - DNA, 75 bp, synthetic construct
  source 1..75: mol_type = other DNA
gccgtttcagaggacttagcgtttgtctcagacgtctttgccgccttcgcggaatttcctgccgccgtagccgag

SEQ ID NO: 420871 - DNA, 75 bp, synthetic construct
  source 1..75: mol_type = other DNA
gccgtttttgaggattctgcacgggtttccgacgctttcgcgttcgtttcggatgtcttcgctgcggaagctgac

SEQ ID NO: 420872 - DNA, 75 bp, synthetic construct
  source 1..75: mol_type = other DNA
gccacggcggatgcaatatcctctgcccgttttgccgctgtctcggcgcgcgttgccgcggattccgccgtactt

SEQ ID NO: 420873 - DNA, 75 bp, synthetic construct
  source 1..75: mol_type = other DNA
tcggatgtcttcgctgcggaagcagacctcgctgctgcgctggcctgtacagcggcttcgccagcattcgttgtg

SEQ ID NO: 420874 - DNA, 75 bp, synthetic construct
  source 1..75: mol_type = other DNA
ctgctgacgcctgtctggtcgcctcatcttttgaagcagacgcagatgatgccgatgacgccgccgaactggctg

SEQ ID NO: 420875 - DNA, 75 bp, synthetic construct
  source 1..75: mol_type = other DNA
agcagcattgtctgctgaagtctttgcatttgtttcagaggtttttgctgcagaagcagacctcgctgctgcagt

SEQ ID NO: 420876 - DNA, 75 bp, synthetic construct
  source 1..75: mol_type = other DNA
gctttttgaggactctgcagcagcagcacttttcgatgcttcagtggcctttgttgatgccgttcctgcgctgga

SEQ ID NO: 420877 - DNA, 75 bp, synthetic construct
  source 1..75: mol_type = other DNA
aggctgcactgctggcgcttgtggaggcgttcgtttctgatgattttgccgcctctttggaggccgccgcatctc

SEQ ID NO: 420878 - DNA, 75 bp, synthetic construct
  source 1..75: mol_type = other DNA
ggaattctcatttaaagccgttaacccggcacagtgtagtaacctgacaggtaagactgcaaccataacatggta

SEQ ID NO: 420879 - DNA, 75 bp, synthetic construct
  source 1..75: mol_type = other DNA
gatcgttgtggattgaagatggtcatttgtgtcaacaggaggcattttctgtcaatgtggttgataccactggag

SEQ ID NO: 420880 - DNA, 75 bp, synthetic construct
  source 1..75: mol_type = other DNA
cttgattgtgacggttgcatggaacttgttaagaaattctatgcagatcgggacaagtatcggatagatattgtt

SEQ ID NO: 420881 - DNA, 75 bp, synthetic construct
  source 1..75: mol_type = other DNA
gattcggcgcgggaaattcttaaacaacgcagttgtagattcaattggtcaacgcaacagttatgtgaaaacatg

SEQ ID NO: 420882 - DNA, 75 bp, synthetic construct
  source 1..75: mol_type = other DNA
ggctggcgcagtcatgataatggctgattcggcgcgggaaatccttaaacaacgaagtaatgagtcatgttcaga

SEQ ID NO: 420883 - DNA, 75 bp, synthetic construct
  source 1..75: mol_type = other DNA
ttcagatggttttaaatttcaggcaaaactgaaaggtggaactacccctggcgattatcagggtgttgctgctta

SEQ ID NO: 420884 - DNA, 75 bp, synthetic construct
  source 1..75: mol_type = other DNA
aagttatggttccctttgaagagatcgcgagacaaatgggggttttgcatcgctatgagaatgggcgtttagctt

SEQ ID NO: 420885 - DNA, 75 bp, synthetic construct
  source 1..75: mol_type = other DNA
ttggctgcatttgatcggtatagaagttctttgggtgataagtttaattctgctgatcgtgccgctattgtcgca

SEQ ID NO: 420886 - DNA, 75 bp, synthetic construct
  source 1..75: mol_type = other DNA
ttggtattgatgtcagtaaggattttctggatgtacatgtgggtaatgtagccctgcgtcgtgttcctaaccgct

SEQ ID NO: 420887 - DNA, 75 bp, synthetic construct
  source 1..75: mol_type = other DNA
ctgtagaagaaatcaggaattcctattttattagtcttgatgaggcccccttccctctggaaactgtagcgtcca

SEQ ID NO: 420888 - DNA, 75 bp, synthetic construct
  source 1..75: mol_type = other DNA
cagtttctacgaaccggtgagtgaagaatccattcgttatatcaaagacttgtcacatggaatgcagcgcataga

SEQ ID NO: 420889 - DNA, 75 bp, synthetic construct
  source 1..75: mol_type = other DNA
caaacacaaacaaaaaaaagcccgcaattacgcgggcttagcggcatttcatgccatcaggtgcctggctgtgcc

SEQ ID NO: 420890 - DNA, 75 bp, synthetic construct
  source 1..75: mol_type = other DNA
ccgccgcgctttttgaggactctgcagcggcagcactttttgatgcttcagtggcctttgttgatgccgttcctg

SEQ ID NO: 420891 - DNA, 75 bp, synthetic construct
  source 1..75: mol_type = other DNA
acctcgctgctgcagtggcttgctcagtggctttgccagccttcgttgtggctgttgaagcggatgatgcggcgc

SEQ ID NO: 420892 - DNA, 75 bp, synthetic construct
  source 1..75: mol_type = other DNA
actgaaaacataaaaaaatattccattatgtcatttgcaatatatgaaatattcaaccttttaaatatttataaa

SEQ ID NO: 420893 - DNA, 75 bp, synthetic construct
  source 1..75: mol_type = other DNA
ttgaatttgacacaattgtatatcatgatggaatatgtaaagaagatcaagatcgctttaataaaataacatcaa

SEQ ID NO: 420894 - DNA, 75 bp, synthetic construct
  source 1..75: mol_type = other DNA
cgataatgattatctatataagatgcttaaaggattttctaggatcagcaatagcacgattcgtttaactaactc

SEQ ID NO: 420895 - DNA, 75 bp, synthetic construct
  source 1..75: mol_type = other DNA
gctgttgaagcagacgatgcggcactttctgccgattttccggcggcagtggctctggctgaggcctgcccggca

SEQ ID NO: 420896 - DNA, 75 bp, synthetic construct
  source 1..75: mol_type = other DNA
atgcagccgctgtttttgaacctgccgcagctgaggcgctctgtcccgctgctgtttcagaagacttagcgttcg

SEQ ID NO: 420897 - DNA, 75 bp, synthetic construct
  source 1..75: mol_type = other DNA
cgtcatgcccgccagttgttgcgtggtaaagagcttatccccgtgcacattgaagcccggctgaatgcttcgact

SEQ ID NO: 420898 - DNA, 75 bp, synthetic construct
  source 1..75: mol_type = other DNA
ccagtagcgttccgttgctggaaggtattcagaccgccgctgccgtgtcggcaaatcgttatgtcgagcagcaac

SEQ ID NO: 420899 - DNA, 75 bp, synthetic construct
  source 1..75: mol_type = other DNA
ctggtattgctggtggtggcaacgggcgtggtcactattttgttgacggcggtagtgccgaaaattatcgaacag

SEQ ID NO: 420900 - DNA, 75 bp, synthetic construct
  source 1..75: mol_type = other DNA
gcaagggagacagaattggattaacgttgattcgtctcagcattgccattgtttttatatggattgggttattaa

SEQ ID NO: 420901 - DNA, 75 bp, synthetic construct
  source 1..75: mol_type = other DNA
tctcggacgtttttgccgccttcgcggaattgcctgccgctgttgccgaggaggctgcactactggcgctcgagg

SEQ ID NO: 420902 - DNA, 75 bp, synthetic construct
  source 1..75: mol_type = other DNA
ggcggcggtggcactgactgctgcctcctctgccttaatggacgcctcacgggccgatgatgcagctgctgtctc

SEQ ID NO: 420903 - DNA, 75 bp, synthetic construct
  source 1..75: mol_type = other DNA
tttttgatgactctgcagcagcagcactttttgctgcttcacgggcctttgtcgatgccgttcctgcgctggaag

SEQ ID NO: 420904 - DNA, 75 bp, synthetic construct
  source 1..75: mol_type = other DNA
tcagacgtctttgccgccttcgcggaattgcctgccgccgttgccgaggaagcggcactaaccggggcaaatgat

SEQ ID NO: 420905 - DNA, 75 bp, synthetic construct
  source 1..75: mol_type = other DNA
cttgtctggtcgcctcatcttttgaagcagacgccgatgaggccgatgacgccgccgaactggcggacgatgcgg

SEQ ID NO: 420906 - DNA, 75 bp, synthetic construct
  source 1..75: mol_type = other DNA
atttcctgccgccgttgccgaggaggctgcactactggcactcgaggctgcgctcgtttctgatgattttgccgc

SEQ ID NO: 420907 - DNA, 75 bp, synthetic construct
  source 1..75: mol_type = other DNA
ggaattgcctgccgccgttgccgaggaagcggaactactggcgctcgaggctgcgctcgtttctgatgattttgc

SEQ ID NO: 420908 - DNA, 75 bp, synthetic construct
  source 1..75: mol_type = other DNA
gtggatgccgtcgcggcgctgcccttcgctgctgacgcctgtctggtcgcctcatcttttgaagcagacgcagat

SEQ ID NO: 420909 - DNA, 75 bp, synthetic construct
  source 1..75: mol_type = other DNA
ctgtgtgatcattaaccaaatcattggttttattggctttcaggcgcggaccattgcgacatttcaggcttatct

SEQ ID NO: 420910 - DNA, 75 bp, synthetic construct
  source 1..75: mol_type = other DNA
cgccgaactggcggacgatgcggcagccgtttttgaggattctgcgctggtttccgacgctttcgcgttcgtctc

SEQ ID NO: 420911 - DNA, 75 bp, synthetic construct
  source 1..75: mol_type = other DNA
cctttttcgtcgtacttgcatcctcaagcgccacggcggatgcaatatcctctgcccgttttgccgctgtctcgg

SEQ ID NO: 420912 - DNA, 75 bp, synthetic construct
  source 1..75: mol_type = other DNA
ctttctgccgactttccggcagcggtggcactggctgaggcctgcccggcacttgttgacgcggcgctggcagat

SEQ ID NO: 420913 - DNA, 75 bp, synthetic construct
  source 1..75: mol_type = other DNA
tgtgtggcatctactccatatagacacagccgttgacagagtcattgaacagtttttccctaaacaagaagattg

SEQ ID NO: 420914 - DNA, 75 bp, synthetic construct
  source 1..75: mol_type = other DNA
gacacaccttgggaaaataaaatcaggtaaagcgcatctggaactacctaacggtgcggtcatttattttatcgg

SEQ ID NO: 420915 - DNA, 75 bp, synthetic construct
  source 1..75: mol_type = other DNA
ccagcatggtgtttaccgctgatgacgcagcagcatcaggagcaatgttgtttactgataactggctgaacgata

SEQ ID NO: 420916 - DNA, 75 bp, synthetic construct
  source 1..75: mol_type = other DNA
aaagcccggataaaccagcacaacagttgttactgcttttccacggtgtcggggataacccggtggcaatggggg

SEQ ID NO: 420917 - DNA, 75 bp, synthetic construct
  source 1..75: mol_type = other DNA
atccggttatcgatctggcgcatgcggttgcggcgcaggaagcgttaatcagtgccggtggtgacgtgacgctgg

SEQ ID NO: 420918 - DNA, 75 bp, synthetic construct
  source 1..75: mol_type = other DNA
acccccagattatggtgggctgggcaggggcatcgaaagatgcgccggtttccgataacgccggttacgccaacc

SEQ ID NO: 420919 - DNA, 75 bp, synthetic construct
  source 1..75: mol_type = other DNA
ttatccggggtggtacttttcagaaaaaagactttatggatgcaggtgtaggatgcatacactatggtcaaatct

SEQ ID NO: 420920 - DNA, 75 bp, synthetic construct
  source 1..75: mol_type = other DNA
tcgatgataaagtagataatttactttcttttattgtcgagagaataaaagaaaatcaaccatcctctcggatta

SEQ ID NO: 420921 - DNA, 75 bp, synthetic construct
  source 1..75: mol_type = other DNA
aactccatcaccgaaggtcttccgcgtgaaatcgagttgcgccagaaacaatacgaatactaccgtgatttactg

SEQ ID NO: 420922 - DNA, 75 bp, synthetic construct
  source 1..75: mol_type = other DNA
tacgcacactggaaaaataaaatcaggcaaaagtcatctggagcttccgaatggtgcggtcatttattttttcga

SEQ ID NO: 420923 - DNA, 75 bp, synthetic construct
  source 1..75: mol_type = other DNA
aagagctatgaaagctctctgacgcaaactgaactcttcgccgtaaagcgtcatgtctcagagcttcgcttgcat

SEQ ID NO: 420924 - DNA, 75 bp, synthetic construct
  source 1..75: mol_type = other DNA
gcttctcttgataagcttcccactgtggttccatccatcaacatagaagcttggaaatcccttagcgaaatttca

SEQ ID NO: 420925 - DNA, 75 bp, synthetic construct
  source 1..75: mol_type = other DNA
gctggagagcattaaagccgaaccagggttggcctcacgcgtcatcgcctttaatggtcgctatgccagtctgcc

SEQ ID NO: 420926 - DNA, 75 bp, synthetic construct
  source 1..75: mol_type = other DNA
atggaatttaaagatttaccaatgccattccaggaaatggcagcgaatatagttcattctcaattggcgactctt

SEQ ID NO: 420927 - DNA, 75 bp, synthetic construct
  source 1..75: mol_type = other DNA
cattccaggaaatggcagcgaatgtggttcgctctcaactggcgactcttgaccagagtaccgtagaaaaagaaa

SEQ ID NO: 420928 - DNA, 75 bp, synthetic construct
  source 1..75: mol_type = other DNA
aggatttacatgaaaaatacttcctggatctaatggacatcattgataaggggtttggcttgttaatgaaaaaga

SEQ ID NO: 420929 - DNA, 75 bp, synthetic construct
  source 1..75: mol_type = other DNA
aaacatagttaccggcgacaaggtatgcattaccccggaaagcgcgaaagccaatgattgggagtttgttcattg

SEQ ID NO: 420930 - DNA, 75 bp, synthetic construct
  source 1..75: mol_type = other DNA
ttgagctaaataagatgatcatctccggaattatggctcaaacactagttcgctacattcctaataagaccgtga

SEQ ID NO: 420931 - DNA, 75 bp, synthetic construct
  source 1..75: mol_type = other DNA
tggcgcaggaaaatcaactctcttaaaaatcctcagcggaaactatgcgccaaccacgggttctgtagtgattaa

SEQ ID NO: 420932 - DNA, 75 bp, synthetic construct
  source 1..75: mol_type = other DNA
agtgaccaagattgaccgcttaggaagggataacattgacgtacagaagaccgtcacaatgttacttggtatggg

SEQ ID NO: 420933 - DNA, 75 bp, synthetic construct
  source 1..75: mol_type = other DNA
acacaaagaggttttctgtaaataaaattcttaacgaactcgatgagaaaaatcttgagttcacgagtaaaatta

SEQ ID NO: 420934 - DNA, 75 bp, synthetic construct
  source 1..75: mol_type = other DNA
gttgttactgcttttccacggtgtcggggataacccggtagcgatgggtgagatcggcagctggtttgcgccgct

SEQ ID NO: 420935 - DNA, 75 bp, synthetic construct
  source 1..75: mol_type = other DNA
gttactccgaggatgcaaaataattatttggatgttagaagtgatgaagtacaaataatgacgttacataagtct

SEQ ID NO: 420936 - DNA, 75 bp, synthetic construct
  source 1..75: mol_type = other DNA
ggtaagccactggcgctctatagcgacaaagccagtgtcttcaggatcaacaataaaaatgccactggcggcgaa

SEQ ID NO: 420937 - DNA, 75 bp, synthetic construct
  source 1..75: mol_type = other DNA
gctaaaaacactacacaggcggttcaagagcataaaaagaagggcttatctcaatctcaggttgctaaagtcctt

SEQ ID NO: 420938 - DNA, 75 bp, synthetic construct
  source 1..75: mol_type = other DNA
accgctgagcttaacatgcgtaaaaaacagtacaactactatcgtgaccagttgttgagttttgatgagagtagt

SEQ ID NO: 420939 - DNA, 75 bp, synthetic construct
  source 1..75: mol_type = other DNA
caaaggggcatttaccgccgttgatggcgaacgcacgccaatgaatgagggcgattttatcctgaccccacaatg

SEQ ID NO: 420940 - DNA, 75 bp, synthetic construct
  source 1..75: mol_type = other DNA
cgcctcccgcgtggcgcgtaccactgacagcactatctaccatgtagtggaaggtagcggacaagtcaccatcgg

SEQ ID NO: 420941 - DNA, 75 bp, synthetic construct
  source 1..75: mol_type = other DNA
ccggcgctgcgcgggcagtcttccatcaccgcgactttatatgccggtttgcaactgatcatgccgggcgaagtg

SEQ ID NO: 420942 - DNA, 75 bp, synthetic construct
  source 1..75: mol_type = other DNA
ctgagaactggatctatattcctgagttcaaccgcgcaatgcgtgacgcctactacaaccgtccgagagagcagc

SEQ ID NO: 420943 - DNA, 75 bp, synthetic construct
  source 1..75: mol_type = other DNA
tggtttttgttcctgagttcaatcgaggcgtacgtgaggcgttttataaccgccctgtagaacagcgcgatgcct

SEQ ID NO: 420944 - DNA, 75 bp, synthetic construct
  source 1..75: mol_type = other DNA
tatccgatgccgtcgatgggcgctttcctgcaactgttaccaaaaggatttacttcacgtgtggcgcgtacgact

SEQ ID NO: 420945 - DNA, 75 bp, synthetic construct
  source 1..75: mol_type = other DNA
gcaagaagtaacgccgccatcgccacctgatccagacccgactcccgatcctgatcccacgccggatcctgatcc

SEQ ID NO: 420946 - DNA, 75 bp, synthetic construct
  source 1..75: mol_type = other DNA
ttgaccgccagcggtacaacgcagtcggcagtacgtgtcgaagaaggcaccctgaaaggcgatgttgcggatatc

SEQ ID NO: 420947 - DNA, 75 bp, synthetic construct
  source 1..75: mol_type = other DNA
aggatgagggtagcacattgactaaaacgggggctggtacactggagctgaccgccagcggtacaacgcagtcgg

SEQ ID NO: 420948 - DNA, 75 bp, synthetic construct
  source 1..75: mol_type = other DNA
gacattgtggaaagagatcaactggctgaacttaaagcaaaatattctacctactcgtgagcgcgccagtttaat

SEQ ID NO: 420949 - DNA, 75 bp, synthetic construct
  source 1..75: mol_type = other DNA
acgttctctgtatctggagcgtctgacactggcattatgtgacaagctggggcttgagctcatggacaggcttca

SEQ ID NO: 420950 - DNA, 75 bp, synthetic construct
  source 1..75: mol_type = other DNA
accagaaccagcggcgtcaaacacaaagtacgctggtttcagcagactcttcggcaggccggagtcatcgaacgc

SEQ ID NO: 420951 - DNA, 75 bp, synthetic construct
  source 1..75: mol_type = other DNA
tttgaaaagtgtaatcatcttgagcaggtgtctttgcgttacgaaaaaattatatggacctataaagacggcaat

SEQ ID NO: 420952 - DNA, 75 bp, synthetic construct
  source 1..75: mol_type = other DNA
gagcttaacatgcgtaaaaaacagtacaactactatcgagaccagttgctgagttttgataacgaagatgttcca

SEQ ID NO: 420953 - DNA, 75 bp, synthetic construct
  source 1..75: mol_type = other DNA
ctgatgtaaaaaaactgagcatccccatcccttgccctaacaatccggaaaaatctcttgccatccagtctgaaa

SEQ ID NO: 420954 - DNA, 75 bp, synthetic construct
  source 1..75: mol_type = other DNA
attaattcctgtcccttctatggcggtacaggaacgtatagtatccattctcgataaatttgataccctcactaa

SEQ ID NO: 420955 - DNA, 75 bp, synthetic construct
  source 1..75: mol_type = other DNA
atcgagttgcgccagaaacaatacgagtactatcgtgatttactgttcagtttcccaacacctgaaactgtcagt

SEQ ID NO: 420956 - DNA, 75 bp, synthetic construct
  source 1..75: mol_type = other DNA
atcctaaagttggtgaagtattgatttctgccagtggaaccatcggcaggactgttatatttgacggtagggaat

SEQ ID NO: 420957 - DNA, 75 bp, synthetic construct
  source 1..75: mol_type = other DNA
aatgaggaattacttcaccctagatattttctgcatttcttcgactcaccaagaatgaaattttactttaagtca

SEQ ID NO: 420958 - DNA, 75 bp, synthetic construct
  source 1..75: mol_type = other DNA
ctcaggagcactgcctctacatcccgacggataacaacaccggtaagctgaccggtacccgtattcacacaccgt

SEQ ID NO: 420959 - DNA, 75 bp, synthetic construct
  source 1..75: mol_type = other DNA
aaagagaagcataaccacctggaacgcattgagttccgctacgagaaaatcacctggacttacaaagacggcaac

SEQ ID NO: 420960 - DNA, 75 bp, synthetic construct
  source 1..75: mol_type = other DNA
atggctattcctgcttatctctggctgaaagatgacggcggcgcggatatcaaaggttccgtggacgttcagggg

SEQ ID NO: 420961 - DNA, 75 bp, synthetic construct
  source 1..75: mol_type = other DNA
cataatttaaaccctaagtatgtctcatattattttcaaacagaacaattccaaaatcaaaaaagacagtatatt

SEQ ID NO: 420962 - DNA, 75 bp, synthetic construct
  source 1..75: mol_type = other DNA
gaatctattcgttatatcaaagacttgtcacatggaatgcagcgcatagaaattcgttgcggtaactgcgatgcc

SEQ ID NO: 420963 - DNA, 75 bp, synthetic construct
  source 1..75: mol_type = other DNA
agtatgattcaggctgtggctggcccagtttttatgagccggtgagtgaagattcaatccgttatatcaaagact

SEQ ID NO: 420964 - DNA, 75 bp, synthetic construct
  source 1..75: mol_type = other DNA
ggctttctgcgttggggctgtatgcctgggcgcgggtcgatgaatcttccgataataattcattgcttaacccgg

SEQ ID NO: 420965 - DNA, 75 bp, synthetic construct
  source 1..75: mol_type = other DNA
agaacagaacattttcgcggtattgaagcagttaggattcagttctgatctctacgctatgcaaagcgaaatgtg

SEQ ID NO: 420966 - DNA, 75 bp, synthetic construct
  source 1..75: mol_type = other DNA
aagctcagcggcgaaatactgtaccggttggtgggcaaggcaagaagctgttccgctggcggctacccgaaggta

SEQ ID NO: 420967 - DNA, 75 bp, synthetic construct
  source 1..75: mol_type = other DNA
accgtaatctggatcctgctggaaaccacccagggcaaaacgcatccgattagcccggtgactgcattatggata

SEQ ID NO: 420968 - DNA, 75 bp, synthetic construct
  source 1..75: mol_type = other DNA
cgtctcgtttgcagcaatcggtatgattttgtggttcgacgggcaaaccagcctcgcaatctggtgctttgcgat

SEQ ID NO: 420969 - DNA, 75 bp, synthetic construct
  source 1..75: mol_type = other DNA
gggggtatttcggtttacgcagggatttgcttcacgttcggaattgtcgattactatattccgcatgcatctctc

SEQ ID NO: 420970 - DNA, 75 bp, synthetic construct
  source 1..75: mol_type = other DNA
tttttattttgatgaatttttctgggtcagtcgctttgccgaactgcgcaaggtggctggcgctatggcaaccct

SEQ ID NO: 420971 - DNA, 75 bp, synthetic construct
  source 1..75: mol_type = other DNA
cgaaaccgggtcagagcaaaacgtgggttttatttggtaaaaccaatcacggcaagctcagcggcgaaatactgt

SEQ ID NO: 420972 - DNA, 75 bp, synthetic construct
  source 1..75: mol_type = other DNA
cgttgattttaaggccaaagtcttcagttatatcgaccgtgtcgtgttctggacgctggctcactggctggcccg

SEQ ID NO: 420973 - DNA, 75 bp, synthetic construct
  source 1..75: mol_type = other DNA
aaccgggtcagagcaaaacgtgggttttatttggtaaaaccaatcacggcaagctcagcggcgaaatactgtacc

SEQ ID NO: 420974 - DNA, 75 bp, synthetic construct
  source 1..75: mol_type = other DNA
actggaaaacgctgcataacgggcttatctgccctgaccggacgtggcggcagattgtcacgctggaagatgtgg

SEQ ID NO: 420975 - DNA, 75 bp, synthetic construct
  source 1..75: mol_type = other DNA
gatgcggtgtatcagattgtgaagcgcttttttccggcagccattccctacaccttcaccctgtcatcaaagcgc

SEQ ID NO: 420976 - DNA, 75 bp, synthetic construct
  source 1..75: mol_type = other DNA
tcaggcgtttgtgctgattaccattgccgcagcactgctcgcttccattggcgtgctggcagaatattctcattt

SEQ ID NO: 420977 - DNA, 75 bp, synthetic construct
  source 1..75: mol_type = other DNA
ggtgattgaaggcgacctgtccagttacttcgacaccgtacatcatcgactgctgatgaaggctgtacgccgcag

SEQ ID NO: 420978 - DNA, 75 bp, synthetic construct
  source 1..75: mol_type = other DNA
gagccgatatgggagagtgattttcatacgctctcatatggcttccggcctgagcgcagtgtccaccacgctatc

SEQ ID NO: 420979 - DNA, 75 bp, synthetic construct
  source 1..75: mol_type = other DNA
tcagcgggccatgctgatggcgatggagccgatatgggagagtgattttcatacgctctcatatggcttccggcc

SEQ ID NO: 420980 - DNA, 75 bp, synthetic construct
  source 1..75: mol_type = other DNA
atgaacgaccagcaaatcgaaaaagaaatcgttgagaaaggcaaaacggcaccgcgcgttacgccagaccatatc

SEQ ID NO: 420981 - DNA, 75 bp, synthetic construct
  source 1..75: mol_type = other DNA
gcccttgcccgccagacgggtttagcatccctaaaagcaacggcaaactgcgaccactgggtatccccgcgttgc

SEQ ID NO: 420982 - DNA, 75 bp, synthetic construct
  source 1..75: mol_type = other DNA
agcttgccacatgggcagccgccgatccgtccctacggattgaacggttgctgcgtctgataacacagccagaat

SEQ ID NO: 420983 - DNA, 75 bp, synthetic construct
  source 1..75: mol_type = other DNA
gcactgttatcaggcaactacagtgaaagcaaagtcgatatggctgaacaactcaaccgaaaactgaaaggctgg

SEQ ID NO: 420984 - DNA, 75 bp, synthetic construct
  source 1..75: mol_type = other DNA
agttcgttgattttaaggccaaagtcttcagttatatcgaccgtgtcgtgttctggaagctggctcactggctgg

SEQ ID NO: 420985 - DNA, 75 bp, synthetic construct
  source 1..75: mol_type = other DNA
attcgcaaacgcagtcgttatggcgagatgcgagtggtctcaacgatcccgcaggagaaagccagaaacttcgcc

SEQ ID NO: 420986 - DNA, 75 bp, synthetic construct
  source 1..75: mol_type = other DNA
ggctggctgaagccgtacggatcaccctttcatcaaagggggtacatacccccgttgttaacggtgtgagtaaag

SEQ ID NO: 420987 - DNA, 75 bp, synthetic construct
  source 1..75: mol_type = other DNA
gtggtctcaacgatcccgcaggagaaagccagaaacttcgccgcatcgctgacagcactgttatcaggcaactac

SEQ ID NO: 420988 - DNA, 75 bp, synthetic construct
  source 1..75: mol_type = other DNA
cgaaggtaatccctatctgaggacggagaccagaaacacgtatacatcgcgctttacagaagtggcaatggcgtt

SEQ ID NO: 420989 - DNA, 75 bp, synthetic construct
  source 1..75: mol_type = other DNA
gtgaacaaaacaatgctacaggccagactggctgttgagctgcaaatcctcagggatgaattactctcaggccac

SEQ ID NO: 420990 - DNA, 75 bp, synthetic construct
  source 1..75: mol_type = other DNA
agtatggtgaaggggttaaaaaagattataaaaaagcagctgagctttatcaggcagcttgcgataaagaagata

SEQ ID NO: 420991 - DNA, 75 bp, synthetic construct
  source 1..75: mol_type = other DNA
cgacttctaaggggaacaaagaagcgtttaatgctctaggtataatgtatgcccttgggtatggggttgataaaa

SEQ ID NO: 420992 - DNA, 75 bp, synthetic construct
  source 1..75: mol_type = other DNA
gcgttaaagcgggcaggcattagcaacttccgcttccatgatctgaggcatacctgggcaagctggctggttcag

SEQ ID NO: 420993 - DNA, 75 bp, synthetic construct
  source 1..75: mol_type = other DNA
aaggctgcggatagtggaaatgccgcaggaatgtatgggctaggctctatgtacgacgatggtgttgctgttaag

SEQ ID NO: 420994 - DNA, 75 bp, synthetic construct
  source 1..75: mol_type = other DNA
ctttaaaatatcacaaactagcagtagaagctggtgatataccttcgcttgcctatatgggatatttatatcaat

SEQ ID NO: 420995 - DNA, 75 bp, synthetic construct
  source 1..75: mol_type = other DNA
atggtaaaaatgtacaaaagagttataaaaaggcttttgcttattacaaaaaagcggcggatcaaggtagttcag

SEQ ID NO: 420996 - DNA, 75 bp, synthetic construct
  source 1..75: mol_type = other DNA
gaacagaaacagcgcctgagtgaagaactggcagtagccgcgccgaaagctgagttcgtcgatcgttatgtgacg

SEQ ID NO: 420997 - DNA, 75 bp, synthetic construct
  source 1..75: mol_type = other DNA
gaacagaaacagcgcctgagtgaagaactggcagttgcagcaccgaaggccgagttcgttgatcgttatgttacg

SEQ ID NO: 420998 - DNA, 75 bp, synthetic construct
  source 1..75: mol_type = other DNA
tctcagaaaaaaaagacggtatccgatgccttcctgattaagagtggcacggaggagatttcattctgtcccgat

SEQ ID NO: 420999 - DNA, 75 bp, synthetic construct
  source 1..75: mol_type = other DNA
cgtggcactgcgatttcgtcgcgccagatggatcaagagttagacgctcacttaaaatatcggacaaaaggcaag

SEQ ID NO: 421000 - DNA, 75 bp, synthetic construct
  source 1..75: mol_type = other DNA
taccgcttcttggaggaccgctatatcaaaaggttagaggacgcagggatcaaatccccagtgaagtcaccatag

SEQ ID NO: 421001 - DNA, 75 bp, synthetic construct
  source 1..75: mol_type = other DNA
atgactaaagaagaatttgtctcttatatttttgataaaacggttgaaatgtatgccgctacttacgggtcctgt

SEQ ID NO: 421002 - DNA, 75 bp, synthetic construct
  source 1..75: mol_type = other DNA
tcagaaaaatgagaatagaccggggtatggtgctcaaaaatatggctgatctgttaggcgttagttcggcttact

SEQ ID NO: 421003 - DNA, 75 bp, synthetic construct
  source 1..75: mol_type = other DNA
ttgagctgcaaaatcctcagggatgaattactctcaggccactaccagcccttgcccgccagacgggtttacatc

SEQ ID NO: 421004 - DNA, 75 bp, synthetic construct
  source 1..75: mol_type = other DNA
catgttctataagttcgttgattttaaggccaaagtcttcagttatatcgaccgtgtcgtgttctggaagctggc

SEQ ID NO: 421005 - DNA, 75 bp, synthetic construct
  source 1..75: mol_type = other DNA
cttcagcttctggcccaccctgtttcagtatgaagcagatgaaacatcccccgcacgggggattttttatgtcgg

SEQ ID NO: 421006 - DNA, 75 bp, synthetic construct
  source 1..75: mol_type = other DNA
aaaaattcgcacagagccgcacacgatcgtggatacatttcagcaacgcattgcaggacgtcaggcggctatggc

SEQ ID NO: 421007 - DNA, 75 bp, synthetic construct
  source 1..75: mol_type = other DNA
ggtaaaaccaatcacggcaagctcagcggcgaaatactgtactggttggtggggcaaggcaagaagctgttccgc

SEQ ID NO: 421008 - DNA, 75 bp, synthetic construct
  source 1..75: mol_type = other DNA
ttcgaaaggcgtccaggcggcgataattaaagccgataaggccggtattcccgttatcaccgttgacgtcgctgc

SEQ ID NO: 421009 - DNA, 75 bp, synthetic construct
  source 1..75: mol_type = other DNA
tggaagaccctgacttcaacgaagcgcgtaatgtcagcgcgctgttcctcgtgcgcgaatggttgaaggggcagg

SEQ ID NO: 421010 - DNA, 75 bp, synthetic construct
  source 1..75: mol_type = other DNA
ggtatctgcatgactacggcgacgggtacgtggggtgcagatcttacgaagggaaggaatatttattcttgattg

SEQ ID NO: 421011 - DNA, 75 bp, synthetic construct
  source 1..75: mol_type = other DNA
atgtatggtatttgtgtagtggaccgcactggcgcttttacattgtttgacgactatgaaatcaacgatcttact

SEQ ID NO: 421012 - DNA, 75 bp, synthetic construct
  source 1..75: mol_type = other DNA
gaagttcgtctgtctgacctggctaaagtagaaggcggtgtagtagacctgaacacgctgaaagcggctaacatt

SEQ ID NO: 421013 - DNA, 75 bp, synthetic construct
  source 1..75: mol_type = other DNA
ccgaaggctccaaaaaggcgggtaaacgcctgggtcgtggtatcggttctggcctcggtaaaaccggtggtcgtg

SEQ ID NO: 421014 - DNA, 75 bp, synthetic construct
  source 1..75: mol_type = other DNA
taaccgcgagctaaaagaagaagtgggatttggtgcgaacgatctgacttttttgaagaagctcagcatggcacc

SEQ ID NO: 421015 - DNA, 75 bp, synthetic construct
  source 1..75: mol_type = other DNA
aaagtgcatatggaagtcgcccgcgccagtcgccgtggcgaagaatctattctcatcggtcacgccgggcacccg

SEQ ID NO: 421016 - DNA, 75 bp, synthetic construct
  source 1..75: mol_type = other DNA
atgcagatcctgttggccaacccacgtggtttttgtgccggcgtagaccgcgctatcagcattgttgaaaacgcg

SEQ ID NO: 421017 - DNA, 75 bp, synthetic construct
  source 1..75: mol_type = other DNA
ctggaaggccgcgaagaaaatatcgttttcgaagtgccgaaagagctgcgagtcgatattcgtgaagtcgattaa

SEQ ID NO: 421018 - DNA, 75 bp, synthetic construct
  source 1..75: mol_type = other DNA
ctttacggattcacgtcagggcactgcccgcatttctgcccgcttacagcaggatgccgataaagcgacgttgcg

SEQ ID NO: 421019 - DNA, 75 bp, synthetic construct
  source 1..75: mol_type = other DNA
tgcatctgctgccattacgttatgtaaaaacacggcgcatggaatggaggtattcaaagaccccctctgggcgtt

SEQ ID NO: 421020 - DNA, 75 bp, synthetic construct
  source 1..75: mol_type = other DNA
atgatcccgcccggtcagcccattcttgtggggcatcacagcgaacgccgcgcccgtcgtgatgcgcagcgtatt

SEQ ID NO: 421021 - DNA, 75 bp, synthetic construct
  source 1..75: mol_type = other DNA
tgatgccacctgtccgctggtgaccaaagtgcatatggaagtcgcccgcgccagccgtcgtggcgaagaatctat

SEQ ID NO: 421022 - DNA, 75 bp, synthetic construct
  source 1..75: mol_type = other DNA
atgtgggaacaggggaaaatcagataccggatatggcttcttttgccagtggtgatggatggatgaaattaccca

SEQ ID NO: 421023 - DNA, 75 bp, synthetic construct
  source 1..75: mol_type = other DNA
gccccggaagccgccagccctgtgcagatgtaccgcgcgacctactcaccggatgacaacaaactgcgcctgtat

SEQ ID NO: 421024 - DNA, 75 bp, synthetic construct
  source 1..75: mol_type = other DNA
gatcctgatcttctccgcacatggtgtttctcaggcggtacgtaacgaagcgaaaagccgtgatttgacggtatt

SEQ ID NO: 421025 - DNA, 75 bp, synthetic construct
  source 1..75: mol_type = other DNA
cgaaaagccgcgatctgacggtattcgacgcgacctgtccgctggtgaccaaagtgcatatggaagtcgcccgcg

SEQ ID NO: 421026 - DNA, 75 bp, synthetic construct
  source 1..75: mol_type = other DNA
gttggtggtcggttcgaaaaactcctctaactccaaccgtctggcggaactggcacagcgtatgggcaaacgcgc

SEQ ID NO: 421027 - DNA, 75 bp, synthetic construct
  source 1..75: mol_type = other DNA
tcagcccggcacactgcgcattgttagagagttttattacccagttttctatccttcctttaaaaaactctattg

SEQ ID NO: 421028 - DNA, 75 bp, synthetic construct
  source 1..75: mol_type = other DNA
ctggtgattggtgtctatcctgacatatctctggctcaggcgcgtcagaaacgggatgaagcgcgtaaactcctg

SEQ ID NO: 421029 - DNA, 75 bp, synthetic construct
  source 1..75: mol_type = other DNA
agtcagctaaacccgctgacaaggattacaaactttccgacggtcagggactttatcttcttgtcaaaaaatccg

SEQ ID NO: 421030 - DNA, 75 bp, synthetic construct
  source 1..75: mol_type = other DNA
tggggactttttcgccgctggtactggcttctggtcggtcgttatgctttccgtcgctggcttgtgccagctact

SEQ ID NO: 421031 - DNA, 75 bp, synthetic construct
  source 1..75: mol_type = other DNA
ggctgcctggccgcaaaccggatgtggcgacaaaaataaaattgatggcctggcggtcaccgcgatgcgccaggc

SEQ ID NO: 421032 - DNA, 75 bp, synthetic construct
  source 1..75: mol_type = other DNA
tgatgcccgtcagcccacactggcggtgcacagccaggcctttcataccgaacgggcctgccgcgatgcattgcg

SEQ ID NO: 421033 - DNA, 75 bp, synthetic construct
  source 1..75: mol_type = other DNA
gtcgtcattgatgggcaacttgatctgtgcgttgatggtgaatggcagagccttaattgtggggaaggcgctcga

SEQ ID NO: 421034 - DNA, 75 bp, synthetic construct
  source 1..75: mol_type = other DNA
tggtctggagactggacacctaaaaagggtgattttattgatttgagctttaagcctataaatcaaatcgtcctt

SEQ ID NO: 421035 - DNA, 75 bp, synthetic construct
  source 1..75: mol_type = other DNA
cgaaagctgtgcattcaattggggctagtggttataccacctcgattgatgtccgaagagtaattaatgggtatt

SEQ ID NO: 421036 - DNA, 75 bp, synthetic construct
  source 1..75: mol_type = other DNA
gtctgaacagctggttggcagtgtggaccttgccgatagaatgagaggcagttttaaagaattgtctgggcttga

SEQ ID NO: 421037 - DNA, 75 bp, synthetic construct
  source 1..75: mol_type = other DNA
ttataaaaagtgatgttccgttctacaaagaacagattgataaatttattgatttagcacaaccagaaagagtat

SEQ ID NO: 421038 - DNA, 75 bp, synthetic construct
  source 1..75: mol_type = other DNA
ccgctgaccgcctcatcgcgcgccgggtactggccgccctccccggttatcgaaggcgacagcgataaccatcgc

SEQ ID NO: 421039 - DNA, 75 bp, synthetic construct
  source 1..75: mol_type = other DNA
gcagccttttcaaccgtactttttgagtcaactcgatacgctggcgtggcgcagcggtgtgccggaaatgacata

SEQ ID NO: 421040 - DNA, 75 bp, synthetic construct
  source 1..75: mol_type = other DNA
cagcacggcagcaccacgctggagcagttgctggacaaggctgaatccgaagggcgcatcttcaaaagcgaacgc

SEQ ID NO: 421041 - DNA, 75 bp, synthetic construct
  source 1..75: mol_type = other DNA
cgctgtttgtcgcgccggcctggacaccgggccgggaagacgtgctcctctcacttgccggagagattgaggatg

SEQ ID NO: 421042 - DNA, 75 bp, synthetic construct
  source 1..75: mol_type = other DNA
atcgcatcacgggctacaaagcgccatcgacagaagaggccgctgtcgccagagaggccgcgaagcgcccgcctg

SEQ ID NO: 421043 - DNA, 75 bp, synthetic construct
  source 1..75: mol_type = other DNA
caccatcggcagaagaggctgccgtcgccagtcaggccgcgaagcgtccgccggtagtcaactatccgggggaag

SEQ ID NO: 421044 - DNA, 75 bp, synthetic construct
  source 1..75: mol_type = other DNA
cctgttaatgcccatattacttcacatgtcgatgaatgcagtcatagcaggaatacaatatctggcttctatcag

SEQ ID NO: 421045 - DNA, 75 bp, synthetic construct
  source 1..75: mol_type = other DNA
ttcaggttgaaagaatctgggtcgatgttgatgacagttggtattgcgatgcccggttccgattcccggccacaa

SEQ ID NO: 421046 - DNA, 75 bp, synthetic construct
  source 1..75: mol_type = other DNA
cttgccggagagattgaggatgaagacagcacgctcgctgaacgtcaggaagcacgggcggagcggtttaccgga

SEQ ID NO: 421047 - DNA, 75 bp, synthetic construct
  source 1..75: mol_type = other DNA
aacaacgctgggttaaccactatcagaaccgcctgatctatgagcgtgccatgctggacgaaagcggcggcgtgg

SEQ ID NO: 421048 - DNA, 75 bp, synthetic construct
  source 1..75: mol_type = other DNA
tgatgcgcagcgtattgaaaacggcatgaaacgagccgtgatgctctttgaacgtgcggaatactgggaagagcg

SEQ ID NO: 421049 - DNA, 75 bp, synthetic construct
  source 1..75: mol_type = other DNA
tcatggacagcgcataaatctacagacctcctgactttctgcgtactggtgctgaagaatggcttcaccgtcacc

SEQ ID NO: 421050 - DNA, 75 bp, synthetic construct
  source 1..75: mol_type = other DNA
agtcacaacgccaaattacagtttcctcgggtacagcggcacgatgaaagtgacgcccgatcgcatcacggacta

SEQ ID NO: 421051 - DNA, 75 bp, synthetic construct
  source 1..75: mol_type = other DNA
caaagcaccatcggcagaagaggctgccgtcgccagtcaggccgcgaagcgtccgccggtagtcaactatccggg

SEQ ID NO: 421052 - DNA, 75 bp, synthetic construct
  source 1..75: mol_type = other DNA
actgtaaggccgtgcgcagtgtggcagaagcagaagaccacggggcataccgctaccgccgcacaatggacaata

SEQ ID NO: 421053 - DNA, 75 bp, synthetic construct
  source 1..75: mol_type = other DNA
ttctgtatttcttgttcctgtatatgaagagattgtatttcgagggtgtctttttaactcttttaaactctggtt

SEQ ID NO: 421054 - DNA, 75 bp, synthetic construct
  source 1..75: mol_type = other DNA
ggtcaacgacccgcaccgtattgtcaaacccatgaaacgcacagggcctcgcggcagcggagaatggcaggttat

SEQ ID NO: 421055 - DNA, 75 bp, synthetic construct
  source 1..75: mol_type = other DNA
tggcggtatggcgacgtaaaccggacagcgaggtcatcgtgcactcagaccagggcagccagtacggcagcgacg

SEQ ID NO: 421056 - DNA, 75 bp, synthetic construct
  source 1..75: mol_type = other DNA
tttttgattacatcgaaatgttttataacagtaagcgtcggcatggttccagcgatcagatgtcaccgacagaat

SEQ ID NO: 421057 - DNA, 75 bp, synthetic construct
  source 1..75: mol_type = other DNA
gctcctgcccagcaggaacagcagcaggaacagcagggtattgagctggtggtcatggtacgtgacaccccagaa

SEQ ID NO: 421058 - DNA, 75 bp, synthetic construct
  source 1..75: mol_type = other DNA
gcaccaactatcgctaatgttcatcctgatgaagttgacaactggaaggctctgggctggaaaactcaggagtaa

SEQ ID NO: 421059 - DNA, 75 bp, synthetic construct
  source 1..75: mol_type = other DNA
cgcaggtttataaagtgaatatcaacggcggtgcgccacaacgtattacctgggaaggttcgcagaaccaggatg

SEQ ID NO: 421060 - DNA, 75 bp, synthetic construct
  source 1..75: mol_type = other DNA
actttcctacatttttgatggtctttctggtatcgttagttcttattagtgcaaaaataaagtcgaatggcctgt

SEQ ID NO: 421061 - DNA, 75 bp, synthetic construct
  source 1..75: mol_type = other DNA
actttcttacatttttgatgttgtttctggtatcgttagttcttattagtgcaaaaataaagtcgaatggcctgt

SEQ ID NO: 421062 - DNA, 75 bp, synthetic construct
  source 1..75: mol_type = other DNA
actttcatacatttttgatgctatttctggtatcgttagttcttattagtgcaaaaataaagtcgaatggcctgt

SEQ ID NO: 421063 - DNA, 75 bp, synthetic construct
  source 1..75: mol_type = other DNA
agtgcacagcgatagtaataatgccgatgtcagtctttaccaccacttagtttgccgtttaaccagattggtgtg

SEQ ID NO: 421064 - DNA, 75 bp, synthetic construct
  source 1..75: mol_type = other DNA
gggccgggttctacgcgtggctgcataacccggtctcagcacgtgataaagataatcagcgtctgctgacgctta

SEQ ID NO: 421065 - DNA, 75 bp, synthetic construct
  source 1..75: mol_type = other DNA
actttcgtacatttttgatgttttttctggtatcgttagttcttattagtgcaaaaataaagtcgaatggcctgt

SEQ ID NO: 421066 - DNA, 75 bp, synthetic construct
  source 1..75: mol_type = other DNA
ttctggaaaaaactgggctatcgcttggcgtaaaagacgccagtctggccatcgaagaaggcgagatatttgtca

SEQ ID NO: 421067 - DNA, 75 bp, synthetic construct
  source 1..75: mol_type = other DNA
atccacaatggtacgccttctcaatcgcctgattgaacccccccgcgggcaagtgctgattgatggtgtggatat

SEQ ID NO: 421068 - DNA, 75 bp, synthetic construct
  source 1..75: mol_type = other DNA
cctcttagcgagttgctctctcatgtcggacaggcaccctgtgcggtgcccgtggtcgacgaggaccaacagtat

SEQ ID NO: 421069 - DNA, 75 bp, synthetic construct
  source 1..75: mol_type = other DNA
tcaagctcgtcgttcctccatgctcgacctgctcgaaagcgtcaggcatgactatgtacacggtggatatacata

SEQ ID NO: 421070 - DNA, 75 bp, synthetic construct
  source 1..75: mol_type = other DNA
caggagctgactggctgacagcgattgagatgtacaaaccaactgtgcgcatcgtggaagttaatgtgccacgcg

SEQ ID NO: 421071 - DNA, 75 bp, synthetic construct
  source 1..75: mol_type = other DNA
aagtaagcgcattgcagaactggaagcacgggaaataaaaccagccaaaggtgaggttcttgtcgttgtttctgg

SEQ ID NO: 421072 - DNA, 75 bp, synthetic construct
  source 1..75: mol_type = other DNA
ggatattgatgcgctcaacgccttcaaatttctggccggaccagaaaccgtgctggcactactggatgagatcaa

SEQ ID NO: 421073 - DNA, 75 bp, synthetic construct
  source 1..75: mol_type = other DNA
acagggagaatgggtcgcatttatttcgccgggcaaatacggcacgtacgccgtgcacacgccaggagataatca

SEQ ID NO: 421074 - DNA, 75 bp, synthetic construct
  source 1..75: mol_type = other DNA
tgactggctgacagcgattgagatgtacaaaccaacagtgcgcatcgtggaagttaatgtgccacgcgctgcagg

SEQ ID NO: 421075 - DNA, 75 bp, synthetic construct
  source 1..75: mol_type = other DNA
ggaattaatgccgaagaacgccgggaaaaagccattgatgcactgcgtcaggtcgggctggaaaattatgcccac

SEQ ID NO: 421076 - DNA, 75 bp, synthetic construct
  source 1..75: mol_type = other DNA
ccgattacgcactgcaagctgccggaactgtagacgaattggttgcggcgctggaagccgcaaaatcaaaactca

SEQ ID NO: 421077 - DNA, 75 bp, synthetic construct
  source 1..75: mol_type = other DNA
gatgaacgggaaaggaaccagcaatacatcaaactccgcgatcaggagaacgaggaaattgcgctaacggtaggg

SEQ ID NO: 421078 - DNA, 75 bp, synthetic construct
  source 1..75: mol_type = other DNA
tgcattttgcactttacaggcgatcccaaattgataaacataaacaccaagcacaagttactttaataaagcaaa

SEQ ID NO: 421079 - DNA, 75 bp, synthetic construct
  source 1..75: mol_type = other DNA
tgctctgcccggaagatcgcaaagcggaaggcattattccggtgcattccgttcgtgacaatatcaacatcagcg

SEQ ID NO: 421080 - DNA, 75 bp, synthetic construct
  source 1..75: mol_type = other DNA
aatgacgtcgattggttacgagctgattgttatctccgcctgcgttttaggtggcgtttctctgaaaggaggcat

SEQ ID NO: 421081 - DNA, 75 bp, synthetic construct
  source 1..75: mol_type = other DNA
gaaaatatttatctcggccagcttccccataaaggcggcattgtaaatcgttcactgctgaattatgaagcaggt

SEQ ID NO: 421082 - DNA, 75 bp, synthetic construct
  source 1..75: mol_type = other DNA
ccaagcacgaaatatataacgtgatttatgcgctggcggcgcagggcgtggcggtgctgtttgcctccagcgatc

SEQ ID NO: 421083 - DNA, 75 bp, synthetic construct
  source 1..75: mol_type = other DNA
gatgaaggtcattttgctggatgaacctacgcgcggtattgatgtgggagccaagcacgaaatatataacgtgat

SEQ ID NO: 421084 - DNA, 75 bp, synthetic construct
  source 1..75: mol_type = other DNA
tatgaaggtcattttgctggatgaaccaacgcgcggcattgatgtgggcgctaagcacgaaatttacaacgtgat

SEQ ID NO: 421085 - DNA, 75 bp, synthetic construct
  source 1..75: mol_type = other DNA
tgattacccacgccggttggctggccggactgctgtttggcggtctctattcggttatcgtcattaccggtattc

SEQ ID NO: 421086 - DNA, 75 bp, synthetic construct
  source 1..75: mol_type = other DNA
gacctggagttctaatgatccagaactgtataagaatcaaataagattattagcgcaacacctgtatgataaaga

SEQ ID NO: 421087 - DNA, 75 bp, synthetic construct
  source 1..75: mol_type = other DNA
atgcattcaataaagtgcagtatttaccatttgatactcccgaacaattactcattgaaaaggcaattacgccaa

SEQ ID NO: 421088 - DNA, 75 bp, synthetic construct
  source 1..75: mol_type = other DNA
ttgtgtaatcaacaacggttgggaagaaaacaatgctgaaccgccccgggtttcctggagagtgttttatctgtg

SEQ ID NO: 421089 - DNA, 75 bp, synthetic construct
  source 1..75: mol_type = other DNA
tggcgattatttaccaggaactgcatctcgtgccggaaatgaccgtcgcggaaaacatctatctcggccagctgc

SEQ ID NO: 421090 - DNA, 75 bp, synthetic construct
  source 1..75: mol_type = other DNA
gaaagttagtccgtccgtgatttaccttttgtcgttgctgcagggaaaaatggcgcgactaccgttgcatcaacc

SEQ ID NO: 421091 - DNA, 75 bp, synthetic construct
  source 1..75: mol_type = other DNA
caaccctgaagtagtgcaggcgttgctggatgaacgggaaagaaaccagcaatacatcaaacgccgcgaccagga

SEQ ID NO: 421092 - DNA, 75 bp, synthetic construct
  source 1..75: mol_type = other DNA
cgaatctgagaaagatgctcaggcctactttaattgcaaatatgcaccgattgacgaaaagcttatggagcttca

SEQ ID NO: 421093 - DNA, 75 bp, synthetic construct
  source 1..75: mol_type = other DNA
cgcgcttgtcgatattttcaagtaaggcggatgagtggcatgcgattcgtcccggtggagatttggcggtgctgc

SEQ ID NO: 421094 - DNA, 75 bp, synthetic construct
  source 1..75: mol_type = other DNA
tgaggtcatgaaaattgctggagatgcccagctttctaccccatgcactgacagcatcataaacagcattgcaac

SEQ ID NO: 421095 - DNA, 75 bp, synthetic construct
  source 1..75: mol_type = other DNA
tgcgtgagttagcaaaacaggcaacacaaggcgaatgggtcgcatttatttcgccgggtactggtacgtatgcgg

SEQ ID NO: 421096 - DNA, 75 bp, synthetic construct
  source 1..75: mol_type = other DNA
aacgccttcaaatttctgaccggaccagaaaccgtgctggcgctgctggatgaactagaagctaaaaacaaacgc

SEQ ID NO: 421097 - DNA, 75 bp, synthetic construct
  source 1..75: mol_type = other DNA
tgcgtgaggcggcggaacgtgcaattccagcaatggaacgcctgttaatgttgtcagctgatgatgatttgttaa

SEQ ID NO: 421098 - DNA, 75 bp, synthetic construct
  source 1..75: mol_type = other DNA
ggagatggccgatttgatggtgatgatgcactaattcatcgtgaagttgctggatatattcccatttgcagaatt

SEQ ID NO: 421099 - DNA, 75 bp, synthetic construct
  source 1..75: mol_type = other DNA
gatgctgaattcatcgccgcagccaatccggctaccgtcttggcgctgctggatgaacgggaaaggaaccagcaa

SEQ ID NO: 421100 - DNA, 75 bp, synthetic construct
  source 1..75: mol_type = other DNA
tttgatggacagaaaaacgcagagaacaacgctcgttatatcgcagctttcaacccagaagtagtgcaggcactg

SEQ ID NO: 421101 - DNA, 75 bp, synthetic construct
  source 1..75: mol_type = other DNA
accgtaatgcgaccttatcaggaacagacttcaaccgcatgtgggaacaatggaaatctatccgcgccgcaggaa

SEQ ID NO: 421102 - DNA, 75 bp, synthetic construct
  source 1..75: mol_type = other DNA
ttaacgattttatgaagcacttttcgccagatatcgcgctggcactgctggatgaactggaaagaaaccagcaat

SEQ ID NO: 421103 - DNA, 75 bp, synthetic construct
  source 1..75: mol_type = other DNA
gactggctgacagcgattgagatgtacaaaccaactgtgcgcatcgtggaagttaatgtgccacgcgccgctggc

SEQ ID NO: 421104 - DNA, 75 bp, synthetic construct
  source 1..75: mol_type = other DNA
agcgcgggaaataaaaccagccaaaggtgaagttcttgtcgttgtatctggttttactggttgcggaaaaagcgc

SEQ ID NO: 421105 - DNA, 75 bp, synthetic construct
  source 1..75: mol_type = other DNA
ccacgtaccacacgttaagagcctgattatccagacctggcagcgtctgaaaggtttcgttctgcgcgccggtaa

SEQ ID NO: 421106 - DNA, 75 bp, synthetic construct
  source 1..75: mol_type = other DNA
ttcggttgtaacgtgccgtcggtgatgggcgcgcgaacccttgatgcaccgcgtgaacgcctgatgaccatcatg

SEQ ID NO: 421107 - DNA, 75 bp, synthetic construct
  source 1..75: mol_type = other DNA
cattgttctatcaggtcgccagctacagccagcacccaacttacagcctggtgtgcattctggcggttatcctgt

SEQ ID NO: 421108 - DNA, 75 bp, synthetic construct
  source 1..75: mol_type = other DNA
cgagtattacgagggagttatctctgatgggtgcaagcgtattgctgaactggaagcgcgggaagttcaattacc

SEQ ID NO: 421109 - DNA, 75 bp, synthetic construct
  source 1..75: mol_type = other DNA
cagccagcacccaacctacagtctggtgtgcattctggcggtgatcctgtttaacatcgtggtcattggcctgct

SEQ ID NO: 421110 - DNA, 75 bp, synthetic construct
  source 1..75: mol_type = other DNA
tgatgtacctgttcctctccttcctcgaggactccggatatatggcgcgtgcggcgtttgtgatggaccgtctga

SEQ ID NO: 421111 - DNA, 75 bp, synthetic construct
  source 1..75: mol_type = other DNA
tgggtgcgcgtacgcttgatgcgccgcgtgaacgcctgatgaccattatgatggcaccgtttatgtcctgcggcg

SEQ ID NO: 421112 - DNA, 75 bp, synthetic construct
  source 1..75: mol_type = other DNA
ttgcgctaacggtagggaaactgcgtgttgagcttgaggaagcaaaatcaaaactcaacgagcaacgcgagtatt

SEQ ID NO: 421113 - DNA, 75 bp, synthetic construct
  source 1..75: mol_type = other DNA
ctgccactggtgccgcagatcggcatgatgtacctgttcctctccttcctcgaggactccgggtatatggcgaga

SEQ ID NO: 421114 - DNA, 75 bp, synthetic construct
  source 1..75: mol_type = other DNA
atggcgccgtttatgtcctgcggcgcgcgtctggccatcttcgcggtatttgcggccgccttcttcgggcagaat

SEQ ID NO: 421115 - DNA, 75 bp, synthetic construct
  source 1..75: mol_type = other DNA
cgctgcacattgccgatgcgcgttaccagtgcattgctgccatctgtgatgtggtaagcaacaccctgacggcag

SEQ ID NO: 421116 - DNA, 75 bp, synthetic construct
  source 1..75: mol_type = other DNA
ggcgcaacaactgggtggccacgtccgtaaaggagaggtggccacactggcggtgatttacaaagactggaaaag

SEQ ID NO: 421117 - DNA, 75 bp, synthetic construct
  source 1..75: mol_type = other DNA
ctctcatggaaaccgtaccggtactgaaatcgaatcctctgtttaatgtggggcagtgtgacggtttacctgaac

SEQ ID NO: 421118 - DNA, 75 bp, synthetic construct
  source 1..75: mol_type = other DNA
tcaggggctggagtttgaagaacaggccagagtcattgaagagttcacgtatcgctacaacgtggaacacatcgg

SEQ ID NO: 421119 - DNA, 75 bp, synthetic construct
  source 1..75: mol_type = other DNA
ccattaatcgataatgtgcttaattctaatcggttttttacctatagagatatgcaggaagctgttgctatagac

SEQ ID NO: 421120 - DNA, 75 bp, synthetic construct
  source 1..75: mol_type = other DNA
acgcacggtattcactgcggtaatttgcttccgcatgttaccagtccggtttccggtacggtggtgcacaccgct

SEQ ID NO: 421121 - DNA, 75 bp, synthetic construct
  source 1..75: mol_type = other DNA
ctggaaagagctggccgtgcagttaggccttgggcagttctacccctggcaggatatgcagacacggcagctgta

SEQ ID NO: 421122 - DNA, 75 bp, synthetic construct
  source 1..75: mol_type = other DNA
cagtattaccgttattttactgtgtaatattgccgccctgatgtggctggagcgaggcctgccgtggcgcaacca

SEQ ID NO: 421123 - DNA, 75 bp, synthetic construct
  source 1..75: mol_type = other DNA
atccagcgcgtgacaacatccattgatgccaggctaattcagctcactggcaaagacaaaaagaccggcggtgat

SEQ ID NO: 421124 - DNA, 75 bp, synthetic construct
  source 1..75: mol_type = other DNA
cgcggagctgcacttcctcggtacgtcagctgccaccgcgcagtcctataccggtcatctgaaattcgacgaatt

SEQ ID NO: 421125 - DNA, 75 bp, synthetic construct
  source 1..75: mol_type = other DNA
ccggtattttgttgactgaatcttttggcccggtaatcgggagcgcggcgttttttaatgatctggcacgtgagc

SEQ ID NO: 421126 - DNA, 75 bp, synthetic construct
  source 1..75: mol_type = other DNA
ggatttcaccctgcccgttcttcaacgtactggcgggctggatatggtcccggcggcaattgttcacggttttat

SEQ ID NO: 421127 - DNA, 75 bp, synthetic construct
  source 1..75: mol_type = other DNA
caaaaaacctccgaaaaatgcgcagacagaaatgcgcaaaactgcgcaaaaaagtgcgcagaaaaaatctgcgca

SEQ ID NO: 421128 - DNA, 75 bp, synthetic construct
  source 1..75: mol_type = other DNA
gagcataacggtaatgtgtaccaggagtatcgttttaacaaacgcgactctctggtgattgttgccagactgtca

SEQ ID NO: 421129 - DNA, 75 bp, synthetic construct
  source 1..75: mol_type = other DNA
tagtaacaatgtccagccgtgatattgcggatctggttcagagtaaacacagtgacgtgaaacgctcggctgagc

SEQ ID NO: 421130 - DNA, 75 bp, synthetic construct
  source 1..75: mol_type = other DNA
ggccagtgaatacctgcgaaaaggggctcaggtgtacatcgagggtcagctacgtacccgaaaatggaccgacca

SEQ ID NO: 421131 - DNA, 75 bp, synthetic construct
  source 1..75: mol_type = other DNA
acagctttatatggctgataccactctgcttgatggggatgcgcggcaattatatgcagggtcaaagctcggaaa

SEQ ID NO: 421132 - DNA, 75 bp, synthetic construct
  source 1..75: mol_type = other DNA
aaagtgcgcagaaaaaatctgcgcagactgcacaaaagcggaacgaaaaatctcaggaaaaaaagccagtattcg

SEQ ID NO: 421133 - DNA, 75 bp, synthetic construct
  source 1..75: mol_type = other DNA
actgtacagccagtgggtcaatgtcattccgccaggtggcaaaactgcttaaggccaaagagcccgatctgcggt

SEQ ID NO: 421134 - DNA, 75 bp, synthetic construct
  source 1..75: mol_type = other DNA
gtggtcattagaattagtgttgccaacctgtaatttatgtagagcaaagataacgttagatgtaggaggcagaag

SEQ ID NO: 421135 - DNA, 75 bp, synthetic construct
  source 1..75: mol_type = other DNA
ctcctaatcttcgctcacggatattaagttttatacttcaaatggggcacaccctccatggttttagtttaaata

SEQ ID NO: 421136 - DNA, 75 bp, synthetic construct
  source 1..75: mol_type = other DNA
tccactaaaaaggtttccacacgaaaagtggaaagtggaaactcggaaactgacaactcgccacctccccaaaga

SEQ ID NO: 421137 - DNA, 75 bp, synthetic construct
  source 1..75: mol_type = other DNA
gttgtcttggctatacttcaccggatggtggaattaacgaaaacaacaactggtgtcacatcccgcaggcaaaag

SEQ ID NO: 421138 - DNA, 75 bp, synthetic construct
  source 1..75: mol_type = other DNA
tttggccgttcctaaatcaaaaaacaagtattaatcatgtcgaatgtgtttattctgacacaatattgttgtcaa

SEQ ID NO: 421139 - DNA, 75 bp, synthetic construct
  source 1..75: mol_type = other DNA
tctggtgttgaaggagtggcaagaattcaaagacaaactgaaagtaatgttattaagttagtttctaatgatgac

SEQ ID NO: 421140 - DNA, 75 bp, synthetic construct
  source 1..75: mol_type = other DNA
atgattcaggatgcatttgtccgcataagagcgagacaactttactggcaagggtacacgcctgcggaaatctcg

SEQ ID NO: 421141 - DNA, 75 bp, synthetic construct
  source 1..75: mol_type = other DNA
ggaatgactggaaaccgttcgcagcacgtcccgtgggtaatcgtcccgtgtggattggctacgacgctaacggca

SEQ ID NO: 421142 - DNA, 75 bp, synthetic construct
  source 1..75: mol_type = other DNA
taaagaaaaaggtaaggcactggtgacgcccggcattcgtccggacacgctatttgtctacatgggatttggcgc

SEQ ID NO: 421143 - DNA, 75 bp, synthetic construct
  source 1..75: mol_type = other DNA
agtttcagtttttgggcggtgcgccggtatctgtctggcgtgagctgcgccggttccgcaatcaggagcaggccg

SEQ ID NO: 421144 - DNA, 75 bp, synthetic construct
  source 1..75: mol_type = other DNA
attcttgcggcggcagtgatgctgtttatgggctttgtgccgtgggcgacttccagcattgcggtgatgtttgtt

SEQ ID NO: 421145 - DNA, 75 bp, synthetic construct
  source 1..75: mol_type = other DNA
cagcgggctttaccgggctgtttggttacctgggcggttcggtggcggcgagcgcgattgttggctacaccgtgg

SEQ ID NO: 421146 - DNA, 75 bp, synthetic construct
  source 1..75: mol_type = other DNA
tattctttggctatgcggcttactatttggttcgtaagaactttgcgcttgctatgccttatctggtcgagcagg

SEQ ID NO: 421147 - DNA, 75 bp, synthetic construct
  source 1..75: mol_type = other DNA
gaccttaattaaaggactggtgatgcctcacatcttcatgccgccagttgaaacccgcctacattcttatcggat

SEQ ID NO: 421148 - DNA, 75 bp, synthetic construct
  source 1..75: mol_type = other DNA
tgggttgtctctgttcacgtttatatgactgccgttggtctgaccgcaatacccggcatggcaatcgttcagcca

SEQ ID NO: 421149 - DNA, 75 bp, synthetic construct
  source 1..75: mol_type = other DNA
cggcagtgatccggtcaccgagtttgcccaagtactggaaaatgccggactggttctgaaagaactgccggccat

SEQ ID NO: 421150 - DNA, 75 bp, synthetic construct
  source 1..75: mol_type = other DNA
cgtagaaacgcgcctccattcttatcgcattgtgaagatgaggcctaaatcttcagaccgtgtcgatccgggttt

SEQ ID NO: 421151 - DNA, 75 bp, synthetic construct
  source 1..75: mol_type = other DNA
cgttgaccggactccgaaacacgacccgcaggagttcgccgccgaatacgaattctggcagcgcgtaaaaatcac

SEQ ID NO: 421152 - DNA, 75 bp, synthetic construct
  source 1..75: mol_type = other DNA
gaccaccaccgtggatatgaaatctgcgctgtatcaggatgtgaaaaatgctgtctcatcaatgctgacgccggg

SEQ ID NO: 421153 - DNA, 75 bp, synthetic construct
  source 1..75: mol_type = other DNA
cttctgttcctctgcggttggttccagggaatgggatggccgccgtgtggtcgtactatggtgcactggtggtcg

SEQ ID NO: 421154 - DNA, 75 bp, synthetic construct
  source 1..75: mol_type = other DNA
gctgctgatggcgctgcgtgacgatgtggcgcaaccttaccagcgtaaccagatttttttgtctgcgtcgcgtcg

SEQ ID NO: 421155 - DNA, 75 bp, synthetic construct
  source 1..75: mol_type = other DNA
aaggaaatagacctgctgacccggcagcttaaaaaactgcatgatggccagccggatgcgacggccacaggaaag

SEQ ID NO: 421156 - DNA, 75 bp, synthetic construct
  source 1..75: mol_type = other DNA
gtagttgaaagaaataataaaaaatatgatatattatatgtgggggcaattactggtagaaaactagatgatgca

SEQ ID NO: 421157 - DNA, 75 bp, synthetic construct
  source 1..75: mol_type = other DNA
tggatctcgcacagtcgtttatgaccgtgcgtaaagtcaccgctggcggcgttattacctaccagtccgatcgcg

SEQ ID NO: 421158 - DNA, 75 bp, synthetic construct
  source 1..75: mol_type = other DNA
ttacgaaacggaccgagcgagggggatcagccacggcgaccttgcgtgggcaaccatgcttgctgtcattaacga

SEQ ID NO: 421159 - DNA, 75 bp, synthetic construct
  source 1..75: mol_type = other DNA
agtgggatgaaacgccacccgtgcagcgtgtcacgcagtccatcgatgcgcgcctcatccagcttactgaaaaac

SEQ ID NO: 421160 - DNA, 75 bp, synthetic construct
  source 1..75: mol_type = other DNA
tttttgggtcagtaactttgtggaactcaggaaggttgctggggcaatggcgacactggaagggcttacgcgaac

SEQ ID NO: 421161 - DNA, 75 bp, synthetic construct
  source 1..75: mol_type = other DNA
aagcggaacaggagctgaccgcgaagcaaatcttcatgcagtacgtgctgccgaacaaactgctgtggtacatcg

SEQ ID NO: 421162 - DNA, 75 bp, synthetic construct
  source 1..75: mol_type = other DNA
ttatcttggcggttctgtggcggcaagcgcaattgtcggttacaccgttgactacttcggctgggatggcggctt

SEQ ID NO: 421163 - DNA, 75 bp, synthetic construct
  source 1..75: mol_type = other DNA
agccgcgcccaggcgttccagttcaagcggttcattcagaagctggcacaggaaatcggtgtagaactcaaaggc

SEQ ID NO: 421164 - DNA, 75 bp, synthetic construct
  source 1..75: mol_type = other DNA
gaacgccaccagttacgcggcatggagtacgaagagcaggccaaatttattaaagagatcaccacccgctacaac

SEQ ID NO: 421165 - DNA, 75 bp, synthetic construct
  source 1..75: mol_type = other DNA
caacctttacggctgcatgttcgttaaagccggagaacgcgccttcgactacaacgcaattctgggctgcggcgt

SEQ ID NO: 421166 - DNA, 75 bp, synthetic construct
  source 1..75: mol_type = other DNA
cggcctgtatgtggtggatgaagccaatattgaaacccacggcatggtgccaatgaatcgtctgaccgatgatcc

SEQ ID NO: 421167 - DNA, 75 bp, synthetic construct
  source 1..75: mol_type = other DNA
ttatccgaaccatccgctgtggtacacgctgtgcgaccgctacggcctatatgtggtggatgaagccaatattga

SEQ ID NO: 421168 - DNA, 75 bp, synthetic construct
  source 1..75: mol_type = other DNA
ggggattggtggcgacgactcctggagcccgtccgtttcggcagaataccaactgagcgccggtcgctaccatta

SEQ ID NO: 421169 - DNA, 75 bp, synthetic construct
  source 1..75: mol_type = other DNA
cgcggcgttaaccgtcatgaacatcatcctctgcacggtcaggttatggatgagcagacgatggtgcaggatatc

SEQ ID NO: 421170 - DNA, 75 bp, synthetic construct
  source 1..75: mol_type = other DNA
tggttacgatacccctatctacaccaacgtgacctatcccattgcggtgaatccgccatttgttcccacagaaaa

SEQ ID NO: 421171 - DNA, 75 bp, synthetic construct
  source 1..75: mol_type = other DNA
aacgcggatggtgcagcgcgatcgtaatcacccgagcgtaattatctggtcgctgggtaatgaatcaggccacgg

SEQ ID NO: 421172 - DNA, 75 bp, synthetic construct
  source 1..75: mol_type = other DNA
tggatggcaagccgctggcaagcggtgaagtacctatgaatgtcgctccacaaggtaaacaggtaattgaactgc

SEQ ID NO: 421173 - DNA, 75 bp, synthetic construct
  source 1..75: mol_type = other DNA
tgcccgatgtacgcgcgcgtggatgaagaccagcccttcccggctgtgccgaaatggtccatcaaaaaatggctt

SEQ ID NO: 421174 - DNA, 75 bp, synthetic construct
  source 1..75: mol_type = other DNA
ctgctgcacgcggaagaaggcacatggctgaatatcgatggtttccatatggggattggtggcgacgactcctgg

SEQ ID NO: 421175 - DNA, 75 bp, synthetic construct
  source 1..75: mol_type = other DNA
atgaccatgattacggattcactggccgtcgtattacaacgtcgtgactgggaaaaccctggcgttacccaactt

SEQ ID NO: 421176 - DNA, 75 bp, synthetic construct
  source 1..75: mol_type = other DNA
ttccatgttgctactcactttaatgacgatttcagccgtgccgttctcgacgctgaagtccacatgtgtggcgaa

SEQ ID NO: 421177 - DNA, 75 bp, synthetic construct
  source 1..75: mol_type = other DNA
ctgattaaatatgatgaaaacggcaacccgtgtcggcttacggcggtgattttggcgatacgccgaacgatcgcc

SEQ ID NO: 421178 - DNA, 75 bp, synthetic construct
  source 1..75: mol_type = other DNA
tatcaaaagtttctttttgaattttgccgccgtgaattaacgtctgcaaatacaacccgctcttatttaaaatgg

SEQ ID NO: 421179 - DNA, 75 bp, synthetic construct
  source 1..75: mol_type = other DNA
atcagagatgaagctcgttcactttatagaaaattaccgggcattagcactcttcatttaactccgcagcatttc

SEQ ID NO: 421180 - DNA, 75 bp, synthetic construct
  source 1..75: mol_type = other DNA
tactgaataccggttcctttaaaactaacaagcaaggggtaacaacattcagcggaggtggtgaacttgccgatc

SEQ ID NO: 421181 - DNA, 75 bp, synthetic construct
  source 1..75: mol_type = other DNA
tattgctattccgcagcagttagcggtggtgggttatagtaatgaaacgctgtcgtttattttaacgcctgcacc

SEQ ID NO: 421182 - DNA, 75 bp, synthetic construct
  source 1..75: mol_type = other DNA
gagttaggtcaacaaagctgcgagttattattccagctaattgccggaaaaccgtcaccacaaaatattaccgtt

SEQ ID NO: 421183 - DNA, 75 bp, synthetic construct
  source 1..75: mol_type = other DNA
cttcgcccagtacgtaccgctctcttatcgtacgctggtgtttatcctcggcggcttctcgatggtggtgtctaa

SEQ ID NO: 421184 - DNA, 75 bp, synthetic construct
  source 1..75: mol_type = other DNA
gcgcgtaaactggctgggactgggcccggaagaaaactaccctgacagactaagtgcagcctgttatgaccgctg

SEQ ID NO: 421185 - DNA, 75 bp, synthetic construct
  source 1..75: mol_type = other DNA
atggattgatggtgaaaagcaactgttgactccacttcgcgaccagttcacccgtgcgccgctggataacgacat

SEQ ID NO: 421186 - DNA, 75 bp, synthetic construct
  source 1..75: mol_type = other DNA
gcggatggtgcagcgcgatcgtaatcacccgagcgtaattatctggtcgctgggtaatgaatcaggccacggcgc

SEQ ID NO: 421187 - DNA, 75 bp, synthetic construct
  source 1..75: mol_type = other DNA
aaaaatgctggttgtttaccgccagaacttgagcagcgcaaggaagcaattcagcttctggatattctcaaaggt

SEQ ID NO: 421188 - DNA, 75 bp, synthetic construct
  source 1..75: mol_type = other DNA
aacagacgagtgaggttggcggggtgttgcggggtgatgggtcactgttgttgcaaaaagcccagtgcggcgcaa

SEQ ID NO: 421189 - DNA, 75 bp, synthetic construct
  source 1..75: mol_type = other DNA
attacgggatgatggattgtggtttttgcaaaaagcccagcgcggcgcaaaaccgctggaaaaaccactgttatc

SEQ ID NO: 421190 - DNA, 75 bp, synthetic construct
  source 1..75: mol_type = other DNA
atggtgagtggcaatttgtcttggtttccggcaccagaagcggttccggaaagctggctggagtgcgatcttcct

SEQ ID NO: 421191 - DNA, 75 bp, synthetic construct
  source 1..75: mol_type = other DNA
cataaaccgtttaatccgcaaaccttcagcaacgcccttacccatttttccatgctggccgttttagtgtttagt

SEQ ID NO: 421192 - DNA, 75 bp, synthetic construct
  source 1..75: mol_type = other DNA
gaaaatgaagaaattcgcgggctgattattggtgaaccgaattttgccgggattgtcggcttaagcaataccgcg

SEQ ID NO: 421193 - DNA, 75 bp, synthetic construct
  source 1..75: mol_type = other DNA
cctgagctggttaagcagcctgattggctatggtctgattgtggctgtgccgattatctctaatcaggtgaatgt

SEQ ID NO: 421194 - DNA, 75 bp, synthetic construct
  source 1..75: mol_type = other DNA
gagcgcagcaactggttacagcttccggcgatgattatcggggcgtttattatcgatttgctgttgctggcactg

SEQ ID NO: 421195 - DNA, 75 bp, synthetic construct
  source 1..75: mol_type = other DNA
tcgtaccgccgacgctggttgaagagcaaaccgtgctgcaaaaggtgactgaaatcagccgccattatggcgaag

SEQ ID NO: 421196 - DNA, 75 bp, synthetic construct
  source 1..75: mol_type = other DNA
tattcagtttgaaaacggcatgaacactggagatttggtgactatcgggccgttgaccggcactgtggaacggat

SEQ ID NO: 421197 - DNA, 75 bp, synthetic construct
  source 1..75: mol_type = other DNA
acgccagcaaataacaaattgcgaatggaggacaaacgcggtgaggagcatatcaagctcagtaccgagtatggc

SEQ ID NO: 421198 - DNA, 75 bp, synthetic construct
  source 1..75: mol_type = other DNA
acacaccgttttttcgttaataaatcagtgcctgaggtggtggagcaaatcctgatggaacacgggttgaaaggc

SEQ ID NO: 421199 - DNA, 75 bp, synthetic construct
  source 1..75: mol_type = other DNA
gctgaaggtgatattctacaggggatcaccgatgaaaatggtaaaacagcgccagtcaacacctccattccgtca

SEQ ID NO: 421200 - DNA, 75 bp, synthetic construct
  source 1..75: mol_type = other DNA
atgcggtggatcctgttcatcctcttctgcctgctgggcgcacctgcccacgcggtatccatacccggcgttaca

SEQ ID NO: 421201 - DNA, 75 bp, synthetic construct
  source 1..75: mol_type = other DNA
atttgacacggcggagagcgtctgtgttgcctctgttgcccgtacggttctgcgtgccgtccgtgacacggtggt

SEQ ID NO: 421202 - DNA, 75 bp, synthetic construct
  source 1..75: mol_type = other DNA
tgaactatacgcccgctactttgaattgctggcaccaggtgaagaagcattaagcattgacgaatacgcggagtg

SEQ ID NO: 421203 - DNA, 75 bp, synthetic construct
  source 1..75: mol_type = other DNA
gccggtagtgacaacgaatgtggaggtgcacgataacctgacgggaacaacccgcaaagtgccggcataccatct

SEQ ID NO: 421204 - DNA, 75 bp, synthetic construct
  source 1..75: mol_type = other DNA
cgatcgccggtcgctgtggcagtaacatcgacctcgtcagccatcatgaagaggtgctggacaaaaccagcggta

SEQ ID NO: 421205 - DNA, 75 bp, synthetic construct
  source 1..75: mol_type = other DNA
aatttgccgagcagaaaaacatctatcagcaactgtggtgtttgccgaaagtggacggtaagtatatccaggtgt

SEQ ID NO: 421206 - DNA, 75 bp, synthetic construct
  source 1..75: mol_type = other DNA
tccgatgccctcggcgttgctcttggtgagctaaccaccaacattctttccttcgctggtcgagtcggtgaagaa

SEQ ID NO: 421207 - DNA, 75 bp, synthetic construct
  source 1..75: mol_type = other DNA
ttcttttgacctgtagaaacattcgaggcggccaccaatggttaaaactcagtaaccgaagaatggggctgttca

SEQ ID NO: 421208 - DNA, 75 bp, synthetic construct
  source 1..75: mol_type = other DNA
cggtgggacttgcttacgcggtgatgaatcactggtcatcaaaaaagagagtgatattgagccgttaattgtggt

SEQ ID NO: 421209 - DNA, 75 bp, synthetic construct
  source 1..75: mol_type = other DNA
ggtgatccccggcaacaaagcgattctgccgatcctctggtcgctgttcccgcaccatcgctacctgctggatac

SEQ ID NO: 421210 - DNA, 75 bp, synthetic construct
  source 1..75: mol_type = other DNA
aaggacttgatgtatcaaagttagatggcctccatgcaataaaacagtcctctggttacgataatttaaatcaag

SEQ ID NO: 421211 - DNA, 75 bp, synthetic construct
  source 1..75: mol_type = other DNA
gggatggtattcggattttctgcgttttcgaacaaatacggtaccgcgatttatgtaaatgttcacgacagcatt

SEQ ID NO: 421212 - DNA, 75 bp, synthetic construct
  source 1..75: mol_type = other DNA
cctcgcgtgagcacgcgccgtgggcgttaaccgattacggttttaaagtggtgattgcgccgagtttcgccgata

SEQ ID NO: 421213 - DNA, 75 bp, synthetic construct
  source 1..75: mol_type = other DNA
gacatctcctttgccgggaaaaaacgcatcacgctgattggcgggggaagttacctacggctggaggcggggaaa

SEQ ID NO: 421214 - DNA, 75 bp, synthetic construct
  source 1..75: mol_type = other DNA
ccaccgtttttgtcgaggtgcgctatcgccgctctgcgctttatggcggcgcggcagccagtgtgacccgcagca

SEQ ID NO: 421215 - DNA, 75 bp, synthetic construct
  source 1..75: mol_type = other DNA
taaaaacaaaaataaaatatatctccttgcatggaaaagaagagaaataaaaaactacttattatcttatacggc

SEQ ID NO: 421216 - DNA, 75 bp, synthetic construct
  source 1..75: mol_type = other DNA
caaccctttccggcatacggtgcagtaccgcacatatcacggaaacggacaacgcctggttgtactcgctgtcac

SEQ ID NO: 421217 - DNA, 75 bp, synthetic construct
  source 1..75: mol_type = other DNA
tgacgtcgatggtgttaatctcactgaactgattaacaaagtctctgaaaacggttattcactccgggtggttga

SEQ ID NO: 421218 - DNA, 75 bp, synthetic construct
  source 1..75: mol_type = other DNA
tgacgtcgatggtgttaatctcattgaactgattaacaaagtccctgaaaacggttattcactccgggtggttga

SEQ ID NO: 421219 - DNA, 75 bp, synthetic construct
  source 1..75: mol_type = other DNA
tccgaccaacagtcaacctgcacacaaccaccgtttacggcccttgccggcatacgctgcagtaccgcacatatc

SEQ ID NO: 421220 - DNA, 75 bp, synthetic construct
  source 1..75: mol_type = other DNA
caacccttccccgcatacgttgcagtaccgcacatatcacggaaacggacaacgcctggttgtactcgctgtcac

SEQ ID NO: 421221 - DNA, 75 bp, synthetic construct
  source 1..75: mol_type = other DNA
caacccttccctgcatacgctgcagtaccgcacatatcacggaaacggacaacgcctggttgtactcgctgtcac

SEQ ID NO: 421222 - DNA, 75 bp, synthetic construct
  source 1..75: mol_type = other DNA
tgattaacgtggtctgcgacaatggccactcccttcgtgttgttgatgaatctgaccgggtctcaacagactgca

SEQ ID NO: 421223 - DNA, 75 bp, synthetic construct
  source 1..75: mol_type = other DNA
gttataatggctgagcaaggcttgttgggattaaaaaacattagcgaagtactgattaattcttatgtttccttg

SEQ ID NO: 421224 - DNA, 75 bp, synthetic construct
  source 1..75: mol_type = other DNA
caagtgaagtctttttaactttatattcaaaatataatcaggctttaatcttagcaaatgaagtttttggtgaaa

SEQ ID NO: 421225 - DNA, 75 bp, synthetic construct
  source 1..75: mol_type = other DNA
tgacgtcgatggtgttaatctcaatgaactgattaacaaagtcactgaaaacggttattcactccgggtggtaga

SEQ ID NO: 421226 - DNA, 75 bp, synthetic construct
  source 1..75: mol_type = other DNA
tgctaagtgggagtctgatacatatgaaaaggacgatagaggatttagagactcaatatctacttcgacaggtaa

SEQ ID NO: 421227 - DNA, 75 bp, synthetic construct
  source 1..75: mol_type = other DNA
ccgacagcattaacgtgcaggcactgaacatggggcgcattgtcgttgacatcgatggtattgagcttgccgaac

SEQ ID NO: 421228 - DNA, 75 bp, synthetic construct
  source 1..75: mol_type = other DNA
aaacgttccgtcgtctggttgtcacactcatccggcgttatggcgtcagcctcattcatctggatgccagcgctg

SEQ ID NO: 421229 - DNA, 75 bp, synthetic construct
  source 1..75: mol_type = other DNA
gacgtcgatggcattgagctcgctgaactgattaacaaagtcgctgaaaacggttattcactccatgtggtggac

SEQ ID NO: 421230 - DNA, 75 bp, synthetic construct
  source 1..75: mol_type = other DNA
ctttcgactggcaatccggaaattcacaacatgaaatcattaaccacggaaacagtgctggatattctgattaca

SEQ ID NO: 421231 - DNA, 75 bp, synthetic construct
  source 1..75: mol_type = other DNA
aactgattaacaatgtcgctgaaaacggttattcactccgcgtggtggaggaattcgaccaacagtcaacctgca

SEQ ID NO: 421232 - DNA, 75 bp, synthetic construct
  source 1..75: mol_type = other DNA
cgttatggcgtcagtctcattcatctggatgccagcgctgaatgtctgccggacctgcccactttcggctggtaa

SEQ ID NO: 421233 - DNA, 75 bp, synthetic construct
  source 1..75: mol_type = other DNA
tgacttcggtgaatcagaatggattcattttaccggtaacggctatctgttgcgtaccgatgcgtggtcataccc

SEQ ID NO: 421234 - DNA, 75 bp, synthetic construct
  source 1..75: mol_type = other DNA
ttattcactccgcgtggtggatgaatccaaccaacagtcaacctacactccaccaccgtttacgactctttccgg

SEQ ID NO: 421235 - DNA, 75 bp, synthetic construct
  source 1..75: mol_type = other DNA
tctgcggcttaaacgcctggggctgtcaaaaacgttccgccgtctggttgtcacacttatccggcgttatggcgt

SEQ ID NO: 421236 - DNA, 75 bp, synthetic construct
  source 1..75: mol_type = other DNA
tgattaataaagtcgctgaaaacggttattcactccgtgtggtggaggaatccgaccaacagtcaacctgcacac

SEQ ID NO: 421237 - DNA, 75 bp, synthetic construct
  source 1..75: mol_type = other DNA
tacgtaccgatgcgtggtcgtatccggttctgcggcttaaacgcctggggctgtcaaaaacgttccgccgtctgg

SEQ ID NO: 421238 - DNA, 75 bp, synthetic construct
  source 1..75: mol_type = other DNA
cttactctgtcgctattctaattggcgcaataatctcaatcctacttagcaaaaaaacggtcacaacaagaaaaa

SEQ ID NO: 421239 - DNA, 75 bp, synthetic construct
  source 1..75: mol_type = other DNA
tcgttgacgtcgatggtgttactctcgctgaactgattaacgtggtctgcgagaacggttactcccttcgtgttg

SEQ ID NO: 421240 - DNA, 75 bp, synthetic construct
  source 1..75: mol_type = other DNA
tccccccctcagctgccctgagcggcatacgctgcagcaccgcacatatcacggaaacggacaacgcctggctgt

SEQ ID NO: 421241 - DNA, 75 bp, synthetic construct
  source 1..75: mol_type = other DNA
acggcaaaggacaacgcctggctgtactcgctgtcgcatcagacgaatgacaccggcgaatcagaatggattcat

SEQ ID NO: 421242 - DNA, 75 bp, synthetic construct
  source 1..75: mol_type = other DNA
gatcgcaaaacaggaagaggctcacgcccggaaaatgcaggctcttaacgccagagggcaggctcaacaattggc

SEQ ID NO: 421243 - DNA, 75 bp, synthetic construct
  source 1..75: mol_type = other DNA
aagcccgaacctcacgattaccgatgcgttttttgaatctttctctggcctgaccaccacgggggccactacgct

SEQ ID NO: 421244 - DNA, 75 bp, synthetic construct
  source 1..75: mol_type = other DNA
gtggtttcataatgtctacagttcggcgctgatgacaattaaccaggcgtttttccaggtggtgtcgatggcgac

SEQ ID NO: 421245 - DNA, 75 bp, synthetic construct
  source 1..75: mol_type = other DNA
gtttgaaaatcgaaccacactggaacggtgaaaccgccatcagctatgacgctctgacgacaataagtgatggta

SEQ ID NO: 421246 - DNA, 75 bp, synthetic construct
  source 1..75: mol_type = other DNA
cacatgatatgatcacatttcgtggtgccggtcgcccacgctcagtactagttaattcgatggaagaaaaaatga

SEQ ID NO: 421247 - DNA, 75 bp, synthetic construct
  source 1..75: mol_type = other DNA
aacagctgaatacatcaaagagcattatttccctggagcaaagattgaatgtctgaaatttgggaaagtggattt

SEQ ID NO: 421248 - DNA, 75 bp, synthetic construct
  source 1..75: mol_type = other DNA
cgggtaaatggttataagcagagcctggctgcgcataatattgcagtgcgtgatgaatggattgttgatggcggt

SEQ ID NO: 421249 - DNA, 75 bp, synthetic construct
  source 1..75: mol_type = other DNA
cgcgttaatggctataagcaaagtctgtccgcgcataatattgcagtgcgtgatgaatggattgttgacggcggt

SEQ ID NO: 421250 - DNA, 75 bp, synthetic construct
  source 1..75: mol_type = other DNA
taagcagaaaatgattaaaggcattattatgctaagttcgccagcggatgagtcattttttgcccaacttgataa

SEQ ID NO: 421251 - DNA, 75 bp, synthetic construct
  source 1..75: mol_type = other DNA
atcaatgaagtgaatggtatttcccgcgtggtgtatgacatcagcggtaagccgccagctactattgagtgggaa

SEQ ID NO: 421252 - DNA, 75 bp, synthetic construct
  source 1..75: mol_type = other DNA
tatgctggagcgttttgtgcgcgatatctgccagtgtgaagcactgtggacaccagcaaaaattatcgatgacgc

SEQ ID NO: 421253 - DNA, 75 bp, synthetic construct
  source 1..75: mol_type = other DNA
agggaactatctatcctgacgttattgaatctgccgcgtctgcaaccggtaaagcgcacgttatcaaatctcacc

SEQ ID NO: 421254 - DNA, 75 bp, synthetic construct
  source 1..75: mol_type = other DNA
atacccggttctgcggcttaaacgcctgggactgtcaaaaacgttccgccgtctggttgtcacacttatccggcg

SEQ ID NO: 421255 - DNA, 75 bp, synthetic construct
  source 1..75: mol_type = other DNA
agggatgaatctggaacgcatcgtggcgctgaaacccgatttggtggttgcctggcgcggagggaacgccgagcg

SEQ ID NO: 421256 - DNA, 75 bp, synthetic construct
  source 1..75: mol_type = other DNA
tcagaaccaggtactcgaagttttgtggcggagaaaacatctttaaagacagccgggttccctggccgcaagtta

SEQ ID NO: 421257 - DNA, 75 bp, synthetic construct
  source 1..75: mol_type = other DNA
gtctggttctcacactaatccaacgttatggcgtcagtctcattcatctggatgccagcgctgaatgcctgccgg

SEQ ID NO: 421258 - DNA, 75 bp, synthetic construct
  source 1..75: mol_type = other DNA
attcgtgaactgttcttttatagattgtagttttaacgaattaagtggtagggaagatatttattttttgggatg

SEQ ID NO: 421259 - DNA, 75 bp, synthetic construct
  source 1..75: mol_type = other DNA
ttcccgttattcctctcacaagtgactggtttgaacgcgcaagcccacgtattatcctcgctgcacaacaactct

SEQ ID NO: 421260 - DNA, 75 bp, synthetic construct
  source 1..75: mol_type = other DNA
tcgagttccctggccgcaggttagccgtgaacaagtattagcacgcgcaccgcaggccattgtcatcactggcgg

SEQ ID NO: 421261 - DNA, 75 bp, synthetic construct
  source 1..75: mol_type = other DNA
tctgcggcttaaacgcctggggctgtcaaaaacgttccgtcgtctggttctcacacttaacccacgttatggcgt

SEQ ID NO: 421262 - DNA, 75 bp, synthetic construct
  source 1..75: mol_type = other DNA
tctgcggcttaaacgcctggggctgtcaaaaacgttccgtcgtctggttttcacactcaacccacgttatggcgt

SEQ ID NO: 421263 - DNA, 75 bp, synthetic construct
  source 1..75: mol_type = other DNA
gacaaaactaaccgatccctctctaaatattaaactgttcattttatccaatccgcagaatccgaccgggaaggt

SEQ ID NO: 421264 - DNA, 75 bp, synthetic construct
  source 1..75: mol_type = other DNA
gtctggttttcacactaagccgacgttatggcgtcagtctcattcatctggatgccagcgctgaatgcctgccgg

SEQ ID NO: 421265 - DNA, 75 bp, synthetic construct
  source 1..75: mol_type = other DNA
gtctggttatcacactaagcctacgttatggcgtcagtctcattcatctggatgccagcgctgaatgcctgccgg

SEQ ID NO: 421266 - DNA, 75 bp, synthetic construct
  source 1..75: mol_type = other DNA
tctgcggcttaaacgcctggggctgtcaaaaacgttccgtcgtctggttgtcacactgaacctacgttatggcgt

SEQ ID NO: 421267 - DNA, 75 bp, synthetic construct
  source 1..75: mol_type = other DNA
atgatctctccgacgcttaatgtgcctcaggcgcgatttctttcaatgccccacaaatttaaagcctatgtcgct

SEQ ID NO: 421268 - DNA, 75 bp, synthetic construct
  source 1..75: mol_type = other DNA
tgtgggagatcccggcagaagtaatgaagatgaagcgacctcatattgtgccgctctctgagcaggttattatgc

SEQ ID NO: 421269 - DNA, 75 bp, synthetic construct
  source 1..75: mol_type = other DNA
tctggcatatccctagagagagaatgaaaatgcgccggcctcatattgttcctctgtcacgccaggtcatttctg

SEQ ID NO: 421270 - DNA, 75 bp, synthetic construct
  source 1..75: mol_type = other DNA
ctatctctcctgtggatttatccttgaagaaggattgccgatggagacgctgaaagccgtggtcaccagcatggc

SEQ ID NO: 421271 - DNA, 75 bp, synthetic construct
  source 1..75: mol_type = other DNA
gcagcggcggccaggcgatgcagcaattaatcaacagcctgtttatggaagcctttgcgaatccgtggctggcag

SEQ ID NO: 421272 - DNA, 75 bp, synthetic construct
  source 1..75: mol_type = other DNA
atgccgggttctgataagacacctaaaaacagaaatgagaaactcacacagttagataaatttcggtttgctcct

SEQ ID NO: 421273 - DNA, 75 bp, synthetic construct
  source 1..75: mol_type = other DNA
tcgctgtagttggcacagtgggtgttcctgcttgttatggtgggttcgaatcacttgttcagaatctaattgatt

SEQ ID NO: 421274 - DNA, 75 bp, synthetic construct
  source 1..75: mol_type = other DNA
aagagcgaggattctgtccttcgcactttctcgaggggcaggcttctggcgttgtttcagcgttaacccataacg

SEQ ID NO: 421275 - DNA, 75 bp, synthetic construct
  source 1..75: mol_type = other DNA
atattatgacctccaggtattggataataactgctacgtaactgctgatgggacgattcatcacaatagcggtaa

SEQ ID NO: 421276 - DNA, 75 bp, synthetic construct
  source 1..75: mol_type = other DNA
gaagctcgctgactatcacggcagtcctgtcactcgtatggctacaaacctgctgattctgaccgggctcagaac

SEQ ID NO: 421277 - DNA, 75 bp, synthetic construct
  source 1..75: mol_type = other DNA
atggccagagtgtctattagtgaagcggcacagcttgttaaggttagtcgtcccacgatttacaagatgattaac

SEQ ID NO: 421278 - DNA, 75 bp, synthetic construct
  source 1..75: mol_type = other DNA
gaggctcgctgaatatcatggcagtcctgttacccgcatggcgacaaatctgctgcttctgacaggcctcagaac

SEQ ID NO: 421279 - DNA, 75 bp, synthetic construct
  source 1..75: mol_type = other DNA
ggatggcgaactggtcagcgactgcgcggtgctgacgccgctgattcagacgctgcgagacattcccggcgtgaa

SEQ ID NO: 421280 - DNA, 75 bp, synthetic construct
  source 1..75: mol_type = other DNA
atctccccaacgaagcacctggtttcagcctgacggatatcacacaggaaagcaaaatcagcagcaagtctttta

SEQ ID NO: 421281 - DNA, 75 bp, synthetic construct
  source 1..75: mol_type = other DNA
ttaacaaggcgctggcacgccagcttcaggccatcggctttggctgggatgtgaatgcgcaggatatcaggggga

SEQ ID NO: 421282 - DNA, 75 bp, synthetic construct
  source 1..75: mol_type = other DNA
gacagtggatcttcctgcccgtgtgtttctgggcatgaatgatgatgaatttgacaaggcgctggcgcgtcagct

SEQ ID NO: 421283 - DNA, 75 bp, synthetic construct
  source 1..75: mol_type = other DNA
tttcagtaaggaagggatcaccaccggagaaacgtaccattatgctgaacccttcctgacggcaggtgacgctga

SEQ ID NO: 421284 - DNA, 75 bp, synthetic construct
  source 1..75: mol_type = other DNA
agtgacagcggacaggagagcatctgggatattcagaccacctgtaacgtggtgagcggaagtgtggtcacccgg

SEQ ID NO: 421285 - DNA, 75 bp, synthetic construct
  source 1..75: mol_type = other DNA
gggagcgaaatctacctcaatcagtcagtcactgaagtggttgagcaggtattgcgtaaacatggtctggaaggg

SEQ ID NO: 421286 - DNA, 75 bp, synthetic construct
  source 1..75: mol_type = other DNA
atttcaataagttagtaaaagatagtaacaagaaactttttgctggacgttctaatgggcgccaggcctatgatt

SEQ ID NO: 421287 - DNA, 75 bp, synthetic construct
  source 1..75: mol_type = other DNA
tgaaagccgtagtgaccagcatggcagaaaccgcccgcgcggcaggcattgccatcgttactggcgacactaaag

SEQ ID NO: 421288 - DNA, 75 bp, synthetic construct
  source 1..75: mol_type = other DNA
gccatcgttactggcgacactaaagtggtgcagcgcggcgcggcagataaactgtttatcaacaccgctggcatg

SEQ ID NO: 421289 - DNA, 75 bp, synthetic construct
  source 1..75: mol_type = other DNA
ggcgatgaaggaggcgatagagcgtgccgtcatcggtaatccggacgtccgcatgaagtttcagcaaatcagcag

SEQ ID NO: 421290 - DNA, 75 bp, synthetic construct
  source 1..75: mol_type = other DNA
acactgggtatccatgtcagatttaatggcagggctgatgatggttttcatgtttatatctgttgcttatatgca

SEQ ID NO: 421291 - DNA, 75 bp, synthetic construct
  source 1..75: mol_type = other DNA
tggttgagttcagccgtgtgatattgcgtcgcaagaacgatatggagcgactgacatctggcgctcaatccttat

SEQ ID NO: 421292 - DNA, 75 bp, synthetic construct
  source 1..75: mol_type = other DNA
atgaaacatatccctgaaggcgtgattcaggtaccagaatcacccgacgccccggaagcgctgccggggtctcgt

SEQ ID NO: 421293 - DNA, 75 bp, synthetic construct
  source 1..75: mol_type = other DNA
gatgcagagtatgaagccctgtaccgtgacattctgcctgagctggacctggtactgtggctgattaaagccgat

SEQ ID NO: 421294 - DNA, 75 bp, synthetic construct
  source 1..75: mol_type = other DNA
cgctcatgacagcacttcccgaccatgccgccagtcccctgatgacccgcctgcaggacgagctgcgcacggaat

SEQ ID NO: 421295 - DNA, 75 bp, synthetic construct
  source 1..75: mol_type = other DNA
ccagtcccctgatgacccgcctgcaggacgagctgcgcacggaatctgtccgcgctcaggcccgtgaacagttta

SEQ ID NO: 421296 - DNA, 75 bp, synthetic construct
  source 1..75: mol_type = other DNA
gtgtattacaacacgctacaggtgcctcatccttccgatcatatgtggcaggagcgactcgccgatcgtcccggc

SEQ ID NO: 421297 - DNA, 75 bp, synthetic construct
  source 1..75: mol_type = other DNA
tcggctttgagattgaagggactggcaagaagtacgcattacgtaatggtgaatatgttgatgcgtattatatgg

SEQ ID NO: 421298 - DNA, 75 bp, synthetic construct
  source 1..75: mol_type = other DNA
cgcaccggctgggagctggatacgctggtcagtgcgctcatgacagcgcttcccgaccatgccgccagtcccctg

SEQ ID NO: 421299 - DNA, 75 bp, synthetic construct
  source 1..75: mol_type = other DNA
cacatgcccgtatggatggacacaccgataactatggtgaagacagttacaacgaaggcttatcattgaaacggg

SEQ ID NO: 421300 - DNA, 75 bp, synthetic construct
  source 1..75: mol_type = other DNA
cacggcggagagcgtctgtgttgcctctgttgcccgtacggttctgcgtgccgtccgtgacacggtggtctctgt

SEQ ID NO: 421301 - DNA, 75 bp, synthetic construct
  source 1..75: mol_type = other DNA
ccggcccgtacatccggttgtggccgtatcggcccgcaccggctgggaactggatacgctggtcagtgcgctcat

SEQ ID NO: 421302 - DNA, 75 bp, synthetic construct
  source 1..75: mol_type = other DNA
tggtttaacgtcgatcgtcaagaagatgctattagcctggtgaatcaaacgatggcttctcaagctgaaaccgcg

SEQ ID NO: 421303 - DNA, 75 bp, synthetic construct
  source 1..75: mol_type = other DNA
cagcatctgctggatatcgctttttggtgtaacgaaaaaggcgtcagcgcccgtcagcaactgaccgtccagcat

SEQ ID NO: 421304 - DNA, 75 bp, synthetic construct
  source 1..75: mol_type = other DNA
ggtaattaatcccggaaataataacgataaacaattttcattgttactggaggagtaccgttcgctttttggact

SEQ ID NO: 421305 - DNA, 75 bp, synthetic construct
  source 1..75: mol_type = other DNA
atgacccgcctgcaggacgagctgcgcacggaatctgtccgcgctcaggcccgtgagcagtttaccggtgcggtg

SEQ ID NO: 421306 - DNA, 75 bp, synthetic construct
  source 1..75: mol_type = other DNA
aaataatcgaagatgttaaatcttgccttgaaaacttacaagtccaacccattttattcatgggtgcaggtattt

SEQ ID NO: 421307 - DNA, 75 bp, synthetic construct
  source 1..75: mol_type = other DNA
tatggatggtgagggtacaatcgatttttctgggatatctaacaatcatgctgatcaattaaaggattttctttt

SEQ ID NO: 421308 - DNA, 75 bp, synthetic construct
  source 1..75: mol_type = other DNA
tatcttatcagagacgaataaaaaagtttttttggattttatttcattttgtgaatcaaataataaatttacaga

SEQ ID NO: 421309 - DNA, 75 bp, synthetic construct
  source 1..75: mol_type = other DNA
cgattgaaaaaccactttcttccctgccttattcgctttcccgtcacatcctggaacatctgcgtaaactcactc

SEQ ID NO: 421310 - DNA, 75 bp, synthetic construct
  source 1..75: mol_type = other DNA
gcacggaatctgtccgctctcaggcccgtgaacagtttaccggtgcggtggaccggatatttgacacggcggaga

SEQ ID NO: 421311 - DNA, 75 bp, synthetic construct
  source 1..75: mol_type = other DNA
gcggggccggtaaatcctcactctgtaatgcactgtttcagggggaggtcaccccggtcagtgatgttcacgccg

SEQ ID NO: 421312 - DNA, 75 bp, synthetic construct
  source 1..75: mol_type = other DNA
tctgatgccattgaggcaattgaaaaaccgctctcctccctgccttactcactttcccgtcacatcctggaacat

SEQ ID NO: 421313 - DNA, 75 bp, synthetic construct
  source 1..75: mol_type = other DNA
tcccgaccatgccgccagtcccctgatgacccgcctgcaggacgagctgcgcacggaatctgtccggggtcaggc

SEQ ID NO: 421314 - DNA, 75 bp, synthetic construct
  source 1..75: mol_type = other DNA
gagtatttctggcgacacatcctgcaccggggacatcagcaggtgctgtttgtggtgacgcaggccgacaaaacg

SEQ ID NO: 421315 - DNA, 75 bp, synthetic construct
  source 1..75: mol_type = other DNA
aaaccgagtttgaattaattgcaataaacagtggatataaattctcaatatcagagcctgtatggatcttagata

SEQ ID NO: 421316 - DNA, 75 bp, synthetic construct
  source 1..75: mol_type = other DNA
aggaaccgattattcaataaattttccaagagcaaaacatagtggagtatttcgttctgagtttacaaagttgaa

SEQ ID NO: 421317 - DNA, 75 bp, synthetic construct
  source 1..75: mol_type = other DNA
cgcacagttctgcgtgccgtccgtgacacggtggtctctgttgcccgcgctgtatggaactggattttcttctga

SEQ ID NO: 421318 - DNA, 75 bp, synthetic construct
  source 1..75: mol_type = other DNA
tccgtatccattccaacggaagatattagtgaaccgatgtttcatcagggacgcggcggcctgcgccatcgtgtt

SEQ ID NO: 421319 - DNA, 75 bp, synthetic construct
  source 1..75: mol_type = other DNA
atgcagcatatccgcgatcaggatgatatttatcctgtgttccgcgagctattccataaacaaaatgcaactact

SEQ ID NO: 421320 - DNA, 75 bp, synthetic construct
  source 1..75: mol_type = other DNA
aagatcctggtatatggtccccatcgggatcaatcgaaaaggtactaaccgtcattcctccaaagaatcttaatg

SEQ ID NO: 421321 - DNA, 75 bp, synthetic construct
  source 1..75: mol_type = other DNA
taccgaatctaaaacagaaccaacaacgccaattgacagaatataaaacgcatcgtgcgggttatactgcgaacg

SEQ ID NO: 421322 - DNA, 75 bp, synthetic construct
  source 1..75: mol_type = other DNA
atgcagcatatacgcgatcaggatgatatttatcccgtgttccgcgagctattccataaacaaaatgcaacgact

SEQ ID NO: 421323 - DNA, 75 bp, synthetic construct
  source 1..75: mol_type = other DNA
ggggggcggcggcggttctggcagcggtcagggacaagccagccaggatggtgaaggtcaggatgagtttgtttt

SEQ ID NO: 421324 - DNA, 75 bp, synthetic construct
  source 1..75: mol_type = other DNA
gtgattcacagtacttattcagtgaacaggcaatatgctacgcgggaactgaaaagaatataaaccagatttata

SEQ ID NO: 421325 - DNA, 75 bp, synthetic construct
  source 1..75: mol_type = other DNA
gtcaacgagtcctaccactggattaccagtactgtatggtgggcaacttccccataaaaatggggtatcgggcgg

SEQ ID NO: 421326 - DNA, 75 bp, synthetic construct
  source 1..75: mol_type = other DNA
atggggaaaagtttagggggcttctttggagcaataattacggcagtcattgtcgctttggcggtttacttcact

SEQ ID NO: 421327 - DNA, 75 bp, synthetic construct
  source 1..75: mol_type = other DNA
aatccattgtggagccgaacgtaaaacattaccagtaatgacatttaatgaatctaatattattggtgaagttaa

SEQ ID NO: 421328 - DNA, 75 bp, synthetic construct
  source 1..75: mol_type = other DNA
gcacagtactgtaaagataacaattattatagtaacggtaacgtttcatataatgattcatataagaaaactatc

SEQ ID NO: 421329 - DNA, 75 bp, synthetic construct
  source 1..75: mol_type = other DNA
ctccttttctgattacttcaagtactacatcattaatatctataacggtagcgatttaatcgatacattctatac

SEQ ID NO: 421330 - DNA, 75 bp, synthetic construct
  source 1..75: mol_type = other DNA
agcggcgggaacttcatgcgctggaagagaatttggccatcatcagcaacagtgagcctgcgcaactgctggaag

SEQ ID NO: 421331 - DNA, 75 bp, synthetic construct
  source 1..75: mol_type = other DNA
ggaaaaagcgcgaacgctttataacgcgtcgggggaagggagtgatgtgcagaatattgactttctgtcactgac

SEQ ID NO: 421332 - DNA, 75 bp, synthetic construct
  source 1..75: mol_type = other DNA
tggcgggattcaagaagaagctccgtcattaggaaagccagttctatgtatgcgtgatacaactgaacggcctgc

SEQ ID NO: 421333 - DNA, 75 bp, synthetic construct
  source 1..75: mol_type = other DNA
ttataatggaaaatatttcaccagaaaatatttttttaacaggaaattcagttattgatgctttggtgtctgtat

SEQ ID NO: 421334 - DNA, 75 bp, synthetic construct
  source 1..75: mol_type = other DNA
cgaagcgcgaacagattaaccagtatcaggaaagcgatctgagatttatccagcgcctgctggcagaagtgggca

SEQ ID NO: 421335 - DNA, 75 bp, synthetic construct
  source 1..75: mol_type = other DNA
acaagtgaaggggaagtgtatgagggtatttctgattcagaaggtaaaacatcatcaatttttacatcaatgccc

SEQ ID NO: 421336 - DNA, 75 bp, synthetic construct
  source 1..75: mol_type = other DNA
tcattttgatgtagacctggaagcgcaagaggtgaaagcgggagagaaaacttatcgctttaccatcgatgcctt

SEQ ID NO: 421337 - DNA, 75 bp, synthetic construct
  source 1..75: mol_type = other DNA
acgcgattttattcagttgtgcgctgtggctgtaaattttatgagcgagccagactctggcgcgaagagcgtgca

SEQ ID NO: 421338 - DNA, 75 bp, synthetic construct
  source 1..75: mol_type = other DNA
gtagagaataaacagtgtggtttagtagaggatgttagctttacgggtggttttggtaatttgtttgcttcatgg

SEQ ID NO: 421339 - DNA, 75 bp, synthetic construct
  source 1..75: mol_type = other DNA
acgccagctgaccgaatataaaacgcatcgggcgggttataccgctaacggcgttccggccaatatcagcgttgt

SEQ ID NO: 421340 - DNA, 75 bp, synthetic construct
  source 1..75: mol_type = other DNA
cgcgagtatgtgtgactggacagcatcgcgagatgttagatcaagtattaaaattatttgagattgagccagact

SEQ ID NO: 421341 - DNA, 75 bp, synthetic construct
  source 1..75: mol_type = other DNA
tggcgataaatgccgctttctggtgctgcgtgtaccgcgaggcagagagcaaagaagcgcaaattgaagcaattg

SEQ ID NO: 421342 - DNA, 75 bp, synthetic construct
  source 1..75: mol_type = other DNA
ttctggtttcgctctatccgggcaaactgctggataccgtcggtaacttcctggcaccgctgaaaattatcgcgc

SEQ ID NO: 421343 - DNA, 75 bp, synthetic construct
  source 1..75: mol_type = other DNA
atggtaacactggcaagataacaactctaacacaaacagtagcagataataataccgcacaaactacggcaatta

SEQ ID NO: 421344 - DNA, 75 bp, synthetic construct
  source 1..75: mol_type = other DNA
tttggttctcctgatgctgtttcatatactgacagtggaaacgagatctggaagtacgcctttgcaaaagtaaaa

SEQ ID NO: 421345 - DNA, 75 bp, synthetic construct
  source 1..75: mol_type = other DNA
atggcgatctgcttgtcctgggtgggaaccagggggatgcggttaatattcgcgcattcccaacatcaagagtgt

SEQ ID NO: 421346 - DNA, 75 bp, synthetic construct
  source 1..75: mol_type = other DNA
tgttcatgcggtaaaaccagaaccgcactgggcaattccacaagggcaaagcgcccacgatactttctgggatta

SEQ ID NO: 421347 - DNA, 75 bp, synthetic construct
  source 1..75: mol_type = other DNA
ctatgcattatctctattgcgctggcgatgatctccctgttgatttcggaatggctggcaagaatcagccgtgaa

SEQ ID NO: 421348 - DNA, 75 bp, synthetic construct
  source 1..75: mol_type = other DNA
ctgcatctaccgctggtgttaccgcccgtggtcgttggttacttgctgttagtctctatgggacggcgcggattt

SEQ ID NO: 421349 - DNA, 75 bp, synthetic construct
  source 1..75: mol_type = other DNA
atgatactgaccgatccagaatggcaggcggttttactaagcctgaaagtttcttccctggctgtgctgtttagc

SEQ ID NO: 421350 - DNA, 75 bp, synthetic construct
  source 1..75: mol_type = other DNA
tgttcatgcggtaaaaccggagccgcactgggcgatcccacagggaggcagcgcccacgacactttctgggatta

SEQ ID NO: 421351 - DNA, 75 bp, synthetic construct
  source 1..75: mol_type = other DNA
cggatattgcctgtgacgcgttactgctgaagccggcgtcatttactttccagaccccggtgtctgacggaacac

SEQ ID NO: 421352 - DNA, 75 bp, synthetic construct
  source 1..75: mol_type = other DNA
taacaccatgatcaatgcaggtcagcatcttgatatcggtgcgatgaaaaatctgtcggtaacggtggaaaaagc

SEQ ID NO: 421353 - DNA, 75 bp, synthetic construct
  source 1..75: mol_type = other DNA
ctcacggttatttccagccatataaaagcttaagcgatatcaccaaagcggatttcctctcagatccgaataaaa

SEQ ID NO: 421354 - DNA, 75 bp, synthetic construct
  source 1..75: mol_type = other DNA
actcccgaatgggggaagtgactgcggatgacggtacggtgttgcctatagctgctacctttgcaggtgcgcctt

SEQ ID NO: 421355 - DNA, 75 bp, synthetic construct
  source 1..75: mol_type = other DNA
atgaagtgaaatccgcagaccttctggcaattctgaaggcgctgaaagccaaaggcgttcatgccaaactgcttt

SEQ ID NO: 421356 - DNA, 75 bp, synthetic construct
  source 1..75: mol_type = other DNA
ggcgcgttttctttaccatcacgttaccgctgaccttgccgggaattattgtcggtacggtgctggctttcgctc

SEQ ID NO: 421357 - DNA, 75 bp, synthetic construct
  source 1..75: mol_type = other DNA
gagcattgatcaccgccgtgatggtcgttgcggcagtttatacggggggagctacactagcagttgcggctatgt

SEQ ID NO: 421358 - DNA, 75 bp, synthetic construct
  source 1..75: mol_type = other DNA
aagtggactactcattactaatgaaacagattttaatctacgttgggatagtcagaagaaccttaaagtaaatgg

SEQ ID NO: 421359 - DNA, 75 bp, synthetic construct
  source 1..75: mol_type = other DNA
gactttgcagttagtgcatataatattctaggtggtgtatctgtcaaagctactatcatgggtattaaaccagag

SEQ ID NO: 421360 - DNA, 75 bp, synthetic construct
  source 1..75: mol_type = other DNA
tattgggtggtgtatctactaaacttattgttggtaatctaaaaccagaatttaactttacattacccgctgtta

SEQ ID NO: 421361 - DNA, 75 bp, synthetic construct
  source 1..75: mol_type = other DNA
cagttgcaaccgaccaacaaaacgtaggcttctgtactgtaacgtgtctagaatatcctgatgcaattttcgatg

SEQ ID NO: 421362 - DNA, 75 bp, synthetic construct
  source 1..75: mol_type = other DNA
atagaatcaattctacaggcttgcggcggtatactttatgtgcacgcggggcaagtatgtattaccgtagaccgt

SEQ ID NO: 421363 - DNA, 75 bp, synthetic construct
  source 1..75: mol_type = other DNA
aataccagccgattgtttaccagttatgcacctgaattcgactcagtaccaaacatcgttgatggtgaatataag

SEQ ID NO: 421364 - DNA, 75 bp, synthetic construct
  source 1..75: mol_type = other DNA
atgggtaagagtttagggggcttctttggagctatcataactgcggtaattgtcgcggcagccgtttactttact

SEQ ID NO: 421365 - DNA, 75 bp, synthetic construct
  source 1..75: mol_type = other DNA
tatcacctttgtttctaacattcctggtgaaacgcgaaccattccttcagccatgtataccctgatccagactcc

SEQ ID NO: 421366 - DNA, 75 bp, synthetic construct
  source 1..75: mol_type = other DNA
gctaaaatagctaacactatccagagtacaaactttgttagtggtagtgctggatggcagatcaataaggcaggt

SEQ ID NO: 421367 - DNA, 75 bp, synthetic construct
  source 1..75: mol_type = other DNA
cagatgactacacttgctactaaaactgaagttaacgcatcttatacattgtctgtcaatgctaacggtactgta

SEQ ID NO: 421368 - DNA, 75 bp, synthetic construct
  source 1..75: mol_type = other DNA
taaaattgaagcagcagaagaacgtttagatgataagattgcagttagtgaagttacaatgagtactcaaatagc

SEQ ID NO: 421369 - DNA, 75 bp, synthetic construct
  source 1..75: mol_type = other DNA
attgctcaagggcaaaagcacatggcgcgaatctttctgattcatgctctatctttctgcgccgtcttttccgtg

SEQ ID NO: 421370 - DNA, 75 bp, synthetic construct
  source 1..75: mol_type = other DNA
cagcgaacaggaagcacgccagcaatctcctgatggctgcgtgatggtattcgctgcccgtattcgccaggaggt

SEQ ID NO: 421371 - DNA, 75 bp, synthetic construct
  source 1..75: mol_type = other DNA
acagttcaccgcaccacggcgctggtgatggttactcctgctctttggccttccggcgctgttcatattttaatt

SEQ ID NO: 421372 - DNA, 75 bp, synthetic construct
  source 1..75: mol_type = other DNA
tcgccagtgggaacaaaggaaatcaaacgcatcgccaacaatgccagatttgcagctggtgggcaatgtgatcag

SEQ ID NO: 421373 - DNA, 75 bp, synthetic construct
  source 1..75: mol_type = other DNA
ccctgtaaaacgatgcaccgtagttcctcacaccacggcgctggtgatggttactcctgttctttggccttgcgg

SEQ ID NO: 421374 - DNA, 75 bp, synthetic construct
  source 1..75: mol_type = other DNA
atttctcaaggataaacgcacagggcgcgaatctgtttgactcatgctcgtacgctatctttctgcgctgtcttt

SEQ ID NO: 421375 - DNA, 75 bp, synthetic construct
  source 1..75: mol_type = other DNA
atattgatttgttatcggttgaatttgatgagattacaaaaaattgtaattacacttttagtgtagatggagaga

SEQ ID NO: 421376 - DNA, 75 bp, synthetic construct
  source 1..75: mol_type = other DNA
aacgaagccgtcagtcgtgaacgtcagacgggaatgcagatggtgcaatctgtgcttgagcgcatcggggaggcg

SEQ ID NO: 421377 - DNA, 75 bp, synthetic construct
  source 1..75: mol_type = other DNA
cactgcgacgcgctgatcctgcgcgaatcggtcagccttgatctgatgaaacgcagcaatatcaccaccgcaaaa

SEQ ID NO: 421378 - DNA, 75 bp, synthetic construct
  source 1..75: mol_type = other DNA
ccagcgcctattccgatctcggtttcgacgtagatttaagcccgatgttctctacacctgaagagatcgcccgcc

SEQ ID NO: 421379 - DNA, 75 bp, synthetic construct
  source 1..75: mol_type = other DNA
ggtgcgcatataaaaaaggttatcatacaggagaaagcataaaatggttttcatattttcactcaatacttactg

SEQ ID NO: 421380 - DNA, 75 bp, synthetic construct
  source 1..75: mol_type = other DNA
tatagaatttgcaaattcactagcttatagacacgggctaaaacgaccaaatggtattgaggcatatttttctaa

SEQ ID NO: 421381 - DNA, 75 bp, synthetic construct
  source 1..75: mol_type = other DNA
tacagcacgccagaaatgcagaatattttgctgcaaaatgccgttggccacgctgtccggaaagcaaaaaatttt

SEQ ID NO: 421382 - DNA, 75 bp, synthetic construct
  source 1..75: mol_type = other DNA
cgctgccggacttcattatgaaccgtggcggtgtgtcgctgcgtccgggtgatggcgtaatccactcctggctga

SEQ ID NO: 421383 - DNA, 75 bp, synthetic construct
  source 1..75: mol_type = other DNA
tggcgcagaaaatggtaggccgtgcctgtggcgtgaaaggcattcgtccgggtgcgtactgtgaaccgaaaatga

SEQ ID NO: 421384 - DNA, 75 bp, synthetic construct
  source 1..75: mol_type = other DNA
actgtgtaattattaatcaaattattggttttgttggttttcaggcgcgagcaattgcgacttttcaggcttatc

SEQ ID NO: 421385 - DNA, 75 bp, synthetic construct
  source 1..75: mol_type = other DNA
gccaattgaagtggacgtctctaacctgaacatgggcgacgtaattgacgtttatccgtacaaaggcgaagtgcg

SEQ ID NO: 421386 - DNA, 75 bp, synthetic construct
  source 1..75: mol_type = other DNA
caccgaacgacccggacgacgcacgtccgctgtctgcggtacagggcgagaaaatcgacgaagtgtttatcggtt

SEQ ID NO: 421387 - DNA, 75 bp, synthetic construct
  source 1..75: mol_type = other DNA
tccgctgtctgcggtacagggcgagaagatcgacgaagtgtttatcggttcctgcatgaccaacatcggtcactt

SEQ ID NO: 421388 - DNA, 75 bp, synthetic construct
  source 1..75: mol_type = other DNA
caacgataaaaatacaatacatcacaacaacagcaaaacattaatttcttatagtagcaacatctatacggataa

SEQ ID NO: 421389 - DNA, 75 bp, synthetic construct
  source 1..75: mol_type = other DNA
gacatgtgcgcacacatgattttaatctgtgcgcacagtttgagttttgtcactcaaattaagcaacgccccgca

SEQ ID NO: 421390 - DNA, 75 bp, synthetic construct
  source 1..75: mol_type = other DNA
cagatttggttcgttccaaggtttgcaacgagagctttttcctgtgctctttaaggaatttctcaagagcaaacg

SEQ ID NO: 421391 - DNA, 75 bp, synthetic construct
  source 1..75: mol_type = other DNA
ctccagggaaagtaatcatcgtctggcacaaatcacgcaatatgcccgtcaactggccggctctccatcgattat

SEQ ID NO: 421392 - DNA, 75 bp, synthetic construct
  source 1..75: mol_type = other DNA
gcgatacaatggctgacacgagcacccgatcgctttagcgccgcccagtttagcccattactcgaacatgaaata

SEQ ID NO: 421393 - DNA, 75 bp, synthetic construct
  source 1..75: mol_type = other DNA
ctttcactctttgtgacgttgctatccagttccttggtaacaacaaaatccagccatcaacttgctgccttactc

SEQ ID NO: 421394 - DNA, 75 bp, synthetic construct
  source 1..75: mol_type = other DNA
ccgaagtggacgtgatgagtcgctatccggtcagttcttcctggctgctcaaccgcccggtaatgggcgatccgc

SEQ ID NO: 421395 - DNA, 75 bp, synthetic construct
  source 1..75: mol_type = other DNA
ttaccatatatataacatccaaatgtgaacttacatcaaggtatctcagtattaatattggtgacagaataaccc

SEQ ID NO: 421396 - DNA, 75 bp, synthetic construct
  source 1..75: mol_type = other DNA
gtttattctttaaatttacaggctggaggatattcgacagcaataagacagtatgaagaagatatgccgagcttt

SEQ ID NO: 421397 - DNA, 75 bp, synthetic construct
  source 1..75: mol_type = other DNA
gactgtaaaagctataagaggaacaacagatgttcctttatctgtgaattttaaaagcgactcgcctgttgcggg

SEQ ID NO: 421398 - DNA, 75 bp, synthetic construct
  source 1..75: mol_type = other DNA
tcagcatcagctacaatgatgaccgccgctacaacagccattattacacggcagattactatcaaaatgtctaca

SEQ ID NO: 421399 - DNA, 75 bp, synthetic construct
  source 1..75: mol_type = other DNA
tttgatgaaggaaccattcgcactgttggtgccaatctgtcacgtgccatctccggcgataccggtgatgacaaa

SEQ ID NO: 421400 - DNA, 75 bp, synthetic construct
  source 1..75: mol_type = other DNA
caccctcagcagtaacctgagctataacttcggcatctataacaaccagttgcgtaacggcgggaacaatacatc

SEQ ID NO: 421401 - DNA, 75 bp, synthetic construct
  source 1..75: mol_type = other DNA
taataaggtgtctcttcgtcggcgtacgaaggataaaattttggatgtgagcagtaatggaacatcaggtgaata

SEQ ID NO: 421402 - DNA, 75 bp, synthetic construct
  source 1..75: mol_type = other DNA
atgccgcttatgcctcttgattataacacactccctgacgaagcggagattaataaggtgcctcttcgtcggcgt

SEQ ID NO: 421403 - DNA, 75 bp, synthetic construct
  source 1..75: mol_type = other DNA
gacatgctgtatggcatggcggatgcctgcgccctgagccacaggtccggaggtaattatgtcaatcaggatagt

SEQ ID NO: 421404 - DNA, 75 bp, synthetic construct
  source 1..75: mol_type = other DNA
attttgataacggaggttatagcaaggttattgatgtaaacaaaggtttatataccgtaccaattacaatcctat

SEQ ID NO: 421405 - DNA, 75 bp, synthetic construct
  source 1..75: mol_type = other DNA
acggtaaaaatggtagcggttggaccgagtttcctgcagcaatgaagtcgttttcccctgtagactctaaaaaca

SEQ ID NO: 421406 - DNA, 75 bp, synthetic construct
  source 1..75: mol_type = other DNA
tgtaatgctccggcgaatattcttttttcaataagagctgcagatatgcaggacggacagataaataaaacaaag

SEQ ID NO: 421407 - DNA, 75 bp, synthetic construct
  source 1..75: mol_type = other DNA
tcagatcagcgccaaaatcaacgggcggattttcccgcttaacggcaagcgtaactatctcccgctctctcccta

SEQ ID NO: 421408 - DNA, 75 bp, synthetic construct
  source 1..75: mol_type = other DNA
tgagtcagaaggtgtttgtttcaggaatttaatactggaaataagaatgaaaaaagcattgtcacttttgattac

SEQ ID NO: 421409 - DNA, 75 bp, synthetic construct
  source 1..75: mol_type = other DNA
cctaccagtttaagcgaatgatgatccgccactgcctgttaaacggtaatgcttatgcggttattcagtgggggc

SEQ ID NO: 421410 - DNA, 75 bp, synthetic construct
  source 1..75: mol_type = other DNA
tatcgcctatttttctgcaggaatacagcaatagcacctacagcaatttcagcgaggcaagccgcgcgtttctga

SEQ ID NO: 421411 - DNA, 75 bp, synthetic construct
  source 1..75: mol_type = other DNA
tgtaccaactgagccagaaacagcaggcggcggcgggcgtcagcggacgggtgaaaaaggtgctgcgccgccgtt

SEQ ID NO: 421412 - DNA, 75 bp, synthetic construct
  source 1..75: mol_type = other DNA
atactccctctcatatacttctcagctgcaacaacgttttgtaatagggtgatagaattaatagaatcaaacata

SEQ ID NO: 421413 - DNA, 75 bp, synthetic construct
  source 1..75: mol_type = other DNA
atttatcgaaaagcaacgtggcgataaaaaaaaataccgtcacttacttctttaggctgatttcgtttatttaca

SEQ ID NO: 421414 - DNA, 75 bp, synthetic construct
  source 1..75: mol_type = other DNA
ataagcagcttggcatgagcaatcaggatgctgagtggctggcctcccggcgcttctccattgaagacattgccc

SEQ ID NO: 421415 - DNA, 75 bp, synthetic construct
  source 1..75: mol_type = other DNA
tactgaacattccgcagcagctgatcctgccggataccgttcatgaaggcatcgtcattaacagtgcagagatgc

SEQ ID NO: 421416 - DNA, 75 bp, synthetic construct
  source 1..75: mol_type = other DNA
aacgagggctccctttctggcaagcggaaaacggggtctggctgacatcaacggttgcggttgagtttcttgagt

SEQ ID NO: 421417 - DNA, 75 bp, synthetic construct
  source 1..75: mol_type = other DNA
tgattcagccgatttactgcgcgccacccctaccgaacgttacgccacgtatgagaaagggattaagaacgggat

SEQ ID NO: 421418 - DNA, 75 bp, synthetic construct
  source 1..75: mol_type = other DNA
cagccaaaatcacttcatccttatgcgccggggtgtgttgtaccggaacgcacaggcgcacacaaataccgctat

SEQ ID NO: 421419 - DNA, 75 bp, synthetic construct
  source 1..75: mol_type = other DNA
ggtcataaaacgctgatcccggaactggtcgaagcgctgaaaaaatggggacgcgaagatatctgcgtggtcgcg

SEQ ID NO: 421420 - DNA, 75 bp, synthetic construct
  source 1..75: mol_type = other DNA
atactggatgcagataaaaagcagatacagtgcgtggtaagaccgctgcaaatcctgcgtgctgacggggtgtgg

SEQ ID NO: 421421 - DNA, 75 bp, synthetic construct
  source 1..75: mol_type = other DNA
aaactggcaatggggcttaacgcatccaaaggcaaaaaaacggcaatcgataaaatttatcgcgacattttttgg

SEQ ID NO: 421422 - DNA, 75 bp, synthetic construct
  source 1..75: mol_type = other DNA
cgctgcttagaataggcaatgactggtgcattccgaaaggaataacgccgacgacgcacatcattaaattaccga

SEQ ID NO: 421423 - DNA, 75 bp, synthetic construct
  source 1..75: mol_type = other DNA
aacacggggagttacttacagcacaactgcgtctggggccggcagacatcctggagtccgatgagaatggtatta

SEQ ID NO: 421424 - DNA, 75 bp, synthetic construct
  source 1..75: mol_type = other DNA
ttaaaaatgatggacattatttttgtagagccggaggaaacagaccagacggtttaaatgagccggttaccatga

SEQ ID NO: 421425 - DNA, 75 bp, synthetic construct
  source 1..75: mol_type = other DNA
agggtaatcacgcaggtggtgatactggatgcggataaaaagcagatacagtgtgtggtaagaccactgcaaatc

SEQ ID NO: 421426 - DNA, 75 bp, synthetic construct
  source 1..75: mol_type = other DNA
cttgccgaccagttacaacccgccgtgttggcagaagccgcgcgccagaaagcgtggccgatgacgctgcgtatt

SEQ ID NO: 421427 - DNA, 75 bp, synthetic construct
  source 1..75: mol_type = other DNA
cagccgggatatgatcacagttactactttattgcctcttttatagaggatcatctgcgcttccatgcgcaatat

SEQ ID NO: 421428 - DNA, 75 bp, synthetic construct
  source 1..75: mol_type = other DNA
aaagcagatacagtgcgtggtaagaccgctgcaaattctgcgtgctgacgggacgtgggaaaatattggcgggat

SEQ ID NO: 421429 - DNA, 75 bp, synthetic construct
  source 1..75: mol_type = other DNA
agcgtctgtgtggttgcggaaagcatgatgaccgtgaaaacggggagttacttacagcacagctgcgactgggac

SEQ ID NO: 421430 - DNA, 75 bp, synthetic construct
  source 1..75: mol_type = other DNA
atgaatatactaaaaaaacttatgcagtgtctgtgtggttgcggaaagcatgatggccgtgaacacgtgcagtcg

SEQ ID NO: 421431 - DNA, 75 bp, synthetic construct
  source 1..75: mol_type = other DNA
gaatggtattatcccggagcaggacagggtaatcacgcaggtggtgatactggatgcggataaaaagcatataca

SEQ ID NO: 421432 - DNA, 75 bp, synthetic construct
  source 1..75: mol_type = other DNA
ggtggtgatactggatacagataaaaagctgatacagtgtgtggtaagaccgctgcaaatcctgcgtgctgacgg

SEQ ID NO: 421433 - DNA, 75 bp, synthetic construct
  source 1..75: mol_type = other DNA
ggaatggagaaccattcaacagagttatcgaagcagaggacatcaatgactgctataaccactggatgatatggg

SEQ ID NO: 421434 - DNA, 75 bp, synthetic construct
  source 1..75: mol_type = other DNA
atgccgctggaaacctgcttacaggcggtaagtgagcaaagtgaaaaactgcatgtaaaaagcctcggaatggcg

SEQ ID NO: 421435 - DNA, 75 bp, synthetic construct
  source 1..75: mol_type = other DNA
aggcatgattgaggcggattccgcgcgtcatgcccgccagttgttgcgcggtaaagagcttatccccgtgcacat

SEQ ID NO: 421436 - DNA, 75 bp, synthetic construct
  source 1..75: mol_type = other DNA
gctgctcgtcagccgggatgaaaggcaagcacggcaacacgcctggctcaagcgccatcctgttccactggtctc

SEQ ID NO: 421437 - DNA, 75 bp, synthetic construct
  source 1..75: mol_type = other DNA
ttcgtcgtagccgcgcagggcttgctgacccgaatcgcccgattggttcattcctgttcctcggcccaacgggtg

SEQ ID NO: 421438 - DNA, 75 bp, synthetic construct
  source 1..75: mol_type = other DNA
aatccacatttctgacgaggcgctgaaactgctgagcgagaacggttacgatccagtctatggtgcacgtccttt

SEQ ID NO: 421439 - DNA, 75 bp, synthetic construct
  source 1..75: mol_type = other DNA
aaaagcagatacagtgcgtggtaagaccgctgcaaatcctgcgtgctgacgggacgtgggaaaatattggcggga

SEQ ID NO: 421440 - DNA, 75 bp, synthetic construct
  source 1..75: mol_type = other DNA
aacgtgctatccagcagcagatcgaaaacccgctggcacagcaaatactgtctggtgaattggttccgggtaaag

SEQ ID NO: 421441 - DNA, 75 bp, synthetic construct
  source 1..75: mol_type = other DNA
gctggcgaactttatgtttgatagcgacgaggcgatggtccgtatagatatgtccgagtttatggagaaacactc

SEQ ID NO: 421442 - DNA, 75 bp, synthetic construct
  source 1..75: mol_type = other DNA
tgggtaaaactgaactttgtaaggcgctggcgaactttatgttcgatagcgacgaggcgatggttcgtatcgata

SEQ ID NO: 421443 - DNA, 75 bp, synthetic construct
  source 1..75: mol_type = other DNA
cggagcaggacagggtaatcacgcaggtggtgatactggatgcagataaaaagcagatacagtgtgtggtaagac

SEQ ID NO: 421444 - DNA, 75 bp, synthetic construct
  source 1..75: mol_type = other DNA
cgatctggcacgctataaccggatcccggtgattgcggaaggcgtagagagcgaagacgttgcgcgtgaattaat

SEQ ID NO: 421445 - DNA, 75 bp, synthetic construct
  source 1..75: mol_type = other DNA
atgatgcgaaactcaacgaaatagaagagaatatctggattgcgcgtaatattcgccatgcaatggaaattggcg

SEQ ID NO: 421446 - DNA, 75 bp, synthetic construct
  source 1..75: mol_type = other DNA
atcggtgaaatatgaatcagatggaggcccaggcatcgcgcggatcatggcttttttgatggggtccagcgaggc

SEQ ID NO: 421447 - DNA, 75 bp, synthetic construct
  source 1..75: mol_type = other DNA
tggagcgtaatggtcgcaaaaccaaaggcatgattgaggcggattccgcgcgtcatgcccgtcaattgttgcgtg

SEQ ID NO: 421448 - DNA, 75 bp, synthetic construct
  source 1..75: mol_type = other DNA
cagaaaaactgaaactggcgatttccagtatccgtgaccatatgttctccgagtttattttctgtgatgacgcga

SEQ ID NO: 421449 - DNA, 75 bp, synthetic construct
  source 1..75: mol_type = other DNA
gtgattgcggaaggcgtagagagcgaagacgttgcgcgcgaattaattaaattaggatgtgttcaggctcagggg

SEQ ID NO: 421450 - DNA, 75 bp, synthetic construct
  source 1..75: mol_type = other DNA
tgatgatgatggccggtgtagtgctatttatcgttgtcgcagtccttgagcctatgctacagcttaacaatatga

SEQ ID NO: 421451 - DNA, 75 bp, synthetic construct
  source 1..75: mol_type = other DNA
ggcaagaacttacgtgggatgttacagcaccagtggcattcacgccgacgagttgcatctgcagaacttgccctt

SEQ ID NO: 421452 - DNA, 75 bp, synthetic construct
  source 1..75: mol_type = other DNA
gaatggtattattccggagcaggccagggtaatcacgcaggtggtgatactggatgcggataaaaagcagataca

SEQ ID NO: 421453 - DNA, 75 bp, synthetic construct
  source 1..75: mol_type = other DNA
cctgtatgaattcatcaaatgaatataaaaaaatcagcccccttctgcgcaagggcgaaaatgaaattaaccgat

SEQ ID NO: 421454 - DNA, 75 bp, synthetic construct
  source 1..75: mol_type = other DNA
tgaagcccggctgaatgcttcttcagggggaatgttgcagcgtcggcggcacgcacagcgtcgcgtggcggcggc

SEQ ID NO: 421455 - DNA, 75 bp, synthetic construct
  source 1..75: mol_type = other DNA
atagcacgattcgtttaactaactctatggtgaacggtcttgaaatcgttgattgcctcatctacgaattgaaat

SEQ ID NO: 421456 - DNA, 75 bp, synthetic construct
  source 1..75: mol_type = other DNA
tgcaattgtggtttggcctgacgcatgcgtcgttctgcgtgatgccgagagtattcatggaggctatgccgcaag

SEQ ID NO: 421457 - DNA, 75 bp, synthetic construct
  source 1..75: mol_type = other DNA
atactggatgcagataaaaagcagatacagtgtgtggtaagaccgctgcaaatcctgcgtgctgacgggacgtgg

SEQ ID NO: 421458 - DNA, 75 bp, synthetic construct
  source 1..75: mol_type = other DNA
ctggagtcagatgagaatggtattattccggagcaggccagggtaatcacgcaggtggtgatactggatgcggat

SEQ ID NO: 421459 - DNA, 75 bp, synthetic construct
  source 1..75: mol_type = other DNA
tttcaggcgccagcaaaggtgctgaaattaccggaagtgcacattcatgatatcgttagtcactgtgcgagaatg

SEQ ID NO: 421460 - DNA, 75 bp, synthetic construct
  source 1..75: mol_type = other DNA
tgcagcgtctgtgcggttgcggaaagcatgatgaccgtgaaaacggggagttacttacagcacagctgcgactgg

SEQ ID NO: 421461 - DNA, 75 bp, synthetic construct
  source 1..75: mol_type = other DNA
aacgttttgacaggcgttggaatgctgagcgaattgccacaggaggatatgtgtcagacattcggtttaccttca

SEQ ID NO: 421462 - DNA, 75 bp, synthetic construct
  source 1..75: mol_type = other DNA
actggatgcggataaaaagcagatacagtgcgtggtaagaccgctgcaaatcctgcgtgctgacgggacgtggga

SEQ ID NO: 421463 - DNA, 75 bp, synthetic construct
  source 1..75: mol_type = other DNA
attttcaggcgtcagcaaaggtgctgaaattcccggaagtgcaaattcaggaaatcatcagtaactgtgcgagac

SEQ ID NO: 421464 - DNA, 75 bp, synthetic construct
  source 1..75: mol_type = other DNA
cggctcacaccattttatgacatcatttcggcatttccggtccttggcggtacgggaatacacatcagcgatctc

SEQ ID NO: 421465 - DNA, 75 bp, synthetic construct
  source 1..75: mol_type = other DNA
agaagaaaatgactttcgcatctcggttgctggcgcacaggagaagactgcgctgctcagaataggcaatgactg

SEQ ID NO: 421466 - DNA, 75 bp, synthetic construct
  source 1..75: mol_type = other DNA
tttcaggcgccagcaaaggtgctgaaattaccggaagtgcatattcatgagatcgttagtcactctgcgagaatg

SEQ ID NO: 421467 - DNA, 75 bp, synthetic construct
  source 1..75: mol_type = other DNA
attttcaggcgccagcaaaggtgctgaaattcccggaagtgcaaattcaggaaatcattagtaactgtgcgagaa

SEQ ID NO: 421468 - DNA, 75 bp, synthetic construct
  source 1..75: mol_type = other DNA
attttcaggcgccagcaaaggtgctgaaattcccggaagtgcaaattcaggaaatcataagtaactgtgcgagat

SEQ ID NO: 421469 - DNA, 75 bp, synthetic construct
  source 1..75: mol_type = other DNA
cggctatgcgctcagcatgagcaatgccgaggtgatgcgccaattgtggccgatactgaacactcgcagtccgtg

SEQ ID NO: 421470 - DNA, 75 bp, synthetic construct
  source 1..75: mol_type = other DNA
gggggagaatattgattggagacgctttaaccagacggcactcggcaagcacattccattgccggattacccctt

SEQ ID NO: 421471 - DNA, 75 bp, synthetic construct
  source 1..75: mol_type = other DNA
gtgccacgatattgcaagcggaaatcttcaatggtcagcgcacgacagcggagatctgcttcatgtttcctggtc

SEQ ID NO: 421472 - DNA, 75 bp, synthetic construct
  source 1..75: mol_type = other DNA
ccgcgtgtgggtcaggaagtgatagtggacttcctgaacggggatccggaccagccggtggtcatgggcaggacg

SEQ ID NO: 421473 - DNA, 75 bp, synthetic construct
  source 1..75: mol_type = other DNA
acgaacatggccgggtacgggtgaagtttcactgggaccgttatcacgggatgacggaggagagttcatgctgga

SEQ ID NO: 421474 - DNA, 75 bp, synthetic construct
  source 1..75: mol_type = other DNA
acctcactcgatatggtgcaactgagtgggcaaatggcgcgtcactatccgcaagtgagcgtggtgtcgctgtac

SEQ ID NO: 421475 - DNA, 75 bp, synthetic construct
  source 1..75: mol_type = other DNA
aatatcgcccttgaacataaaggttccggtaacttttcagcgtgggttattgaagcctgcaggagaaggctggca

SEQ ID NO: 421476 - DNA, 75 bp, synthetic construct
  source 1..75: mol_type = other DNA
cagtccgcgtgcgccgcagtatgtctttgaagcaggcgtaccggtattcggcgtttgctatggcatgcagaccat

SEQ ID NO: 421477 - DNA, 75 bp, synthetic construct
  source 1..75: mol_type = other DNA
atatcatgaaggcatgatcaatgcgcgagatggtgtctgtcgtcctttcgatagccaagcctctggcacagtcac

SEQ ID NO: 421478 - DNA, 75 bp, synthetic construct
  source 1..75: mol_type = other DNA
gttgccggatatatatgtgttagactgtgagcaagaggaaatacgttttctactagctaatgatgacattatcat

SEQ ID NO: 421479 - DNA, 75 bp, synthetic construct
  source 1..75: mol_type = other DNA
ggtgcgctgggaatgaaggtccgggatgaaatcgtactggagagtggcggtaaaatcaccatgaaagtgggtggt

SEQ ID NO: 421480 - DNA, 75 bp, synthetic construct
  source 1..75: mol_type = other DNA
gggaccagccgcaggcgctgcacggcagccaggggagaggaaccacgctgggaaatcagttagaggtgataccgg

SEQ ID NO: 421481 - DNA, 75 bp, synthetic construct
  source 1..75: mol_type = other DNA
atccatgtgcagaagaacatggacacggaggtgcttcacgaccggacgacggacgtgaagcatgaccacacggag

SEQ ID NO: 421482 - DNA, 75 bp, synthetic construct
  source 1..75: mol_type = other DNA
tgccgggccgaagataaacctgaacggcgggggcagtgcggggacaccggtggggacgatgcagccgggtgtact

SEQ ID NO: 421483 - DNA, 75 bp, synthetic construct
  source 1..75: mol_type = other DNA
tattaaacgaaaaagaaatagatttaggaagtgcatacatttcgaatgaatgcaacgagtatcttcagatagaaa

SEQ ID NO: 421484 - DNA, 75 bp, synthetic construct
  source 1..75: mol_type = other DNA
tcttaacggcggaggcagtccgggagacgtgatcctgccgatgcgcccggtgatcctgaaagccgcagccgggag

SEQ ID NO: 421485 - DNA, 75 bp, synthetic construct
  source 1..75: mol_type = other DNA
ggacacctttgcagtggtgcatttcaggttaatccagaaccagtcttatccgtttgtgatgagtgtggatgttgc

SEQ ID NO: 421486 - DNA, 75 bp, synthetic construct
  source 1..75: mol_type = other DNA
attatccggggcgtttcaaggatgagcagcacggccaggactttgcgcgttaccagacggaagggtggcggaacg

SEQ ID NO: 421487 - DNA, 75 bp, synthetic construct
  source 1..75: mol_type = other DNA
cctgagcatcagcccgccgctgtggcgggcagggttacggcagaacttccgtatcttccagcagcaggacatcgg

SEQ ID NO: 421488 - DNA, 75 bp, synthetic construct
  source 1..75: mol_type = other DNA
ggaagcgccagaaaaatcggtgtgtaaggagtgcctgaaaagggcgcaggaagcagccgccgcttttgcgcctcg

SEQ ID NO: 421489 - DNA, 75 bp, synthetic construct
  source 1..75: mol_type = other DNA
tcccatggaacccgttcccgggggcgccgtatggtcgcagctcaaacagccgtatcgaccgtttctcaaaagtgc

SEQ ID NO: 421490 - DNA, 75 bp, synthetic construct
  source 1..75: mol_type = other DNA
acctgaacaacgtcgttccggcgatggaaatcatgttggatgactttggctttggtctgtctaaacgtcgtgtga

SEQ ID NO: 421491 - DNA, 75 bp, synthetic construct
  source 1..75: mol_type = other DNA
cagccgctggagtattttgccgccgagtaccagatgggactttccaatatgatggaagcgaacccgggtgtggat

SEQ ID NO: 421492 - DNA, 75 bp, synthetic construct
  source 1..75: mol_type = other DNA
cggggctgaacacccatccggagtatgcccgtcgcgtggcggacgagctttcggtcattacctgtgcgccgtttg

SEQ ID NO: 421493 - DNA, 75 bp, synthetic construct
  source 1..75: mol_type = other DNA
tcgtctggttgtcacccttagccggtgttatggcgtccgtctcattcatctggttgccagcgccgcatttctgcc

SEQ ID NO: 421494 - DNA, 75 bp, synthetic construct
  source 1..75: mol_type = other DNA
tcgtctggttgtcacacttagccggtgttatggcgtccgtctcattcatctggttgccagcgccgaatttctgcc

SEQ ID NO: 421495 - DNA, 75 bp, synthetic construct
  source 1..75: mol_type = other DNA
tcgtctggttgtcacacttagccggagttatggcgtccgtctcattcatctggttgccagcgccgtatttctgcc

SEQ ID NO: 421496 - DNA, 75 bp, synthetic construct
  source 1..75: mol_type = other DNA
tcgtctggttgtcacgcttagccggggttatggcgtccgtctcattcatctggttgccagcgccgtatttctgcc

SEQ ID NO: 421497 - DNA, 75 bp, synthetic construct
  source 1..75: mol_type = other DNA
tcgtctggttgtcacgcttagccggtgttatggcgtccgtctcattcatctggttgccagcgccggatttctgcc

SEQ ID NO: 421498 - DNA, 75 bp, synthetic construct
  source 1..75: mol_type = other DNA
tcgtctggttgtcacccttagccggcgttatggcgtccgtctcattcatctggttgccagcgccgtatttctgcc

SEQ ID NO: 421499 - DNA, 75 bp, synthetic construct
  source 1..75: mol_type = other DNA
gttctgcggcttaaacgactgggcctgtccagaacgttccgtcgtctggttgtcattctcatccgccgttatggc

SEQ ID NO: 421500 - DNA, 75 bp, synthetic construct
  source 1..75: mol_type = other DNA
cctgccgtacgacatgctgtaccgtcacccgttcccgggaccaggcctcggcgttcgtgttctgggtgaagtgaa

SEQ ID NO: 421501 - DNA, 75 bp, synthetic construct
  source 1..75: mol_type = other DNA
ccacggcgataaagttaccgctatcccgtccgacttcgtcaccgtagccagcaccgaaagctgcccgtttgccat

SEQ ID NO: 421502 - DNA, 75 bp, synthetic construct
  source 1..75: mol_type = other DNA
tcactctcacccggcgttatggcgtcagtctcattcatctggacgccggcgctgaatgcctgccgggtttaccca

SEQ ID NO: 421503 - DNA, 75 bp, synthetic construct
  source 1..75: mol_type = other DNA
acggcaaaggacaacgcctggttgtattcgctgtcacatcagacgaatgacaccggcgaatcagaatggattcat

SEQ ID NO: 421504 - DNA, 75 bp, synthetic construct
  source 1..75: mol_type = other DNA
tgattaacgtggtctgcgataacggttactcccttcgtgttgttgatgaatctgaccggacatcagcagagcgca

SEQ ID NO: 421505 - DNA, 75 bp, synthetic construct
  source 1..75: mol_type = other DNA
aaactttccctgacgccggaagccgacagcattaacatgcaggcgctgaacatggggcgcattgtcgttgacgtc

SEQ ID NO: 421506 - DNA, 75 bp, synthetic construct
  source 1..75: mol_type = other DNA
atttccggctgggtagcgatgctcgagcataatctcaaacatatcgaatacagcctgcctcacgtagcggaactg

SEQ ID NO: 421507 - DNA, 75 bp, synthetic construct
  source 1..75: mol_type = other DNA
tacagccaccgtttcgtaaataactcctaccttcatctgggtatattttcagaacgagagctggttggcgtaatg

SEQ ID NO: 421508 - DNA, 75 bp, synthetic construct
  source 1..75: mol_type = other DNA
gattcctgaacaagcgagcaaggaagcggctaaatactaagctattcaggatccaaccatatccaaaatcaattc

SEQ ID NO: 421509 - DNA, 75 bp, synthetic construct
  source 1..75: mol_type = other DNA
ttactgctccgaacaaatttgaagcactggcgacctgcgatgcactggttcaggctcatggcgcgttgaaagggc

SEQ ID NO: 421510 - DNA, 75 bp, synthetic construct
  source 1..75: mol_type = other DNA
ccatgctctgctgtcaggtgagtggggaacgacgtggcgatcaacagtggggggcgcttccggtaactttgaact

SEQ ID NO: 421511 - DNA, 75 bp, synthetic construct
  source 1..75: mol_type = other DNA
tctggcgacctgtgatgcgctggttcaggcgcacggcgccttgaaaggtttggctgcgtcactgatgaaaattgc

SEQ ID NO: 421512 - DNA, 75 bp, synthetic construct
  source 1..75: mol_type = other DNA
ttattcactccgcgtggtggagaaatccgaccaacagtcaacctgcacaccaccaccgtttacggcccttgccgg

SEQ ID NO: 421513 - DNA, 75 bp, synthetic construct
  source 1..75: mol_type = other DNA
acggaaaaggacaacgcctggttgtactcgctgtcacaccagaccaatgatttcggtgaatcagaatggattcat

SEQ ID NO: 421514 - DNA, 75 bp, synthetic construct
  source 1..75: mol_type = other DNA
acgttgcagtaccgcacatatcacggaaacggacaacgcctggctgtactcgctgtcacaccagactaatgacga

SEQ ID NO: 421515 - DNA, 75 bp, synthetic construct
  source 1..75: mol_type = other DNA
taaccggggctatatggaactgaaccgcatgtggctacacgacgacatgccccgcaactctgaatcacgggccat

SEQ ID NO: 421516 - DNA, 75 bp, synthetic construct
  source 1..75: mol_type = other DNA
gtcagtttcgttacatccggtttctggacaagagagccagaaaacgccttaacacaaagctattcaaagtccagc

SEQ ID NO: 421517 - DNA, 75 bp, synthetic construct
  source 1..75: mol_type = other DNA
gagatttgcaggagtgccattaaacgaggcggacaacgaggtgaacatctgagggctaatatcgacagagccagt

SEQ ID NO: 421518 - DNA, 75 bp, synthetic construct
  source 1..75: mol_type = other DNA
tgaactgttaatggattatgcagagttacgcggtggaagtgccgctgatgctgaagcatggcgtgatgattatga

SEQ ID NO: 421519 - DNA, 75 bp, synthetic construct
  source 1..75: mol_type = other DNA
actactacctgatggaagcctacaaacaccttaaaccgattgcgctggcgggagacgcgcgcaagtttaaagcaa

SEQ ID NO: 421520 - DNA, 75 bp, synthetic construct
  source 1..75: mol_type = other DNA
agctgacagcgctgacggtagttttatggatgaactgctaacgctgatggcagcacaccgcgtgtggtcacgcat

SEQ ID NO: 421521 - DNA, 75 bp, synthetic construct
  source 1..75: mol_type = other DNA
gtgttaagtgaagaaatgcaatttgccatggctgtggctcaaatcgtaagtgcagtcgcggtttcgcttggcttg

SEQ ID NO: 421522 - DNA, 75 bp, synthetic construct
  source 1..75: mol_type = other DNA
gacattaatgtaattagcaaatggaaagattgcctcgatgagagtgaggtctgggcgattgatatacagcaactc

SEQ ID NO: 421523 - DNA, 75 bp, synthetic construct
  source 1..75: mol_type = other DNA
ttttgccaacgttttatagttttgatgtttttgatactcttattggacgtaaatgcttaattccaaaaggtattt

SEQ ID NO: 421524 - DNA, 75 bp, synthetic construct
  source 1..75: mol_type = other DNA
ataacggctggcagatgcgttatcacctgcgtattgagccgccgttatggcggtgcgggctgcggcagaacttcc

SEQ ID NO: 421525 - DNA, 75 bp, synthetic construct
  source 1..75: mol_type = other DNA
atgctgaaccgtgaatggcaggtggtacagagcatactgtcaggaagccagccgcaggcgcttcacggcagccag

SEQ ID NO: 421526 - DNA, 75 bp, synthetic construct
  source 1..75: mol_type = other DNA
atggagagcctgcgcagtgatgcggaaaaggccacagggcagagtaattcgccgaagctgtggccgggaacgcgg

SEQ ID NO: 421527 - DNA, 75 bp, synthetic construct
  source 1..75: mol_type = other DNA
tcatcccggaagaactggtacccgttcagcgtgttggcaaaatggtgctcaatcgcaacccggataacttctttg

SEQ ID NO: 421528 - DNA, 75 bp, synthetic construct
  source 1..75: mol_type = other DNA
cacatcagcaccagtcaccactacacgattccagcgaagcgaaaccggggatggactcactggcacctgaggacg

SEQ ID NO: 421529 - DNA, 75 bp, synthetic construct
  source 1..75: mol_type = other DNA
ggtgaggaagcgccagaaaaatcggtgtgtaaggagtgcctgaaaagggcgcaggaagcagccgccgcttttgcg

SEQ ID NO: 421530 - DNA, 75 bp, synthetic construct
  source 1..75: mol_type = other DNA
cgtattgatagtgttaatgaaaaagactatttttgttatgcgcatgtgtcggggtatatgattccctatgtcgct

SEQ ID NO: 421531 - DNA, 75 bp, synthetic construct
  source 1..75: mol_type = other DNA
aatcaataccgacggtgattacattgtcggcagcattgactatactggcgatactcgcgggcaggcgtggtatat

SEQ ID NO: 421532 - DNA, 75 bp, synthetic construct
  source 1..75: mol_type = other DNA
gcgatactcgcgggcaggcgtggtatatggacctgctgtgtctggcgaaaggggctcgggatttgctcaactcaa

SEQ ID NO: 421533 - DNA, 75 bp, synthetic construct
  source 1..75: mol_type = other DNA
gtatatggacctgctttgcctggctaaaggtggcaaagaattgcttaactcgaaagggattgatgcggcgaaata

SEQ ID NO: 421534 - DNA, 75 bp, synthetic construct
  source 1..75: mol_type = other DNA
aacactatgacacgttcgataacatctcgaagatttactctgataaattgcctcaaggaaaagatttagagctat

SEQ ID NO: 421535 - DNA, 75 bp, synthetic construct
  source 1..75: mol_type = other DNA
ccgcaaaattttcctgtggtcgatgatcctgtttgccattttcgcactcctgcaggggctggcaccggatatgta

SEQ ID NO: 421536 - DNA, 75 bp, synthetic construct
  source 1..75: mol_type = other DNA
acgacatcgaaaatcttctttttggcaaacagctacagccaattaatccttctacgcctccactatgtattataa

SEQ ID NO: 421537 - DNA, 75 bp, synthetic construct
  source 1..75: mol_type = other DNA
gccgccgaagtggtaacggggaacacgctcacgatgcagtttaaccgggtgaggtatacccccgtgtattacctc

SEQ ID NO: 421538 - DNA, 75 bp, synthetic construct
  source 1..75: mol_type = other DNA
gaaaatctgtgcgcggtatgaatcttcagatatcgcgaacatgcaggaaatgttttgcctgatggtgagtgcgct

SEQ ID NO: 421539 - DNA, 75 bp, synthetic construct
  source 1..75: mol_type = other DNA
ttcacgtgatggtcattttcttaaggaaatcgctgatgcatatattaatatgcatcaattaagtataaaaacaaa

SEQ ID NO: 421540 - DNA, 75 bp, synthetic construct
  source 1..75: mol_type = other DNA
tcgcagggcagtgtaaggctaactggtggtatgaaaataatctggtaaatattgttcctgaagataaatatattg

SEQ ID NO: 421541 - DNA, 75 bp, synthetic construct
  source 1..75: mol_type = other DNA
gtcactggtaaagataatgccacagacagttggatcatgttgcagtgtattgacagctgggaaggccacctgaac

SEQ ID NO: 421542 - DNA, 75 bp, synthetic construct
  source 1..75: mol_type = other DNA
tcaactgagcctgttaggcatcgccgcagaggtgaccaccgggaatacgctgacgttgcagtgcagccgggtgcg

SEQ ID NO: 421543 - DNA, 75 bp, synthetic construct
  source 1..75: mol_type = other DNA
ggcgcatgtccgcccgtcatcggtgcagagccaggattacacctttaaggtgccggactggccggggatgtatga

SEQ ID NO: 421544 - DNA, 75 bp, synthetic construct
  source 1..75: mol_type = other DNA
attatccgggaaggtacaaggatgaacagcacggcaaggatttcacgctgtaccggatggagagcctgcgcagtg

SEQ ID NO: 421545 - DNA, 75 bp, synthetic construct
  source 1..75: mol_type = other DNA
agggtgtcacaggcgtgggcggggccggggtttggtaacctggcgataccgcgcgtgggccaggaggtgattgtt

SEQ ID NO: 421546 - DNA, 75 bp, synthetic construct
  source 1..75: mol_type = other DNA
agacggttcaggtcggtacaaaaaaagagggggccacgaccagagtatcacggtggcgaacgaccggcgtatcac

SEQ ID NO: 421547 - DNA, 75 bp, synthetic construct
  source 1..75: mol_type = other DNA
gagtggacgccgctgttttatgaggaccatccggcgcgggagttctgtgtccagtacggggaaagcgacctggcg

SEQ ID NO: 421548 - DNA, 75 bp, synthetic construct
  source 1..75: mol_type = other DNA
attgccttctttgaggatggcacgcagacccacggagaaacggatgaagaggggtatacagagcgttttttgtat

SEQ ID NO: 421549 - DNA, 75 bp, synthetic construct
  source 1..75: mol_type = other DNA
ggctgtgggcggaagaaggaattttcttctttgagcggtttgcggcgaccagcccggagcagaagctgacgctgt

SEQ ID NO: 421550 - DNA, 75 bp, synthetic construct
  source 1..75: mol_type = other DNA
ccgcgcgattgtgaaacacggtaatttcgcgctgttaacgccagacggcctggtaaaaaatattattccgggatt

SEQ ID NO: 421551 - DNA, 75 bp, synthetic construct
  source 1..75: mol_type = other DNA
cagattgaattagttcaaagtcttgatgatgcttatcaaatagttttgaagaaattcccatctgaaattgcttca

SEQ ID NO: 421552 - DNA, 75 bp, synthetic construct
  source 1..75: mol_type = other DNA
tatccgtttgtgatgagtgtggatgttgccagcgactcttttatgcagacggcggagatgctgctggagaagaag

SEQ ID NO: 421553 - DNA, 75 bp, synthetic construct
  source 1..75: mol_type = other DNA
gatgacgatacggtcgaagacctataaaggaagcggttttaatgagttgcgctttgaggatgcgacggataagga

SEQ ID NO: 421554 - DNA, 75 bp, synthetic construct
  source 1..75: mol_type = other DNA
aggggagaggaaccacgctgggaaatcagttagaggtgataccggcggaccggacctggcgtccacgggtgcaga

SEQ ID NO: 421555 - DNA, 75 bp, synthetic construct
  source 1..75: mol_type = other DNA
ttgttgattatctggtcacactgcatcaaaacgggggtaatcagcagggcttcggtggcaaaggaattgaaacat

SEQ ID NO: 421556 - DNA, 75 bp, synthetic construct
  source 1..75: mol_type = other DNA
cctgtgtattgagccgccgttatggcggtgcgggctgcggcagaacttccgcatcttccagcagcaggatatccg

SEQ ID NO: 421557 - DNA, 75 bp, synthetic construct
  source 1..75: mol_type = other DNA
cggcatcatgccgctattaatatcacctttgataggacgttatggcaacaaaattgatatgcggttgttggtgac

SEQ ID NO: 421558 - DNA, 75 bp, synthetic construct
  source 1..75: mol_type = other DNA
gtgtggcctgtgtctatgatgtatttgatcagcagtttgaaccgccccgggaatcctggagactaaactccctga

SEQ ID NO: 421559 - DNA, 75 bp, synthetic construct
  source 1..75: mol_type = other DNA
gccattatcatgttctgtacaccatggataattaatcgcattggtgccaaaaataccctgctcgttgccgggggg

SEQ ID NO: 421560 - DNA, 75 bp, synthetic construct
  source 1..75: mol_type = other DNA
aaatagacatgcgggtgttggtgacattcagtttttttgatgtatgcggtttgctattactggcgttctgtgaca

SEQ ID NO: 421561 - DNA, 75 bp, synthetic construct
  source 1..75: mol_type = other DNA
ggtgacatttagttttttgatgtatgcggtttgctattactggcgttctgtgacatttatgccaacgattgattt

SEQ ID NO: 421562 - DNA, 75 bp, synthetic construct
  source 1..75: mol_type = other DNA
gtcagttgacagcaaccatcgatcaatttaaccccgtgtttaattcatcgtcacaaattatggataaatactatg

SEQ ID NO: 421563 - DNA, 75 bp, synthetic construct
  source 1..75: mol_type = other DNA
aaaatgtacaggaagcctttgatcctccccagcaggataaggtaccgccacaacggccgggaagattctcacgat

SEQ ID NO: 421564 - DNA, 75 bp, synthetic construct
  source 1..75: mol_type = other DNA
acaacggctggcagatgcgttatcacctgcgtattgagccgccgttatggcggtgcgggctgcggcagaactttc

SEQ ID NO: 421565 - DNA, 75 bp, synthetic construct
  source 1..75: mol_type = other DNA
aactgcgcttcgaggacgccaccagtaatgagcaggtgtatatccatgcgcagaagaacatggatacggaggtgc

SEQ ID NO: 421566 - DNA, 75 bp, synthetic construct
  source 1..75: mol_type = other DNA
gcctgttactggtatttttcgcccccttttttttatatgtatttgcgcccctgctgcgcttcaatatctgggcag

SEQ ID NO: 421567 - DNA, 75 bp, synthetic construct
  source 1..75: mol_type = other DNA
tctccgcttttgccggcaacatgtatgaccgcatcggcttccaggacacctatatgatcctcggcggaattgccc

SEQ ID NO: 421568 - DNA, 75 bp, synthetic construct
  source 1..75: mol_type = other DNA
taattcgccgaagctgtggccggggacgtggtttacgctgacggggcatccgcagaagatgctgaaccgtgaatg

SEQ ID NO: 421569 - DNA, 75 bp, synthetic construct
  source 1..75: mol_type = other DNA
aagtaaaatacctggacgccgttaacttcccaaacggcaatccagatgcagatccatctattgaggctgtatctt

SEQ ID NO: 421570 - DNA, 75 bp, synthetic construct
  source 1..75: mol_type = other DNA
gggagccgatcccgtctggtggtttggcggcggtttcgatttaacgccttactacggctttgaagaagatgccat

SEQ ID NO: 421571 - DNA, 75 bp, synthetic construct
  source 1..75: mol_type = other DNA
ttaaacagttcttgctcaaccttcaggatacaatttgtcaacaactgaccgccgtcgatggcgcagagtttgtcg

SEQ ID NO: 421572 - DNA, 75 bp, synthetic construct
  source 1..75: mol_type = other DNA
gcttaaatcagcaactctcaggcagtactttatcgactgtggtatcgaccctgaaactatgaccggcgaagcgac

SEQ ID NO: 421573 - DNA, 75 bp, synthetic construct
  source 1..75: mol_type = other DNA
aagaacaaatcggaaattaagactctgtataactcagttggtcgtgttggcagggcgcaaatgcgcaatggcatc

SEQ ID NO: 421574 - DNA, 75 bp, synthetic construct
  source 1..75: mol_type = other DNA
catttagtccgcgcgtggaaacgtacctatggtttaccgaccattgtgactaactgttcgaataactacggccct

SEQ ID NO: 421575 - DNA, 75 bp, synthetic construct
  source 1..75: mol_type = other DNA
aatgccaccactggtacgctgggagtacgattatcagccggaagaaggcagtccagaagcagcgttgagcgagtt

SEQ ID NO: 421576 - DNA, 75 bp, synthetic construct
  source 1..75: mol_type = other DNA
atatgaacacggcattcaaaatcattatggccgcgatctatttctggctgttctctatcacttttggcggcatcg

SEQ ID NO: 421577 - DNA, 75 bp, synthetic construct
  source 1..75: mol_type = other DNA
gttacgttagtatcaaataagcgaacctatgttttctttttacagtctgtaaagggtaatccttcatggatggtt

SEQ ID NO: 421578 - DNA, 75 bp, synthetic construct
  source 1..75: mol_type = other DNA
tgccggacgatatgatctatatcgctgagattgattctgcaccctgcgcgtttattgtcggcttgccgaacatca

SEQ ID NO: 421579 - DNA, 75 bp, synthetic construct
  source 1..75: mol_type = other DNA
ctgccacagaaggaaaagggaataccggcctgcggactggctatgaaatcttatcgaaattcaacgatgtccgct

SEQ ID NO: 421580 - DNA, 75 bp, synthetic construct
  source 1..75: mol_type = other DNA
gtattgtgggttggcagcgaatcgacaaacaaggtggaaaataccagaccagcgcagtaaccagcggcgatttcg

SEQ ID NO: 421581 - DNA, 75 bp, synthetic construct
  source 1..75: mol_type = other DNA
gtatcaactggcctgcctgttccgacaacatccaactcaaccctcgcgggggtgttgagcgttactcttcataca

SEQ ID NO: 421582 - DNA, 75 bp, synthetic construct
  source 1..75: mol_type = other DNA
ccttctcgcagaaaacgcagttggatcacttgctgcaaacagtatgaaagatgatgcggaagcactcgctaccga

SEQ ID NO: 421583 - DNA, 75 bp, synthetic construct
  source 1..75: mol_type = other DNA
cccgcctttcatgacgatcaaacgacgcagggcaaaaagatggctgaagaatttggtctgcatggtggaatggaa

SEQ ID NO: 421584 - DNA, 75 bp, synthetic construct
  source 1..75: mol_type = other DNA
gggtgtcgatgggagaagcgaaagagaaatgggctgaacgcatcgcgttactgcgtgattatcaagtgaatagca

SEQ ID NO: 421585 - DNA, 75 bp, synthetic construct
  source 1..75: mol_type = other DNA
tcctgaaattactcgatttcacacccgctgaaatcaacagcctgcttcagttagccgcgaagctgaaagccgata

SEQ ID NO: 421586 - DNA, 75 bp, synthetic construct
  source 1..75: mol_type = other DNA
aaactttctgaggataaggtgaaaatatctattcctgtagttcttgttcatcaaataccactgatgtttgaataa

SEQ ID NO: 421587 - DNA, 75 bp, synthetic construct
  source 1..75: mol_type = other DNA
gctgttattaaagatgtgccttttatgcaggaaaaaccagcgaagcgtctggctatagagggacttccagggaat

SEQ ID NO: 421588 - DNA, 75 bp, synthetic construct
  source 1..75: mol_type = other DNA
ccgccagcattgtttttgatcaggcggaaaaccgtatgcataccatcaaagcagtgatggtcgcgacgcttgcca

SEQ ID NO: 421589 - DNA, 75 bp, synthetic construct
  source 1..75: mol_type = other DNA
tttgcagagcgtgaaggagtgcctctgcacaccacagacctgttacagcctacttcccgcgtcgggaaaatggcg

SEQ ID NO: 421590 - DNA, 75 bp, synthetic construct
  source 1..75: mol_type = other DNA
atcaggaattcgtcgtgccgccggtaatcgactggagcaggttcagaatgctatggctggagtaaacattcagcc

SEQ ID NO: 421591 - DNA, 75 bp, synthetic construct
  source 1..75: mol_type = other DNA
cagcaagctatcagatttgcagagcgtgaaggagttcctctgcacaccacagacctgttacaacccacttcccgc

SEQ ID NO: 421592 - DNA, 75 bp, synthetic construct
  source 1..75: mol_type = other DNA
agaaagcgccaataccgctggagaaaaagcctctcaagcgtctcaaagtgcatccgctgcggcatcctcacaaag

SEQ ID NO: 421593 - DNA, 75 bp, synthetic construct
  source 1..75: mol_type = other DNA
agccaaagcatcagagactaacgcttcatcgagtgcaaacgcggctgtgaggtgtactggcaatagcggacacta

SEQ ID NO: 421594 - DNA, 75 bp, synthetic construct
  source 1..75: mol_type = other DNA
tgctgaaaccgggcgcggcttactacaggcaggaatcaacgtagcgaacatacctgctgaactcactgatgctgt

SEQ ID NO: 421595 - DNA, 75 bp, synthetic construct
  source 1..75: mol_type = other DNA
attatcgcctttcttttagaactgggtctgcgcgcgttacagcgccgcctcacgccctggcatggagaagtacaa

SEQ ID NO: 421596 - DNA, 75 bp, synthetic construct
  source 1..75: mol_type = other DNA
gagatcgcttctctggcgtataaagttgcgcaaacgaaaacatatctcgatggtcttggcaaagaccttgttgct

SEQ ID NO: 421597 - DNA, 75 bp, synthetic construct
  source 1..75: mol_type = other DNA
tgctattccttatcttattaaaactaaaggtttttgttataaaagataatgagcgaaagttaattggtatgtggg

SEQ ID NO: 421598 - DNA, 75 bp, synthetic construct
  source 1..75: mol_type = other DNA
ttgtgcttttttatatgtttttgtttaatgcatataatcgtattccttatgggaaaataattatcgggggcatat

SEQ ID NO: 421599 - DNA, 75 bp, synthetic construct
  source 1..75: mol_type = other DNA
atcttgataaaggtatgatcgaagcgatcgaacactcgttgagaacgcttaacgccccagagggtattgttgtca

SEQ ID NO: 421600 - DNA, 75 bp, synthetic construct
  source 1..75: mol_type = other DNA
gcatattctggaacaatacgagttagcacatagctgggaatcggatggcgaaggtggtttccgcaatacggggtc

SEQ ID NO: 421601 - DNA, 75 bp, synthetic construct
  source 1..75: mol_type = other DNA
ggcgtggcctaccaagagttggtgggcgtcaatctgcgcggcgaccgtggtcagtattttactccccggggcgta

SEQ ID NO: 421602 - DNA, 75 bp, synthetic construct
  source 1..75: mol_type = other DNA
gttttatctgcatgtaggatttgggctggtagcttgtgtattctgtctgcttgtaatcttgcatgagaaatttat

SEQ ID NO: 421603 - DNA, 75 bp, synthetic construct
  source 1..75: mol_type = other DNA
caggaagagacaccggccgccggaacacccgccgtgtcgttaccgaaacgccgcaatgacagtgagatgaaaaag

SEQ ID NO: 421604 - DNA, 75 bp, synthetic construct
  source 1..75: mol_type = other DNA
gttaaattagcatctcctacttatatgtttttctgggctttatacttaatagtctgccttgtgggaaaaaataat

SEQ ID NO: 421605 - DNA, 75 bp, synthetic construct
  source 1..75: mol_type = other DNA
gtaggcggcgcgttgctggcgtcgatttgcggttggatatgcgcaacatgcgagaaaaggaagacacaatatgag

SEQ ID NO: 421606 - DNA, 75 bp, synthetic construct
  source 1..75: mol_type = other DNA
ttggcccgcgcaatgcaactttcggcactggcggctggtatgttttatctactctggcccaccaccatgcaatat

SEQ ID NO: 421607 - DNA, 75 bp, synthetic construct
  source 1..75: mol_type = other DNA
aagttcgagaatgatcttgttgggtcagatctgagaatcatgcaaaaattgaaattaggaaacgagatgtatttt

SEQ ID NO: 421608 - DNA, 75 bp, synthetic construct
  source 1..75: mol_type = other DNA
tctttattctttgcggaataaaagattgcgaggctctggagttaaatgtacagccagatcatatgcatcttgtcg

SEQ ID NO: 421609 - DNA, 75 bp, synthetic construct
  source 1..75: mol_type = other DNA
ccgtcgctaagttcaaggctaaacacgttaaataccatcgcaaaaaccctgttcctggcattgaactgagggata

SEQ ID NO: 421610 - DNA, 75 bp, synthetic construct
  source 1..75: mol_type = other DNA
gaacgttggcaaatccactctgctaaacaaactgttggggcagaagatctccatcacttcccgtaaagcgcagac

SEQ ID NO: 421611 - DNA, 75 bp, synthetic construct
  source 1..75: mol_type = other DNA
cactaccgttatgacgaatttggccgtgcggtggaaaaggaggggcggagcggaacacagagttaccgttatgat

SEQ ID NO: 421612 - DNA, 75 bp, synthetic construct
  source 1..75: mol_type = other DNA
tcgattacacagcaattcttgaaagaatttatgaggttcactttgtaaataattctgattatgcagaagctttaa

SEQ ID NO: 421613 - DNA, 75 bp, synthetic construct
  source 1..75: mol_type = other DNA
cggacaacaataggtagcaaacgtcctcatatacgccgggacactggcatacatactggacaggaagtaagaaac

SEQ ID NO: 421614 - DNA, 75 bp, synthetic construct
  source 1..75: mol_type = other DNA
ggcaagtcagatgaacttcctcgatatcgtgccgatctctgctgaaaccgggctgaatgtcgacactatcgcagc

SEQ ID NO: 421615 - DNA, 75 bp, synthetic construct
  source 1..75: mol_type = other DNA
tagtaataaacttgccgcccacctgaaaatgccagcaggaaacttctctattcgtgaatggctggaagatccaaa

SEQ ID NO: 421616 - DNA, 75 bp, synthetic construct
  source 1..75: mol_type = other DNA
tagtaataaacttgccgctcacctgaaaatgccagcagggaacttctcaattcgtgaatggctggaagatccgaa

SEQ ID NO: 421617 - DNA, 75 bp, synthetic construct
  source 1..75: mol_type = other DNA
ggctgaatgttgacactattgcggcaatcgtgcgtaaacatctgccggaagcgacgcatcacttcccggaagatt

SEQ ID NO: 421618 - DNA, 75 bp, synthetic construct
  source 1..75: mol_type = other DNA
gatttattgccatcgtcggacgcccgaacgttggcaaatccaccctgctgaacaaactgttggggcagaaaatct

SEQ ID NO: 421619 - DNA, 75 bp, synthetic construct
  source 1..75: mol_type = other DNA
aatcgtgcgtaagcatctgcctgaagcgacccatcacttcccggaagattacatcaccgatcgctcacagcgttt

SEQ ID NO: 421620 - DNA, 75 bp, synthetic construct
  source 1..75: mol_type = other DNA
gggcagagtttacagtaatgtttttgactgtggatttattgatatggaacaatcatgggttcagctattattaat

SEQ ID NO: 421621 - DNA, 75 bp, synthetic construct
  source 1..75: mol_type = other DNA
ttagttttgacgatgctatctctgcattaattaataactttaataatctctgcgatttgtatttttttcaagatg

SEQ ID NO: 421622 - DNA, 75 bp, synthetic construct
  source 1..75: mol_type = other DNA
atcgggctaaaagatgataccaatgcccgtcacttcgccggccttaactttaccgagaaaaattgcaggaagcgg

SEQ ID NO: 421623 - DNA, 75 bp, synthetic construct
  source 1..75: mol_type = other DNA
aagggcttgagcgtgtggtgctcagtgacagtgaacggcagaaaactttcttcggtgcaggtccacagggagcac

SEQ ID NO: 421624 - DNA, 75 bp, synthetic construct
  source 1..75: mol_type = other DNA
agctggccggagcatgaatgtccccgtccggagcagattcaggactgcatccgtcatacgctgaatcgtctgggg

SEQ ID NO: 421625 - DNA, 75 bp, synthetic construct
  source 1..75: mol_type = other DNA
gtgatgcttacgacagaaaacgcacgcctgtccgggccgagtctgtgcatccggaactcaggacaatgtttatat

SEQ ID NO: 421626 - DNA, 75 bp, synthetic construct
  source 1..75: mol_type = other DNA
tggaagcgatgctggtgagtctggcaattgcccgtggcagcgatgagtgggaggctgacgttctcgcgaaggcac

SEQ ID NO: 421627 - DNA, 75 bp, synthetic construct
  source 1..75: mol_type = other DNA
atgaccattacgtctctggatggctaccgctggttgaaaaacgatattattcgcggcaattttcagccagatgaa

SEQ ID NO: 421628 - DNA, 75 bp, synthetic construct
  source 1..75: mol_type = other DNA
gcgggatgccgcgcgcgccagtgagttaatgcgccagcatttgctgacgccgattcccattatccagcaggcgat

SEQ ID NO: 421629 - DNA, 75 bp, synthetic construct
  source 1..75: mol_type = other DNA
acccatcagggaaaaatgtgcagtggccgaacgccgatggaaacgttacttgatggaaagcacatctgggatgag

SEQ ID NO: 421630 - DNA, 75 bp, synthetic construct
  source 1..75: mol_type = other DNA
aaaaagttatatgatgatcttgaagcattacaatcggttcttgatgaatggcgggttcactataataatgagcga

SEQ ID NO: 421631 - DNA, 75 bp, synthetic construct
  source 1..75: mol_type = other DNA
cgcgctatcggttcatctggctgcggcaaacggtgctttctgtagaaatgctggaagataaacacaatcaacacc

SEQ ID NO: 421632 - DNA, 75 bp, synthetic construct
  source 1..75: mol_type = other DNA
ctgggagagatggctggctctggcggacaataacatcgctgaaaatgcgttgcggatggtcagtctgggccgcaa

SEQ ID NO: 421633 - DNA, 75 bp, synthetic construct
  source 1..75: mol_type = other DNA
actggatcaaaatttaccattgcgaaagcttgttctggaaaagctggagatgaaatggtctccagagcaaatatc

SEQ ID NO: 421634 - DNA, 75 bp, synthetic construct
  source 1..75: mol_type = other DNA
gcggcggtaacccattgtcctaaaggtaagcgtaaactgaccgccgtatgtagccatcagacgagaattggtaac

SEQ ID NO: 421635 - DNA, 75 bp, synthetic construct
  source 1..75: mol_type = other DNA
ctccgatcgctatccgaaagagatcaacggcgttgaggatcgtttgaaatcccgcttcggctggacccgccagag

SEQ ID NO: 421636 - DNA, 75 bp, synthetic construct
  source 1..75: mol_type = other DNA
tcgaagatattaacgttgacgaaacagtgaaggtatacgccagcgccagcaccggaaccattacgttgacggcaa

SEQ ID NO: 421637 - DNA, 75 bp, synthetic construct
  source 1..75: mol_type = other DNA
ggccaaaaccgtgcttactggatcaaaatttaccattgcgaaagcttgttctggaaaagctggagatgaaatggt

SEQ ID NO: 421638 - DNA, 75 bp, synthetic construct
  source 1..75: mol_type = other DNA
gatctggttgctgctcagctaaacaacagaccgagaaagacactgaagttcaaaacaccgaaagagataattgaa

SEQ ID NO: 421639 - DNA, 75 bp, synthetic construct
  source 1..75: mol_type = other DNA
cgtagtcgtgaagcactacaccacctgaatgtacagcatctgcgccgatcgcacagcctacgtcatggcagacgc

SEQ ID NO: 421640 - DNA, 75 bp, synthetic construct
  source 1..75: mol_type = other DNA
agttgataaaacccgtcagaatgaacatccgcacctccctgtagaaagccgacaccaggcaaaaggaacccgctt

SEQ ID NO: 421641 - DNA, 75 bp, synthetic construct
  source 1..75: mol_type = other DNA
taaaacccgtcagaatgaacatccgcacctccctgttgaaagttggcgtcaggcaaagggggcccgcttcctgtg

SEQ ID NO: 421642 - DNA, 75 bp, synthetic construct
  source 1..75: mol_type = other DNA
tgccgtaagatcgagcagttgcgtgaagagagccacgatatcaaagaagatttttcaaatttaatcagaacattg

SEQ ID NO: 421643 - DNA, 75 bp, synthetic construct
  source 1..75: mol_type = other DNA
aaactggtcactatcgacaatattcagaagacggtggcggagtactacaagatcaaagtcgcggatctcctttcc

SEQ ID NO: 421644 - DNA, 75 bp, synthetic construct
  source 1..75: mol_type = other DNA
gtcttgcccgattgcaggatgagttcccagccacagaattcagtatgtggatacgcccattgcaggcggaactga

SEQ ID NO: 421645 - DNA, 75 bp, synthetic construct
  source 1..75: mol_type = other DNA
tgaatcaaaaagggtatcgggtggcgtctatgtcagagcaggagctgctcgatattttcgatgcccgtgccaata

SEQ ID NO: 421646 - DNA, 75 bp, synthetic construct
  source 1..75: mol_type = other DNA
cgtcccggaatgcgttacccgccgtcaggcggtgattaatcaggcccgcaccctgctgaaaaacaacacacacga

SEQ ID NO: 421647 - DNA, 75 bp, synthetic construct
  source 1..75: mol_type = other DNA
cacgtcgagtttataacctagccactattggggtaatactctgtctattttacggtttagttgtaatgggtcttg

SEQ ID NO: 421648 - DNA, 75 bp, synthetic construct
  source 1..75: mol_type = other DNA
caggcggtggttaatcaggcccgcatcctgctgaaaaaacaacacacacgaaaacggctgatgttatcgccgcct

SEQ ID NO: 421649 - DNA, 75 bp, synthetic construct
  source 1..75: mol_type = other DNA
atgtacggaacatgcgaaacgctatgccggaagctggcagcaaagtattcgggagacacgcctctgatgctggtt

SEQ ID NO: 421650 - DNA, 75 bp, synthetic construct
  source 1..75: mol_type = other DNA
tatgcgccagtaacgctatcacttttgatgactaaagaaagtagtgaaatatatgagacatatttaaaacgaggt

SEQ ID NO: 421651 - DNA, 75 bp, synthetic construct
  source 1..75: mol_type = other DNA
cgatcatgaaatcagaaccgtcctggcgcgcctggaggacatcccggaagaccagcggactgaatccggtatttc

SEQ ID NO: 421652 - DNA, 75 bp, synthetic construct
  source 1..75: mol_type = other DNA
cacgcagctaccggcatttgatgccctgcggcaggcgctgccgatggtgcacagcattatattgatggccctggt

SEQ ID NO: 421653 - DNA, 75 bp, synthetic construct
  source 1..75: mol_type = other DNA
atatttttggcagataaagataactcttatattcagggacaaaccattttaatggatggtggccggactattgct

SEQ ID NO: 421654 - DNA, 75 bp, synthetic construct
  source 1..75: mol_type = other DNA
ggtgtgagttatcctgccagcaaagcgggaggtgaagggttgattcgcggtctggcaaaggagttaggaccaaaa

SEQ ID NO: 421655 - DNA, 75 bp, synthetic construct
  source 1..75: mol_type = other DNA
aatggaccgcccgtgacagcaatcatccggtcccggaaagcgttacccgtcgcctggctgatgcggcgaaagttc

SEQ ID NO: 421656 - DNA, 75 bp, synthetic construct
  source 1..75: mol_type = other DNA
tattggggtaatactctgtctattttacggtttagttgtaatgggtcttgctactttacgagagcaccaagatta

SEQ ID NO: 421657 - DNA, 75 bp, synthetic construct
  source 1..75: mol_type = other DNA
atgtacggaacatgcgaaacgctctgccgggagctggcagcgcagtatacggagaacacgccgctgatgctggtt

SEQ ID NO: 421658 - DNA, 75 bp, synthetic construct
  source 1..75: mol_type = other DNA
atgtacggaacatgcgaaacgctatgccggtagctggcagcaaagtattcgggagacacgccactgatgctggtt

SEQ ID NO: 421659 - DNA, 75 bp, synthetic construct
  source 1..75: mol_type = other DNA
ccgggatgaccggacgcaatatggacccgtatatggggcgggcattcgtaggcgatgggctggcgacgatgcttt

SEQ ID NO: 421660 - DNA, 75 bp, synthetic construct
  source 1..75: mol_type = other DNA
atgaccaacgttttagggctgggaaaagccgtcgattttactctcgtcagccatgctgcctggttcggtctgcca

SEQ ID NO: 421661 - DNA, 75 bp, synthetic construct
  source 1..75: mol_type = other DNA
gtctggtccccggaagagattcaggcactggctgacggtatggaaatttctctgaccgatcatgaaatcaggacc

SEQ ID NO: 421662 - DNA, 75 bp, synthetic construct
  source 1..75: mol_type = other DNA
tctgaccggtcatgaaatcaggaccgtcctggcgcgcatggaggacatcccggaagaccagcggactgaatccgg

SEQ ID NO: 421663 - DNA, 75 bp, synthetic construct
  source 1..75: mol_type = other DNA
tttctctgaccgatcatgaaatcaggactgtcctggcgcacctggaggacatcccggaagaccagcggatggagt

SEQ ID NO: 421664 - DNA, 75 bp, synthetic construct
  source 1..75: mol_type = other DNA
gctggcgtccctgattcagaccgccgaacaggcggtggttaatcaggcccgcgccctgctgaaaaacaacacacg

SEQ ID NO: 421665 - DNA, 75 bp, synthetic construct
  source 1..75: mol_type = other DNA
gaacaggcactgtggaaacgtgagtgggccgcccgtgtgtaccacggtgtatctgtaattttaaataactctccc

SEQ ID NO: 421666 - DNA, 75 bp, synthetic construct
  source 1..75: mol_type = other DNA
atgtacggaacatgcgaaacgctatgccgggagctggcagcaaagtatacgggagacacgcccctgatgctggtt

SEQ ID NO: 421667 - DNA, 75 bp, synthetic construct
  source 1..75: mol_type = other DNA
atgtacggaacatgcgaaacgctatgccggcagctggcagcaaagtatacgggagacacgccgctgatgctggtt

SEQ ID NO: 421668 - DNA, 75 bp, synthetic construct
  source 1..75: mol_type = other DNA
atcatcaataacgtgagcgaaaaccgccaggtgaccgtcccggctgaactgctggcgtccctgattcagaccgcc

SEQ ID NO: 421669 - DNA, 75 bp, synthetic construct
  source 1..75: mol_type = other DNA
atctggtccccggaagagattcaggcactggccgacggtatggaaatttctctgaccgatcatgaaatcaggact

SEQ ID NO: 421670 - DNA, 75 bp, synthetic construct
  source 1..75: mol_type = other DNA
tatttcttccggtgcggctatggagattatcagcaacgtgagtgaaaaccgccaggtgaccgtccctgctgaact

SEQ ID NO: 421671 - DNA, 75 bp, synthetic construct
  source 1..75: mol_type = other DNA
atcaaaaagggtgtccataggatttattttgattctagtgaacattctaatcgtcaacgttttactgttgcacac

SEQ ID NO: 421672 - DNA, 75 bp, synthetic construct
  source 1..75: mol_type = other DNA
cattgctatctgtaccgttgacggacagctttttcaggccggagacgcacaagaacgtttttccattcagtctat

SEQ ID NO: 421673 - DNA, 75 bp, synthetic construct
  source 1..75: mol_type = other DNA
atgatgccggtaactcgcttgcgggcattgctgtccttgaacaattgacgaaacaattagggcgttcggtttatt

SEQ ID NO: 421674 - DNA, 75 bp, synthetic construct
  source 1..75: mol_type = other DNA
tgcagcaaatgtttaacggcgtcacgctgggcagtacttacgcgctgattgccatcggctacaccatggtttacg

SEQ ID NO: 421675 - DNA, 75 bp, synthetic construct
  source 1..75: mol_type = other DNA
catgctggcactgacgattttcattcgctattcccgtatggggcgcgcctgccgtgcctgcgcggaagatctgaa

SEQ ID NO: 421676 - DNA, 75 bp, synthetic construct
  source 1..75: mol_type = other DNA
atcttcttcccttccgggaacacgacgacccaactactgcaaacagcaggtgtttttgctgcaggatttctgatg

SEQ ID NO: 421677 - DNA, 75 bp, synthetic construct
  source 1..75: mol_type = other DNA
gtctgaattactggcaaccgctattagcggcgatgccgggttaaccatccagggcggcgcatctactaccgaaga

SEQ ID NO: 421678 - DNA, 75 bp, synthetic construct
  source 1..75: mol_type = other DNA
ccggttggcagttaagtttgcctgcggcccgtgcttttatccttggcgatagcgcgcaaaatattagccgtaaag

SEQ ID NO: 421679 - DNA, 75 bp, synthetic construct
  source 1..75: mol_type = other DNA
tactggtgatcctgccgtcgtggacctcgtttctgatccgcgtttatgcctggatgggaatattaaaaaataacg

SEQ ID NO: 421680 - DNA, 75 bp, synthetic construct
  source 1..75: mol_type = other DNA
tggcaggcttattatcaagcccgccaccgcctgccgttaggaaagatgcatgagcgagccgttaattgtcggcat

SEQ ID NO: 421681 - DNA, 75 bp, synthetic construct
  source 1..75: mol_type = other DNA
aaagataacgaagaagatcgcgctcgtctgcgccgttacttcgaacagcgtgtcgccacacataaagaagctcac

SEQ ID NO: 421682 - DNA, 75 bp, synthetic construct
  source 1..75: mol_type = other DNA
gctgtcgaacgcatgttagtcactcttgccaccgggcgcggtttgatgttggtgggggaacctggcaccgcaaaa

SEQ ID NO: 421683 - DNA, 75 bp, synthetic construct
  source 1..75: mol_type = other DNA
ttgtgattggcgcggcgatggcggcggtggcgggtgtgctgctcggtcagttctacggcgtaattaacccctaca

SEQ ID NO: 421684 - DNA, 75 bp, synthetic construct
  source 1..75: mol_type = other DNA
cggaaatggagaaccgtctgagtgccgtacttgccgcaagggaagcagaaggtcgtcagatggccagcctcttcg

SEQ ID NO: 421685 - DNA, 75 bp, synthetic construct
  source 1..75: mol_type = other DNA
aacagcaactgccacccgggatcagtgaatccggtgaagtggtggatatggccgcttatgaggcatggcaacagg

SEQ ID NO: 421686 - DNA, 75 bp, synthetic construct
  source 1..75: mol_type = other DNA
tcatccactgtctttatcgatggtctccccgcagcccgccagggagatccgctgacgccgcatgataaaccgaag

SEQ ID NO: 421687 - DNA, 75 bp, synthetic construct
  source 1..75: mol_type = other DNA
tctcactgatcaaagtcacgacagtgattatctttatcgtcgtcggcgtgatgatgattatcggtatcttcaaag

SEQ ID NO: 421688 - DNA, 75 bp, synthetic construct
  source 1..75: mol_type = other DNA
gtgactcaggctgaacagccgcaacagccagtgtctcctgccatcaatgataagaagtcagatgcaggtgtgagt

SEQ ID NO: 421689 - DNA, 75 bp, synthetic construct
  source 1..75: mol_type = other DNA
aagaagagatggaacagcaactgccacccgggatcagtgaatccggtgaagtggtggatatggccgcttatgagg

SEQ ID NO: 421690 - DNA, 75 bp, synthetic construct
  source 1..75: mol_type = other DNA
tcatccaccgtttttatcgatggtctccccgcagcccgtcagggagatccgccgacgccgcatgctaaaccgaag

SEQ ID NO: 421691 - DNA, 75 bp, synthetic construct
  source 1..75: mol_type = other DNA
atgattttgtcagcgaaagaagagttggctaatgaaccgcatccgattgatggcctgtccggtgaatatgcggag

SEQ ID NO: 421692 - DNA, 75 bp, synthetic construct
  source 1..75: mol_type = other DNA
gtcgtgcctgcgcggaagatctgaaaatggcgagcctgcttggcatcaacaccgaccgggtgattgcgctgacct

SEQ ID NO: 421693 - DNA, 75 bp, synthetic construct
  source 1..75: mol_type = other DNA
catccacctcatccccgaaaaatcgccagaggctcgtcaaccgtctttattgacggcctgcccgccgccagaacc

SEQ ID NO: 421694 - DNA, 75 bp, synthetic construct
  source 1..75: mol_type = other DNA
cagccacaacagccacaacagccacaacagccacaacagccacaacagccacaacagccacaacagccagtgtct

SEQ ID NO: 421695 - DNA, 75 bp, synthetic construct
  source 1..75: mol_type = other DNA
agcaggctatgaagcagcaaaaggcgatgttaatcgccctgatcgtcatctgtttaaccgtcatagtgacggcac

SEQ ID NO: 421696 - DNA, 75 bp, synthetic construct
  source 1..75: mol_type = other DNA
cctcagcggtagcgatcatcatgttgctgctgctaattatgccgataatgtggttccacaaacatcagcaaaaaa

SEQ ID NO: 421697 - DNA, 75 bp, synthetic construct
  source 1..75: mol_type = other DNA
gatttctggcagggtgtcggccgctatcactccaacacgccggcgcgtaaggcctggtatatcgggaaggtttac

SEQ ID NO: 421698 - DNA, 75 bp, synthetic construct
  source 1..75: mol_type = other DNA
gttcagcgtgatggcgacaacatgaccggggagctgaaaatccgtggtgttaatgcgctgaggattttcaacgac

SEQ ID NO: 421699 - DNA, 75 bp, synthetic construct
  source 1..75: mol_type = other DNA
atcccgacctgtagttgcagagcttggcgatgattccggctggcatttttacagtcagaggaatacggataacag

SEQ ID NO: 421700 - DNA, 75 bp, synthetic construct
  source 1..75: mol_type = other DNA
cccaactcgcgcagcaacaagctcagttaaagcagttacaaagctatatgaaagaaaccgcgcctgcggttgttt

SEQ ID NO: 421701 - DNA, 75 bp, synthetic construct
  source 1..75: mol_type = other DNA
tgaccaaagaaacggtacctggcgcggtaggtgcgatacttaaagattctaataatgagggattacgtcgtcagc

SEQ ID NO: 421702 - DNA, 75 bp, synthetic construct
  source 1..75: mol_type = other DNA
tgacgcgggcagcgactattgcgcaggctgcgatcccgaccgctgtatctccggaaacattatcctcgtctctga

SEQ ID NO: 421703 - DNA, 75 bp, synthetic construct
  source 1..75: mol_type = other DNA
gagctgcgctttaatcagcttatcctcgagacggctggcgtcccgcaaactgtcgaactggcggtagagattgcc

SEQ ID NO: 421704 - DNA, 75 bp, synthetic construct
  source 1..75: mol_type = other DNA
tgagcgcgccgcaaatacagggcgttttacgcgagctgcgctttaatcagcttatcctcgagacggctggcgtcc

SEQ ID NO: 421705 - DNA, 75 bp, synthetic construct
  source 1..75: mol_type = other DNA
gcggaaactcaattgctttcggggataacgatactggcctgaaacaaaacggcgatggcattctggatgtttatg

SEQ ID NO: 421706 - DNA, 75 bp, synthetic construct
  source 1..75: mol_type = other DNA
ttttcaacgaagcctttggtctgatttttcgtcgttcggaagagtgcctgcaccttatccctaccagtgaaggtc

SEQ ID NO: 421707 - DNA, 75 bp, synthetic construct
  source 1..75: mol_type = other DNA
ggtcagcagataatattggtggtgtgtattacaaacaggctcagatttatattgatggcgcatggcgctccgtat

SEQ ID NO: 421708 - DNA, 75 bp, synthetic construct
  source 1..75: mol_type = other DNA
ctacgaaccccgattatcgttttccccgttcagaacaataccaacgctgcaacgctgcaattaacactgggtgga

SEQ ID NO: 421709 - DNA, 75 bp, synthetic construct
  source 1..75: mol_type = other DNA
atccgtatgccatgcgtttatacgaatctctgtgtcagtaccgtaaacctgatggctcaggtgtcgtgtccctga

SEQ ID NO: 421710 - DNA, 75 bp, synthetic construct
  source 1..75: mol_type = other DNA
ccgggcaacgtctgggattttccgcgcgtgcgttatttgatggatgaatatgaaaaccatccgacgcaaaagccg

SEQ ID NO: 421711 - DNA, 75 bp, synthetic construct
  source 1..75: mol_type = other DNA
ataaaatactctccaggaaacccggggcggttcactgttttatgaagtgtgacaatctgaaaatctgtcacactt

SEQ ID NO: 421712 - DNA, 75 bp, synthetic construct
  source 1..75: mol_type = other DNA
atgccggattttcgccggcgtttcctgcaggcaagtgttgatgagatcaatagccggacaccaatgcgcctctct

SEQ ID NO: 421713 - DNA, 75 bp, synthetic construct
  source 1..75: mol_type = other DNA
gctgggggttatcgatcagccgctgaccattctgcataccaatctggcagtttatatcggcattgtttacgccta

SEQ ID NO: 421714 - DNA, 75 bp, synthetic construct
  source 1..75: mol_type = other DNA
caactgtccatcactcttaatctcggtaatttcctgcaactgaccgacgatccgctctatttcgatgcttatctc

SEQ ID NO: 421715 - DNA, 75 bp, synthetic construct
  source 1..75: mol_type = other DNA
ccgggtaacgtctgggattttccgcgcgtgcgttatttgatggatgaatatgaaaaccacccgacgcaaaaaccg

SEQ ID NO: 421716 - DNA, 75 bp, synthetic construct
  source 1..75: mol_type = other DNA
ggcaccctgcaggaacatgacggtatctgcgaaattcatgttgctaaatacgctgaaacgttcggactgacctcc

SEQ ID NO: 421717 - DNA, 75 bp, synthetic construct
  source 1..75: mol_type = other DNA
atccgtacgccatgcgtttatacgaatctctgtgccagtaccgtaaacctgatggctcaggtgtcgtgtccctga

SEQ ID NO: 421718 - DNA, 75 bp, synthetic construct
  source 1..75: mol_type = other DNA
ttccattgcgtgcccttatggtggctccccgccagcttccttaccattccgggttcagctatttcgaactcgaca

SEQ ID NO: 421719 - DNA, 75 bp, synthetic construct
  source 1..75: mol_type = other DNA
atcgactggatcatggagcgctaccagctacctcaaagttaccaacgtatgccggattttcgccggcgtttcctg

SEQ ID NO: 421720 - DNA, 75 bp, synthetic construct
  source 1..75: mol_type = other DNA
tacatcgagaaaaataaaggccgccagacgactcatatcgtattttccttccgtgatattacctcgatgacaaca

SEQ ID NO: 421721 - DNA, 75 bp, synthetic construct
  source 1..75: mol_type = other DNA
acgtgcgcacagtccatccagaggactttacagtgtacatatcaacccatatctcattcccttctttatcgggtt

SEQ ID NO: 421722 - DNA, 75 bp, synthetic construct
  source 1..75: mol_type = other DNA
attgcggaaatgcaaaaagacggcactctgcaagccctttccgaaaaatggtttggtgctgatgtgaccaaataa

SEQ ID NO: 421723 - DNA, 75 bp, synthetic construct
  source 1..75: mol_type = other DNA
gcgtacctatgatgatgatccgaccaaatatcaggatctgcgcgtaggtcgtattgatgccatcctggttgatcg

SEQ ID NO: 421724 - DNA, 75 bp, synthetic construct
  source 1..75: mol_type = other DNA
gagcgttaaaagttttgcagatgaaggtctgcttaataaagtcaaagagcgcggcacgctgctggtagggctgga

SEQ ID NO: 421725 - DNA, 75 bp, synthetic construct
  source 1..75: mol_type = other DNA
atgcaaataatccttgattacctttgccacgctgcaaatacaatttttggcatgtatcagcaacaattcctcaaa

SEQ ID NO: 421726 - DNA, 75 bp, synthetic construct
  source 1..75: mol_type = other DNA
gcaccaactatgaagagtggctgcgtcagaatgttcagggtgtcgatgtgcgtacctatgatgatgacccgacca

SEQ ID NO: 421727 - DNA, 75 bp, synthetic construct
  source 1..75: mol_type = other DNA
aaaaccaacgatacgttggcagtaaccggtgaagcgttctctcgtcaggagtctggcgtggcactgcgtaaagga

SEQ ID NO: 421728 - DNA, 75 bp, synthetic construct
  source 1..75: mol_type = other DNA
ttagcgatttttgcgccggtggcgatgtcggcgctggcgggggtgaaaagcgcgcagcaggttcgcattcgtgcc

SEQ ID NO: 421729 - DNA, 75 bp, synthetic construct
  source 1..75: mol_type = other DNA
aaaagcgtgagtggcaacttctcccgcggtgaagtcatccgcatttgcaacctcgaaggtcgcgatattgctcac

SEQ ID NO: 421730 - DNA, 75 bp, synthetic construct
  source 1..75: mol_type = other DNA
aagatcgtgaacgcttcctgaacgcccgcgataccctgcgtgcgttgctcgacaacaacatcgttccggtaatta

SEQ ID NO: 421731 - DNA, 75 bp, synthetic construct
  source 1..75: mol_type = other DNA
gcgcgcctcactggtgtagataaagatgctatgaatgaagtcactgcccgctatatggatgtgcagactcaggca

SEQ ID NO: 421732 - DNA, 75 bp, synthetic construct
  source 1..75: mol_type = other DNA
tggcgggtgccgataaactgttgttactgaccgatcaaaaaggtttgtataccgctgacccgcgcagcaatccgc

SEQ ID NO: 421733 - DNA, 75 bp, synthetic construct
  source 1..75: mol_type = other DNA
ctcgcaagaaattgatgcaatactgggatatgaatacggcccggttgccgttcaccgtgatgacatgatcacccg

SEQ ID NO: 421734 - DNA, 75 bp, synthetic construct
  source 1..75: mol_type = other DNA
ggcaaatacattaaacgcagtcaggagttcaggccacgattccgcacaatgcgccgcctgcgtgatctgcatata

SEQ ID NO: 421735 - DNA, 75 bp, synthetic construct
  source 1..75: mol_type = other DNA
attcctcaatataaagataatttaataaagacagtagccgagaatagaacgctaccgattggcgcgttgacaaca

SEQ ID NO: 421736 - DNA, 75 bp, synthetic construct
  source 1..75: mol_type = other DNA
tgttgccgtttgcttttgttagcagctattcatttgcaaattcaatagctattcctaatgagtattctgtttccg

SEQ ID NO: 421737 - DNA, 75 bp, synthetic construct
  source 1..75: mol_type = other DNA
tacagaaggctttgaagagtatcgtaaaatcgttgaaggctacacgccggagtcggttgaagatatcaccggcgt

SEQ ID NO: 421738 - DNA, 75 bp, synthetic construct
  source 1..75: mol_type = other DNA
tggcggctattacgattactacacgtcaacgatgccccgggcggcgtggccttacagcgacagccgggacagtgg

SEQ ID NO: 421739 - DNA, 75 bp, synthetic construct
  source 1..75: mol_type = other DNA
agaagacctgaccgccgcagaatggatgtttgacatggtgaagaccatcgcgccatcagccagaaaaccgaattt

SEQ ID NO: 421740 - DNA, 75 bp, synthetic construct
  source 1..75: mol_type = other DNA
cggcattgatgacgctctgcgcgcgattgccggtgacagcgtttcaggtcttggaaccggcggcatgagcaccaa

SEQ ID NO: 421741 - DNA, 75 bp, synthetic construct
  source 1..75: mol_type = other DNA
aagatcgtgaacgcttcctgaacgcccgcgacaccctgcgtgcgttgctcgataacaatatcgttccggtaatca

SEQ ID NO: 421742 - DNA, 75 bp, synthetic construct
  source 1..75: mol_type = other DNA
aaattaactatgatggtgaagaatatcaaatttgggtaggtaacagatggtattcatacggacatatttactcaa

SEQ ID NO: 421743 - DNA, 75 bp, synthetic construct
  source 1..75: mol_type = other DNA
acattgcactgaaaaacggctcgaacatcgcgctgttgaatgcgatgggccatgtcattattgaagaaaatctgt

SEQ ID NO: 421744 - DNA, 75 bp, synthetic construct
  source 1..75: mol_type = other DNA
atattaatcaatgagatatcagcaagagttgagaacttcaacaaactatttgaagaattactaagggtcagaaaa

SEQ ID NO: 421745 - DNA, 75 bp, synthetic construct
  source 1..75: mol_type = other DNA
gattcatttgtagggaatcttaaagtgattgaaggtgcaaaaggtgttcattatgactgggttaatgctaactcg

SEQ ID NO: 421746 - DNA, 75 bp, synthetic construct
  source 1..75: mol_type = other DNA
ctcgcaagaaattgatgcaatactgggatatgaatatggcccggttgccgttcaccgtgatgacatgattacccg

SEQ ID NO: 421747 - DNA, 75 bp, synthetic construct
  source 1..75: mol_type = other DNA
cgtcacccggcaaccttgggcagcagcgaagtcgaggcatttctgtcggcactgttgcaaatagtcggtggtgat

SEQ ID NO: 421748 - DNA, 75 bp, synthetic construct
  source 1..75: mol_type = other DNA
gcatttcgcccaggggatcaccataataaaatgctgaggcctggcctttgcgtagtgcacgcatcacctcaatac

SEQ ID NO: 421749 - DNA, 75 bp, synthetic construct
  source 1..75: mol_type = other DNA
ccgcttgatgcgctgccgcccctcactagtgaggcactgttgcaaatagtcggtggtgataaacttatcatcccc

SEQ ID NO: 421750 - DNA, 75 bp, synthetic construct
  source 1..75: mol_type = other DNA
gcaaacccgcaacgagctgtacgaaagcatcaactactaccagtacgaagagaagctcgacgacctgtttgcccg

SEQ ID NO: 421751 - DNA, 75 bp, synthetic construct
  source 1..75: mol_type = other DNA
cgcagcgcccatgtcgcaatggcgctgtatcccctttctgctttccgcgcaatgaaccgcgccgctgaacatgtc

SEQ ID NO: 421752 - DNA, 75 bp, synthetic construct
  source 1..75: mol_type = other DNA
aagaagagatggtggatcggatccgcgcggcggtggatgcgaaaaccgatcctgattttgtgatcatggcgcgca

SEQ ID NO: 421753 - DNA, 75 bp, synthetic construct
  source 1..75: mol_type = other DNA
cggggaaaaatattccgcgcgcggtacgtcaggtgttctggcgaatcctgctattctacgtattcgcgattctga

SEQ ID NO: 421754 - DNA, 75 bp, synthetic construct
  source 1..75: mol_type = other DNA
gatttctcaggcaggcccgggcggggcgctgctttcatatattcttattggtctgatggtttactttctgatgac

SEQ ID NO: 421755 - DNA, 75 bp, synthetic construct
  source 1..75: mol_type = other DNA
gcgcgcagcctgcaggctggagcaactggacaatcggcgaagcgccgtttgctggtggttttgcggcgatgatcg

SEQ ID NO: 421756 - DNA, 75 bp, synthetic construct
  source 1..75: mol_type = other DNA
acgcatgtgctgaaagttggcggtgccggagtgcgctcaccgcttgatgcgctgccgggcactgttgcaaatagt

SEQ ID NO: 421757 - DNA, 75 bp, synthetic construct
  source 1..75: mol_type = other DNA
gcgccttcaaacgtgccgtagaaggcactgttgcaaagttagcgatgaggcagccttttgtcttattcaaaggcc

SEQ ID NO: 421758 - DNA, 75 bp, synthetic construct
  source 1..75: mol_type = other DNA
gatttcgatcacggcacgatcatcgtgcgggagggggcactgttgcaaagttagcgatgaggcagccttttgtct

SEQ ID NO: 421759 - DNA, 75 bp, synthetic construct
  source 1..75: mol_type = other DNA
ggatgcggcaatcgaacgagcggaggcctatgttgaagcgggtgccgaaatgctgttcccggaagcaattaccga

SEQ ID NO: 421760 - DNA, 75 bp, synthetic construct
  source 1..75: mol_type = other DNA
tttttgccgccaccgcaacaggtactggcaaaactgctcaccattgccgggccgcagggatttatggacgccacg

SEQ ID NO: 421761 - DNA, 75 bp, synthetic construct
  source 1..75: mol_type = other DNA
tgcattcgcggcggctgaaatggcgctggccgctctcgcgtcaggtgaccttaagcattggcacgttagcggttt

SEQ ID NO: 421762 - DNA, 75 bp, synthetic construct
  source 1..75: mol_type = other DNA
taaataaattacggcaactttataaaggtgttgttcatgttctaaaaaacaaaaattcaacttttgaagttgaac

SEQ ID NO: 421763 - DNA, 75 bp, synthetic construct
  source 1..75: mol_type = other DNA
ggcgcgattgccgccggacgtgagcacctgggttacccggaactgccagcgactatcgcctcgaagcaactattg

SEQ ID NO: 421764 - DNA, 75 bp, synthetic construct
  source 1..75: mol_type = other DNA
agcagaatccttgataacagccagtttgccgtttgccttaaagagactgatgaattaattggtcatctctttgct

SEQ ID NO: 421765 - DNA, 75 bp, synthetic construct
  source 1..75: mol_type = other DNA
gatagcaccgtcacagtcccagtggtctgcggaaagggagggactgaactggctggttatcaaactgataccctc

SEQ ID NO: 421766 - DNA, 75 bp, synthetic construct
  source 1..75: mol_type = other DNA
gtaactgatgaggtttttgaatctgcccactccattgttttcgatgaagcagaaaaccggatgcacaccattaaa

SEQ ID NO: 421767 - DNA, 75 bp, synthetic construct
  source 1..75: mol_type = other DNA
ccaacattaccgaatttggcgcaacaccgctgtttaccaccgatgaattacgcagcgcccatgtcgcaatggcgc

SEQ ID NO: 421768 - DNA, 75 bp, synthetic construct
  source 1..75: mol_type = other DNA
ggtgccgagatgttgttcccggaggcgattaccgaactcgccatgtaccgccagtttgccgatgcggtgcaggtg

SEQ ID NO: 421769 - DNA, 75 bp, synthetic construct
  source 1..75: mol_type = other DNA
gatacttaccctcacgtagctatgaaggccacctgcttacagcttagatataattgtgagtataatacaaatttc

SEQ ID NO: 421770 - DNA, 75 bp, synthetic construct
  source 1..75: mol_type = other DNA
gacaatttccaaagtctgttcactggcattagcaacggaaaatattgttctgaatacgcttcagaacaaaacagg

SEQ ID NO: 421771 - DNA, 75 bp, synthetic construct
  source 1..75: mol_type = other DNA
gcggcggcgctgaccgggctggatctgcgcctgttggccccgaaagcctgctggccggaagagagcctggtggcg

SEQ ID NO: 421772 - DNA, 75 bp, synthetic construct
  source 1..75: mol_type = other DNA
gaacccgatgatgattttaatgctcaactcatggaacaattaaaaatatgggcaaaaaataatggtgaaagtgat

SEQ ID NO: 421773 - DNA, 75 bp, synthetic construct
  source 1..75: mol_type = other DNA
ggatatcgaacagatcccatcgatgtattcagcactgaaataccagggcaaaaaactgtacgaatatgcgcgtca

SEQ ID NO: 421774 - DNA, 75 bp, synthetic construct
  source 1..75: mol_type = other DNA
tttttgaggaagctgtaggtcgcaaagttgagtttgttcaggataaccattctaaatcgagaaaaggagtattgc

SEQ ID NO: 421775 - DNA, 75 bp, synthetic construct
  source 1..75: mol_type = other DNA
gggaagaactcatccgcaacaaacagccggaagcggcggaggcactttatcagcagaacgaagccgatatgctcg

SEQ ID NO: 421776 - DNA, 75 bp, synthetic construct
  source 1..75: mol_type = other DNA
ccgttcagtttcaggagtttctgcgtaccgtgctggttgagcgttcggcggcgctgggtgtgccggttccggcgc

SEQ ID NO: 421777 - DNA, 75 bp, synthetic construct
  source 1..75: mol_type = other DNA
aatatcaaggtgaccgtcgctggtagtggtaaaaagctgcgtggtctgcgtcacggcccgtaccgtcctgacctg

SEQ ID NO: 421778 - DNA, 75 bp, synthetic construct
  source 1..75: mol_type = other DNA
acctacctttggcaaatgggttggggtgaatttatctgctgaaaataagcgccagttgtggataccagaggggtt

SEQ ID NO: 421779 - DNA, 75 bp, synthetic construct
  source 1..75: mol_type = other DNA
tcgaagtctagtaaaggtgttttacgcgggctgcattatcaattagaaccttatgctcaagggaaattggtacgt

SEQ ID NO: 421780 - DNA, 75 bp, synthetic construct
  source 1..75: mol_type = other DNA
gcacgcgagcaaacgtatttcgtcgacaaaacggcggatcatagagaaaaccgtctgtggatgatggccaacatg

SEQ ID NO: 421781 - DNA, 75 bp, synthetic construct
  source 1..75: mol_type = other DNA
tgatagagggattatttggaatgataaagaaattggcattatatggccgtgtaagtctaaagtgttgctttctgt

SEQ ID NO: 421782 - DNA, 75 bp, synthetic construct
  source 1..75: mol_type = other DNA
tcgcggttgatattcgtaaatcgtcacctacctttggcaagtgggttggtgtaaatttgtcggcggagaataagc

SEQ ID NO: 421783 - DNA, 75 bp, synthetic construct
  source 1..75: mol_type = other DNA
tgaaagaggggttaaatgggatgacccctgtattgatattaagtggcctctagtatcgtctcccctgttatcaga

SEQ ID NO: 421784 - DNA, 75 bp, synthetic construct
  source 1..75: mol_type = other DNA
caggccgtgtatggccaacacctcaggcagttaagtacggcctggtggatggagatcttatgacctgctccccgt

SEQ ID NO: 421785 - DNA, 75 bp, synthetic construct
  source 1..75: mol_type = other DNA
cagcggcgcggccccaaccgttggcggcgcgtttgtcgtcactcttgccgccacgctgtgtggcctagtattggg

SEQ ID NO: 421786 - DNA, 75 bp, synthetic construct
  source 1..75: mol_type = other DNA
cagataccgttccgtctggttatgccctgatgcaggggcagacttttgacaaatctgcatacccgaaacttgcag

SEQ ID NO: 421787 - DNA, 75 bp, synthetic construct
  source 1..75: mol_type = other DNA
agccagtgccaccgccgccggaaaatcggcagaaagtgctgcatcgtccgcttcaacagccacaacgaaggctgg

SEQ ID NO: 421788 - DNA, 75 bp, synthetic construct
  source 1..75: mol_type = other DNA
atgccgaattaaacgctgttgctgatgagcgcatgaaaaatccggaaattgtgaaggttaacctggatgacctat

SEQ ID NO: 421789 - DNA, 75 bp, synthetic construct
  source 1..75: mol_type = other DNA
gaaaaatcctatgggaactgtagccgaaggggaaggggatgccgtcgcaatcctgaaccggaatgaacctgcatt

SEQ ID NO: 421790 - DNA, 75 bp, synthetic construct
  source 1..75: mol_type = other DNA
ttctggacactctgctgtcgatcccttctctgctgctggcgattattgtggtggcgtttgccgggccgcatctga

SEQ ID NO: 421791 - DNA, 75 bp, synthetic construct
  source 1..75: mol_type = other DNA
ggcgacagaggcagctggtagtgcgacggcagcagctcagagcaaaagtacggcggaatctgcagcaacacgcgc

SEQ ID NO: 421792 - DNA, 75 bp, synthetic construct
  source 1..75: mol_type = other DNA
caacgccaaaggcagtaaaatcagcctatgacaatgcagagaaacgtctgcagaaagaccagaacggcgctgata

SEQ ID NO: 421793 - DNA, 75 bp, synthetic construct
  source 1..75: mol_type = other DNA
cgactcagaggctaatgcgtggatatctagagagcagacgtactttgtcgacaaaaccaccgaccatagcgaaaa

SEQ ID NO: 421794 - DNA, 75 bp, synthetic construct
  source 1..75: mol_type = other DNA
gtcagcgtcttccagcgcaggaacggcatcaacaaaggccactgaagcggaaaaaagttgctgccgctgcagagt

SEQ ID NO: 421795 - DNA, 75 bp, synthetic construct
  source 1..75: mol_type = other DNA
ggacgaaaaccacatcgtcgtttgattacggcactaaatccacgaataacaccggggcgcatacgcacagtctga

SEQ ID NO: 421796 - DNA, 75 bp, synthetic construct
  source 1..75: mol_type = other DNA
ccggcacatctgcccgtgaggcggcaacccaagcgactgatgctgcaggctcagcgcgtgcagccagcacgtcag

SEQ ID NO: 421797 - DNA, 75 bp, synthetic construct
  source 1..75: mol_type = other DNA
gcacgcgagcaaacgtatttcgtcgacaatacggcggatcatagagaaaaccgactgtggatgatggccaacatg

SEQ ID NO: 421798 - DNA, 75 bp, synthetic construct
  source 1..75: mol_type = other DNA
gattagcagagctggaagcggaagtattgcagcgggtgatgcagcgtggtgaatttgaaactcgcctgagaaaac

SEQ ID NO: 421799 - DNA, 75 bp, synthetic construct
  source 1..75: mol_type = other DNA
tggtgatgagttcatggaaaggttctcgtggcatgtggcggataaggggttccgtatggtgaggtactacggttt

SEQ ID NO: 421800 - DNA, 75 bp, synthetic construct
  source 1..75: mol_type = other DNA
aatgcgcaactgaagatggcgggttgggtcgatgccaattattcaaaaagctacactattaacagaggtgaagta

SEQ ID NO: 421801 - DNA, 75 bp, synthetic construct
  source 1..75: mol_type = other DNA
tctaaatcgagcagaggagtactgagaggactacattatcaaaaagctccttacgctcaggctaaattagttcgt

SEQ ID NO: 421802 - DNA, 75 bp, synthetic construct
  source 1..75: mol_type = other DNA
gcacgcgagcaaacgtatttcgtcgacaagacggctgatcatagagaaaaccgcctgtggatgatggccaacatg

SEQ ID NO: 421803 - DNA, 75 bp, synthetic construct
  source 1..75: mol_type = other DNA
cgtccgcgccggttagggtcggtacgattagcagagctggaagcggaagtattgcagcgggtgatgcagcgtggt

SEQ ID NO: 421804 - DNA, 75 bp, synthetic construct
  source 1..75: mol_type = other DNA
tgattttaatttcattgaggataatattgacagcaggtgctgctattttatcagcctatctccggagcaaagaaa

SEQ ID NO: 421805 - DNA, 75 bp, synthetic construct
  source 1..75: mol_type = other DNA
agccccaggacagtgcgcacgcgtttatggagatgtcagcagctggagcaacgctatatacgctggcagactggg

SEQ ID NO: 421806 - DNA, 75 bp, synthetic construct
  source 1..75: mol_type = other DNA
gacatcatcagatggagcgcatacccactcattgtctggtacagctgcaagcgcaggtgctcatgcacatactgt

SEQ ID NO: 421807 - DNA, 75 bp, synthetic construct
  source 1..75: mol_type = other DNA
gtggtcacccgggataactcggtggctgacggttcgacggcgaatacgctgcaggtgagggtgaccgatgcgttc

SEQ ID NO: 421808 - DNA, 75 bp, synthetic construct
  source 1..75: mol_type = other DNA
caatggcgaatacgctgcgggcgagggtgaccgatgcgttcggcaatgcgcttgccgggcagacggtcagcgtgt

SEQ ID NO: 421809 - DNA, 75 bp, synthetic construct
  source 1..75: mol_type = other DNA
gcgggctgcactatcagctggatccgcacgctcagggcaaactggtccgctgcgtggaaggtgaggtatttgacg

SEQ ID NO: 421810 - DNA, 75 bp, synthetic construct
  source 1..75: mol_type = other DNA
gcacgcgagcaaacgtatttcgtcgacaacacggctgatcatagagaaaaccggctgtggatgatggccaacatg

SEQ ID NO: 421811 - DNA, 75 bp, synthetic construct
  source 1..75: mol_type = other DNA
aacgtcagaaacgaatgcggcagcgtcacaacaatcagcagccacttctgcatccaccgcgaccacgaaagcgtc

SEQ ID NO: 421812 - DNA, 75 bp, synthetic construct
  source 1..75: mol_type = other DNA
cggcggaatccgcagcaacgcgcgctgagacagcggcaaaacgggcagaggatattgcatccgccgtggcgcttg

SEQ ID NO: 421813 - DNA, 75 bp, synthetic construct
  source 1..75: mol_type = other DNA
gtacggatttggggacgaaaaccacatcgtcgtttgattacggcactaaatccacgaataacactggtgcgcata

SEQ ID NO: 421814 - DNA, 75 bp, synthetic construct
  source 1..75: mol_type = other DNA
accacgaaagcgtcagaagctgccacctcagcccgggatgcgtcagcttcaaaagaggcggcaaaatcatcagaa

SEQ ID NO: 421815 - DNA, 75 bp, synthetic construct
  source 1..75: mol_type = other DNA
cgcatccagtacggatttggggacgaaaaccacatcgtcgtttgattacggcactaaatccacgaataacaccgg

SEQ ID NO: 421816 - DNA, 75 bp, synthetic construct
  source 1..75: mol_type = other DNA
cgtgaggcggcaacccatgcgactgatgctgcaggctcagcacgcgcagccagcacgtcagccggacaggccgcg

SEQ ID NO: 421817 - DNA, 75 bp, synthetic construct
  source 1..75: mol_type = other DNA
agcagccacttctgcatccaccgcgaccacgaaagcgtcagaagcagccacttcagccagggatgcgtcggcttc

SEQ ID NO: 421818 - DNA, 75 bp, synthetic construct
  source 1..75: mol_type = other DNA
ctggtttctggtgttgagtttgatggttccaaagatattactttaaccgccgcgcatgtggctgcttttgccaga

SEQ ID NO: 421819 - DNA, 75 bp, synthetic construct
  source 1..75: mol_type = other DNA
acagccgaggcactatggaaattaccggtactctcggttacttcagaagtgatagcggtaatttctatacagcaa

SEQ ID NO: 421820 - DNA, 75 bp, synthetic construct
  source 1..75: mol_type = other DNA
gctcaaaaacagcggctgcatcatctgccagcgccgcgtcaacaagtgccgggcaggcctcagccagtgccaccg

SEQ ID NO: 421821 - DNA, 75 bp, synthetic construct
  source 1..75: mol_type = other DNA
ggaagctgctgctgatcgtgctgaagagattgccggtgcagttgcgatggaagacgcaagccttacaactaaagg

SEQ ID NO: 421822 - DNA, 75 bp, synthetic construct
  source 1..75: mol_type = other DNA
tcacttttctcgtcaactggaagaacgtctggggctgatcgaagtccaggcgccgattcttagccgtgtggggga

SEQ ID NO: 421823 - DNA, 75 bp, synthetic construct
  source 1..75: mol_type = other DNA
gtggcgggcttactggcgcgttgacgggttctgccgtcgtgaatgccctttgtggggtaaccggcgggatgatcg

SEQ ID NO: 421824 - DNA, 75 bp, synthetic construct
  source 1..75: mol_type = other DNA
cctcttacgttggcgggaataataagtggcgggcttactggcgcgttaaccggttctgccgtcgtgaatgccctt

SEQ ID NO: 421825 - DNA, 75 bp, synthetic construct
  source 1..75: mol_type = other DNA
atatcatggcagcactgcgaaaacgtggtacgtcgctggcagcggtttcccgcaaagcgggactggcgtccgcca

SEQ ID NO: 421826 - DNA, 75 bp, synthetic construct
  source 1..75: mol_type = other DNA
cagatatcattgccgggttaagaaagaaaggaacgtctctcgctgcggtgtcgcgtgaggccgggttgtcctcca

SEQ ID NO: 421827 - DNA, 75 bp, synthetic construct
  source 1..75: mol_type = other DNA
accactcactatgtggtgctcggttttcgcttcagagtagcggaagaagagctgttactgccggatgagcagcat

SEQ ID NO: 421828 - DNA, 75 bp, synthetic construct
  source 1..75: mol_type = other DNA
taaggcaacgcattcgcccaaaagtgaaaacgtggaataaaaacatactctctcaatttgatgaattgggttttt

SEQ ID NO: 421829 - DNA, 75 bp, synthetic construct
  source 1..75: mol_type = other DNA
atgtctgaaccgcaacggctgttctttgctatcgacttacctgcagaaatccgcgaacagattatccgctggcgc

SEQ ID NO: 421830 - DNA, 75 bp, synthetic construct
  source 1..75: mol_type = other DNA
gttcgcgtgtggtgtggttaggaatgcgtcagccgccacgcggcttaatccaactggcgaatatgctccgttcac

SEQ ID NO: 421831 - DNA, 75 bp, synthetic construct
  source 1..75: mol_type = other DNA
ttgattaattgggaaccactgggtgcaaatgttgatgctgaggatgcagaggttctggctgaattgaagaaataa

SEQ ID NO: 421832 - DNA, 75 bp, synthetic construct
  source 1..75: mol_type = other DNA
tcctttgaccgttccgggttccaatatcatggtcgtgtccaggcactggcagatgctgcccgtgaagctggcctt

SEQ ID NO: 421833 - DNA, 75 bp, synthetic construct
  source 1..75: mol_type = other DNA
aaaaatggattagatgtacaatttgtaagtaaaaaaaagaaagggttaattctaactttaccttctgaaatgaat

SEQ ID NO: 421834 - DNA, 75 bp, synthetic construct
  source 1..75: mol_type = other DNA
aggaaaatatgactctgcgctgaaatcaacagtatggtccgactataaaaatgaaaaactcactgacgctatctc

SEQ ID NO: 421835 - DNA, 75 bp, synthetic construct
  source 1..75: mol_type = other DNA
agctggaaaaagagtacgttattgctgcccgtctggatggcgcaacgacgctgaatattctctggtttgccgtgt

SEQ ID NO: 421836 - DNA, 75 bp, synthetic construct
  source 1..75: mol_type = other DNA
cggtaagtgattttcgccgcgacttcccgcagtttgctgaccctgccaaatatcccgaagcgcaaatccagtttc

SEQ ID NO: 421837 - DNA, 75 bp, synthetic construct
  source 1..75: mol_type = other DNA
ggcggcagacagccgggcgatgctggctggtggttcgggcggttcaaccaatggtgttcaggcctcaaagtccgt

SEQ ID NO: 421838 - DNA, 75 bp, synthetic construct
  source 1..75: mol_type = other DNA
ttctggataccttactggcgatcccgtccctgctgctggcaattatcgttgtggcatttgccgggccgagtttgt

SEQ ID NO: 421839 - DNA, 75 bp, synthetic construct
  source 1..75: mol_type = other DNA
caccgaaattacccgtgctctatcgatggcgatcctcgatatcgccgcgctcggttttctcgatctcggcgcaca

SEQ ID NO: 421840 - DNA, 75 bp, synthetic construct
  source 1..75: mol_type = other DNA
gccaggtgcggcaattatgattagcgtgttgttggttaacctccttggcgatggcgttcgtcgtgcgattattgc

SEQ ID NO: 421841 - DNA, 75 bp, synthetic construct
  source 1..75: mol_type = other DNA
tcgggtattcggttgaagaactagcaatgcgatatcaacgatcaactaccgcaattcgtaatatgctaaaaatcc

SEQ ID NO: 421842 - DNA, 75 bp, synthetic construct
  source 1..75: mol_type = other DNA
atatgtagaaacggcaactataagaaaacttttcaagagtattgtttccgaccaggcacgcatagctacaattaa

SEQ ID NO: 421843 - DNA, 75 bp, synthetic construct
  source 1..75: mol_type = other DNA
gtgtctggcagcacttttatgacgataacttctccggcacggatttcaccactcactatgtggtgctcggttttc

SEQ ID NO: 421844 - DNA, 75 bp, synthetic construct
  source 1..75: mol_type = other DNA
gagcgaaaacgtcaccggcaaagatttgtttccgtactttgccgggttgttcgtggctcactacatgacgctatg

SEQ ID NO: 421845 - DNA, 75 bp, synthetic construct
  source 1..75: mol_type = other DNA
tgaaattaactgtgtggtccgactacaaaagtgaaaaactgaccgatacgatatcgctgcgctatctggtacgat

SEQ ID NO: 421846 - DNA, 75 bp, synthetic construct
  source 1..75: mol_type = other DNA
ggctaaaatctgaatttcttgagcttgtggaaagtacacatacggaatctataacgaatactcaaacagaactaa

SEQ ID NO: 421847 - DNA, 75 bp, synthetic construct
  source 1..75: mol_type = other DNA
cagctggcgaatatgctccgctcacaggctgcccgcagcggttgttttcaaagcaatcgtccgtttcatccacat

SEQ ID NO: 421848 - DNA, 75 bp, synthetic construct
  source 1..75: mol_type = other DNA
aaggcaatcagggggcaggcaatatcaccgactgtacggtgattgtgaccaaaaaagcggcttccggcatcagta

SEQ ID NO: 421849 - DNA, 75 bp, synthetic construct
  source 1..75: mol_type = other DNA
ggcacaggcatttgccatcaggttaacctcgaatatctcggcaaagcagtgtggagcgaattgcaggacggtgaa

SEQ ID NO: 421850 - DNA, 75 bp, synthetic construct
  source 1..75: mol_type = other DNA
cctttgcaggtatatatctgcatatatataccacccgttatgattctcacatccctgctgacaattttaaccatt

SEQ ID NO: 421851 - DNA, 75 bp, synthetic construct
  source 1..75: mol_type = other DNA
tgttttggtaaaaaaatgccagtcgcaatgccaggtatattttattaacgaagaaatggtaaagaatggcatggc

SEQ ID NO: 421852 - DNA, 75 bp, synthetic construct
  source 1..75: mol_type = other DNA
tgttatatagtctgtgtggataaaaatttagatgcggtcagaaagaaaattagcaccaatgtgggtattattgtc

SEQ ID NO: 421853 - DNA, 75 bp, synthetic construct
  source 1..75: mol_type = other DNA
atgaaagaaattgacatcaaattgaaaattgtagagtttcttttaaactctgaacccgctgatacatacctagct

SEQ ID NO: 421854 - DNA, 75 bp, synthetic construct
  source 1..75: mol_type = other DNA
gaaaggatgcttgatgctctggatgaccaggagctggtgaaactggttactgaacgcagcaatcaacctctgcat

SEQ ID NO: 421855 - DNA, 75 bp, synthetic construct
  source 1..75: mol_type = other DNA
gcagatttaggtacagctcagaaagtcgttgtatacccaacgattggtgatcatgtcttcagcgcgtggccaaaa

SEQ ID NO: 421856 - DNA, 75 bp, synthetic construct
  source 1..75: mol_type = other DNA
atgaatgaaataatgacggtcatagtatcatcattttattgtatactcaggccgctggggatgtttattatccta

SEQ ID NO: 421857 - DNA, 75 bp, synthetic construct
  source 1..75: mol_type = other DNA
catacaaatcaaacagactgacgccggtttccgttattgcttatgccggactgggttatatgttctgttttacaa

SEQ ID NO: 421858 - DNA, 75 bp, synthetic construct
  source 1..75: mol_type = other DNA
gccgcaatgttaggccagccggtttccatgcttatcccggacgtagtgggctttaaacttaccggtaaattacgt

SEQ ID NO: 421859 - DNA, 75 bp, synthetic construct
  source 1..75: mol_type = other DNA
cctacggacagtaaacgcattcttgattatgtagaacaacgttatcttactcgcgtacgcgctcagaatatcagt

SEQ ID NO: 421860 - DNA, 75 bp, synthetic construct
  source 1..75: mol_type = other DNA
tgttttggtaaaaaaatgccagccgcaatgcatggtgtattttattaacgaagaaatggtaaagaatggcatggc

SEQ ID NO: 421861 - DNA, 75 bp, synthetic construct
  source 1..75: mol_type = other DNA
ggcccggaggagctgacccggtttatccagcaacgcaaattccggagtaaccaccttttttatattcgctttttt

SEQ ID NO: 421862 - DNA, 75 bp, synthetic construct
  source 1..75: mol_type = other DNA
tgtcaacgcgtccgacatatcatggaagattccctggtgatgacatatcgtctcagtcacctaaaaaagcacttc

SEQ ID NO: 421863 - DNA, 75 bp, synthetic construct
  source 1..75: mol_type = other DNA
ataaacagcaggagttagcaaaagagaggcaactgattcagccaaagccgtttacagctgagcttccacctggag

SEQ ID NO: 421864 - DNA, 75 bp, synthetic construct
  source 1..75: mol_type = other DNA
ttgcgaaacagggcagcaagcaatgaaaaactgaaggaaaaacttcaggaattactggcgaatactaatagcaat

SEQ ID NO: 421865 - DNA, 75 bp, synthetic construct
  source 1..75: mol_type = other DNA
gtactcttcatcagaaaaaccattaagagaacgaaaattcattagtattgacaaagacaattttgatgaagtgat

SEQ ID NO: 421866 - DNA, 75 bp, synthetic construct
  source 1..75: mol_type = other DNA
tccagcaacgcaaattccggagtaaccaccttttttatattcgcttttttaaggccgcgatcaaattcctggaac

SEQ ID NO: 421867 - DNA, 75 bp, synthetic construct
  source 1..75: mol_type = other DNA
tattttatctcgtgaaactttagatgagcaggatcgaaaaagcacaggggcttaccacacagattttagattagc

SEQ ID NO: 421868 - DNA, 75 bp, synthetic construct
  source 1..75: mol_type = other DNA
atgaggaaattaattttatgtaatatccttatcttgccaactttattctcatgtgtcgaagcagcgccagcgatt

SEQ ID NO: 421869 - DNA, 75 bp, synthetic construct
  source 1..75: mol_type = other DNA
ttggcccaacaagtaaagtgattgatcccgcttgtggaacgggaatgctattagtggcacttactatcgaagtct

SEQ ID NO: 421870 - DNA, 75 bp, synthetic construct
  source 1..75: mol_type = other DNA
gtgtggttgcggtgattatttatgtccttcaccagaacaagactaagatctctgatcgtacggtcgttaatcgta

SEQ ID NO: 421871 - DNA, 75 bp, synthetic construct
  source 1..75: mol_type = other DNA
ggcggcggtgctgctgacgatctacgggctcaagcagttggccgagcatggagcgggcctcgcctcgatggctgc

SEQ ID NO: 421872 - DNA, 75 bp, synthetic construct
  source 1..75: mol_type = other DNA
cagctcgtgctggggctgtcgccgctgcaggccgggctggccacgctgccctggtccctgtgcttcgtcatcggt

SEQ ID NO: 421873 - DNA, 75 bp, synthetic construct
  source 1..75: mol_type = other DNA
gatagagaaacctgatactacagcaactgaaagcgcgccgaaacaggacgcaacctatgaactggtccttgaggc

SEQ ID NO: 421874 - DNA, 75 bp, synthetic construct
  source 1..75: mol_type = other DNA
ggaagttcctggtgtaccattaacgagaatgagtcagtttcctgaaaatgccgacaaaatgtttcttgatatgat

SEQ ID NO: 421875 - DNA, 75 bp, synthetic construct
  source 1..75: mol_type = other DNA
tcaaacagttacgagcattattattcacttgacaaagatggaaaatcatttgtaaatgagatggcagacagagag

SEQ ID NO: 421876 - DNA, 75 bp, synthetic construct
  source 1..75: mol_type = other DNA
tataccaatgccaccaccacacaactggtcaatatcaatagcgacgactgggacgagtcgctactggcgtggagc

SEQ ID NO: 421877 - DNA, 75 bp, synthetic construct
  source 1..75: mol_type = other DNA
ctctacggatgatttcttcaccgaaaccacgccgtatgcgccgagtagtccttattccgcgtcaaaagccagcag

SEQ ID NO: 421878 - DNA, 75 bp, synthetic construct
  source 1..75: mol_type = other DNA
aaaaaactctcatatagccacacttgtagaccgaaaatcacgttatacgatcatcctcagactcaggggcaaaga

SEQ ID NO: 421879 - DNA, 75 bp, synthetic construct
  source 1..75: mol_type = other DNA
gacattgagatacagacaattgcggctaaaaataccggctaccactggaaatcgctgaatattcctgttgactgt

SEQ ID NO: 421880 - DNA, 75 bp, synthetic construct
  source 1..75: mol_type = other DNA
ccgatgacttaggggtgcttggtgttaatttggtaaatgatcaaattactgaaatggggcatatttttagagaga

SEQ ID NO: 421881 - DNA, 75 bp, synthetic construct
  source 1..75: mol_type = other DNA
tgcaacgaatagtattcaaacagataagtactctcaagaaaagcttgtgatctatttaaatcaatcaaatgcatc

SEQ ID NO: 421882 - DNA, 75 bp, synthetic construct
  source 1..75: mol_type = other DNA
agacgaggctatcgctcagggttatctcactgagtgtgcggattactggcagataacggaacatgggaagttatt

SEQ ID NO: 421883 - DNA, 75 bp, synthetic construct
  source 1..75: mol_type = other DNA
cgcgtcatccgcgtggttttatgcagggaagatatctggaaagccagcgtgatgtcgaagctgcagataagccgt

SEQ ID NO: 421884 - DNA, 75 bp, synthetic construct
  source 1..75: mol_type = other DNA
aatctcaactactggcgatttggcgactacatcggcatcggctgcggggcgcacggcaaagtcaccttcccggat

SEQ ID NO: 421885 - DNA, 75 bp, synthetic construct
  source 1..75: mol_type = other DNA
aaaacgccgtttttgcgtttcctctttgccattgagcttgagcaaatatgcccgacccagcctcatgacagcgat

SEQ ID NO: 421886 - DNA, 75 bp, synthetic construct
  source 1..75: mol_type = other DNA
ctggcgcggctgtggggggcgctgccgccggatatccggttaagcccgcatctttacctggcgaccaacagcgca

SEQ ID NO: 421887 - DNA, 75 bp, synthetic construct
  source 1..75: mol_type = other DNA
ggcgaagagcgcgagacggcgattggcttaaccaaagacaaacagggcgacagcaaagtccgtattgacggtaca

SEQ ID NO: 421888 - DNA, 75 bp, synthetic construct
  source 1..75: mol_type = other DNA
gcgtcattcgccacgagcaggaggcgtttgttctccacgggcgattacagggcgaagagcgcgagacggcgattg

SEQ ID NO: 421889 - DNA, 75 bp, synthetic construct
  source 1..75: mol_type = other DNA
ctcaatcggcctttaaccgctacatccggatccgggacgaggggaaagaatgcgtcagctgcggcaatccactca

SEQ ID NO: 421890 - DNA, 75 bp, synthetic construct
  source 1..75: mol_type = other DNA
acgcgctggatttgagggcaaagcagaaggtgaaagaggccgctaagcgtatcagtgaacagaaagaggcagaga

SEQ ID NO: 421891 - DNA, 75 bp, synthetic construct
  source 1..75: mol_type = other DNA
cgacaacacaatcagagaacacctgatgacggaggagaactggaggaaaggctgcttcgggccagagctgaactg

SEQ ID NO: 421892 - DNA, 75 bp, synthetic construct
  source 1..75: mol_type = other DNA
atggcgaagtaccaggtggcattgcgcaagtgcgataactttatcgtgcggcagtatggcggcgttgagaatcga

SEQ ID NO: 421893 - DNA, 75 bp, synthetic construct
  source 1..75: mol_type = other DNA
aaaaccgtgacggagaagccctttctcgcatgtcaggttatgagcatcagtacaccaacaatgacaacgtggtga

SEQ ID NO: 421894 - DNA, 75 bp, synthetic construct
  source 1..75: mol_type = other DNA
gcccgttgacggacttcgggggaaaaacgagtatttttagtcatcctgtttacctctttctcaggaagtttagtc

SEQ ID NO: 421895 - DNA, 75 bp, synthetic construct
  source 1..75: mol_type = other DNA
gtgtcaaaagaattacgttgcgacattatttctgtaaccagcaataccgctgtagtggttcgtgctaacaggaac

SEQ ID NO: 421896 - DNA, 75 bp, synthetic construct
  source 1..75: mol_type = other DNA
gtgcacatcggcctgccaataactgctgaattcgaaacactggatatcaacattaacggacaggaaacgctgctg

SEQ ID NO: 421897 - DNA, 75 bp, synthetic construct
  source 1..75: mol_type = other DNA
caggcaaaacaggcactttgcgcccttcgcatacagaaggcacatcatgggatggctggggcggatccggtgatg

SEQ ID NO: 421898 - DNA, 75 bp, synthetic construct
  source 1..75: mol_type = other DNA
ggtacggtcaaccgtctgccttccgcacccggtctgtttgagcaggcccgggccggcatcgatgccgcgattgaa

SEQ ID NO: 421899 - DNA, 75 bp, synthetic construct
  source 1..75: mol_type = other DNA
acatgccgcaccgtgaactggcgcgaagattaagcggcggattaacttacggtgaaattccggctgccattaaca

SEQ ID NO: 421900 - DNA, 75 bp, synthetic construct
  source 1..75: mol_type = other DNA
gattttacccaccgtcagggttgggccagagctatgctggatggccaggactggcgtgacgccgggttgcgctat

SEQ ID NO: 421901 - DNA, 75 bp, synthetic construct
  source 1..75: mol_type = other DNA
tattgaagaagctgacaagaaatacggcatcagttatcaacgactgaaagaactctcaggcattgcatcatcagt

SEQ ID NO: 421902 - DNA, 75 bp, synthetic construct
  source 1..75: mol_type = other DNA
aggtatgcgacaacgaacgctatcaacgaacgctggaaaactttggctatctcatccagcaggcgaccgtttttg

SEQ ID NO: 421903 - DNA, 75 bp, synthetic construct
  source 1..75: mol_type = other DNA
atatggtggttgatacccacgatattaatgatttcattatgaagccgttaccaaatcatttatttacgcgtgata

SEQ ID NO: 421904 - DNA, 75 bp, synthetic construct
  source 1..75: mol_type = other DNA
ccgaatcatttatttacccgcgatacctcctgctggatttataacggtgtttctattaacccgatggccaaacca

SEQ ID NO: 421905 - DNA, 75 bp, synthetic construct
  source 1..75: mol_type = other DNA
cagcaactgggataaaaacggacgcgttaaggttcgccaacttgatcctttgccgctgtcagtgcttgctgttct

SEQ ID NO: 421906 - DNA, 75 bp, synthetic construct
  source 1..75: mol_type = other DNA
cgcgcacgacaactggcagattgtcgacgtcaccaccaaaaacggaccgttcgaagatatcaacgttgacgagac

SEQ ID NO: 421907 - DNA, 75 bp, synthetic construct
  source 1..75: mol_type = other DNA
gcagcgcgttctgcattcgtgatgacggcaaactgctggtgctgacctatctgcgcgatcagcaggtgttcgcat

SEQ ID NO: 421908 - DNA, 75 bp, synthetic construct
  source 1..75: mol_type = other DNA
tggtcattctgcattgtgccgtacagcagcgctttctgcattcgggatgacggcaagttgctggtgctcacctat

SEQ ID NO: 421909 - DNA, 75 bp, synthetic construct
  source 1..75: mol_type = other DNA
cagacctatgctctggagttcgggcacaactatatgcgcgttatcaaagatggcgcttatgttctgacgaccagc

SEQ ID NO: 421910 - DNA, 75 bp, synthetic construct
  source 1..75: mol_type = other DNA
aacgcaagtcggggcatatgggcaacaactccgggcggaacttggtatgaatatccgcagcgggaatttgagttc

SEQ ID NO: 421911 - DNA, 75 bp, synthetic construct
  source 1..75: mol_type = other DNA
ccgtttcagaaatggcagcgtcaggaggtatgcgataacgaacgctatcaacgaacgctggaaaactttggttat

SEQ ID NO: 421912 - DNA, 75 bp, synthetic construct
  source 1..75: mol_type = other DNA
agcaacaggtccggcagtctggtggtggcaaaaccgcccacgacctgctgcacgagaaaagtgaccgcgagtccg

SEQ ID NO: 421913 - DNA, 75 bp, synthetic construct
  source 1..75: mol_type = other DNA
atgctggccggtacggtcaaccgtctgccttccgcacccggtctgtttgagcaggcccgggccggcatcgatgcc

SEQ ID NO: 421914 - DNA, 75 bp, synthetic construct
  source 1..75: mol_type = other DNA
acaacagcgcagcgccatcgatacggtggtgatgcaggagattgtccgtcagaccccggcgctgcgcccggcaat

SEQ ID NO: 421915 - DNA, 75 bp, synthetic construct
  source 1..75: mol_type = other DNA
ccatgatacgtcccgtgaccttgatccacagttgcatacccacgctctggtctttaacgccacgtttgctgatga

SEQ ID NO: 421916 - DNA, 75 bp, synthetic construct
  source 1..75: mol_type = other DNA
agaagccgcactgcgactggcgcaggagaatccggagagtggggtggtgatacgcctgcacggcgaagagcgcct

SEQ ID NO: 421917 - DNA, 75 bp, synthetic construct
  source 1..75: mol_type = other DNA
aggtgtatctcagcgaaattgccctgctgtcagaagcggtaaaatccggccagccgctggctgatgtccggacag

SEQ ID NO: 421918 - DNA, 75 bp, synthetic construct
  source 1..75: mol_type = other DNA
cagtggcgatgacgctatttatttgctgcacggcttatcgaggtttgtgccgcactttatcgccctttctgccgc

SEQ ID NO: 421919 - DNA, 75 bp, synthetic construct
  source 1..75: mol_type = other DNA
actggcgatcgtcgaccactaacggaagacaccttgcgattgctggaaaaaatcgccccttccgcacataaaatt

SEQ ID NO: 421920 - DNA, 75 bp, synthetic construct
  source 1..75: mol_type = other DNA
acgcccgtttaaacatcaggagaaagattacctgctgtataaattcaaccgtttccaggcctgccgctatgggct

SEQ ID NO: 421921 - DNA, 75 bp, synthetic construct
  source 1..75: mol_type = other DNA
gagcaggccaggcgtgagctgttgtcggtggcaccggagaaagatgaagacaaacgtgacccgctgttatctgcc

SEQ ID NO: 421922 - DNA, 75 bp, synthetic construct
  source 1..75: mol_type = other DNA
tcattgctgatgatgcacagacggcgctgcgcctggcacaggagaacccggagagtggggtggtgatacgcctgc

SEQ ID NO: 421923 - DNA, 75 bp, synthetic construct
  source 1..75: mol_type = other DNA
ttccgcgtgtggcgtatgagatggaaaagagcatcatccgccatattgccgagggtaaggatgccgtgcagcccc

SEQ ID NO: 421924 - DNA, 75 bp, synthetic construct
  source 1..75: mol_type = other DNA
ggtgaccattccggaagaaaaaggcagtttccttaaattttgccagctactcggtgggcgctcggtcacagagtt

SEQ ID NO: 421925 - DNA, 75 bp, synthetic construct
  source 1..75: mol_type = other DNA
tacgaagcggcgcaggtcacgccgctacaaaaaatggaaaagctctcgtctcgtcttgataacgtgattctggtg

SEQ ID NO: 421926 - DNA, 75 bp, synthetic construct
  source 1..75: mol_type = other DNA
ttcacctgggtgccgccgttcgaccatccgatggtgatcgccgggcagggtacgctggcgctggaactgctccag

SEQ ID NO: 421927 - DNA, 75 bp, synthetic construct
  source 1..75: mol_type = other DNA
aagtgatcgccgtagaagcggaagattccgcctgcctgaaagcggcgctggatgcgggtcatccggttgatctgc

SEQ ID NO: 421928 - DNA, 75 bp, synthetic construct
  source 1..75: mol_type = other DNA
ccacggtaccgactacgggcgcgtactggcggcgttcgagcttggcgaccatgaaccggatttcgaaacccggct

SEQ ID NO: 421929 - DNA, 75 bp, synthetic construct
  source 1..75: mol_type = other DNA
atgatggctgactcacaacccctgtccggtactccggaaggtgccgaatatttaagagcggtactacgcgcaccg

SEQ ID NO: 421930 - DNA, 75 bp, synthetic construct
  source 1..75: mol_type = other DNA
tgcggtaaaacgcatcggcgatgaaaccttccgtttgtgccaggagtatctcgacgacatcatcaccgtcgatag

SEQ ID NO: 421931 - DNA, 75 bp, synthetic construct
  source 1..75: mol_type = other DNA
tgaagatgaaatgggtctgcgcatggcagaaacaccggagtcggtgattgcccgcacccgcaaagaaaacgacct

SEQ ID NO: 421932 - DNA, 75 bp, synthetic construct
  source 1..75: mol_type = other DNA
gatgatgttccggaagaagagaagaagcagcgtctgtatattctgcaagagcgcattaatcagcaagcgatggcg

SEQ ID NO: 421933 - DNA, 75 bp, synthetic construct
  source 1..75: mol_type = other DNA
gggcgtcgcgttttcttctgcgcggttaggtgtgaaggcgctgatcgtcatgccaaccgctaccgctgacatcaa

SEQ ID NO: 421934 - DNA, 75 bp, synthetic construct
  source 1..75: mol_type = other DNA
agcggtaaaacgcatcggcgatgaaaccttccgtttatgccaggagtatcttgacgacatcatcaccgtcgatag

SEQ ID NO: 421935 - DNA, 75 bp, synthetic construct
  source 1..75: mol_type = other DNA
gtggcggtgctgatcaaacaactgatgccgcaaatcaaagtgatcgccgtagaagcggaagactccgcctgcctg

SEQ ID NO: 421936 - DNA, 75 bp, synthetic construct
  source 1..75: mol_type = other DNA
accgcctgccggagatgatcaactctgtgcgcggcgaccgcagcccggttgtagatatcagcttcccggaaattg

SEQ ID NO: 421937 - DNA, 75 bp, synthetic construct
  source 1..75: mol_type = other DNA
gcatacacatagtattagcgggacagcaaatagtgcaggtgggcaccaacaccagagttctggaccatatgcgca

SEQ ID NO: 421938 - DNA, 75 bp, synthetic construct
  source 1..75: mol_type = other DNA
gccagcgatccagtacggatttgggacgaaaaccacatcgtcgtttgattacggcactaaatccacgaataacac

SEQ ID NO: 421939 - DNA, 75 bp, synthetic construct
  source 1..75: mol_type = other DNA
cacccgctctggcgacagctatattctggttaacttctataccggagtcggaagttgccggaccttgcagatgaa

SEQ ID NO: 421940 - DNA, 75 bp, synthetic construct
  source 1..75: mol_type = other DNA
acggcattaaatcgcacacccacagcgccagcgtatccagtacggatttgggtacgaaaaccacatcgtcgtttg

SEQ ID NO: 421941 - DNA, 75 bp, synthetic construct
  source 1..75: mol_type = other DNA
tgaagccactgaacaggccagcgcagcagcgaggtctgcttctgccgcgaagacatctgaaacaaacgcgaaagc

SEQ ID NO: 421942 - DNA, 75 bp, synthetic construct
  source 1..75: mol_type = other DNA
cctgatgcaggggcagacttttgacaaatctgcatacccgaaacttgcagccgcttatccgtcaggcgtgatccc

SEQ ID NO: 421943 - DNA, 75 bp, synthetic construct
  source 1..75: mol_type = other DNA
ggaagcggcggcgcgtagtgcggaggtggcggaggcaaaggcagcgaatgcccgggggccaaagggagataaggg

SEQ ID NO: 421944 - DNA, 75 bp, synthetic construct
  source 1..75: mol_type = other DNA
tgagtttcctgcacctgccggtacagagcggttccgatcgcatcctcaacctgatgggccgtacccacacggcgc

SEQ ID NO: 421945 - DNA, 75 bp, synthetic construct
  source 1..75: mol_type = other DNA
actgcgtgcggcgcgtccggatattcagatcagttctgacttcatcgttggcttccctggtgaaaccaccgaaga

SEQ ID NO: 421946 - DNA, 75 bp, synthetic construct
  source 1..75: mol_type = other DNA
tatcagtggctcattaaccagtggcacctcccaatgggtaggtaaatcatcttcagaaggaaaccatacacactc

SEQ ID NO: 421947 - DNA, 75 bp, synthetic construct
  source 1..75: mol_type = other DNA
caaaacgggcagaggatattgcatccgccgtggcgcttgaggatgcaagtacgacgaaaaaggggatagtacagc

SEQ ID NO: 421948 - DNA, 75 bp, synthetic construct
  source 1..75: mol_type = other DNA
ggaagcagcggcgcgcagtgcggaggcggcggaggcaaaggcggcgaatgcccgggggccaaagggagataaggg

SEQ ID NO: 421949 - DNA, 75 bp, synthetic construct
  source 1..75: mol_type = other DNA
cactgccagcatcaacagcagcagcctgagccggaccgtgacgtttatcgccgatgtcaggacggcgcagatagc

SEQ ID NO: 421950 - DNA, 75 bp, synthetic construct
  source 1..75: mol_type = other DNA
tcggcatccagttaatgacgctggatgaactcaacaatgtggatgatttccgtcaggtcgtcaggtcgtcagcac

SEQ ID NO: 421951 - DNA, 75 bp, synthetic construct
  source 1..75: mol_type = other DNA
gcgctggcagccaatatcaccaatgaaggcggggcggaaggtcgctatcgggtgctgaaaaatattatgggctta

SEQ ID NO: 421952 - DNA, 75 bp, synthetic construct
  source 1..75: mol_type = other DNA
gcttatcgccgcaacacaggcacttccggcctgccgcttcatcatcaatcccaatgacgatcgctttattaatcc

SEQ ID NO: 421953 - DNA, 75 bp, synthetic construct
  source 1..75: mol_type = other DNA
acgaacacgagcatttttcctaatggttatactgcgatttcaaatctaagcgcggggattatgagcacaacaagc

SEQ ID NO: 421954 - DNA, 75 bp, synthetic construct
  source 1..75: mol_type = other DNA
catacccatagtattagcgggacagcaaatagtgccggtgcgcaccaacacaagagttccggtgcatttggtggc

SEQ ID NO: 421955 - DNA, 75 bp, synthetic construct
  source 1..75: mol_type = other DNA
attggacggctgggatttatggaattaatgttgacagtaatggagaagtaacattatctgtgctgataagaagtg

SEQ ID NO: 421956 - DNA, 75 bp, synthetic construct
  source 1..75: mol_type = other DNA
tggctatgccctgatgcaggggcagacttttgacaaatctgcatacccgaaacttgcagtggcttatccgtcagg

SEQ ID NO: 421957 - DNA, 75 bp, synthetic construct
  source 1..75: mol_type = other DNA
tccagcctatgtaattctatctttaaaggtaatgtatgtgcagtgagtgatgtagaagcatgcacgagaaaggtt

SEQ ID NO: 421958 - DNA, 75 bp, synthetic construct
  source 1..75: mol_type = other DNA
aactgacagaagaacaggccgtagctcaaaaacttaaaaatcaggtaaccgaaggtaagcttattgacgccggat

SEQ ID NO: 421959 - DNA, 75 bp, synthetic construct
  source 1..75: mol_type = other DNA
gcttatcgcgatagccgcaccaatggcctaatggcgcaggcacaacagcaactcggcaaacgcgatatttatcaa

SEQ ID NO: 421960 - DNA, 75 bp, synthetic construct
  source 1..75: mol_type = other DNA
aatgggattataccagtaatgccagcgtaacgattcatacttcaccagcatattctgctaataagccggaaggat

SEQ ID NO: 421961 - DNA, 75 bp, synthetic construct
  source 1..75: mol_type = other DNA
aatggtgtatcagccggttataacgctgcgttaggtactggtaccacgtcgagcgcaggagggcatgctcacaat

SEQ ID NO: 421962 - DNA, 75 bp, synthetic construct
  source 1..75: mol_type = other DNA
cgtggagaaaatttccacgcgtaaccaggctgtagtgtatcagggattgcaagcttacagccgtgaccagcaacc

SEQ ID NO: 421963 - DNA, 75 bp, synthetic construct
  source 1..75: mol_type = other DNA
tcttcgttcgccgctggtggcggaaagtattcgttgttatcaaagcgggcaacgctatccgctggagatgattgg

SEQ ID NO: 421964 - DNA, 75 bp, synthetic construct
  source 1..75: mol_type = other DNA
cgtggactacggaaaattttgctcgcccgccacgcgttgttcgatgaagtggcctctgccagcctcgcaccgatc

SEQ ID NO: 421965 - DNA, 75 bp, synthetic construct
  source 1..75: mol_type = other DNA
tgctggcgcgcatacccactcactgtccggcactgctgcaagcgcaggtgcacacgcacatactgtcggtattgg

SEQ ID NO: 421966 - DNA, 75 bp, synthetic construct
  source 1..75: mol_type = other DNA
cgcactctctgacagtctgacggcatatcagcgcgatcaccgggccgtcattattgtggcgccggccgttgtggg

SEQ ID NO: 421967 - DNA, 75 bp, synthetic construct
  source 1..75: mol_type = other DNA
tcacgtctctgctgattagctggcgtacaccgacggttgtgtcttttgatatgaagggcacggtcgatcagttca

SEQ ID NO: 421968 - DNA, 75 bp, synthetic construct
  source 1..75: mol_type = other DNA
gcgcgcaaccgcaatatttcatccgtatgcatcagtggattgcgccggataagacgccatttttgcgcttcctgt

SEQ ID NO: 421969 - DNA, 75 bp, synthetic construct
  source 1..75: mol_type = other DNA
ttaagggcaaacctgccagtggtcgggccgtattgtctcaggaacaggacggcattaaatcgcacacccacagcg

SEQ ID NO: 421970 - DNA, 75 bp, synthetic construct
  source 1..75: mol_type = other DNA
cgagctggcatcaagagtaattattactacggcaacacgaaccgcaaacgatccgatgaataactgcgagtttaa

SEQ ID NO: 421971 - DNA, 75 bp, synthetic construct
  source 1..75: mol_type = other DNA
gcgcggtttataccacctacaacaccattgaagcattaaaagatcgcctgattgttcgccagttgccaacccaac

SEQ ID NO: 421972 - DNA, 75 bp, synthetic construct
  source 1..75: mol_type = other DNA
cagcaacgcgcgctgagacagcggcaaaacgggcagaggatattgcatccgccgtggcgcttgaggatgcgagca

SEQ ID NO: 421973 - DNA, 75 bp, synthetic construct
  source 1..75: mol_type = other DNA
aacgtgacgtttgttgccgatgtcaggacggcgcagatcgctgatctggtggtcattaaggacggctcagtggct

SEQ ID NO: 421974 - DNA, 75 bp, synthetic construct
  source 1..75: mol_type = other DNA
acgaacgcatcctcgagcgccagtagtgccgcttcctcggcaacggcggcaggaaattccgcgaaggcggcaaaa

SEQ ID NO: 421975 - DNA, 75 bp, synthetic construct
  source 1..75: mol_type = other DNA
acaaccagtcatcactgaaaggggactttaccgatagtgctgagctacatcttgttctgcacgatatatcaggca

SEQ ID NO: 421976 - DNA, 75 bp, synthetic construct
  source 1..75: mol_type = other DNA
ggaaaaactacacgactctccagggcagtagtaccacaacaacccctgccgttatcacgacaaccatgctgaaaa

SEQ ID NO: 421977 - DNA, 75 bp, synthetic construct
  source 1..75: mol_type = other DNA
gtcaccatccgcgcccggagtgcagattttcgcgggacgctcaattcccgccgggaaggctcctggcatgacacc

SEQ ID NO: 421978 - DNA, 75 bp, synthetic construct
  source 1..75: mol_type = other DNA
aaagagaaacacctgcgcgcactggagcacccgaaagcgaaaccggtcacgcagaagaaagcgccaaaagcaccg

SEQ ID NO: 421979 - DNA, 75 bp, synthetic construct
  source 1..75: mol_type = other DNA
taccgtcagcccggataatggttttacgaccagtattgaactcgaagtgaagattgatgatcttgaaatggaata

SEQ ID NO: 421980 - DNA, 75 bp, synthetic construct
  source 1..75: mol_type = other DNA
attttcgtgaaacgctgaatacccgccgtgaaaagtcgtggcacaagaccaccgtcggggaagtagtgaaggaaa

SEQ ID NO: 421981 - DNA, 75 bp, synthetic construct
  source 1..75: mol_type = other DNA
atccgcgacgatccccatgccctgcgcgccgcatttattgaagccgacagccaggcggatgtggtgatcagttcc

SEQ ID NO: 421982 - DNA, 75 bp, synthetic construct
  source 1..75: mol_type = other DNA
ggcggtgtttcagtgggtgaagcggattacaccaaaacgattcttgaagagctgggggagatcgccttctggaag

SEQ ID NO: 421983 - DNA, 75 bp, synthetic construct
  source 1..75: mol_type = other DNA
cgctcgacgccgcgcttggcgagatactttctcgcgttgtccctctgactgcacaggaaacactgccgctggtac

SEQ ID NO: 421984 - DNA, 75 bp, synthetic construct
  source 1..75: mol_type = other DNA
tcctttagcctcggtaactgctttatcgtgctggagcgcgatcgcggcaatgttgaagcgggcgaatgggtggaa

SEQ ID NO: 421985 - DNA, 75 bp, synthetic construct
  source 1..75: mol_type = other DNA
tcctttagcctcggcaactgctttatcgtactggagcgcgagcgcggcaatgtggaagtgggcgaatgggtggaa

SEQ ID NO: 421986 - DNA, 75 bp, synthetic construct
  source 1..75: mol_type = other DNA
ttggttctgcggcctgccaggtaatccagtttcagcgacgctgacgttctatcaactggtgcaaccgttgctggc

SEQ ID NO: 421987 - DNA, 75 bp, synthetic construct
  source 1..75: mol_type = other DNA
cgcaggagtctgatgcgaaattcctgacccgccttgcagaacgcaacggcggtgaggtgtcggtaaaaatgggaa

SEQ ID NO: 421988 - DNA, 75 bp, synthetic construct
  source 1..75: mol_type = other DNA
acgcaacggcggtgaggtgtcggtaaaaatgggaaaactgttgtttctcaaagcggggcagggggtgacggccag

SEQ ID NO: 421989 - DNA, 75 bp, synthetic construct
  source 1..75: mol_type = other DNA
attaccggcaatatcagcgaccgtctgatgagcatgactctgacggataaccggggctttgaggctgaccagctt

SEQ ID NO: 421990 - DNA, 75 bp, synthetic construct
  source 1..75: mol_type = other DNA
tggcagaagggcgggcagatctctacacggaaatgtctgtgaaggtcagtggttttaaacagccgatagatgatg

SEQ ID NO: 421991 - DNA, 75 bp, synthetic construct
  source 1..75: mol_type = other DNA
gcgcaggccatgcgcgccgctcaggcgaagtgggataaactgcaacggggtgtggcggagttctccatcagtctg

SEQ ID NO: 421992 - DNA, 75 bp, synthetic construct
  source 1..75: mol_type = other DNA
attttcgtgaaacgctgaatacccgccgtgaaaagtcgtggcacaagaccaccgtcgggaaagtggtgaaggaaa

SEQ ID NO: 421993 - DNA, 75 bp, synthetic construct
  source 1..75: mol_type = other DNA
tgaacaccggggcgcgcccgacaccctgaccattcgcgcacgtagcgcagactttcgcggaacgctcaattcacg

SEQ ID NO: 421994 - DNA, 75 bp, synthetic construct
  source 1..75: mol_type = other DNA
aaatggccgtgccagccactgtttaaccttttgtggtgaaccgctacaacaagcgcaagtactttacgcgctgtg

SEQ ID NO: 421995 - DNA, 75 bp, synthetic construct
  source 1..75: mol_type = other DNA
tcgccctgctctctcaggcgctggaaaatggccgtgagaaccattgtttaaccttttgtggcgaaccgctacaac

SEQ ID NO: 421996 - DNA, 75 bp, synthetic construct
  source 1..75: mol_type = other DNA
gaagtgccgaaagggtccttctatcactactttcgctctaaagaagcgtttggcgttgccatgcttgagcgccat

SEQ ID NO: 421997 - DNA, 75 bp, synthetic construct
  source 1..75: mol_type = other DNA
ggcgttgcgtcattttctctacaactggcagaagggcgggcagatctctacacggaaatgtctgtgaaggtcagt

SEQ ID NO: 421998 - DNA, 75 bp, synthetic construct
  source 1..75: mol_type = other DNA
tggaaggggcagccgcttttcccgaaaggggcattcacggtggatgaaattgaacacactggtgcaccggaccgc

SEQ ID NO: 421999 - DNA, 75 bp, synthetic construct
  source 1..75: mol_type = other DNA
aacgctgaaccagttctgccagcatgggacgatcagcggctgtctgacagtaaaactttctgctgaagtgtgcga

SEQ ID NO: 422000 - DNA, 75 bp, synthetic construct
  source 1..75: mol_type = other DNA
cgttgccggtaaatcctttgccggtcagccgtaccatggtgaatggcctgcgggtacctgcattcgtattatgac

SEQ ID NO: 422001 - DNA, 75 bp, synthetic construct
  source 1..75: mol_type = other DNA
ccggggctttgaagcagaccagcttgatctggaactggacgacgccgacagaaaaatcgcgctgccgcgccgtgg

SEQ ID NO: 422002 - DNA, 75 bp, synthetic construct
  source 1..75: mol_type = other DNA
gtgctttttgtcactttggcctttcttttcatggaagtggcctgcgataccagtatcctttattgcaatttgctt

SEQ ID NO: 422003 - DNA, 75 bp, synthetic construct
  source 1..75: mol_type = other DNA
gatgagatcagctcgttcactaacaccacttttgctgctgccggtacgccgaatgctaacggtaaaaactggctt

SEQ ID NO: 422004 - DNA, 75 bp, synthetic construct
  source 1..75: mol_type = other DNA
attgagctcgatgattctgacgggcttgtcgcgctgccgattcgcggcgcggtgctgtcactgtatctcggctgg

SEQ ID NO: 422005 - DNA, 75 bp, synthetic construct
  source 1..75: mol_type = other DNA
tatgatcccaattatgggggggtatgcgtgcaaatttttgaaggcatcattcgtttttatttgtttgttcattct

SEQ ID NO: 422006 - DNA, 75 bp, synthetic construct
  source 1..75: mol_type = other DNA
aagcgaagcagggcgattacctggtggggacggatgaaaacgtgctggtacttaatcgcacctatgctaatcgga

SEQ ID NO: 422007 - DNA, 75 bp, synthetic construct
  source 1..75: mol_type = other DNA
aaaagtgacgctgaaacgtaagccaaaagagaagcacctgcgcgcactggagcatccgaaagcaaagccggtcag

SEQ ID NO: 422008 - DNA, 75 bp, synthetic construct
  source 1..75: mol_type = other DNA
ctgaccatccgggcgcgtagtgcagactttcgcggaacgctcaattcacggcgtgaagaatcatggcacgacacc

SEQ ID NO: 422009 - DNA, 75 bp, synthetic construct
  source 1..75: mol_type = other DNA
atgataacggggatggcaattgacgccggtgccagccttgtaccggcttttatgctgacgctgaacagtcaggac

SEQ ID NO: 422010 - DNA, 75 bp, synthetic construct
  source 1..75: mol_type = other DNA
tcgtggacaattactaaggttatgcactctctgagcaataatggattcacgacgagcctagagcttgaggtgagg

SEQ ID NO: 422011 - DNA, 75 bp, synthetic construct
  source 1..75: mol_type = other DNA
aaggcactggatcatctggaccagaccaatgaaagcgatgcaagttttctgatgaaactggcgagacagtatggg

SEQ ID NO: 422012 - DNA, 75 bp, synthetic construct
  source 1..75: mol_type = other DNA
ggaaagttgagttacccctgcgcggggcagtgctgacgctgtggcttggctggcagggctcggcgttgctgaata

SEQ ID NO: 422013 - DNA, 75 bp, synthetic construct
  source 1..75: mol_type = other DNA
ccaacaagcgccagtatattgccgtgatgcctggtgagtatcagggaacggtatatgtccctgccgctccgggtg

SEQ ID NO: 422014 - DNA, 75 bp, synthetic construct
  source 1..75: mol_type = other DNA
ttattcctgtttgctctcttgatctgcggtattccttgtatggcagtgaagagcctacagtatcaggcgaatatg

SEQ ID NO: 422015 - DNA, 75 bp, synthetic construct
  source 1..75: mol_type = other DNA
tgatgctggcagtgagtttgtattacaatattacccgcagattatggcttcttatttcctgtattttgtcgcgat

SEQ ID NO: 422016 - DNA, 75 bp, synthetic construct
  source 1..75: mol_type = other DNA
cactcaaggggcaaccatttagttataagggaacaggtggtgccatttttgttagcatgttacttattgtggtgg

SEQ ID NO: 422017 - DNA, 75 bp, synthetic construct
  source 1..75: mol_type = other DNA
gctcccgcaaaaatcagcttgaggtgatgcgcgaacaagacgcgccgattaccgccgatcaactgctggcacctt

SEQ ID NO: 422018 - DNA, 75 bp, synthetic construct
  source 1..75: mol_type = other DNA
atgtcgcaaactttaaaacaattagccatggcgaaaatggctggctttcgccataagacggtcgttgtccctgag

SEQ ID NO: 422019 - DNA, 75 bp, synthetic construct
  source 1..75: mol_type = other DNA
caaatggaacaattcatttccattcgtctgttaccaccttcggtatgcttctgcgcatgtttgcgatattaatgg

SEQ ID NO: 422020 - DNA, 75 bp, synthetic construct
  source 1..75: mol_type = other DNA
cgaagtgggataagctgcaacggggcgttgcggagttctctatcagtctggctactggtcgggcagatatttaca

SEQ ID NO: 422021 - DNA, 75 bp, synthetic construct
  source 1..75: mol_type = other DNA
cagaacaccttctttgtcaccaacagcggtgtgcagaaccgtctggaaacgaatcgtcagccgcgtacgctggtg

SEQ ID NO: 422022 - DNA, 75 bp, synthetic construct
  source 1..75: mol_type = other DNA
tgtgggaatacaataaccgcggcgtgggtagtaaagtggttgcagaggcgaaagaagtaagagctattaactatt

SEQ ID NO: 422023 - DNA, 75 bp, synthetic construct
  source 1..75: mol_type = other DNA
agcttgagggcatcgctcaaccaaaaatcgagcttaacagtcgctggaaagattctcgcggagaaaaaattactg

SEQ ID NO: 422024 - DNA, 75 bp, synthetic construct
  source 1..75: mol_type = other DNA
catgagtgtattttttctgagtaccggttccgaaaagaatttatttatctccctgaggaaagcagggagtggcag

SEQ ID NO: 422025 - DNA, 75 bp, synthetic construct
  source 1..75: mol_type = other DNA
cttgctgaacgcatcggtgttactgccgcagcccgtgaactcagcctgtatgaatcacaactctacaactggcgc

SEQ ID NO: 422026 - DNA, 75 bp, synthetic construct
  source 1..75: mol_type = other DNA
tgtttttcatatttttacgaatatatcaggatgcgataggcaaagatcatttctacctgagctgtaaaaaggcaa

SEQ ID NO: 422027 - DNA, 75 bp, synthetic construct
  source 1..75: mol_type = other DNA
agatacaggtaaaagctacttcgccaatatcgtgcatacacaagaggtcgataaagaagagttcattaaactcta

SEQ ID NO: 422028 - DNA, 75 bp, synthetic construct
  source 1..75: mol_type = other DNA
gagaaacggcaggagggtatgccgcagggcggcccgctgtcgccgttactgtcgaacatcctgctggatgaactg

SEQ ID NO: 422029 - DNA, 75 bp, synthetic construct
  source 1..75: mol_type = other DNA
aatgtttgccgctgttcagacattattgacacctgttattgatgaactcaataaggctatggcaattcacgagaa

SEQ ID NO: 422030 - DNA, 75 bp, synthetic construct
  source 1..75: mol_type = other DNA
ttaacgccagtaattaacgaattaaatacagtgatggcaattcacgagaataataaagcgcatcacaccggagaa

SEQ ID NO: 422031 - DNA, 75 bp, synthetic construct
  source 1..75: mol_type = other DNA
ttattcattctgaaaacgcattaattaaagcgcgcgaaatgaatgcgttgttaattaaattaattgaagcaacgg

SEQ ID NO: 422032 - DNA, 75 bp, synthetic construct
  source 1..75: mol_type = other DNA
ctgaaaaagacttaattgaatcatcaatgtgtcttagtaatgatgacatactgaaatacagggccagtaatttta

SEQ ID NO: 422033 - DNA, 75 bp, synthetic construct
  source 1..75: mol_type = other DNA
ctgtatgtaattgcccatggaaatactgctgttattggtgatggtgttcgtggaactaaaaaattagaaccaaaa

SEQ ID NO: 422034 - DNA, 75 bp, synthetic construct
  source 1..75: mol_type = other DNA
tgtgcggcttttttcctgttattcaggtgtatccaataaatttgcatcatatgcatatcgtctaaagtgtgagtt

SEQ ID NO: 422035 - DNA, 75 bp, synthetic construct
  source 1..75: mol_type = other DNA
ggcattgatcgacggaaactaccagccgcgggcaatacgcagaatggacatcccgaagccggacggtggcgtgag

SEQ ID NO: 422036 - DNA, 75 bp, synthetic construct
  source 1..75: mol_type = other DNA
gtggacaggcttatccagcaggcgatagcgcagcagttaagcgccatcgtggacaaaagcttctcagactccagc

SEQ ID NO: 422037 - DNA, 75 bp, synthetic construct
  source 1..75: mol_type = other DNA
gggtcacgccatatgaatcaggcgataaagaatgcgtggttcagcaggcagggtctgatatcactgctggaacag

SEQ ID NO: 422038 - DNA, 75 bp, synthetic construct
  source 1..75: mol_type = other DNA
ggctgaaatttagtattggattttgcatttttacgctggtgtttttgctgatactgcgcaaagacttctcccaca

SEQ ID NO: 422039 - DNA, 75 bp, synthetic construct
  source 1..75: mol_type = other DNA
cctggactataacacatcgtggttaacagcatgtcgtcgggcaggaattgaaaatttccgttttcatgacctccg

SEQ ID NO: 422040 - DNA, 75 bp, synthetic construct
  source 1..75: mol_type = other DNA
ctccacatgccagtggtttaaatcaaaccttgcagcactataactctattgctgagacttttagtttgtctgtgt

SEQ ID NO: 422041 - DNA, 75 bp, synthetic construct
  source 1..75: mol_type = other DNA
gcaccggcaccgctggctgcaggtaacctggcatctgataccaataaagaattacttaatacacctgaagcttta

SEQ ID NO: 422042 - DNA, 75 bp, synthetic construct
  source 1..75: mol_type = other DNA
aataaggattaaggatatatcggaggcaatgatctactcagttatcagcaaagcgtataaccgaaaaacaaagga

SEQ ID NO: 422043 - DNA, 75 bp, synthetic construct
  source 1..75: mol_type = other DNA
ttggtcatccgtttaccgcgattctggttgcttgtctggtagcgatttatggcctggcaatgcgtcagggcatgc

SEQ ID NO: 422044 - DNA, 75 bp, synthetic construct
  source 1..75: mol_type = other DNA
ttaacgccagtaattaacgaattaaatacggtgatggcaattcacgagaataataaaacgcatcacaccggagaa

SEQ ID NO: 422045 - DNA, 75 bp, synthetic construct
  source 1..75: mol_type = other DNA
ttctgcaactgaatcaacgcggacaaaatgtcactgttatcagtaatttgccagaagatgatattaaacaacttg

SEQ ID NO: 422046 - DNA, 75 bp, synthetic construct
  source 1..75: mol_type = other DNA
cacctgcttcgtgctggcagctgcagtgcgcatcattcaggggtctgccaccgttgcctgtttaacggcggtggg

SEQ ID NO: 422047 - DNA, 75 bp, synthetic construct
  source 1..75: mol_type = other DNA
ggcaagatcttacatgaaaccggcgcagtcgatcagattgccgtcaaaatgctcaaatccttcggtcacagccgc

SEQ ID NO: 422048 - DNA, 75 bp, synthetic construct
  source 1..75: mol_type = other DNA
cacctgcttcgtgctggcagctgcagtgcgcatcattcagggttctgccaccgtagcctgtttaacggcggtagg

SEQ ID NO: 422049 - DNA, 75 bp, synthetic construct
  source 1..75: mol_type = other DNA
tgcggcaattaacgaacgcgttctggtgacgacgttgaccaagcgaatggcggaagatctaacggaatatctgga

SEQ ID NO: 422050 - DNA, 75 bp, synthetic construct
  source 1..75: mol_type = other DNA
cgcaggcttgctggcgaaaaaagccgtaactctgggcctcaagcggcaaccgtgggtcaaagcgtcgctggcacc

SEQ ID NO: 422051 - DNA, 75 bp, synthetic construct
  source 1..75: mol_type = other DNA
gtctcggcggcgataccgcgaaggtgaacccgctctcacccgtcgatctggtgattgaccactcggtgaccgtcg

SEQ ID NO: 422052 - DNA, 75 bp, synthetic construct
  source 1..75: mol_type = other DNA
ttccatgcttatcccggatgttgtgggctttaaacttaccggaaaattacgtgaaggtatcaccgccacagacct

SEQ ID NO: 422053 - DNA, 75 bp, synthetic construct
  source 1..75: mol_type = other DNA
gatttcaggttgtaaagaagaaaataaaacgaatgtctccattgagtttatgcattcttcggtggaacaggaacg

SEQ ID NO: 422054 - DNA, 75 bp, synthetic construct
  source 1..75: mol_type = other DNA
agtggcagagcgcggcggtcccggattcacgccatttatcacgttcagcagcaacggacagccctttgctgtgac

SEQ ID NO: 422055 - DNA, 75 bp, synthetic construct
  source 1..75: mol_type = other DNA
ggtggctgagcgtggtggtcccggattcacaccatttattaccttcagcagtaacggacagcctttcgccgtaaa

SEQ ID NO: 422056 - DNA, 75 bp, synthetic construct
  source 1..75: mol_type = other DNA
atcgctttggcgatgatgaagcattcgaggagaacgttcgcctggaaatggagcgtaatcacgagcgttatgtct

SEQ ID NO: 422057 - DNA, 75 bp, synthetic construct
  source 1..75: mol_type = other DNA
gatcgtaaaggcgatccggtatatctgaaagatatctggccatcggcacaagaaattgcccgtgcggtagaacaa

SEQ ID NO: 422058 - DNA, 75 bp, synthetic construct
  source 1..75: mol_type = other DNA
ggattcactaccgctggcggatcgcgccaccattgccaatatgtcgccagaatatggtgccacctgtggcttctt

SEQ ID NO: 422059 - DNA, 75 bp, synthetic construct
  source 1..75: mol_type = other DNA
ggtgggatcgaagcagaagccgcaatgttaggccagccggtttccatgcttatcccggacgtagtgggctttaaa

SEQ ID NO: 422060 - DNA, 75 bp, synthetic construct
  source 1..75: mol_type = other DNA
gtcactggcacccggctcaaaagttgtttctgactatctggcaaaagccaaactgacaccgtatcttgatgagct

SEQ ID NO: 422061 - DNA, 75 bp, synthetic construct
  source 1..75: mol_type = other DNA
gattaacggtcttggcgtgctgggatggggcgttggcgggatcgaggcggaagcagcgatgttaggccagccgat

SEQ ID NO: 422062 - DNA, 75 bp, synthetic construct
  source 1..75: mol_type = other DNA
tgtggttcagcgctctcccttaagacgaggcatggcaacatactggtttctgaaaggagagaggcaggcggggca

SEQ ID NO: 422063 - DNA, 75 bp, synthetic construct
  source 1..75: mol_type = other DNA
atcttctatcggagattcgtcagcgagcggcaattaacgaacgcgtactggtcaccacactgaccaagcgaatgg

SEQ ID NO: 422064 - DNA, 75 bp, synthetic construct
  source 1..75: mol_type = other DNA
attctctacggcgataagatcactccatcaatggcgaaagcgattggcgaaaccgaacgtcgccgtgagaaacag

SEQ ID NO: 422065 - DNA, 75 bp, synthetic construct
  source 1..75: mol_type = other DNA
gatatcttcccggcagaatcggatgacattgcacttcgcgtggagctgtttgacgaggaagtggaacgattgtcg

SEQ ID NO: 422066 - DNA, 75 bp, synthetic construct
  source 1..75: mol_type = other DNA
ccgctgaaatttgaggagtttgaagcgctggctccgcaaacgatttatgtttctgcgacgccaggtaactacgaa

SEQ ID NO: 422067 - DNA, 75 bp, synthetic construct
  source 1..75: mol_type = other DNA
cagaagtacaacgaagagcatggcattacaccacaagggctgaacaagaaagtggtcgatatcctggcgctgggg

SEQ ID NO: 422068 - DNA, 75 bp, synthetic construct
  source 1..75: mol_type = other DNA
cctgatttatatctcaagatgatgctgcacctcacggtcggtatgattatcgatcagcgcgcgatcctgcgtcgc

SEQ ID NO: 422069 - DNA, 75 bp, synthetic construct
  source 1..75: mol_type = other DNA
cggaagatcttaccgaatatctcgaagaacacggtgagcgcgtgcgttatcttcactcagatatcgacaccgtcg

SEQ ID NO: 422070 - DNA, 75 bp, synthetic construct
  source 1..75: mol_type = other DNA
tgtggttcagcgctctcccttaaggcgaggcatggcaacatactggtttctgaaaggagagaggcaggcgggaca

SEQ ID NO: 422071 - DNA, 75 bp, synthetic construct
  source 1..75: mol_type = other DNA
tgtggttcagcgctctcccttaagtcgaggcatggcaacatactggtttctgaaaggagagaggcaggcgggtca

SEQ ID NO: 422072 - DNA, 75 bp, synthetic construct
  source 1..75: mol_type = other DNA
tatcgcggtgaccgggcgcgtaaagagacgctggtggagtacggtttccgcctgccatcagcgctggataaccgt

SEQ ID NO: 422073 - DNA, 75 bp, synthetic construct
  source 1..75: mol_type = other DNA
acgcggtggaatatttcgtctcctactacgactactatcagccggaagcctatgtaccgagttccgacaccttca

SEQ ID NO: 422074 - DNA, 75 bp, synthetic construct
  source 1..75: mol_type = other DNA
gtagggatcaacttactgcgcgaaggtctggatatgccggaagtttcgctggtggcgatcctcgacgctgacaaa

SEQ ID NO: 422075 - DNA, 75 bp, synthetic construct
  source 1..75: mol_type = other DNA
agaaaaattttttcactcactccggagcacaacaacctttgctggcagaaaatacacgaacggtgatatgccatc

SEQ ID NO: 422076 - DNA, 75 bp, synthetic construct
  source 1..75: mol_type = other DNA
ggccttgttaccctggacggcgtgcctgccaacaacgctgccaaaacgtgggcaacctcaacaccggacgaaatc

SEQ ID NO: 422077 - DNA, 75 bp, synthetic construct
  source 1..75: mol_type = other DNA
ccactcagaaaaatttcttcagtctctcagaagcacaaccacctttgcgggcagaaaatacacggacagttatat

SEQ ID NO: 422078 - DNA, 75 bp, synthetic construct
  source 1..75: mol_type = other DNA
gccatcaccggaaaaaatgaagctgctggctgacacgatttctgcggtttatcttgatggctacgagggcaggca

SEQ ID NO: 422079 - DNA, 75 bp, synthetic construct
  source 1..75: mol_type = other DNA
gccggagtatcagcagaaacggcacagcaacgcataaaagaattccactctgaagaattccttcagtcactgaga

SEQ ID NO: 422080 - DNA, 75 bp, synthetic construct
  source 1..75: mol_type = other DNA
aatacacgaacggtgatatgccatcaccggaaaaaatgaagctgctggctgacacgatttctgcggtttatcttg

SEQ ID NO: 422081 - DNA, 75 bp, synthetic construct
  source 1..75: mol_type = other DNA
cggctatgttcgggaacatggtttccgccacctgtgctggaaaaacggatcccgaagccgaatggcaaggagcgc

SEQ ID NO: 422082 - DNA, 75 bp, synthetic construct
  source 1..75: mol_type = other DNA
agctacaaaacgtaggatatctggcgggtgatgcgaagattcttaataacatcaatttttcgctgcgtgctggcg

SEQ ID NO: 422083 - DNA, 75 bp, synthetic construct
  source 1..75: mol_type = other DNA
gtttggcgatacggtatacgataatctgatctttccctggcagatccgtaaccagcagcctgacccggccatttt

SEQ ID NO: 422084 - DNA, 75 bp, synthetic construct
  source 1..75: mol_type = other DNA
ccactcagaaaaatttcttcagtctctcagaagcacaaccacctttgcgggcagaaaatatacgaacagtgatat

SEQ ID NO: 422085 - DNA, 75 bp, synthetic construct
  source 1..75: mol_type = other DNA
tgagagcggtacaattgtgttttgtagagactttccagaatggcaacgcctgcatcaaaaacttggcgttgacgt

SEQ ID NO: 422086 - DNA, 75 bp, synthetic construct
  source 1..75: mol_type = other DNA
ttaaccggctttaattctgcttacagaactgcatcaaccagcgacaaggtgtcaatgacttacagttggtgggct

SEQ ID NO: 422087 - DNA, 75 bp, synthetic construct
  source 1..75: mol_type = other DNA
cggcacagcaacgcataaaagaattccactcagaaaaatttcttcagtctctcagaagcacaaccacctttgcgg

SEQ ID NO: 422088 - DNA, 75 bp, synthetic construct
  source 1..75: mol_type = other DNA
gagccactgccgctggtcggtgaaggcagcgacaactacgcgggcgatgaaatggtcaccaaagtcgtgccggta

SEQ ID NO: 422089 - DNA, 75 bp, synthetic construct
  source 1..75: mol_type = other DNA
cagatctatcgcgatgagcagggcttaagcctgatgccgcacaccgcgcagccggtactgccagcgcaaaatcag

SEQ ID NO: 422090 - DNA, 75 bp, synthetic construct
  source 1..75: mol_type = other DNA
cgggagaaagcgtggcgaaagtgccgctgcttggcgatatcccattgattggtaacctgtttaaatcgacggcgg

SEQ ID NO: 422091 - DNA, 75 bp, synthetic construct
  source 1..75: mol_type = other DNA
gcaccgaatttgctgaaggagctgcaggaaaaagtttcgccagtggtacgtaaattaatcccaccttctcagacg

SEQ ID NO: 422092 - DNA, 75 bp, synthetic construct
  source 1..75: mol_type = other DNA
gtatcagcaacaaggcgttgagaaatcacgcattctgatcaagctggcttcaacctgggaaggaattcgcgcggc

SEQ ID NO: 422093 - DNA, 75 bp, synthetic construct
  source 1..75: mol_type = other DNA
acttcttgttttgggggcgagatctgtattgttgggagcagctaaaaatgatgatccggtcagtcgatgggccct

SEQ ID NO: 422094 - DNA, 75 bp, synthetic construct
  source 1..75: mol_type = other DNA
gcgacattctgccgtatatggccttccgtccaattatcaagcacccacgcctgatggaaagtagcctgtttacgc

SEQ ID NO: 422095 - DNA, 75 bp, synthetic construct
  source 1..75: mol_type = other DNA
agaaaaattttttcactcactccagagcacaacaacctttgctggcagaaaatacacaaacagcgatatgccttc

SEQ ID NO: 422096 - DNA, 75 bp, synthetic construct
  source 1..75: mol_type = other DNA
tgtgtcagcagccctcacagcctgtaccccaaaaaccagcctggaacaacatacccggcattatgtttatgcttc

SEQ ID NO: 422097 - DNA, 75 bp, synthetic construct
  source 1..75: mol_type = other DNA
cagcgcaggctcaggcaacgttgttaattacgatccctccaacgtgattatgctcaccgggcgcgcctccgtcgt

SEQ ID NO: 422098 - DNA, 75 bp, synthetic construct
  source 1..75: mol_type = other DNA
tttctcaggcaaaaccgcagaaaggctcgacggtgatcagtgaaaacggcgctaccaccataaatccggatacta

SEQ ID NO: 422099 - DNA, 75 bp, synthetic construct
  source 1..75: mol_type = other DNA
agccactttcaccgctaattttaaagataccgacctgaaatcgttcatcgaaaccgtcggcgctaaccttaataa

SEQ ID NO: 422100 - DNA, 75 bp, synthetic construct
  source 1..75: mol_type = other DNA
gaacaagaagccaagacacaacaagaagctaccgttaaagctgttcctgatcagcttccccctacagaagataat

SEQ ID NO: 422101 - DNA, 75 bp, synthetic construct
  source 1..75: mol_type = other DNA
cgggtggctttcgcgatatgtatatcaccaaaaataaccgcatgttttacgcactgttgattgctatctgtatcc

SEQ ID NO: 422102 - DNA, 75 bp, synthetic construct
  source 1..75: mol_type = other DNA
atgtggttaggagaccttgaaactgaatttatggaaaatattgctaatgacatacacttagaaaaaaccacaatt

SEQ ID NO: 422103 - DNA, 75 bp, synthetic construct
  source 1..75: mol_type = other DNA
aaattacaacaacttggcgatatcgtcgacgaaatgatggctaaacgccgccaagatgaggataaaaggaatgaa

SEQ ID NO: 422104 - DNA, 75 bp, synthetic construct
  source 1..75: mol_type = other DNA
tctgtcgctttgcgggccatctttcgcacttctacagggtcgcccaacatgcggtactttgcagccagctagtgc

SEQ ID NO: 422105 - DNA, 75 bp, synthetic construct
  source 1..75: mol_type = other DNA
tctgtcgctttgccggccatctttcgcacttctacagggtcgcccaacatgcggtcctttgcagccagctggtgc

SEQ ID NO: 422106 - DNA, 75 bp, synthetic construct
  source 1..75: mol_type = other DNA
tctgtcgctttgcaggccatctttcgcacttctacagggtcgcccaacatgcggtactttgcagccagctggtgc

SEQ ID NO: 422107 - DNA, 75 bp, synthetic construct
  source 1..75: mol_type = other DNA
acgccgcgatctcgggcttgatgatggctctttctggcctgtactggaaggtatcccggcaacagagatgttcaa

SEQ ID NO: 422108 - DNA, 75 bp, synthetic construct
  source 1..75: mol_type = other DNA
tgcgccagccgccatcttattattgctgaaattgttcacggcaaagttggcaggccgcagcgcatttaccacagt

SEQ ID NO: 422109 - DNA, 75 bp, synthetic construct
  source 1..75: mol_type = other DNA
tgcgccagccgccatctgattattgctgaaattgttcacggcaaagttggcagaccgcaacgcatataccacagt

SEQ ID NO: 422110 - DNA, 75 bp, synthetic construct
  source 1..75: mol_type = other DNA
atgcctcggcgattctggtagatcaacaattctgttaccgccaggtggttgagcaaaacgcgattgccaaaagtt

SEQ ID NO: 422111 - DNA, 75 bp, synthetic construct
  source 1..75: mol_type = other DNA
aatgcatgatgcaacagaagcatattgccaggacatccccgcgccactgaaacgccttcttcctgactataaacg

SEQ ID NO: 422112 - DNA, 75 bp, synthetic construct
  source 1..75: mol_type = other DNA
aacgtgattccactggcacctagccatgcctacgggatgtttatggaacgttttaacgagttatcggagttacac

SEQ ID NO: 422113 - DNA, 75 bp, synthetic construct
  source 1..75: mol_type = other DNA
tctgtcgctttgcgggccatctttcgcacttctacagggtcgcccaacatgcggttctttgcagccagcttgtgc

SEQ ID NO: 422114 - DNA, 75 bp, synthetic construct
  source 1..75: mol_type = other DNA
atcgccattctggcagatagcgggattcgtaacgggcttgatgtcgtgcgtatgattgcgctcggtgccgacacc

SEQ ID NO: 422115 - DNA, 75 bp, synthetic construct
  source 1..75: mol_type = other DNA
aattacgcaagattcgctggtgcaggggctgggtaaagagttgcctgcggcactggccccgatggcgaaagggaa

SEQ ID NO: 422116 - DNA, 75 bp, synthetic construct
  source 1..75: mol_type = other DNA
cttacgagggacaaattcttttccctactcaaaaatataaaatcaacattaaaaaaagacatgaggtacctgcat

SEQ ID NO: 422117 - DNA, 75 bp, synthetic construct
  source 1..75: mol_type = other DNA
gattcgctggtgcaggggctgggtaaagagttgcctgcggcactggctccgatggcgaaagggaatgcagcttaa

SEQ ID NO: 422118 - DNA, 75 bp, synthetic construct
  source 1..75: mol_type = other DNA
atgcgcgacgcggcgaagttcaggctgccaaagcggcggatgcgcatggcattccgtttactctctcgacggttt

SEQ ID NO: 422119 - DNA, 75 bp, synthetic construct
  source 1..75: mol_type = other DNA
aacgcggcaatgcgccgctacttgcaggcggtgacgcatccgcaatgggcgtgggatgtgggcctgaacggtcgt

SEQ ID NO: 422120 - DNA, 75 bp, synthetic construct
  source 1..75: mol_type = other DNA
aatgcatgatgcaacagaagcgtattgtcaggacattcccgcaccactgaaacgccttcttcctgactataaaca

SEQ ID NO: 422121 - DNA, 75 bp, synthetic construct
  source 1..75: mol_type = other DNA
tctgtcgctttgcgggccatctttcgcacttctacagggtcgcccaacatgcggtgctttgcagccagctggtgc

SEQ ID NO: 422122 - DNA, 75 bp, synthetic construct
  source 1..75: mol_type = other DNA
tctgtcgctttgcgggccatctttcgcacttctacagggtcgcccaacatgcggtcctttgcagccagctcgtgc

SEQ ID NO: 422123 - DNA, 75 bp, synthetic construct
  source 1..75: mol_type = other DNA
acgaaggagcttcctgagcatcaactcatttccgaagagctggcgcctttcactgatgtaatctgggacaagaaa

SEQ ID NO: 422124 - DNA, 75 bp, synthetic construct
  source 1..75: mol_type = other DNA
atgttggcgcacgtgacaaaatgcgcagactgatacaccgactggattcagaaatggagcgcagcggcaatagtc

SEQ ID NO: 422125 - DNA, 75 bp, synthetic construct
  source 1..75: mol_type = other DNA
ccaactctttcttaacctgcttgaagctcaaggatatgccgtcgttcctatggaaaacaatgtgttgaaagtagt

SEQ ID NO: 422126 - DNA, 75 bp, synthetic construct
  source 1..75: mol_type = other DNA
gttcagttaacggaaaccgtgatgaattaattgatacaacacaggcaaggccaattcagtattgcattaatggaa

SEQ ID NO: 422127 - DNA, 75 bp, synthetic construct
  source 1..75: mol_type = other DNA
tgttggtgcatatacgcaggcagaatgtaactcaaggtttattacaggtattcgccttggcggtctgtcatctgt

SEQ ID NO: 422128 - DNA, 75 bp, synthetic construct
  source 1..75: mol_type = other DNA
gtccagcggtggcggaattactaacgctcaattcacttatattaatcatggtgatgcttatgctcctggctggcg

SEQ ID NO: 422129 - DNA, 75 bp, synthetic construct
  source 1..75: mol_type = other DNA
gataccgcgacgaaattgaaaacagccagaaacattaatggcgtcaggttcgatggttcggctgacattaatatc

SEQ ID NO: 422130 - DNA, 75 bp, synthetic construct
  source 1..75: mol_type = other DNA
agaaaaaccagaatggcgcagatattccaaacaaagataaatttacgcaaacaataggtgcttgccgctcttttc

SEQ ID NO: 422131 - DNA, 75 bp, synthetic construct
  source 1..75: mol_type = other DNA
ggatggaactcgattagcggggtttataacgctaatattggtggagcatctacgttgattctccatttttatatg

SEQ ID NO: 422132 - DNA, 75 bp, synthetic construct
  source 1..75: mol_type = other DNA
gtagatgcggcaattatcaagcgcaccaacaagcgccagtatattgccgtgatgcctggtgagtatcagggaacg

SEQ ID NO: 422133 - DNA, 75 bp, synthetic construct
  source 1..75: mol_type = other DNA
agacagatattggctccttttttatcaacgattccttaatgataaggccccaagtccttataatgacaaatgctt

SEQ ID NO: 422134 - DNA, 75 bp, synthetic construct
  source 1..75: mol_type = other DNA
gagaactgaatgatggttttggacggcgatttaaagttaacgcagatatatcaggttgctttaccaacatctact

SEQ ID NO: 422135 - DNA, 75 bp, synthetic construct
  source 1..75: mol_type = other DNA
taacggaaaccgtgatgaattaattgatacaactcaggcaaggccaattcagtattgcattaatgggacgtggta

SEQ ID NO: 422136 - DNA, 75 bp, synthetic construct
  source 1..75: mol_type = other DNA
taataaaattattaccgatactggctgtggaactattcatcttgcaggttgcgttattgaggttatgggtaataa

SEQ ID NO: 422137 - DNA, 75 bp, synthetic construct
  source 1..75: mol_type = other DNA
gggggggctgctttatgtggcggaatgtaacccgaaaagtcatgtttccattattccgctggcgcgattcatgcg

SEQ ID NO: 422138 - DNA, 75 bp, synthetic construct
  source 1..75: mol_type = other DNA
aattcgtcaagaccaactgttgcagagcttggtgatgattcaggctggcatttctatagtcagcgaaatacagat

SEQ ID NO: 422139 - DNA, 75 bp, synthetic construct
  source 1..75: mol_type = other DNA
aaatgggcgatttcgctgacgtagttttgatgccaggcgacccgctgcgtgcaaaatatattgctgaaaactttc

SEQ ID NO: 422140 - DNA, 75 bp, synthetic construct
  source 1..75: mol_type = other DNA
ggtacttacaaaggccgcaaaatttccgtaatgggtcacggtatggggatcccgtcctgctccatctacaccaaa

SEQ ID NO: 422141 - DNA, 75 bp, synthetic construct
  source 1..75: mol_type = other DNA
tttgccgctatcgctgactttgacatggtgcgtaacgcggtagacgcggctaaagcactgggcgttgatgctcgc

SEQ ID NO: 422142 - DNA, 75 bp, synthetic construct
  source 1..75: mol_type = other DNA
tatgctcacgctggacggggaggatatcacgcagaatttcagcgaccggctcatcggcctgaccatgaccgacaa

SEQ ID NO: 422143 - DNA, 75 bp, synthetic construct
  source 1..75: mol_type = other DNA
ccagagacccgaaaccacaaaagcagaaggtgaagctcaaacgtaaacccaaagagcagcacctgcgcgcgctgc

SEQ ID NO: 422144 - DNA, 75 bp, synthetic construct
  source 1..75: mol_type = other DNA
atcacgcagaatttcagcgaccggcttatcggtctgaccatgaccgacaatcgcggattcgaggctgaccagctc

SEQ ID NO: 422145 - DNA, 75 bp, synthetic construct
  source 1..75: mol_type = other DNA
tattaatcatggtgatgcttatgctcctggctggcgacgagactacaacacgaaaaaccagcagtctgcatttgc

SEQ ID NO: 422146 - DNA, 75 bp, synthetic construct
  source 1..75: mol_type = other DNA
atattccgggaaaagataccttcacccaaaatattggtgcctgccgcgcatatagcgcatgggtggatattggtg

SEQ ID NO: 422147 - DNA, 75 bp, synthetic construct
  source 1..75: mol_type = other DNA
gctgctaccgcgacaaaacttgcgacggcaagaaacatcaacggtgttaaatttgatggttctgtggacatttcg

SEQ ID NO: 422148 - DNA, 75 bp, synthetic construct
  source 1..75: mol_type = other DNA
taaggtaagcgtcaaagattgtgttaaaggatgtatgcttgcaatattaaccctggttccgttcattgttgtgat

SEQ ID NO: 422149 - DNA, 75 bp, synthetic construct
  source 1..75: mol_type = other DNA
acctcactaaatggtattcgctttggctttaactgctctatgctccgtgcatggtgggttatgttagggctgcct

SEQ ID NO: 422150 - DNA, 75 bp, synthetic construct
  source 1..75: mol_type = other DNA
gtaaatcaggcttctggcgcattacagaaaaaccagaacggcgcagatattccgggaaaagataccttcaccaaa

SEQ ID NO: 422151 - DNA, 75 bp, synthetic construct
  source 1..75: mol_type = other DNA
ctgacgaatgggggcggtagtatattaaagtatgctatatctttaattattaataaagtagatgaggcgtcagca

SEQ ID NO: 422152 - DNA, 75 bp, synthetic construct
  source 1..75: mol_type = other DNA
gctgccactgagcgcgaagcacgcgcgcagctgccgcacgcacatctgatttttgtcgcccgaatccgtcaggag

SEQ ID NO: 422153 - DNA, 75 bp, synthetic construct
  source 1..75: mol_type = other DNA
gcgtagtagcgagactccttaaaattactgtaggagcctttcacatggctgtattcgcacgcccttattttgtct

SEQ ID NO: 422154 - DNA, 75 bp, synthetic construct
  source 1..75: mol_type = other DNA
gcgtagtagcgagactccttaatttcactacaggagcctttcacatggctgtattcgcacgcccttattttgtct

SEQ ID NO: 422155 - DNA, 75 bp, synthetic construct
  source 1..75: mol_type = other DNA
atgccgctggcgcggcatatcctggtgacgatatctgaacagttatatactgtgtatatacgtggtaatgacgag

SEQ ID NO: 422156 - DNA, 75 bp, synthetic construct
  source 1..75: mol_type = other DNA
tcggtggctgggtagaaagcgaatgtctagggttatatctgattgatgatgaagaacaatgcagagtctacgaac

SEQ ID NO: 422157 - DNA, 75 bp, synthetic construct
  source 1..75: mol_type = other DNA
cgaaccgccacaatggttgtggcaacggcaaggagatacaaatgaagcaatggatagccgcactactgttgatgc

SEQ ID NO: 422158 - DNA, 75 bp, synthetic construct
  source 1..75: mol_type = other DNA
acaaaatggccttcactgacagcatctaaccgctctcttattaagaatgagatggaagatatcccgctacaacag

SEQ ID NO: 422159 - DNA, 75 bp, synthetic construct
  source 1..75: mol_type = other DNA
cacccccggcctgccaattccaaaatataattgtgaggttaaagtctaccatgttcacggctctatagactcccc

SEQ ID NO: 422160 - DNA, 75 bp, synthetic construct
  source 1..75: mol_type = other DNA
aaaaaaatggtcaaacgcaggaacaacaagtggtagctgcctgcgataagctggcggtcaatttcggtacagaaa

SEQ ID NO: 422161 - DNA, 75 bp, synthetic construct
  source 1..75: mol_type = other DNA
gcaaaatggcttatatattttggaagcatcatagaggttagcaatactaagtatgaaaaaacatatttagacgca

SEQ ID NO: 422162 - DNA, 75 bp, synthetic construct
  source 1..75: mol_type = other DNA
gcaaagaaatgagattaggttattcgtggcatgcttatagagcttgggaaacaagatggtccacaatcattgctt

SEQ ID NO: 422163 - DNA, 75 bp, synthetic construct
  source 1..75: mol_type = other DNA
aaaaagttggaagacacgttattccctgatgataaaccaccagcactgagtcttgaagaagccgcacaaatacta

SEQ ID NO: 422164 - DNA, 75 bp, synthetic construct
  source 1..75: mol_type = other DNA
cagtgataggtacacaactgctggctggctacgctaatgctgacagaattattcaacgacctactggggattttt

SEQ ID NO: 422165 - DNA, 75 bp, synthetic construct
  source 1..75: mol_type = other DNA
gtttggcgatacggtatacgataatctgatctttccctggcagatccgtaaccggcagcctgacccagccatttt

SEQ ID NO: 422166 - DNA, 75 bp, synthetic construct
  source 1..75: mol_type = other DNA
tgcgcgagcaaaatattgccgtgctgtgggtgacacacgataaagacgaaattaatcatgcggataaagtgatta

SEQ ID NO: 422167 - DNA, 75 bp, synthetic construct
  source 1..75: mol_type = other DNA
atatcgccgagctatctggtggtgaaaaacaacgcatctcactgattcgtaacctgcaatttatgccgaaggttt

SEQ ID NO: 422168 - DNA, 75 bp, synthetic construct
  source 1..75: mol_type = other DNA
aacgcataccacgattcaggcggcggtagatgcggcaattatcaagcgcaccaacaagcgccagtatattgccgt

SEQ ID NO: 422169 - DNA, 75 bp, synthetic construct
  source 1..75: mol_type = other DNA
aagaaaatggcagttggctttacctgattgacctagaacacgcattacgcgtcgctggcattcgcatcaaaggag

SEQ ID NO: 422170 - DNA, 75 bp, synthetic construct
  source 1..75: mol_type = other DNA
tctcgattttctcgaacgcttcgctttgccggacagcattttgacgaagaatatcgccgagctatctggtggtga

SEQ ID NO: 422171 - DNA, 75 bp, synthetic construct
  source 1..75: mol_type = other DNA
cggtaacccgctgaacctgtgggggatggaacttggctggacggtcatagaattgcaggctgctcagcaggtcgg

SEQ ID NO: 422172 - DNA, 75 bp, synthetic construct
  source 1..75: mol_type = other DNA
gcggtctgtatcagatcgtcacttactacggcaagctgggtgcagtcgagccagtgtataaagaaactctgtcct

SEQ ID NO: 422173 - DNA, 75 bp, synthetic construct
  source 1..75: mol_type = other DNA
gatactggtgcccaatacttcaaccacgtctaatgaaggattacttatttatctttataaccggaatgtttcggg

SEQ ID NO: 422174 - DNA, 75 bp, synthetic construct
  source 1..75: mol_type = other DNA
aaccagaatccgaaacaacgtccgcgcggctccgttggtgagcgccgttggcttcgtaaacgtggattactttaa

SEQ ID NO: 422175 - DNA, 75 bp, synthetic construct
  source 1..75: mol_type = other DNA
accccgccgttaatcccgatctctatgtgaaccttgacgaacagcgtgaagggtacgcctcgtttgaatcacggg

SEQ ID NO: 422176 - DNA, 75 bp, synthetic construct
  source 1..75: mol_type = other DNA
aaccagaatccgaaacaacgcccgcgcggctccgttggtgagcgtcgttggcttcgtaaacgtggattactttaa

SEQ ID NO: 422177 - DNA, 75 bp, synthetic construct
  source 1..75: mol_type = other DNA
cttcctcgctgattgccgaaatgccggcctccgtggcgctgcattatgcggtactgccgctgcgtctggacaatg

SEQ ID NO: 422178 - DNA, 75 bp, synthetic construct
  source 1..75: mol_type = other DNA
taacgtgttgttattgcgccatgaacgcagttctctgccgctcggcaagtttttggtcaccgaaggcgttatcag

SEQ ID NO: 422179 - DNA, 75 bp, synthetic construct
  source 1..75: mol_type = other DNA
ggaatccatcgatgcctggcagatcccttcctcgctgattgccgaaatgccggcctccgtggcgttgcattatgc

SEQ ID NO: 422180 - DNA, 75 bp, synthetic construct
  source 1..75: mol_type = other DNA
ataatgttgaaagtcttttcatttacgaatgcgatttcacgatactggcggcaggcattaaggcgtgctatccgc

SEQ ID NO: 422181 - DNA, 75 bp, synthetic construct
  source 1..75: mol_type = other DNA
ctattatcttgatagagatgagaaaagacatcgtaccactttgcggaaaacacatcgccggggagacaatagtat

SEQ ID NO: 422182 - DNA, 75 bp, synthetic construct
  source 1..75: mol_type = other DNA
tgccactttatctggtcagaaaaaaatatcgatattcattattactgtgaccgtgaaatgtcgcctcaggaatgg

SEQ ID NO: 422183 - DNA, 75 bp, synthetic construct
  source 1..75: mol_type = other DNA
gaagctcaaatggaacgtaaggagtctggtttcaatcagatggcattcaataaggctttattcgaatatgtagtt

SEQ ID NO: 422184 - DNA, 75 bp, synthetic construct
  source 1..75: mol_type = other DNA
atcgccggtgatcctcgccgggacgccggggacctttaaacatatcgcgctggaagagatctacgccctgtgtag

SEQ ID NO: 422185 - DNA, 75 bp, synthetic construct
  source 1..75: mol_type = other DNA
atcggctcttcgtctttcgtgttgcagaaagaatttggctttagtccaatgcaatttagcctggtatttggcctt

SEQ ID NO: 422186 - DNA, 75 bp, synthetic construct
  source 1..75: mol_type = other DNA
accgcgcgctgagcaatatcggcaacagccgcagcataaacagtctgaatgaagccagtaaagaggccggacagt

SEQ ID NO: 422187 - DNA, 75 bp, synthetic construct
  source 1..75: mol_type = other DNA
ttcaatggtcgcgtaccgaaccctcgcaagatttgctggatctggtgcaaaacccggactatcaaccaatggtgg

SEQ ID NO: 422188 - DNA, 75 bp, synthetic construct
  source 1..75: mol_type = other DNA
aagtagccatcgcgcttttagatatggcgggcgataccgaagccgcaacgggcttaggcgagcatttcactcgtt

SEQ ID NO: 422189 - DNA, 75 bp, synthetic construct
  source 1..75: mol_type = other DNA
ttgccagtctttttatttatgagtgcgattttgaaatactatccccggctattaagtcactataccctttagcca

SEQ ID NO: 422190 - DNA, 75 bp, synthetic construct
  source 1..75: mol_type = other DNA
acgttgcttcacggctttataatttaaacgtgaaccatatatcagaaacattgcaggtaatagaatatgcaatgt

SEQ ID NO: 422191 - DNA, 75 bp, synthetic construct
  source 1..75: mol_type = other DNA
gctgatttgaccagtataataccggtcaaatcaatgggggagtttttgtcagatataaatgatttttttatggaa

SEQ ID NO: 422192 - DNA, 75 bp, synthetic construct
  source 1..75: mol_type = other DNA
gactggcgaacgcactattactcagtgcagtcattcgtttcaatgcacatgattcgcgggcagcaaaacgctacg

SEQ ID NO: 422193 - DNA, 75 bp, synthetic construct
  source 1..75: mol_type = other DNA
tgatggtttccggtattgtcagctacactcgttggccagcgttatctggcccgccaaagctatgtattttttcat

SEQ ID NO: 422194 - DNA, 75 bp, synthetic construct
  source 1..75: mol_type = other DNA
gagtgcattattggtagcgccttttgtctgatcatccacaataatgacgtcagatttgccgtaaacctggatgcc

SEQ ID NO: 422195 - DNA, 75 bp, synthetic construct
  source 1..75: mol_type = other DNA
gaagaatattggtagtagatggacatcatttgattctaggagagctaataaaataatttatacatctgtaatgtc

SEQ ID NO: 422196 - DNA, 75 bp, synthetic construct
  source 1..75: mol_type = other DNA
actctggtggcatcctgtgtggtgatcaccgccattgtcgtgccggtgatcactgcgttgtgggcaaaacacgga

SEQ ID NO: 422197 - DNA, 75 bp, synthetic construct
  source 1..75: mol_type = other DNA
tgctcgccgatatggctgctgcagagcaggagctggagcaagcctttgaacgctgggagtatcttgaagcgttaa

SEQ ID NO: 422198 - DNA, 75 bp, synthetic construct
  source 1..75: mol_type = other DNA
aagaagtgcctgtgccaaaagcagaaactgtaaaacgcagcacgagcaaactaagctataaactgcagcgcgaac

SEQ ID NO: 422199 - DNA, 75 bp, synthetic construct
  source 1..75: mol_type = other DNA
aatgcaactccgaatacacctacgaagataacggcatgtacatctgcccggaatgtgcctacgaatggaacgacg

SEQ ID NO: 422200 - DNA, 75 bp, synthetic construct
  source 1..75: mol_type = other DNA
ggcaccaaagtgaaaaacatccgcctggttgaaggcgaccataacatcgattgcaaaatcgacggttttggtccg

SEQ ID NO: 422201 - DNA, 75 bp, synthetic construct
  source 1..75: mol_type = other DNA
aagggggaatggtaaaaacaggtttctttgccggtttatctgttctggcgattgttgcggcgatggatatgacca

SEQ ID NO: 422202 - DNA, 75 bp, synthetic construct
  source 1..75: mol_type = other DNA
gaggctcaaatggaaagaaaagattcagggtttaaccaaactgagtttaataagattttgcttgagaatgtcatg

SEQ ID NO: 422203 - DNA, 75 bp, synthetic construct
  source 1..75: mol_type = other DNA
tttgattatggcctatccgaaaaatgccaaagatagtctgacagatacggaaaaagctcaactaaagaagttgac

SEQ ID NO: 422204 - DNA, 75 bp, synthetic construct
  source 1..75: mol_type = other DNA
aaacagcggtaaatttatgggtgacactacggcacgatattatcgcgttggccgtctttctaaatggattgctta

SEQ ID NO: 422205 - DNA, 75 bp, synthetic construct
  source 1..75: mol_type = other DNA
tcgatcactgtcgggctattctggcgctcagtgataacgatgcagataacgcttttgtcgtcctgtcagccaaag

SEQ ID NO: 422206 - DNA, 75 bp, synthetic construct
  source 1..75: mol_type = other DNA
gcaccctgctggaatttgatgtcaatgaagcgttagtcgcgagaacgatgattaaacatgcgcggaatacattgt

SEQ ID NO: 422207 - DNA, 75 bp, synthetic construct
  source 1..75: mol_type = other DNA
aatctggagcatatgacttggttgtaaggtatggttttgaagtcaacgatctattttccaaaaccatcagagaca

SEQ ID NO: 422208 - DNA, 75 bp, synthetic construct
  source 1..75: mol_type = other DNA
atgaatactaatactaaatttgatttatggttgattagagtaagttacattgcccaagttggattgttttttttg

SEQ ID NO: 422209 - DNA, 75 bp, synthetic construct
  source 1..75: mol_type = other DNA
acaaagaacgaagaatcttccaaagtaatattttgtgattttgagggggtatcaccccgccgctaccataaattt

SEQ ID NO: 422210 - DNA, 75 bp, synthetic construct
  source 1..75: mol_type = other DNA
atagatgttcaatatcttgatgattacagaaaatatgagactgttgtagctcagaaatttataaacgagattgct

SEQ ID NO: 422211 - DNA, 75 bp, synthetic construct
  source 1..75: mol_type = other DNA
ataacaaagaacgaagaatcttccaaagtaatattttgtgattttgagggggtatcacccataagcgctaactta

SEQ ID NO: 422212 - DNA, 75 bp, synthetic construct
  source 1..75: mol_type = other DNA
ctcacagcatgtgcatttttgtgtacggggctgtcaccctgtatcgctggtgtttttgctgatactgcgcaaaga

SEQ ID NO: 422213 - DNA, 75 bp, synthetic construct
  source 1..75: mol_type = other DNA
cacgtgtcccgccctactcatcgagctcacagcatgtgcatttttgtgtacggggctgtcaccctgtatcgctgg

SEQ ID NO: 422214 - DNA, 75 bp, synthetic construct
  source 1..75: mol_type = other DNA
taaagatcactttattgtttgcggtcactccattctggcaatcaacacgattctgcaactgaatcaacgcggaca

SEQ ID NO: 422215 - DNA, 75 bp, synthetic construct
  source 1..75: mol_type = other DNA
gtaatgaaagcggtaaaaaaatctggcgagaagatgaactgccaattatccccgaaaaatggattattaatcctc

SEQ ID NO: 422216 - DNA, 75 bp, synthetic construct
  source 1..75: mol_type = other DNA
atggaatcccaaggggaagaaaaacttagtgaagcaaccgttaatcgcgagcagtcatatctacatgctgttttt

SEQ ID NO: 422217 - DNA, 75 bp, synthetic construct
  source 1..75: mol_type = other DNA
tcctaaaaaacgaggagcgctattttcaccatgttatgaggcttttgacgctgcaattaagagagcgaagataga

SEQ ID NO: 422218 - DNA, 75 bp, synthetic construct
  source 1..75: mol_type = other DNA
atcacccttagagtaaataacagactcgcaagcgaaatcagacggcgagcgaagaacgaaggactgacaatttca

SEQ ID NO: 422219 - DNA, 75 bp, synthetic construct
  source 1..75: mol_type = other DNA
gcgctgcccggaaccggtgatgatggtgcgcaaaaccgtgcgcaatatgcagcctggcgaaacgttgctgattat

SEQ ID NO: 422220 - DNA, 75 bp, synthetic construct
  source 1..75: mol_type = other DNA
tgcctgatcccgcgataggctatatcttccagaatgatattgtggcgttaaagcaggcattttcactgcctgata

SEQ ID NO: 422221 - DNA, 75 bp, synthetic construct
  source 1..75: mol_type = other DNA
cagctggctgggaaaagatgcgatggccggcgtgggattggcggacagcttcaatatggtcattatggctttttt

SEQ ID NO: 422222 - DNA, 75 bp, synthetic construct
  source 1..75: mol_type = other DNA
gagcggaatatttatgatctcattgtcagggcgtacctcgcgcagttttacccggtacatgaatttaaagccacg

SEQ ID NO: 422223 - DNA, 75 bp, synthetic construct
  source 1..75: mol_type = other DNA
gaagggggctgatagccattctgccagaactggttaaaagcccggtaatgacagccatcaacgaacgtatgttac

SEQ ID NO: 422224 - DNA, 75 bp, synthetic construct
  source 1..75: mol_type = other DNA
ggatgtactaaaccggttctgcgttactggtgtaatgcgaatgatacggtaagtgtcacaagggcgttgaaagga

SEQ ID NO: 422225 - DNA, 75 bp, synthetic construct
  source 1..75: mol_type = other DNA
tccattggcttctcactttgataaaaacactttcgctgtataccgggaacggcgtttgagtggtgaatggaatca

SEQ ID NO: 422226 - DNA, 75 bp, synthetic construct
  source 1..75: mol_type = other DNA
ggaaatggctatgccagtgctttccctatggtcgcaacggaaagcgaatacgtaaacagtttgccaccaagggcg

SEQ ID NO: 422227 - DNA, 75 bp, synthetic construct
  source 1..75: mol_type = other DNA
actgcttcatgccgcgctgcattatccggagaatttaagcgaaggccgtttaccggggcaaactgataacgacat

SEQ ID NO: 422228 - DNA, 75 bp, synthetic construct
  source 1..75: mol_type = other DNA
atgttagcgtgaaagaggctgacggttcggttaccacgtacctggtgccttattcggcggtgccaaatatgttgc

SEQ ID NO: 422229 - DNA, 75 bp, synthetic construct
  source 1..75: mol_type = other DNA
aaccgtctttccgaaacgtttgctgtgatgaatgccccaggaattaaagatgcttatgtcggtgatgctgccaac

SEQ ID NO: 422230 - DNA, 75 bp, synthetic construct
  source 1..75: mol_type = other DNA
attatcgggaaccgttggaagccgggatcaatttaactatggggtcaacctgagtcatcagcatcagggaaatga

SEQ ID NO: 422231 - DNA, 75 bp, synthetic construct
  source 1..75: mol_type = other DNA
cagggcaagcagtgcatcaagcagcggctattctttcttctttggagtacatcaaccaagcggaagcgcggagcc

SEQ ID NO: 422232 - DNA, 75 bp, synthetic construct
  source 1..75: mol_type = other DNA
gattgggcacgttctttcggtagcctcgaacgagcaggcatcgaaggaacaggaacatatggtgccgcattaaca

SEQ ID NO: 422233 - DNA, 75 bp, synthetic construct
  source 1..75: mol_type = other DNA
ttggtactcgcattattcaaacaaatcaaattggctatcaggagctatttgattgggctaaatcttttggagttc

SEQ ID NO: 422234 - DNA, 75 bp, synthetic construct
  source 1..75: mol_type = other DNA
gatcacgtttgggcaaacaataaagataattatcgccgtgatgaaaacgatatctatgacattgccgattattac

SEQ ID NO: 422235 - DNA, 75 bp, synthetic construct
  source 1..75: mol_type = other DNA
atttgcacaaattctcggcacgctgcgtgttggtgatatgtacacctcaagcgatatttttgactctgttcgctt

SEQ ID NO: 422236 - DNA, 75 bp, synthetic construct
  source 1..75: mol_type = other DNA
attgataagcaacaaggactttcatgcacaatcaccttcggtaaagagattgatgaaagtagaaattatatttgc

SEQ ID NO: 422237 - DNA, 75 bp, synthetic construct
  source 1..75: mol_type = other DNA
cctttacccggccagtacgatatcgatatttatgttaataaacaatggcgcggaaagtatgaaattatcgtgaaa

SEQ ID NO: 422238 - DNA, 75 bp, synthetic construct
  source 1..75: mol_type = other DNA
gcggtgtgaatctggcaaaccgtctttctgaaacgtttgctgtgatgtatgcaccaggaattaaagatgcctacg

SEQ ID NO: 422239 - DNA, 75 bp, synthetic construct
  source 1..75: mol_type = other DNA
cggaaaattgccgccccttatcgcggcgcggttgtactggttaattttgataccgatcagcgcaagccctggttt

SEQ ID NO: 422240 - DNA, 75 bp, synthetic construct
  source 1..75: mol_type = other DNA
agtgcgattaacgaagaggcattgctgataaaaaataatctttcggatgtcgaagacagtgatgaggctgttgaa

SEQ ID NO: 422241 - DNA, 75 bp, synthetic construct
  source 1..75: mol_type = other DNA
gtattggacgcgggggaaatgcgccatcaggtcaccttatcagcggtcttgacggtggtgaaagtatggactggg

SEQ ID NO: 422242 - DNA, 75 bp, synthetic construct
  source 1..75: mol_type = other DNA
ataaggggaacaagtccgggctggtagcgaacgatatcattaaaggcattcccttaatttgtcttcttgatagcg

SEQ ID NO: 422243 - DNA, 75 bp, synthetic construct
  source 1..75: mol_type = other DNA
tgttaatggaggtacagactggacgctacgaaccccgattatcgttttccccgttcagaacaataccaacgccgc

SEQ ID NO: 422244 - DNA, 75 bp, synthetic construct
  source 1..75: mol_type = other DNA
agttaagcctggagccattaatcgctcaccgtggaagctttgaaagcttcgcccaggcggtgcgtgacatcgctc

SEQ ID NO: 422245 - DNA, 75 bp, synthetic construct
  source 1..75: mol_type = other DNA
gggcctcatgcccagctggcgctggtgggcacgttgcatcaggatctgcatttaacatcggcaacgtttggcaaa

SEQ ID NO: 422246 - DNA, 75 bp, synthetic construct
  source 1..75: mol_type = other DNA
gagcaaagagtgtgacggcgatcgacattagttcagaaaaactggcactggcaaaatctttcggtgcgatgcaaa

SEQ ID NO: 422247 - DNA, 75 bp, synthetic construct
  source 1..75: mol_type = other DNA
cggtgttcagaacgcgctgggcggaaactcaattgctttcggggataacgataccggcctgaaacagaatggtga

SEQ ID NO: 422248 - DNA, 75 bp, synthetic construct
  source 1..75: mol_type = other DNA
ggtatcggcgttcagaacgcgctgggcggaaactcaattgctttcggggataacgataccggcctgaaacagaat

SEQ ID NO: 422249 - DNA, 75 bp, synthetic construct
  source 1..75: mol_type = other DNA
ggtgcaattaacgaagaggcattgctgattaaaaataatctttcggatgtggaagacaaagatgaggctgttgaa

SEQ ID NO: 422250 - DNA, 75 bp, synthetic construct
  source 1..75: mol_type = other DNA
ggttgtgttttgtcaggcattaatgttcaggacactggcagtaactctgcagataatatcggtggcgtgtattac

SEQ ID NO: 422251 - DNA, 75 bp, synthetic construct
  source 1..75: mol_type = other DNA
cacttcgaccgttcactattaatctgcggacgggtgaaatatccatgtcgcataaagtgtctgttggcggtggtt

SEQ ID NO: 422252 - DNA, 75 bp, synthetic construct
  source 1..75: mol_type = other DNA
agaaaagctatttcagtgtgataaaccccggcaatatctattcagattttgatctgcgatatgtaaaaaaatctg

SEQ ID NO: 422253 - DNA, 75 bp, synthetic construct
  source 1..75: mol_type = other DNA
ttccgaaacgtttgctgtgatgaatgcgccaggaattaaagatgcttatgtcaatgggcaaaaatatcgcacaac

SEQ ID NO: 422254 - DNA, 75 bp, synthetic construct
  source 1..75: mol_type = other DNA
gacagtaatcgtctcagtatttttagcgaaataacgcccgacccaactatccagaccgtggtgaaaggcattgcg

SEQ ID NO: 422255 - DNA, 75 bp, synthetic construct
  source 1..75: mol_type = other DNA
cggggacaacctgacacgagaacaaatccgcatcagttcgctgattgcgtgggagcttcacgacattaaagagca

SEQ ID NO: 422256 - DNA, 75 bp, synthetic construct
  source 1..75: mol_type = other DNA
tctattatcgcacctatcgcctgtggctacgcccaggaagagtacagctgggcgatgggctttggcctggcggcg

SEQ ID NO: 422257 - DNA, 75 bp, synthetic construct
  source 1..75: mol_type = other DNA
atgttgcatcgataactgtggatggaaaacgaaaatacctaggctcattcaaacttttagatgatgccaaacaag

SEQ ID NO: 422258 - DNA, 75 bp, synthetic construct
  source 1..75: mol_type = other DNA
ctgaaagaaaaaaaagcagaatggtcaatacgcataccagatatggttcaggcggcactggcggatgcaacgttg

SEQ ID NO: 422259 - DNA, 75 bp, synthetic construct
  source 1..75: mol_type = other DNA
ctcctgcgacgaccagaccatccgcgagcgagtacaggcagctggtgtcgtgggtgctggcggcgcaggtttccc

SEQ ID NO: 422260 - DNA, 75 bp, synthetic construct
  source 1..75: mol_type = other DNA
ttgatcaaattacctggggcgcactggcgtgtgtaggagtggtgttgatgatttggctgtatcaggcgctgaaat

SEQ ID NO: 422261 - DNA, 75 bp, synthetic construct
  source 1..75: mol_type = other DNA
cgactgcgatgttccagtcgattaatgccttcgcagttatgctgtgcggtgtgttcctggcgtgggtggtaaaag

SEQ ID NO: 422262 - DNA, 75 bp, synthetic construct
  source 1..75: mol_type = other DNA
cgatggcttttattttggcagcgagtcaccgacattccagatagaattaatcgatgaatatccgtctaaggcgtt

SEQ ID NO: 422263 - DNA, 75 bp, synthetic construct
  source 1..75: mol_type = other DNA
aaaatcagaaacagcgtaaagaactggggctgattgttacccttaccttcttcagtatgttgttctgggccttcg

SEQ ID NO: 422264 - DNA, 75 bp, synthetic construct
  source 1..75: mol_type = other DNA
cgccacgatcatcggccttggcgttctggcaaaaatttatcgcaaagcagaaaaccaaaaacaacgtaaggagct

SEQ ID NO: 422265 - DNA, 75 bp, synthetic construct
  source 1..75: mol_type = other DNA
ctggcaaaaatttatcgcaaagcagaaaaccagaaacagcggaaggagctgaggctgattgtgacgctcaccttc

SEQ ID NO: 422266 - DNA, 75 bp, synthetic construct
  source 1..75: mol_type = other DNA
gggctgtatgcctgacggcaccgtattcagcattcccgaccaggatctgctgccggaacctttccagccgggaac

SEQ ID NO: 422267 - DNA, 75 bp, synthetic construct
  source 1..75: mol_type = other DNA
cagatacatttgcggatatcgtactggaaacaattggcgtgagaacacaacagatgtcgttcgatttttatatgt

SEQ ID NO: 422268 - DNA, 75 bp, synthetic construct
  source 1..75: mol_type = other DNA
ctcaggataaaatcaaagacataaaaatatttgattacctcgtctcatctgatgtggagcatcgagatgttacgg

SEQ ID NO: 422269 - DNA, 75 bp, synthetic construct
  source 1..75: mol_type = other DNA
atgaaaatagcgtttatcggcgaagccgtttctggatttggcggcatggaaacagtcatccgtgatgtcattagc

SEQ ID NO: 422270 - DNA, 75 bp, synthetic construct
  source 1..75: mol_type = other DNA
tggaagaactggaaattggctatgtaccacctgaaaactgggagcggggtattaatgcgttttatacctcttatt

SEQ ID NO: 422271 - DNA, 75 bp, synthetic construct
  source 1..75: mol_type = other DNA
atgggcaaccgttaacatttggctatgaagtgaatgataatcacggacataatattggcgtcgtcggtcagggaa

SEQ ID NO: 422272 - DNA, 75 bp, synthetic construct
  source 1..75: mol_type = other DNA
agtgaatatgggataacgctcaatatcgttgaggatcgtgcgtggactaaagctacatatgatttgacatctggg

SEQ ID NO: 422273 - DNA, 75 bp, synthetic construct
  source 1..75: mol_type = other DNA
ctgtttctggatttggcggcatggaaacggtcattcgtgatgttattactaccttcaggcaacaacatatctata

SEQ ID NO: 422274 - DNA, 75 bp, synthetic construct
  source 1..75: mol_type = other DNA
atgaaaatagcgtttatcggcgaagctgtttctggatttggcggcatggaaactgtcatccgtgatgttattact

SEQ ID NO: 422275 - DNA, 75 bp, synthetic construct
  source 1..75: mol_type = other DNA
tatcagtgcagattgtatctccgggcctgctgacatcatccagcctgatgttaatggtcatttatatcaaccggg

SEQ ID NO: 422276 - DNA, 75 bp, synthetic construct
  source 1..75: mol_type = other DNA
atcgaattgtctggtatggttggcaacaacatccttgggaattagtccagcaagatattaaaaaagtgagtgcgt

SEQ ID NO: 422277 - DNA, 75 bp, synthetic construct
  source 1..75: mol_type = other DNA
taaacaacaaatgattaaccggggtgtaccagaatcgacgataaacgttatttttaaccctgtcgaagcgaaaga

SEQ ID NO: 422278 - DNA, 75 bp, synthetic construct
  source 1..75: mol_type = other DNA
gtaccagaatcgacgataaatgttatttttaatccagtcgaagctaaagacacagtcattcctgggcctgaggaa

SEQ ID NO: 422279 - DNA, 75 bp, synthetic construct
  source 1..75: mol_type = other DNA
ttgtgcgtaagtggctggaagaacgcaaactgggcgaggtacgcaccagcgaacttttcgacgtttggtgggact

SEQ ID NO: 422280 - DNA, 75 bp, synthetic construct
  source 1..75: mol_type = other DNA
ctcatccgggttgtagcggcggagagatcgccgcagcactgaatactccaaccacagccattaatgctgagttac

SEQ ID NO: 422281 - DNA, 75 bp, synthetic construct
  source 1..75: mol_type = other DNA
aaaaggatgcatatcacatctatctcactgacggcacttactttttgcgccaccaacgtggtgcaggtaaatctt

SEQ ID NO: 422282 - DNA, 75 bp, synthetic construct
  source 1..75: mol_type = other DNA
gccgtgctcaggtgcatgtcgaggcgttaatcgtggaagttgccgaaggtagcaatatcaatttcggcgtgcagt

SEQ ID NO: 422283 - DNA, 75 bp, synthetic construct
  source 1..75: mol_type = other DNA
gccgctgccgctggtcggtgaaggcagcgacaactacgcgggcgatgaaatggtcaccaaagtagtgccggtacg

SEQ ID NO: 422284 - DNA, 75 bp, synthetic construct
  source 1..75: mol_type = other DNA
tgccgaacgactgctgaccgatggtggcattacggcaaagcgaaagctggtgcggtttgactgggctgatttgcc

SEQ ID NO: 422285 - DNA, 75 bp, synthetic construct
  source 1..75: mol_type = other DNA
ttgaagaggcctgcctaagatggcttgaggaaaaagctgataaaaaatctctcgattcagataaaagccggattg

SEQ ID NO: 422286 - DNA, 75 bp, synthetic construct
  source 1..75: mol_type = other DNA
aggcttcttaccacgtaaacccgatgccgttcgggtgtagcaatccactgactcacatgtttaaccagctactga

SEQ ID NO: 422287 - DNA, 75 bp, synthetic construct
  source 1..75: mol_type = other DNA
catcagaacaaaccgcagcacaggtggtcgcgctcgcaaaactggaggccaggcttcttaccacgtaaacccgat

SEQ ID NO: 422288 - DNA, 75 bp, synthetic construct
  source 1..75: mol_type = other DNA
ggtcgcgctcgcaaaacaggaggccaggcttcttaccacgtaaacccgatgccgttcgggtgtagcaatccactt

SEQ ID NO: 422289 - DNA, 75 bp, synthetic construct
  source 1..75: mol_type = other DNA
atgtacaaaaataatcaaaattattttctgtgtgaaatatggtatgcctcgtattcgctcccgggtgggaaacga

SEQ ID NO: 422290 - DNA, 75 bp, synthetic construct
  source 1..75: mol_type = other DNA
aagatttccgtttccatgacctcagacacacctgggcaagctggctgattcagtcaggcgtcccattatgtcagc

SEQ ID NO: 422291 - DNA, 75 bp, synthetic construct
  source 1..75: mol_type = other DNA
agtgatccagcgcgtggatcacgcgggtaatcgcaccgaagaggtgatcccgctggataacgcctcggcttcgga

SEQ ID NO: 422292 - DNA, 75 bp, synthetic construct
  source 1..75: mol_type = other DNA
atccgagcgcttcatggccgattattgagaaatacaggatttctatcttagaccagttaactgaatggtgtgtgg

SEQ ID NO: 422293 - DNA, 75 bp, synthetic construct
  source 1..75: mol_type = other DNA
aaacttcaatacaaccgctgagaaaatgtttgacccctgcgaaaatctcaaggtttcagagcaaattttggtgga

SEQ ID NO: 422294 - DNA, 75 bp, synthetic construct
  source 1..75: mol_type = other DNA
aaacgcaaaatacgctcaatcaactgaataaacagattgatgagatgaacgcgtcgattgccaaactggagcagc

SEQ ID NO: 422295 - DNA, 75 bp, synthetic construct
  source 1..75: mol_type = other DNA
aatcctccggtttgatgcgcaagctgcacaaattaaaaaccaaaccaaaacattttattgtcgattccagtggtt

SEQ ID NO: 422296 - DNA, 75 bp, synthetic construct
  source 1..75: mol_type = other DNA
actgtatgtatagttggtgagcccgacggtaatgtcaccatgctccccatgtcctggaaaaattttctgtccgtg

SEQ ID NO: 422297 - DNA, 75 bp, synthetic construct
  source 1..75: mol_type = other DNA
ctgactcaggcgctgaacgagcgtaaaaagacgctggcggggctggaatcttccatccagcaaggtcagcagcag

SEQ ID NO: 422298 - DNA, 75 bp, synthetic construct
  source 1..75: mol_type = other DNA
tgatgtcccgaactggtggtctgggtgcgccgcgtggtcaggcattctggccggttcgcgggccgacgctgcatc

SEQ ID NO: 422299 - DNA, 75 bp, synthetic construct
  source 1..75: mol_type = other DNA
agcgcaaactgaagactaccgtgctggctaacgatggtgagctgatcgtgcttggcggtctgatggacgaccagg

SEQ ID NO: 422300 - DNA, 75 bp, synthetic construct
  source 1..75: mol_type = other DNA
ttccatccagcaaggtcagcaacagttgagcgagctgcgcgccaacgaatcccgtctgcgtaacagcattgcccg

SEQ ID NO: 422301 - DNA, 75 bp, synthetic construct
  source 1..75: mol_type = other DNA
agcggtgaagaaagccagcgtggacagcgtttacaggcttatttcggctatctcaaccaggcgcgacaagaaacc

SEQ ID NO: 422302 - DNA, 75 bp, synthetic construct
  source 1..75: mol_type = other DNA
gctatggcgaacaattgcagggcgaactgcgctggaaagggatggttatcggtgcctctgaaggtactgaggtta

SEQ ID NO: 422303 - DNA, 75 bp, synthetic construct
  source 1..75: mol_type = other DNA
tctatctcaccaatcaactaaaatatagcgataatcacgcctacgagttatttagcgcctactgttcgctggtat

SEQ ID NO: 422304 - DNA, 75 bp, synthetic construct
  source 1..75: mol_type = other DNA
tgcaacgcggcgttgcgtcattctcgttacaactggcggaagggcgggcagatctctacacggaaatgccagtga

SEQ ID NO: 422305 - DNA, 75 bp, synthetic construct
  source 1..75: mol_type = other DNA
cttacccgcatggccgatatgcttggcgccatcgcaacggtcaaaaacggcaacctgctgttcatcatacctggt

SEQ ID NO: 422306 - DNA, 75 bp, synthetic construct
  source 1..75: mol_type = other DNA
acgatctgcgtgcgggcgtcagcgaagaactggcgaagattgagatagaccacgccgatcagacgagtgaatcag

SEQ ID NO: 422307 - DNA, 75 bp, synthetic construct
  source 1..75: mol_type = other DNA
tatcagttagtcggggatgtttttaaagttgcaggttttttatatgcatacccaatgatagtacaagcaagaacc

SEQ ID NO: 422308 - DNA, 75 bp, synthetic construct
  source 1..75: mol_type = other DNA
aaagcgcaaatcagcgcctcactggcaggggtggaaatcgaccacgccgaccagacggaggaaagcgacatctcg

SEQ ID NO: 422309 - DNA, 75 bp, synthetic construct
  source 1..75: mol_type = other DNA
gcctgaagacacagataagcgaaatcctcatggatatcgaaattgaccacgctgaccagaccgaagagagcgata

SEQ ID NO: 422310 - DNA, 75 bp, synthetic construct
  source 1..75: mol_type = other DNA
cgccgcgtccggcgttcagtattgaaattgaaggtaatcagcttacggcgctggataaccggctgatctctcttt

SEQ ID NO: 422311 - DNA, 75 bp, synthetic construct
  source 1..75: mol_type = other DNA
ggtttcctcaaacaacccgtcggtaaagattacaaattcggtggtccgtctgttaaagatgaaaaactgtttggc

SEQ ID NO: 422312 - DNA, 75 bp, synthetic construct
  source 1..75: mol_type = other DNA
tcgtctcttatcaggggcaggacaacatttattctgacctgaccgccgggcgtattgatgccgcgttccaggacg

SEQ ID NO: 422313 - DNA, 75 bp, synthetic construct
  source 1..75: mol_type = other DNA
aaatatcatttaatatctgtaataaattacacaatgatggctttaattactgcctctgcaatgcctttagctctt

SEQ ID NO: 422314 - DNA, 75 bp, synthetic construct
  source 1..75: mol_type = other DNA
cagtcgtcaggaattactccggcttatgcgtctgactgaagacgtaccagatgtgagacaggaactgcttaaccg

SEQ ID NO: 422315 - DNA, 75 bp, synthetic construct
  source 1..75: mol_type = other DNA
caatgcaggagtctgccacccgtcagcgtgaacaggataccgtccggaagtttactgaagagagtaaatctgaat

SEQ ID NO: 422316 - DNA, 75 bp, synthetic construct
  source 1..75: mol_type = other DNA
cacgtaagtatctcctgaaaaggagaacaaattttcagtgcgtactttatacggcggtgaaaacggatcactctg

SEQ ID NO: 422317 - DNA, 75 bp, synthetic construct
  source 1..75: mol_type = other DNA
gttggtatgatcgcgggtctggttatcttcttatgtggcaatcgtcattttgctcatacccgtggcgttaacaaa

SEQ ID NO: 422318 - DNA, 75 bp, synthetic construct
  source 1..75: mol_type = other DNA
cagaatagaggcgtaccgcaaacttaagcatctgctggttattagccagccgacgctggctgaagatgccgaata

SEQ ID NO: 422319 - DNA, 75 bp, synthetic construct
  source 1..75: mol_type = other DNA
gtggggtattcagtcgtatttttaattattacagcgtaccggaggaatcacgcatggtactcagtcgtcaggaat

SEQ ID NO: 422320 - DNA, 75 bp, synthetic construct
  source 1..75: mol_type = other DNA
atccggtagtacgatcgcttgtcagcgcgcgcattgcgcaaatgtgcctgtgtgagttttgcgtggatatcacca

SEQ ID NO: 422321 - DNA, 75 bp, synthetic construct
  source 1..75: mol_type = other DNA
gtatttattccttgaaagctggcaatatagcgcacgcacaaaagttgatgaatgagcaggctgaaatattatttt

SEQ ID NO: 422322 - DNA, 75 bp, synthetic construct
  source 1..75: mol_type = other DNA
tgcagcggttccggcggcgttaattgcaacgctccagtttatcgccaccacttttagtttgccggttaaaacgac

SEQ ID NO: 422323 - DNA, 75 bp, synthetic construct
  source 1..75: mol_type = other DNA
gacctgtttcagacaaaaaaaatactcaaacttcagggggccagtctacggtcaacccggttacaccggttacgg

SEQ ID NO: 422324 - DNA, 75 bp, synthetic construct
  source 1..75: mol_type = other DNA
gcgagacaggaactgcttaaccgtttgttgtccggtaaaaaactgactggtcgggatgaacaggatatccggcgt

SEQ ID NO: 422325 - DNA, 75 bp, synthetic construct
  source 1..75: mol_type = other DNA
caatgcaggagtctgccactcgtcagcgtgaacaggataccattcggcagttttctgaagagagtaaatccgaat

SEQ ID NO: 422326 - DNA, 75 bp, synthetic construct
  source 1..75: mol_type = other DNA
tttcatttaaatatgcggctggaaagagtattgccggctgatttacttgatattgcaagtgaaaataatctgcga

SEQ ID NO: 422327 - DNA, 75 bp, synthetic construct
  source 1..75: mol_type = other DNA
ccttatcgccagatgagtgaaacacccctaccagaaaatcatttactggatgcgcggttacgtaaagaaaaagaa

SEQ ID NO: 422328 - DNA, 75 bp, synthetic construct
  source 1..75: mol_type = other DNA
gatgcgattaatcagataaatcatgtccgtaatgtactacaacaaatcaaacaagaggcaagctatcttctaaat

SEQ ID NO: 422329 - DNA, 75 bp, synthetic construct
  source 1..75: mol_type = other DNA
tgatcgttaaagaacaaggtggcctgggtcataaagcctgtatttcaggtcagggagatatgccgttcaaagagt

SEQ ID NO: 422330 - DNA, 75 bp, synthetic construct
  source 1..75: mol_type = other DNA
cacccatggcttaaacctgactgcccataaatacccgggcttacgcggcacactacaaaccgcatccactgactg

SEQ ID NO: 422331 - DNA, 75 bp, synthetic construct
  source 1..75: mol_type = other DNA
agatttcggatctggagtttggaaatattgattcttgtattgaatcattgttaaaaataaggcgtattgagcatt

SEQ ID NO: 422332 - DNA, 75 bp, synthetic construct
  source 1..75: mol_type = other DNA
gccggtgttaatatcggtcatggtgcaataattgcagcaaattcggtggttactaaaaatattgcaccgtattca

SEQ ID NO: 422333 - DNA, 75 bp, synthetic construct
  source 1..75: mol_type = other DNA
ggttacggtgccgaaacaggtgcagatgctgttacaacccggcagtgatatctggcagaaggaatatgcgctgga

SEQ ID NO: 422334 - DNA, 75 bp, synthetic construct
  source 1..75: mol_type = other DNA
actcggcggcgcaaaacacatgttgggcggtaaagctggcacacgatggcacgttatccctcaatcaatgtgatg

SEQ ID NO: 422335 - DNA, 75 bp, synthetic construct
  source 1..75: mol_type = other DNA
atggaaaggctattagacgcgtacaaacggatattacaggaagttgacgcccagtcatttaacctgaatgaagat

SEQ ID NO: 422336 - DNA, 75 bp, synthetic construct
  source 1..75: mol_type = other DNA
ggatttcctggcccgctttgcgcagtttaaggacagggcagtgatcgaagggcagacactcggtgtgctaatcga

SEQ ID NO: 422337 - DNA, 75 bp, synthetic construct
  source 1..75: mol_type = other DNA
caaaatgatcacgcaccttgcccgcccggttggcagttaagtttgcctgcggcccgtgcttttatccttggcgat

SEQ ID NO: 422338 - DNA, 75 bp, synthetic construct
  source 1..75: mol_type = other DNA
agtttatttgccaagtcaagagtttatgatgggatatgcatttactccttttacagaagcttttattaattataa

SEQ ID NO: 422339 - DNA, 75 bp, synthetic construct
  source 1..75: mol_type = other DNA
caataatgatgaagtcaatgattatatatcaagactgaaaaaacaatacggattaaatcttcatactgaagaaaa

SEQ ID NO: 422340 - DNA, 75 bp, synthetic construct
  source 1..75: mol_type = other DNA
ccagcttccggtagctatttacagttattgccagtatcaggacggtgcagcccccgggcgtggtgcctggacgcc

SEQ ID NO: 422341 - DNA, 75 bp, synthetic construct
  source 1..75: mol_type = other DNA
cccctcactttgaagggatcggagctataaaaatggttttaggtacattcctcaaattgaggattgtggaaaaac

SEQ ID NO: 422342 - DNA, 75 bp, synthetic construct
  source 1..75: mol_type = other DNA
gtccgcgcctggtttttagcgaatcgcgcgggggagcctgccgacctggtggactgtattgccggaaccatcgtc

SEQ ID NO: 422343 - DNA, 75 bp, synthetic construct
  source 1..75: mol_type = other DNA
agcaaaaacacgttcccgattttcggtgcgggctgggatcgcctgatgggacgccagaacgagacggtgaaagtg

SEQ ID NO: 422344 - DNA, 75 bp, synthetic construct
  source 1..75: mol_type = other DNA
cccaacgaacgcgcatcgctggcggcatggcgtcagggtggtgctacattgggcctgctgctgtgtacggtggga

SEQ ID NO: 422345 - DNA, 75 bp, synthetic construct
  source 1..75: mol_type = other DNA
agcgcactggcggtagtcaccattgtggcgatgggttgcttctacagtctgaacgagaagatgtacgtccgcatt

SEQ ID NO: 422346 - DNA, 75 bp, synthetic construct
  source 1..75: mol_type = other DNA
agtcattgaatccgaaagtcaggctgcatgggtttttctcttatgtctcttacttggattcagggggaaatattc

SEQ ID NO: 422347 - DNA, 75 bp, synthetic construct
  source 1..75: mol_type = other DNA
tttattcaatagttgttatgcttgatgaggttatattgtgttctgaacttccttacagaaaagaatggcgagata

SEQ ID NO: 422348 - DNA, 75 bp, synthetic construct
  source 1..75: mol_type = other DNA
gtataaatcatcgaggcttggtttctatttattacttgtaggtattgttgctgtctattttgtggttttatccat

SEQ ID NO: 422349 - DNA, 75 bp, synthetic construct
  source 1..75: mol_type = other DNA
ggtcaaaggttatggtgtcgaacaatgaccttacggcaacgatggcagaaaaggctgctgcaaccaacatcgacc

SEQ ID NO: 422350 - DNA, 75 bp, synthetic construct
  source 1..75: mol_type = other DNA
tctcactgtacctctgatggcaaattcgtttgcaatgatggaactattagtaaatccaaaaaaaatctgtactaa

SEQ ID NO: 422351 - DNA, 75 bp, synthetic construct
  source 1..75: mol_type = other DNA
atgaatacagctctttccatcatggacgatgccagctcaaacactgctatcgactatcgacaggaaatgaacgtc

SEQ ID NO: 422352 - DNA, 75 bp, synthetic construct
  source 1..75: mol_type = other DNA
aaaatgtacttaagatccgaatcattgactgacttggattcgctgtggaaagaacacatattcagcacaatccga

SEQ ID NO: 422353 - DNA, 75 bp, synthetic construct
  source 1..75: mol_type = other DNA
catgagtgttgctgaggttgagtcgctgccggacggagcggatattgacggcaactgggtgtttgacggggagag

SEQ ID NO: 422354 - DNA, 75 bp, synthetic construct
  source 1..75: mol_type = other DNA
tcaggaactgcttcagttaatcgccggagagggtttttcactggaagaactgcttgatcggcctgaagatacgcc

SEQ ID NO: 422355 - DNA, 75 bp, synthetic construct
  source 1..75: mol_type = other DNA
agtaaaaaccaggcggaaagctaaaggcggagtaagaaaggctaaataccgctttaaggatgaaaatggcgagat

SEQ ID NO: 422356 - DNA, 75 bp, synthetic construct
  source 1..75: mol_type = other DNA
agaaatgcagggaggccagcagcagtgaaacaataatcgcatcaacctatcacgaaccactttctccagccacag

SEQ ID NO: 422357 - DNA, 75 bp, synthetic construct
  source 1..75: mol_type = other DNA
atggggaaaataaaatattggctaatagcaggatttattatacttctttcgattgtttacagtacgaccaatcaa

SEQ ID NO: 422358 - DNA, 75 bp, synthetic construct
  source 1..75: mol_type = other DNA
tgaagaacgtcgtgaagatgctgaacgtgaagcggctgaacgagcagagcgtgaacggaaacgtcaggaactgct

SEQ ID NO: 422359 - DNA, 75 bp, synthetic construct
  source 1..75: mol_type = other DNA
gatgaatattcgttcattgcgtgtgtttgcccgtgagattgattttgagcagttgctcgaaatgcaggaaaagct

SEQ ID NO: 422360 - DNA, 75 bp, synthetic construct
  source 1..75: mol_type = other DNA
ggcttacagtatgcctgctgcaatccccgcgccatgtcgcaccgcgccaaaaacacgggcaccaaagcagttcgg

SEQ ID NO: 422361 - DNA, 75 bp, synthetic construct
  source 1..75: mol_type = other DNA
gcgatttcgatgcctgtcaggcgctggtgaagcaggcgtttgatgatgaagagctgaaagtggcgctggggctga

SEQ ID NO: 422362 - DNA, 75 bp, synthetic construct
  source 1..75: mol_type = other DNA
gcgatttcgatgcctgtcaggcgctggtgaagcaggcgtttgatgatgaagaactgaaagtggcgctggggctaa

SEQ ID NO: 422363 - DNA, 75 bp, synthetic construct
  source 1..75: mol_type = other DNA
aaaccactcaacagacgatgcgcgagttaaaagcgctgggatatatctcggaaccgcacgctgccgtagcttacc

SEQ ID NO: 422364 - DNA, 75 bp, synthetic construct
  source 1..75: mol_type = other DNA
atgcataaactctcaaaacgtccgacgatgggagatgagcgtgttgaaggtcgtggtgaagaccttagccatgct

SEQ ID NO: 422365 - DNA, 75 bp, synthetic construct
  source 1..75: mol_type = other DNA
taagcatgcagctaataatggtgggaagccaagtttagttaaatatcaagaatgtacggaggaagttgcattcga

SEQ ID NO: 422366 - DNA, 75 bp, synthetic construct
  source 1..75: mol_type = other DNA
acaacgagcaggtcagctttgcgcaagccgtaacccaggggttgggcaaaaatcaggggctgttttttccgcacg

SEQ ID NO: 422367 - DNA, 75 bp, synthetic construct
  source 1..75: mol_type = other DNA
tgattatcggggccggaggcgcattcaacgccattttaaaaagcagcagtctcgctgatacgctggcagttattc

SEQ ID NO: 422368 - DNA, 75 bp, synthetic construct
  source 1..75: mol_type = other DNA
atttgctgaatgacaggcacaaatatctctctgagcgcgtgtatggcttgtttaaggcgctgagtcctgcgcaca

SEQ ID NO: 422369 - DNA, 75 bp, synthetic construct
  source 1..75: mol_type = other DNA
gttttaaatgattttactggtgaatgttttaagcgtcagataaaagattttggtgatgagctggcaatcaaaatc

SEQ ID NO: 422370 - DNA, 75 bp, synthetic construct
  source 1..75: mol_type = other DNA
caacttccggcaaggactggaaccagatgatgacgcgtgccgtgaaccgttcaaaagggtttaatcatccgttgt

SEQ ID NO: 422371 - DNA, 75 bp, synthetic construct
  source 1..75: mol_type = other DNA
ccgttacaaccggtacgcctgtccggtgatgaattgtatggcgaagatccgtattacgtcctctacgtcacgccg

SEQ ID NO: 422372 - DNA, 75 bp, synthetic construct
  source 1..75: mol_type = other DNA
cctgcaagaccagtgtgcgatagtgcatcttgccggtgcccgcggtgattttgttgctgatgacaccattctgcc

SEQ ID NO: 422373 - DNA, 75 bp, synthetic construct
  source 1..75: mol_type = other DNA
tttcacttaagattaacttatgtaacagtgtagaagcattgaccaattcattcgggacagttattagtgataaac

SEQ ID NO: 422374 - DNA, 75 bp, synthetic construct
  source 1..75: mol_type = other DNA
gcgaggaggatatcagcgacgagcagatcatctccaacagcatcccgatctggctgcaaatgaaagatgccgcga

SEQ ID NO: 422375 - DNA, 75 bp, synthetic construct
  source 1..75: mol_type = other DNA
atgcaagttattctgcttgataaagtagtaaacctgggtagcctgggtgatcaggtaaacgttaaagcgggctat

SEQ ID NO: 422376 - DNA, 75 bp, synthetic construct
  source 1..75: mol_type = other DNA
gcgctgcgtgtttacggctactctactacgagaaaatgagcgcggtttaatggaggcgctgggatgccgtggcga

SEQ ID NO: 422377 - DNA, 75 bp, synthetic construct
  source 1..75: mol_type = other DNA
tgattgcgactaaagccttcgggctgggggctgatgtaccagacattcgtaatgtcatcattacatatattcctg

SEQ ID NO: 422378 - DNA, 75 bp, synthetic construct
  source 1..75: mol_type = other DNA
accgtaatcgtcacttatgttcccgaagacctagccgatttagtgcaaatggttggtcgtgctggacgcgacgga

SEQ ID NO: 422379 - DNA, 75 bp, synthetic construct
  source 1..75: mol_type = other DNA
cagcttggctgaattgggtgacatgattaagttagaaggtggtaattggctaacagctcccccacatgcagtacg

SEQ ID NO: 422380 - DNA, 75 bp, synthetic construct
  source 1..75: mol_type = other DNA
ctatctcgaaggcctcgcacattatctggggtacagaagcggcgatgaaaagctggaatcaggatttctccggct

SEQ ID NO: 422381 - DNA, 75 bp, synthetic construct
  source 1..75: mol_type = other DNA
atgaccacttttaccgacgaggacaaagaactaattaaagaaatcaaagagcgtataggcagcctggacgtccga

SEQ ID NO: 422382 - DNA, 75 bp, synthetic construct
  source 1..75: mol_type = other DNA
tattactccggatgacgggggatgctgttatatccggttaaggcggggcagtcctgcccacagaataatgccaga

SEQ ID NO: 422383 - DNA, 75 bp, synthetic construct
  source 1..75: mol_type = other DNA
tattactccggatgacgggggatgctgttatatccggttaaggcggggcagtcctgccccacagaataatgccag

SEQ ID NO: 422384 - DNA, 75 bp, synthetic construct
  source 1..75: mol_type = other DNA
tttgccggtagcggggtccgtattgaaggaagcagcccgtcattatttgtgcggacggatacggttcgtgctgtg

SEQ ID NO: 422385 - DNA, 75 bp, synthetic construct
  source 1..75: mol_type = other DNA
ctgcacggtgttcaaccgaagaaacaaaaacagcgctctgacgctgggttgcggcaagtcatccagcccggcgac

SEQ ID NO: 422386 - DNA, 75 bp, synthetic construct
  source 1..75: mol_type = other DNA
aattcaacacaggaagcgcagttctccgtactcgatgccatcaccgccagcgagctaattaacgatattgaagcc

SEQ ID NO: 422387 - DNA, 75 bp, synthetic construct
  source 1..75: mol_type = other DNA
cgggattattgcaggtgaaagatgcctgtaccgccgactcactggctgaatttgcctgggatctgtttaccgcct

SEQ ID NO: 422388 - DNA, 75 bp, synthetic construct
  source 1..75: mol_type = other DNA
tgtttaccgcctggcagaccgctggcgcaccgtcgaaagaaagctgggcattcactgcgttaggtgttctcggca

SEQ ID NO: 422389 - DNA, 75 bp, synthetic construct
  source 1..75: mol_type = other DNA
cacgtctgggtttcaatcgctggaataatggccagtatatgaaagcgtctgatgctgttgtagaactctggcaga

SEQ ID NO: 422390 - DNA, 75 bp, synthetic construct
  source 1..75: mol_type = other DNA
cggaagtgattaataaccctacgccacccgctgagcctggcaacgccacaccatcatttttagttaccgataatc

SEQ ID NO: 422391 - DNA, 75 bp, synthetic construct
  source 1..75: mol_type = other DNA
tctctcactagcaaatgacgatgtatggcagcgctgcgccgacaaactgattgcagctctcggaaacatacccgc

SEQ ID NO: 422392 - DNA, 75 bp, synthetic construct
  source 1..75: mol_type = other DNA
accactgtcggctggaaagggttaattaacgatccccatatggatggctcttttgatgtagaagccgggctgcag

SEQ ID NO: 422393 - DNA, 75 bp, synthetic construct
  source 1..75: mol_type = other DNA
gctcgcgaaaatatccagttgattccggttaggcagtgccgccagcgataccatgcggctgttggtctggccgag

SEQ ID NO: 422394 - DNA, 75 bp, synthetic construct
  source 1..75: mol_type = other DNA
aacgttgtcgtgacatacgtccccgatgatttgcctgatctcgttcagatgattggacgagccgggcgcgatggg

SEQ ID NO: 422395 - DNA, 75 bp, synthetic construct
  source 1..75: mol_type = other DNA
gtttcacgtaaattctggggcgaatgccctgaactcatggatgaaattgtctatgtctacggactagaatttgcc

SEQ ID NO: 422396 - DNA, 75 bp, synthetic construct
  source 1..75: mol_type = other DNA
cttaccaatggcgcagcggttacagaaaaaaatagcttacaaggatgccgttaattggctggcaaataacccgcg

SEQ ID NO: 422397 - DNA, 75 bp, synthetic construct
  source 1..75: mol_type = other DNA
atgcgcgccgccgcccagccgcaccgttttgttggcattaaccaggcagggcaggttgcgttgctacaaactcag

SEQ ID NO: 422398 - DNA, 75 bp, synthetic construct
  source 1..75: mol_type = other DNA
ctctccggtaactccggatggttggataagctgtagtgagcgaatgccggacgacaggcaggaggtgaatcaatg

SEQ ID NO: 422399 - DNA, 75 bp, synthetic construct
  source 1..75: mol_type = other DNA
gtcttatcgtccttgccgatcagccgaaatatacgggggaaggcacgggcatcaagaaaatcacgggaggcgatc

SEQ ID NO: 422400 - DNA, 75 bp, synthetic construct
  source 1..75: mol_type = other DNA
tgtttctgatgttatggatggcgctgttgatcgcagcaatggtgtatccacaggggatttttccggtactggcag

SEQ ID NO: 422401 - DNA, 75 bp, synthetic construct
  source 1..75: mol_type = other DNA
tctcgcctggacggggtgggctattactctggtcttttatctgctgaccgctattgccttctggatcacccgtaa

SEQ ID NO: 422402 - DNA, 75 bp, synthetic construct
  source 1..75: mol_type = other DNA
ttattgtcctggcagaccagccgaaatatacaggcgaaggcacgggcatcaagaaaatcacgggcggcgaccctg

SEQ ID NO: 422403 - DNA, 75 bp, synthetic construct
  source 1..75: mol_type = other DNA
ccgttgaaatcaacccgaaatatgagaagcgattcacgacgataataagggcggtggtactggcaaccaataacg

SEQ ID NO: 422404 - DNA, 75 bp, synthetic construct
  source 1..75: mol_type = other DNA
ggtcaatattgccgtctctggcactaacactgccggaaccacaaccagcattactcatccggtcacggtcgatct

SEQ ID NO: 422405 - DNA, 75 bp, synthetic construct
  source 1..75: mol_type = other DNA
agcaatatccatcagcattccgtaactgaaactgctctcgtttcatctgtaccagctaatcagtcgacggcaggg

SEQ ID NO: 422406 - DNA, 75 bp, synthetic construct
  source 1..75: mol_type = other DNA
aaaaatcagctgtgggtaaggttatcgttagtgtcgcttgctctgacggcagaattacgcctgccgaaatcaaac

SEQ ID NO: 422407 - DNA, 75 bp, synthetic construct
  source 1..75: mol_type = other DNA
aaaattccctgatgctgagttccgtaatctgttcaatgaagtcgctcggttaagatcgatattcattgagaaccg

SEQ ID NO: 422408 - DNA, 75 bp, synthetic construct
  source 1..75: mol_type = other DNA
ggcagcgccagccataatctggcggtagacaccaccgcgccggttctcaccattaacaccgtggcgggcgatgac

SEQ ID NO: 422409 - DNA, 75 bp, synthetic construct
  source 1..75: mol_type = other DNA
aatcctggcttcaccgatgatgaaaaacgctctctacatgcgtatttaacgtggcaacttcataccccagccaat

SEQ ID NO: 422410 - DNA, 75 bp, synthetic construct
  source 1..75: mol_type = other DNA
tgttcgtaaattactgaactcgattttcactgaagaagaaccagaacaaccagaaagcgctccagcctcattaac

SEQ ID NO: 422411 - DNA, 75 bp, synthetic construct
  source 1..75: mol_type = other DNA
gcacggaagctggctgacctgattgaggcatgggaaccccctgaccactggttcaccggcatcggcaaatctgaa

SEQ ID NO: 422412 - DNA, 75 bp, synthetic construct
  source 1..75: mol_type = other DNA
acagtttttatcatgattgtttttattgttcagtcttatagacataagactgaatatggtggttttttcgtttta

SEQ ID NO: 422413 - DNA, 75 bp, synthetic construct
  source 1..75: mol_type = other DNA
cccataatgtgaccgttgatctcagcggcccgacgctgaccatcaataccgtctccgacgatgacattattaaca

SEQ ID NO: 422414 - DNA, 75 bp, synthetic construct
  source 1..75: mol_type = other DNA
gccgaacggcgttctgcgtaccacaggcgaacacgaagtgagcttccaggttcacagcgaagtattcgcgaaagt

SEQ ID NO: 422415 - DNA, 75 bp, synthetic construct
  source 1..75: mol_type = other DNA
attgagaaaagttcttgagactcatgaaatagtgaagagtattatcaggtattataactcagacagaaacgtgta

SEQ ID NO: 422416 - DNA, 75 bp, synthetic construct
  source 1..75: mol_type = other DNA
aaagatccgtggggcaatgattatcagtatctcagcccgggtgaaaaaggactgtttgatgtttacaccctgggg

SEQ ID NO: 422417 - DNA, 75 bp, synthetic construct
  source 1..75: mol_type = other DNA
aagaactggcgggctccgatgacaagaaaagcaatgcggtttcgctggtaacgtccagtaacagctgtccggcga

SEQ ID NO: 422418 - DNA, 75 bp, synthetic construct
  source 1..75: mol_type = other DNA
ttttgttctggttaattttgatattcagccggtgtcggcattacgtcgacatagcgcatttattgatttcgtgaa

SEQ ID NO: 422419 - DNA, 75 bp, synthetic construct
  source 1..75: mol_type = other DNA
gttctccggcaccggcaaatctgaaggaaaggcacttctcatcgccttcctgcgtaactgcaaaggctttcgcac

SEQ ID NO: 422420 - DNA, 75 bp, synthetic construct
  source 1..75: mol_type = other DNA
gtgagtgttgaactgacggataaaggaggtcgatgtgcagcactgggcatgtcgaacggtacgtggtttaccctt

SEQ ID NO: 422421 - DNA, 75 bp, synthetic construct
  source 1..75: mol_type = other DNA
atgttggagcatatacgcaggcagaatgtaactcaaggtttattacaggtattcgccttggcggtctgtcatctg

SEQ ID NO: 422422 - DNA, 75 bp, synthetic construct
  source 1..75: mol_type = other DNA
tgaaatcgttcacgtatggcgcggcggggtatggtgtccggtcagcacaatggagctgagccgcgaaatggtggc

SEQ ID NO: 422423 - DNA, 75 bp, synthetic construct
  source 1..75: mol_type = other DNA
ggtgatgaagcactggcgataaagcaacagacggatccggttattgagttttgccagttcctgaattttctggag

SEQ ID NO: 422424 - DNA, 75 bp, synthetic construct
  source 1..75: mol_type = other DNA
tggattctgtttcgtaaattctcctctcaggaggaagttgaaaatgtggccgcacaactactggagtttgcgtaa

SEQ ID NO: 422425 - DNA, 75 bp, synthetic construct
  source 1..75: mol_type = other DNA
aaacctcttccggattacttctcgcggcgacgccggagagttgcgattttctgcatcaaatcaaaataggcgagt

SEQ ID NO: 422426 - DNA, 75 bp, synthetic construct
  source 1..75: mol_type = other DNA
acggggagttcggcaactgactttatcaccagcgataccacgctcacgttgacggggtcactggggacagggctt

SEQ ID NO: 422427 - DNA, 75 bp, synthetic construct
  source 1..75: mol_type = other DNA
gcctcgcgaacgaaaactggtgtccggtttcgttgattacctgtgtgaatcagtaggccgggaacatacgccagc

SEQ ID NO: 422428 - DNA, 75 bp, synthetic construct
  source 1..75: mol_type = other DNA
gctaaagtcatttgatgctttccgtgaatgggtaactattgaggccggattttacaccgagcatttttatccgga

SEQ ID NO: 422429 - DNA, 75 bp, synthetic construct
  source 1..75: mol_type = other DNA
atggcgcatatacaactggtcaaacaaacctcttctggtttacttctcccggcgacgccggagagttgcgatttt

SEQ ID NO: 422430 - DNA, 75 bp, synthetic construct
  source 1..75: mol_type = other DNA
agcgttggctggggtgaagactaccctttaaatacagttttggttaggaacgaaataagaacaattgcagaagtc

SEQ ID NO: 422431 - DNA, 75 bp, synthetic construct
  source 1..75: mol_type = other DNA
cccggaacaatataaaaaatttagtaattatccagttattggacttaatagctcaagaaataactcagtccaact

SEQ ID NO: 422432 - DNA, 75 bp, synthetic construct
  source 1..75: mol_type = other DNA
agggcaatcgcaaaacttgaagcgctggatggctggtatgattttcagtcggaatgtatcttaacgctcagggtt

SEQ ID NO: 422433 - DNA, 75 bp, synthetic construct
  source 1..75: mol_type = other DNA
atggcgcatatacaactggttaaacaaacatcttccggcttactgctcccggcgacaccggagagttgcgatttt

SEQ ID NO: 422434 - DNA, 75 bp, synthetic construct
  source 1..75: mol_type = other DNA
cggggcaatctcctccaacgaacgcaagctggtaaccggctatgccaagttccttgcctcattcgcgggaagtga

SEQ ID NO: 422435 - DNA, 75 bp, synthetic construct
  source 1..75: mol_type = other DNA
cgttgagtatctgtgcgaatcagttggtcgggaacacactccagccctgagcgaagccgcagagcaatatctgaa

SEQ ID NO: 422436 - DNA, 75 bp, synthetic construct
  source 1..75: mol_type = other DNA
tcgattactggactccggtcggtggggcgatcacgcctcgcgaacgaaaactggtgtccggtttcgttgattacc

SEQ ID NO: 422437 - DNA, 75 bp, synthetic construct
  source 1..75: mol_type = other DNA
tcggtgatcctgccagggcttgttgacccggacagcggcaaaattcattacatgccgcatattcaggtggaaaac

SEQ ID NO: 422438 - DNA, 75 bp, synthetic construct
  source 1..75: mol_type = other DNA
tgaaatcaccgaagccgataaagtgctgctccctgctattgaaagctgcattaatacccaggcgctgaaggcgtt

SEQ ID NO: 422439 - DNA, 75 bp, synthetic construct
  source 1..75: mol_type = other DNA
gcttaacagcgcggcggtttatcgcttgattgaccagtacgggccaatctcgcggattcagattgccgagcaaag

SEQ ID NO: 422440 - DNA, 75 bp, synthetic construct
  source 1..75: mol_type = other DNA
catcagaaggagaaaccccatgcctgcttgtgagcttcgcccgactacgcagtacgacaccaacgcagtttacgc

SEQ ID NO: 422441 - DNA, 75 bp, synthetic construct
  source 1..75: mol_type = other DNA
ggcagcctgcgccagtcggtcgacacgctgctgacgctgatccatcagaagaagaaacaccatgcctgcttgtga

SEQ ID NO: 422442 - DNA, 75 bp, synthetic construct
  source 1..75: mol_type = other DNA
cggccacgatatccgcagtctggcactggcagagcactacttcggtgcaagtcaggattgcgaagattccattct

SEQ ID NO: 422443 - DNA, 75 bp, synthetic construct
  source 1..75: mol_type = other DNA
ctggtttcaggattcgttgattacctatgtgaatcagttggccgggaacatacgccagctctgagcgaagccgca

SEQ ID NO: 422444 - DNA, 75 bp, synthetic construct
  source 1..75: mol_type = other DNA
atggcgcatatacaactggtcaaacaaacttcttctggtttacttctcccggcgacgccggagagttgtgatttt

SEQ ID NO: 422445 - DNA, 75 bp, synthetic construct
  source 1..75: mol_type = other DNA
ggcgacgccggagagttgcgattttctgcatcaaatcaaaataggcgagtggatacacgcagactttaagcgtgt

SEQ ID NO: 422446 - DNA, 75 bp, synthetic construct
  source 1..75: mol_type = other DNA
gagcaataccttaacaccgttgcgactcgcagaacccgggatacggcattactcaagtcatttgacgctttccgc

SEQ ID NO: 422447 - DNA, 75 bp, synthetic construct
  source 1..75: mol_type = other DNA
tttagatgtgctgtggaattatattttgttccgcacgtttgcctctcaggaggctgctgaaaatgctgccgcgca

SEQ ID NO: 422448 - DNA, 75 bp, synthetic construct
  source 1..75: mol_type = other DNA
gagtgggtaaccattcaggccggattttacaccgagcatttttatccggacggtagccgtgggcgtcgggcgaaa

SEQ ID NO: 422449 - DNA, 75 bp, synthetic construct
  source 1..75: mol_type = other DNA
agaggctcacaactttcaaaaactatttaagtgataagttttctttaagctattcaaactcaaatgggcttaatg

SEQ ID NO: 422450 - DNA, 75 bp, synthetic construct
  source 1..75: mol_type = other DNA
gcaagcaatagcccgggctgtcgaccttatcgactcccccattcataccacgctgccgccacaagttctggcggt

SEQ ID NO: 422451 - DNA, 75 bp, synthetic construct
  source 1..75: mol_type = other DNA
ctgaaataccccctttgccacaagccaaaccaacatctgctggagctactcttccctggctggcagacgatgccc

SEQ ID NO: 422452 - DNA, 75 bp, synthetic construct
  source 1..75: mol_type = other DNA
gacaaggcttgaatccgccatgtgcctgcgccgccgctggtcgccggaaactttcagctcttcctggttgaacac

SEQ ID NO: 422453 - DNA, 75 bp, synthetic construct
  source 1..75: mol_type = other DNA
aaacaaaaaagggctacgtagaagaagtatccgtgatgacaccgacatctgtacccacccaggttatcgaatgcc

SEQ ID NO: 422454 - DNA, 75 bp, synthetic construct
  source 1..75: mol_type = other DNA
tgcagatgctgcggcggcggaaaaagcggaactgaagctgattgcggagaaaacaaaaaagggctacgtagaaga

SEQ ID NO: 422455 - DNA, 75 bp, synthetic construct
  source 1..75: mol_type = other DNA
gccgattatccgcgcatggcctggcgaatcccagcataaacgggccaccgtcggactggatattctcgccgctat

SEQ ID NO: 422456 - DNA, 75 bp, synthetic construct
  source 1..75: mol_type = other DNA
ggtttgcccaaaggcggcgcggtcggtttcgaactactcgatcaggaaaagtttggtatcagccagttcagcgaa

SEQ ID NO: 422457 - DNA, 75 bp, synthetic construct
  source 1..75: mol_type = other DNA
gtttgctgaaaagctgcacgaggaactgaaagtgctggttgtccgggctgcagatatcaacggaataaaaccagg

SEQ ID NO: 422458 - DNA, 75 bp, synthetic construct
  source 1..75: mol_type = other DNA
gagagccgcgaactcacggtggcggagcttgaagatcggttagcaccggatctcggtctggatgataacggttcg

SEQ ID NO: 422459 - DNA, 75 bp, synthetic construct
  source 1..75: mol_type = other DNA
aaaatactatccaggacagcctgggcaggtatttgatgattattacggaggtaaaatctggtgcgcaacgatact

SEQ ID NO: 422460 - DNA, 75 bp, synthetic construct
  source 1..75: mol_type = other DNA
taattccactgcttctaccttatgcctgacatcagaattactgtctttaattgatttaattgaagatattgaacc

SEQ ID NO: 422461 - DNA, 75 bp, synthetic construct
  source 1..75: mol_type = other DNA
cagggatatttaaagcgatcatttggcggtgctattgcgacaccactctcctctgaaccagaagcgatacaaccg

SEQ ID NO: 422462 - DNA, 75 bp, synthetic construct
  source 1..75: mol_type = other DNA
cagaaaatgcccgagcggtcgggtaatggggctggcgaataaaggctggatgcgtggtgaaccgcaggacggtgg

SEQ ID NO: 422463 - DNA, 75 bp, synthetic construct
  source 1..75: mol_type = other DNA
aacgtcgcagggaacagcgcccaggcaacgcatgtttatagcgtcgatgccactgcgccctctgtcaccatcaac

SEQ ID NO: 422464 - DNA, 75 bp, synthetic construct
  source 1..75: mol_type = other DNA
cctgtcacgtctgttactattagaagtcttacacgcccatcggactaccggattacaactgccggatcgtatcgt

SEQ ID NO: 422465 - DNA, 75 bp, synthetic construct
  source 1..75: mol_type = other DNA
tgtggtcgctgcctgcaaaaaccaccgccgtggcaaagactggtcacggttgccgactatgcaccaccgttaagt

SEQ ID NO: 422466 - DNA, 75 bp, synthetic construct
  source 1..75: mol_type = other DNA
gaacatggacagttggccggatatgtcgctcaggccgggaaggtatttaccaggggactccctgaaaaaggtcat

SEQ ID NO: 422467 - DNA, 75 bp, synthetic construct
  source 1..75: mol_type = other DNA
atgacagattttatattaattttactctccctctgggaggaagtgttcaaagcccggtgttttccactgttttaa

SEQ ID NO: 422468 - DNA, 75 bp, synthetic construct
  source 1..75: mol_type = other DNA
gagtcaggttagcatcggatgaacgaatgttacccggttctttacgtggctatgctcctgctgtccggggaatag

SEQ ID NO: 422469 - DNA, 75 bp, synthetic construct
  source 1..75: mol_type = other DNA
aaaatactctccaggacagcctgggcaagtatttgatgattattacggcggtaatatctggtgtgcgacggtact

SEQ ID NO: 422470 - DNA, 75 bp, synthetic construct
  source 1..75: mol_type = other DNA
aaaaatcacataaattctgggcggtggagcagcagggaaacgaactgcacatcaactggcgtaaagtcggcacca

SEQ ID NO: 422471 - DNA, 75 bp, synthetic construct
  source 1..75: mol_type = other DNA
tggctgggggagtcattcaacacaggaagcgcagttctccgcactcgatgacatcaccgccagcgagttgattaa

SEQ ID NO: 422472 - DNA, 75 bp, synthetic construct
  source 1..75: mol_type = other DNA
aaaaatgcctttcgccttgaattgcctgtgcaaggtcgccatatggtgattgtggatgatgtcgtcaccaccgga

SEQ ID NO: 422473 - DNA, 75 bp, synthetic construct
  source 1..75: mol_type = other DNA
gtgaccttcacaacaaaaacggggaaagccatgttgtttgatgtgaagatgcaggacggaacgccgccgccgatg

SEQ ID NO: 422474 - DNA, 75 bp, synthetic construct
  source 1..75: mol_type = other DNA
atcggagttgggatcgcgagacatataaatatatcggcgcttctgactcggcaattgacgcatgggaacgtgagg

SEQ ID NO: 422475 - DNA, 75 bp, synthetic construct
  source 1..75: mol_type = other DNA
gcaatggataatctgccttacgtgttcgatgaggcgggagtaactattggttattccgcggttactgtctggcaa

SEQ ID NO: 422476 - DNA, 75 bp, synthetic construct
  source 1..75: mol_type = other DNA
tttagagaatgccccgcagacctttatcggcctgttagaaggtaaaaacttcggcaaagtcgttatccgcgtggc

SEQ ID NO: 422477 - DNA, 75 bp, synthetic construct
  source 1..75: mol_type = other DNA
gcctgttgatattggcggcgtgatggtcggcggtacggtgagccgtgtcgtggagtcgaatcatcctgattatca

SEQ ID NO: 422478 - DNA, 75 bp, synthetic construct
  source 1..75: mol_type = other DNA
gattattatctgaagtatgtcatctggtttttgcatcatgaagttcaggcaactaagaggattatcttcaaggat

SEQ ID NO: 422479 - DNA, 75 bp, synthetic construct
  source 1..75: mol_type = other DNA
gcgtgccacgcaacgagtacgtttgattgccgagaatgtcagcccgcagtcgctgttgcgacacgtttcccgggt

SEQ ID NO: 422480 - DNA, 75 bp, synthetic construct
  source 1..75: mol_type = other DNA
cagcgtaatggctatttatgggcgccaggcttaacgctgtggaagtcagcgatcctgaaacctttcttgcaaacg

SEQ ID NO: 422481 - DNA, 75 bp, synthetic construct
  source 1..75: mol_type = other DNA
tgctaccgttacttaatacatctgcgcgcattcccgtttgcggcttagtgagcagctataacgctacagagctac

SEQ ID NO: 422482 - DNA, 75 bp, synthetic construct
  source 1..75: mol_type = other DNA
acgtgattaacgccagcgaaaaaggcgcagatctgcaaatttccggcaccagtaatcagccagcaggcaccactg

SEQ ID NO: 422483 - DNA, 75 bp, synthetic construct
  source 1..75: mol_type = other DNA
cccgaagaggggctgaaacgaatgctgggcgaaacccggcactacggtatccccgccacactgcggggcatggtg

SEQ ID NO: 422484 - DNA, 75 bp, synthetic construct
  source 1..75: mol_type = other DNA
ccatgagttccagcaggagatggggcaatgggtgaaagaggggaaaatccattatcgcgagcaaatgaccgacgg

SEQ ID NO: 422485 - DNA, 75 bp, synthetic construct
  source 1..75: mol_type = other DNA
tttagagaatgcgccacagacgtttatcggcctgctgaagggtaaaaacttcggcaaagtggtgatccgcgtcgc

SEQ ID NO: 422486 - DNA, 75 bp, synthetic construct
  source 1..75: mol_type = other DNA
gcaaatcggcaaactgaaaggctgtcgggtggtgggtgttgccggtggcgctgaaaaatgccgccatgctactga

SEQ ID NO: 422487 - DNA, 75 bp, synthetic construct
  source 1..75: mol_type = other DNA
acctgttcacgtcgctcaccgaaaggacagctatctctatgatttatttaaaattcaagggagagaactcttaac

SEQ ID NO: 422488 - DNA, 75 bp, synthetic construct
  source 1..75: mol_type = other DNA
atgagacctaacatttcaatcactcttaccacgcctcatgtgactattgaacgctatagcgagctgacagggctg

SEQ ID NO: 422489 - DNA, 75 bp, synthetic construct
  source 1..75: mol_type = other DNA
tgaatacgccacatgtcacaattgagcgttatagcgaacttactggtctttcaatcgacacaattaacgatatgc

SEQ ID NO: 422490 - DNA, 75 bp, synthetic construct
  source 1..75: mol_type = other DNA
gtatccaggatggtttgtaagttacaaggccgatgttgtggaacctggttcaaaatatgcgagcgcgcgttactc

SEQ ID NO: 422491 - DNA, 75 bp, synthetic construct
  source 1..75: mol_type = other DNA
tttcctccccggtgccgatcattctgtttatcgacgaagcgcataccctgattggcgcgggcaaccagcagggcg

SEQ ID NO: 422492 - DNA, 75 bp, synthetic construct
  source 1..75: mol_type = other DNA
tgaccaccctgagccaccagcaggaggcggaaattcgccagcttgagcgcgagcttcgcatcgggctgcgtaccg

SEQ ID NO: 422493 - DNA, 75 bp, synthetic construct
  source 1..75: mol_type = other DNA
ccgtggatctggctggtgggcaagcgttccgtgcaacagaaaccggcgacaccctgcttgcccgctatgccaaaa

SEQ ID NO: 422494 - DNA, 75 bp, synthetic construct
  source 1..75: mol_type = other DNA
tgattgcactggtgctctatgccctgttaccgctggtgcgcggcgtggtagtcggcttgaaccagatcccgcgcg

SEQ ID NO: 422495 - DNA, 75 bp, synthetic construct
  source 1..75: mol_type = other DNA
gtgagcgtgcggattcatctaaggtgattatagaaatttcactttctactaccactactatggggactcgtcaag

SEQ ID NO: 422496 - DNA, 75 bp, synthetic construct
  source 1..75: mol_type = other DNA
ttagatacctggtatgtgggaatgaatgattttgcccgaattgccggggggcagaatagcagaagcaatattctt

SEQ ID NO: 422497 - DNA, 75 bp, synthetic construct
  source 1..75: mol_type = other DNA
tggtgctacttttccactgctcggcagggggcaatttttctctgctcaatgtcattcagaccgtgccttcggtgg

SEQ ID NO: 422498 - DNA, 75 bp, synthetic construct
  source 1..75: mol_type = other DNA
ggctgacagcctgttttattcccgctaaaaaaggcagcatttttgcactcattctggcgcaattcgtcttcgtat

SEQ ID NO: 422499 - DNA, 75 bp, synthetic construct
  source 1..75: mol_type = other DNA
tggtgctacttttccactgcgcggcagggggcgattttttctctgctcaatgtcattcagaccgtgccttcggtg

SEQ ID NO: 422500 - DNA, 75 bp, synthetic construct
  source 1..75: mol_type = other DNA
ctggttcgtaaacagcaggcttcgcaggacggaaaaccccggcagggtgccctgtattttgtgtcgttttccatt

SEQ ID NO: 422501 - DNA, 75 bp, synthetic construct
  source 1..75: mol_type = other DNA
acacgcgaagcagcaaccaccgaaaaaggactgccgatcaccagagcagttatcaataagctgaaggaccagaag

SEQ ID NO: 422502 - DNA, 75 bp, synthetic construct
  source 1..75: mol_type = other DNA
cggcggatattcaggcgctgggtaacggcaacctgacagttaacgcctcggtcaccaatggcgttggcaacacgg

SEQ ID NO: 422503 - DNA, 75 bp, synthetic construct
  source 1..75: mol_type = other DNA
gggtacggtggatattacggtaagcggcaccaacagcgccggaacaacctccaccattacccatccggtcactgt

SEQ ID NO: 422504 - DNA, 75 bp, synthetic construct
  source 1..75: mol_type = other DNA
ggtcgacagcgcgctgcccggcgtgaccattaacccggtggcaaccgacgatattattaacgccgccgaagcggg

SEQ ID NO: 422505 - DNA, 75 bp, synthetic construct
  source 1..75: mol_type = other DNA
atgccgcgatgcagatatagccgtccgcgtaaattagctgatgcagtccaggtaacctcgtcatggcgccgcgcg

SEQ ID NO: 422506 - DNA, 75 bp, synthetic construct
  source 1..75: mol_type = other DNA
cgctgacttgagcggagcaacgaaaggccagcttgaagcctggctggagcatgcacaatttgatactggtacata

SEQ ID NO: 422507 - DNA, 75 bp, synthetic construct
  source 1..75: mol_type = other DNA
ctggaccgatgaccagaccgcccagatcctcaactggatcaagcaggagatcaacctgccggtcgcgctggcggt

SEQ ID NO: 422508 - DNA, 75 bp, synthetic construct
  source 1..75: mol_type = other DNA
atgaaacgcagaagaagattgctatgcaagccgatattgagcagttaacgaagatttcaacgaagtactcaaagg

SEQ ID NO: 422509 - DNA, 75 bp, synthetic construct
  source 1..75: mol_type = other DNA
gtcaccacagactgaacatccagctatcgctattcagcgcaaagaacacgatgaaagaattgcacttgagcaaga

SEQ ID NO: 422510 - DNA, 75 bp, synthetic construct
  source 1..75: mol_type = other DNA
cgttgtctggcaggcgctcaagtacgctggctattgcgctaatctgcgtcaggaaagcgtggtcgaaatcttcca

SEQ ID NO: 422511 - DNA, 75 bp, synthetic construct
  source 1..75: mol_type = other DNA
ggcgagctgaaaacccgccatctgctgcgcaaagctttctggactaaaatgctggagcgtctgaaagccagttcc

SEQ ID NO: 422512 - DNA, 75 bp, synthetic construct
  source 1..75: mol_type = other DNA
gctgcagcaccactcacatcagagcagcaacgtattcgtgagctggaaaagcaggtgtgtcgtctggaggaacaa

SEQ ID NO: 422513 - DNA, 75 bp, synthetic construct
  source 1..75: mol_type = other DNA
aactggtccaaaacatttactcgtcactgggttgcaatgaaacacatttttcaccgacttgatagtgaggcttta

SEQ ID NO: 422514 - DNA, 75 bp, synthetic construct
  source 1..75: mol_type = other DNA
cggcgcaactgatggtgttcagatcgacccgacgctgttttcacagtacggcattcgcagcgtaccggccctggt

SEQ ID NO: 422515 - DNA, 75 bp, synthetic construct
  source 1..75: mol_type = other DNA
gcggattaaccgccagcagttataccgtgactgccacggtgagcgacaaagcgggcaacccggcaagcgccgatc

SEQ ID NO: 422516 - DNA, 75 bp, synthetic construct
  source 1..75: mol_type = other DNA
aggcgctgggcaatggcgatttgaccattaccgcctcagtcaccaacggtaatggcaacaccggcagcggcacgc

SEQ ID NO: 422517 - DNA, 75 bp, synthetic construct
  source 1..75: mol_type = other DNA
ctgatctggcgctttccggcaccagcgatcagcctgcgggtacggcgatcaccgtcacgctgaacggacaaaact

SEQ ID NO: 422518 - DNA, 75 bp, synthetic construct
  source 1..75: mol_type = other DNA
caactacacggtaacggcggcggtgaccagcagtatcggcaacagcgccaccgccagccataacgtgctggtcga

SEQ ID NO: 422519 - DNA, 75 bp, synthetic construct
  source 1..75: mol_type = other DNA
acctggagcgtcggcgttccggcggcagatgtcacaaactggcctgcggggacggtcaatattgccgtctctggc

SEQ ID NO: 422520 - DNA, 75 bp, synthetic construct
  source 1..75: mol_type = other DNA
ggcgacgatattcttaacgccgccgaagcgggtgctgcgctgactatcactggcagcagcacggcggaagccggg

SEQ ID NO: 422521 - DNA, 75 bp, synthetic construct
  source 1..75: mol_type = other DNA
gtaccagaaaaattgcaggaaaaactctggtgcgcctgaagacgttgagctggttggcggcgcaggcggtaaaag

SEQ ID NO: 422522 - DNA, 75 bp, synthetic construct
  source 1..75: mol_type = other DNA
gatgaggtaactggcagaatgattatgctggataatccgctgatttccggtaagcagtcgtacgcaaaaggttca

SEQ ID NO: 422523 - DNA, 75 bp, synthetic construct
  source 1..75: mol_type = other DNA
ctagacaccgaatctttgatttgtactgtgaaaatgagatctaaacaaaaaacgaccttttcgcgacgagatatt

SEQ ID NO: 422524 - DNA, 75 bp, synthetic construct
  source 1..75: mol_type = other DNA
gatgggtaaccgggcgtgagaactaccagcgacaggagcttgccaggctgtgtggaattaagcctgacaactgga

SEQ ID NO: 422525 - DNA, 75 bp, synthetic construct
  source 1..75: mol_type = other DNA
atggcggaaacatttgctgggagcatcagatcgcgataacgcagtgggtgtggagtgaatttaaaactcagtccg

SEQ ID NO: 422526 - DNA, 75 bp, synthetic construct
  source 1..75: mol_type = other DNA
tattaatgccttatgtatgtaatgaatcgatttcatacttgcttggtgaaaaagggatactgaaagaaatagatg

SEQ ID NO: 422527 - DNA, 75 bp, synthetic construct
  source 1..75: mol_type = other DNA
ctgggtcgcaaaaggtgtcgaaccgaccaaattcaccgaagttaccgacgtggtgctgatcacgcgtgacaactt

SEQ ID NO: 422528 - DNA, 75 bp, synthetic construct
  source 1..75: mol_type = other DNA
ggtatgaacgacagcaccgtgctgggcggcgtacgcgcgacggaaggtcagggctttaaagctgccgatatcatc

SEQ ID NO: 422529 - DNA, 75 bp, synthetic construct
  source 1..75: mol_type = other DNA
tacttccctcagttacttaagagctatgaggatgaaaagatttattttgataagttagggtataattttaataat

SEQ ID NO: 422530 - DNA, 75 bp, synthetic construct
  source 1..75: mol_type = other DNA
tgatgatgctaaaaagataaagcatgcatgctccgtaataaatcatattaatcttcgcagcgatcagtctaaaat

SEQ ID NO: 422531 - DNA, 75 bp, synthetic construct
  source 1..75: mol_type = other DNA
ttaaataatatacaggagttaaataatatacaggagttaaataattcgcaggagttaaataatccacaggagtta

SEQ ID NO: 422532 - DNA, 75 bp, synthetic construct
  source 1..75: mol_type = other DNA
ccggttattcaggtggcctgtaagctggcgggtgcggtccatttcgctgatgtgcagatcaacgtcgttcgctaa

SEQ ID NO: 422533 - DNA, 75 bp, synthetic construct
  source 1..75: mol_type = other DNA
taagagccgtagcaactattcggtcggctacagtaacagcgcttcatggggaagctacagtatcagcgctcaacg

SEQ ID NO: 422534 - DNA, 75 bp, synthetic construct
  source 1..75: mol_type = other DNA
agtttcaccattcctattgaaaaattacttggcactgaacaacggacttcaggtttccagagtattgatactcaa

SEQ ID NO: 422535 - DNA, 75 bp, synthetic construct
  source 1..75: mol_type = other DNA
caggcttcaacattaaacggagagaaagtgccaatggcgtctaaaaaattttactcagatgatgacatccagctg

SEQ ID NO: 422536 - DNA, 75 bp, synthetic construct
  source 1..75: mol_type = other DNA
agtaggagagaaggcacttcgtgacattattcgggaagcagaatcgaaaaaacccaccccgccgttcttcctcta

SEQ ID NO: 422537 - DNA, 75 bp, synthetic construct
  source 1..75: mol_type = other DNA
actatcgtcatggcaatatctcttttcgcgttatcctcaacatccagcacagaacaacattttcacattataaaa

SEQ ID NO: 422538 - DNA, 75 bp, synthetic construct
  source 1..75: mol_type = other DNA
tcattaagatttttgaagaaaagatgggtaatgaaggtaatgactccaacttattgatagtgttttatgttcaga

SEQ ID NO: 422539 - DNA, 75 bp, synthetic construct
  source 1..75: mol_type = other DNA
ttctctggttaatgactctttatccattgagcctagttcacgccactattatgatgaatctctgggatactggcc

SEQ ID NO: 422540 - DNA, 75 bp, synthetic construct
  source 1..75: mol_type = other DNA
cccaatataaacagcaaaatcatcaccaaaacaaattattcatcccgacaagaatctctcaataagccagacagc

SEQ ID NO: 422541 - DNA, 75 bp, synthetic construct
  source 1..75: mol_type = other DNA
gcccgtcatgaatccgataccacggacgtacgccagttgctgaacaccatcttcaccgaagatgaacccgctgac

SEQ ID NO: 422542 - DNA, 75 bp, synthetic construct
  source 1..75: mol_type = other DNA
ctcttgatgaacggatccttgcccgtcatgaatccgacacaacggacgtacgccagttactgaacaccatcttca

SEQ ID NO: 422543 - DNA, 75 bp, synthetic construct
  source 1..75: mol_type = other DNA
gtgacggtattgtcgtcaaacccaataaaacacggttgtatttaagctatacccccgccagtggtacgcttcggg

SEQ ID NO: 422544 - DNA, 75 bp, synthetic construct
  source 1..75: mol_type = other DNA
cgactgtggtcgataaaggacaacctatttgtgccgctctggcactggcatggatatactattttcctgattaca

SEQ ID NO: 422545 - DNA, 75 bp, synthetic construct
  source 1..75: mol_type = other DNA
acctgtctcatattcttattgattccttagatgatgcaaaagttaaccttacaccggtcatcgattcgattctgg

SEQ ID NO: 422546 - DNA, 75 bp, synthetic construct
  source 1..75: mol_type = other DNA
gaatgatggaaatcctccgggatgggaaaataaatatatgtgaatatattaataaagaacagttagaaaaattaa

SEQ ID NO: 422547 - DNA, 75 bp, synthetic construct
  source 1..75: mol_type = other DNA
ttaaatacctggcgtgttggaatgaataattttgctcgtaatgccgaggggcaggataatacaagaaatatcctc

SEQ ID NO: 422548 - DNA, 75 bp, synthetic construct
  source 1..75: mol_type = other DNA
gaaagacaagatcatagcatttacacacttttgactgacggaatttcggttgcggatatgaaaaattggttcgca

SEQ ID NO: 422549 - DNA, 75 bp, synthetic construct
  source 1..75: mol_type = other DNA
ctcagtctactgatggtcagataaatatcgtattaaatgattgtgacaatattagagaaagtcatatttctcttg

SEQ ID NO: 422550 - DNA, 75 bp, synthetic construct
  source 1..75: mol_type = other DNA
cgcaacagggagaaacgcttcgcacgtatgagcagcgactggagaaggtggagaagacttcagtcaccccggtat

SEQ ID NO: 422551 - DNA, 75 bp, synthetic construct
  source 1..75: mol_type = other DNA
atagcatttatctcagcttcacaattccaatagaaaatttactgggtacggaacaccgcagctccggcttccaga

SEQ ID NO: 422552 - DNA, 75 bp, synthetic construct
  source 1..75: mol_type = other DNA
tcggagtgtatgagccagcaggccagtgagatcaccgttgcccatgtgctgttgcagatgctggctatcccgcgc

SEQ ID NO: 422553 - DNA, 75 bp, synthetic construct
  source 1..75: mol_type = other DNA
aagggctggcgctgcgcatcgtggcagggcaggtgccggataagctgaaaaacaccgatatcatgactcttgacc

SEQ ID NO: 422554 - DNA, 75 bp, synthetic construct
  source 1..75: mol_type = other DNA
ccgtggatctggctggcgggcaaacgccccgcgcaacggaaaccagcgacaccctgctggcccgctacgccaaaa

SEQ ID NO: 422555 - DNA, 75 bp, synthetic construct
  source 1..75: mol_type = other DNA
cgtcaattgccggacaaagcgattgatgtgctggatacggcctgcgcccgcgtggcaatcaacctgtcatcgcca

SEQ ID NO: 422556 - DNA, 75 bp, synthetic construct
  source 1..75: mol_type = other DNA
gcggaagtgattattgaaccggaagtgacggacgaaatcatgagccgcgtcacccgcgcggaaaacggcgcgagg

SEQ ID NO: 422557 - DNA, 75 bp, synthetic construct
  source 1..75: mol_type = other DNA
tgacggcgctggatgaactggaagcggcctggcaccagcagcagacgctggtccgggagattatcgcgctgcgcc

SEQ ID NO: 422558 - DNA, 75 bp, synthetic construct
  source 1..75: mol_type = other DNA
gattggttcgcctccgggctacgttggctatggcgaaggcggcgtgctgaccgaagcgattcgccagaaaccgta

SEQ ID NO: 422559 - DNA, 75 bp, synthetic construct
  source 1..75: mol_type = other DNA
acgctgccgaagcgacgattattctgcgtggcctgtcggcggtctatgaacagtctcacggtgtgctgattgacg

SEQ ID NO: 422560 - DNA, 75 bp, synthetic construct
  source 1..75: mol_type = other DNA
accggcgctggcgcgtggcgaactgaaaaccatcgccgccacaacctggagcgaatacaaaaaatacttcgaaaa

SEQ ID NO: 422561 - DNA, 75 bp, synthetic construct
  source 1..75: mol_type = other DNA
accgtcctgcaactggcagagctgctctacggcggtcgccagtacctgaccaccatcaatatgtccgagttccag

SEQ ID NO: 422562 - DNA, 75 bp, synthetic construct
  source 1..75: mol_type = other DNA
ttgcccggattcggttgtcggcggtggacgacgcatttacggcagacgtggaagatgctcagaacgacgagtccg

SEQ ID NO: 422563 - DNA, 75 bp, synthetic construct
  source 1..75: mol_type = other DNA
tgatgatcgacattctctgccgccgccgtaaaaacaacccggtggtggtgggcgaagcaggcgtgggtaaaagcg

SEQ ID NO: 422564 - DNA, 75 bp, synthetic construct
  source 1..75: mol_type = other DNA
cagaaaccctactcggtggtgctgctcgatgaagtggaaaaagcgcacccggatgtgctcaacctgttctaccag

SEQ ID NO: 422565 - DNA, 75 bp, synthetic construct
  source 1..75: mol_type = other DNA
atgaaaaaattagcagcagtaattgcagtaatggctctgtgtagcgcaccagttatggcagcagagcagggtggt

SEQ ID NO: 422566 - DNA, 75 bp, synthetic construct
  source 1..75: mol_type = other DNA
atgaaaaaattcgcagcagtaatcgcagtaatggccctgtgcagtgcaccggtgatggcagcagagcagggcggt

SEQ ID NO: 422567 - DNA, 75 bp, synthetic construct
  source 1..75: mol_type = other DNA
attcagggggaagtcgataaagactggaattctgttgaaattgacgtcaaacagatccgcaaagtaaatccgtaa

SEQ ID NO: 422568 - DNA, 75 bp, synthetic construct
  source 1..75: mol_type = other DNA
ggtgacggtaaaccgctatgaacgcgataaaaaagctcgcgagaaagcagtcgaatatcacggatgccagtgcaa

SEQ ID NO: 422569 - DNA, 75 bp, synthetic construct
  source 1..75: mol_type = other DNA
gctttcagccattaaagaggattaccagctggatccagttaatgatttgctgcctgtgtgccctaattgccatgc

SEQ ID NO: 422570 - DNA, 75 bp, synthetic construct
  source 1..75: mol_type = other DNA
acattcatcaggataaagccgctgcagctcccatagccgatgttctgttcccggatgagttggcgtcgcaggaga

SEQ ID NO: 422571 - DNA, 75 bp, synthetic construct
  source 1..75: mol_type = other DNA
tatcaggtgattgtcgaacacgccgatgacccggaaaccatgcaggaagccctctatccggtgctggcggacttc

SEQ ID NO: 422572 - DNA, 75 bp, synthetic construct
  source 1..75: mol_type = other DNA
atggaagtggtgccgtatctgccgctgtcgaaagagacgctcgccaccattatcgccgggaaactggcccgtctg

SEQ ID NO: 422573 - DNA, 75 bp, synthetic construct
  source 1..75: mol_type = other DNA
cggcgtcgttgccgcacgtggatgccgtggaggatacgccgccagagtcagaacaggataataccggtgccgaac

SEQ ID NO: 422574 - DNA, 75 bp, synthetic construct
  source 1..75: mol_type = other DNA
atttgcatttgcatggctcaccactatttgttaatcagggtgagaccgtcttaaaactttcacgttctcaactta

SEQ ID NO: 422575 - DNA, 75 bp, synthetic construct
  source 1..75: mol_type = other DNA
ccgtgaggcatactggcaatatttgttaggacgggaagttactgtaaccaggttggataacatcactgacttcat

SEQ ID NO: 422576 - DNA, 75 bp, synthetic construct
  source 1..75: mol_type = other DNA
cggcaaggtccaccagaaggagaacatgagttggatacccttcaccaggctgtcacatattgtaaagctcttgct

SEQ ID NO: 422577 - DNA, 75 bp, synthetic construct
  source 1..75: mol_type = other DNA
aagtcgcaaaaatttgattatcagcatgaagaccgcacaggaccatcagcggatcgatggcggctcctttctggt

SEQ ID NO: 422578 - DNA, 75 bp, synthetic construct
  source 1..75: mol_type = other DNA
ccgaagggaaacagccaatatgcgtcgaatcatgcccgctgcgcgcccttgagttcggttcgattgaagagctac

SEQ ID NO: 422579 - DNA, 75 bp, synthetic construct
  source 1..75: mol_type = other DNA
agatggctttgtggtggttgatgaagatgtttgtatcggctgccgctactgccacatggcttgtccgtacggcgc

SEQ ID NO: 422580 - DNA, 75 bp, synthetic construct
  source 1..75: mol_type = other DNA
aaggcggctgccctgcaggtactgatgaacacactcacccacacggcagagcacgaggtgccgtaccgggtggaa

SEQ ID NO: 422581 - DNA, 75 bp, synthetic construct
  source 1..75: mol_type = other DNA
atgattgccaacggggaatgtctggtcgggcgcgttttgaacagggcgatgcgtttaatccggcagaactcagca

SEQ ID NO: 422582 - DNA, 75 bp, synthetic construct
  source 1..75: mol_type = other DNA
tttccacgacatattccggcacagaatgcggttctggacgtcacctttgaattccctcgcggacgagccacaaaa

SEQ ID NO: 422583 - DNA, 75 bp, synthetic construct
  source 1..75: mol_type = other DNA
cgctggacgacaaacgccgcgagcaacaagaaagcgccacggcgaaagcgcaaaaagcggtggacgacatcgccg

SEQ ID NO: 422584 - DNA, 75 bp, synthetic construct
  source 1..75: mol_type = other DNA
ggtcggcgactggctgggtgatgcgcgtgaaaacgacgtatttgaacatgctggcgcgcgtgacgtgatccgccg

SEQ ID NO: 422585 - DNA, 75 bp, synthetic construct
  source 1..75: mol_type = other DNA
agcgttgggggggatgggccgcgagcgatagctctggcgtggattactcaccaatcgcggctggtttcaaagggc

SEQ ID NO: 422586 - DNA, 75 bp, synthetic construct
  source 1..75: mol_type = other DNA
attaacgctcaacggaacgctggcgcgcaataaccccggtgtagttggccaggggatgacgcttggtattcagac

SEQ ID NO: 422587 - DNA, 75 bp, synthetic construct
  source 1..75: mol_type = other DNA
ttgttcgctttcacaaagaagggatcattgcagacattacaagcgcgatgggaaagatgatgcttacgatgttgt

SEQ ID NO: 422588 - DNA, 75 bp, synthetic construct
  source 1..75: mol_type = other DNA
gcctggcaggagcaggaaaaaacgctggccaacatcaaagccacgcgaatgcagaaaaacctgacggcggcggcg

SEQ ID NO: 422589 - DNA, 75 bp, synthetic construct
  source 1..75: mol_type = other DNA
gagcatgaggtgccgtaccggatggaaaccactgcagaaggcggcctgcacatcaccgtcagccggaagcactga

SEQ ID NO: 422590 - DNA, 75 bp, synthetic construct
  source 1..75: mol_type = other DNA
gtgattaacaacgtcgaacacactcaggcgcagattatcagcggcaccgccacgggcgcggtggcgggcgaccgc

SEQ ID NO: 422591 - DNA, 75 bp, synthetic construct
  source 1..75: mol_type = other DNA
taatgctgccttttctgaatcgtcactcatttttcgaggtcatcaccatgcgtacgttaacatcctataacgaag

SEQ ID NO: 422592 - DNA, 75 bp, synthetic construct
  source 1..75: mol_type = other DNA
tagaacccctagaagtaattggttctggcggttttggccttgtagaaaaaataaggttatataactcacaaagaa

SEQ ID NO: 422593 - DNA, 75 bp, synthetic construct
  source 1..75: mol_type = other DNA
gattttccgattcgtttggtggtaacccaccattatattcgtgcggtcttagtgcgctgtaatatccaacgatat

SEQ ID NO: 422594 - DNA, 75 bp, synthetic construct
  source 1..75: mol_type = other DNA
tttgtgccaataccagcagaaacagacgaagagtttcatacgttagccacatccctttcacaaaagctggaaatg

SEQ ID NO: 422595 - DNA, 75 bp, synthetic construct
  source 1..75: mol_type = other DNA
cgacgaatacgaggcgctgcgcgagtgcctggaagaactcagagcggcgcagggcgggggtagtgaccccgccag

SEQ ID NO: 422596 - DNA, 75 bp, synthetic construct
  source 1..75: mol_type = other DNA
gcatgtacagataccgtctggaaagggatgtgcaacccgaaggccttgtgttcggttattttggtgtaaacggct

SEQ ID NO: 422597 - DNA, 75 bp, synthetic construct
  source 1..75: mol_type = other DNA
gtggtcataacgtccatgttaatggggttgattatggcgttgaccgatgacggtaatggcgtacccaaaggaccg

SEQ ID NO: 422598 - DNA, 75 bp, synthetic construct
  source 1..75: mol_type = other DNA
cttgcgcctttacttattggtattctggttgctgttattggtgcttctaccggaccattaaccggttttgccatg

SEQ ID NO: 422599 - DNA, 75 bp, synthetic construct
  source 1..75: mol_type = other DNA
tctgacccctttccccgaacttatcaaccagcaatgggttcgccgctacgacatgacggtgcgcctgcgccggaa

SEQ ID NO: 422600 - DNA, 75 bp, synthetic construct
  source 1..75: mol_type = other DNA
ccgacgatcccggagcttggtaccaactggtgcgggttcaacatctcagactttcaggacgccgcaaacccggcc

SEQ ID NO: 422601 - DNA, 75 bp, synthetic construct
  source 1..75: mol_type = other DNA
gctggagcgccaccatcttcgcggcgcacagctggtgcagcacagcgccgtatgggtcgtgcgcaggagctcgcg

SEQ ID NO: 422602 - DNA, 75 bp, synthetic construct
  source 1..75: mol_type = other DNA
cggaacagtacgaaaagatatgcaaacagctatggggtttattgatggctgtttgtcatttttttatttaataca

SEQ ID NO: 422603 - DNA, 75 bp, synthetic construct
  source 1..75: mol_type = other DNA
tgtgcgcgggatttacaaccacgctcagtatctagataagcgcagagaaatgatgcagtggtgggctgactggct

SEQ ID NO: 422604 - DNA, 75 bp, synthetic construct
  source 1..75: mol_type = other DNA
tacgagcacaagaagcaagtctggtctgtagggtatgcgactgaacttgccaaaatgtttgacgacgacatttta

SEQ ID NO: 422605 - DNA, 75 bp, synthetic construct
  source 1..75: mol_type = other DNA
tttacaaccatgctcagtatctcgataaacgcagagaaatgatgcaatggtgggcggactggcttgatgaaaagg

SEQ ID NO: 422606 - DNA, 75 bp, synthetic construct
  source 1..75: mol_type = other DNA
tttacaaccatgctcagtatctcgataagcgcagagaaatgatgcaatggtgggcggactggcttgatgagaagg

SEQ ID NO: 422607 - DNA, 75 bp, synthetic construct
  source 1..75: mol_type = other DNA
ctttgcaggaggcaagggataaagcatggactgcgaggaaagacatctcggttggcatcgatccggtaaaggcga

SEQ ID NO: 422608 - DNA, 75 bp, synthetic construct
  source 1..75: mol_type = other DNA
tttacaaccacgctcagtatcttgataagcgcagggaaatgatgcaatggtgggcggactggcttgatgaaaagg

SEQ ID NO: 422609 - DNA, 75 bp, synthetic construct
  source 1..75: mol_type = other DNA
ttgccgccgaatgcctgaagccgaaagagccgcgtgcgccgggtcttgatgatatgacctatcgtcaggcgttta

SEQ ID NO: 422610 - DNA, 75 bp, synthetic construct
  source 1..75: mol_type = other DNA
acgtagtactgatgatcggaaaaatgtgccttattccgtattcatgacaccgccactgtccagggttggtatgac

SEQ ID NO: 422611 - DNA, 75 bp, synthetic construct
  source 1..75: mol_type = other DNA
accgccagcaatatcgaccagacagtcaataccacctggggcggtttacaggcgacagatgccacccacgcttac

SEQ ID NO: 422612 - DNA, 75 bp, synthetic construct
  source 1..75: mol_type = other DNA
tacgagcacaagaagcaagtctggtcagtaggctatgcgactgaacttgcaaaaatgtttgatgacgacatttta

SEQ ID NO: 422613 - DNA, 75 bp, synthetic construct
  source 1..75: mol_type = other DNA
cggtataccggcatgttcttgtttagatgcaccagttacacataaagctggttatgcaatctgccgttctgcaga

SEQ ID NO: 422614 - DNA, 75 bp, synthetic construct
  source 1..75: mol_type = other DNA
agtgaacaatctgaactggtctttaccgatggacaacagctaacccacgtaacctttgccgatgccgcagcgggg

SEQ ID NO: 422615 - DNA, 75 bp, synthetic construct
  source 1..75: mol_type = other DNA
aactggagcgtcggcgttccgctgtcagatgtcaccgcacttggcagcggcccgcaaaccatcacggccacgatt

SEQ ID NO: 422616 - DNA, 75 bp, synthetic construct
  source 1..75: mol_type = other DNA
cttaattttttgtgctaaagaagatttttcgtatgtttgtgctttaaaaaaacattttgctataccacctataat

SEQ ID NO: 422617 - DNA, 75 bp, synthetic construct
  source 1..75: mol_type = other DNA
tttctcactacgggaaggacactaaaatctggcgtctgcagtctgttccaccgattgaatattctgagacagaat

SEQ ID NO: 422618 - DNA, 75 bp, synthetic construct
  source 1..75: mol_type = other DNA
cgcttattattaattgtatcagaaccagaatttgcttacacatgggggccaaaaggttctgcagatgtaagaaac

SEQ ID NO: 422619 - DNA, 75 bp, synthetic construct
  source 1..75: mol_type = other DNA
atcgttggggggcttgggctgcagcagaaaatagtggtgtcgactggcagccgatagcggctggtttcaaggggt

SEQ ID NO: 422620 - DNA, 75 bp, synthetic construct
  source 1..75: mol_type = other DNA
agcgctggggagcatgggccgcagcagataacagtggtgtggactggcaaccgatcgcagctggcttcaaggggc

SEQ ID NO: 422621 - DNA, 75 bp, synthetic construct
  source 1..75: mol_type = other DNA
acgatggcaaatttgatatttattatcttaatgatgtccgaggcggcagcgatctgggggtacatgcttttcatc

SEQ ID NO: 422622 - DNA, 75 bp, synthetic construct
  source 1..75: mol_type = other DNA
agtctgattcagctgaaattgcaggccgggcggaagttgacgcaggcagaaaccacccgacttaacgccgtgctg

SEQ ID NO: 422623 - DNA, 75 bp, synthetic construct
  source 1..75: mol_type = other DNA
gtgcttgattacattgacgcggtgacggcaacagatacgagcaccgcgccggatgtcatctggcctgaactgccg

SEQ ID NO: 422624 - DNA, 75 bp, synthetic construct
  source 1..75: mol_type = other DNA
gattatatagacgcactgaacgcaatggatataaacatggcaccagatatcaaccggccggaaataccactggca

SEQ ID NO: 422625 - DNA, 75 bp, synthetic construct
  source 1..75: mol_type = other DNA
agcgccagccgtggcgtgacgctgaacggcgacgtgcccaccgtcaccatcaacacctttgcgggcgacgatgtg

SEQ ID NO: 422626 - DNA, 75 bp, synthetic construct
  source 1..75: mol_type = other DNA
cggtgaggcgtgggtaaccgatacagaacggcagcaagccgaagagctggaggttgccagacagcaacgcaagga

SEQ ID NO: 422627 - DNA, 75 bp, synthetic construct
  source 1..75: mol_type = other DNA
cgggttacgtgatttgccggacgtccacgctggacgggtgggagtatgtccccgatcatcgtggagagacggtat

SEQ ID NO: 422628 - DNA, 75 bp, synthetic construct
  source 1..75: mol_type = other DNA
acaaatggcctggtgtgtgggaataattttggcgaaatccgcgttccacataaaggtgatattgtcgggcaggtt

SEQ ID NO: 422629 - DNA, 75 bp, synthetic construct
  source 1..75: mol_type = other DNA
gatattgtcgggcaggttattgagggagcgtatgaagtgctcggtgcctttgataaagtcactgaaaatatggag

SEQ ID NO: 422630 - DNA, 75 bp, synthetic construct
  source 1..75: mol_type = other DNA
cgccgcgaatacagtaaacatatgttacgtcttcgcagggaagggcatattaacgggcaggaagttcctgaaatt

SEQ ID NO: 422631 - DNA, 75 bp, synthetic construct
  source 1..75: mol_type = other DNA
tcgtccagccaaatacaaatatacaaatgaaaacggcaatgagcagacttggacgggtcagggccgtactcctaa

SEQ ID NO: 422632 - DNA, 75 bp, synthetic construct
  source 1..75: mol_type = other DNA
ctatcgttgtagaagaacgtcgtgaagaagaggcctcatttctaaaacagcaggaagagaaacaggccaagctgg

SEQ ID NO: 422633 - DNA, 75 bp, synthetic construct
  source 1..75: mol_type = other DNA
cgatctctggacaacctggcagcgggttcaggagaatatgataaaaggtggattatcggggcgaagtgcctccgg

SEQ ID NO: 422634 - DNA, 75 bp, synthetic construct
  source 1..75: mol_type = other DNA
ggtattgatggtgatatccgaatcaacaaagcattatggatgattgccgaacagttcagggagtggaagtcatga

SEQ ID NO: 422635 - DNA, 75 bp, synthetic construct
  source 1..75: mol_type = other DNA
tacaaggacaagagccattacaggtattgatggtgatatccgaatcaacaaggcgttatgggtgattgccgaaca

SEQ ID NO: 422636 - DNA, 75 bp, synthetic construct
  source 1..75: mol_type = other DNA
gtttggaggataaacagaacgatctctggacaacctggcagcgggctcaggagaatatgataaaaggtggactgt

SEQ ID NO: 422637 - DNA, 75 bp, synthetic construct
  source 1..75: mol_type = other DNA
agtgacgatcaacatttatttggcagagctgcagtgatggacaggtaggaagatgaaaataaaacgccagtgacg

SEQ ID NO: 422638 - DNA, 75 bp, synthetic construct
  source 1..75: mol_type = other DNA
agtgacgaacaacatttatttggcagagctgcagtgatggtcaggtaggaagatgaaaataaaacgccagtgacg

SEQ ID NO: 422639 - DNA, 75 bp, synthetic construct
  source 1..75: mol_type = other DNA
agtgacgaacaacatttatttggcagagctgcattgatggacaggtaggaagatgaaaataaaacgccagtgacg

SEQ ID NO: 422640 - DNA, 75 bp, synthetic construct
  source 1..75: mol_type = other DNA
aatatcatcttgacgatatcgccatgcagcgactgcacaaaggcgagattgtcgccctggatgatcagtacacat

SEQ ID NO: 422641 - DNA, 75 bp, synthetic construct
  source 1..75: mol_type = other DNA
ccgaagtggctgatttcgtgtgttatctgttgtctgaacgtgccagttatattaccggagtgaccactaacattg

SEQ ID NO: 422642 - DNA, 75 bp, synthetic construct
  source 1..75: mol_type = other DNA
cagaggaacttcttcttcgtcgcagacattgccgcaatctgagcaggtatcacagccagcagccagcagtaattt

SEQ ID NO: 422643 - DNA, 75 bp, synthetic construct
  source 1..75: mol_type = other DNA
ttcgatatcaaagatcgaatggaaggtcgggatattgagcgtggcaagttggcagagacaatccgcagcaatcag

SEQ ID NO: 422644 - DNA, 75 bp, synthetic construct
  source 1..75: mol_type = other DNA
ttattgattccgtcgatgccggagttggcgcggtcattgacttatttgaactggaccttactcccctgggaggcg

SEQ ID NO: 422645 - DNA, 75 bp, synthetic construct
  source 1..75: mol_type = other DNA
atggctacgtggcaacagggtattaattctggtggttttctggctggcattggtgcgcaaaatgagaatgcgcca

SEQ ID NO: 422646 - DNA, 75 bp, synthetic construct
  source 1..75: mol_type = other DNA
gacaaatacccaacagcagcagagtcaatccggatcatatacctcaaaatcaggcattcaatttacggtggaatg

SEQ ID NO: 422647 - DNA, 75 bp, synthetic construct
  source 1..75: mol_type = other DNA
atgggcggtacggttaattgtgacaccagcgaactgggtggtgcccgcttctcgtttagctggccgttatggcat

SEQ ID NO: 422648 - DNA, 75 bp, synthetic construct
  source 1..75: mol_type = other DNA
tgtggctgtcaacgcatctgaccgacattcaggcgctaactcccgataaaacggtacggataaaaaccatcatac

SEQ ID NO: 422649 - DNA, 75 bp, synthetic construct
  source 1..75: mol_type = other DNA
ggatgatggcccagggattgccccagaaaaccgcgaacatatctttgaaccttttgttcgcctcgatcccagccg

SEQ ID NO: 422650 - DNA, 75 bp, synthetic construct
  source 1..75: mol_type = other DNA
gaaaactaaaccagccaatatctggagatgggtttcgtccaatagctttgccaacagcccaaaagatcatggaaa

SEQ ID NO: 422651 - DNA, 75 bp, synthetic construct
  source 1..75: mol_type = other DNA
ccgcaccggtactggtgttgcgtgggataaaaaatacggggatttgcatgcaaaaccatgcaccttatggatgca

SEQ ID NO: 422652 - DNA, 75 bp, synthetic construct
  source 1..75: mol_type = other DNA
ctcagtgctgaagcgggtacggcgagcaacaacggcaagtttgtcggcactggctataacgacaccttcttcgcc

SEQ ID NO: 422653 - DNA, 75 bp, synthetic construct
  source 1..75: mol_type = other DNA
tgtggtcgatgaagatgtgtgcattggctgccgctactgccatatggcttgcccgtatggcgcactgaaccgccc

SEQ ID NO: 422654 - DNA, 75 bp, synthetic construct
  source 1..75: mol_type = other DNA
accggcagcagcggcgataaccaactggaagggcgcggcggtaacgacaccattaatatcggtaacggcggtcac

SEQ ID NO: 422655 - DNA, 75 bp, synthetic construct
  source 1..75: mol_type = other DNA
tcctttaacggatgatgaattaatgcagtttgtgccttcggtattttccggtgataaacatgaatcccggagtga

SEQ ID NO: 422656 - DNA, 75 bp, synthetic construct
  source 1..75: mol_type = other DNA
ccccgccgttgggaggataaacagaacgatctctggacaacctggcagcgggttcaggagaatatgataaaaggt

SEQ ID NO: 422657 - DNA, 75 bp, synthetic construct
  source 1..75: mol_type = other DNA
caacatttatttggcagagctgcactgatggtcaggtatgaagatgaaaataaaacgccagtgacgcctgaataa

SEQ ID NO: 422658 - DNA, 75 bp, synthetic construct
  source 1..75: mol_type = other DNA
tgcgccatttcttgataccgttgctcagaccagcgccttcccgtgggggtggctggcgggggcggcggtaggtgg

SEQ ID NO: 422659 - DNA, 75 bp, synthetic construct
  source 1..75: mol_type = other DNA
cctataccgccacggttgccgccaatggcacctgggcgctgaacgtgcctgcggcggatctggcatcgctcgggc

SEQ ID NO: 422660 - DNA, 75 bp, synthetic construct
  source 1..75: mol_type = other DNA
gcggtttcttatgacagtgattatttctggttccgggggctgggcgggggcttttatctgtggaatgacagtgcg

SEQ ID NO: 422661 - DNA, 75 bp, synthetic construct
  source 1..75: mol_type = other DNA
gacgctcaccattaacaccatcgccagcgacgatatccttaacgccacagaggcgggaaatccgctcaccatcag

SEQ ID NO: 422662 - DNA, 75 bp, synthetic construct
  source 1..75: mol_type = other DNA
cagcatgaacagcatcaccagcgatgatgtgattaacgccgccgaaaaaggcgcagcgttaacgctctccggcag

SEQ ID NO: 422663 - DNA, 75 bp, synthetic construct
  source 1..75: mol_type = other DNA
aacatcaacggcaataacgcccaggcggatcgcgcgtacagcgttgatgccaccgcgccgcttgtgaccatcaac

SEQ ID NO: 422664 - DNA, 75 bp, synthetic construct
  source 1..75: mol_type = other DNA
aaggtgatattgtcgggcaggttattgagggatcgtatgaagtgcccggtgtctttgaaaaagtcactgaaaata

SEQ ID NO: 422665 - DNA, 75 bp, synthetic construct
  source 1..75: mol_type = other DNA
tcagcccgattttagctggagcgtcagcgttccggcagccgatctccaggcgctgggcaatggcgatttgaccat

SEQ ID NO: 422666 - DNA, 75 bp, synthetic construct
  source 1..75: mol_type = other DNA
ttgataaagtcactgaaaatatggaggcaatgaaagagatacatcttaacagtgacgaacaacatttatttgcag

SEQ ID NO: 422667 - DNA, 75 bp, synthetic construct
  source 1..75: mol_type = other DNA
gcaccggggaaatgtggtggacaaagttattgaaggggcttacgaggtggtgggcgtgtttgaccggattgagga

SEQ ID NO: 422668 - DNA, 75 bp, synthetic construct
  source 1..75: mol_type = other DNA
gcaccggggaaatgtggtggatagagtgattgaaggggcttacgaggtggtgggcgtgtttgaccggattgagga

SEQ ID NO: 422669 - DNA, 75 bp, synthetic construct
  source 1..75: mol_type = other DNA
ccacataaaggtgatattgtcgggcaggttattgagggagcgtatgaagtgcccggtgtctttgataaagtcact

SEQ ID NO: 422670 - DNA, 75 bp, synthetic construct
  source 1..75: mol_type = other DNA
caaccactgcgaagatcctgcttgtaccaaagtctgtccgagcggtgcgatgcataagcgagaagacggcttcgt

SEQ ID NO: 422671 - DNA, 75 bp, synthetic construct
  source 1..75: mol_type = other DNA
tactccccgtcgtcgggagaataaacagaacgatctctggacaacctggcagcgggctcaggagaatatgataaa

SEQ ID NO: 422672 - DNA, 75 bp, synthetic construct
  source 1..75: mol_type = other DNA
gcaccggggaaatgtggtggacatagtaattgaaggggcttacgaggtggtgggcgtgtttgaccggattgagga

SEQ ID NO: 422673 - DNA, 75 bp, synthetic construct
  source 1..75: mol_type = other DNA
gacgcaaatgaatattccttaccgcttcagcgaagccagcggcgcgattgaagttccggccgataaagttcacga

SEQ ID NO: 422674 - DNA, 75 bp, synthetic construct
  source 1..75: mol_type = other DNA
gtgcgcgatgaatgcgactgcagcccagacaaaatctcttggtggcttaatcgcctgcgtgcgaatccgaaaatt

SEQ ID NO: 422675 - DNA, 75 bp, synthetic construct
  source 1..75: mol_type = other DNA
aatctgttacccggccgcgcactcgatgaagggcaaattagcgccattgtgcatctggtttccagcgcggttgct

SEQ ID NO: 422676 - DNA, 75 bp, synthetic construct
  source 1..75: mol_type = other DNA
ggaggataaacagaatgatctctggacaacctggcagcgggttcaggagaatatgataaaaggtggattatcggg

SEQ ID NO: 422677 - DNA, 75 bp, synthetic construct
  source 1..75: mol_type = other DNA
cgtctttatttgtccgtgaacaaaaatccccttcggcatcagtgacggtaaatcttttacctggtcgcgcgctgg

SEQ ID NO: 422678 - DNA, 75 bp, synthetic construct
  source 1..75: mol_type = other DNA
gtggcgtaaagcggtacgcccgcagctaacacgtcgcgccgaggcggtgaaagcggtgcagcaacaggcacagac

SEQ ID NO: 422679 - DNA, 75 bp, synthetic construct
  source 1..75: mol_type = other DNA
cgtttagtaaggtaagcgtgttaaaaaatgggcaatcacttaccagcaatctctgtaagtatgaacaaatcaaag

SEQ ID NO: 422680 - DNA, 75 bp, synthetic construct
  source 1..75: mol_type = other DNA
gtcagtgctgttttaaccgctgcaccagcagaacaggtagttggttacaatatcaatctacaactggcagtgaag

SEQ ID NO: 422681 - DNA, 75 bp, synthetic construct
  source 1..75: mol_type = other DNA
gtattgaatatcaaggcatctgggccgtccaaatatggtgcgttggtggttgataaaaccactgtaacgactgat

SEQ ID NO: 422682 - DNA, 75 bp, synthetic construct
  source 1..75: mol_type = other DNA
tccgaatatgctggttcgctgggccagacgcggttttggcgtctggagtgcctggcgtctggttaaaagtacgat

SEQ ID NO: 422683 - DNA, 75 bp, synthetic construct
  source 1..75: mol_type = other DNA
tcctaatatgctggtccgctgggccagacgcggttttggcgtatggagcgcctggcgtctggttaaaacgaccct

SEQ ID NO: 422684 - DNA, 75 bp, synthetic construct
  source 1..75: mol_type = other DNA
aaagcagacgtatatacttcaagcgatagaaacgaagaacgcacgtatctgcaagagcaacacgatttggcaata

SEQ ID NO: 422685 - DNA, 75 bp, synthetic construct
  source 1..75: mol_type = other DNA
cactctgagcttttatgctcttaaccaggcagaaggagtcgagtttggggctgtaacggaaaaagacggtgtcta

SEQ ID NO: 422686 - DNA, 75 bp, synthetic construct
  source 1..75: mol_type = other DNA
caggatgggaaacgcataactgcaagccaaaatattgatgccatgacggatgtgaaggatgctgtgttggatatc

SEQ ID NO: 422687 - DNA, 75 bp, synthetic construct
  source 1..75: mol_type = other DNA
atgctgcggtattgaatgttcagctaacaaataatactaatgcgtcggttaatggacagaaggttcagctcatca

SEQ ID NO: 422688 - DNA, 75 bp, synthetic construct
  source 1..75: mol_type = other DNA
cggatgtgaaggaggctgtgttggagatcacatcatctgcatcttcggctgtagtgagcgataccaacaatctga

SEQ ID NO: 422689 - DNA, 75 bp, synthetic construct
  source 1..75: mol_type = other DNA
cttaatttccaatattcctgctaatggtaaggatgctgcggtattgaatgtgcaactgacaaatacgaatgcgtc

SEQ ID NO: 422690 - DNA, 75 bp, synthetic construct
  source 1..75: mol_type = other DNA
caggcagaaggagtcgagtttggggctgtaacggaaaaagacggtgtctatagcgcgacagtaacttcaaaacga

SEQ ID NO: 422691 - DNA, 75 bp, synthetic construct
  source 1..75: mol_type = other DNA
atggttgacgcatcagctcaaccccatatagttgtaacacttgagccaaacccttgggccgctttttactttgat

SEQ ID NO: 422692 - DNA, 75 bp, synthetic construct
  source 1..75: mol_type = other DNA
cgcgagaaaggcgacacctacggcaatctggtaccattctccccgaaacataaaggcacgctgggcgtggactac

SEQ ID NO: 422693 - DNA, 75 bp, synthetic construct
  source 1..75: mol_type = other DNA
cggctcggacgtggtgaatggctttacggtagggacatgggaaggcaccgccgacaccgatcgcattgatattcg

SEQ ID NO: 422694 - DNA, 75 bp, synthetic construct
  source 1..75: mol_type = other DNA
tggcgatctgacggttaacgcctcggtaaccaacggcgttggcaataccggcagcggttcgcgcgagatcgtgat

SEQ ID NO: 422695 - DNA, 75 bp, synthetic construct
  source 1..75: mol_type = other DNA
gctatcagccagaacggtttttttcgcctggtagacagcaacggctcggtgttttatagccgtaacgggcaattc

SEQ ID NO: 422696 - DNA, 75 bp, synthetic construct
  source 1..75: mol_type = other DNA
ggagtaaaagttgctggcatcacccaggattttaccgatggcacgaccaccaataccggacgtggtcttgacgtt

SEQ ID NO: 422697 - DNA, 75 bp, synthetic construct
  source 1..75: mol_type = other DNA
ccgactattcagcaaggggcgaatccgaccaatatttcgatcccgaataccctgatggcagcgaaaactaccacc

SEQ ID NO: 422698 - DNA, 75 bp, synthetic construct
  source 1..75: mol_type = other DNA
taaccagtcataaagatggtaaaccgtgggtaatgcgcgtgcgttcgcaaggggagatggattcactcgtgcgtg

SEQ ID NO: 422699 - DNA, 75 bp, synthetic construct
  source 1..75: mol_type = other DNA
ctaacaagtcacaaaaatttgattatcagcatgaagaccgcactggaccatcagcggatcgctggcggctccttt

SEQ ID NO: 422700 - DNA, 75 bp, synthetic construct
  source 1..75: mol_type = other DNA
tgatatccccagtcaggtattcggttgggaaacggcgatcccttttcttccctggactattgttccttactggag

SEQ ID NO: 422701 - DNA, 75 bp, synthetic construct
  source 1..75: mol_type = other DNA
gtggcgggcgatgacattatcaacgccgctgaaatcgctgtggcgcagaccatcagcgggcaggtcacgggaacg

SEQ ID NO: 422702 - DNA, 75 bp, synthetic construct
  source 1..75: mol_type = other DNA
ggcaatggttgtatccagtggtggcacaccttatccagtgaaagcacttatccagatggctaaggatattaccac

SEQ ID NO: 422703 - DNA, 75 bp, synthetic construct
  source 1..75: mol_type = other DNA
attccctcgcggacgagcgacaaaagatcgactctatttctgtgtaccgatgctggatctggtggttccggaaga

SEQ ID NO: 422704 - DNA, 75 bp, synthetic construct
  source 1..75: mol_type = other DNA
ggcattcgcctttttattacctccgcgccttattacgcggcacctgctgacattaaagtcagtctgcaacccgca

SEQ ID NO: 422705 - DNA, 75 bp, synthetic construct
  source 1..75: mol_type = other DNA
aacgatccgaagagcccgtttgtgacctccggtattcgcgtgggtactccggcgattacccgtcgtggctttaaa

SEQ ID NO: 422706 - DNA, 75 bp, synthetic construct
  source 1..75: mol_type = other DNA
cgtccagccgcactccggttcccaggctaactttgcggtctacaccgcgctgctggaaccaggtgataccgttct

SEQ ID NO: 422707 - DNA, 75 bp, synthetic construct
  source 1..75: mol_type = other DNA
ctgaccaacaaatatgctgaaggttatccgggcaaacgctactacggcggttgcgagtatgttgatatcgttgaa

SEQ ID NO: 422708 - DNA, 75 bp, synthetic construct
  source 1..75: mol_type = other DNA
cagcttgccggcatcaatcagaagatagcggaagagaaaagaaaacaggatgaactgaaggcaacgaaagacgca

SEQ ID NO: 422709 - DNA, 75 bp, synthetic construct
  source 1..75: mol_type = other DNA
cgctttaggcattatcgggtatggtttactgatggctgtcaccggtgcgctgattgatgaatcgctagtggaaaa

SEQ ID NO: 422710 - DNA, 75 bp, synthetic construct
  source 1..75: mol_type = other DNA
accactcacaaaaccctggcggggccgcgcggcggcctgatcctggcgaaaggtggtagcgaagagctgtacaaa

SEQ ID NO: 422711 - DNA, 75 bp, synthetic construct
  source 1..75: mol_type = other DNA
ctggtcgttggcggtttgttgctgattgccgccgaatgcctgaagccgaaagagccgcgtgcgccgggtcttgat

SEQ ID NO: 422712 - DNA, 75 bp, synthetic construct
  source 1..75: mol_type = other DNA
tgtggttttcattgaactgaaacaaaatggtgtgatgtgggagggggcattacatgatgcgcgtttgcgcgaagg

SEQ ID NO: 422713 - DNA, 75 bp, synthetic construct
  source 1..75: mol_type = other DNA
cggttctgattccgtcgaatctgccgctcgcgaaatcgcttatttcttcggcgaaggcgaagtgtgcccgcgcac

SEQ ID NO: 422714 - DNA, 75 bp, synthetic construct
  source 1..75: mol_type = other DNA
aaacccattatctggtacggttgagttttctgctggtagtgaagatagtccagactctcaacacgtcaaaatgga

SEQ ID NO: 422715 - DNA, 75 bp, synthetic construct
  source 1..75: mol_type = other DNA
gaacttggcagtgatgttggcgcggtgaaatcattctccctgtacgctgatgacgcaaatggagtattgactcta

SEQ ID NO: 422716 - DNA, 75 bp, synthetic construct
  source 1..75: mol_type = other DNA
ccttcgtggtggcgctgattgcgattaaaaccttcctgcaactgattaagcggatttcgtttatcccgtttgcca

SEQ ID NO: 422717 - DNA, 75 bp, synthetic construct
  source 1..75: mol_type = other DNA
gaataagcgtactgaagccggaaaacgcctctctgcggcgattgctgcaagggaaaaagatgaaaacacactgaa

SEQ ID NO: 422718 - DNA, 75 bp, synthetic construct
  source 1..75: mol_type = other DNA
atgaataccgacaacatgtcgctgctggggctgacgcttgattacgggccgtttggttttcttgatgattacgaa

SEQ ID NO: 422719 - DNA, 75 bp, synthetic construct
  source 1..75: mol_type = other DNA
ggaagaaaatacgtaatgttgaagaggcattaaaaacgtatgaaaagtaccgggctgacattaacaaaaaaatta

SEQ ID NO: 422720 - DNA, 75 bp, synthetic construct
  source 1..75: mol_type = other DNA
atgtggaaggtgacaagaaaatttataatgctgaagttgctgaatgggataagttacggcaacgattgcttgatg

SEQ ID NO: 422721 - DNA, 75 bp, synthetic construct
  source 1..75: mol_type = other DNA
ccagggcggtgacctgaccacgcgagcattaaatattggacaccagcatggctatatagagttttttctccgtca

SEQ ID NO: 422722 - DNA, 75 bp, synthetic construct
  source 1..75: mol_type = other DNA
tcgatgcgttacttctggaggatatccagggaggtgacctgaccacacgtgcattaggcatcggtgaacagcctg

SEQ ID NO: 422723 - DNA, 75 bp, synthetic construct
  source 1..75: mol_type = other DNA
ccggaacccgtttactggcgacacaggctgtcattgctgctggcggactgattcatcgcgcagggtgcgcggaaa

SEQ ID NO: 422724 - DNA, 75 bp, synthetic construct
  source 1..75: mol_type = other DNA
tggttgctggttataaccacggctggttaagtatttcgtttgtcgatttctggtttaaaaatctcaatctgaggg

SEQ ID NO: 422725 - DNA, 75 bp, synthetic construct
  source 1..75: mol_type = other DNA
aaatgagcaaaagcatgcaaatgacgctcttaatgccctgttgaaggaaaaagagaatatccgtaaccagcttgc

SEQ ID NO: 422726 - DNA, 75 bp, synthetic construct
  source 1..75: mol_type = other DNA
tgatgctgattctcttcgtatatctccccgcgaggccaggtcgttaatcgaacaggctgaaaaacggcagaagga

SEQ ID NO: 422727 - DNA, 75 bp, synthetic construct
  source 1..75: mol_type = other DNA
gataaaaatcacaaccagcgcagtcatcgataaccgtgcaaacctgaattatcttctgacccattccggtctgga

SEQ ID NO: 422728 - DNA, 75 bp, synthetic construct
  source 1..75: mol_type = other DNA
caacagctgacgcaacagaaaaacacgcctgacggcaaaacgatagtttcccctgaaaaattcccggggcgttca

SEQ ID NO: 422729 - DNA, 75 bp, synthetic construct
  source 1..75: mol_type = other DNA
gggggagcccttgccgttcttgatgcacaacaggcccgtctgctcgggcagcagacacggaatgacagggccatt

SEQ ID NO: 422730 - DNA, 75 bp, synthetic construct
  source 1..75: mol_type = other DNA
ttatggaacaaaccctgactaaggaattgaaagaggttaaccctgacgctgaaagtggtgcaagaattgatatag

SEQ ID NO: 422731 - DNA, 75 bp, synthetic construct
  source 1..75: mol_type = other DNA
atacaatccaaacaagcatactctgagtatcagagcaaaaaagatgatgctgcacgaataatgaaaattgttgat

SEQ ID NO: 422732 - DNA, 75 bp, synthetic construct
  source 1..75: mol_type = other DNA
tttatgaaattacttcgcaacgccttaaagtaattgaaaaattccaaaaaataactgatgaaaatcagcttgaaa

SEQ ID NO: 422733 - DNA, 75 bp, synthetic construct
  source 1..75: mol_type = other DNA
gttaccgatgttactgaatttgcagtcaatgggcgcaagctgtatttgtctgggtcttcccctgttgtggtgggt

SEQ ID NO: 422734 - DNA, 75 bp, synthetic construct
  source 1..75: mol_type = other DNA
tcatcgagaagggaaacagattaaccataaagctgttcagcgcctgatgggaaccctctcacttaaagcagcgat

SEQ ID NO: 422735 - DNA, 75 bp, synthetic construct
  source 1..75: mol_type = other DNA
gctccctgtgagaaatgggtgacagatatcaccgaattcagggctggcggacaaaaactgtacctgtccccgata

SEQ ID NO: 422736 - DNA, 75 bp, synthetic construct
  source 1..75: mol_type = other DNA
acgtttgccagcagattgccggtggcgaaaaggccattatcggtgtgatggtggaaagtcatctggtggaaggca

SEQ ID NO: 422737 - DNA, 75 bp, synthetic construct
  source 1..75: mol_type = other DNA
acgatccgcatatggataacagtttccagatcaacgacggtctgcgtattgcccgtaaattgctgctcgatatta

SEQ ID NO: 422738 - DNA, 75 bp, synthetic construct
  source 1..75: mol_type = other DNA
gatgatcgatttcagccatgctaactcgtccaaacaattcaaaaagcagatggatgtttgtgctgacgtttgcca

SEQ ID NO: 422739 - DNA, 75 bp, synthetic construct
  source 1..75: mol_type = other DNA
tgtaattattgagatgaaacgacctaaagtgcacccagatataatgaacctagtcgcacaaggtaataaatatgt

SEQ ID NO: 422740 - DNA, 75 bp, synthetic construct
  source 1..75: mol_type = other DNA
accagagtctggaaagcggtgagccgctggcctatggcaagagcatcaccgatgcctgcattggctgggaagata

SEQ ID NO: 422741 - DNA, 75 bp, synthetic construct
  source 1..75: mol_type = other DNA
ccagatcaacgacggtttgcgcattgctcgtaaattgctgctcgacattaacgatagtggcctgccagcagcagg

SEQ ID NO: 422742 - DNA, 75 bp, synthetic construct
  source 1..75: mol_type = other DNA
tttgataaatgcacacaacggattgatgagtggggcatttttacggtttcgatggcggtgcgtcgtgataactga

SEQ ID NO: 422743 - DNA, 75 bp, synthetic construct
  source 1..75: mol_type = other DNA
ttggttttggtaaggcgggaaaaacattagcagcaacgctggctaaagccggatggcgcgtagcgctcatcgaac

SEQ ID NO: 422744 - DNA, 75 bp, synthetic construct
  source 1..75: mol_type = other DNA
cgacgtgatcaacggccaggcggagtttatcaataatcatagcctgcgtgttcatcggcctgagggaaatctgga

SEQ ID NO: 422745 - DNA, 75 bp, synthetic construct
  source 1..75: mol_type = other DNA
cgtattacgcgatcagatttttactcacccgtcgatgagcgaatcgctcaatgatctattttcattagtcaaata

SEQ ID NO: 422746 - DNA, 75 bp, synthetic construct
  source 1..75: mol_type = other DNA
tactctataacttcttaatcacttcattgatggtattttatatgtttaaaaaatctgttttatttgcaacactat

SEQ ID NO: 422747 - DNA, 75 bp, synthetic construct
  source 1..75: mol_type = other DNA
catgacggaagaacaggccagagagcgtggtgcggatattcaggtggtaacattacctgttgcggcaattccacg

SEQ ID NO: 422748 - DNA, 75 bp, synthetic construct
  source 1..75: mol_type = other DNA
atgttcgctaattttggcagtaaggttaccattttcgaagccgcatcgttatttttaccacgagaagatcgggat

SEQ ID NO: 422749 - DNA, 75 bp, synthetic construct
  source 1..75: mol_type = other DNA
atattggtgttaaagatagtggaaaactattaccaggacatggcggactccttgacaggattgactcattaattt

SEQ ID NO: 422750 - DNA, 75 bp, synthetic construct
  source 1..75: mol_type = other DNA
cctgccaggggtgatcattaataccgtggcgggcgatgacattatcaacgccgctgaaatcgccgttaaccagac

SEQ ID NO: 422751 - DNA, 75 bp, synthetic construct
  source 1..75: mol_type = other DNA
gattacgctccccacgcaacttctgatatcaggcgatgactatgtggtgcatcgccaaccgcagattgattttta

SEQ ID NO: 422752 - DNA, 75 bp, synthetic construct
  source 1..75: mol_type = other DNA
cacagccacggttgcaggcgatggtagctggacaaccactgtacccgctgccgatttagcgtcattaaccgatgg

SEQ ID NO: 422753 - DNA, 75 bp, synthetic construct
  source 1..75: mol_type = other DNA
tcaataatgcggagaaaactcaggatctgaccatcagcggcggctccagcggtctggcgaccggcaccacggtca

SEQ ID NO: 422754 - DNA, 75 bp, synthetic construct
  source 1..75: mol_type = other DNA
caccggctataacgacaccttcttcgccaccgcaggcaccgacacttacgacggttccggcggctgggtgtacag

SEQ ID NO: 422755 - DNA, 75 bp, synthetic construct
  source 1..75: mol_type = other DNA
accttcaggaacgtcaccacctcgtggcggctgcatgaggaaatccgcgcgaagtggttcagatttgccgggctg

SEQ ID NO: 422756 - DNA, 75 bp, synthetic construct
  source 1..75: mol_type = other DNA
ccttgcgtatgcttaccgaaaacggtcatcagccattgctgcaagaaatcgcccggcgttataaccagccggaag

SEQ ID NO: 422757 - DNA, 75 bp, synthetic construct
  source 1..75: mol_type = other DNA
tcgaaagagagttgggcgttcactgcgttaggcgttctcggtaacgatgacaccgcccgcaaactgacgcctttg

SEQ ID NO: 422758 - DNA, 75 bp, synthetic construct
  source 1..75: mol_type = other DNA
actcactggctgaatttgcctgggatctgtttaccgcctggcagaccgctggcgcgccgtcgaaagagagttggg

SEQ ID NO: 422759 - DNA, 75 bp, synthetic construct
  source 1..75: mol_type = other DNA
agagccaaatataaccccgctccggatctggctgatgcaatgaagggatatcgcaagaagaactatcctttcctt

SEQ ID NO: 422760 - DNA, 75 bp, synthetic construct
  source 1..75: mol_type = other DNA
cagccatcgctctggacgcgcccggtattaaaagcaaacgcccaatcactgccagatagcgccctcttccacctc

SEQ ID NO: 422761 - DNA, 75 bp, synthetic construct
  source 1..75: mol_type = other DNA
tgccgcaacggaactggctcctgccgtcgcccgcgcctttaacaaactcaaaactctacgacaagacgcccgcac

SEQ ID NO: 422762 - DNA, 75 bp, synthetic construct
  source 1..75: mol_type = other DNA
agataagtttgaagttccaatcccctgcccggataatccggaaaaatcccttgccatccagtctgaaatcgttcg

SEQ ID NO: 422763 - DNA, 75 bp, synthetic construct
  source 1..75: mol_type = other DNA
cagcactgcggctgcttggaaattgacgataccaaagcattatatcgttatgtcttccattgggttagtttcaat

SEQ ID NO: 422764 - DNA, 75 bp, synthetic construct
  source 1..75: mol_type = other DNA
gacagtcgatacctctattccgaccacgcttgcgcaaatcaccagccagaccacccgcgacactacgccgattat

SEQ ID NO: 422765 - DNA, 75 bp, synthetic construct
  source 1..75: mol_type = other DNA
tcccttagataatcacccgacaaaaatccccactcttccgaccttttatcagccatcgctctggacgcgcccgtt

SEQ ID NO: 422766 - DNA, 75 bp, synthetic construct
  source 1..75: mol_type = other DNA
attgctgcaaaaaatcgcccggcgttataaccagccggaagtaaccgatgcggtgaacgctctacttgcgctcga

SEQ ID NO: 422767 - DNA, 75 bp, synthetic construct
  source 1..75: mol_type = other DNA
cccgaagttgtacacaccacgttaagtcatcgccgctttcccggagttcctgttcagcaagcagacaaattgacc

SEQ ID NO: 422768 - DNA, 75 bp, synthetic construct
  source 1..75: mol_type = other DNA
catcttcactctcggttccgatggtcagggtcgtattggtgccagggcgatagattatggcggagtgcgcaatat

SEQ ID NO: 422769 - DNA, 75 bp, synthetic construct
  source 1..75: mol_type = other DNA
gttcgatacgggggaaatgggcaaggcgctggactgggctgacgtggctatcagtgagagccaggccacgccgga

SEQ ID NO: 422770 - DNA, 75 bp, synthetic construct
  source 1..75: mol_type = other DNA
aataaagaaattttgaagaatcaaccagataatgttatcaaagaaaaaatgaatgatgaattcaaacttagattt

SEQ ID NO: 422771 - DNA, 75 bp, synthetic construct
  source 1..75: mol_type = other DNA
cagcaaagccgaaagaaaaaccataccgccttctcgatggtaatggcctgtacctttatgtccctgtatcaggga

SEQ ID NO: 422772 - DNA, 75 bp, synthetic construct
  source 1..75: mol_type = other DNA
cgacacgggcgacctgagtcgcgcccttgactgggcagacattgccatcagtgaaggccaggccacaccggacaa

SEQ ID NO: 422773 - DNA, 75 bp, synthetic construct
  source 1..75: mol_type = other DNA
atggcactttcccccgcgcagcgtcacagccagcgtattgcgatggaacaaaagctgaagcgcagccaggcactg

SEQ ID NO: 422774 - DNA, 75 bp, synthetic construct
  source 1..75: mol_type = other DNA
atggctatgaccccgtgtcagcgacaccgagcacgcattaaagccgcaaaggcgctggataagtgcgaagccctg

SEQ ID NO: 422775 - DNA, 75 bp, synthetic construct
  source 1..75: mol_type = other DNA
cagtttccgctctttccatgatgtctttcggtgtctttgcccagagcgtcagcgctaccgcttccactctggatc

SEQ ID NO: 422776 - DNA, 75 bp, synthetic construct
  source 1..75: mol_type = other DNA
caggaagtattggccttcaggtcgtgaatactgctttcaaaatgggccatcagcctgtagcactggtcagaaata

SEQ ID NO: 422777 - DNA, 75 bp, synthetic construct
  source 1..75: mol_type = other DNA
ccacaaaaaaatgatggggttctggacatagacaatatgcctctgcgtgaagaacctgactgcattattaacgag

SEQ ID NO: 422778 - DNA, 75 bp, synthetic construct
  source 1..75: mol_type = other DNA
acgtgattaacgccaccgaaaaaggcgcggatctgcaaatttccggcaccagtaatcagcccgcaggcaccactg

SEQ ID NO: 422779 - DNA, 75 bp, synthetic construct
  source 1..75: mol_type = other DNA
ggcgacgatattatcaacgcggctgaagcgggcgccgatcaaaccatcagcggacaggttacccgcgccgccgca

SEQ ID NO: 422780 - DNA, 75 bp, synthetic construct
  source 1..75: mol_type = other DNA
aaagcatcaccattatcggtatcagcgatgacaccggcgccagcagcagcgactttattaccagcgataccacgc

SEQ ID NO: 422781 - DNA, 75 bp, synthetic construct
  source 1..75: mol_type = other DNA
cacccaggcgggcgtctggcaggggcaggctgccgggtatgcctatggtggctccctgtatgcccgcacccaggt

SEQ ID NO: 422782 - DNA, 75 bp, synthetic construct
  source 1..75: mol_type = other DNA
tgaccgtcagatgagctacatgcgccagcagctgtctgcccgcatgctcagccgttaccagaacaattatcactt

SEQ ID NO: 422783 - DNA, 75 bp, synthetic construct
  source 1..75: mol_type = other DNA
tttaccagctgacggactatatcggttacgacatcctgctgcagtacattcaggagctgatacagcaggccaggg

SEQ ID NO: 422784 - DNA, 75 bp, synthetic construct
  source 1..75: mol_type = other DNA
acttcctgcagaagatggcgaatgacattaacagtatgaacctcagtagctgtcaggtggcccaggggatagttg

SEQ ID NO: 422785 - DNA, 75 bp, synthetic construct
  source 1..75: mol_type = other DNA
ctcgttcagttttattaatggcgagcagctgcagcgttttgttaagcagattatgagcaacgcgatgggttactt

SEQ ID NO: 422786 - DNA, 75 bp, synthetic construct
  source 1..75: mol_type = other DNA
agaagggaattgagaagggaatggagaaagggattgagaaggggattcagcagggaagacaggaagtaagtcagg

SEQ ID NO: 422787 - DNA, 75 bp, synthetic construct
  source 1..75: mol_type = other DNA
catcaacaccattgccagcgataacatcatcaacgccagcgaagcggcggcgggcgtaacggtgtccggcaccag

SEQ ID NO: 422788 - DNA, 75 bp, synthetic construct
  source 1..75: mol_type = other DNA
tgccggcgcgtaccactgaccgcgatatcctccgggcgattatggaggggggaacggcaaaaatttaccactgca

SEQ ID NO: 422789 - DNA, 75 bp, synthetic construct
  source 1..75: mol_type = other DNA
tcatgagccgcgtcacccgcgcggaaaacggcgcgaggatgctggaatcggtcatcgacggcaatatgctgccgc

SEQ ID NO: 422790 - DNA, 75 bp, synthetic construct
  source 1..75: mol_type = other DNA
catgcgtcagcagctttccgcccgtatgctcagtcgttaccagaacaactatcacttcggagggagcacgctgtg

SEQ ID NO: 422791 - DNA, 75 bp, synthetic construct
  source 1..75: mol_type = other DNA
atttcctgcagaagatggcgaatgacattaacagcatgaacctcagctcctgtcaggtggcacaggggattgtcg

SEQ ID NO: 422792 - DNA, 75 bp, synthetic construct
  source 1..75: mol_type = other DNA
atgcgccagcagctttccgcccgcatgctcagtcgttaccagaacaactatcacttcggagggagcacgctgtga

SEQ ID NO: 422793 - DNA, 75 bp, synthetic construct
  source 1..75: mol_type = other DNA
gcccgggataaagccctgaaatcgcagattacaaaactgctgaccagtattcagaacaaggcgctcagtgattct

SEQ ID NO: 422794 - DNA, 75 bp, synthetic construct
  source 1..75: mol_type = other DNA
caggcgattatagatcgttataatgagcggcgagaagatgatgtactcaacggtgaagaattcgatacattcagt

SEQ ID NO: 422795 - DNA, 75 bp, synthetic construct
  source 1..75: mol_type = other DNA
gcggtgatcaccaactccacctatgatggcttgctctacaacaccgactggatcaaacagacgctggatgtcccg

SEQ ID NO: 422796 - DNA, 75 bp, synthetic construct
  source 1..75: mol_type = other DNA
gatactcgcgtttgcttatcccgacaacagccttagccgctggggagcgccacgcacaacctgtcagttattacc

SEQ ID NO: 422797 - DNA, 75 bp, synthetic construct
  source 1..75: mol_type = other DNA
gcatggtgatattaatatgatgcaacataaaggctttcaacctcctgttcctgggttagatcttccaaactcaga

SEQ ID NO: 422798 - DNA, 75 bp, synthetic construct
  source 1..75: mol_type = other DNA
gctgaaatcgttgtggcgcagaccatcagcggtcaggtcacgggaacggcggctgcggggaacacggtgacggtc

SEQ ID NO: 422799 - DNA, 75 bp, synthetic construct
  source 1..75: mol_type = other DNA
aacgcgacaattactgatatgcagatacgccagcgtgatgtcgctgcacttgatgccagatactcgagggaatta

SEQ ID NO: 422800 - DNA, 75 bp, synthetic construct
  source 1..75: mol_type = other DNA
gcatattatctggcaggctttccctggtatgaggggaatatcctgtttgcctttgcagtggcggcacaggtgctg

SEQ ID NO: 422801 - DNA, 75 bp, synthetic construct
  source 1..75: mol_type = other DNA
ctcctgcccggtttcgtgtttttgggcagggggagattatgggggattttacgggggtgcagtttgtgatgatgc

SEQ ID NO: 422802 - DNA, 75 bp, synthetic construct
  source 1..75: mol_type = other DNA
ctcctgcccggtttcgtgtttttgggcagggagagattatgggggattttacaggggtgttgtttgtgatgatgc

SEQ ID NO: 422803 - DNA, 75 bp, synthetic construct
  source 1..75: mol_type = other DNA
atctttttaacagcatgtttgatgacacagccagacgtaaagtcaggctggcactgtcaaatcgcgaatcgttta

SEQ ID NO: 422804 - DNA, 75 bp, synthetic construct
  source 1..75: mol_type = other DNA
ttctatgcgtcgccaggcatatcttaataaatgtcgtaatttaaatgcctcaagaattatatggacgctggatgt

SEQ ID NO: 422805 - DNA, 75 bp, synthetic construct
  source 1..75: mol_type = other DNA
cattaacagcatgaacctcagctcctgtcaggtggcacaggggattgtcggaggattatttcctcagactcaggt

SEQ ID NO: 422806 - DNA, 75 bp, synthetic construct
  source 1..75: mol_type = other DNA
tccgggcgtcagttaccggacaaagcgattgatgtgctggataccgcctgcgcccgcgtagccattaacctttca

SEQ ID NO: 422807 - DNA, 75 bp, synthetic construct
  source 1..75: mol_type = other DNA
attgccggcgaaaccaatatgttcgctgactgggcggcctcacgtcagggctgtacggtgggcggcaggggagac

SEQ ID NO: 422808 - DNA, 75 bp, synthetic construct
  source 1..75: mol_type = other DNA
agaccatggtcggtctttcttatttttctgcggcttggattgacatcttttggcggccccattgcgcacttgggc

SEQ ID NO: 422809 - DNA, 75 bp, synthetic construct
  source 1..75: mol_type = other DNA
ataaacgccgttttatctcaactggcggggcgctgaagaacgttttgcagttagacagagaaaccaatgaggatc

SEQ ID NO: 422810 - DNA, 75 bp, synthetic construct
  source 1..75: mol_type = other DNA
tcggcgggcttttcccccggacgcaggtgtcccagcagaaagtctgtcaggacattgccggtgagagcaatattt

SEQ ID NO: 422811 - DNA, 75 bp, synthetic construct
  source 1..75: mol_type = other DNA
ctcggggtgtctaactcacttatttaccagctgacggactatatcggctacgacatcctgctgcagtacattcag

SEQ ID NO: 422812 - DNA, 75 bp, synthetic construct
  source 1..75: mol_type = other DNA
aggagctgaaagagtttgtgatgaccctgaccggtacgctgatttttggtgagaacagtgagatcaccccgttgc

SEQ ID NO: 422813 - DNA, 75 bp, synthetic construct
  source 1..75: mol_type = other DNA
atggcggcaggatttgcacccgatgttccagccgccttgcctctcctgatcccggtattccctcgcctttttcat

SEQ ID NO: 422814 - DNA, 75 bp, synthetic construct
  source 1..75: mol_type = other DNA
atggaggaaagaacggagaccgtcacccgtcgccgtcggcagagtggcgtatggggaaccgtttgtcgatggttt

SEQ ID NO: 422815 - DNA, 75 bp, synthetic construct
  source 1..75: mol_type = other DNA
ccggaagtgacggacgaaatcatgagccgcgtcacccgcgcggaaaacggcgcgaggatgctggaatcggtcatc

SEQ ID NO: 422816 - DNA, 75 bp, synthetic construct
  source 1..75: mol_type = other DNA
gggctgaattgcgggaatttaagaacaaggttactcaaagtaacttagttgcaccgcgtacaaagcacctcatcc

SEQ ID NO: 422817 - DNA, 75 bp, synthetic construct
  source 1..75: mol_type = other DNA
aggcattattccgcgaattgtatccagcgctaaagcaaattcaatcgaactattccggcagatgttacgactacg

SEQ ID NO: 422818 - DNA, 75 bp, synthetic construct
  source 1..75: mol_type = other DNA
cgaactattccggcagatgttacgactacggtcatgagttctcgtatgttattggaatggcgagagacgttttaa

SEQ ID NO: 422819 - DNA, 75 bp, synthetic construct
  source 1..75: mol_type = other DNA
cagatgctcggtgtttccaacagtatgatttaccagctgacggactatatcggttacgacatcctgctgcagtac

SEQ ID NO: 422820 - DNA, 75 bp, synthetic construct
  source 1..75: mol_type = other DNA
ggcagacggtgcgttcacggcagatgtggaagatgcgctgcctgatgatgccgtgacaccgcaaacagaggacga

SEQ ID NO: 422821 - DNA, 75 bp, synthetic construct
  source 1..75: mol_type = other DNA
ccctgagccaccagcaggaggcagaaattcgccagcttgagcgcgagcttcgcatcgggctgcgtaccgacacct

SEQ ID NO: 422822 - DNA, 75 bp, synthetic construct
  source 1..75: mol_type = other DNA
cacgcaactgatgagtcgttatgagcagaacctgaactatacatctgtatcttctgcacagctgacgacaggagg

SEQ ID NO: 422823 - DNA, 75 bp, synthetic construct
  source 1..75: mol_type = other DNA
ttacaggttaacgacaccgctcagggcgcagcaacggtgtggatggcctcacctgaactcgaaaactatgagcgc

SEQ ID NO: 422824 - DNA, 75 bp, synthetic construct
  source 1..75: mol_type = other DNA
cttaaccttacccgcagcgtgaaatacagtgacgccgaccgtgcggaaatccagcgccagttgaccgagcagtat

SEQ ID NO: 422825 - DNA, 75 bp, synthetic construct
  source 1..75: mol_type = other DNA
ctttaaaccagccctgctggcgcgtatggaagtggtgccgtaccagagcctgaaaacgcgggcgctgggcgttct

SEQ ID NO: 422826 - DNA, 75 bp, synthetic construct
  source 1..75: mol_type = other DNA
tgctcagcggcctgttgctcgggttgtccttctcggcagccgcagacgtcaacggcgacatgaacaactttttca

SEQ ID NO: 422827 - DNA, 75 bp, synthetic construct
  source 1..75: mol_type = other DNA
ttctttgtgccgccttactgacgctgacgcctgcagcgtcagcggatgtgaacagcgacatgaatcagttcttta

SEQ ID NO: 422828 - DNA, 75 bp, synthetic construct
  source 1..75: mol_type = other DNA
ttacgccgctggttgataaccgcgatctgattaaggttctgatgcgtggtggaacggcgaaagtatatggctgtg

SEQ ID NO: 422829 - DNA, 75 bp, synthetic construct
  source 1..75: mol_type = other DNA
cagtgtgcccattctgcgttacctggtggacccgcagatgctgaacatctccactttctacccgtcactctctga

SEQ ID NO: 422830 - DNA, 75 bp, synthetic construct
  source 1..75: mol_type = other DNA
ccatgatggcgaccgggaattacccgcaggcgacaatagatatgatcctgcagaaccttgaccaggccacgcagc

SEQ ID NO: 422831 - DNA, 75 bp, synthetic construct
  source 1..75: mol_type = other DNA
caggccgcgggctacgcttcgggcggttctctgtatgccagaacacaggtgaaaaccatccagctggtcagtatg

SEQ ID NO: 422832 - DNA, 75 bp, synthetic construct
  source 1..75: mol_type = other DNA
tcctgttccgcgtgatggtcgtgactacgatccggatgttctgcagaaggcggttctggatgcggtgagtgccct

SEQ ID NO: 422833 - DNA, 75 bp, synthetic construct
  source 1..75: mol_type = other DNA
taagccatatccctgctccgcgtgacggtcgtgattatgatccggaagtactgaagcaggcggtgaatgatgcgg

SEQ ID NO: 422834 - DNA, 75 bp, synthetic construct
  source 1..75: mol_type = other DNA
tgacgcggtcgcaaatattccacagccggcggacggtaaaagtctcaccccggatgatgtgcgtccgatgcttga

SEQ ID NO: 422835 - DNA, 75 bp, synthetic construct
  source 1..75: mol_type = other DNA
ccgcgtgatggtcgtgattacgatccggaagtactgaagcaggcggttctggaggcggtgaatgcccttccggct

SEQ ID NO: 422836 - DNA, 75 bp, synthetic construct
  source 1..75: mol_type = other DNA
ctgctccgcgtgatggtcgtgattacgatccggaagtactgaagcaggtggtgaatgatgctgtcgggagcattc

SEQ ID NO: 422837 - DNA, 75 bp, synthetic construct
  source 1..75: mol_type = other DNA
cgcaaatattccgcagccggcggacggtaaaagtctcaccccggatgatgtgcgtccgatgcttgaacagatggt

SEQ ID NO: 422838 - DNA, 75 bp, synthetic construct
  source 1..75: mol_type = other DNA
atgaatgaacgtgaactgtccattatccgtgcactgggtgaagaattctccgcggtgctggaggaattacagcgt

SEQ ID NO: 422839 - DNA, 75 bp, synthetic construct
  source 1..75: mol_type = other DNA
gcactgcaacagcatgaccggcgataagcccggagacattcattcatcagcctggactctggctgcaaaacgtgg

SEQ ID NO: 422840 - DNA, 75 bp, synthetic construct
  source 1..75: mol_type = other DNA
ccctgccggctccgcaggacgggcgtgatgccacggcactggaagtgctccccgctattgacgatcaaaaatcct

SEQ ID NO: 422841 - DNA, 75 bp, synthetic construct
  source 1..75: mol_type = other DNA
gtactgcagcaggcggtgaatgatgcggtcgcaaatattccgcagccggcggacggtaaaagtctcaccccggat

SEQ ID NO: 422842 - DNA, 75 bp, synthetic construct
  source 1..75: mol_type = other DNA
ctggcgggcgtatgaaaaaacgcacgggatgcggggatgggaatgcctggttgacggggtggcggatatcgacgt

SEQ ID NO: 422843 - DNA, 75 bp, synthetic construct
  source 1..75: mol_type = other DNA
cgcaggacgggcgtgatgccacggcactggaagtgctccccgctattgacgatcaaaaatcctttccccggggca

SEQ ID NO: 422844 - DNA, 75 bp, synthetic construct
  source 1..75: mol_type = other DNA
tccgatgcttgagcagatggtgaaagaggccgtaagccatatccctgctccgcgtgacggtcgtgattacgatcc

SEQ ID NO: 422845 - DNA, 75 bp, synthetic construct
  source 1..75: mol_type = other DNA
ccgcgtgatggtcgtgattatgatccggatgtactgcagcaggcggttctggaggcggtgaatgcccttccggct

SEQ ID NO: 422846 - DNA, 75 bp, synthetic construct
  source 1..75: mol_type = other DNA
cggcagacggcaaaagtatcacccccgatgatgtgcgtccgatgcttgagcagatggtgaaagaggctgtaagcc

SEQ ID NO: 422847 - DNA, 75 bp, synthetic construct
  source 1..75: mol_type = other DNA
taaaccgggggatgcgcatgcatctggctggaccctggctgccaaacgtggacgggatgcaggaggcggaaaatg

SEQ ID NO: 422848 - DNA, 75 bp, synthetic construct
  source 1..75: mol_type = other DNA
cggtgataaacccggagaagctcattcatcagcctggaccctggctgcaaaacgtggacgggatgcaggaggcgg

SEQ ID NO: 422849 - DNA, 75 bp, synthetic construct
  source 1..75: mol_type = other DNA
cagatggtgaaagaggcagtgagccatattcctgttccgcgtgatggtcgtgactacgatccggatgttctgcag

SEQ ID NO: 422850 - DNA, 75 bp, synthetic construct
  source 1..75: mol_type = other DNA
acatttgaggagaagatggccgcgcaggcacaagcgtttgaagagaaactggcttccctgtctgtggtattacgg

SEQ ID NO: 422851 - DNA, 75 bp, synthetic construct
  source 1..75: mol_type = other DNA
aaggctgttctggatgcggtgagtgccctgccggctccgcaggacgggcgtgatgccactgcactggaaatactc

SEQ ID NO: 422852 - DNA, 75 bp, synthetic construct
  source 1..75: mol_type = other DNA
tgaccgccgataaaccgggggatgcgcatgcatctggctggacgctggctgccaaacggggacgggatgctggag

SEQ ID NO: 422853 - DNA, 75 bp, synthetic construct
  source 1..75: mol_type = other DNA
atgcttgaacagatggtgaaggaggcggtaagccatattcctgttccgcgtgatggtcgtgactacgatccggat

SEQ ID NO: 422854 - DNA, 75 bp, synthetic construct
  source 1..75: mol_type = other DNA
aaaaaacattttccctgccggtgatgctctaccgtggtgtgttcagaaccggcgaaacttaccaccccggcgata

SEQ ID NO: 422855 - DNA, 75 bp, synthetic construct
  source 1..75: mol_type = other DNA
ggcttctcagtctgtggtattacagaagtgcgtgacgggtgatgatgtgcgtccgatgcttgagcagatggtgaa

SEQ ID NO: 422856 - DNA, 75 bp, synthetic construct
  source 1..75: mol_type = other DNA
gtcagcgtacggaaaaaacattttccctgccggtgatgctctaccgcggtgtgttcagagccggtgaaacctacc

SEQ ID NO: 422857 - DNA, 75 bp, synthetic construct
  source 1..75: mol_type = other DNA
gcagccaggcggcgcggtggtggtcgatccggcgcacaacacctggtatgtgcaactgccggataccgacacgct

SEQ ID NO: 422858 - DNA, 75 bp, synthetic construct
  source 1..75: mol_type = other DNA
gcgtttacgccatatttggttcgataaagcccagttccgcaacggttttgatgccattcgcgaacgtgatgtgct

SEQ ID NO: 422859 - DNA, 75 bp, synthetic construct
  source 1..75: mol_type = other DNA
gctacgactccatcgtccccggcggtcgttatcataattttaaagactttattaatttccccaatgtcggcaaag

SEQ ID NO: 422860 - DNA, 75 bp, synthetic construct
  source 1..75: mol_type = other DNA
tcgcagctatttcggctctgcttatttctggtaccgcaatggcccagacaagcagtggttctgtctccgctactg

SEQ ID NO: 422861 - DNA, 75 bp, synthetic construct
  source 1..75: mol_type = other DNA
acgtttacgccacatttggtttgataaagcccagttccgtaacggttttgatgccattcgcgaacacgatgtgct

SEQ ID NO: 422862 - DNA, 75 bp, synthetic construct
  source 1..75: mol_type = other DNA
aagccaacattcactgggcgaagcgcctgaccgaagcaggcgtgcacgttatcttctctgcgccggggctgaaaa

SEQ ID NO: 422863 - DNA, 75 bp, synthetic construct
  source 1..75: mol_type = other DNA
tcgcaagcctatgatccttctggataacattttgcgttattgcctggatgatatttttaaaggcttctttgatta

SEQ ID NO: 422864 - DNA, 75 bp, synthetic construct
  source 1..75: mol_type = other DNA
gaacggaacattggttcgatagcgcaagtgctccaatcagtagtgaagaatggctccagcttgttaatgatgata

SEQ ID NO: 422865 - DNA, 75 bp, synthetic construct
  source 1..75: mol_type = other DNA
gcgataacaaagccagtgaactgaagctggcgaacgcaaccattactgatatgcaggtgcgccagcgcgatgttg

SEQ ID NO: 422866 - DNA, 75 bp, synthetic construct
  source 1..75: mol_type = other DNA
aatgaaactctgcgtgctgatgttgccgctggtcgtaagcgcctgcggatcaacgccacctgctccggtaccgtg

SEQ ID NO: 422867 - DNA, 75 bp, synthetic construct
  source 1..75: mol_type = other DNA
tgagtttaaaagtggcaacttaagtgcgcgtgtcagcaaaggtgagttctggtcactggattttctgcgcaacgg

SEQ ID NO: 422868 - DNA, 75 bp, synthetic construct
  source 1..75: mol_type = other DNA
acggattgagcattttcagggggcgctgaataacggtcctcattatccgctcaatattttgcaggacgtgaaggt

SEQ ID NO: 422869 - DNA, 75 bp, synthetic construct
  source 1..75: mol_type = other DNA
acaccgctaccgtgcagggcaatttaagctggagcgtggacgttccggcggcggatattcaggccatcggtaatg

SEQ ID NO: 422870 - DNA, 75 bp, synthetic construct
  source 1..75: mol_type = other DNA
gctgaatgctgtaccacacgatcccgacgtaaaagcattgctgcgactggcgacggtgtggaacattccggtcgc

SEQ ID NO: 422871 - DNA, 75 bp, synthetic construct
  source 1..75: mol_type = other DNA
cggatgatgtgcgtccgatgcttgaacagatggtgaaggaggcggtaagccatattcctgttccgcgcgacggtc

SEQ ID NO: 422872 - DNA, 75 bp, synthetic construct
  source 1..75: mol_type = other DNA
catggtatagcgaatgccgcccttgcgctggctaaaggtgagaatgttgcggcgcaggcgaccggggcgatgaca

SEQ ID NO: 422873 - DNA, 75 bp, synthetic construct
  source 1..75: mol_type = other DNA
gtacactgggctttaagaatattgagaataaagcagaataccgggtggaacaccagggcggtagcctgagcaccg

SEQ ID NO: 422874 - DNA, 75 bp, synthetic construct
  source 1..75: mol_type = other DNA
gatgtggtcaatatcatcgaacacgctcaggcgcaggtgatcaccggcagcagctccggctttgccgcaggcacg

SEQ ID NO: 422875 - DNA, 75 bp, synthetic construct
  source 1..75: mol_type = other DNA
cactgcaacagcatgaccggcgataagcccggagacattcattcatccggctggactctggctgcaaaacgtggg

SEQ ID NO: 422876 - DNA, 75 bp, synthetic construct
  source 1..75: mol_type = other DNA
ggatgatgtgcgtccgatgcttgagcagatggtgaaagaggccgtaagtcatatcccagtcccgcgtgatggtcg

SEQ ID NO: 422877 - DNA, 75 bp, synthetic construct
  source 1..75: mol_type = other DNA
aacagctgctactggatacccggggacagacgctggttaaccgtgacagcggggagcacggggggatccgggcgc

SEQ ID NO: 422878 - DNA, 75 bp, synthetic construct
  source 1..75: mol_type = other DNA
ggctgaatggttttattgaggttgccggacgccgtgcggaagtggtgatcgctaatccgtccggtattacctgca

SEQ ID NO: 422879 - DNA, 75 bp, synthetic construct
  source 1..75: mol_type = other DNA
ataaatattgataaagatgaacttcctcttgacgatggtgttctatctctattcatcatgtctgatggcgcgcat

SEQ ID NO: 422880 - DNA, 75 bp, synthetic construct
  source 1..75: mol_type = other DNA
acaaaaccagacggggatttttgccggtaaagaaggttttgacattacggtcgggaagcacacccaactggatgg

SEQ ID NO: 422881 - DNA, 75 bp, synthetic construct
  source 1..75: mol_type = other DNA
gccggagatttggtgttgtctgccgggcgggatatttcggccactgccgctgatgttaccaccgatgccgcgctg

SEQ ID NO: 422882 - DNA, 75 bp, synthetic construct
  source 1..75: mol_type = other DNA
aggttcgtgttccccaggtctatgcgaagctcagggaaggggatttaggtggtgacggtgccctgctcggcggac

SEQ ID NO: 422883 - DNA, 75 bp, synthetic construct
  source 1..75: mol_type = other DNA
gtatcgaccgcgacaccaccagccgcaaaggcgcgctggaacagcaactggcggaagtacaccgcggtggtgcac

SEQ ID NO: 422884 - DNA, 75 bp, synthetic construct
  source 1..75: mol_type = other DNA
cgcgtccggcaattcaacacgtgctggatttaaaaggtcagaaggtgcaggcggggctggctccggcgttaatca

SEQ ID NO: 422885 - DNA, 75 bp, synthetic construct
  source 1..75: mol_type = other DNA
tagtcagcgtccggtgccgcgccagtgcccctcctgcggctccacgcatctggtgccggtgggactgggcaccga

SEQ ID NO: 422886 - DNA, 75 bp, synthetic construct
  source 1..75: mol_type = other DNA
cgacaaactgtgggttctcggtcccgttccggcactggcacctaaacgtggcggccgctggcgctggcaaatttt

SEQ ID NO: 422887 - DNA, 75 bp, synthetic construct
  source 1..75: mol_type = other DNA
ggcagcattgcggcaagggaaaatctggcgcgaccaggtcgccactctcgaatttaatgatgccgcactacaggc

SEQ ID NO: 422888 - DNA, 75 bp, synthetic construct
  source 1..75: mol_type = other DNA
agctgaaagcggtagttgaagtgctggacgttgagccggtatttactcactccgtctggcgattactgctatggg

SEQ ID NO: 422889 - DNA, 75 bp, synthetic construct
  source 1..75: mol_type = other DNA
tacggcgggtgttcaactttattgaaaacccataccgtccggtgacatttgattatttaatggtgtcgccgcaaa

SEQ ID NO: 422890 - DNA, 75 bp, synthetic construct
  source 1..75: mol_type = other DNA
attgcggcagttatctggcaactgatcagggcggcgaaacgcggaaaaagttcccgatggttatacaactggtgt

SEQ ID NO: 422891 - DNA, 75 bp, synthetic construct
  source 1..75: mol_type = other DNA
tgcatggagtaaattgttcattgaacgttatggcttcaccaatgcgacagaagtggcgatggcctgtgcaacgtt

SEQ ID NO: 422892 - DNA, 75 bp, synthetic construct
  source 1..75: mol_type = other DNA
atgtcgggagacgagaataaacttaagaaatatcgtttcccggaaacactgaccaaccagagccgctactttggc

SEQ ID NO: 422893 - DNA, 75 bp, synthetic construct
  source 1..75: mol_type = other DNA
cacaacatcgaaatatctgttcggtattggtgcggcggttctggtttatttcgggataaaaaaactgaaaaaagg

SEQ ID NO: 422894 - DNA, 75 bp, synthetic construct
  source 1..75: mol_type = other DNA
cttatttactggtatatgccaacagtcctgctgcgcggtatttttcataatgttcctgattcgtgtttccggcag

SEQ ID NO: 422895 - DNA, 75 bp, synthetic construct
  source 1..75: mol_type = other DNA
gcggcgattgtgatcggcacccgctccgcgctgtttacgccgtttaaaaatctcggcgtgattgtcattgatgaa

SEQ ID NO: 422896 - DNA, 75 bp, synthetic construct
  source 1..75: mol_type = other DNA
tggtgggacctcccgggccaaagggggaacaggggcccgcgggtcctcaggggccgaagggtgataagggagagc

SEQ ID NO: 422897 - DNA, 75 bp, synthetic construct
  source 1..75: mol_type = other DNA
atgtatgggcgcatcggtcaagcgttgattgaggccaagcaaagcggcagcgatccgttcgccgccatcgaggcc

SEQ ID NO: 422898 - DNA, 75 bp, synthetic construct
  source 1..75: mol_type = other DNA
agaaaaggtaaccgatgctctggctggcaatatcatccgtaacatcatgatacccgcctttaaaaaacaaaaatt

SEQ ID NO: 422899 - DNA, 75 bp, synthetic construct
  source 1..75: mol_type = other DNA
gagagcggggagagaccggtctgacgggagatgcaggtccacagggtccaaagggagataccggtgcggcaggcc

SEQ ID NO: 422900 - DNA, 75 bp, synthetic construct
  source 1..75: mol_type = other DNA
cctttcttgaccccaaagataccacacgggttcagggtttttttcggcatttgcaggtcaggtttggtgacgggc

SEQ ID NO: 422901 - DNA, 75 bp, synthetic construct
  source 1..75: mol_type = other DNA
aaaaccagtaaaaacaacagaaaaacagatgagactaattgtcgcattacttaaacgtataggcttaaccgatag

SEQ ID NO: 422902 - DNA, 75 bp, synthetic construct
  source 1..75: mol_type = other DNA
ctgatagccaaatatcgtgagcttagtgccatgggcgatgcagcagcgactgcatttcttaatacttgggacaac

SEQ ID NO: 422903 - DNA, 75 bp, synthetic construct
  source 1..75: mol_type = other DNA
accacgaaggcatcagaagctgcgacctcggcccgggatgcggcggcctcaaaagaggcggcaaaatcatcagaa

SEQ ID NO: 422904 - DNA, 75 bp, synthetic construct
  source 1..75: mol_type = other DNA
tgagacaaacagcaatggctggttcccggatacagatggcgcactcatcaccggactgacctttcttgaccccaa

SEQ ID NO: 422905 - DNA, 75 bp, synthetic construct
  source 1..75: mol_type = other DNA
accatgctgctgctgcaactgccgcatatcggccaggttcagtgtggagtatggtcagcggcagttcgtgagagc

SEQ ID NO: 422906 - DNA, 75 bp, synthetic construct
  source 1..75: mol_type = other DNA
gcaccgttcctgccggatcagatccacttcgtacacagccaggagttactgtctcgttatccggatctcgatgcc

SEQ ID NO: 422907 - DNA, 75 bp, synthetic construct
  source 1..75: mol_type = other DNA
cgccgattcttagccgtgtgggggatggcacgcaggataacttgtcgggctgtgaaaaagcggtgcaggtaaaag

SEQ ID NO: 422908 - DNA, 75 bp, synthetic construct
  source 1..75: mol_type = other DNA
gtgctgaaaaaaagtatgggctgggaagtcaattttgatatgtccctgcgcgatccgttgatgctggcattcttc

SEQ ID NO: 422909 - DNA, 75 bp, synthetic construct
  source 1..75: mol_type = other DNA
gctgcggataaagaaatgaccattggcgcaatataccttgatactcagggatattacgctggagtgcgtcagggc

SEQ ID NO: 422910 - DNA, 75 bp, synthetic construct
  source 1..75: mol_type = other DNA
ccaatacgcagaattgggatgccgctgagacgcctaagcttctcctaggaatgctccgcaattctttacccgcca

SEQ ID NO: 422911 - DNA, 75 bp, synthetic construct
  source 1..75: mol_type = other DNA
tacagtcatatatttatagatgaatatcaagattcatctttatcccagcatcaactatttctaaaaataaacgaa

SEQ ID NO: 422912 - DNA, 75 bp, synthetic construct
  source 1..75: mol_type = other DNA
atacccagggatattacgctggagtgcgtcagggcgttcaggatgcggcaaaagattcttcagtacaggtacagt

SEQ ID NO: 422913 - DNA, 75 bp, synthetic construct
  source 1..75: mol_type = other DNA
ttgagcaaccaaaaattgccgtcataaattgcgaagcttttgaagtttgtgtgcagcggcgtaaagggtttgaag

SEQ ID NO: 422914 - DNA, 75 bp, synthetic construct
  source 1..75: mol_type = other DNA
gtgaggcgggcattccagtgatttgctacaacacctgtattaatcaaaagggtgtcgataaatatgtctcggcat

SEQ ID NO: 422915 - DNA, 75 bp, synthetic construct
  source 1..75: mol_type = other DNA
acagtcattactattgctatgctcgggattgacatcaaatttcagggtttatattgatacgccattagataaatt

SEQ ID NO: 422916 - DNA, 75 bp, synthetic construct
  source 1..75: mol_type = other DNA
tataagcgttttcagaagatattttggtgttcccccccatgaatattcatcaagattttttttagaaaaaggcaa

SEQ ID NO: 422917 - DNA, 75 bp, synthetic construct
  source 1..75: mol_type = other DNA
atgatttctttaaaaactacacactctcacctttttctgtaagaaggttttatccgtcatacttgatagtagaat

SEQ ID NO: 422918 - DNA, 75 bp, synthetic construct
  source 1..75: mol_type = other DNA
gttattgcaattacattcacaaggaaagcaagttcagaactggaacgtagatgcaagtctgaaggacacgatgta

SEQ ID NO: 422919 - DNA, 75 bp, synthetic construct
  source 1..75: mol_type = other DNA
ctcgactggagcatttaagaagtctgaggcatcttactttttcaagttgccccaactagagggtctttatcgtta

SEQ ID NO: 422920 - DNA, 75 bp, synthetic construct
  source 1..75: mol_type = other DNA
aggtatttgcacattttgaaataaatttaaatcataggtgtcatccatcaataattaattatgcatctaggctac

SEQ ID NO: 422921 - DNA, 75 bp, synthetic construct
  source 1..75: mol_type = other DNA
catgggatcaataacctgcgtaacaattacagcatggcccatcctactgaaactttgctgaatgaagccgatgcc

SEQ ID NO: 422922 - DNA, 75 bp, synthetic construct
  source 1..75: mol_type = other DNA
cctggattttatatttatgtttcatcacgggtgagaatgccctctaaagttcgtgcttttattgattttatggtg

SEQ ID NO: 422923 - DNA, 75 bp, synthetic construct
  source 1..75: mol_type = other DNA
ccggcctctccgggtccggtaaatcaacggtcgccggggcgctggaggaggcgttacataaactcggcgtcagta

SEQ ID NO: 422924 - DNA, 75 bp, synthetic construct
  source 1..75: mol_type = other DNA
tggtcactggatttgtccgcaggataatgaaattcctgtggtcgccgttgccagccatgataccgccagcgcggt

SEQ ID NO: 422925 - DNA, 75 bp, synthetic construct
  source 1..75: mol_type = other DNA
tgcatggagtaaattgttcattgaacgttatggcttcaccaatgcgacggaagtggcgatggcctgtgcgacgtt

SEQ ID NO: 422926 - DNA, 75 bp, synthetic construct
  source 1..75: mol_type = other DNA
cgatcactgaacgctttggccgtcgcacatggcgtttttggtggtgccgatggtcggtgcgttctttatcgatat

SEQ ID NO: 422927 - DNA, 75 bp, synthetic construct
  source 1..75: mol_type = other DNA
gtacgggcgctgcgtggagtaaattgttcattgaacgttatggcttcaccaatgcgacggaagtggcgatggcct

SEQ ID NO: 422928 - DNA, 75 bp, synthetic construct
  source 1..75: mol_type = other DNA
gaagtggcgtcggtgggcggtgtggtgaaagagtatcaggtggttatcgatcctcagcgcctggcgcagtatggc

SEQ ID NO: 422929 - DNA, 75 bp, synthetic construct
  source 1..75: mol_type = other DNA
atgtgtgccaaccatggaattgcgaccaatagtacaaatgataatgttccaggcttgctttccctgataactgca

SEQ ID NO: 422930 - DNA, 75 bp, synthetic construct
  source 1..75: mol_type = other DNA
attacagcatggcccatcctactgaaactttgctgaatgaagccgatgcccgttttgccataaatctggttcgtt

SEQ ID NO: 422931 - DNA, 75 bp, synthetic construct
  source 1..75: mol_type = other DNA
attgtttggcattggcgcagagagctacacggttggctccaatgagttttacatggggtatgccaccagccgcca

SEQ ID NO: 422932 - DNA, 75 bp, synthetic construct
  source 1..75: mol_type = other DNA
cctgaccggcaagatgaactgggaatataccaacgccacgaccacgcaactggtcaatatcaatagcgacgactg

SEQ ID NO: 422933 - DNA, 75 bp, synthetic construct
  source 1..75: mol_type = other DNA
atgattgaatggattattcgtcgctcggtggcgaaccgttttctggtgctgatgggcgcgttgtttctgagtatc

SEQ ID NO: 422934 - DNA, 75 bp, synthetic construct
  source 1..75: mol_type = other DNA
atcaggcagatcaacaatgtcagtttgctttcagtacaccggattcagaacctacaacctctgtattacaaggca

SEQ ID NO: 422935 - DNA, 75 bp, synthetic construct
  source 1..75: mol_type = other DNA
atcggcggcacacttggcgcactgggcgcgttgtcgatggatatcaacagagctgacacccaattcgataactag

SEQ ID NO: 422936 - DNA, 75 bp, synthetic construct
  source 1..75: mol_type = other DNA
gcggccggttctgcgacttcagcagccggatcagcaactgctgcggctaacagccagaaagctgcgaagacgagt

SEQ ID NO: 422937 - DNA, 75 bp, synthetic construct
  source 1..75: mol_type = other DNA
caggggctgtttcagcatttgcaggtcaggtttggtgacgggccgtggcaggatgttaaggggctggatgaagtg

SEQ ID NO: 422938 - DNA, 75 bp, synthetic construct
  source 1..75: mol_type = other DNA
gccgggtttcctatcagatgaccagccagaaagatcgcccaacccaacatgaaatgcgtcttgatggctcactgc

SEQ ID NO: 422939 - DNA, 75 bp, synthetic construct
  source 1..75: mol_type = other DNA
caacgatggctattttagttttaatgaagccaatacccgcaattgggactataacagtcgccaaaaaagtgaaat

SEQ ID NO: 422940 - DNA, 75 bp, synthetic construct
  source 1..75: mol_type = other DNA
tggtgaacacggtggcctcagaaaatccggatgaggccggtcgttacagcatggacgttgagtacggtcagtaca

SEQ ID NO: 422941 - DNA, 75 bp, synthetic construct
  source 1..75: mol_type = other DNA
gttgaagttctgtttcgcgaaaagatgcccgcgatgcaaatggccttgctggaacgccgcgaacttgatgccggg

SEQ ID NO: 422942 - DNA, 75 bp, synthetic construct
  source 1..75: mol_type = other DNA
gacttatatattgtttatgaaacgcagcaggtgacgcccgcgctggttaaactgctggcggcgttggcgcagtag

SEQ ID NO: 422943 - DNA, 75 bp, synthetic construct
  source 1..75: mol_type = other DNA
cccggcaggcccacagggaccgaaaggagaaacaggtgtggctggcccggtaggggcaaccggacctcaggggcc

SEQ ID NO: 422944 - DNA, 75 bp, synthetic construct
  source 1..75: mol_type = other DNA
cgtaaaccgaatcccccaccgtggtgggacctcccgggccaaagggggaacaggggcccgcgggtcctcaggggc

SEQ ID NO: 422945 - DNA, 75 bp, synthetic construct
  source 1..75: mol_type = other DNA
gaggcactgcgccgttttgaactgatggtggaagaggtggcgcgtcacgcagaggaggcgaagaagaatgccgga

SEQ ID NO: 422946 - DNA, 75 bp, synthetic construct
  source 1..75: mol_type = other DNA
atgatggatttacccggcgagcaactgatcgactggggcggagcgttacgctggctgaaatcgacagccgaggac

SEQ ID NO: 422947 - DNA, 75 bp, synthetic construct
  source 1..75: mol_type = other DNA
ggatcagtgcaggggaattatatcaactgtgtgaagaagcgccactattgccggataacaggcaaagaaaaggcc

SEQ ID NO: 422948 - DNA, 75 bp, synthetic construct
  source 1..75: mol_type = other DNA
tgaactggtaactgaagacgcagacgttatatctggtgaaaaacgtctgcgtcttaactacaacggcataattgc

SEQ ID NO: 422949 - DNA, 75 bp, synthetic construct
  source 1..75: mol_type = other DNA
atcaaaggccaggacctggcgattgccagcctgcacaaacacctgctgaccgcacgcgccgacctgcgccgtccg

SEQ ID NO: 422950 - DNA, 75 bp, synthetic construct
  source 1..75: mol_type = other DNA
ctacagtgtgagcgggtgtcgggtgctgccagcggggcgctttatgccaatgagagcggtgcctattttgccctg

SEQ ID NO: 422951 - DNA, 75 bp, synthetic construct
  source 1..75: mol_type = other DNA
gacgtccgcgaggaatgccggcatatcagccagtcaggcagaagagagcgcggcaaatgctgacacttcagcagg

SEQ ID NO: 422952 - DNA, 75 bp, synthetic construct
  source 1..75: mol_type = other DNA
aatggctggttcccggatacagatggcgcactcatcaccggactgacctttcttgaccccaaagatgccacacgg

SEQ ID NO: 422953 - DNA, 75 bp, synthetic construct
  source 1..75: mol_type = other DNA
ggctggttcccggatacagatggtgcgctcatcaccggactgacctttcttgaccccaaagatgccacacaggtt

SEQ ID NO: 422954 - DNA, 75 bp, synthetic construct
  source 1..75: mol_type = other DNA
agaaacaggtgcggctggcccggtgggggcaaccggacctcagggaccgaagggcgacccgggggagacacaaat

SEQ ID NO: 422955 - DNA, 75 bp, synthetic construct
  source 1..75: mol_type = other DNA
ccaatacatggactcaggcacaaacttttaatggtggtattaatggcaatttgacggtgaccggaaacggctcat

SEQ ID NO: 422956 - DNA, 75 bp, synthetic construct
  source 1..75: mol_type = other DNA
atgacccgcggtgtgaccgatgacagcggaccttgcagttacaacatatatcgccagaacgttcatacattctgg

SEQ ID NO: 422957 - DNA, 75 bp, synthetic construct
  source 1..75: mol_type = other DNA
gacaccggcccggcaggggcaaccggtgaaagggggccggcaggtgatgctggtccggcaggcccgcaggggccg

SEQ ID NO: 422958 - DNA, 75 bp, synthetic construct
  source 1..75: mol_type = other DNA
caaaatcttgatggaagaatcgcgtcgattgctggtgaatgctaataatgtattggctcgggttgaacaaatagg

SEQ ID NO: 422959 - DNA, 75 bp, synthetic construct
  source 1..75: mol_type = other DNA
gtgaaagggggccggcaggtgatgctggtccggcaggaccacagggaccgaaaggcgacaggggagagcggggag

SEQ ID NO: 422960 - DNA, 75 bp, synthetic construct
  source 1..75: mol_type = other DNA
agactgcatcggcaaactccgcgacagcagccaaaaaatcagaaaccagcgcgaaaaatagcgagacagccacaa

SEQ ID NO: 422961 - DNA, 75 bp, synthetic construct
  source 1..75: mol_type = other DNA
acaggtgcttttggtcatgattatactgcaaggttggtgcaatcgttgtctgataaaatcagtactgcaagatct

SEQ ID NO: 422962 - DNA, 75 bp, synthetic construct
  source 1..75: mol_type = other DNA
gcccggcaggcggcagaaagtgcagcctcagcaaagcagtcagaggatgcgtcctcgtcctcggcttctgcggcc

SEQ ID NO: 422963 - DNA, 75 bp, synthetic construct
  source 1..75: mol_type = other DNA
tttttcagcatttgcaggtcaggtttggtgacgggccgtggcaggatgttaaggggctggatgaagtgggcagtg

SEQ ID NO: 422964 - DNA, 75 bp, synthetic construct
  source 1..75: mol_type = other DNA
gctcaacggcggcggttacgccgactattgcgtggcgcgcgccgagctctgtttatccgtgccgaaaaacctgcc

SEQ ID NO: 422965 - DNA, 75 bp, synthetic construct
  source 1..75: mol_type = other DNA
atggtgtctgggacacagtgaaatagaaagtcttctttattctaagagggcaagggtgatagacacgacaatttt

SEQ ID NO: 422966 - DNA, 75 bp, synthetic construct
  source 1..75: mol_type = other DNA
accgtgtatgaagactcacaaccgggtacgctgaatgattttctcggtgccatgacggaggatgatgcccgtccg

SEQ ID NO: 422967 - DNA, 75 bp, synthetic construct
  source 1..75: mol_type = other DNA
atgacagcccgccggttcaggcgggcttttttgtgtggtgaatatggcagtaaagatttcaggtgtactgaaaga

SEQ ID NO: 422968 - DNA, 75 bp, synthetic construct
  source 1..75: mol_type = other DNA
gggcctcccgggccaaagggggaacaggggcccgcgggtcctcaggggccgaagggagataaaggagagcgtggc

SEQ ID NO: 422969 - DNA, 75 bp, synthetic construct
  source 1..75: mol_type = other DNA
tgtcggggcaaccggtgagcggggaccggcaggtgatgctggtccggcaggcccgcaggggccgaaaggcgacag

SEQ ID NO: 422970 - DNA, 75 bp, synthetic construct
  source 1..75: mol_type = other DNA
gtgctgaaagacggtgcaggaaaaccgatacagaactgcaccattcagctcaaagcaaaacgtaacagcaccacg

SEQ ID NO: 422971 - DNA, 75 bp, synthetic construct
  source 1..75: mol_type = other DNA
tcaggtttggtgacgggccgtggcaggatgtcaaggggctggatgaagtgggcagtgatacaggcagaacaggag

SEQ ID NO: 422972 - DNA, 75 bp, synthetic construct
  source 1..75: mol_type = other DNA
gacccgggggagacacaaatccgttttcgtctggggccgggaaacattattgagacaaacagccatggctggttc

SEQ ID NO: 422973 - DNA, 75 bp, synthetic construct
  source 1..75: mol_type = other DNA
ggttccgtctggggccgggaaacattattgagacaaacagcaatggctggttcccggatacagatggcgcactca

SEQ ID NO: 422974 - DNA, 75 bp, synthetic construct
  source 1..75: mol_type = other DNA
gagcggggagagaccggtctgacgggaaatgcaggtccacagggtccaaagggagataccggtacggcaggcccg

SEQ ID NO: 422975 - DNA, 75 bp, synthetic construct
  source 1..75: mol_type = other DNA
ctcagcctccgctcagtattcatattaaagagctggaaaatcaactcggcacgcagctttttattcgccattcgc

SEQ ID NO: 422976 - DNA, 75 bp, synthetic construct
  source 1..75: mol_type = other DNA
catcccggcagatttgtatattgtttatgaaacgcagcaggtgacacccgcgatggttaagctgttggcagcatt

SEQ ID NO: 422977 - DNA, 75 bp, synthetic construct
  source 1..75: mol_type = other DNA
cggttccgtctggggccgggaaacattattgagacaaacagcaatggctggttcccggatacagatggcgcactc

SEQ ID NO: 422978 - DNA, 75 bp, synthetic construct
  source 1..75: mol_type = other DNA
tcgtctggggccggcgagcattattgagacaaacagcaatggctggttcccggatacagatggcgcactcatcac

SEQ ID NO: 422979 - DNA, 75 bp, synthetic construct
  source 1..75: mol_type = other DNA
gaggcggagacgtcagcgaggaatgccggcatatcagccagtaaggcggaagcgagcgccgcaaatgctgatact

SEQ ID NO: 422980 - DNA, 75 bp, synthetic construct
  source 1..75: mol_type = other DNA
aatgattttctcggtgccatgtcggaggatgacgtccggccggaggcactgcgccgttttgaactgatggtggaa

SEQ ID NO: 422981 - DNA, 75 bp, synthetic construct
  source 1..75: mol_type = other DNA
ctggtggtgctgaccgcatttatctcgccacaccgcgccgaacgccagatggttcgcgaacgcgtaggagaaggg

SEQ ID NO: 422982 - DNA, 75 bp, synthetic construct
  source 1..75: mol_type = other DNA
cgtatttgctggatggcgacaacgtccgccacggcttatgcagcgatctcggttttagcgatgccgatcgtaaag

SEQ ID NO: 422983 - DNA, 75 bp, synthetic construct
  source 1..75: mol_type = other DNA
gcaacaacgcgagctacaccacggtcatcgtggtgtagtgctgtggtttaccggcctctccgggtccggtaaatc

SEQ ID NO: 422984 - DNA, 75 bp, synthetic construct
  source 1..75: mol_type = other DNA
atgaaatcattaaccacggaaaccgcactggatattctgattgcgtggctgcagaacaatatcgactgcgaatcg

SEQ ID NO: 422985 - DNA, 75 bp, synthetic construct
  source 1..75: mol_type = other DNA
gactggtaaccagaaacaacatgaaatcattaaccacggaaaccgcactggatattctgattgcatggctgcagg

SEQ ID NO: 422986 - DNA, 75 bp, synthetic construct
  source 1..75: mol_type = other DNA
ctgccctgcattgaacaggccagggaggatatccgtaccctgcgccagttgcagtttctgcaacagaaccggtga

SEQ ID NO: 422987 - DNA, 75 bp, synthetic construct
  source 1..75: mol_type = other DNA
aattcagactaactgaaccgccccgggtttcctggagagtgttttatctgtcaactcaggctgccagatcatcgt

SEQ ID NO: 422988 - DNA, 75 bp, synthetic construct
  source 1..75: mol_type = other DNA
ccacggaaacagcgctggatattctgattgcgtggctgcaggacaatattgactgcgaatcagggattatcttcg

SEQ ID NO: 422989 - DNA, 75 bp, synthetic construct
  source 1..75: mol_type = other DNA
atgaaatcattaaccactgaaacagcgctggatatcctcattgcgtggctgcaggacaatatcgactgcgaatcg

SEQ ID NO: 422990 - DNA, 75 bp, synthetic construct
  source 1..75: mol_type = other DNA
caagtgcggtttatctcggaggtggttttgtattgagcataattggttcaatactctatccaacagaaaaaagcc

SEQ ID NO: 422991 - DNA, 75 bp, synthetic construct
  source 1..75: mol_type = other DNA
aaaaccgcctcgggtctgttgcagatcgtcgatccggctgagcgggccaatgcggccatcgcactttttggtaca

SEQ ID NO: 422992 - DNA, 75 bp, synthetic construct
  source 1..75: mol_type = other DNA
tcagtattcgcggctccgatatgtcaaaggcgagtgctgaagcgtatgcgcttatcgggctggatgcagccagga

SEQ ID NO: 422993 - DNA, 75 bp, synthetic construct
  source 1..75: mol_type = other DNA
ctctggctctttttattgcttttatcattggtcttatcaagccgtcgctggttagaatgccgaatcgtaagcgct

SEQ ID NO: 422994 - DNA, 75 bp, synthetic construct
  source 1..75: mol_type = other DNA
ttatggcggagtggtgaaacagaccgttgcggcgcgcgtcaatgttcgaactggtgaggtaacttcaataattga

SEQ ID NO: 422995 - DNA, 75 bp, synthetic construct
  source 1..75: mol_type = other DNA
ttgggatggttcttaccgaccattggaaaagctaattaaagagaatatgaacgatgattcatcttataaacatgt

SEQ ID NO: 422996 - DNA, 75 bp, synthetic construct
  source 1..75: mol_type = other DNA
aaaccaaagcgattagccagtgtgctagccagatggctaaatggggcgttggtggtcgcaagaaattactccacg

SEQ ID NO: 422997 - DNA, 75 bp, synthetic construct
  source 1..75: mol_type = other DNA
caaatgggcaggtcctgtgggtgcagcgtttacgattggttctgatctatgggatgcctataaagcacacgagcg

SEQ ID NO: 422998 - DNA, 75 bp, synthetic construct
  source 1..75: mol_type = other DNA
agatgccaacctgccaggcctgcgggtcgatacggtggcaggcgatgatgtggtcaatattatcgagcacggtca

SEQ ID NO: 422999 - DNA, 75 bp, synthetic construct
  source 1..75: mol_type = other DNA
agcgccttgccggtctgattgccagcctgtcaccggcggcgcggcggcaaatggccgctgatattgcgaagcgcc

SEQ ID NO: 423000 - DNA, 75 bp, synthetic construct
  source 1..75: mol_type = other DNA
ggctatgacaatcttgtaggcattggaaacttatttttacccccattatccacggtccagctaccgcattatgaa

SEQ ID NO: 423001 - DNA, 75 bp, synthetic construct
  source 1..75: mol_type = other DNA
gccgaattagttggggagttggtaacgccaataattaagaaaaatgactcattacttttgcaacggattttgagt

SEQ ID NO: 423002 - DNA, 75 bp, synthetic construct
  source 1..75: mol_type = other DNA
cagtacgccggtacagtatgatgcccgaccattgttaggtttccagagtgacgacttggctattattgaagttat

SEQ ID NO: 423003 - DNA, 75 bp, synthetic construct
  source 1..75: mol_type = other DNA
atggacgtttacgaagatctatacctccagacagacatcaacactttttattttctgaaaaacggcgtcgtatat

SEQ ID NO: 423004 - DNA, 75 bp, synthetic construct
  source 1..75: mol_type = other DNA
gtcttcgccgggatattccgtaaacgtccggctaacctggaagaagaaatgctgatcgacgaggtattaaaatga

SEQ ID NO: 423005 - DNA, 75 bp, synthetic construct
  source 1..75: mol_type = other DNA
cacgtatcagaacagcaattatctgttcacttacgtaactaaggggaaatgcccttatacaaaaacatttgacac

SEQ ID NO: 423006 - DNA, 75 bp, synthetic construct
  source 1..75: mol_type = other DNA
aacgccttgccggtctgattgccagcctgtcaccggcggcacgtcggcaaatggcggctgagattgcgaaaaagc

SEQ ID NO: 423007 - DNA, 75 bp, synthetic construct
  source 1..75: mol_type = other DNA
atggctggactgaatgtctgaatcaacgtgtagccggcatcctgaggcaggcctgtgttgacttttccgacgcag

SEQ ID NO: 423008 - DNA, 75 bp, synthetic construct
  source 1..75: mol_type = other DNA
ggcaaagaaaatcatgttgaactaattcaaaataatagtggtaatgaattaataaaattagccgaacgtttttat

SEQ ID NO: 423009 - DNA, 75 bp, synthetic construct
  source 1..75: mol_type = other DNA
ctcaccaaaactggagcaatataatggtatttctgctgtcgaaatcctgggggaaccggcaccaggatacagttc

SEQ ID NO: 423010 - DNA, 75 bp, synthetic construct
  source 1..75: mol_type = other DNA
acagcattgagcacaatcaggcgctggtgatcaccggcagtagcaccggtctaacagcgggaacggcgttaacgg

SEQ ID NO: 423011 - DNA, 75 bp, synthetic construct
  source 1..75: mol_type = other DNA
atggcaactttaacaaaaaaagaacgggcatggttgaatgaattacagaacgttcttgatcgctgcccgtcaccg

SEQ ID NO: 423012 - DNA, 75 bp, synthetic construct
  source 1..75: mol_type = other DNA
gcaggacaatattgactgcgaatcggaaattatctttgacaacgatgaggataaaacggattcggcagcactgct

SEQ ID NO: 423013 - DNA, 75 bp, synthetic construct
  source 1..75: mol_type = other DNA
attgctgattttggcctgaagattatccttgtgttcgtattgctcgtgcttttcaagattcgcagttttaacttg

SEQ ID NO: 423014 - DNA, 75 bp, synthetic construct
  source 1..75: mol_type = other DNA
aaaaaaattggtttttacaccattggcgataaaaccatttacctgtatgacctacgccgcatggatgaaatcatg

SEQ ID NO: 423015 - DNA, 75 bp, synthetic construct
  source 1..75: mol_type = other DNA
agacggccttaactggagttacgttgacggacgcacgctaacgaatggcacgacgacctggcaggtgcgggtggt

SEQ ID NO: 423016 - DNA, 75 bp, synthetic construct
  source 1..75: mol_type = other DNA
ttgccctgcatcgaacaggcccgggaggatgtccgtgctgttcgtcatctgcagcttctgcaccagaaccggtga

SEQ ID NO: 423017 - DNA, 75 bp, synthetic construct
  source 1..75: mol_type = other DNA
gcgcaattccggtttgctcgcgcagaaaatcgtgcagcgagccgctgacggaaattcacaacatgaaatcattaa

SEQ ID NO: 423018 - DNA, 75 bp, synthetic construct
  source 1..75: mol_type = other DNA
ctctggtttccgacgacaaaaaggataccggaactattgagatcattgctccgctctctggcgagatcgtcaata

SEQ ID NO: 423019 - DNA, 75 bp, synthetic construct
  source 1..75: mol_type = other DNA
atgcctgccgggtttacccactttcgactggtaaccaggaacaacatgaaatcattaaccacggaaactgctctg

SEQ ID NO: 423020 - DNA, 75 bp, synthetic construct
  source 1..75: mol_type = other DNA
atgcctgccgggtttacccactttctactggtaaccaggaacaacatgaaatcattaaccacggaaacagctctg

SEQ ID NO: 423021 - DNA, 75 bp, synthetic construct
  source 1..75: mol_type = other DNA
atgcctgccgggtttacccactttcaactggtaaccagtaacaacatgaaatcattaaccacggaaaccgctctg

SEQ ID NO: 423022 - DNA, 75 bp, synthetic construct
  source 1..75: mol_type = other DNA
agcgatgaaaccagtgtttatgcgggtgcaggtcaaaatataggccaaaatccatttaacataataatcgtaata

SEQ ID NO: 423023 - DNA, 75 bp, synthetic construct
  source 1..75: mol_type = other DNA
agctatacgctcgctgactgtgaagattgatcgccttaatacggtttattccctccacaaatcccgacttagcga

SEQ ID NO: 423024 - DNA, 75 bp, synthetic construct
  source 1..75: mol_type = other DNA
cggcgcagcaaacgtccaggccagcgtcagcaatgtcgctggcaacagtgcccaggcaacgcatgcatacagcgt

SEQ ID NO: 423025 - DNA, 75 bp, synthetic construct
  source 1..75: mol_type = other DNA
gccgaagcggggcagattgttacgataacgctcaatagcccgaccgtgcagacgtatcaggcaacggtacaggcc

SEQ ID NO: 423026 - DNA, 75 bp, synthetic construct
  source 1..75: mol_type = other DNA
gcttacgccgctgaaggcgctgatggatggacttgcctgggtactggaaaagcttggcgtgctgcctgatgaagc

SEQ ID NO: 423027 - DNA, 75 bp, synthetic construct
  source 1..75: mol_type = other DNA
gtcactgggaacaggttaaggcttttatgctcggaacattccgggcgctgtgggctggccttgcgcctgttcgtg

SEQ ID NO: 423028 - DNA, 75 bp, synthetic construct
  source 1..75: mol_type = other DNA
agagagggtgacacggcaggcaatcgatcttgctcaggtcaccggcggtaatgtggctgaacaggttcaggcggc

SEQ ID NO: 423029 - DNA, 75 bp, synthetic construct
  source 1..75: mol_type = other DNA
ttacattaataggtaatcttggacaagatcctgagattcggtgtatgcagaatggagttaccgttgctaatttaa

SEQ ID NO: 423030 - DNA, 75 bp, synthetic construct
  source 1..75: mol_type = other DNA
ctgttgacttttgtatgctatggaatataattaaaggttttttgtttttattgtgtggtgtggtggattacacag

SEQ ID NO: 423031 - DNA, 75 bp, synthetic construct
  source 1..75: mol_type = other DNA
atggctagattgcgagaggtgcttaacgcgattttcagcgccccccgatctggaaaatccagaatccccaaatat

SEQ ID NO: 423032 - DNA, 75 bp, synthetic construct
  source 1..75: mol_type = other DNA
gattcagcagcactgttgccctgcatcgaacaggcccgggaggatgtccgtgctgttcgtcatctgcagcttctg

SEQ ID NO: 423033 - DNA, 75 bp, synthetic construct
  source 1..75: mol_type = other DNA
ataaaacagattcggcagcactgttgccctgtattgaacaggccagggaggatatccgtaccctgcgccaactgc

SEQ ID NO: 423034 - DNA, 75 bp, synthetic construct
  source 1..75: mol_type = other DNA
ataaaacggattcggcagcgctgctgccctgcattgaacaggccagggaagatatccgtaccctgcgccaactgc

SEQ ID NO: 423035 - DNA, 75 bp, synthetic construct
  source 1..75: mol_type = other DNA
aattacgtcaacggaatgtggcttgttgatggtcgacaaagaccagtaattaaaacaagcatgactaagcgtaac

SEQ ID NO: 423036 - DNA, 75 bp, synthetic construct
  source 1..75: mol_type = other DNA
acaagcctggaaagtggaacataaattgtcagatattctactgttgactatttgtgccgttatttctggtgcaga

SEQ ID NO: 423037 - DNA, 75 bp, synthetic construct
  source 1..75: mol_type = other DNA
gttgatgatcaagttgctgccgtggctgctattggcgattgcagtagtgtgggtaataaaggcggttaaagcacc

SEQ ID NO: 423038 - DNA, 75 bp, synthetic construct
  source 1..75: mol_type = other DNA
cgaatggaagtttgccgataaagccgggaaggatttagggtttgaagttattaagattgccgtgccggatggcga

SEQ ID NO: 423039 - DNA, 75 bp, synthetic construct
  source 1..75: mol_type = other DNA
ggactggcatttgccggctggagccgcgggtaaaaaagtgttgctggtgcccggccaggtggaagacgacgcctc

SEQ ID NO: 423040 - DNA, 75 bp, synthetic construct
  source 1..75: mol_type = other DNA
atgtcccctctccagaaatcgcattacgtatcaatgccccaaaaaacttcaacccgctatcgcaatcccggagga

SEQ ID NO: 423041 - DNA, 75 bp, synthetic construct
  source 1..75: mol_type = other DNA
atggctgcaaaacaacgccaaggaactgactcgcgtcggtgttgaccctaacagcgttgctcagatgtatcagca

SEQ ID NO: 423042 - DNA, 75 bp, synthetic construct
  source 1..75: mol_type = other DNA
atgcagagcaccatatgaaagacaaccgctgggttccaggctggatgtgtgcaccacgcccacagacggatgcca

SEQ ID NO: 423043 - DNA, 75 bp, synthetic construct
  source 1..75: mol_type = other DNA
gagaacacgcaactccagtcacgcaccgacgcgctgggacgtaaaacagcgtatgaatacaacgatgagggcgat

SEQ ID NO: 423044 - DNA, 75 bp, synthetic construct
  source 1..75: mol_type = other DNA
tagaatatctgaagacggtttatcccggcatggtgatatcagttattgtctggacacgtaatgaagtccatgata

SEQ ID NO: 423045 - DNA, 75 bp, synthetic construct
  source 1..75: mol_type = other DNA
atgcatttaatattctctaaatattctgtgttttttattcttttcgctttttttgcttttccgctctcaggacag

SEQ ID NO: 423046 - DNA, 75 bp, synthetic construct
  source 1..75: mol_type = other DNA
atgcgtctggtgatcgcggtgctttgcgtcagttggctactcaatatccagaccagatagaatccgttcgtaaag

SEQ ID NO: 423047 - DNA, 75 bp, synthetic construct
  source 1..75: mol_type = other DNA
ccaaaattggcgaacgtcagggccaggaactgtataaagagatgcagaaacgtggctgggatgtcaaagaaagcg

SEQ ID NO: 423048 - DNA, 75 bp, synthetic construct
  source 1..75: mol_type = other DNA
cagaagaaggttgctatgcaggctgatattgagcagcttacgaagatttctcagaagtatgcaaaggcactttga

SEQ ID NO: 423049 - DNA, 75 bp, synthetic construct
  source 1..75: mol_type = other DNA
taaaagcgatgaagaactctgtgaaattgctaaacagaacatcttggcatcacgtaatgaaccgccccgggtttc

SEQ ID NO: 423050 - DNA, 75 bp, synthetic construct
  source 1..75: mol_type = other DNA
aagaaatgcctgatatctgcaaaactgaagcattacttgagcttgaaaagaaattttacccagctttaaaagcac

SEQ ID NO: 423051 - DNA, 75 bp, synthetic construct
  source 1..75: mol_type = other DNA
gcgttttccctgagcaaattgcagacgtgattaataatattcctgaaggttttagggtcgctaagattgttaaag

SEQ ID NO: 423052 - DNA, 75 bp, synthetic construct
  source 1..75: mol_type = other DNA
cttccttctgaaattattaatgtcttccctgaagtggtagagatgcctgatgtatgcaagggagaagcattgctt

SEQ ID NO: 423053 - DNA, 75 bp, synthetic construct
  source 1..75: mol_type = other DNA
tattacccactgctaaaagcacagcgtattaaacttgatgacgcttacagcaaagttaccctgatgcaatcagct

SEQ ID NO: 423054 - DNA, 75 bp, synthetic construct
  source 1..75: mol_type = other DNA
aagccggaaatgcggcattggctgatcaggccagagaagcgatgcacaccatcgtgaccggggatttgtcgaaat

SEQ ID NO: 423055 - DNA, 75 bp, synthetic construct
  source 1..75: mol_type = other DNA
aggccagcgatctgccccgcgacaaacagcaggcggcagagaaaatcaccgccggcctgatgaacctgatgcagc

SEQ ID NO: 423056 - DNA, 75 bp, synthetic construct
  source 1..75: mol_type = other DNA
gctggggctgcgcgacccgaacgacccgacttaccgccgcccgctgacgcaggccagcgatctgccccgcgacaa

SEQ ID NO: 423057 - DNA, 75 bp, synthetic construct
  source 1..75: mol_type = other DNA
aaagggctaatcagcttgattgagcagggagaaattacggatcgtaaaggggtgatttcccaccttaccgatgcc

SEQ ID NO: 423058 - DNA, 75 bp, synthetic construct
  source 1..75: mol_type = other DNA
cttacagaggcactacgaacaacagcagcaagcgtggcaggacagctacgccaacttacagcgcatgttcgaggt

SEQ ID NO: 423059 - DNA, 75 bp, synthetic construct
  source 1..75: mol_type = other DNA
gaaaaccggtcatccgtctggaagatggatttgtgcgctcgctggatcttggtgtcaatggtgcgccgccgcttt

SEQ ID NO: 423060 - DNA, 75 bp, synthetic construct
  source 1..75: mol_type = other DNA
aaatttacatctgatatcatagataatattataaataacaataaaaagaatatggttaaagagattgacccaaaa

SEQ ID NO: 423061 - DNA, 75 bp, synthetic construct
  source 1..75: mol_type = other DNA
accgtgctgttccagctacagctgggtacgctgcgtgacaaaactgaccgcatccaggcgctggctggctggatc

SEQ ID NO: 423062 - DNA, 75 bp, synthetic construct
  source 1..75: mol_type = other DNA
gcgtgattcgcggccaccgctttatgggcgagccggaattcactatcgacaatgccgatcagtatccggaaattc

SEQ ID NO: 423063 - DNA, 75 bp, synthetic construct
  source 1..75: mol_type = other DNA
cctggtatcaggacgaaggttacaccgttgacaccatccaggcggtactggcgcgtcgtccgactcgtccggctg

SEQ ID NO: 423064 - DNA, 75 bp, synthetic construct
  source 1..75: mol_type = other DNA
gtgaatgcctccaccctgaaagagccggaagaaattaaactggcgatgcaggtagttgtattgcgcgacaagctg

SEQ ID NO: 423065 - DNA, 75 bp, synthetic construct
  source 1..75: mol_type = other DNA
cgtctggcggatgccgagttcttcttcaacacagaccgtaaaaaacgtctggaagataatctgccgcgtctgcaa

SEQ ID NO: 423066 - DNA, 75 bp, synthetic construct
  source 1..75: mol_type = other DNA
gtccaagtgtgacctgatgaccaatatggtcttcgagttcactgacactcagggcgtgatgggtatgcactacgc

SEQ ID NO: 423067 - DNA, 75 bp, synthetic construct
  source 1..75: mol_type = other DNA
gcgcgatggtgccagtatgagggaaattcagataagggtccttaaaggactgtcgatgctgagtaagggttggcc

SEQ ID NO: 423068 - DNA, 75 bp, synthetic construct
  source 1..75: mol_type = other DNA
tatcggcgcaatttatcttaccggtattttcatgacctggcgtagagcgcgtggttttattaaacaagagaaagc

SEQ ID NO: 423069 - DNA, 75 bp, synthetic construct
  source 1..75: mol_type = other DNA
gcgtcgtcgtcgtcgggggcttgatcgtgcctgccgtgaagccggtatcgatcctgatacgcttgagcactgttt

SEQ ID NO: 423070 - DNA, 75 bp, synthetic construct
  source 1..75: mol_type = other DNA
tcgttctgaccgcgaaatttgaagataaattcctcgctgtgccgtctgaagcactggtttacaccatgaaaggtg

SEQ ID NO: 423071 - DNA, 75 bp, synthetic construct
  source 1..75: mol_type = other DNA
tcgtgaaatagaaaaacgtggcccggcaattgcccaggcgttcgatgccgaaggtaaaccgagtaaagcggcaga

SEQ ID NO: 423072 - DNA, 75 bp, synthetic construct
  source 1..75: mol_type = other DNA
gctggattttttgcgcgagggctcccctgaattgtttgataacgtagccgtgagttttttaccgcttgtaaacct

SEQ ID NO: 423073 - DNA, 75 bp, synthetic construct
  source 1..75: mol_type = other DNA
tgagttgcgtgaaccggttgatgccttcttcgataaagtgatggtaatggtcgatgacaaagaactacgtatcaa

SEQ ID NO: 423074 - DNA, 75 bp, synthetic construct
  source 1..75: mol_type = other DNA
ctggtggagaaactggtcgataaaggcggctatcgtccgctcgaatggcgctatcgctgggatgccagaagtcag

SEQ ID NO: 423075 - DNA, 75 bp, synthetic construct
  source 1..75: mol_type = other DNA
gcactcaccttaaccgccgctacaacgtgaatgaccaggtgacggacgaggaagtcacacagggcaacagtgacc

SEQ ID NO: 423076 - DNA, 75 bp, synthetic construct
  source 1..75: mol_type = other DNA
taggtttatcggcattatttgcattcctgcaagaagtaaattgtaaaaaactatggagtaaaggaagttgggata

SEQ ID NO: 423077 - DNA, 75 bp, synthetic construct
  source 1..75: mol_type = other DNA
gggtcagtatgaagatacggaatcgggcctgtactataaccggttccggtactatggttgcgagacggggcagta

SEQ ID NO: 423078 - DNA, 75 bp, synthetic construct
  source 1..75: mol_type = other DNA
acgatgaagagcactgtaccacctacgtggatgcagaaggcggcgaaacccgttactggtataacgaagacggcc

SEQ ID NO: 423079 - DNA, 75 bp, synthetic construct
  source 1..75: mol_type = other DNA
cctaaaggtgagtttggttcaatagttgaacatgttgatggaaaaaatacaggacatatttctgcatcgcttacc

SEQ ID NO: 423080 - DNA, 75 bp, synthetic construct
  source 1..75: mol_type = other DNA
cgccatccgatggatatacgagccagatagttttacgcctctggcgcgttatgagaaaggccagttgcattatgc

SEQ ID NO: 423081 - DNA, 75 bp, synthetic construct
  source 1..75: mol_type = other DNA
cactctcgcgtttttaccgctcacaggccagaggagtcggaatttttggttcgaaatggactgatgaatggtcag

SEQ ID NO: 423082 - DNA, 75 bp, synthetic construct
  source 1..75: mol_type = other DNA
agtgaccaggtaacggacgaggaagtcacacagggcgacagtgaccgaactctgagtgccaccatatttcgctat

SEQ ID NO: 423083 - DNA, 75 bp, synthetic construct
  source 1..75: mol_type = other DNA
ggacttggtgaaatatgttgatgttggtgcgacttactacttcaataaaagcatatccgcgtttgttgattataa

SEQ ID NO: 423084 - DNA, 75 bp, synthetic construct
  source 1..75: mol_type = other DNA
aggtttatcggcattatctgcattcctgcaagaagtaaattgtaaaaaactatggagtaaaggaagttgggatac

SEQ ID NO: 423085 - DNA, 75 bp, synthetic construct
  source 1..75: mol_type = other DNA
gatgggcatggatgatattggcgaggatatgtacaacatgggcggcgaagtcatggcgcacgccggtgattttaa

SEQ ID NO: 423086 - DNA, 75 bp, synthetic construct
  source 1..75: mol_type = other DNA
tgctctggctaggcgttgtggtcgcgcgcagtcaacaatttgcgactggctgaatgggaagaaaaaaatttctcc

SEQ ID NO: 423087 - DNA, 75 bp, synthetic construct
  source 1..75: mol_type = other DNA
taacgcgaacgctaacgaggccataagcattaactgtgaagaagtggcaaaccatgtagccgcatatcacgacat

SEQ ID NO: 423088 - DNA, 75 bp, synthetic construct
  source 1..75: mol_type = other DNA
ctaaagagttcaaagctgaagctgtcagaacggttcttgaaaatcaactttcgatcagtgaaggcgcttcccgat

SEQ ID NO: 423089 - DNA, 75 bp, synthetic construct
  source 1..75: mol_type = other DNA
cagacgcacaatttatcgttactgccatgcgcggtgagatcaaacgccgccagcgccgcaaggccaaagaatcag

SEQ ID NO: 423090 - DNA, 75 bp, synthetic construct
  source 1..75: mol_type = other DNA
gctgccgaggagatcgggcaactcgtcaccgtcgcgcgtgaagaactccagcgccgcaaggccaaagaacaggag

SEQ ID NO: 423091 - DNA, 75 bp, synthetic construct
  source 1..75: mol_type = other DNA
aaagctacggaagaactcgggcaacttatcgccatcgcacgcgaagaactccagcgccgcaaggccaaagaagcg

SEQ ID NO: 423092 - DNA, 75 bp, synthetic construct
  source 1..75: mol_type = other DNA
tatcgctctggacgggcagcaaaaactgctcgacagccaggtgctgattatcggtctgggcgggctgggtacacc

SEQ ID NO: 423093 - DNA, 75 bp, synthetic construct
  source 1..75: mol_type = other DNA
caaaccggatagcatcccggcggcggaaaaattcgctgcggaaaataaaaatacctacggtgcgctggcttcttt

SEQ ID NO: 423094 - DNA, 75 bp, synthetic construct
  source 1..75: mol_type = other DNA
gaaccctcagacagaaaacaaagtgatgagcggctaaaactggagattaaggtggcgcatatccgcactcgcgaa

SEQ ID NO: 423095 - DNA, 75 bp, synthetic construct
  source 1..75: mol_type = other DNA
tatctcttcctgaaggcactttaggacaatgggttaccgccgcaagaaaagggctcaatacaccaggctcccgca

SEQ ID NO: 423096 - DNA, 75 bp, synthetic construct
  source 1..75: mol_type = other DNA
tcaattccaaccatcgaagcgattttaaatgaggaaaagcaaatggccgactggctgattcagcatattccgcaa

SEQ ID NO: 423097 - DNA, 75 bp, synthetic construct
  source 1..75: mol_type = other DNA
tcggtggtatattcccttctgatgaaatagtcaaaggctctattagcggatatgtcttcgagcaatttgaaatcg

SEQ ID NO: 423098 - DNA, 75 bp, synthetic construct
  source 1..75: mol_type = other DNA
cctagtgaggtgttgtccgcaatccgggaggttgccaagattcgtgccgatttcgatgattttgacggtgacagg

SEQ ID NO: 423099 - DNA, 75 bp, synthetic construct
  source 1..75: mol_type = other DNA
atgacagcacagatagcggcttacggacggctggtggctgacccgcagttaaagaccatcagcaagggtacacaa

SEQ ID NO: 423100 - DNA, 75 bp, synthetic construct
  source 1..75: mol_type = other DNA
atgacgctggcgcgtatggcggtatccgtaccgtgccataacgcagacgacgggcagacgacgttatggttatcc

SEQ ID NO: 423101 - DNA, 75 bp, synthetic construct
  source 1..75: mol_type = other DNA
aggcagtggacaggccagaacggcgaaacgcggcagggctggcaggttatcgcagacagtgtaatcagtgccaga

SEQ ID NO: 423102 - DNA, 75 bp, synthetic construct
  source 1..75: mol_type = other DNA
ccagccatagccgtttacatggcagcaaatcttatcgtgtgccgtggcctacgatgatgagtcctgtgatgtggt

SEQ ID NO: 423103 - DNA, 75 bp, synthetic construct
  source 1..75: mol_type = other DNA
gaagaactggacactgtgcttgcgcaatattgtgaaagtaaatggtctgcaaggcggttcgcaggctgaaagtga

SEQ ID NO: 423104 - DNA, 75 bp, synthetic construct
  source 1..75: mol_type = other DNA
ccccacaggaaggtattgtcggtgtacggattgagcattttcagggggcgctgaataacggtcctcattatccgc

SEQ ID NO: 423105 - DNA, 75 bp, synthetic construct
  source 1..75: mol_type = other DNA
aagattttggctataatatcgttaaaatgtctataatattaacctttgtaaataacagtggagggtatttagatt

SEQ ID NO: 423106 - DNA, 75 bp, synthetic construct
  source 1..75: mol_type = other DNA
tcaggtcgtataggcagggctgcgattcaaaaagtgatatcaaaaaataattcctcttcaggaaatatacccact

SEQ ID NO: 423107 - DNA, 75 bp, synthetic construct
  source 1..75: mol_type = other DNA
acgagctatctggcaactatccggtaattccggatggttgggtcatggtgccgaagagactaacagccgagaacg

SEQ ID NO: 423108 - DNA, 75 bp, synthetic construct
  source 1..75: mol_type = other DNA
gactgacgcactgaacagggcaaaacagcagacgggtcagcacgatgatccgtacggggacaacataccgtttta

SEQ ID NO: 423109 - DNA, 75 bp, synthetic construct
  source 1..75: mol_type = other DNA
tactgatgcactgaacagggcaaagcaacagacaggccagcacgatgatctgaaccgccccgggaatcctggaga

SEQ ID NO: 423110 - DNA, 75 bp, synthetic construct
  source 1..75: mol_type = other DNA
aacgtagagccaggccaaaccgtcaccgttacctttggcggtaaaaattacaccgccagcgtggcgagcgatggt

SEQ ID NO: 423111 - DNA, 75 bp, synthetic construct
  source 1..75: mol_type = other DNA
ctttgattttctgattgtggcctttgccatctttatggcgattaagctaatcaacaaactgaatcggaaaaaaga

SEQ ID NO: 423112 - DNA, 75 bp, synthetic construct
  source 1..75: mol_type = other DNA
tacgtcctcggtgctcttcccccttataatgccctgctgggaggaaaattaattgcatgtctgcttcgtagccgc

SEQ ID NO: 423113 - DNA, 75 bp, synthetic construct
  source 1..75: mol_type = other DNA
gcgtcgtcaggtgaacaacctgcgtcacgctaccaacagcgagctactgtgcgaagcgtttctgcatgcctttac

SEQ ID NO: 423114 - DNA, 75 bp, synthetic construct
  source 1..75: mol_type = other DNA
cgggcaacctctgccggatgatgccgatctgcgtaaagagcgcagcgacgaaatcccggaagcggcaaaagagat

SEQ ID NO: 423115 - DNA, 75 bp, synthetic construct
  source 1..75: mol_type = other DNA
gctggattatctggaagcactggatctggtggatacctccagtgcgccagatattgaatggcctactcctccggc

SEQ ID NO: 423116 - DNA, 75 bp, synthetic construct
  source 1..75: mol_type = other DNA
gctggattatctggaagcactggaactggtggatacatccagtgcgccagatattgaatggcctacgcctccggc

SEQ ID NO: 423117 - DNA, 75 bp, synthetic construct
  source 1..75: mol_type = other DNA
gtaactcgacgtctgtctccatgacctgggcagatttcgatggtgacggcgatatggatctcttcctgcctgcca

SEQ ID NO: 423118 - DNA, 75 bp, synthetic construct
  source 1..75: mol_type = other DNA
gatgccgtgagtcatatccccgttccgcgcgacggtcgtgactacgatccggaagttctgcagaaggcggttctg

SEQ ID NO: 423119 - DNA, 75 bp, synthetic construct
  source 1..75: mol_type = other DNA
acgatcaaaaatcctttccccggggcacgtatgccacacaccggggcggactctggcgggcgtatgaaaaaacgc

SEQ ID NO: 423120 - DNA, 75 bp, synthetic construct
  source 1..75: mol_type = other DNA
acgatcaaaaatcctttccccggggcacgtatgccacacacccggggggactctggcgggcgtatgaaaaaacgc

SEQ ID NO: 423121 - DNA, 75 bp, synthetic construct
  source 1..75: mol_type = other DNA
atgattctgtttaccctcctggttacgctgatatattttcttccgggtgaagattcattctattccgctccctat

SEQ ID NO: 423122 - DNA, 75 bp, synthetic construct
  source 1..75: mol_type = other DNA
actgcgaagacatacttaaagaggtgatatgggcgttcagtgattttgtccgcgataatcgtggtgtgtatgatc

SEQ ID NO: 423123 - DNA, 75 bp, synthetic construct
  source 1..75: mol_type = other DNA
gggcacgtatgccacacaccagggcggactctggcgggcgtatgaaaaaacgcacgggatgcggggatgggaatg

SEQ ID NO: 423124 - DNA, 75 bp, synthetic construct
  source 1..75: mol_type = other DNA
gctggattatctggaagcactggacctggtggatacttccagtgcgccagatattgaatggcctactcctccggc

SEQ ID NO: 423125 - DNA, 75 bp, synthetic construct
  source 1..75: mol_type = other DNA
tcggcggcaccaccggtgccatctatcgccagttctctattaccattgttgcggcgatggtgctgtcagtactgg

SEQ ID NO: 423126 - DNA, 75 bp, synthetic construct
  source 1..75: mol_type = other DNA
ctggctaattcagcatattccgcaaacaactgagaaattcttaattcgctctgaaactgatggcgtagaagcgaa

SEQ ID NO: 423127 - DNA, 75 bp, synthetic construct
  source 1..75: mol_type = other DNA
tctattccggtcatcgaagcgattttaaatgaggaaaagcagatggccgactggctaattcagcatattccgcaa

SEQ ID NO: 423128 - DNA, 75 bp, synthetic construct
  source 1..75: mol_type = other DNA
atgagcattattaaagaatttcgcgaatttgcgatgcgcgggaacgtggtggatttggcggtgggtgtcattatc

SEQ ID NO: 423129 - DNA, 75 bp, synthetic construct
  source 1..75: mol_type = other DNA
actgagcgttacaaagacagcggcagcgatatggtgctggtgggtctgctgcgtggctcatttatgtttatggcg

SEQ ID NO: 423130 - DNA, 75 bp, synthetic construct
  source 1..75: mol_type = other DNA
ttaccgttgttaaatctgatgctgacgccagatgagcgcgaagcgttggggactcgcgtgcgtattgtcgaagag

SEQ ID NO: 423131 - DNA, 75 bp, synthetic construct
  source 1..75: mol_type = other DNA
tgtgattatcttgaccgtcaatacatgttgggcgacagcgtgatggttgcgccagtgttctctgaagtgggcgat

SEQ ID NO: 423132 - DNA, 75 bp, synthetic construct
  source 1..75: mol_type = other DNA
tcaatattttgcaggacgtgaaggtcacaatcgaaaacacagaacgttatgctgagtttaaaagtggcaacttaa

SEQ ID NO: 423133 - DNA, 75 bp, synthetic construct
  source 1..75: mol_type = other DNA
gctggattatctggaagcactggagctggtggatacgtccagtgcgccagatattgaatggcctacccctccggc

SEQ ID NO: 423134 - DNA, 75 bp, synthetic construct
  source 1..75: mol_type = other DNA
cggtgatcttcaccctgaaagcggcacgtactggcaacatcattactgtgactggtacgggagaagcgaagaact

SEQ ID NO: 423135 - DNA, 75 bp, synthetic construct
  source 1..75: mol_type = other DNA
gaaagtaaatggtctgcaaggcggttcgcaggctgaaagtgagcaggggctggtggtgaagcctcaagggaatgc

SEQ ID NO: 423136 - DNA, 75 bp, synthetic construct
  source 1..75: mol_type = other DNA
cctactggcgctgggcaacaacgatcaacgtcccgattacgtgtggcacgaaggcacggcattccacctctttaa

SEQ ID NO: 423137 - DNA, 75 bp, synthetic construct
  source 1..75: mol_type = other DNA
aaaaagaatctcatgcgcaacaaagtgcagattatccagcagtttgaacaggcgggttctcacgctaaccgttat

SEQ ID NO: 423138 - DNA, 75 bp, synthetic construct
  source 1..75: mol_type = other DNA
cgtaaaatccatatcgactatatttgcgactttatttttgatgacgagcgacttgagaacatctatttgatagat

SEQ ID NO: 423139 - DNA, 75 bp, synthetic construct
  source 1..75: mol_type = other DNA
tcgtgaggctttcaaccagatacatcgttacagtaaagagagttttaacagcgaaaattccctgtttaagtatct

SEQ ID NO: 423140 - DNA, 75 bp, synthetic construct
  source 1..75: mol_type = other DNA
gcgaaaaaactgaaggggaactgggacagcggatatacgggcgaaaatgccgggaagacggccatactgagcaac

SEQ ID NO: 423141 - DNA, 75 bp, synthetic construct
  source 1..75: mol_type = other DNA
gttttcaccggtggatgcgcagacggtggaacaactgaagatgaccgctgaaattgtctgttcggtgttccgtgt

SEQ ID NO: 423142 - DNA, 75 bp, synthetic construct
  source 1..75: mol_type = other DNA
aacattgtcactttccgggatctggaacgctcaactattgatgccataacgctatttggtgacaaaaacaccaaa

SEQ ID NO: 423143 - DNA, 75 bp, synthetic construct
  source 1..75: mol_type = other DNA
gcttcagagcctcaatggtgtggtgtttaatgacagcgagtggcggcgcttcacggagcagtatctggacaaccc

SEQ ID NO: 423144 - DNA, 75 bp, synthetic construct
  source 1..75: mol_type = other DNA
gaccttctcatcgtggtgggaatgttcttgactggctttgatgctccgacgctcaatactctgttcgttgacaaa

SEQ ID NO: 423145 - DNA, 75 bp, synthetic construct
  source 1..75: mol_type = other DNA
aaagccttcgtcaaactgtttggtgaatatctgcggacagaaaacatcctgcaaaactatgatgaatttgccacg

SEQ ID NO: 423146 - DNA, 75 bp, synthetic construct
  source 1..75: mol_type = other DNA
taaacgaaatctggataaggatgataacaaaatcatcgtcaccactattcagaaacttaataacctgatgaaagc

SEQ ID NO: 423147 - DNA, 75 bp, synthetic construct
  source 1..75: mol_type = other DNA
tcacggagcagtatctggataacccgagcgatggcattctggataagacccgtaaaatccatatcgactatattt

SEQ ID NO: 423148 - DNA, 75 bp, synthetic construct
  source 1..75: mol_type = other DNA
tatggaaaatcaacagctcctataaagcgaaaaactggtctacccccgaaagcggtggctttatctggcacacca

SEQ ID NO: 423149 - DNA, 75 bp, synthetic construct
  source 1..75: mol_type = other DNA
ctggatgaggcgctggaaacgggggaaaacgagagtacagaatttgatgtcaccacgctgctgagaatggacagt

SEQ ID NO: 423150 - DNA, 75 bp, synthetic construct
  source 1..75: mol_type = other DNA
accaaaacttagtccgttaaatccgcaatataaaacgaaaaaacaggcagttttccagaaaatcgtctcgtttat

SEQ ID NO: 423151 - DNA, 75 bp, synthetic construct
  source 1..75: mol_type = other DNA
aactacagcgtgttcgatattagccaaacgctactagtgatgcgaccgtaccagattgccgccactgagcgtatc

SEQ ID NO: 423152 - DNA, 75 bp, synthetic construct
  source 1..75: mol_type = other DNA
aaccgacgagaaaaaactgagtgcggctgaaaatcagcaggcgtttcttcatcccatgcgtattcaggaaatcac

SEQ ID NO: 423153 - DNA, 75 bp, synthetic construct
  source 1..75: mol_type = other DNA
caacatggacgaaatcaaagaactgatcaaactgtccggtagcgtgactgtgggtgaaaccccggttatccgcat

SEQ ID NO: 423154 - DNA, 75 bp, synthetic construct
  source 1..75: mol_type = other DNA
gcaggcgacacggtgaccgtcacgctcggcggggcgacttacactgccacggtgcaggcgaatttaagctggagc

SEQ ID NO: 423155 - DNA, 75 bp, synthetic construct
  source 1..75: mol_type = other DNA
taaatccgcaatataaaacaaaaaaacagacggtttttcagaagattaacgcatttattgagaagtttaaggggg

SEQ ID NO: 423156 - DNA, 75 bp, synthetic construct
  source 1..75: mol_type = other DNA
agtcgggaaaaaacagtccggcttcattgtcaggtccgcctgcacagggaaccacccgccattacaaccgggggg

SEQ ID NO: 423157 - DNA, 75 bp, synthetic construct
  source 1..75: mol_type = other DNA
taaagtaatgtttgatcaaacgatgattcaaaacattattgaaactaacccccaggaagcgcattcctatcttaa

SEQ ID NO: 423158 - DNA, 75 bp, synthetic construct
  source 1..75: mol_type = other DNA
catccgaaacctggtcaggccccctcaccttccggttgatggcgcaaaaccgaacgccgcaagcagatgcttttt

SEQ ID NO: 423159 - DNA, 75 bp, synthetic construct
  source 1..75: mol_type = other DNA
tgctgccactggtgaagctaagcgcggctttatggcagtagttgcagaactggaacaacggttccctgaccctgc

SEQ ID NO: 423160 - DNA, 75 bp, synthetic construct
  source 1..75: mol_type = other DNA
cttgatcaaagaagaaaatctcaatgaagaggcggcgaaacgctatattcgcacgtctttaaaacgcgaatacgc

SEQ ID NO: 423161 - DNA, 75 bp, synthetic construct
  source 1..75: mol_type = other DNA
gcaaaactatgatgaatttgccacgctgaaagccctgcaacaaatcgatcttagcgatcctgttgcagtagaaaa

SEQ ID NO: 423162 - DNA, 75 bp, synthetic construct
  source 1..75: mol_type = other DNA
ttaccggcacacctattttcccggaaaacgctttaggctcagaaacgaccgccagcgtatttggtcgtgaattgc

SEQ ID NO: 423163 - DNA, 75 bp, synthetic construct
  source 1..75: mol_type = other DNA
aaagtcgttgcccgtggtccggtagccgctgcgtcagctgaagcaactccggcaactgccgcgcctgtagcaaaa

SEQ ID NO: 423164 - DNA, 75 bp, synthetic construct
  source 1..75: mol_type = other DNA
agcaatatcgacgatttcagcggccttatcattaaagctcagggccatgttgtggcgggtcaaacaccgctgtat

SEQ ID NO: 423165 - DNA, 75 bp, synthetic construct
  source 1..75: mol_type = other DNA
cacctccggcgtcgaagcggggcaaatcgttaccgttacctttggcggcaaaacttacagcgccacggtggcggc

SEQ ID NO: 423166 - DNA, 75 bp, synthetic construct
  source 1..75: mol_type = other DNA
acgagaagtacaggactatcgttcaagctacaacgatatccgtgactggcagcgcaaggagcgcgaaagtaatgt

SEQ ID NO: 423167 - DNA, 75 bp, synthetic construct
  source 1..75: mol_type = other DNA
cattaccctgttcgggaagagcaacaccaaaagtgtggtcatggagaaaagctataccgaatacatggaaggctt

SEQ ID NO: 423168 - DNA, 75 bp, synthetic construct
  source 1..75: mol_type = other DNA
agcaaaaccgcaggctgtaccaaacgcggtatctatcgcggagctggtatcgccgattaccggggatgttgtggc

SEQ ID NO: 423169 - DNA, 75 bp, synthetic construct
  source 1..75: mol_type = other DNA
atgacagcacagatagccgcttacgggcggctggtggctgacccacagttaaagaccaccagcaagggcacacaa

SEQ ID NO: 423170 - DNA, 75 bp, synthetic construct
  source 1..75: mol_type = other DNA
agaacggcgaaacgcggcagggctggcaggttatcgcagacagcgtaatcagtgcgagaacggcgcgaccgggcg

SEQ ID NO: 423171 - DNA, 75 bp, synthetic construct
  source 1..75: mol_type = other DNA
ccctgccatgcagccaggcagatgacggaacggcgacgatgtggttatccgtcctggcgtttggcagacaggccg

SEQ ID NO: 423172 - DNA, 75 bp, synthetic construct
  source 1..75: mol_type = other DNA
agtgcgcgaacggtgcgaccgggcggcaaaaaaggtcaacagggtcaggctactgacgcactgaacagagcaaaa

SEQ ID NO: 423173 - DNA, 75 bp, synthetic construct
  source 1..75: mol_type = other DNA
gttgtcattacaacacaggcggctatatgacgctcgcagagctgggcatggccttctggcatgatttagcggctc

SEQ ID NO: 423174 - DNA, 75 bp, synthetic construct
  source 1..75: mol_type = other DNA
agaacggcaaaacgcggcagggctggcaggttatcgcagatagtgtaatcagtgccagaacggcgcgaccgggcg

SEQ ID NO: 423175 - DNA, 75 bp, synthetic construct
  source 1..75: mol_type = other DNA
cccgttactttgccaacacgacaaagcgcgataaaaacagttttgacttcaccatgaactgggcgaaatcagaca

SEQ ID NO: 423176 - DNA, 75 bp, synthetic construct
  source 1..75: mol_type = other DNA
gattatcgtctcagtactgatgtttgccacgaccgggagcctgctgtggtaccagggcatgaagataaacgcgaa

SEQ ID NO: 423177 - DNA, 75 bp, synthetic construct
  source 1..75: mol_type = other DNA
tgataagtacatcaaagctgagcaaacaggcgacagctaccagagcgaatcggacctggaacgggaactgattca

SEQ ID NO: 423178 - DNA, 75 bp, synthetic construct
  source 1..75: mol_type = other DNA
gatctgctaattgtcgtggggatgttcttaaccggcttcgatgctccaacattgaacacgctattcgtcgataaa

SEQ ID NO: 423179 - DNA, 75 bp, synthetic construct
  source 1..75: mol_type = other DNA
ttttaccgctacctttttccagaaacatactctgcttaatgttctggtgaactacagcgtgttcgatgttagcca

SEQ ID NO: 423180 - DNA, 75 bp, synthetic construct
  source 1..75: mol_type = other DNA
gaccggctcacacgctaaccgttatgacgtcaccattctggtaaacggcctgccgctggtgcaaatcgaactcaa

SEQ ID NO: 423181 - DNA, 75 bp, synthetic construct
  source 1..75: mol_type = other DNA
tgcaggtcattcagcagtttgaacagaccggctcacacgctaaccgttatgatgttacgattctggtcaacggcc

SEQ ID NO: 423182 - DNA, 75 bp, synthetic construct
  source 1..75: mol_type = other DNA
ctgcgggagcgctgaacattagcgttagcggcgcgaacagtgccggaacccagaccagcattacccatccggtca

SEQ ID NO: 423183 - DNA, 75 bp, synthetic construct
  source 1..75: mol_type = other DNA
atcaaacgagacgaaaatcaaagacgctatagccctgttcacagcttcgacagaggaatcactgaaaaaacaccg

SEQ ID NO: 423184 - DNA, 75 bp, synthetic construct
  source 1..75: mol_type = other DNA
tttatatccgtaaaatctcagtcggctatgctgtccaatgttcgggaacagcttcagagcctcaatggtgtggtg

SEQ ID NO: 423185 - DNA, 75 bp, synthetic construct
  source 1..75: mol_type = other DNA
aaggtggactacaacgatgtgcggccacagtttaagtctttagagacagaaaccgacgagaaaaaactgagtgcg

SEQ ID NO: 423186 - DNA, 75 bp, synthetic construct
  source 1..75: mol_type = other DNA
gctggtgatctccggttccagcactggcggggaagcgggcgatgtcatcaccgtcacgttaaacagtaaaaccta

SEQ ID NO: 423187 - DNA, 75 bp, synthetic construct
  source 1..75: mol_type = other DNA
tggagtgccacggtgccagcctcggctgtcagtgcattgggtgaagccaactacacagtaaccgcgaacgtcacc

SEQ ID NO: 423188 - DNA, 75 bp, synthetic construct
  source 1..75: mol_type = other DNA
atgcggcgtgagcttctggtgtacaaatccaccaccggaaaaaccgttccctgcttgtctggaggaacggcggtt

SEQ ID NO: 423189 - DNA, 75 bp, synthetic construct
  source 1..75: mol_type = other DNA
ggacgccgggcaggacgtggagatgccagagccggagaagaagaaacgagaaatgattcagttgtggggggagta

SEQ ID NO: 423190 - DNA, 75 bp, synthetic construct
  source 1..75: mol_type = other DNA
gtggctgttaaaatttatacattatattttctgtataatactgtttttatttttataaaaatcatcatttcagtc

SEQ ID NO: 423191 - DNA, 75 bp, synthetic construct
  source 1..75: mol_type = other DNA
gcagagaaactattctcgataaactactgcaacttgacgagcaaatcagaaatgaaagggagaatgaacttgcct

SEQ ID NO: 423192 - DNA, 75 bp, synthetic construct
  source 1..75: mol_type = other DNA
aatggcacaaaacaacttcgcccagatgttcagaaggccgtttggcacaactcgttacgattgcctgagggagaa

SEQ ID NO: 423193 - DNA, 75 bp, synthetic construct
  source 1..75: mol_type = other DNA
ggggtaaaagcttcgctggtgtcgtgcaatatgcattgaagccaggttcacatcataaaagtaatccaatcgtca

SEQ ID NO: 423194 - DNA, 75 bp, synthetic construct
  source 1..75: mol_type = other DNA
tcagcaggcactggccatcgatcctcaaaaatttttcgaatacatccgctttacccccgtatataaggatggtgt

SEQ ID NO: 423195 - DNA, 75 bp, synthetic construct
  source 1..75: mol_type = other DNA
tgagccagcgtgcggcgggcctgcgtgccaaagtcgacctggacaaagggtactggtggtcatcctcaaatcagg

SEQ ID NO: 423196 - DNA, 75 bp, synthetic construct
  source 1..75: mol_type = other DNA
ggctctggcggggcgtggcccggaaggcaccattaacttcaacaccagctccgaccgcgtccgtctgtgctaccc

SEQ ID NO: 423197 - DNA, 75 bp, synthetic construct
  source 1..75: mol_type = other DNA
tttaccacacggcctgcaggtggagctgccggatattgccgccacgaccacggtgcagaccgtccagctatggga

SEQ ID NO: 423198 - DNA, 75 bp, synthetic construct
  source 1..75: mol_type = other DNA
aaagcgtggtgatactggaatttatcgggatgatgttgctgacggtggcgctactgtcggtaagcgacgtcctgt

SEQ ID NO: 423199 - DNA, 75 bp, synthetic construct
  source 1..75: mol_type = other DNA
gcgacgtccagttccagttttttgcagtgcagtagcattattcgcattaccgacaaagcgttacgtgaagaactg

SEQ ID NO: 423200 - DNA, 75 bp, synthetic construct
  source 1..75: mol_type = other DNA
ggggtaagagcttcgctggtgttgttcgttatgcattgcaaccgggagcacatcataaaagcgatccagtcgtaa

SEQ ID NO: 423201 - DNA, 75 bp, synthetic construct
  source 1..75: mol_type = other DNA
caccacaaaatcacgccttatattatcggtggcaacatgacgggaagcactgctgctgaacttatcagtgaattt

SEQ ID NO: 423202 - DNA, 75 bp, synthetic construct
  source 1..75: mol_type = other DNA
tatgggcttctctgagacgcatctacgagcatatgtcctgcatgatgataaagatggccaacatatccatatagt

SEQ ID NO: 423203 - DNA, 75 bp, synthetic construct
  source 1..75: mol_type = other DNA
agacacgataatcaacaccctcgaaaaactacgtaatccattcttgtatgtttccaaacagccttccaagatttt

SEQ ID NO: 423204 - DNA, 75 bp, synthetic construct
  source 1..75: mol_type = other DNA
cactgcacatcctttccaccaaatcctgcacctgcatcttctgacaccctgtcattccatgacaacaaatcccat

SEQ ID NO: 423205 - DNA, 75 bp, synthetic construct
  source 1..75: mol_type = other DNA
ggggtaaacaattcacaggtgtggttctctatagcctgaagtcaggttctcaccacaaaatcacgccttatgtta

SEQ ID NO: 423206 - DNA, 75 bp, synthetic construct
  source 1..75: mol_type = other DNA
cgctgctatatcatgcacgatgattcggacgggcagcatatccatataatagctaacagaattaacatggtcggt

SEQ ID NO: 423207 - DNA, 75 bp, synthetic construct
  source 1..75: mol_type = other DNA
tctatatgggcagagcattgtttttttattggtcacatttttattatgcatggtggctatcataatgccatttaa

SEQ ID NO: 423208 - DNA, 75 bp, synthetic construct
  source 1..75: mol_type = other DNA
ttcacaacaaccctgcaagattctcaaaagtctatgcaactcagcatctaaaacctgcaagaaaaattcgtttat

SEQ ID NO: 423209 - DNA, 75 bp, synthetic construct
  source 1..75: mol_type = other DNA
ctatcagaacggactggtcttcccgcccctaaggaagctctccaacagatacttgataaaagtttggcagataca

SEQ ID NO: 423210 - DNA, 75 bp, synthetic construct
  source 1..75: mol_type = other DNA
agcacacgtatcatccaggatcttgaaaaagactaccagctaacacaaaccaaaggaactgatgcactaaacccc

SEQ ID NO: 423211 - DNA, 75 bp, synthetic construct
  source 1..75: mol_type = other DNA
ttttctgcttcaccactttctatagacctaccatctgttcactatgttaaaaaatgtgttaaaacaaacactttt

SEQ ID NO: 423212 - DNA, 75 bp, synthetic construct
  source 1..75: mol_type = other DNA
agaaccttatcagcacccgtatcatccaggatcttgaaaaagactaccagctaacaagaaccaaaggaactgatg

SEQ ID NO: 423213 - DNA, 75 bp, synthetic construct
  source 1..75: mol_type = other DNA
agattctgggtatcactggtgtggagcgccaactgtcagcaatgattgacgacccgcagagcgaggtgaacctgc

SEQ ID NO: 423214 - DNA, 75 bp, synthetic construct
  source 1..75: mol_type = other DNA
gtgacagtgaactcgatcaccgaattgcacttcagttcggtggtggtaatgaggagacgaatctctggaccctct

SEQ ID NO: 423215 - DNA, 75 bp, synthetic construct
  source 1..75: mol_type = other DNA
gcggataaatgtcctgaggggggaacagcgtcgtgtcagtggcagtgcccgggtttccctcaaacgtcgtatctg

SEQ ID NO: 423216 - DNA, 75 bp, synthetic construct
  source 1..75: mol_type = other DNA
atgtagtcaatgaccatggagtacggctactctgcctaaatggtggtggggccagagggatgtttacaatcagtg

SEQ ID NO: 423217 - DNA, 75 bp, synthetic construct
  source 1..75: mol_type = other DNA
atcatccggcgaaaaaaacgatcgccccggacaccgccccccctctcatgcagagaaaaaattcccgtttcaggc

SEQ ID NO: 423218 - DNA, 75 bp, synthetic construct
  source 1..75: mol_type = other DNA
ggcgtaaaaaacgatcgccccggacaccgccccccgtctcatgcagagaaaaaattcctgtttcaggccagttaa

SEQ ID NO: 423219 - DNA, 75 bp, synthetic construct
  source 1..75: mol_type = other DNA
gtgaagcggcgggtggtatgccggacccgacgctgccggaggtgtccggaggtcatggcagggcagacgatatca

SEQ ID NO: 423220 - DNA, 75 bp, synthetic construct
  source 1..75: mol_type = other DNA
gcgacggtagggtccagtaatctcgatccgctcagtttgtcgctaaatctcgaagcaaacgtcatcattcacgat

SEQ ID NO: 423221 - DNA, 75 bp, synthetic construct
  source 1..75: mol_type = other DNA
ctctgtggttgtgtggttgacctctgtgacagtgaactcgatcaccgaattgcacttcagttcggtggtggtaat

SEQ ID NO: 423222 - DNA, 75 bp, synthetic construct
  source 1..75: mol_type = other DNA
aacattgtgcatattgaaacgcacaatggcgtggtttttacccagcaggcaagtgttacagaaggtgagcaagag

SEQ ID NO: 423223 - DNA, 75 bp, synthetic construct
  source 1..75: mol_type = other DNA
agcatatgtccagctacggtccagaggccaaacaggattacgcggtgcgcctggaggggccaattgtggaagata

SEQ ID NO: 423224 - DNA, 75 bp, synthetic construct
  source 1..75: mol_type = other DNA
cgtcatcacaaagcggaagagaaccgccagccgggagaagcgcaggtattgctggtctggcgcgataacgaagaa

SEQ ID NO: 423225 - DNA, 75 bp, synthetic construct
  source 1..75: mol_type = other DNA
cgactgtcaacaagtggatgaatccatgctgccgaaacgtacctggtggaacctgaccaaaagcgtgctggcatt

SEQ ID NO: 423226 - DNA, 75 bp, synthetic construct
  source 1..75: mol_type = other DNA
gcgggtgaatattctgaagggtgaacagcgtcgtgtcagtggcagtgcccgggtttccctcaaacgtcgtatctg

SEQ ID NO: 423227 - DNA, 75 bp, synthetic construct
  source 1..75: mol_type = other DNA
ttgagactcttgaggtggaaaaaggggcgcgcccggtcagcatggtcaagtctgcggtgattggtctggtgggaa

SEQ ID NO: 423228 - DNA, 75 bp, synthetic construct
  source 1..75: mol_type = other DNA
aaactatctctagatgatggtggtactaatgatttcgaaaatttagtattaatcgaaaacgaaccatatcataaa

SEQ ID NO: 423229 - DNA, 75 bp, synthetic construct
  source 1..75: mol_type = other DNA
agagaagctggatgcaataacctatattgacgctccaattggtactacgtttagtcaggtattgtccgggcgtgg

SEQ ID NO: 423230 - DNA, 75 bp, synthetic construct
  source 1..75: mol_type = other DNA
ctgaccgtgtccgtctgtgttatccgcatgtcagagtctatgacgcggccaccaacagtgagcgtctggaaccgc

SEQ ID NO: 423231 - DNA, 75 bp, synthetic construct
  source 1..75: mol_type = other DNA
attacgcactggatgcgcaaagcggaacaatcacgaacctcgggaaaggcatcgctgcgggagccacggtgaaag

SEQ ID NO: 423232 - DNA, 75 bp, synthetic construct
  source 1..75: mol_type = other DNA
tttcagcagctacggcagcggtctgcgcctgtggggcaaccggatggcagcctggccgacggtcacccatatgcg

SEQ ID NO: 423233 - DNA, 75 bp, synthetic construct
  source 1..75: mol_type = other DNA
accgagtcagtgaatgcctacgggcgcaaactgattggcgacggcgcgctgctcggttttgaatgctggtatgac

SEQ ID NO: 423234 - DNA, 75 bp, synthetic construct
  source 1..75: mol_type = other DNA
ccaggcgctgattgacgcgctaaccgaatcggtgaatgcctatggccgcaagctgattggcgacggcgcattgct

SEQ ID NO: 423235 - DNA, 75 bp, synthetic construct
  source 1..75: mol_type = other DNA
gggtttccctcaagcgtcatatctggctgagggatgccgggcagtgctgtctctgtggtcgtgtggttgacctct

SEQ ID NO: 423236 - DNA, 75 bp, synthetic construct
  source 1..75: mol_type = other DNA
gacgcagcacagtttggaccacaactgactggatttagtattccgcaggcactggatgcgatctacgatcacggt

SEQ ID NO: 423237 - DNA, 75 bp, synthetic construct
  source 1..75: mol_type = other DNA
ttcatgttgatgaacaaacaggaataatcactcgtgcagaaactgagatccctgccggagcgaaagtttgcgcct

SEQ ID NO: 423238 - DNA, 75 bp, synthetic construct
  source 1..75: mol_type = other DNA
gccctgaccgaatcggtaaatacctggggccgtaagctgattgccgacggcgcactgcttggctttgaatgctgg

SEQ ID NO: 423239 - DNA, 75 bp, synthetic construct
  source 1..75: mol_type = other DNA
ttcagcaaaacccaatggctacatgacgccgcaggaattctgggagctggttattgtctgcctgtgtctgcgggg

SEQ ID NO: 423240 - DNA, 75 bp, synthetic construct
  source 1..75: mol_type = other DNA
aagaggttctggagcgtttgggttggagaattagccgcatttggtccactgattggttcagtaatcctgatgagg

SEQ ID NO: 423241 - DNA, 75 bp, synthetic construct
  source 1..75: mol_type = other DNA
gaaaaagtgatgcgccggtgaccacgccagcagaactggctgatgctatcgggctgtcatacgacacctataccg

SEQ ID NO: 423242 - DNA, 75 bp, synthetic construct
  source 1..75: mol_type = other DNA
catgcgactgacggcggttttttcctgtgtcagggtgctggcggagtcggtcgggatgttgccctgcaacctgta

SEQ ID NO: 423243 - DNA, 75 bp, synthetic construct
  source 1..75: mol_type = other DNA
aaccgtttatcgcgcagacaggcattgatctactggccgtctcggtaggcacggcgcacggcatgtacgcgcctg

SEQ ID NO: 423244 - DNA, 75 bp, synthetic construct
  source 1..75: mol_type = other DNA
gtcgctctggcgcttgatcatggcaaaaatccggactgtattcgtcaggcgtttcgtgctggtttcagcggatta

SEQ ID NO: 423245 - DNA, 75 bp, synthetic construct
  source 1..75: mol_type = other DNA
ctggcgcgttttacactgcgcggtattccgccgttaccggctggcggtgcgcatatccgcgtgacgttccaggtc

SEQ ID NO: 423246 - DNA, 75 bp, synthetic construct
  source 1..75: mol_type = other DNA
tcccgcgtaataccacgattccggtggcccgcgctcaggatttcaccacctttaaagatggtcagacggcgatgt

SEQ ID NO: 423247 - DNA, 75 bp, synthetic construct
  source 1..75: mol_type = other DNA
tgactgttaatgttgcgggctggcagggcgaaatcagccgtcaacaattcaacgaactgatcgcaccactggtta

SEQ ID NO: 423248 - DNA, 75 bp, synthetic construct
  source 1..75: mol_type = other DNA
acgccaaatttaatgccggagcattgttgcgtggcgacatgaaatcccgctttgaagcgtatgccacggggatca

SEQ ID NO: 423249 - DNA, 75 bp, synthetic construct
  source 1..75: mol_type = other DNA
ccgagattttgcaaaacataaacgatcttcagatatcccttgaaaatgactcgttacagttaggggcgtttttac

SEQ ID NO: 423250 - DNA, 75 bp, synthetic construct
  source 1..75: mol_type = other DNA
gaacaattcaatgaactgatcgcgccactggtaaaacgaaccttactggcttgtcgtcgcgcgctgaaagacgcg

SEQ ID NO: 423251 - DNA, 75 bp, synthetic construct
  source 1..75: mol_type = other DNA
accacgaaaccctccgatggcagtaaagccggtaagcagaaggataacgccaatgcagacgaaacaacgtcttga

SEQ ID NO: 423252 - DNA, 75 bp, synthetic construct
  source 1..75: mol_type = other DNA
caaaatcagcggcacccttaaaacacgggcggtggatgaacgactgcataagctggtttcggcaaaacctaatgg

SEQ ID NO: 423253 - DNA, 75 bp, synthetic construct
  source 1..75: mol_type = other DNA
ctgaagaaagattttgaggagcgtcacaccgggcttggtaatgctcaccgcccgatgatccttgagatggggctg

SEQ ID NO: 423254 - DNA, 75 bp, synthetic construct
  source 1..75: mol_type = other DNA
agtgatgtggggtagccgttgggatgaactgctgcgtaaagataccagcggtaaactgatccagctgatgaatga

SEQ ID NO: 423255 - DNA, 75 bp, synthetic construct
  source 1..75: mol_type = other DNA
ctggtgcggcgcatttctcggtaaagttgaggcccatgcgatcacgccgttctggcgtaccatggcaccgctgac

SEQ ID NO: 423256 - DNA, 75 bp, synthetic construct
  source 1..75: mol_type = other DNA
atggtcgatcaggactggatggattccagtaaccccggaacctggacagatgaaagtaggcaccctgatacacaa

SEQ ID NO: 423257 - DNA, 75 bp, synthetic construct
  source 1..75: mol_type = other DNA
atgaccgttatttatcagaccaccatcacccgtattggcgcgagcgccactgacgccctcagcgaccagatgctc

SEQ ID NO: 423258 - DNA, 75 bp, synthetic construct
  source 1..75: mol_type = other DNA
gaggcgtattcaacaggcattaactggggtatttactcaccaaatgactgccgggaacttgaagaacttaaccca

SEQ ID NO: 423259 - DNA, 75 bp, synthetic construct
  source 1..75: mol_type = other DNA
ttgaagcctacgccaccgggatcaactggggaatttactcttccaatgactgccgcgacctggaagatatgaatc

SEQ ID NO: 423260 - DNA, 75 bp, synthetic construct
  source 1..75: mol_type = other DNA
ggattgtcatacgacacctataccggaaagcggatcagcagccagcgggccatgcggctgacggcggtctattcc

SEQ ID NO: 423261 - DNA, 75 bp, synthetic construct
  source 1..75: mol_type = other DNA
gagcgtatgtacggtgaaaaacaagagaacgtttactactacatcactactctgaacgaaaactaccacatgccg

SEQ ID NO: 423262 - DNA, 75 bp, synthetic construct
  source 1..75: mol_type = other DNA
gggctgaaccctatagcctatgcaagagaagcaatatctctgggaatggcaacagaggaacatggggcgcggttg

SEQ ID NO: 423263 - DNA, 75 bp, synthetic construct
  source 1..75: mol_type = other DNA
ttgaaccaaagcttaacagccagtggcagccggtttaccaggtaacattccccgatggctcaacagatgtgcttg

SEQ ID NO: 423264 - DNA, 75 bp, synthetic construct
  source 1..75: mol_type = other DNA
aacgttagccgaccatgaaggccgtcacctgctgccatctgttgttcactatcaacagcaagggcattcggtggg

SEQ ID NO: 423265 - DNA, 75 bp, synthetic construct
  source 1..75: mol_type = other DNA
cagatcgcggacgtgtcgtacctgctggataccttctttgccaaggtcacccgcaccgcgttgcagaacgccgcc

SEQ ID NO: 423266 - DNA, 75 bp, synthetic construct
  source 1..75: mol_type = other DNA
ccgagcgtgttgtaaccctgactggcgaagcaatcgctcgcccgggcaacgtctgggcacggctggggacgccag

SEQ ID NO: 423267 - DNA, 75 bp, synthetic construct
  source 1..75: mol_type = other DNA
aatgcatggccaagggcaatccgtcaagagcatcgcagaatcgctaagaatgcctctaagcaccacttacaggat

SEQ ID NO: 423268 - DNA, 75 bp, synthetic construct
  source 1..75: mol_type = other DNA
attgatgggcgacaaacctgcgtcacactcggcttagccgctatttttgctgccgtattattgccgggtatgcat

SEQ ID NO: 423269 - DNA, 75 bp, synthetic construct
  source 1..75: mol_type = other DNA
ttgcagatacctgtgatggcgtattttctgctcgtagccgcgatcgcatgttggaaatcatgcgtgatagtcgtt

SEQ ID NO: 423270 - DNA, 75 bp, synthetic construct
  source 1..75: mol_type = other DNA
atgtgatcctgaaaaaatcgtatgaagtgatgcatggggaattggggaatgtggattcgatccagagctggtcga

SEQ ID NO: 423271 - DNA, 75 bp, synthetic construct
  source 1..75: mol_type = other DNA
actttatgacctcatcggcaaaatatgccgacattctgctgccagacctgatgaccgttgagcaggaagatatta

SEQ ID NO: 423272 - DNA, 75 bp, synthetic construct
  source 1..75: mol_type = other DNA
aaaagttcacagaaggtcgcacgcaggaacaatggttacaacatctgtacgccaaaatgcttgccaaagatccgg

SEQ ID NO: 423273 - DNA, 75 bp, synthetic construct
  source 1..75: mol_type = other DNA
cgtgggattgccaacggcgatatggtgcgggtgtataaccatcgtggcgaagttcggctaccagccaaagtgaca

SEQ ID NO: 423274 - DNA, 75 bp, synthetic construct
  source 1..75: mol_type = other DNA
cgtaatctgcatcgtgagtttaacttcagtttagatggtgctgcaactaagcacgacgcattgttgccacggttc

SEQ ID NO: 423275 - DNA, 72 bp, synthetic construct
  source 1..72: mol_type = other DNA
aaaactagtattaagactatcacttatttaagtgatattggttgtctggagattcagggggccagtctatag

SEQ ID NO: 423276 - DNA, 75 bp, synthetic construct
  source 1..75: mol_type = other DNA
ctttcttctgtccatcggcgtttgctacgcaaattccagtacctgaattacctgtgtatgtgaatgacgtaacag

SEQ ID NO: 423277 - DNA, 75 bp, synthetic construct
  source 1..75: mol_type = other DNA
ggtgtggctgctatggtggtgacgatggtggcgattttcatcctcggtcagcttctcaaacgtacgctgggcggg

SEQ ID NO: 423278 - DNA, 75 bp, synthetic construct
  source 1..75: mol_type = other DNA
aattgtcaccctgatcaaccggtggatgccggggcttatctgtcctatctggagagtcaggctcgccgctttgtc

SEQ ID NO: 423279 - DNA, 75 bp, synthetic construct
  source 1..75: mol_type = other DNA
aatacttttggtggcagcgaagaacaggataatgaagatggctttgaagggataaatcgtcagattttaatgctg

SEQ ID NO: 423280 - DNA, 75 bp, synthetic construct
  source 1..75: mol_type = other DNA
ataccctaaaactgtatgaaatgattaagttgatgaatgctgatggagaatggacaaaaattcaaatagctacgc

SEQ ID NO: 423281 - DNA, 75 bp, synthetic construct
  source 1..75: mol_type = other DNA
agcgcctgcgttggtattcggaaaagagcaccagctataccaatacgtttaatgaagatgatggtagctatgtag

SEQ ID NO: 423282 - DNA, 75 bp, synthetic construct
  source 1..75: mol_type = other DNA
acgctggatatgagctggtaccaagggattaacttagggtttgagagcagacctaagtctggagaaacctttgct

SEQ ID NO: 423283 - DNA, 75 bp, synthetic construct
  source 1..75: mol_type = other DNA
tgtctttcaaaacttcctggcagagcaagaaccaaaatcatattttgagattatctacggtaaagaggcacctct

SEQ ID NO: 423284 - DNA, 75 bp, synthetic construct
  source 1..75: mol_type = other DNA
ctaatgaatggcggacaatggttcttcatgctggacactgatcaggaaatattagcctgggcgctggtggagctg

SEQ ID NO: 423285 - DNA, 75 bp, synthetic construct
  source 1..75: mol_type = other DNA
ggcgaccttatcgatcgcggtactgaaaatgtcgaatgtctggaactattgcagatgccctggttcagggcagtg

SEQ ID NO: 423286 - DNA, 75 bp, synthetic construct
  source 1..75: mol_type = other DNA
ttcggcacgtagtcgcgatcgcatgctggaaattatgcgcgatagccgtttaggaacccatggtggtctggcgct

SEQ ID NO: 423287 - DNA, 75 bp, synthetic construct
  source 1..75: mol_type = other DNA
gtaaagcgtctgccctatatcattgagttgaacaccgggcatgaaactatcgttatagcccatgccgactatcca

SEQ ID NO: 423288 - DNA, 75 bp, synthetic construct
  source 1..75: mol_type = other DNA
atgatccaggctatgcatgaagtgaatttatatagccgtattgatggttctggctacagaaacatatgggttgtt

SEQ ID NO: 423289 - DNA, 75 bp, synthetic construct
  source 1..75: mol_type = other DNA
gaaaagcccgaagacattctggaatcagcattatatcgacactggtgccgtattttgcggaaacctgacattgat

SEQ ID NO: 423290 - DNA, 75 bp, synthetic construct
  source 1..75: mol_type = other DNA
tgagcgtcagaaagcagtggcctgatgaattgaagatccatctggttgaatatgtgccgattgcgcggtggaatg

SEQ ID NO: 423291 - DNA, 75 bp, synthetic construct
  source 1..75: mol_type = other DNA
gatgataaaagtagttaccttattcaatcatggattgaaaatgttgaaggaaaaaaggatgccaggtttgtaatt

SEQ ID NO: 423292 - DNA, 75 bp, synthetic construct
  source 1..75: mol_type = other DNA
ctgaaaggtcatgcgcaacgcgtgccggtgaaaacaggttcggtcactgaactggtgtcgattctcggaaaaaaa

SEQ ID NO: 423293 - DNA, 75 bp, synthetic construct
  source 1..75: mol_type = other DNA
attcatgcctataccggcacccagtcactggtggatggtccgcgtggtaaagatctacgcgcttcacgtgcggcg

SEQ ID NO: 423294 - DNA, 75 bp, synthetic construct
  source 1..75: mol_type = other DNA
tacggtccgttcccctggagcgttgacttcacggaagattcacttatcgtcgatgggaaaagtattgcggtgtac

SEQ ID NO: 423295 - DNA, 75 bp, synthetic construct
  source 1..75: mol_type = other DNA
atcaacatatggtagacgcggaaggaaacaccttcagcgtgccgccagatcgcaccagcaagcaggtgcttccaa

SEQ ID NO: 423296 - DNA, 75 bp, synthetic construct
  source 1..75: mol_type = other DNA
gcgagcccagttgcttgccatcattgcaataatgccccctgtgttacagcttgccccgttaatgctcttactttt

SEQ ID NO: 423297 - DNA, 75 bp, synthetic construct
  source 1..75: mol_type = other DNA
agcggaattaaacttgataaatgggggctgataaaaaccggcgatgcagggcatttatccacccagacgcatctg

SEQ ID NO: 423298 - DNA, 75 bp, synthetic construct
  source 1..75: mol_type = other DNA
taactgcaactggcattgcccgctgcataacgctattccggattacatccgtctggtacaggaaggaaagattat

SEQ ID NO: 423299 - DNA, 75 bp, synthetic construct
  source 1..75: mol_type = other DNA
ctgcggaatgtataggctgtcatgcttgtgaaattgcctgtgcggtggcacataatcaagaaaactggccgctga

SEQ ID NO: 423300 - DNA, 75 bp, synthetic construct
  source 1..75: mol_type = other DNA
aggtaagcgagtcgtggtattgggcggtggcgatacgacaatggattgtttgcggacttccatccgcctcaatgc

SEQ ID NO: 423301 - DNA, 75 bp, synthetic construct
  source 1..75: mol_type = other DNA
cgaaatctattgtggactggatccgcaacaagcgacttatgagagtgaccgctgtgtttattgtgccgaaaaagc

SEQ ID NO: 423302 - DNA, 75 bp, synthetic construct
  source 1..75: mol_type = other DNA
ggtgatcccggaactgagcggcaaactgaaaggccatgcgcagcgtgtacccgtgaaaacaggttcggtcaccga

SEQ ID NO: 423303 - DNA, 75 bp, synthetic construct
  source 1..75: mol_type = other DNA
ttccgcgaaaccgatctgaaaaacattcatgccggtacgcctgcgacaattcgcctgatgagcgacagcggcaaa

SEQ ID NO: 423304 - DNA, 75 bp, synthetic construct
  source 1..75: mol_type = other DNA
tctattaactgggtccgcgttgcccagcgttttccggtcaaaatcatggtcgataaacctgacccggaaatgttc

SEQ ID NO: 423305 - DNA, 75 bp, synthetic construct
  source 1..75: mol_type = other DNA
gcggaagacgttgaccgtgcgaggaccgcgcagcgcgctgcagaagccgatcttaatgccgtattgttacaggcg

SEQ ID NO: 423306 - DNA, 75 bp, synthetic construct
  source 1..75: mol_type = other DNA
ttcaatatacacctgaacttgatgcgcaacgactcaaactgactttcccgcaggcaatattaaagcatgaggcac

SEQ ID NO: 423307 - DNA, 75 bp, synthetic construct
  source 1..75: mol_type = other DNA
gtctgagatcgatttcagaaacaaaatctggaccatcccagccactcgcgaggctatccccggtgtccgctattc

SEQ ID NO: 423308 - DNA, 75 bp, synthetic construct
  source 1..75: mol_type = other DNA
ccacatctccccaggcgtttacgctcgtgctttcctggaaggtcgtctgactcaggagcagctggataacttccg

SEQ ID NO: 423309 - DNA, 75 bp, synthetic construct
  source 1..75: mol_type = other DNA
ggtcgagtgcgtgggcttgtgcgcaggatttgattgtgtccgaggacaataaagttgtacacaaagcactaaagt

SEQ ID NO: 423310 - DNA, 75 bp, synthetic construct
  source 1..75: mol_type = other DNA
actggtgtctattctcggaaaaaaagtgactgccgaagaggtgaacaacgcgcttaaaaaggcgacaaacaataa

SEQ ID NO: 423311 - DNA, 75 bp, synthetic construct
  source 1..75: mol_type = other DNA
gcagaaaatatcattccccacactacaggtgcggcaaaagccattggtctggtgatcccagaactgagcggcaaa

SEQ ID NO: 423312 - DNA, 75 bp, synthetic construct
  source 1..75: mol_type = other DNA
ccgaaagtgtctcgttctattaactgggtccgcgttgcccagcgttttccggtcaaaatcatggttgataaacct

SEQ ID NO: 423313 - DNA, 75 bp, synthetic construct
  source 1..75: mol_type = other DNA
agcctccctcgcggcgctggataagcaaattatgctcacccagcgtagcgttgacgcacaacagtttggtgccga

SEQ ID NO: 423314 - DNA, 75 bp, synthetic construct
  source 1..75: mol_type = other DNA
attgccgaacaatttggcctcaacgtgctgccgacccgtgcgggtctggtgccattcactctgcataaaccgttg

SEQ ID NO: 423315 - DNA, 75 bp, synthetic construct
  source 1..75: mol_type = other DNA
tagcgttcgagcagcctacatccataaggcggaatatctggaggcccgtaaagcgatgatgcagtggtggtcgga

SEQ ID NO: 423316 - DNA, 75 bp, synthetic construct
  source 1..75: mol_type = other DNA
ttatcagaaaggaactgctgaccgggtatcagacgctgaaggctggacacaaaacaccagttaaaggccgcacag

SEQ ID NO: 423317 - DNA, 75 bp, synthetic construct
  source 1..75: mol_type = other DNA
cgcgccgggattcgctatcgcagagcataccagtcccgacacacgtatgcatgctggtcgttggccgccggtgct

SEQ ID NO: 423318 - DNA, 75 bp, synthetic construct
  source 1..75: mol_type = other DNA
catacttatgcctgttgggcattatcggcaggagcgaatccaagcttcatagcaaaccaaatgggccatgcaaat

SEQ ID NO: 423319 - DNA, 75 bp, synthetic construct
  source 1..75: mol_type = other DNA
ggggtaagtaaaaaagaaattacggtgaaggaacttgaagaaaagtggctggatctgaaacgaatggaaatctct

SEQ ID NO: 423320 - DNA, 75 bp, synthetic construct
  source 1..75: mol_type = other DNA
actccaccaaaaaccgatgcaggcaccggaaggacaattcatctggttcaaccagctattgatgctcttaaaagc

SEQ ID NO: 423321 - DNA, 75 bp, synthetic construct
  source 1..75: mol_type = other DNA
cgttgacgaaggagtttacccttccgaaaaccgaggctgggacaaaccgcatcatcaaccttattcagccagcta

SEQ ID NO: 423322 - DNA, 75 bp, synthetic construct
  source 1..75: mol_type = other DNA
ttttactacaactgtgcgcctgctcacacaacgtatcccaccaaaaaagtgactccgtccgaagtgtctccggtt

SEQ ID NO: 423323 - DNA, 75 bp, synthetic construct
  source 1..75: mol_type = other DNA
cagtgttctggtgatgcggacggaccttaaccactcagaccagcttcgggtgacagaatcgctgcggggtaagaa

SEQ ID NO: 423324 - DNA, 75 bp, synthetic construct
  source 1..75: mol_type = other DNA
cggacttggcacaaaagactacggctctcattcctggtatgccggtgctgaagtgggttaccgctatcatgtcac

SEQ ID NO: 423325 - DNA, 75 bp, synthetic construct
  source 1..75: mol_type = other DNA
accagtcacgacatacctatgcgtgctggtcattatctgctggtgcaaacccgagttttattgccagtcagatgg

SEQ ID NO: 423326 - DNA, 75 bp, synthetic construct
  source 1..75: mol_type = other DNA
gcggtgccggaacgattactgtcgatggtcaatgctatgaaatcggtcaccgcgatgccttgtatgtaggtaaag

SEQ ID NO: 423327 - DNA, 75 bp, synthetic construct
  source 1..75: mol_type = other DNA
tttatctggggcatggtcggtgaaaaccaggtctttaatgatatggaccatgtggccgttaaagatttgcgctag

SEQ ID NO: 423328 - DNA, 75 bp, synthetic construct
  source 1..75: mol_type = other DNA
tgctgaatcagaagctggcagattttgccccattgatgccccatagccacgagaacagtacgggaggattattaa

SEQ ID NO: 423329 - DNA, 75 bp, synthetic construct
  source 1..75: mol_type = other DNA
tgcgacccaaacggaaatcaccgccgtgggcgatttacaactggtgaagaccgtcgcctggtacgataacgagta

SEQ ID NO: 423330 - DNA, 75 bp, synthetic construct
  source 1..75: mol_type = other DNA
aagatgcatcttttcactataaaaaaagggcttactgtcacatctcaacaacaggtttttgatttcatgattggc

SEQ ID NO: 423331 - DNA, 75 bp, synthetic construct
  source 1..75: mol_type = other DNA
gaacagataaaggatttactctggcggaggaaatgctcagttggctacataacaataatgttattttcccgtcgg

SEQ ID NO: 423332 - DNA, 75 bp, synthetic construct
  source 1..75: mol_type = other DNA
attgaaggggcttcactgcgtgatgggtgggaaaattgacaatatttatgatgctctacatgaaatagaacgcgt

SEQ ID NO: 423333 - DNA, 75 bp, synthetic construct
  source 1..75: mol_type = other DNA
gtgactgccgaagaggtgaacaacgcgcttaaaaaggcgacaaacaataacgagtcatttggttatactgatgaa

SEQ ID NO: 423334 - DNA, 75 bp, synthetic construct
  source 1..75: mol_type = other DNA
aatagaagtcggcacgatgacgaccattcatgcctataccggcactcagtcactggtggatggtccgcgaggtaa

SEQ ID NO: 423335 - DNA, 75 bp, synthetic construct
  source 1..75: mol_type = other DNA
atatgccgattgtcagagtcggtgcgcgtttgctgtataactatctggttaaaggcggcgttcaggtgtttgagt

SEQ ID NO: 423336 - DNA, 75 bp, synthetic construct
  source 1..75: mol_type = other DNA
ggctatattttgctagcgggggttatctttaccgcaggcgtggtggagttgccggatcactggtatgtcgatcaa

SEQ ID NO: 423337 - DNA, 75 bp, synthetic construct
  source 1..75: mol_type = other DNA
atgaaatgtagctggcgcgaaggcaataagatccagttgctggaaaacggcgagcaatattatcccgcggtgttt

SEQ ID NO: 423338 - DNA, 75 bp, synthetic construct
  source 1..75: mol_type = other DNA
aggtgaagatccctgggccgcgatagaagatgttattcccaggcaggagttcgtcaacagcctggaagaaacaca

SEQ ID NO: 423339 - DNA, 75 bp, synthetic construct
  source 1..75: mol_type = other DNA
gcggtggataatctggggatcacccagactgtcagcggcctgatggggtcactttctgcaatgaaaggttctgtg

SEQ ID NO: 423340 - DNA, 75 bp, synthetic construct
  source 1..75: mol_type = other DNA
tgtcactctccacgcgggaatcaccgtggtttcgcgatcgcgttattccgctggcgatcaataacgtcagcgcct

SEQ ID NO: 423341 - DNA, 75 bp, synthetic construct
  source 1..75: mol_type = other DNA
atatccttatcgtacggaaaatattttatttctacctgatagtacgcggatttatagggggcagcaggtagacaa

SEQ ID NO: 423342 - DNA, 75 bp, synthetic construct
  source 1..75: mol_type = other DNA
gaacatatcgatgctggtatcactctggccgatgcagtcaattttctggtggaaaagtacgaactggtacgtatc

SEQ ID NO: 423343 - DNA, 75 bp, synthetic construct
  source 1..75: mol_type = other DNA
tgcgggcgacgacgtcatatctgtcgcctgtcgtggtctggcaaacattactggcccgcctgctggagcagcact

SEQ ID NO: 423344 - DNA, 75 bp, synthetic construct
  source 1..75: mol_type = other DNA
tgagatggggtataaagaaagtgaatataatttagacaatttgtacgacgctttcctgaagctggcggacaaaaa

SEQ ID NO: 423345 - DNA, 75 bp, synthetic construct
  source 1..75: mol_type = other DNA
tgcgtggaaaaagatatcgacgtggcagctgaatctctgaaagtcgccgaagccttccgtattcatacctttatt

SEQ ID NO: 423346 - DNA, 75 bp, synthetic construct
  source 1..75: mol_type = other DNA
atagtgaagggagcgggaactatagaaagtttttaaagagtgagaagaagaatatcttattaatttttatggagt

SEQ ID NO: 423347 - DNA, 75 bp, synthetic construct
  source 1..75: mol_type = other DNA
gggcgcatcgccgttcggttataagattgccgaacaatttggcctcaatgtgttgccaacccgcgctggcctggt

SEQ ID NO: 423348 - DNA, 75 bp, synthetic construct
  source 1..75: mol_type = other DNA
ctcacccgactgctggaccagcattacggcctcacgctgaatgacacaccgttcgccgatgaacgtgtgattgag

SEQ ID NO: 423349 - DNA, 75 bp, synthetic construct
  source 1..75: mol_type = other DNA
ccaacatactttgctccgcactattgcaaagatctccgctcgtattttgcagacgggggattagttgcgaacaat

SEQ ID NO: 423350 - DNA, 75 bp, synthetic construct
  source 1..75: mol_type = other DNA
accgggctgatgacccgcagcggttacaaagctgttaccgatatcaccggcggcaaatacagcggggaggtccag

SEQ ID NO: 423351 - DNA, 75 bp, synthetic construct
  source 1..75: mol_type = other DNA
gaatttgtcagtatcaatctgctaccggatgtggacctcgaaaccttcctgaatgagcagcgtaatgcacatccg

SEQ ID NO: 423352 - DNA, 75 bp, synthetic construct
  source 1..75: mol_type = other DNA
gcgtggcggtgccttcggtgatcaccgctgaaaacggcaccgtatttcgcgagaacttactcttcactcatcgtg

SEQ ID NO: 423353 - DNA, 75 bp, synthetic construct
  source 1..75: mol_type = other DNA
cgtaaggatattctcaacgtccacaccgccattaatcaccaggagatatggcgcaccagccagttagttagccag

SEQ ID NO: 423354 - DNA, 75 bp, synthetic construct
  source 1..75: mol_type = other DNA
atgtttgattcgactttaaatccgttatggcagcgttacatcctcgccgttcaggaggaagtaaaaccggcgctg

SEQ ID NO: 423355 - DNA, 75 bp, synthetic construct
  source 1..75: mol_type = other DNA
aattttgggtgagtttgatgatgctgcgttgatgaaagcctttggggcgacgcataacgctattttcgttgcacc

SEQ ID NO: 423356 - DNA, 75 bp, synthetic construct
  source 1..75: mol_type = other DNA
atccgcgtcgtcttggcgtcgccagtcattttggcttattagtcgatgtgccaaccattggcgtggcgaaaaaac

SEQ ID NO: 423357 - DNA, 75 bp, synthetic construct
  source 1..75: mol_type = other DNA
gcgttatgaaaccatctcgatggcgatcagcagtatgatcggcgatgtcagcggcatgatttgcgatggtgcgtc

SEQ ID NO: 423358 - DNA, 75 bp, synthetic construct
  source 1..75: mol_type = other DNA
gtgtgtggccgagggcgagcaagagtcaccgctggcggtgctgtctaatacgacgctggcagagatcctgaagtt

SEQ ID NO: 423359 - DNA, 75 bp, synthetic construct
  source 1..75: mol_type = other DNA
cgttaggtggaaatgccaacgccgggctggaagtgctgaaagacgcaactgcgcaggcaattgccgatgccaaag

SEQ ID NO: 423360 - DNA, 75 bp, synthetic construct
  source 1..75: mol_type = other DNA
agtcaaagcagaagccgccaacggtaatggcccggtcgatgccgtctaccaggcgattaaccgtatcactgacta

SEQ ID NO: 423361 - DNA, 75 bp, synthetic construct
  source 1..75: mol_type = other DNA
gaggcgctggccttcatcggtaagcagcaagaagagccggagcatttccgtctggattacttcagcgtgcagtct

SEQ ID NO: 423362 - DNA, 75 bp, synthetic construct
  source 1..75: mol_type = other DNA
tgcgtggaaaaggatatcgacgtggcagctgaatctctgaaagttgccgaagccttccgtatccatacctttatt

SEQ ID NO: 423363 - DNA, 75 bp, synthetic construct
  source 1..75: mol_type = other DNA
tttgattcctgggcgacgttcaatgttagggcgcaaattacttaactggtttaactcccagggattaaacgtaga

SEQ ID NO: 423364 - DNA, 75 bp, synthetic construct
  source 1..75: mol_type = other DNA
atctattggtctgaaccaaatccagctgaatctgacctctcgttcggggcgtgcggcggtgaaacaccgcatgga

SEQ ID NO: 423365 - DNA, 75 bp, synthetic construct
  source 1..75: mol_type = other DNA
ccgtctatcaggcaattaaccgcatcactgactataacgtcgaactggtgaaatacagcctgaccgccaaaggtc

SEQ ID NO: 423366 - DNA, 75 bp, synthetic construct
  source 1..75: mol_type = other DNA
cggtgccagtttcgtcacgcctgtcgcccatacaggtctggcagcaactgttaacgtatctgctggagcagcatt

SEQ ID NO: 423367 - DNA, 75 bp, synthetic construct
  source 1..75: mol_type = other DNA
atattctcactcgggtaggcggcagagagaatattgtgagtctggttcactgcgctacacggctgcgttttaagc

SEQ ID NO: 423368 - DNA, 75 bp, synthetic construct
  source 1..75: mol_type = other DNA
tggaatctctgaatgttggtgatatcaggctcgaaaagcgaataaagcacgttctcagtgtgcttagccgttcac

SEQ ID NO: 423369 - DNA, 75 bp, synthetic construct
  source 1..75: mol_type = other DNA
tttcgcccgcgataacctcgactggcaaagccgtgaactggcaacagttggcgcattagcagccacgccaggcat

SEQ ID NO: 423370 - DNA, 75 bp, synthetic construct
  source 1..75: mol_type = other DNA
cgcatctggtgcgttataccgagcgcgtacgtgtgcagggccaggaattgccggaatcggcccacaccgcctctt

SEQ ID NO: 423371 - DNA, 75 bp, synthetic construct
  source 1..75: mol_type = other DNA
atacgatgcctgttgctgttcagccaggagcttttctgccatccgcgagccagtgtgacagatgatgaagtatgt

SEQ ID NO: 423372 - DNA, 75 bp, synthetic construct
  source 1..75: mol_type = other DNA
cgctcacgtttctgattatcggccccgtagccacctggctgagccagctgctggccaatggttatcagcttatct

SEQ ID NO: 423373 - DNA, 75 bp, synthetic construct
  source 1..75: mol_type = other DNA
gtcggtattcgtggtttatttaatgttcgctatcgtaataaacctgttccatttggtgcgacagccagtgtaccc

SEQ ID NO: 423374 - DNA, 75 bp, synthetic construct
  source 1..75: mol_type = other DNA
ttttgccaaccagaataatggcgaaaatggctcggtagggataaattaccgtggtacatatggttcactaaattc

SEQ ID NO: 423375 - DNA, 75 bp, synthetic construct
  source 1..75: mol_type = other DNA
gaaccctacgtcttccgctggggatttggaagttacgatcaaagagtctgataattccgaaactatctataccat

SEQ ID NO: 423376 - DNA, 75 bp, synthetic construct
  source 1..75: mol_type = other DNA
atgaatcatgaatacacggtttcagatacgctttcagctcgccagcaggccatcccgttgattgccgcctcaatg

SEQ ID NO: 423377 - DNA, 75 bp, synthetic construct
  source 1..75: mol_type = other DNA
agcagttagaagaagtattcaatcaaaacaaagttgttcggatcgctattcaacggatggataaaaagaaatgga

SEQ ID NO: 423378 - DNA, 75 bp, synthetic construct
  source 1..75: mol_type = other DNA
ttgccctggttttggtactggaaggtttagggccgatgctttacccgaaggcatggaagaagatgatcatctgcg

SEQ ID NO: 423379 - DNA, 75 bp, synthetic construct
  source 1..75: mol_type = other DNA
tttgatgtcgcgcataatccacatgcggcggaatatctcaccgggcgtatgaaagcgttaccgaaaaacgggcgc

SEQ ID NO: 423380 - DNA, 75 bp, synthetic construct
  source 1..75: mol_type = other DNA
atggcaactaaaaaatacgaattaacaaaggaatacttttttcatggtgaattttggcatctcattgatgagaac

SEQ ID NO: 423381 - DNA, 75 bp, synthetic construct
  source 1..75: mol_type = other DNA
atggcggcaaaaaaatacgaactaaccaaagaatacttttttcatggtgaattttggcaccaacttgatgataat

SEQ ID NO: 423382 - DNA, 75 bp, synthetic construct
  source 1..75: mol_type = other DNA
aagtttgaaagaagctgtaacagatagtacaaaagcaatactcacggtaaatttattaggtaatcctaataactt

SEQ ID NO: 423383 - DNA, 75 bp, synthetic construct
  source 1..75: mol_type = other DNA
gggtgatatcaccctgggcccgtgccggatacctgcggcgaaactgcaggatactgagaaactacaggagattac

SEQ ID NO: 423384 - DNA, 75 bp, synthetic construct
  source 1..75: mol_type = other DNA
agaaataaacataaagttcaagggaaatggttcgaagacaccatgtctcttaacaacggggtttgaacaaagaac

SEQ ID NO: 423385 - DNA, 75 bp, synthetic construct
  source 1..75: mol_type = other DNA
gaaagccccagaacatgtgaaatattatatggagtcttaaatactggagaaagatgtactctaattgggaaattt

SEQ ID NO: 423386 - DNA, 75 bp, synthetic construct
  source 1..75: mol_type = other DNA
atattgcaccagatgatgttgataaacacatgcgtcagatcggtaaagtcatggaactcggtctgggttatggtg

SEQ ID NO: 423387 - DNA, 75 bp, synthetic construct
  source 1..75: mol_type = other DNA
aatcgccacaccgcaaaaaacattgtattgcggttatcttaaaatccgacgtgatggcgcgtggctgcgcataca

SEQ ID NO: 423388 - DNA, 75 bp, synthetic construct
  source 1..75: mol_type = other DNA
aaaattagcataaactttcaatatgatgatttaactgtgatcccggccccagcaccgggatcaccacaatgcccg

SEQ ID NO: 423389 - DNA, 75 bp, synthetic construct
  source 1..75: mol_type = other DNA
ctgagtatttagataaaaatggtctttttgttggaaatcatcagatagaactatttgatgagattgattatctca

SEQ ID NO: 423390 - DNA, 75 bp, synthetic construct
  source 1..75: mol_type = other DNA
gcgttgccggtagtcaatgtgatacagcataacctgagcagttatgagcaactactgcgtggcaagggaggttcg

SEQ ID NO: 423391 - DNA, 75 bp, synthetic construct
  source 1..75: mol_type = other DNA
cgtatctatgggtctgggtccgattggtgctatttaccaggctaagttcctgaaatatctggaacaccgtggcct

SEQ ID NO: 423392 - DNA, 75 bp, synthetic construct
  source 1..75: mol_type = other DNA
gcacgccacaaccgtttacgactctttccggcatacgctgcagtaccgcacatatcacggaaaaggacaacgcct

SEQ ID NO: 423393 - DNA, 75 bp, synthetic construct
  source 1..75: mol_type = other DNA
gctaacaagcaaacagcacaaacgcatccatgcatatcagtgcgacgacccgatgcgcggtatttggttggacag

SEQ ID NO: 423394 - DNA, 75 bp, synthetic construct
  source 1..75: mol_type = other DNA
tctgccaggtttacccactttcgactggtaatccggaaattcacaacatgaaatcattaaccacggaaacagcgc

SEQ ID NO: 423395 - DNA, 75 bp, synthetic construct
  source 1..75: mol_type = other DNA
gcgttgctggggaaaaaatcctggctactgagcgccgtaggaagtgatttttatggtcaatcgctcctgacacaa

SEQ ID NO: 423396 - DNA, 75 bp, synthetic construct
  source 1..75: mol_type = other DNA
gttaccggagcgggcgatgccatgatggcgggacttgcttcgtgttgggtagacgggatgccgtttgccgaatct

SEQ ID NO: 423397 - DNA, 75 bp, synthetic construct
  source 1..75: mol_type = other DNA
aggataaaacagattcggcagcactgttgccctgtatcgaacaggccagggagggtatccgtaccctgcgccaac

SEQ ID NO: 423398 - DNA, 75 bp, synthetic construct
  source 1..75: mol_type = other DNA
gtattgatttccgcgatcttgtttttgtgacaggcaacgagccggtgacggatacccgaaaggttgccgtagcat

SEQ ID NO: 423399 - DNA, 75 bp, synthetic construct
  source 1..75: mol_type = other DNA
gcctgtattgcgcacctgccattaatttatttatccaccatgcagaagccatcacgctggacaaccggcgggcag

SEQ ID NO: 423400 - DNA, 75 bp, synthetic construct
  source 1..75: mol_type = other DNA
ctggcgctttactggcgcgcgcagccgcacagtgccttacgcagccaggtgcgcggggcgattattcctggtttg

SEQ ID NO: 423401 - DNA, 75 bp, synthetic construct
  source 1..75: mol_type = other DNA
atgtcaaaatatatttatatttatattttattatcatttttagttttattctttatatttttctatgcttatatc

SEQ ID NO: 423402 - DNA, 75 bp, synthetic construct
  source 1..75: mol_type = other DNA
gcctgtttctgaaaaagttaaagagatatacagtaaactcgtacctaatgcttcttacaaggttcttcatattgg

SEQ ID NO: 423403 - DNA, 75 bp, synthetic construct
  source 1..75: mol_type = other DNA
ttcgctggcggcagcagtagcgcgtttcgccactggcaagctgagcaactggctgattgcgcgctttctctggtg

SEQ ID NO: 423404 - DNA, 75 bp, synthetic construct
  source 1..75: mol_type = other DNA
ggactggttttacgaagtgcgtcatctttcgacgtcattaggactagtggaggcaggactggggatttcggcgct

SEQ ID NO: 423405 - DNA, 75 bp, synthetic construct
  source 1..75: mol_type = other DNA
accgggcgaggcgtgttgacacgttataagctgggcagaattgatgggattaatattttgcatggtgaccttaaa

SEQ ID NO: 423406 - DNA, 75 bp, synthetic construct
  source 1..75: mol_type = other DNA
tataccgggcgaggcgtgttggcacgttataagctgaacagaattgatgggattaatattttgcatggtgacctt

SEQ ID NO: 423407 - DNA, 75 bp, synthetic construct
  source 1..75: mol_type = other DNA
tataccggacgaggtgtgttggcacgctataagcttggcagagttgatggaattaatattttgcacggtgacctt

SEQ ID NO: 423408 - DNA, 75 bp, synthetic construct
  source 1..75: mol_type = other DNA
atatttgggcgcacaagtacgtaccagtaatcatcgtctggatgaacagcctgtgtctgttcgaactccagaggg

SEQ ID NO: 423409 - DNA, 75 bp, synthetic construct
  source 1..75: mol_type = other DNA
atgcaaagcaaaactgggagcttcgtgacggtatcgtatattcaaagcgcaccggcaagcccgtttcatttgccg

SEQ ID NO: 423410 - DNA, 75 bp, synthetic construct
  source 1..75: mol_type = other DNA
atgtccccactgccgcctcccctggcatgaggtggagagctcccggacggatgaagaacgacgcctggtggaaaa

SEQ ID NO: 423411 - DNA, 75 bp, synthetic construct
  source 1..75: mol_type = other DNA
tcaaagcagcggcgcaggctgcgcttgatggaaatgcggcgggtgcggaaagagcgcttaaccgcgccggaacgc

SEQ ID NO: 423412 - DNA, 75 bp, synthetic construct
  source 1..75: mol_type = other DNA
tggcgaaaccattaattgacaccgggcaatatcgcagagctattacccatgttgtgagggataaagatgccgact

SEQ ID NO: 423413 - DNA, 75 bp, synthetic construct
  source 1..75: mol_type = other DNA
aaaaaagatgtgctggtcggcatcccttcggaagacagcgagcgggatgatgttccgtttggtaatgcgggcatc

SEQ ID NO: 423414 - DNA, 75 bp, synthetic construct
  source 1..75: mol_type = other DNA
atgagtttcaaaagcggtgtgacaacgagggtggataacgctcaggccattctggatgcgctcaaatccatcggt

SEQ ID NO: 423415 - DNA, 75 bp, synthetic construct
  source 1..75: mol_type = other DNA
tgatggtaatgctgcgggagcagaacgcgcactcaaccgtgccggaacactggccgctaatggcgtcaggcgtta

SEQ ID NO: 423416 - DNA, 75 bp, synthetic construct
  source 1..75: mol_type = other DNA
tggcgaaaccattaattgacactgggcaatatcgcagagcgattacccatgttgtgagggataaaaatgccgact

SEQ ID NO: 423417 - DNA, 75 bp, synthetic construct
  source 1..75: mol_type = other DNA
gccgtttgttaccgcctgtttaggcggtgcggcgggcggtttgtttatcggcctgatagcctggtggggtctgcc

SEQ ID NO: 423418 - DNA, 75 bp, synthetic construct
  source 1..75: mol_type = other DNA
cctgaacaaagcgcaaatcagccgcctgatgaagttactgcgcgaaaacttccagtttaatgttgatgcggagat

SEQ ID NO: 423419 - DNA, 75 bp, synthetic construct
  source 1..75: mol_type = other DNA
agataccgacctgctggggatgggcgtttcagccatcagcatgattggcgactgctacgcgcaaaaccagaaaga

SEQ ID NO: 423420 - DNA, 75 bp, synthetic construct
  source 1..75: mol_type = other DNA
gctcagcgcaaaatcaaagatgctgacctgccgagtccgcagcaaaaactcgatatcctgcaggaaaccatcgcc

SEQ ID NO: 423421 - DNA, 75 bp, synthetic construct
  source 1..75: mol_type = other DNA
cacggcctgactctttttgcccctggaaggaaccgcgttgctgcgcggcggcaatgattcgccgggctatcatcg

SEQ ID NO: 423422 - DNA, 75 bp, synthetic construct
  source 1..75: mol_type = other DNA
catagaaaattctcgccagaagggttttccgctgtacaggccgcacgcggtcgcaagggggggatcgctaaaggc

SEQ ID NO: 423423 - DNA, 75 bp, synthetic construct
  source 1..75: mol_type = other DNA
gccatcagcatgattggcgactgctacgcgcagaaccagaaagagttgaagcagtactatcagcaagtggatgaa

SEQ ID NO: 423424 - DNA, 75 bp, synthetic construct
  source 1..75: mol_type = other DNA
aaaccacgccgattacatcgagcgcaaaggggagtatgcgaaacggaaagacctggagtacacggagcacgggaa

SEQ ID NO: 423425 - DNA, 75 bp, synthetic construct
  source 1..75: mol_type = other DNA
tgctggggcagatgccgttacacatctccttacgtgaggatctcgataaaggcacgccaacggttatcagccgtc

SEQ ID NO: 423426 - DNA, 75 bp, synthetic construct
  source 1..75: mol_type = other DNA
cgtatcaccggggcgaaagctatcgactggaaactgtcgcacaatatcgccaccttaaaacgcgtgaagaatcag

SEQ ID NO: 423427 - DNA, 75 bp, synthetic construct
  source 1..75: mol_type = other DNA
acctgatttacggcctgccgaaacagacgccggagagtttcgcctttaccctgaaacgtgtggcggagctgaacc

SEQ ID NO: 423428 - DNA, 75 bp, synthetic construct
  source 1..75: mol_type = other DNA
actggggcggcggaacgccgacgtatctgaataaagcgcaaatcagccgcctgatgaagctgctgcgcgaaaact

SEQ ID NO: 423429 - DNA, 75 bp, synthetic construct
  source 1..75: mol_type = other DNA
ccggcgctataacgccaggtatcccgaccggggtggtgcgaaaaaggattccggaagcttgactctcactcagca

SEQ ID NO: 423430 - DNA, 75 bp, synthetic construct
  source 1..75: mol_type = other DNA
ggcagtggtacgggtacaggcagcggtacgggtacaggcagcggtacgggtacaggcagcggtacgggtacaggc

SEQ ID NO: 423431 - DNA, 75 bp, synthetic construct
  source 1..75: mol_type = other DNA
cagttaaaagccaaacaaacctccggcgtgcaacaatttctcgccaaattcgccaccatcttcacgccgctgatc

SEQ ID NO: 423432 - DNA, 75 bp, synthetic construct
  source 1..75: mol_type = other DNA
aattgcttgcaaagctggaacgtctggagaagcaaggacagtttttattaccgggattcgataaaggcattcaag

SEQ ID NO: 423433 - DNA, 75 bp, synthetic construct
  source 1..75: mol_type = other DNA
ataaagaggcgcgctgggcgctggggctgacccttttgtatctggcagtatggttagtagccgcttacttacctg

SEQ ID NO: 423434 - DNA, 75 bp, synthetic construct
  source 1..75: mol_type = other DNA
gggattctggtggcatgggttagtgggtttattttcaccacgctctttggctgccgtaacgtcaatctggactga

SEQ ID NO: 423435 - DNA, 75 bp, synthetic construct
  source 1..75: mol_type = other DNA
ggcgcggcgggcggtttgtttatcgggctgatagcctggtggggtctgccgatgggcttaaacagcgcctttggg

SEQ ID NO: 423436 - DNA, 75 bp, synthetic construct
  source 1..75: mol_type = other DNA
ccggacgatctcgacatgctgctgacctcattaatcaccctgctaatcaccgccacactggcgtatctggtgatt

SEQ ID NO: 423437 - DNA, 75 bp, synthetic construct
  source 1..75: mol_type = other DNA
ttgtgtgctgcttgataccgatgaagtcagggccactttcagggtgattatgacgctgattggctccatgctttc

SEQ ID NO: 423438 - DNA, 75 bp, synthetic construct
  source 1..75: mol_type = other DNA
tcattcatttctccattgtggaatatgtggccttctgcgcgtgatttttcactgacaattccacgggggcagtgt

SEQ ID NO: 423439 - DNA, 75 bp, synthetic construct
  source 1..75: mol_type = other DNA
cgggtacaggcagtggtacgggtacaggcagtggtacgggtacaggcagtggtacgggtacaggcagcggtacgg

SEQ ID NO: 423440 - DNA, 75 bp, synthetic construct
  source 1..75: mol_type = other DNA
gtcggtatcgtcacagtgagttcagcaggtgttgcaggtgttggtggcggtgcaacattcgccgcgttaattgtt

SEQ ID NO: 423441 - DNA, 75 bp, synthetic construct
  source 1..75: mol_type = other DNA
gaaggatgatgcgccgaaaggtgaacgcgtcttaaccgctatcgataccctgcaaagctgggtgatgaaactggt

SEQ ID NO: 423442 - DNA, 75 bp, synthetic construct
  source 1..75: mol_type = other DNA
gtgactaacctgtttggtctgactgctgaaggtctggttcagggtggcgctgagactgcccgtctgaacgctatc

SEQ ID NO: 423443 - DNA, 75 bp, synthetic construct
  source 1..75: mol_type = other DNA
ttatcaacgctatcatgacgttgatcgccttcttgccggtgttggtgacgctctccgcgcatgtgccggaattgc

SEQ ID NO: 423444 - DNA, 75 bp, synthetic construct
  source 1..75: mol_type = other DNA
aaaaactatttccgcctctattttcactatatgtatttcaacatcgcccgcattctctatttgcaggtcgataac

SEQ ID NO: 423445 - DNA, 75 bp, synthetic construct
  source 1..75: mol_type = other DNA
gtggcgcgtatcactggcgtttctgggcagatcccgattagtgccgcgcgtttctggtcgttagatttcctgatt

SEQ ID NO: 423446 - DNA, 75 bp, synthetic construct
  source 1..75: mol_type = other DNA
ttcctccaaagacaaaacccgtcttgcatttgcaggcctgaaattcggtgactacggctctatcgattatggtcg

SEQ ID NO: 423447 - DNA, 75 bp, synthetic construct
  source 1..75: mol_type = other DNA
ttgagtcagcaggtacagcacttgagcgagcggacagaacacttgagccagttatacagcgagaactggagataa

SEQ ID NO: 423448 - DNA, 75 bp, synthetic construct
  source 1..75: mol_type = other DNA
gcgaactggcaacaactgcgtcatatcgaaggggccgcgcagcgtgtgcaggaagacactatgcgttttgcttca

SEQ ID NO: 423449 - DNA, 75 bp, synthetic construct
  source 1..75: mol_type = other DNA
ttgagtcagcaggtgcagcacttgagcgagcggacagaacgcttgagccagttatacagcgagaactggagataa

SEQ ID NO: 423450 - DNA, 75 bp, synthetic construct
  source 1..75: mol_type = other DNA
ggcgaagaaacaccatcctcgctggtatcgtgaggttgaatctactgaaaaagaaacaacggaattacagtctaa

SEQ ID NO: 423451 - DNA, 75 bp, synthetic construct
  source 1..75: mol_type = other DNA
atgcggcgtttcgcgtggccgatgaccagagcaaccgctttacgctgccgcaggcggtgaggctggtgaccaaaa

SEQ ID NO: 423452 - DNA, 75 bp, synthetic construct
  source 1..75: mol_type = other DNA
atgacggagctggaaagacatttgctgaacgcattagagcaactgcaacaggactatatgcagcggctgaacgaa

SEQ ID NO: 423453 - DNA, 75 bp, synthetic construct
  source 1..75: mol_type = other DNA
tggggtgacggtttctggaacttgctggcgtttggtatgcagatggcgcttatcatcgttaccggtcatgccctt

SEQ ID NO: 423454 - DNA, 75 bp, synthetic construct
  source 1..75: mol_type = other DNA
cgtctgacgtggtgagtatcgatccgaaactactcatggaagaggctgattttcaaaagcagctaccgaaagatg

SEQ ID NO: 423455 - DNA, 75 bp, synthetic construct
  source 1..75: mol_type = other DNA
tcaacctgattgacaagagtgagtttacccaaaaagccggcattgcaactgatgacatcgttgcggttggtatga

SEQ ID NO: 423456 - DNA, 75 bp, synthetic construct
  source 1..75: mol_type = other DNA
tttacgctttggttgggctaataaacatatcattaaaaatttgcatcgtgatgaagtcctggcacagctggaaaa

SEQ ID NO: 423457 - DNA, 75 bp, synthetic construct
  source 1..75: mol_type = other DNA
tggtgcgggcgtgccggacgttggcgagttgttaaattacgatgctgacaatgtgcagcaccgctataaaccaca

SEQ ID NO: 423458 - DNA, 75 bp, synthetic construct
  source 1..75: mol_type = other DNA
tccccacagcggcgcgttttgaatgggtgcatcgtcatttgccggggctgatcacccttaatgcttaccgaacgc

SEQ ID NO: 423459 - DNA, 75 bp, synthetic construct
  source 1..75: mol_type = other DNA
gcagaggtgacacgacaggctgatgtgacgcgcatactgccgctgattaacgagctggaggcgctgccaggacag

SEQ ID NO: 423460 - DNA, 75 bp, synthetic construct
  source 1..75: mol_type = other DNA
atccgatcgtactgacgcgcaagaaagggctgctgtcaacccgctcaatgcttcgggtaaaaatgctgaattgtg

SEQ ID NO: 423461 - DNA, 75 bp, synthetic construct
  source 1..75: mol_type = other DNA
aggttattatcggcgcgaatacacgtatttgccacggcgcagttattcagggaccagtagtgattggcgcaaact

SEQ ID NO: 423462 - DNA, 75 bp, synthetic construct
  source 1..75: mol_type = other DNA
ggcgttctggccggtgagggtgaggtaatacccgatacggtttatgatatgcggtatttgctcgatattgtcagc

SEQ ID NO: 423463 - DNA, 75 bp, synthetic construct
  source 1..75: mol_type = other DNA
atggtgcaggcagacaaacgcaagctggataagctgaagttcgaccaggtgattaatctggcgcgcagactgccg

SEQ ID NO: 423464 - DNA, 75 bp, synthetic construct
  source 1..75: mol_type = other DNA
tttcattgggaaattagttcaaattcctgtctatgtccgtgcgtggtcaatggagggtagggaaggtgtaactta

SEQ ID NO: 423465 - DNA, 75 bp, synthetic construct
  source 1..75: mol_type = other DNA
tttacgttttggctgggccaataaacatatcattaagaatttgcatcgtgatgaagtgctggcacagttagaaaa

SEQ ID NO: 423466 - DNA, 75 bp, synthetic construct
  source 1..75: mol_type = other DNA
atggcgcgttacgatctcgtagaccgactcaacactacctttcgccagatggaacaagagctggctgcatttgcc

SEQ ID NO: 423467 - DNA, 75 bp, synthetic construct
  source 1..75: mol_type = other DNA
ttatcagggctgggaaatgaccgacattcagacagaccgtgtgacattacgttatcaggggcgcacggtaacgtt

SEQ ID NO: 423468 - DNA, 75 bp, synthetic construct
  source 1..75: mol_type = other DNA
tggtgtcgctgatggaccactcgccgggccagcgccagttcgctaaccgcgagaagtatcgcgaatattatcagg

SEQ ID NO: 423469 - DNA, 75 bp, synthetic construct
  source 1..75: mol_type = other DNA
atcgtccgtaatctgatgtacggaatgcgtgactgcctcgcgtttggcgagccgatgaaaataggttatttacca

SEQ ID NO: 423470 - DNA, 75 bp, synthetic construct
  source 1..75: mol_type = other DNA
atgaaagcggtatctcgcgttcacatcaccccgcatatgcattgggatcgggagtggtatttcaccaccgaagag

SEQ ID NO: 423471 - DNA, 75 bp, synthetic construct
  source 1..75: mol_type = other DNA
tgcgcgaaattacgctactgccgctcaatattaaacatatatcggtgaaggcctttttacgaaatggcgcaccga

SEQ ID NO: 423472 - DNA, 75 bp, synthetic construct
  source 1..75: mol_type = other DNA
tcagagcgtgtaaaaacggatattaataaaaacaattttaatgatgttctggcagatatctccccgtctgtgcgt

SEQ ID NO: 423473 - DNA, 75 bp, synthetic construct
  source 1..75: mol_type = other DNA
taacggaaaagagcaacgtccgctgtccgaacgggacaaggttgatatcaataaaaacaacttcaacagcgtcat

SEQ ID NO: 423474 - DNA, 75 bp, synthetic construct
  source 1..75: mol_type = other DNA
ttcacgccagagcaggtcgcccgacagattccccgtcttaaagccatgctggccatgcgcagccttctgcgggat

SEQ ID NO: 423475 - DNA, 75 bp, synthetic construct
  source 1..75: mol_type = other DNA
tcatttctgagtgtcatcgtatagaagaggacgctctgtactcttctaaatctcattataatgtttctgatagat

SEQ ID NO: 423476 - DNA, 75 bp, synthetic construct
  source 1..75: mol_type = other DNA
cggagggccgtattcccggcgcaatacagacggcagtcagggattccgtcgatggctgggttgacgcgattaaat

SEQ ID NO: 423477 - DNA, 75 bp, synthetic construct
  source 1..75: mol_type = other DNA
cccgccggaagggcgtattcccggtgccattcagaccgccgtcatggataccgcgcagggctgggtggactccat

SEQ ID NO: 423478 - DNA, 75 bp, synthetic construct
  source 1..75: mol_type = other DNA
gttgcgttttggcgcgacgtggcgtgtctctccgagcgatcgtttattaaacgatctccgtggcctcattggttc

SEQ ID NO: 423479 - DNA, 75 bp, synthetic construct
  source 1..75: mol_type = other DNA
gctgggcgatgcgttaaaagcggcagatcaacacgcgaaagcggaagctatcggtcaggccgatatgttcggcgt

SEQ ID NO: 423480 - DNA, 75 bp, synthetic construct
  source 1..75: mol_type = other DNA
ttgcgttttggcgcgacgtggcgtgtctctccgagcgatcgtttattaaacgatctccgtggcctcattggttcg

SEQ ID NO: 423481 - DNA, 75 bp, synthetic construct
  source 1..75: mol_type = other DNA
ctgaaagccaatctgctggataacgtgactttccgtaaagagctggaaaaaattctgcgtgacccggtactgagc

SEQ ID NO: 423482 - DNA, 75 bp, synthetic construct
  source 1..75: mol_type = other DNA
cgcgccgaatatcgtgcgcggcggttcgcactccggcaacgtggcggccagtgaactggcgcagcttggcctgct

SEQ ID NO: 423483 - DNA, 75 bp, synthetic construct
  source 1..75: mol_type = other DNA
cgcgcgacaaattgccctcgccagccacgatgacgccacgcacgcccacgttgccgaatcccaccagcttggcag

SEQ ID NO: 423484 - DNA, 75 bp, synthetic construct
  source 1..75: mol_type = other DNA
gggccagcgccagttcgccaaccgcgagaagtatcgcgaatattatcagggcaaatattccctcaccgatgcgca

SEQ ID NO: 423485 - DNA, 75 bp, synthetic construct
  source 1..75: mol_type = other DNA
atgattatcaataacgttaagctggtgctggaaaacgaagtggtgcacggttcgctggagatgcaggacggtgaa

SEQ ID NO: 423486 - DNA, 75 bp, synthetic construct
  source 1..75: mol_type = other DNA
aaacgcgccgacctggtgctggcgcatcgcaagggcaatcacattcatatcgaccacgtctggcgtcagggtaaa

SEQ ID NO: 423487 - DNA, 75 bp, synthetic construct
  source 1..75: mol_type = other DNA
tcgcactccggcaacgtggcggccagtgaactggcgcagcttggcctgctggatatcctctcttccgactactac

SEQ ID NO: 423488 - DNA, 75 bp, synthetic construct
  source 1..75: mol_type = other DNA
ttttcctttatgtctatattgagatttcaatttttattcaggttgcccatgtcctgggggtattgctgaccctcg

SEQ ID NO: 423489 - DNA, 75 bp, synthetic construct
  source 1..75: mol_type = other DNA
tccgaacgggacaagattgatatcaataaaaacaacttcaacagcgtcatggctgagttttcgcctgcggttaat

SEQ ID NO: 423490 - DNA, 75 bp, synthetic construct
  source 1..75: mol_type = other DNA
ttcccgccgctcgtgtaaatatcaagcttgacctgcatacaggcaatgctaaaaagaaagttgaactccccctca

SEQ ID NO: 423491 - DNA, 75 bp, synthetic construct
  source 1..75: mol_type = other DNA
ttcactggaagtacaggatggcgaaattcgcgcctttgccgaaagccagagccgccagccggaagcgatggacgg

SEQ ID NO: 423492 - DNA, 75 bp, synthetic construct
  source 1..75: mol_type = other DNA
agtgcctggttgcatggtaactttcgttacgtggcgcattctgattgggttagtctggatcaaatctcgccatgg

SEQ ID NO: 423493 - DNA, 75 bp, synthetic construct
  source 1..75: mol_type = other DNA
tcggtttcgtccgccgttttcttttgcggttagtggttgcccttgccgtgttctggggtgggggcatcgcgttgt

SEQ ID NO: 423494 - DNA, 75 bp, synthetic construct
  source 1..75: mol_type = other DNA
tgaagatctggataacggaacaccaaccgttattagtcgtccagatagcgaatttacggctatttatcgtgacct

SEQ ID NO: 423495 - DNA, 75 bp, synthetic construct
  source 1..75: mol_type = other DNA
agtgtgcatatttgcagtaactgcggtcatcacgagccaatttttggcaccggtggcgcacagaaactggccgag

SEQ ID NO: 423496 - DNA, 75 bp, synthetic construct
  source 1..75: mol_type = other DNA
aaatgccacttcatatctctcttcgtgaagatctggataacggaacaccaaccgttattagtcgtccagatagtg

SEQ ID NO: 423497 - DNA, 75 bp, synthetic construct
  source 1..75: mol_type = other DNA
taccacaacattcgcaagcttatttgaaggttgcaccggactggtcacgataccggctgacgtgtttgctggttg

SEQ ID NO: 423498 - DNA, 75 bp, synthetic construct
  source 1..75: mol_type = other DNA
tccggggctgtacaggtctgaagacactgccggaagggttgtttgacaacaacactgctgtgaccacgttcagtc

SEQ ID NO: 423499 - DNA, 75 bp, synthetic construct
  source 1..75: mol_type = other DNA
acattcctgtaactggtgcggttgtggtaactacgccgcaagacatcgcgctgatcgatgcgaagaaaggcattg

SEQ ID NO: 423500 - DNA, 75 bp, synthetic construct
  source 1..75: mol_type = other DNA
accggccgggggcaggatgtggcggaaggccgcgccagcgttccaggtgtgaagaaaccacgcgcaagggggtaa

SEQ ID NO: 423501 - DNA, 75 bp, synthetic construct
  source 1..75: mol_type = other DNA
acaccaccggtatgcgcggcgtaaatctggcgacggatgacaatatgttcccggatgggatgcgttcctacgccc

SEQ ID NO: 423502 - DNA, 75 bp, synthetic construct
  source 1..75: mol_type = other DNA
atgacactctgatcccgtcctcattacggctggagatctcggtaccgcagatttatgaagatcagcgtctgaaag

SEQ ID NO: 423503 - DNA, 75 bp, synthetic construct
  source 1..75: mol_type = other DNA
ttatgtcgtaacgctgacctcccgaggtcaggatgtggcagaaggtcgtgcccgcgttgccggtgtcaagcgtcc

SEQ ID NO: 423504 - DNA, 75 bp, synthetic construct
  source 1..75: mol_type = other DNA
atgattaacgatattctgaccgaagaccgtcgtctggtcatcctgcgttccctgatggactgcaataacgaagca

SEQ ID NO: 423505 - DNA, 75 bp, synthetic construct
  source 1..75: mol_type = other DNA
atgattacggtcaccgcgtgtcccgcgacaccgtgcatacccacatagcctggcttgctgaacagggactggtgc

SEQ ID NO: 423506 - DNA, 75 bp, synthetic construct
  source 1..75: mol_type = other DNA
ttttgcaggccttttatggctgccaggcgctgacatcattaggtcaggggatatttgcagactgcaccggggtga

SEQ ID NO: 423507 - DNA, 75 bp, synthetic construct
  source 1..75: mol_type = other DNA
cgtgaccgctgggttctggccattgctggtacacacggcaaaaccactaccgcgggaatggcgacctggattctg

SEQ ID NO: 423508 - DNA, 75 bp, synthetic construct
  source 1..75: mol_type = other DNA
gcgttgctgggaaaaaatgcctggcttttaagtgcggtaggtggagatttctatgggcaatcattgctggcgcaa

SEQ ID NO: 423509 - DNA, 75 bp, synthetic construct
  source 1..75: mol_type = other DNA
tcaagcccaaccggcttgaagcagaaacactcagtggtatttcgctttcagatcggaatgatgctgaaaaagtgg

SEQ ID NO: 423510 - DNA, 75 bp, synthetic construct
  source 1..75: mol_type = other DNA
aaccacgctcgaacaccatgaagatgggcgtctgcaaagatgatttagcaccgtcgttaggtcgtgccgatgaag

SEQ ID NO: 423511 - DNA, 75 bp, synthetic construct
  source 1..75: mol_type = other DNA
cgagcaggggcactggcaggcgaaaaagctgaccaccgatgcttccgaatgggaagtcttgctggatggcgaaaa

SEQ ID NO: 423512 - DNA, 75 bp, synthetic construct
  source 1..75: mol_type = other DNA
gccgctaacgcgctgggttcgtttattaacgctcgtcgccgtctggagttgcgcggagaagcaaatggcgtgacg

SEQ ID NO: 423513 - DNA, 75 bp, synthetic construct
  source 1..75: mol_type = other DNA
aaccggaaagttaattatagacaacctttttcaagagattattgattacgcgaaagaaaaatatatcagcggagg

SEQ ID NO: 423514 - DNA, 75 bp, synthetic construct
  source 1..75: mol_type = other DNA
cggaaagatgattgttgacgagatttttgcggagttaattaaacacgcgaaagagaaatacgtatgtggaggaat

SEQ ID NO: 423515 - DNA, 75 bp, synthetic construct
  source 1..75: mol_type = other DNA
actgctgtgaccacgttcagtcagactttttacggctgtacggggctggcggtgctgcctgccgggctgtttgaa

SEQ ID NO: 423516 - DNA, 75 bp, synthetic construct
  source 1..75: mol_type = other DNA
tgataatatgccatttattgattccattcgatttgcacaggggtgttcatcaatggcgctggccagtgagtatac

SEQ ID NO: 423517 - DNA, 75 bp, synthetic construct
  source 1..75: mol_type = other DNA
tggacgtgcgagacaatattgagcgccgggcttatgaaattgctctggcatcgctggaagcagtatcggatgaac

SEQ ID NO: 423518 - DNA, 75 bp, synthetic construct
  source 1..75: mol_type = other DNA
atattcagcgtctctggtatttggaagatggcattgtctattcaaagaggaagggcaagcctgttgcattctctt

SEQ ID NO: 423519 - DNA, 75 bp, synthetic construct
  source 1..75: mol_type = other DNA
ggcaataacatcatctatcagaccacggttcctccggggcctttcatcctgcaggacgtttacccttccggatac

SEQ ID NO: 423520 - DNA, 75 bp, synthetic construct
  source 1..75: mol_type = other DNA
gcacaccatcatcaccttaagcggcctgatgctgctgaccaaaggtgtggagttaagcggttattttgatgtgct

SEQ ID NO: 423521 - DNA, 75 bp, synthetic construct
  source 1..75: mol_type = other DNA
cgtctttattactggcatgggcggtaaacgtaggtggctttgggttattacccggatcgctggcaaatttgattg

SEQ ID NO: 423522 - DNA, 75 bp, synthetic construct
  source 1..75: mol_type = other DNA
gcaaactccggagtggaaaccgcggctggtgtggagttgtctggggctgtatatcgtctttctgacggcgctgga

SEQ ID NO: 423523 - DNA, 75 bp, synthetic construct
  source 1..75: mol_type = other DNA
aaactcaaggagccacatattcgcgcgctggatggtctgggcattgcactgacggcaccggcggatagcacacgt

SEQ ID NO: 423524 - DNA, 75 bp, synthetic construct
  source 1..75: mol_type = other DNA
aagatctcgaacatcgtcgtttcagtgggatccgcgccagcgaggcgctgatccatagcggtcgtttccatgcgc

SEQ ID NO: 423525 - DNA, 75 bp, synthetic construct
  source 1..75: mol_type = other DNA
attacgtaacacctaacgcaaaagtttatgttgaaggcgcatggaatcgggttacgaataaaaaaggtaatactt

SEQ ID NO: 423526 - DNA, 75 bp, synthetic construct
  source 1..75: mol_type = other DNA
tgatcactgccgtggggatgcacattggcgaactgattggcgggacgatgattatcgaaaacatctttgcctggc

SEQ ID NO: 423527 - DNA, 75 bp, synthetic construct
  source 1..75: mol_type = other DNA
atctgttcgcaattttcttgatactaaaagaagtgtgttcaaaattgatccacattttgattcatttgaagaggt

SEQ ID NO: 423528 - DNA, 75 bp, synthetic construct
  source 1..75: mol_type = other DNA
agagatgatatcggctccatcccgaatggagaaagagtaataggctataaacaacgttttaaaatgccctatatt

SEQ ID NO: 423529 - DNA, 75 bp, synthetic construct
  source 1..75: mol_type = other DNA
ttctgactacagcaaaaatggtgcaggcatagaaaactataacttcatcactactgctggtcttaagtacacctt

SEQ ID NO: 423530 - DNA, 75 bp, synthetic construct
  source 1..75: mol_type = other DNA
tcgccagccaacgcccggtgctggacgatatgctgaatttcctgcccgccacgctggaactggcgggtgcggcgc

SEQ ID NO: 423531 - DNA, 75 bp, synthetic construct
  source 1..75: mol_type = other DNA
ctggcctctactcgaactatgctggggctggatcagccgctgtacgtccagtatggtacctggttgtggaaggcg

SEQ ID NO: 423532 - DNA, 75 bp, synthetic construct
  source 1..75: mol_type = other DNA
agccgtcgctgcccgtgctgatcatcgacgacggaatgctggacacgcctgctgcgccgttgcctgaagtggctg

SEQ ID NO: 423533 - DNA, 75 bp, synthetic construct
  source 1..75: mol_type = other DNA
ggctcgacgatggccctgattgaagccaaagacgcggccggggcgatgcttccgggatcgccgggcacccgtgtg

SEQ ID NO: 423534 - DNA, 75 bp, synthetic construct
  source 1..75: mol_type = other DNA
tgacccgctacgcgctctccgccggtaaagtcgacgatagttcgctgcgtaataaaccgatgctctaccagggaa

SEQ ID NO: 423535 - DNA, 75 bp, synthetic construct
  source 1..75: mol_type = other DNA
tttcccgacggcatgcgctcctacgcccctgaaattcgcggcgtggcgcaaagcaacgccctggtgacggtgcgc

SEQ ID NO: 423536 - DNA, 75 bp, synthetic construct
  source 1..75: mol_type = other DNA
acgcgcgccgttgtgaggtgggccggtggtcagtgctccacggcacttgatcccgtcagcgcgctcaaaacgaag

SEQ ID NO: 423537 - DNA, 75 bp, synthetic construct
  source 1..75: mol_type = other DNA
agtgtttagcgtgccttacgcctccgtcgcccagctgctgcgcccgggcatgacccgctacgcgctctccgccgg

SEQ ID NO: 423538 - DNA, 75 bp, synthetic construct
  source 1..75: mol_type = other DNA
gccaaacgcgcgattgtgaagtggagcggcgggcagtgttcggtggatctgggacagcaaacaacaaaggatagc

SEQ ID NO: 423539 - DNA, 75 bp, synthetic construct
  source 1..75: mol_type = other DNA
gttgataaccgtgctgatccgtctggcaacgggtcagggcgtggtctccgccatgacggcggcggggattattag

SEQ ID NO: 423540 - DNA, 75 bp, synthetic construct
  source 1..75: mol_type = other DNA
tgttggcggtaacgttggtagcagagatcaaccgcacttttcactgcgccttgaccctgaaggacattttccact

SEQ ID NO: 423541 - DNA, 75 bp, synthetic construct
  source 1..75: mol_type = other DNA
acgcagccgggtctcacgcaattggagccgtcgctgcccgtgctgatcatcgacgacggaatgctggacacgcct

SEQ ID NO: 423542 - DNA, 75 bp, synthetic construct
  source 1..75: mol_type = other DNA
tggttcagctatggcctatgacggaacaattacgtttacaggcaaagttgtagctcagacctgcaatgtgaccac

SEQ ID NO: 423543 - DNA, 75 bp, synthetic construct
  source 1..75: mol_type = other DNA
tttatgctgataaacatgaggcagaaagggtgaaaaaacatttatcctatcaattaggaaaattaatcataaata

SEQ ID NO: 423544 - DNA, 75 bp, synthetic construct
  source 1..75: mol_type = other DNA
tgacgaggcagaacatcgttctccggtacatgacacagaaacattttgcgatcttactggtttccaaaactacaa

SEQ ID NO: 423545 - DNA, 75 bp, synthetic construct
  source 1..75: mol_type = other DNA
atccgcacggcacgggaacaatttcagggcacgaacacctgaagaacgccatcatggacatcatcatgacacctg

SEQ ID NO: 423546 - DNA, 75 bp, synthetic construct
  source 1..75: mol_type = other DNA
cgccgtggtgacgttatccggcatcatcaccgaaaccatgcagaacatcacattcagtatcaccctgagggagta

SEQ ID NO: 423547 - DNA, 75 bp, synthetic construct
  source 1..75: mol_type = other DNA
ctggatgcaccgatgaatgccaccacccgccttcagtgcatgagtgccgtggtaattgccctgacgcagtgggag

SEQ ID NO: 423548 - DNA, 75 bp, synthetic construct
  source 1..75: mol_type = other DNA
attctggcgtttaaaagcgtaggaaaactggaaccgggtgagctgtactacttcgccggtattgacgaagcgcgc

SEQ ID NO: 423549 - DNA, 75 bp, synthetic construct
  source 1..75: mol_type = other DNA
tggtgatagtcatcgccgggttgattacgttatggagaattcttaacgcacccgtgccgacttatcagacgctga

SEQ ID NO: 423550 - DNA, 75 bp, synthetic construct
  source 1..75: mol_type = other DNA
cacggttcgctgtgcgaaatacggatgagcttctggggagcggagtttgcggcgttcttacagtgtaagcagtaa

SEQ ID NO: 423551 - DNA, 75 bp, synthetic construct
  source 1..75: mol_type = other DNA
gccggtattaatcagtaatagcgatgattttacagacgtattaccccacggcacggcgcagataagcgctggtga

SEQ ID NO: 423552 - DNA, 75 bp, synthetic construct
  source 1..75: mol_type = other DNA
tgggctacaccgcagggaaacgcttcggcggcaatccatttactgccatggtgattggcggagcgttagtgcatc

SEQ ID NO: 423553 - DNA, 75 bp, synthetic construct
  source 1..75: mol_type = other DNA
ttctgccctcggttggtgaagtgcgttctccggtggcgggtcgaattgcttcgttgttcgccacattacacgcca

SEQ ID NO: 423554 - DNA, 75 bp, synthetic construct
  source 1..75: mol_type = other DNA
gcggtgtcattgccatcggttgcgcatttgtcggtacgttgatgcttcatttcatcaccagtaaacgtcagccag

SEQ ID NO: 423555 - DNA, 75 bp, synthetic construct
  source 1..75: mol_type = other DNA
accgtctgggccagcgttattggcggtgtcattgccatcggttgcgcatttgtcggtacggtgatgcttcatttc

SEQ ID NO: 423556 - DNA, 75 bp, synthetic construct
  source 1..75: mol_type = other DNA
gccggttatctctggctttatcaggcggttcctgcatttgcaggcgcggtaatgggcggcttctggcaaatcttc

SEQ ID NO: 423557 - DNA, 75 bp, synthetic construct
  source 1..75: mol_type = other DNA
gcagattggtggcaaaacttgcaacacagtggacagctaaagactttggctgaacatttgccaaaagaaacaatg

SEQ ID NO: 423558 - DNA, 75 bp, synthetic construct
  source 1..75: mol_type = other DNA
tttcaggaactactcattcaagatcccactgccggtgacattatcgcaggcacaggcagttttagaaaaattcgc

SEQ ID NO: 423559 - DNA, 75 bp, synthetic construct
  source 1..75: mol_type = other DNA
aaaacggccggagggcggaatacggcacgctacctgggtcgttatctgaagaagccaccaatagcggcttcccga

SEQ ID NO: 423560 - DNA, 75 bp, synthetic construct
  source 1..75: mol_type = other DNA
cggtggcgaaagtgtgctatgtgcagatggtgaagcagttcctgaatcgtgacccgttcgaatgtgtgctgtgtg

SEQ ID NO: 423561 - DNA, 75 bp, synthetic construct
  source 1..75: mol_type = other DNA
gtgatttatataaaatactaacgaaaaacattatcgcaaatatattatatgtaatgatggtaatgttagttgcat

SEQ ID NO: 423562 - DNA, 75 bp, synthetic construct
  source 1..75: mol_type = other DNA
ttacagatggctcgtgttgttgcatttagtgaattatgggtaacgctattcatggcggtcgtggcgattatacat

SEQ ID NO: 423563 - DNA, 75 bp, synthetic construct
  source 1..75: mol_type = other DNA
gaaatattacctgggcctcttttaacctcagtgaaaaggatctcgacgaatactacaaccaattctccaatgccg

SEQ ID NO: 423564 - DNA, 75 bp, synthetic construct
  source 1..75: mol_type = other DNA
caaaaagccatacggcctggggcaaaacgtttcgaaccgaagtttaccccattggcattgaaccagatgagattg

SEQ ID NO: 423565 - DNA, 72 bp, synthetic construct
  source 1..72: mol_type = other DNA
atgaaattaagacatctcgatatcttttatgctgtaatgacttgtggttccttaacgcgtgcggctgaagtt

SEQ ID NO: 423566 - DNA, 75 bp, synthetic construct
  source 1..75: mol_type = other DNA
cgaggctgaaacagcacatcccggagaagttttttaagatggtgaggtacttcgggttccttgccaaccgggtgt

SEQ ID NO: 423567 - DNA, 75 bp, synthetic construct
  source 1..75: mol_type = other DNA
tggcaggagtgcttcattagcgacctaaagcagatagttccgcgaagcgcggaaagccagcagcgcgataaagtt

SEQ ID NO: 423568 - DNA, 75 bp, synthetic construct
  source 1..75: mol_type = other DNA
ggtcaattaggctggacgccgctttattatctgaatcagcattttgatcgtaaattactgatgaaaatcttccgc

SEQ ID NO: 423569 - DNA, 75 bp, synthetic construct
  source 1..75: mol_type = other DNA
acatgataacgatttggccgtatcgcttaatggttcagaactgcgtgataccaggcaggcgcagcagataatgaa

SEQ ID NO: 423570 - DNA, 75 bp, synthetic construct
  source 1..75: mol_type = other DNA
tagcattccgggcagctcacggtttaacgatgacgtgatcaccacgtcattaatctgtaccaaccgtatgatccc

SEQ ID NO: 423571 - DNA, 75 bp, synthetic construct
  source 1..75: mol_type = other DNA
taaaggcgtaccggttcgcgggctggcgaccacgctgtggatacgtcccgatccgtttatctgcgaaggtgaaat

SEQ ID NO: 423572 - DNA, 75 bp, synthetic construct
  source 1..75: mol_type = other DNA
cggtgtatctgcaatggctacccgcgatggggttacggcggctggcagcacatcattttgcctgcggtttccatt

SEQ ID NO: 423573 - DNA, 75 bp, synthetic construct
  source 1..75: mol_type = other DNA
agagtctgacagtgttcgtctggatattgattttacttttgcctgcgaagctgaaatgctgatcttccagttggg

SEQ ID NO: 423574 - DNA, 75 bp, synthetic construct
  source 1..75: mol_type = other DNA
tttatgtccggcagcctgcgccagaaacttgaagatgaatttccagaattcacccatgggttgatccgtatgctg

SEQ ID NO: 423575 - DNA, 75 bp, synthetic construct
  source 1..75: mol_type = other DNA
gcgaagagctggattatctgcgccagctcggcaagctgttgtcccaggaaaaaccgcatctggcccattttctgg

SEQ ID NO: 423576 - DNA, 75 bp, synthetic construct
  source 1..75: mol_type = other DNA
gtatatgacgattttgcccatcacccaacggcgattctggcaaccctggcggcactgcgcggcaaagttggtggt

SEQ ID NO: 423577 - DNA, 75 bp, synthetic construct
  source 1..75: mol_type = other DNA
agcaacggcggttttggtgggatccatcagaaactgctggatgggttagcgaagaaagcggaagccgcgcagtaa

SEQ ID NO: 423578 - DNA, 75 bp, synthetic construct
  source 1..75: mol_type = other DNA
agtaacggcggttttggtggtattcatcagaaactgctggatggtctggcgaagaaagcggaagctgcgcagtaa

SEQ ID NO: 423579 - DNA, 75 bp, synthetic construct
  source 1..75: mol_type = other DNA
actattggcgcaggccagtccacctttggcgggaaaactgcaactacctggggctataacggcaatctgctgggg

SEQ ID NO: 423580 - DNA, 75 bp, synthetic construct
  source 1..75: mol_type = other DNA
gaagcctgtattcagcctgcgcactggagtggtgatgtcgatgcgttggcagatatggtggtgaaaaccgcccag

SEQ ID NO: 423581 - DNA, 75 bp, synthetic construct
  source 1..75: mol_type = other DNA
ataccatgaaaatggggatctgcaaagacgatctggcaccttcattaggtcgtgccgatgaagtcttcctgctgc

SEQ ID NO: 423582 - DNA, 75 bp, synthetic construct
  source 1..75: mol_type = other DNA
ggaagatgcggggattgcggtcgtgagttcgctaccggaagccaccttgctggcggcagcgttaattcatccgct

SEQ ID NO: 423583 - DNA, 75 bp, synthetic construct
  source 1..75: mol_type = other DNA
tgagtccgacctggcttttgtgcgtggttttgcttatggttggttatcaactggttattgttatttgccaatttt

SEQ ID NO: 423584 - DNA, 75 bp, synthetic construct
  source 1..75: mol_type = other DNA
catcaactgttcctaataattcgttatttcagatctatttttattatccatcagggcatttttttaatgcctcag

SEQ ID NO: 423585 - DNA, 75 bp, synthetic construct
  source 1..75: mol_type = other DNA
ggtggtaatttattgaacgcatcagataaacttttttatctgccgtttgctttcattattatcgtattgctgtgg

SEQ ID NO: 423586 - DNA, 75 bp, synthetic construct
  source 1..75: mol_type = other DNA
gagaggtatactttacagttcggttgcagagcattccgttgccatctttgcacataataacagacagttcagtct

SEQ ID NO: 423587 - DNA, 75 bp, synthetic construct
  source 1..75: mol_type = other DNA
acttaaagaaataaaaataaccgtcgagcgtgatggtcagttatatgatgcatttattgctgtaggagaaaactg

SEQ ID NO: 423588 - DNA, 75 bp, synthetic construct
  source 1..75: mol_type = other DNA
caggcagcatcggtgcccggcttatcccgtgttagcgcgccggaaacagcggtaactggtgatcaaactgaagaa

SEQ ID NO: 423589 - DNA, 75 bp, synthetic construct
  source 1..75: mol_type = other DNA
caacgtgatgatgttctccgataacgtcacgctggaagacgaaatccaactcaaaactcatgcgcgggaaaaagg

SEQ ID NO: 423590 - DNA, 75 bp, synthetic construct
  source 1..75: mol_type = other DNA
ctgggacagtgcctgtcagaaattacccgatgccaatctggcgctgatttcagtggctggcgagtatgcggcgga

SEQ ID NO: 423591 - DNA, 75 bp, synthetic construct
  source 1..75: mol_type = other DNA
acgtgcgcgtattgctgcttgatgtcgtgattggctttggcgcgaccgccgatcctgctgcctcgctggtaagcg

SEQ ID NO: 423592 - DNA, 75 bp, synthetic construct
  source 1..75: mol_type = other DNA
agataaggctgataattttatttttattggcagcattgtcatttattggtctttttttcatcattaactatcaac

SEQ ID NO: 423593 - DNA, 75 bp, synthetic construct
  source 1..75: mol_type = other DNA
accccggcggtggcccgcgacgagaatgtctggtttgcctcctcgctggatgaggccgcacgcctggcttgcctg

SEQ ID NO: 423594 - DNA, 75 bp, synthetic construct
  source 1..75: mol_type = other DNA
gccgatggtcaccagattattgacctcggcgatgatttctacaccgtcgggcgtccccatccgatgatcgaccca

SEQ ID NO: 423595 - DNA, 75 bp, synthetic construct
  source 1..75: mol_type = other DNA
gagcttccgcttatacacctctaccatgaattgctggcaaggacattgttcttcaaaccatatcatgaagaattt

SEQ ID NO: 423596 - DNA, 75 bp, synthetic construct
  source 1..75: mol_type = other DNA
caacctacagtagcctggcagcctgtaccgggtccacaaacgggagagccggttattgctcctgcaccggaaggt

SEQ ID NO: 423597 - DNA, 75 bp, synthetic construct
  source 1..75: mol_type = other DNA
tggcgttttggcgctcatccttacctcctgtggtctggcggcaatcaacgctgacgatatctggtattttgcctc

SEQ ID NO: 423598 - DNA, 75 bp, synthetic construct
  source 1..75: mol_type = other DNA
gaatttatgctgcgtgtattgtatcagctgaagatggaagggaaatcatttcgctggctcgtggtgggcgccggg

SEQ ID NO: 423599 - DNA, 75 bp, synthetic construct
  source 1..75: mol_type = other DNA
gtaaaagcgaactacggcaaagcccatgaaatcgctgtcaagctgggattaaaaaccatcactgacgccgcttaa

SEQ ID NO: 423600 - DNA, 75 bp, synthetic construct
  source 1..75: mol_type = other DNA
caatacatatgaatttgatttgccaaaagaatatttaagagcttttgagaaagcttattcggagtatcagacaaa

SEQ ID NO: 423601 - DNA, 75 bp, synthetic construct
  source 1..75: mol_type = other DNA
gtacatattgttattcctaaacaaaaccttcttactggcggcgcgttagatccggttggactttataaacatcat

SEQ ID NO: 423602 - DNA, 75 bp, synthetic construct
  source 1..75: mol_type = other DNA
aaatggttatcgtggcttccaagctgcctaaagacttccttttaggcggggatggtaaagcgtataacgatgcgt

SEQ ID NO: 423603 - DNA, 75 bp, synthetic construct
  source 1..75: mol_type = other DNA
gtaatgctggaatagctgaatatctgcgtgacgggcagaaacaaggccgtgcctttaatcgtgacgaactggata

SEQ ID NO: 423604 - DNA, 75 bp, synthetic construct
  source 1..75: mol_type = other DNA
tatcgcgtaatagtcaatggacaaccaatgaaagagatccacaaaccggagcagggcggcaacatcgagcagtat

SEQ ID NO: 423605 - DNA, 75 bp, synthetic construct
  source 1..75: mol_type = other DNA
gcgtgaaattatattaaatagagaaagggggttgtatgagcatactgaaagttctggacgacgagccaatagaga

SEQ ID NO: 423606 - DNA, 75 bp, synthetic construct
  source 1..75: mol_type = other DNA
atgataaagagatcaagagctataatgtttttattaaggagttgcaaaataaatatagcgaagtaaggattcgca

SEQ ID NO: 423607 - DNA, 75 bp, synthetic construct
  source 1..75: mol_type = other DNA
gtggcgcaaggatggctgatcaggcgggacaggctggcacatttgtcagtgagcggatatatccgcaacaatcta

SEQ ID NO: 423608 - DNA, 75 bp, synthetic construct
  source 1..75: mol_type = other DNA
tatgccatcgtgcattaatatcatcagtggacccagctcgacggccgatattgagcttatcaaggtggttggggt

SEQ ID NO: 423609 - DNA, 75 bp, synthetic construct
  source 1..75: mol_type = other DNA
agtggacccagctcgacggcggatattgaacttatcaaggtggttggggtacatggcccggtgaaggcggtgtat

SEQ ID NO: 423610 - DNA, 75 bp, synthetic construct
  source 1..75: mol_type = other DNA
atcaaggctcaacagtttgtcacatcaacggggcggcaagtccttactgacaacggacaacaaggtatgggcggc

SEQ ID NO: 423611 - DNA, 75 bp, synthetic construct
  source 1..75: mol_type = other DNA
gtgattcaggcgcgtccgactgcaggactgcaacgtttgcgttatctgctgctgctgtggggcgcggatcgtaac

SEQ ID NO: 423612 - DNA, 75 bp, synthetic construct
  source 1..75: mol_type = other DNA
ctttatcaatggacccagcaacctcctcgatacaatggccatatagctaaaaatgtcccggagcaaaacccgact

SEQ ID NO: 423613 - DNA, 75 bp, synthetic construct
  source 1..75: mol_type = other DNA
tgaaacctattcccgttcctgttgagatctacacgcagtgcattaccgatgcctcccgttttttcgggattgatg

SEQ ID NO: 423614 - DNA, 75 bp, synthetic construct
  source 1..75: mol_type = other DNA
atgccgaacagggctgtgatttctgtggctggcagttgtatgagcgtggagagctcgttgatgtgctgtgggggg

SEQ ID NO: 423615 - DNA, 75 bp, synthetic construct
  source 1..75: mol_type = other DNA
tgcagatgataataatgcagatctcatcccatgcctgagtacagaccttcttgtcagtcttggcataaaaaaatc

SEQ ID NO: 423616 - DNA, 75 bp, synthetic construct
  source 1..75: mol_type = other DNA
acagcgcatgcacaccacttcaggatcgtttggccgacgcatcaactgagtttgatgttggtcagcaacatctgt

SEQ ID NO: 423617 - DNA, 75 bp, synthetic construct
  source 1..75: mol_type = other DNA
tgagctggcgaaccagaaagctgagttttttgagtcagttatcaatgtccttaaaaatgattacggggtgagtat

SEQ ID NO: 423618 - DNA, 75 bp, synthetic construct
  source 1..75: mol_type = other DNA
cgtaaatatggccggcttgactggagtcctggacttcctgacctggtgaagaggaaactgcctgtgactcagaca

SEQ ID NO: 423619 - DNA, 75 bp, synthetic construct
  source 1..75: mol_type = other DNA
aatagctgttgttgagcaggttgaaaaaggcgagatgacctataaacaggcccagcagcggtatggcattcaggg

SEQ ID NO: 423620 - DNA, 75 bp, synthetic construct
  source 1..75: mol_type = other DNA
aaggcaaaattcagcttactggtttgcctggctttaaagaaaaagccattgagatagccgctgaacggggtttag

SEQ ID NO: 423621 - DNA, 75 bp, synthetic construct
  source 1..75: mol_type = other DNA
actggaaagcatccgcacgcaggtgatgaccatgggcggtatggtggagcaacagcttactgatgccatcaccgc

SEQ ID NO: 423622 - DNA, 75 bp, synthetic construct
  source 1..75: mol_type = other DNA
gaaggggcaggatttccgtcacgtcggtggtgacgaactcgataaactgctggcagaaaaagatagcgacaaata

SEQ ID NO: 423623 - DNA, 75 bp, synthetic construct
  source 1..75: mol_type = other DNA
gaaaggtcaggatttccgtcacgtcggcggcgatgaactggataaactgctggcagagaaagatccgaaagcgtc

SEQ ID NO: 423624 - DNA, 75 bp, synthetic construct
  source 1..75: mol_type = other DNA
ggcggtgctggtggcgctcggcattattattgccgacagccgcttggggacgttcagtcaaatccgtacttatat

SEQ ID NO: 423625 - DNA, 75 bp, synthetic construct
  source 1..75: mol_type = other DNA
accaacgcaaccagccgctaatcgctctccgcaaagggctacgccgccgcaaagtggcgccgaaccgcctgcgcg

SEQ ID NO: 423626 - DNA, 75 bp, synthetic construct
  source 1..75: mol_type = other DNA
atgacctacatgatggaagattcacggaccattccgagcgtacttaccgcgctgttctgtgcgcgctctatcgaa

SEQ ID NO: 423627 - DNA, 75 bp, synthetic construct
  source 1..75: mol_type = other DNA
cttaacgctttcctgttcaaactggaaagcgtcatcgccaatatctcagcattgaagggcgataaggaggcagaa

SEQ ID NO: 423628 - DNA, 75 bp, synthetic construct
  source 1..75: mol_type = other DNA
atatcgaccagctatggccggtattaacccgcgagccacaggatcacatcccgtggtcttctctgctggcgctgc

SEQ ID NO: 423629 - DNA, 75 bp, synthetic construct
  source 1..75: mol_type = other DNA
aacccgcgagccacagacccatatcccgtggtcgtctctgctggcgctgccgcaatcgtacattgtgcctggggg

SEQ ID NO: 423630 - DNA, 75 bp, synthetic construct
  source 1..75: mol_type = other DNA
taccgcgattacgactggcggcgcgaacagcaggcactcttttccgctgctgccattgtgccgttatatgtgggc

SEQ ID NO: 423631 - DNA, 75 bp, synthetic construct
  source 1..75: mol_type = other DNA
acatccccaacggcaaccgcacctattatttgagccgctcgcaaccaccggtttttgcgctgatggtggagttgt

SEQ ID NO: 423632 - DNA, 75 bp, synthetic construct
  source 1..75: mol_type = other DNA
ttgccttcgccagacgcgatggggccaaagttacctgaaccggcaacggggatcgctcagccgactccgcagcaa

SEQ ID NO: 423633 - DNA, 75 bp, synthetic construct
  source 1..75: mol_type = other DNA
gtaacagagtatggttttaatcttagtgccacaaaaaaaatagccttgtctaaatctcaggatgagactaataaa

SEQ ID NO: 423634 - DNA, 75 bp, synthetic construct
  source 1..75: mol_type = other DNA
atatcgcaagtatctattagtttctatacgacattcaatacattgattctaggctatttttatagccctacaatg

SEQ ID NO: 423635 - DNA, 75 bp, synthetic construct
  source 1..75: mol_type = other DNA
taaatataagtcctccctgttggctacagcttttgtagacaaaggcaataagatcgagtttcccactcttataaa

SEQ ID NO: 423636 - DNA, 75 bp, synthetic construct
  source 1..75: mol_type = other DNA
gaagatgcttttacgcttaagcgtcatgttaacgatgttcaacaaaatgaagaatttaatgagaaacggaaacgc

SEQ ID NO: 423637 - DNA, 75 bp, synthetic construct
  source 1..75: mol_type = other DNA
caccgcgccagcaaaagaaaaagagaaggccgcaccagaaccaacccaaaagccaaaaatttccatcgagcgcta

SEQ ID NO: 423638 - DNA, 75 bp, synthetic construct
  source 1..75: mol_type = other DNA
atgtacaacaacaaaacaggtatgtgtctgtgtgttccttatacaacgcaatcaaaaggatatccgttcgaagtt

SEQ ID NO: 423639 - DNA, 75 bp, synthetic construct
  source 1..75: mol_type = other DNA
tggatgctgtcgatcgtgaactggctgcaagtgaaaagcgtttgcgtgagatggagcgttatgtaacgtctgata

SEQ ID NO: 423640 - DNA, 75 bp, synthetic construct
  source 1..75: mol_type = other DNA
ggccagtgaaacgcgtttacgcgagatggaacgttatgtcacttccgatactttcacgttacgtagccgtttccg

SEQ ID NO: 423641 - DNA, 75 bp, synthetic construct
  source 1..75: mol_type = other DNA
cctggactcggtgatcaccgccgtcggcctttctcagcatatatttattatgattgctgccgtcatgattgccgt

SEQ ID NO: 423642 - DNA, 75 bp, synthetic construct
  source 1..75: mol_type = other DNA
ggatattattgctgatatccattgcgtggctttcacatattacccagccgctttttaccgtgctgacgctggaga

SEQ ID NO: 423643 - DNA, 75 bp, synthetic construct
  source 1..75: mol_type = other DNA
gggatcgacaatattattttcctttctctggtggtggcaaagcttcccacagcacaacgtgctcatgcgcgccgt

SEQ ID NO: 423644 - DNA, 75 bp, synthetic construct
  source 1..75: mol_type = other DNA
caaccgcgtttgcatcttcccgccgtggacgtcctgcaaacaaccggatcgatgaagaaacacgctgtaaagccc

SEQ ID NO: 423645 - DNA, 75 bp, synthetic construct
  source 1..75: mol_type = other DNA
ctcgtatcgctggcgagaaaataacagtctacgactatcctgacggtacactggcattcaaatacggttaccgtt

SEQ ID NO: 423646 - DNA, 75 bp, synthetic construct
  source 1..75: mol_type = other DNA
cctttggcatttaaccacccagattgtattgatgccatcatgactgatggaattagcactgatgcctcatttact

SEQ ID NO: 423647 - DNA, 75 bp, synthetic construct
  source 1..75: mol_type = other DNA
ggattgtatcggccacattgcttcatgggcgaattgggttgtcgcaggaggatgcaaatgaattaccaactggca

SEQ ID NO: 423648 - DNA, 75 bp, synthetic construct
  source 1..75: mol_type = other DNA
gcgcacccaatacatctgggtaactgttgttccggctgtatggctgcttatctgcaccacctgggcactgggtct

SEQ ID NO: 423649 - DNA, 75 bp, synthetic construct
  source 1..75: mol_type = other DNA
ctatctacttcggtggcgtgattgctcacgacccgtactggggtccggcactgacctttaaagacaccaccatta

SEQ ID NO: 423650 - DNA, 75 bp, synthetic construct
  source 1..75: mol_type = other DNA
tagcagcgaaagagcatcaaagattactctcaattgcaaacacggtgccgtattttcaattatcagtcagggtac

SEQ ID NO: 423651 - DNA, 75 bp, synthetic construct
  source 1..75: mol_type = other DNA
taaccggtaaaaatgtcgaagataactggcgcgtgcgctggatgacggactattactataaggtcattaaccaga

SEQ ID NO: 423652 - DNA, 75 bp, synthetic construct
  source 1..75: mol_type = other DNA
cgcagccagtcggattccggtgccagcgtggcggtcggctggcgaaatgacgtctggagctgggatatcggcacc

SEQ ID NO: 423653 - DNA, 75 bp, synthetic construct
  source 1..75: mol_type = other DNA
ggactctaaggagctaaatgaaagttccgttctttcactttatcaagatagccagttaatccattttatacctga

SEQ ID NO: 423654 - DNA, 75 bp, synthetic construct
  source 1..75: mol_type = other DNA
ggtttctaaaatggctgttaaactccccaatttgagagttcaagaaaagattggttttattaatagaaactggat

SEQ ID NO: 423655 - DNA, 75 bp, synthetic construct
  source 1..75: mol_type = other DNA
gatactgaacgttatgaaaaactcgcacaatcagcggcaatatcgcaacaaattattgataacgccaggtttgac

SEQ ID NO: 423656 - DNA, 75 bp, synthetic construct
  source 1..75: mol_type = other DNA
ttaatgggggaaatgcatactctgacggactggctgcacttttgttgaccagcgatgatgttgcgcaaaaatata

SEQ ID NO: 423657 - DNA, 75 bp, synthetic construct
  source 1..75: mol_type = other DNA
ttgccgcgtgcaaatgggcaaaaaagcagcggtctggggttggcgttcgtcagtgaggtcgcccgtttgtttaac

SEQ ID NO: 423658 - DNA, 75 bp, synthetic construct
  source 1..75: mol_type = other DNA
aattatgtcttctggcgcaggtagcttaagagcaaaaatctatgagaatgggctcaaaaatgtaaatgaaggtga

SEQ ID NO: 423659 - DNA, 75 bp, synthetic construct
  source 1..75: mol_type = other DNA
gaaggcgcgggacagacgattgaggccgcgcgtcaggcgatggtctggacgctgtttcactacggcttaaccggc

SEQ ID NO: 423660 - DNA, 75 bp, synthetic construct
  source 1..75: mol_type = other DNA
gcggcattaacaaagtgcgcaatgaataccatgtctatatgactgatgcgcagggcaaagtattgttcgattcgg

SEQ ID NO: 423661 - DNA, 75 bp, synthetic construct
  source 1..75: mol_type = other DNA
acgttgcgtggtcagtatggcgcgcgtagcactttgcaaaatcctgccgaccccgaaagttctgtaatgtatgtt

SEQ ID NO: 423662 - DNA, 75 bp, synthetic construct
  source 1..75: mol_type = other DNA
gctgcccccattatggacggctcgcggcttattggtgttttgagcgtaggcaaaccgaatgcggcgatggcaccg

SEQ ID NO: 423663 - DNA, 75 bp, synthetic construct
  source 1..75: mol_type = other DNA
cgcgcaccgagaaagaagcgattgatgcaggcaccacctggtgggaaggtgacttgttccagggcaaaccggact

SEQ ID NO: 423664 - DNA, 75 bp, synthetic construct
  source 1..75: mol_type = other DNA
ttacctacggcattatgctcggtgaaaaaccggctgtgctgtcggctatcgttaagtatcactgtacccaccgtg

SEQ ID NO: 423665 - DNA, 75 bp, synthetic construct
  source 1..75: mol_type = other DNA
ccgggcaaggctggcggatgctggtggagtgtctctcggtgggccgtggcatcaccctgccttccaactcaaccg

SEQ ID NO: 423666 - DNA, 75 bp, synthetic construct
  source 1..75: mol_type = other DNA
atccagtttgccagcgatgtcatgttgacgcgttgtgaactgaccagcgaggcgcaggcggcagaagcggcatta

SEQ ID NO: 423667 - DNA, 75 bp, synthetic construct
  source 1..75: mol_type = other DNA
agtggccccagttcaacagcggacattgagcttatcaaagttgttggggttcacgggccggtgaaggcggtgtac

SEQ ID NO: 423668 - DNA, 75 bp, synthetic construct
  source 1..75: mol_type = other DNA
accacgcctgactgctgaagagcaagcgtttatcgacggtccggtagaagaagcctgccggatggcaaatgattt

SEQ ID NO: 423669 - DNA, 75 bp, synthetic construct
  source 1..75: mol_type = other DNA
acggtgtggggctaagtctgagctacgataaaggtgaagcaaacggcgtctgggcatcgcttagtggcgaccagt

SEQ ID NO: 423670 - DNA, 75 bp, synthetic construct
  source 1..75: mol_type = other DNA
cgtcgtgaactggcgtcttacggtattaagctgccctcacagcgtgcggcagaagaaaaagcccgtgaagcccag

SEQ ID NO: 423671 - DNA, 75 bp, synthetic construct
  source 1..75: mol_type = other DNA
ctgaatgtgaagcgatcatcgagcggctttaccctgaactggagcgtcgtttggcaaaggtaaaacctgatttgc

SEQ ID NO: 423672 - DNA, 75 bp, synthetic construct
  source 1..75: mol_type = other DNA
tgattgctcgccagggggtgaaattaaagttcgacgattttcagcaaaccacccaggagcacgtctggccgcggc

SEQ ID NO: 423673 - DNA, 75 bp, synthetic construct
  source 1..75: mol_type = other DNA
ctccggtaagcggatggatgatgaagaagagattacctacactgcacgcggtgtggctgccgacccggacgacgt

SEQ ID NO: 423674 - DNA, 75 bp, synthetic construct
  source 1..75: mol_type = other DNA
gcaaatagcggtggaccgcgtccgcaggtcaaagaggggattggcccgcagttgccacgaccgaaacgcatccgc

SEQ ID NO: 423675 - DNA, 75 bp, synthetic construct
  source 1..75: mol_type = other DNA
gcagccacaacagcaggttgcgccgcagccacaatatcagcagccgcaacaaccggttgcgccacagcagcaata

SEQ ID NO: 423676 - DNA, 75 bp, synthetic construct
  source 1..75: mol_type = other DNA
gtgaaaaagaacgacaaatacgtcatgaaaatcaccggcgatgatgaaattggcaaagctcagttggataacttc

SEQ ID NO: 423677 - DNA, 75 bp, synthetic construct
  source 1..75: mol_type = other DNA
ggtacaaaattcggtacattcgagcagggcgatgaactgaacatgcagtctgctggcgtgtattcgcagatgaaa

SEQ ID NO: 423678 - DNA, 75 bp, synthetic construct
  source 1..75: mol_type = other DNA
ggcggtgctggtggcgctcggcattattattgccgacagtcgcctggggacgttcagtcaaatccgtacttatat

SEQ ID NO: 423679 - DNA, 75 bp, synthetic construct
  source 1..75: mol_type = other DNA
cagggatatgacttcgggctggatgacatcttcttctatgggcgtggcgaaggcatcggtaaagccgggctgatt

SEQ ID NO: 423680 - DNA, 75 bp, synthetic construct
  source 1..75: mol_type = other DNA
ctccacagcacttccaaatcgcgccgggctacgttcagtcaccgtatgtgcagtacatcggcaccctgtttggca

SEQ ID NO: 423681 - DNA, 75 bp, synthetic construct
  source 1..75: mol_type = other DNA
ggcaacctttatttcaatgataaagactgcaaaggcaatgcattctcagctaccgcaaaagtcgcttatgacact

SEQ ID NO: 423682 - DNA, 75 bp, synthetic construct
  source 1..75: mol_type = other DNA
cctggcagcctgtaccggggccgcaaacgggagaaccggttattgcacctgcaccggaaggttacccacaccagt

SEQ ID NO: 423683 - DNA, 75 bp, synthetic construct
  source 1..75: mol_type = other DNA
ccgggtcacccagtgcgcgacatctggttacagacggtagaagcattacgcgatacatctcacatacggaaccac

SEQ ID NO: 423684 - DNA, 75 bp, synthetic construct
  source 1..75: mol_type = other DNA
taatgtgatcaccgataaattacctctggaattctcttcgtgggttgcgagaatgcgtacgccagaagtgttagt

SEQ ID NO: 423685 - DNA, 75 bp, synthetic construct
  source 1..75: mol_type = other DNA
cggttactactgccgcaagacttccttcagtgttccgggtaagccgctggttgatgccctggagaataatcaggg

SEQ ID NO: 423686 - DNA, 75 bp, synthetic construct
  source 1..75: mol_type = other DNA
gaacgacgcatgtgggagagatgctggacatcgttctgcggatcgcgcctacgtatggcacaccgcccgtcacag

SEQ ID NO: 423687 - DNA, 75 bp, synthetic construct
  source 1..75: mol_type = other DNA
ctgatgtgtgaaaaagaaccggagttgaaaatagcacagcaactggtactcgagttctaccgtattctgaaaacc

SEQ ID NO: 423688 - DNA, 75 bp, synthetic construct
  source 1..75: mol_type = other DNA
cgtctcgatgatcgggattatcgtgcaaatgtcgccaggcttgaggcaaaaaaaaaaagtagcaaagccaatctc

SEQ ID NO: 423689 - DNA, 75 bp, synthetic construct
  source 1..75: mol_type = other DNA
tttttcacgaatggattagtctttgacatagaccacgaatacggagcaatagcgtgggatttagtaggtttaccg

SEQ ID NO: 423690 - DNA, 75 bp, synthetic construct
  source 1..75: mol_type = other DNA
tttatcaatggttttgtgtttgatatagatcagccttcaggtgcgattgcttgggatgattgcggattacctaag

SEQ ID NO: 423691 - DNA, 75 bp, synthetic construct
  source 1..75: mol_type = other DNA
gtctggctgatttccgtattaaagccgatgtcgtcaattactctccggggccggttatcactcgctttgaattga

SEQ ID NO: 423692 - DNA, 75 bp, synthetic construct
  source 1..75: mol_type = other DNA
agagacgcgctactaagggaggtaacacgtctcgacatgtcaagttccattatccagcgggccatgccaatgctg

SEQ ID NO: 423693 - DNA, 75 bp, synthetic construct
  source 1..75: mol_type = other DNA
atcatcctcctttgctacatgcagctctggatggaaaaagcacaacaactcagtaagcagctatacccagtaatg

SEQ ID NO: 423694 - DNA, 75 bp, synthetic construct
  source 1..75: mol_type = other DNA
ttcacaaacggtatgacagcctcggtcaaattgaccgatcctaaaggggacaagcaagagactcgcatcttctca

SEQ ID NO: 423695 - DNA, 75 bp, synthetic construct
  source 1..75: mol_type = other DNA
tccggtatggctggcttctctgttatctggctgcgtttcttccgccaggggccggtggaatggctctggcgtcag

SEQ ID NO: 423696 - DNA, 75 bp, synthetic construct
  source 1..75: mol_type = other DNA
tccgccaggggccggtggaatggctctggcgtcagttaactttgcgtgctgccggaacggcaatatctaaaacat

SEQ ID NO: 423697 - DNA, 75 bp, synthetic construct
  source 1..75: mol_type = other DNA
tgaccaactatctattgcaaacgctgatttgtaccacgcttttttaccacctcggtttgtttatgcattttgacc

SEQ ID NO: 423698 - DNA, 75 bp, synthetic construct
  source 1..75: mol_type = other DNA
tgatatggcaaagaataataaactgacatcaagtgcacaggcttcatatctttatcacggtaagctcctggggaa

SEQ ID NO: 423699 - DNA, 75 bp, synthetic construct
  source 1..75: mol_type = other DNA
gttttgtgctggtggcgattggggtgaccattaaccttcctgccatcgccctgcaatggcgactggactgggcgt

SEQ ID NO: 423700 - DNA, 75 bp, synthetic construct
  source 1..75: mol_type = other DNA
gcgcctggacgccggatgcatcggctattttgtatgaaaaatactggaagcttcacggcggcgttgaagcgatcg

SEQ ID NO: 423701 - DNA, 75 bp, synthetic construct
  source 1..75: mol_type = other DNA
tggtgatattatttctgataaacaggccacaatcagcttcggaactgaatcaggtaaagagggcatattgtctga

SEQ ID NO: 423702 - DNA, 75 bp, synthetic construct
  source 1..75: mol_type = other DNA
cttaccggtacaccagtgaattcagatgatgctgcttttttaccgaccatcaatatggctgatggcggatttaaa

SEQ ID NO: 423703 - DNA, 75 bp, synthetic construct
  source 1..75: mol_type = other DNA
gctttgtttggcgcgctgaataatcagagcgaatggcaaaggctgggtaagaataaagaaaaagcaattgggtta

SEQ ID NO: 423704 - DNA, 75 bp, synthetic construct
  source 1..75: mol_type = other DNA
gatcctgctattaaacatcagcgcctttgggctaccaaaggcggcttatctcaatcccgcctggtacggcgctat

SEQ ID NO: 423705 - DNA, 75 bp, synthetic construct
  source 1..75: mol_type = other DNA
agagagtgctaatcagtatgcccccgttctttacctgacaaacggatatgatttgaccggtgagagtgcaaaact

SEQ ID NO: 423706 - DNA, 75 bp, synthetic construct
  source 1..75: mol_type = other DNA
taaaacaggcggaaccatcggcattcctctaatatctaatacaacaatagtttctaaccccgggcaaacatataa

SEQ ID NO: 423707 - DNA, 75 bp, synthetic construct
  source 1..75: mol_type = other DNA
aatgccgttaccgggaagcgttgttgcatccgtaagcccggatgatctgctgaaaacattgccgaagcggaaagg

SEQ ID NO: 423708 - DNA, 75 bp, synthetic construct
  source 1..75: mol_type = other DNA
actgtcatatcactggaggattaattgctgtttctgaactatcaggcagagtatcattcagaacatcagccaaga

SEQ ID NO: 423709 - DNA, 75 bp, synthetic construct
  source 1..75: mol_type = other DNA
acttcgcctgtgggaagaaggttactggctaccgcaagtggcgtttggtaaacgtgatattgctggtacgggtct

SEQ ID NO: 423710 - DNA, 75 bp, synthetic construct
  source 1..75: mol_type = other DNA
atcgcgctgccagctgggcagacctcaacctgagttatgaacgcggtaacacgttgatgtttggtttcactttac

SEQ ID NO: 423711 - DNA, 75 bp, synthetic construct
  source 1..75: mol_type = other DNA
gactggtgccggaattattgtcggtgacgaggcaaatgtcaaatggggagttaatggcattgccggtgattatct

SEQ ID NO: 423712 - DNA, 75 bp, synthetic construct
  source 1..75: mol_type = other DNA
cggtaaacagtttgcatggaaggaccaggggatgcatctgtccatgaaggacagggactacaatccgctgattgg

SEQ ID NO: 423713 - DNA, 75 bp, synthetic construct
  source 1..75: mol_type = other DNA
aatatcaatacgacaaatgatataagtataaaaaatgctcacttagtgatgcaagggcatgctacaaatcatgct

SEQ ID NO: 423714 - DNA, 75 bp, synthetic construct
  source 1..75: mol_type = other DNA
tcgacggaaaaaaccttccatcgtggcagtacagactactttgttaacgcgcgtaaaggcgacattggcgcgttc

SEQ ID NO: 423715 - DNA, 75 bp, synthetic construct
  source 1..75: mol_type = other DNA
acaaagatatgagctacgtgaagaatatcaccgcccattatcgccagatgctggatgccattattgaagaacgtg

SEQ ID NO: 423716 - DNA, 75 bp, synthetic construct
  source 1..75: mol_type = other DNA
aaatcagtaccgcgtctggccaaatgagatgcctgcggatttgcataaaattcgtccgcatcatccgcttaatcg

SEQ ID NO: 423717 - DNA, 75 bp, synthetic construct
  source 1..75: mol_type = other DNA
aagatgactacggcgaaggcggctttagtaaaggtttttatatctcgattccattcgacttgatgaccattggac

SEQ ID NO: 423718 - DNA, 75 bp, synthetic construct
  source 1..75: mol_type = other DNA
ttctatggccaggtgtatggcggttatctggaaacgatgtatgccggtgtcggttccgagctgctttatcgcccg

SEQ ID NO: 423719 - DNA, 75 bp, synthetic construct
  source 1..75: mol_type = other DNA
tccgtggcgctgttcccatggctggaaggcaccattcgttatacggatgtgcgcacacgcaaatatagccagtgg

SEQ ID NO: 423720 - DNA, 75 bp, synthetic construct
  source 1..75: mol_type = other DNA
attaatacaatatgcattaatggctatagttagtgcattttgtgttatatatatgcagattattattagaacata

SEQ ID NO: 423721 - DNA, 75 bp, synthetic construct
  source 1..75: mol_type = other DNA
gtgacaatattgtctacttcatttatctttacaacaagtatatttatcatcctttttcttaaggcagagtttgta

SEQ ID NO: 423722 - DNA, 75 bp, synthetic construct
  source 1..75: mol_type = other DNA
cggcagaagcacagcgccagtcgctgattgatgctgcaatggcttccattagtctgattcaactgaaatttcagg

SEQ ID NO: 423723 - DNA, 75 bp, synthetic construct
  source 1..75: mol_type = other DNA
ccgcagaagcacagcgccagtcgctgattgatcctgcaatggcttccattagtctgattcaactgaaatttcagg

SEQ ID NO: 423724 - DNA, 75 bp, synthetic construct
  source 1..75: mol_type = other DNA
accggggcgggatgctgcgccacgatgcgccggaacgctattaccacacgcgggtaaagcgcggcccttccggcc

SEQ ID NO: 423725 - DNA, 75 bp, synthetic construct
  source 1..75: mol_type = other DNA
cacatttcttcagattgttgagtgtgttaatttaaatatagagcttattgcaaaagatgaactggtaaaaatcat

SEQ ID NO: 423726 - DNA, 75 bp, synthetic construct
  source 1..75: mol_type = other DNA
cgcactctggccacactggagcgtcttctgagcctgctgtcggcctttgaggtcgtggtattggccgctgtatga

SEQ ID NO: 423727 - DNA, 75 bp, synthetic construct
  source 1..75: mol_type = other DNA
tgagaaatgggtgacggatactgatgcacagcatagcgccgcagtagaagctgcagaagcacagcgccagtcact

SEQ ID NO: 423728 - DNA, 75 bp, synthetic construct
  source 1..75: mol_type = other DNA
tgagaaatgggtgacggatacagatgcacagcatagcgacgcagtagaagcggcagaagcacagcgccagtcact

SEQ ID NO: 423729 - DNA, 75 bp, synthetic construct
  source 1..75: mol_type = other DNA
atgcgtcccgcgactatcgccccgttagcgccatacgataaatgggatggtgagaaatgggtgaccgatactgaa

SEQ ID NO: 423730 - DNA, 75 bp, synthetic construct
  source 1..75: mol_type = other DNA
ctgcagaagcacagcgccagtcgctgattgattctgcaatggcttccattagtctgattcaactgaaatttcagg

SEQ ID NO: 423731 - DNA, 75 bp, synthetic construct
  source 1..75: mol_type = other DNA
cagcagaagcacagcgccagtcgctgattgatactgcaatggcttccattagtctgattcaactgaaatttcagg

SEQ ID NO: 423732 - DNA, 75 bp, synthetic construct
  source 1..75: mol_type = other DNA
tgagaaatgggtgacggatacggatgcacagcatagcggcgcagtagaagccgcagaagcacagcgccagtcact

SEQ ID NO: 423733 - DNA, 75 bp, synthetic construct
  source 1..75: mol_type = other DNA
aacccacaggaaagtgcctgcaatggacagagcatcacagccagcgcgtaccgggctgaccgaccggctggcccc

SEQ ID NO: 423734 - DNA, 75 bp, synthetic construct
  source 1..75: mol_type = other DNA
tgttttacgcgtatgacaggatacggaggacggttgtggcgcacgtctgcactctggccacactggagcgtattc

SEQ ID NO: 423735 - DNA, 75 bp, synthetic construct
  source 1..75: mol_type = other DNA
tttcctatgctgttggttgtgatttatggcgttgggatttatctcactacctggtttaatgaattcatcaccacc

SEQ ID NO: 423736 - DNA, 75 bp, synthetic construct
  source 1..75: mol_type = other DNA
gtggggtacaaatcatttttgagtgaggtcaacaacctgaataaacgtatgggtgaaccgccccgggtttcctgg

SEQ ID NO: 423737 - DNA, 75 bp, synthetic construct
  source 1..75: mol_type = other DNA
atcggcgatcaacaaggttggttgcatcgtaaaggggcaacgccagatgacaatgggctggtgattattcccggt

SEQ ID NO: 423738 - DNA, 75 bp, synthetic construct
  source 1..75: mol_type = other DNA
acgttgctgaagaaagctggctggaggaaaacctgccgtcagcatttgcacagcatccgtggcgcagctcgcttg

SEQ ID NO: 423739 - DNA, 75 bp, synthetic construct
  source 1..75: mol_type = other DNA
cggcgttcagcggctaccagttgctgctggagtatttcaccttccgcgagaagtttatgttcgtggcgctgaacg

SEQ ID NO: 423740 - DNA, 75 bp, synthetic construct
  source 1..75: mol_type = other DNA
ctggtcacagattgatttatcccgcctgccgctgtacctcagtgccgacagcccggtggcctgtgcgctgcaccg

SEQ ID NO: 423741 - DNA, 75 bp, synthetic construct
  source 1..75: mol_type = other DNA
gtcagcctgctgtggccgcactacctgcgcactattccgtcgctttccgtggtcgaactgaccacggatcaccaa

SEQ ID NO: 423742 - DNA, 75 bp, synthetic construct
  source 1..75: mol_type = other DNA
tcaggaagtttagtctccaggatttccggggcggttcatggtgcgctgatgaatggcctcaattatgccacctgc

SEQ ID NO: 423743 - DNA, 75 bp, synthetic construct
  source 1..75: mol_type = other DNA
tatgacaggatacggaggacggttgttgcacacgtcttcggtgaacgtactatggccacgctggagcatcttctg

SEQ ID NO: 423744 - DNA, 75 bp, synthetic construct
  source 1..75: mol_type = other DNA
ggttgaactgtcgacagatcaccggcagatgaagcagagcgaaacactgagtaattttcaggtattgtcgcgtcc

SEQ ID NO: 423745 - DNA, 75 bp, synthetic construct
  source 1..75: mol_type = other DNA
cgtcaggcggttcttgctattgcggttaatggtcagcttacaaaagaatggagagaattatctgaattaagtgct

SEQ ID NO: 423746 - DNA, 75 bp, synthetic construct
  source 1..75: mol_type = other DNA
caggaaccactggtaatatgccaaaaattaaccaaacagttgtttctaatacacctataaatttgccctccctta

SEQ ID NO: 423747 - DNA, 75 bp, synthetic construct
  source 1..75: mol_type = other DNA
acaactgctattcaagatggttttttcttagacaatgaacacaaaaaattacctgcagcaaaattaccaaaacca

SEQ ID NO: 423748 - DNA, 75 bp, synthetic construct
  source 1..75: mol_type = other DNA
gtgcgctgcacggtgcaagcggggctgatgaacccgaagtataaagttgaaattaagattgtggctgcggtgtaa

SEQ ID NO: 423749 - DNA, 75 bp, synthetic construct
  source 1..75: mol_type = other DNA
attactaaaacctaaggatttcatttaccctagatatgcatattacagcctttgcgctctgaatattccagataa

SEQ ID NO: 423750 - DNA, 75 bp, synthetic construct
  source 1..75: mol_type = other DNA
catggctgtcaaaaatagccattgattgctttgatcaaatttcaaccacaaacaataaagtaaaaagtactgctt

SEQ ID NO: 423751 - DNA, 75 bp, synthetic construct
  source 1..75: mol_type = other DNA
ttgtttccaacgacatattgccataatcaagccaaacagaaatttaattgatcatagatttttagctttctattt

SEQ ID NO: 423752 - DNA, 75 bp, synthetic construct
  source 1..75: mol_type = other DNA
ttgactcacgtaccattcttgatcaggctggcgcggaatcactgctgggtatgggggatatgctctactctgggc

SEQ ID NO: 423753 - DNA, 75 bp, synthetic construct
  source 1..75: mol_type = other DNA
cttgcccgttcactttcgacggtggcggtgcgtgtcgttgaagttattcctggcaaaccctatgtaggtctggag

SEQ ID NO: 423754 - DNA, 75 bp, synthetic construct
  source 1..75: mol_type = other DNA
ggtgattgattttgataatgtaaccagatgggtgcctgaatcttactaccaatcgctaaaagaaattagaaaacc

SEQ ID NO: 423755 - DNA, 75 bp, synthetic construct
  source 1..75: mol_type = other DNA
acgaagcaatgggaaatatacttattaaaaaatctttgtactagcatttcagatggcgatcatcaggctcctcca

SEQ ID NO: 423756 - DNA, 75 bp, synthetic construct
  source 1..75: mol_type = other DNA
ggcaaaagcgttccgtggtgaactcaccgcccagtggcgggccgaaaacccggaattgatcagcggagaaaacag

SEQ ID NO: 423757 - DNA, 75 bp, synthetic construct
  source 1..75: mol_type = other DNA
ttatttttctagaaatagtgaccaaattatcatcggtagatttttttcatctgctacacttggtcaatactcact

SEQ ID NO: 423758 - DNA, 75 bp, synthetic construct
  source 1..75: mol_type = other DNA
tgccttttcgcttgctgcttacccggacaccacaactgattgccgcgctgcgtgaagaatggggcatcagccaga

SEQ ID NO: 423759 - DNA, 75 bp, synthetic construct
  source 1..75: mol_type = other DNA
aacgatacataaagcaatgcagtctggttcgggtatacacggtctcgccacccccggtatgcctgcaggaagtcc

SEQ ID NO: 423760 - DNA, 75 bp, synthetic construct
  source 1..75: mol_type = other DNA
gggaatggagatggggcccgaaaagaggcttacgatgttatcgcattctcaccggagggcagtaaaaaagtcttc

SEQ ID NO: 423761 - DNA, 75 bp, synthetic construct
  source 1..75: mol_type = other DNA
gtaagtctggagtcgctgggccgtcataccatccagatgctgcacgacgtgctggacgcgttcgcgcggatggac

SEQ ID NO: 423762 - DNA, 75 bp, synthetic construct
  source 1..75: mol_type = other DNA
agaatgcttcacttcatgcacgggactttatcaaaagacgaaccgagaaaatattgcagtgaagcttgtgccgaa

SEQ ID NO: 423763 - DNA, 75 bp, synthetic construct
  source 1..75: mol_type = other DNA
ttatcaaaagacgaaccgagaaaatattgcagtgaagcttgtgccgaaaaagaccagatggcacatgaactttaa

SEQ ID NO: 423764 - DNA, 75 bp, synthetic construct
  source 1..75: mol_type = other DNA
caagacttcagtcatgcaggtttaagaattgaaggtgctagagctaacttaactcgctcattttcagaaattata

SEQ ID NO: 423765 - DNA, 75 bp, synthetic construct
  source 1..75: mol_type = other DNA
cgtggttgctgaatgaaaagaaactaacaaaaagaacctctagcgatattatatctagatgttgcagaggtgttt

SEQ ID NO: 423766 - DNA, 75 bp, synthetic construct
  source 1..75: mol_type = other DNA
ctagatctttatatccgatattgagtaggtcacagtcagatgataaaggatcatttaatatttatattcagacat

SEQ ID NO: 423767 - DNA, 75 bp, synthetic construct
  source 1..75: mol_type = other DNA
gggaatggagatgggggcccgtaaagaggcttacgatgttatttcattctctccggagggcagtaaaaaagtctt

SEQ ID NO: 423768 - DNA, 75 bp, synthetic construct
  source 1..75: mol_type = other DNA
ggttcgggcatttacggtctcgccacccccggcatgcctgcaggaagcccgggaatggagatgggcgaccgaaaa

SEQ ID NO: 423769 - DNA, 75 bp, synthetic construct
  source 1..75: mol_type = other DNA
atgaaaaaagtggttctaatggcgctggctctcggcctttcactacccgcgatggcgagtgaaaaagtgattgat

SEQ ID NO: 423770 - DNA, 75 bp, synthetic construct
  source 1..75: mol_type = other DNA
ctgcaccggttgaacctgtgactcagacgccacctgttgcctctgttgatgttgcacctgcgcaacctacagtag

SEQ ID NO: 423771 - DNA, 75 bp, synthetic construct
  source 1..75: mol_type = other DNA
tggatattctgttctggtgtgccggttcgcagggcagcatgtacccgttcaatggctgggtgagcaatgaatcca

SEQ ID NO: 423772 - DNA, 75 bp, synthetic construct
  source 1..75: mol_type = other DNA
gctgaacattatcacgtcgatgggctgcctgcagggtggcgacctggatattggttatctgtcggaacttgatcc

SEQ ID NO: 423773 - DNA, 75 bp, synthetic construct
  source 1..75: mol_type = other DNA
tttcccggtaaccattggcaatgttccggtcgccaaaggacgtcagccggatacgccgaatccttccatgccgat

SEQ ID NO: 423774 - DNA, 75 bp, synthetic construct
  source 1..75: mol_type = other DNA
gacaattggacaaaatggaaagggaaatgattgttgagcgaacgcaggcgggattagctgagcactcactggagg

SEQ ID NO: 423775 - DNA, 75 bp, synthetic construct
  source 1..75: mol_type = other DNA
accggtgttcgccatatcaaggaagtgtttatccttatccccaagaaaaacagtaagtccacgctggctgcggga

SEQ ID NO: 423776 - DNA, 75 bp, synthetic construct
  source 1..75: mol_type = other DNA
gcgacgccagccaccacggaattgtgggaaaaagtgatggaaggcattggtatcgaaaacgcaacccacgcgccg

SEQ ID NO: 423777 - DNA, 75 bp, synthetic construct
  source 1..75: mol_type = other DNA
ttgctgatccttattgtcctgtttgccgtctggttgatggctgccttactaagctttaacccttcggaccccagc

SEQ ID NO: 423778 - DNA, 75 bp, synthetic construct
  source 1..75: mol_type = other DNA
gaatcaggccgttgatatggcaaagaataataaactgacatcaagtgcacaggcttcatatctttatcacggtaa

SEQ ID NO: 423779 - DNA, 75 bp, synthetic construct
  source 1..75: mol_type = other DNA
aattctcatttcggatgtgaatgatttctattatggattagttgtcacattcagaaaccaaaaaaagaactgtaa

SEQ ID NO: 423780 - DNA, 75 bp, synthetic construct
  source 1..75: mol_type = other DNA
gggaggaagcattaatgttaatggaaactccacaacaggttctgatgtatggaacagtatcagtgatgtgatgaa

SEQ ID NO: 423781 - DNA, 75 bp, synthetic construct
  source 1..75: mol_type = other DNA
cagccgcaggataccctgcttcatccgctgttgatgcgtaatggcgacagccgtccgttgcataaaccgacgacg

SEQ ID NO: 423782 - DNA, 75 bp, synthetic construct
  source 1..75: mol_type = other DNA
gaaaaattgacccgctgatggcgctgttcaatgcggtctccctgatgtcccttaacccggaaccgaaaaagaaag

SEQ ID NO: 423783 - DNA, 75 bp, synthetic construct
  source 1..75: mol_type = other DNA
tgcgctggcggctgaagagatactgacgctggcgaactggtgcctgttgaactactccgggctgaaaacgccagt

SEQ ID NO: 423784 - DNA, 75 bp, synthetic construct
  source 1..75: mol_type = other DNA
atatttaccagctttggttgcaaagccagcgccgattgctgccgatgctcattcatcgtgatgaagcgatggctg

SEQ ID NO: 423785 - DNA, 75 bp, synthetic construct
  source 1..75: mol_type = other DNA
gcaacctactttgtccgggccattggcgattcgatgaaagatatgggcctgtactccggcgatttaatggtggtc

SEQ ID NO: 423786 - DNA, 75 bp, synthetic construct
  source 1..75: mol_type = other DNA
cagtcttcagtctggcaaatagcggtggaccgcgtccgcaggtcaaagaggggattggcccgcagttgccacgac

SEQ ID NO: 423787 - DNA, 75 bp, synthetic construct
  source 1..75: mol_type = other DNA
gtgccaactcgtcgtgaactggcgtcttacggtattaagctgccctcacagcgtgcggcggaagaaaaagcccgt

SEQ ID NO: 423788 - DNA, 75 bp, synthetic construct
  source 1..75: mol_type = other DNA
ggcaactcagcgtccatcggttgatgttattactggtctgattaaagcgaatattccgacccgtatcgcctttac

SEQ ID NO: 423789 - DNA, 75 bp, synthetic construct
  source 1..75: mol_type = other DNA
aagtatttgtcaaactcttggtaatgatattgatactcttaatagtatgggaatgaaagttgcctgtattggacc

SEQ ID NO: 423790 - DNA, 75 bp, synthetic construct
  source 1..75: mol_type = other DNA
tgcggatgttctgacccgcaatggcgtgggggtgacggtgtacgatcgccatccagaaatcggtggcttgctcac

SEQ ID NO: 423791 - DNA, 75 bp, synthetic construct
  source 1..75: mol_type = other DNA
ggcaacattgaacgctacatttcagatcaggcgttggcgaaaggttggcgtcctgacttaagccatgtcaccaaa

SEQ ID NO: 423792 - DNA, 75 bp, synthetic construct
  source 1..75: mol_type = other DNA
tgccgatgaatcccgcctaccctaccctctatccggaagaactacagatattcggcgtggtgacggcattcatac

SEQ ID NO: 423793 - DNA, 75 bp, synthetic construct
  source 1..75: mol_type = other DNA
cggtggtggcacgcctgaaggaaaaactcccggggctgtcggtggagtattttccggaaaaaccggcggaatacc

SEQ ID NO: 423794 - DNA, 75 bp, synthetic construct
  source 1..75: mol_type = other DNA
gatattgatactcttaatagtatgggaatgaaagttgcctgtattggacctcgaattaatgatattctagaaaag

SEQ ID NO: 423795 - DNA, 75 bp, synthetic construct
  source 1..75: mol_type = other DNA
tgatgcaaggctgtaacgagcaggggattgcccatatggcgacgggattcgccaaacagcatcgccgtcagcgta

SEQ ID NO: 423796 - DNA, 75 bp, synthetic construct
  source 1..75: mol_type = other DNA
aaatggcagagggactggcctgcaaaacctatactcgagaagatctcgagaactggttgtgttattggtctcgtg

SEQ ID NO: 423797 - DNA, 75 bp, synthetic construct
  source 1..75: mol_type = other DNA
atgagtaactacttggaagttaagagaaaaattggtcaatatgcatgtgttactcggtggggtttcccctgtgcc

SEQ ID NO: 423798 - DNA, 75 bp, synthetic construct
  source 1..75: mol_type = other DNA
ctgtgatgactcacggctggatttacaccgacgcccagctgttacgcgatgatattcaaacacttttcacggcag

SEQ ID NO: 423799 - DNA, 75 bp, synthetic construct
  source 1..75: mol_type = other DNA
aaatcaccgttctgctgtttgataacgccagctttggctgcattaataacctgcagatgggtcatggaatgggaa

SEQ ID NO: 423800 - DNA, 75 bp, synthetic construct
  source 1..75: mol_type = other DNA
tcccgaagtggcagggcaccttgatgcacagctaatggaatacagtgaaacgctcaacacacacctgacccagac

SEQ ID NO: 423801 - DNA, 75 bp, synthetic construct
  source 1..75: mol_type = other DNA
tgccggatctgtctgaagatcgcggttggtcatttgatatttccagcctgaaggttgccgacagcgtgctggtat

SEQ ID NO: 423802 - DNA, 75 bp, synthetic construct
  source 1..75: mol_type = other DNA
tcgcgtattgatgagccggcctatcaagggttgaaaggttttgcggctgatattttgttgcaggccagtaacgtg

SEQ ID NO: 423803 - DNA, 75 bp, synthetic construct
  source 1..75: mol_type = other DNA
gacgattcgcaacatccgtctgcaaatggaacaagatccacagcatcgcggttcgtttgagttctccgggcgggt

SEQ ID NO: 423804 - DNA, 75 bp, synthetic construct
  source 1..75: mol_type = other DNA
gctcgtttgagttctccgggcgggttaatcgcgaccagcgcgatctcacgttatctctcaaaggcacggtggatg

SEQ ID NO: 423805 - DNA, 75 bp, synthetic construct
  source 1..75: mol_type = other DNA
gaaacagcgaatggtgaaaacggtgccgcgcagcaagggcagagccaatcaacgttgccgcgcccggtcatttct

SEQ ID NO: 423806 - DNA, 75 bp, synthetic construct
  source 1..75: mol_type = other DNA
taaacgacatgcaaggtcaatcgcctgtgctggcgctttccggggctggtacgttgaatctggcggagcaaacct

SEQ ID NO: 423807 - DNA, 75 bp, synthetic construct
  source 1..75: mol_type = other DNA
cattcattatatccattcagctgattggtttacagtcgagcgtaacagaggtggcggaataggctctctcttgag

SEQ ID NO: 423808 - DNA, 75 bp, synthetic construct
  source 1..75: mol_type = other DNA
accacggcaacaggaacaaccgcaaacgtctcgatgctggtcgcggcagggcgttcaattttaggggatgaataa

SEQ ID NO: 423809 - DNA, 75 bp, synthetic construct
  source 1..75: mol_type = other DNA
tttattgggtattttaccttatggtgagcagtttgatgaccctggtgaaccatcaatattagacgtttatggtga

SEQ ID NO: 423810 - DNA, 75 bp, synthetic construct
  source 1..75: mol_type = other DNA
gtattggcagcgatgtatatattgcttagcaaggatccaaattttaaatggggggatggcgtaagtatggacaaa

SEQ ID NO: 423811 - DNA, 75 bp, synthetic construct
  source 1..75: mol_type = other DNA
gttgatcaccttggaatggctgctcttggtccgattgattacttcaatgttcaggacaagatggctggtcgccaa

SEQ ID NO: 423812 - DNA, 75 bp, synthetic construct
  source 1..75: mol_type = other DNA
cagcgccgctgccgccgtaccgggtgcttaccgggatggcggaccgcttcgggcggacgctgacgtaccggcgtg

SEQ ID NO: 423813 - DNA, 75 bp, synthetic construct
  source 1..75: mol_type = other DNA
gcgcggacgccgcatcaagcgaactggcgcgtgtgatggccatcatcaattgtcccgaagctgttgggcgcgagg

SEQ ID NO: 423814 - DNA, 75 bp, synthetic construct
  source 1..75: mol_type = other DNA
ttgaaaattttggatttaataaaataggtagaaatgtattaatatcagataaaacctcgatatacaatccacaaa

SEQ ID NO: 423815 - DNA, 75 bp, synthetic construct
  source 1..75: mol_type = other DNA
gagattgatccggttgcggcagcaaggattcatccaaatgatccacaaaggctttcccgggcactggaagttttt

SEQ ID NO: 423816 - DNA, 75 bp, synthetic construct
  source 1..75: mol_type = other DNA
gccatcgccccggcgagtcgtgaactgctccatcaacgcattgagcagcgttttcatcagatgttggcttcaggt

SEQ ID NO: 423817 - DNA, 75 bp, synthetic construct
  source 1..75: mol_type = other DNA
actggatatgaatgttccagataacgaaccagaaattggagcactgtcaaaaaaagtagaaagagaacaaaactg

SEQ ID NO: 423818 - DNA, 75 bp, synthetic construct
  source 1..75: mol_type = other DNA
tacccggagtttcaataaatgatggtgcagtaattggagcattatcgtttgtaaaacgtgactgtgatgagttta

SEQ ID NO: 423819 - DNA, 75 bp, synthetic construct
  source 1..75: mol_type = other DNA
aaaggccggcattttcagcgtgacatcattctgtgggccgtacgctggtactgcaaatacggcatcagttaccgt

SEQ ID NO: 423820 - DNA, 75 bp, synthetic construct
  source 1..75: mol_type = other DNA
aaagtggcggacagtctgctggtgttccagcatgaagatgacgagcaggtgacgattcgcaacatccgtctgcaa

SEQ ID NO: 423821 - DNA, 75 bp, synthetic construct
  source 1..75: mol_type = other DNA
gaaaccgtttatcaacgactggaaggctgggaagggaatggcggcttcgcgcagttagcggtggaagaagagtag

SEQ ID NO: 423822 - DNA, 75 bp, synthetic construct
  source 1..75: mol_type = other DNA
cagccgattaaagatgcggtggaaaccgtttatcaacggctggaaggctgggaaggaaacggcggatttgcgcag

SEQ ID NO: 423823 - DNA, 75 bp, synthetic construct
  source 1..75: mol_type = other DNA
tgcgccgccgcgccgaaaggtaactgggtggtgattgacggcggtagcgcaccggaaaacgacatcgtcgccatc

SEQ ID NO: 423824 - DNA, 75 bp, synthetic construct
  source 1..75: mol_type = other DNA
cgtaatcagattagaactggtaaaccaatcctacagcaacgatatcatcggtagcaacgccagatgctttcgtga

SEQ ID NO: 423825 - DNA, 75 bp, synthetic construct
  source 1..75: mol_type = other DNA
ggcatcttttttattggtttgggggagtggattaatcaccctctcaaggtgagatttattggtcctggagtttgg

SEQ ID NO: 423826 - DNA, 75 bp, synthetic construct
  source 1..75: mol_type = other DNA
cgcaggcccgctactggcggaaaagtgcgctgccgcgccgaaaggtaactgggtagtgattgacggcggtagcgc

SEQ ID NO: 423827 - DNA, 75 bp, synthetic construct
  source 1..75: mol_type = other DNA
cagaaaaacgtgcggcagaagagctgaacaaacgcgacgcttacgatgtgttgatcgtcggctccggcccggcgg

SEQ ID NO: 423828 - DNA, 75 bp, synthetic construct
  source 1..75: mol_type = other DNA
taaacatgctcgacacaaatatgaaaactcaactcaaggcgtaccttgagaaattgaccaggcctgttgagttga

SEQ ID NO: 423829 - DNA, 75 bp, synthetic construct
  source 1..75: mol_type = other DNA
ggatgaagatgacagtttctacgctgccaacggcatctctaccgatgatatcgtcgctttaggtctggtttatca

SEQ ID NO: 423830 - DNA, 75 bp, synthetic construct
  source 1..75: mol_type = other DNA
atcgacccggatgatatcgccgagatgtttatgatgactacccataacatgccgttgaactaccttatcgaccag

SEQ ID NO: 423831 - DNA, 75 bp, synthetic construct
  source 1..75: mol_type = other DNA
gaacaagcgtgacgcttatgatgtgctgatcgttggttctggcccggcgggtgctgcggcggcaatttactccgc

SEQ ID NO: 423832 - DNA, 75 bp, synthetic construct
  source 1..75: mol_type = other DNA
attactcgctctcttgccataactgcccggacgtggtgcaggcgctgaacctgatgagcgtattgaacccgcgca

SEQ ID NO: 423833 - DNA, 75 bp, synthetic construct
  source 1..75: mol_type = other DNA
ctgaagctgcctgggaagcagcaacttatgcatctactaaaaacgatgatgatctctggaaagagattttcggtg

SEQ ID NO: 423834 - DNA, 75 bp, synthetic construct
  source 1..75: mol_type = other DNA
tcgcctgaatgactgggctgagcggaataaagattcccgcaatggcaaagatgtgaagaagttgctggagaagat

SEQ ID NO: 423835 - DNA, 75 bp, synthetic construct
  source 1..75: mol_type = other DNA
ttaacgatctgtcggcattgtatggcgtatctactgtgacgatccgcaacgatctggcgtttctggaaaagcagg

SEQ ID NO: 423836 - DNA, 75 bp, synthetic construct
  source 1..75: mol_type = other DNA
tgcgccgtcagtcacaatctttttatggcgatcaggctgaacaatcgctgcaaaattaccacttcgacatgctgt

SEQ ID NO: 423837 - DNA, 75 bp, synthetic construct
  source 1..75: mol_type = other DNA
aatgctggcgctgacaggggcgggaacgttgaatctgacagagcagacttgcgatacccagtttgatattcgcgt

SEQ ID NO: 423838 - DNA, 75 bp, synthetic construct
  source 1..75: mol_type = other DNA
tcttgaccgctttaccaccgatttgacgttgaaggatggcgtcgtgacgttaaacgacatgcaaggtcaatcgcc

SEQ ID NO: 423839 - DNA, 75 bp, synthetic construct
  source 1..75: mol_type = other DNA
ctacaggacgaagcgaaacgtcgcctgaatgactgggccgagcggaataaagattcccgcaatggcaaagatgtg

SEQ ID NO: 423840 - DNA, 75 bp, synthetic construct
  source 1..75: mol_type = other DNA
ccggactttcgtactttagtacgcttagctaaacgttggcgtaccaacatggaatgcccacttaagtcatttcat

SEQ ID NO: 423841 - DNA, 75 bp, synthetic construct
  source 1..75: mol_type = other DNA
ttgacccggctagtccagaaaacaatgtggcatctcgtataacgaaagacgaacaagaacaaatagctaaagctg

SEQ ID NO: 423842 - DNA, 75 bp, synthetic construct
  source 1..75: mol_type = other DNA
aaatatcgagaaacgtttccgggaattcttagtttatattgcccgtaccaaactgggcgaacgtatcgacttccc

SEQ ID NO: 423843 - DNA, 75 bp, synthetic construct
  source 1..75: mol_type = other DNA
gatcattgttgatgaaggcattcctgcggatagtctggaaggactgcgaaagactgggattgaggtgattctggt

SEQ ID NO: 423844 - DNA, 75 bp, synthetic construct
  source 1..75: mol_type = other DNA
ctttcttacattatgttgagtaaagcattaacgaagacatatattattacagagattacaactgcattacttttt

SEQ ID NO: 423845 - DNA, 75 bp, synthetic construct
  source 1..75: mol_type = other DNA
ctattgtggtaatgataatgatcagggcatcaattaactctgcgggtagtttccagggcgctggcgatgttatcg

SEQ ID NO: 423846 - DNA, 75 bp, synthetic construct
  source 1..75: mol_type = other DNA
attttttctcaaaatgatgagttactgagtccaagggataagttcacaagttcagtatttgcacttctactttgt

SEQ ID NO: 423847 - DNA, 75 bp, synthetic construct
  source 1..75: mol_type = other DNA
cggcaggcgatgccgtatctgtagtaggcactgctagccagacaatgaagccaaacctgttctataacaagttct

SEQ ID NO: 423848 - DNA, 75 bp, synthetic construct
  source 1..75: mol_type = other DNA
tcgtactgcatgggagaatgcgcagatcccaaccaattttggcggcattcgcgcactgatgtctaatgggcttgc

SEQ ID NO: 423849 - DNA, 75 bp, synthetic construct
  source 1..75: mol_type = other DNA
ttgaaacatggtttaacagccaggagtcagggaggagtatatgcagcacacagattcgtcgttcccttcaggaaa

SEQ ID NO: 423850 - DNA, 75 bp, synthetic construct
  source 1..75: mol_type = other DNA
atgttagatatcagaatgtcacgaccatctgaagcatcagagatcatacaaatctggaagagttcagtggatgct

SEQ ID NO: 423851 - DNA, 75 bp, synthetic construct
  source 1..75: mol_type = other DNA
gcatatgggttttaaggtatcagggcgttccgatctggataatcagggaaggccataccccttgttgcatctgag

SEQ ID NO: 423852 - DNA, 75 bp, synthetic construct
  source 1..75: mol_type = other DNA
gtggtataatttattgggtaaaattgcagagcaagactttattccagatgaattaataattcatagcgaattcaa

SEQ ID NO: 423853 - DNA, 75 bp, synthetic construct
  source 1..75: mol_type = other DNA
gcacctaaggcagagtatcaaataaaaaacacaggagaattagaatctcagttagaaatgacaaaaaagcttgaa

SEQ ID NO: 423854 - DNA, 75 bp, synthetic construct
  source 1..75: mol_type = other DNA
gaacagaaaaataaaattgtagctagaaagtccatcgttgcaaagcgtaatattaaaaagggtgagatatttact

SEQ ID NO: 423855 - DNA, 75 bp, synthetic construct
  source 1..75: mol_type = other DNA
tttggatgttttttcaactccttttgatttggaatctatagaatttttatacacaagaaaacaaactacatggaa

SEQ ID NO: 423856 - DNA, 75 bp, synthetic construct
  source 1..75: mol_type = other DNA
aattgccaatcgaagataaaaaaattgtactatcaactggtatggcaacagttgatgaaatcaatttggcattaa

SEQ ID NO: 423857 - DNA, 75 bp, synthetic construct
  source 1..75: mol_type = other DNA
tttagatgttttttctaccccttttgacgaagactctattgattttttagcatctttgaaacaaaaaatatggaa

SEQ ID NO: 423858 - DNA, 75 bp, synthetic construct
  source 1..75: mol_type = other DNA
caatagatttggcagatgggaaaagtattattatatacaaataagaggcgcttttttatcggctattcatcatca

SEQ ID NO: 423859 - DNA, 75 bp, synthetic construct
  source 1..75: mol_type = other DNA
ccatcattttgccaccgctcggcgtgctgttaggtaaaggatttggttgggcgttcatcattaatatcctgctga

SEQ ID NO: 423860 - DNA, 75 bp, synthetic construct
  source 1..75: mol_type = other DNA
tgagtaccgtgatgagacccggtggctgctgacaggataccggagtacggttaatgtctctgcggtcagggatgc

SEQ ID NO: 423861 - DNA, 75 bp, synthetic construct
  source 1..75: mol_type = other DNA
cgggagacagtggctcaccgctttttgcctgggatgcggtgaagaagcagtgggtccttgttgctgtacttaatg

SEQ ID NO: 423862 - DNA, 75 bp, synthetic construct
  source 1..75: mol_type = other DNA
cggcaggcagtatggatatcagcgacagtgttctggtgatgcggacggaccttcaccactcagaccagcttcggg

SEQ ID NO: 423863 - DNA, 75 bp, synthetic construct
  source 1..75: mol_type = other DNA
ggcagttgccggtggtgacattgtgtggaattacaataagggaagcggagagggaaccctttctcaggacgggaa

SEQ ID NO: 423864 - DNA, 75 bp, synthetic construct
  source 1..75: mol_type = other DNA
ttatccggtgttttatcgtatggggagtggaacgcagtacaccggagctgcttccggtgcgctgaccagaatagc

SEQ ID NO: 423865 - DNA, 75 bp, synthetic construct
  source 1..75: mol_type = other DNA
cgttgattacgcgaaagcaaacatcaaaactaaagatctgcgtcagttcccgaacattgataacgcctatatgga

SEQ ID NO: 423866 - DNA, 75 bp, synthetic construct
  source 1..75: mol_type = other DNA
gaagccgatggatttcagtgggatcattccggcactgcaaaccaaaaacgtcgatctggcgctggcgggcattac

SEQ ID NO: 423867 - DNA, 75 bp, synthetic construct
  source 1..75: mol_type = other DNA
tgaacattatctacccaaaaccaggacgtacgcataactgtgttaactgtgctatagctacagatagaaccttag

SEQ ID NO: 423868 - DNA, 75 bp, synthetic construct
  source 1..75: mol_type = other DNA
tggttcaggtgcagcggcggtttgtaccggaagctgtcagccattcactggcactggcggcgtcactggatgggc

SEQ ID NO: 423869 - DNA, 75 bp, synthetic construct
  source 1..75: mol_type = other DNA
tgaagacccttcttccacgcagtgaaacagatgactcccgcccaatcctctttaggcctaatcattgtatacagg

SEQ ID NO: 423870 - DNA, 75 bp, synthetic construct
  source 1..75: mol_type = other DNA
gtaccgaagtacggtgagatcgtcatcgacattaaccatgtgccgatgctggccaacgcattcgataaagcccgg

SEQ ID NO: 423871 - DNA, 75 bp, synthetic construct
  source 1..75: mol_type = other DNA
tcttatccgccgattcggcctttcatcagaaataaaaccaaagtctttgattaaaactttctatgaactccgcag

SEQ ID NO: 423872 - DNA, 75 bp, synthetic construct
  source 1..75: mol_type = other DNA
gacgggagtgataaatacccgtggccacagccggtgctgtaccacatttgcctcgagatgcgtgacagagggatt

SEQ ID NO: 423873 - DNA, 75 bp, synthetic construct
  source 1..75: mol_type = other DNA
aacggcctgagtgttccgcctgtccggcgacaactggcagcacccaaacgtcctgcgggaccaacgccaattgag

SEQ ID NO: 423874 - DNA, 75 bp, synthetic construct
  source 1..75: mol_type = other DNA
actggaaggggcgaaacacccgcaagggccaacgccaattgaacggctgaaacaggaatacgaacgccggaaggc

SEQ ID NO: 423875 - DNA, 75 bp, synthetic construct
  source 1..75: mol_type = other DNA
tgaatggggcaaccagcttaatgaggagaacccacatcacctgtatcagccataccgcctgccggggcagcagca

SEQ ID NO: 423876 - DNA, 75 bp, synthetic construct
  source 1..75: mol_type = other DNA
ctggcgcaatgagtcctggcgatacgacggaagcgataaatacccgtggactcagcctgtgctgtatcacatttg

SEQ ID NO: 423877 - DNA, 75 bp, synthetic construct
  source 1..75: mol_type = other DNA
tacaggggaggtatatcacccaggatccaatcgggctaagaggtgaatggaatctgtataaatatccattaaacc

SEQ ID NO: 423878 - DNA, 75 bp, synthetic construct
  source 1..75: mol_type = other DNA
ctcagcctgtgctgtatcacatttgcctcgagatgcgttcaaaggggattgaacgccagatgaccgaaggggaat

SEQ ID NO: 423879 - DNA, 75 bp, synthetic construct
  source 1..75: mol_type = other DNA
gagcgccagatgacggaaggggagttaaaacgacttgcagaacggcaactgacgaaatgggcaaagcatgttggt

SEQ ID NO: 423880 - DNA, 75 bp, synthetic construct
  source 1..75: mol_type = other DNA
ctgactggatgattcagacaggtattcagaatccagagcagctatcacacatgctgactactatgacgctagggg

SEQ ID NO: 423881 - DNA, 75 bp, synthetic construct
  source 1..75: mol_type = other DNA
tgtgctgtaccacatctgcctcgaaatgcgtaccagagggattgagcgccagatgacgcagggtgagttaaaacg

SEQ ID NO: 423882 - DNA, 75 bp, synthetic construct
  source 1..75: mol_type = other DNA
gtctgccgccagtgcatggaccgctgccgggcgggtgaaacatggcctccggacctggctgagtttgtggcactg

SEQ ID NO: 423883 - DNA, 75 bp, synthetic construct
  source 1..75: mol_type = other DNA
caagtaatatttaagccttctcaaaccagtgggacgatctcaaaaacctacattttacctggtgaagcacttcct

SEQ ID NO: 423884 - DNA, 75 bp, synthetic construct
  source 1..75: mol_type = other DNA
gtgtggcggcgggagcgtgacctgacggggtggatgtcgctgtcgcgtaaaccggaggagacatggtacggctgg

SEQ ID NO: 423885 - DNA, 75 bp, synthetic construct
  source 1..75: mol_type = other DNA
aaggtagaagattaccgccgtgaaagtgccaaccgcgataccgcgccgcgaccgctggggcttcaggatcgcctg

SEQ ID NO: 423886 - DNA, 75 bp, synthetic construct
  source 1..75: mol_type = other DNA
tccgtttaccttcacgctgttatggctctcggtgttcggcaatagcgcgctgtatgaaatcatccacggcggcgc

SEQ ID NO: 423887 - DNA, 75 bp, synthetic construct
  source 1..75: mol_type = other DNA
gaaatcatccacggcggcgcggcatttgccgaggaagcgatggtccatccggagcgcggcttctacagcctgctg

SEQ ID NO: 423888 - DNA, 75 bp, synthetic construct
  source 1..75: mol_type = other DNA
gcgttaacgccaattattacaatcgatcagatcgattatgtagtgctggcaaccatgataacgacaacggatgta

SEQ ID NO: 423889 - DNA, 75 bp, synthetic construct
  source 1..75: mol_type = other DNA
cgggctttacctaccgcgcacgtagcggtaaatcgacctactaccggctggaaaccttcctgttagaaggcagcc

SEQ ID NO: 423890 - DNA, 75 bp, synthetic construct
  source 1..75: mol_type = other DNA
cgtttagttttgtgattttcttcgtcatggcgggattgtataaatcgctgaaagttgaagattatcgccgggaaa

SEQ ID NO: 423891 - DNA, 75 bp, synthetic construct
  source 1..75: mol_type = other DNA
ggctgacgcgcagtatggagtacgatgctgccggacgtgtcatcagtctgactaacgagaacggcagtcacagcg

SEQ ID NO: 423892 - DNA, 75 bp, synthetic construct
  source 1..75: mol_type = other DNA
aaagtgacacgatgaagacgggtgaaaataccttccattatgaaagcctgcgcggtcgttatgtcagtgcgtatt

SEQ ID NO: 423893 - DNA, 75 bp, synthetic construct
  source 1..75: mol_type = other DNA
catctgtcgccggcctggaatgccgggattcagttcagtcccgtagagacggtggttattgaccttgcttatgaa

SEQ ID NO: 423894 - DNA, 75 bp, synthetic construct
  source 1..75: mol_type = other DNA
aaataccttccattatgaaagcctgcgcggtcgttatgtcagtctgatggccggccctgtctggctgctcagtga

SEQ ID NO: 423895 - DNA, 75 bp, synthetic construct
  source 1..75: mol_type = other DNA
atgcgacatttatacggagccattttattctggaccgcactgctgacaggcatttcccttcctgcacaagctaaa

SEQ ID NO: 423896 - DNA, 75 bp, synthetic construct
  source 1..75: mol_type = other DNA
ctggaatgccgggattcagttcagtcccgtagagacggtggttattgaccttgcttatgaaggttccgccagtgg

SEQ ID NO: 423897 - DNA, 75 bp, synthetic construct
  source 1..75: mol_type = other DNA
accggaagaccgcgcacagcgcagactctgggaaaacgcactccgccagggctggcaggaaggccgtgacaacgc

SEQ ID NO: 423898 - DNA, 75 bp, synthetic construct
  source 1..75: mol_type = other DNA
cgccggatctccgggcatggctgacgcccactgacaaccaggatgacggcatttcagacacccgtcgccagatgc

SEQ ID NO: 423899 - DNA, 75 bp, synthetic construct
  source 1..75: mol_type = other DNA
accaacttgtgccacaacgccatcgaccgctggctggagaaacagccagaggcgctggcgctgattgccgtctct

SEQ ID NO: 423900 - DNA, 75 bp, synthetic construct
  source 1..75: mol_type = other DNA
caacatcacgccaggcagtaaaaaagccggtgtggtgtggcatacgcagggttccggtaagagtatctcgatgtg

SEQ ID NO: 423901 - DNA, 75 bp, synthetic construct
  source 1..75: mol_type = other DNA
cggcgtcagataaagatcacctgcaatcgcatatttacaacaaacagaccaaaaaacgcctggaagcccgcttta

SEQ ID NO: 423902 - DNA, 75 bp, synthetic construct
  source 1..75: mol_type = other DNA
agcgtgcgtgcccggttacgtattctggtgcgccagacgctgcgtaagtataagtatccgccggataaaacacct

SEQ ID NO: 423903 - DNA, 75 bp, synthetic construct
  source 1..75: mol_type = other DNA
cggaatatttccgcacgccgttggcgaccgcggtaacgggtggtgatcgcatttctaatagcgaaagcccaattc

SEQ ID NO: 423904 - DNA, 75 bp, synthetic construct
  source 1..75: mol_type = other DNA
atgaagaatcacgcgcatccaattattgtcgtcaagcgacgcaaagcgaaaagtcacggctcggcgcatggatcg

SEQ ID NO: 423905 - DNA, 75 bp, synthetic construct
  source 1..75: mol_type = other DNA
ccagatgacgaggtcgaagtgccatatctgaaagacatagaacttgcgtgtggtgatggttcctgcttggaagat

SEQ ID NO: 423906 - DNA, 75 bp, synthetic construct
  source 1..75: mol_type = other DNA
cgcaacgtgatgggcgttccggcagtgttcgtaaacgggaaagagtttggtcagggtcgcatgacgttgactgaa

SEQ ID NO: 423907 - DNA, 75 bp, synthetic construct
  source 1..75: mol_type = other DNA
cggtaagtgtactggaaaaaactgggggcgctccgcaggtcagtgttcccacaatgccatcagccgaaccgaggt

SEQ ID NO: 423908 - DNA, 75 bp, synthetic construct
  source 1..75: mol_type = other DNA
tatctgctatatcaacggcctgccggtggcggtgattgagctgaaaagcccgattgatgccaatgccgatatctg

SEQ ID NO: 423909 - DNA, 75 bp, synthetic construct
  source 1..75: mol_type = other DNA
gccacatgaccgtaaggcctggtatcagtctgaacgtgagcgcctcaagttcgaacaggaaacggcgcaactcat

SEQ ID NO: 423910 - DNA, 75 bp, synthetic construct
  source 1..75: mol_type = other DNA
ttaagcgcatgaaatgtgtggcaatggaaggtcttattgaagaagctaatgaggtcatcgaaagtaccgagaaaa

SEQ ID NO: 423911 - DNA, 75 bp, synthetic construct
  source 1..75: mol_type = other DNA
gtgcactggcaaaactcgctagagcaacatcctagagcaacatcaaacgaaaaattaagtcaggcttttcatgcg

SEQ ID NO: 423912 - DNA, 75 bp, synthetic construct
  source 1..75: mol_type = other DNA
aatgatcaagtgtccgttcctgactattctgacctaaatataaaaaaacttaacatacctcaaagtgttggtaat

SEQ ID NO: 423913 - DNA, 75 bp, synthetic construct
  source 1..75: mol_type = other DNA
aaaacttgagtataatatcattgccaaaaataaaatcttactaaatgaaaaaattgcattaagcgaaggcacatc

SEQ ID NO: 423914 - DNA, 75 bp, synthetic construct
  source 1..75: mol_type = other DNA
ggggaatttcagcttgagccaccgctggataccgaggaaggacgcgcagcagctgatgagtgggatgaacgttaa

SEQ ID NO: 423915 - DNA, 75 bp, synthetic construct
  source 1..75: mol_type = other DNA
gaaacacgctggaaaatgctgaccgacgcaggtaaaacgcttggatttcgtggtggcaaggctcagcgttcatgg

SEQ ID NO: 423916 - DNA, 75 bp, synthetic construct
  source 1..75: mol_type = other DNA
caattgatgccaatgccgatatctgggcggcatttaatcagttgcagacctataaaaacgaactcggcgatctgt

SEQ ID NO: 423917 - DNA, 75 bp, synthetic construct
  source 1..75: mol_type = other DNA
agcaaagcctgcaatggtttgctgaactgggatgggaagtactgcacgggccggatattgcgccagatggtagca

SEQ ID NO: 423918 - DNA, 75 bp, synthetic construct
  source 1..75: mol_type = other DNA
tctgaaaattaagcgcatgaaatgtgtggcaatggaaggtcttattgaagaagctgatgaggtcatcgaaagtac

SEQ ID NO: 423919 - DNA, 75 bp, synthetic construct
  source 1..75: mol_type = other DNA
gcaggcgtggtctggcatacgcagggttccggtaaaagcatctccatgtgttgctatgtcggcaaactgttgcaa

SEQ ID NO: 423920 - DNA, 75 bp, synthetic construct
  source 1..75: mol_type = other DNA
gggcatgatcacccgtccggatgtttctgatcaaatgcaaaccgtcaggcgggcggactctggcacggaatggta

SEQ ID NO: 423921 - DNA, 75 bp, synthetic construct
  source 1..75: mol_type = other DNA
atcatccgcagttacaacaacgactcctacccagacgaagaggctgatattgatgatgtcgagataattggccgt

SEQ ID NO: 423922 - DNA, 75 bp, synthetic construct
  source 1..75: mol_type = other DNA
tggcagggccagcaggtgctggggatgcgtctgacctggaacaaacgctacattacgctcgcgccgattgcgacc

SEQ ID NO: 423923 - DNA, 75 bp, synthetic construct
  source 1..75: mol_type = other DNA
cgcgcggtttaaccagcagcacaccaaccggcgatgccactaaacgttattatcagcacctgaaccgcctgagtg

SEQ ID NO: 423924 - DNA, 75 bp, synthetic construct
  source 1..75: mol_type = other DNA
gtcggtgtgccaaactcattaggcccgggtgagctactgcaacattacggcactgacgagcagaaagatcactat

SEQ ID NO: 423925 - DNA, 75 bp, synthetic construct
  source 1..75: mol_type = other DNA
ttctcactgtttaccctgacagtcgatacccatcacccggatggttttatctcgcgtacctgtaaccgcaaaaaa

SEQ ID NO: 423926 - DNA, 75 bp, synthetic construct
  source 1..75: mol_type = other DNA
gaacatctgtctgggcgatatcctgaaaaactcgggttatcagaactatttcgtgcagggcgcgaatctgcgttt

SEQ ID NO: 423927 - DNA, 75 bp, synthetic construct
  source 1..75: mol_type = other DNA
atgtacagaaaacagcagctcatacattgcattctgtgctgcgagaaatcgggaaagatattgcaagcgagccag

SEQ ID NO: 423928 - DNA, 75 bp, synthetic construct
  source 1..75: mol_type = other DNA
gctggaaagtatgcgcgtgaagctggaggggaaaaactatattgagcagtatgtttatgcgttaacccatgagct

SEQ ID NO: 423929 - DNA, 75 bp, synthetic construct
  source 1..75: mol_type = other DNA
aacgttgctgctgaaccggcgttactggagcaggcgctggggaatttactggataacgccatcgattttactccc

SEQ ID NO: 423930 - DNA, 75 bp, synthetic construct
  source 1..75: mol_type = other DNA
aaacgttattacgccaggcaagactggagaatcgccaggaagtggttctttctgcggttgacgtagcggcattat

SEQ ID NO: 423931 - DNA, 75 bp, synthetic construct
  source 1..75: mol_type = other DNA
ggttatcgctatctgaatctgtcgggtaaagatggtaaccgcgacaacgccgtggctgacggtccatatgttggc

SEQ ID NO: 423932 - DNA, 75 bp, synthetic construct
  source 1..75: mol_type = other DNA
ggtggtttgcagtggaaaattggcaacagcttccgtttgtttggcgagtattactactctccggattcgctctcc

SEQ ID NO: 423933 - DNA, 75 bp, synthetic construct
  source 1..75: mol_type = other DNA
gtttggtggatcaaccgctccattgcccggctcactcgctatgctgattccgtcactgacaataagcccgttcct

SEQ ID NO: 423934 - DNA, 75 bp, synthetic construct
  source 1..75: mol_type = other DNA
aaatcttcctcaatatcaaagagaaaacattggcgtggaagccggatatcatccgcctgtggaaattccctaaag

SEQ ID NO: 423935 - DNA, 75 bp, synthetic construct
  source 1..75: mol_type = other DNA
tgccatcaccgttgaaggggctaacattctgacccgcagcatgatgatcttcggacaaggagcgattcgttgcca

SEQ ID NO: 423936 - DNA, 75 bp, synthetic construct
  source 1..75: mol_type = other DNA
gttcgcagcttctggctgggcctgacgcgcggtttaaccagcagcacgccaaccggcgatgccactaaacgctac

SEQ ID NO: 423937 - DNA, 75 bp, synthetic construct
  source 1..75: mol_type = other DNA
cgagcataacccggttggtttactggaagaggcgctggtggatgtgattgccgccgacccgattcatcagcggat

SEQ ID NO: 423938 - DNA, 75 bp, synthetic construct
  source 1..75: mol_type = other DNA
aagtggcttaacgcatcagcaataccagaccaaaccaatatccttgcacttagccgctggcttggggttcgccct

SEQ ID NO: 423939 - DNA, 75 bp, synthetic construct
  source 1..75: mol_type = other DNA
tgcgcttctccaaatcaacccttcgcagagttggcgcgaacagtgatggaagcggggttgtttgttttccggctc

SEQ ID NO: 423940 - DNA, 75 bp, synthetic construct
  source 1..75: mol_type = other DNA
gcaaactcgtcgcgcgatgtgcgtcgtcagctggacagtggcaaactggatgaagcaatggctcgtttcgaatct

SEQ ID NO: 423941 - DNA, 75 bp, synthetic construct
  source 1..75: mol_type = other DNA
aaatttgatctggtgattaccgccaaagcctacggtaataacgccagccgccccattccggtacgcgttggcaat

SEQ ID NO: 423942 - DNA, 75 bp, synthetic construct
  source 1..75: mol_type = other DNA
aaaggcaatgtcgatacgctgaagattgttgataacgatattcgctacaaagccgacagtttcatctttaacgtc

SEQ ID NO: 423943 - DNA, 75 bp, synthetic construct
  source 1..75: mol_type = other DNA
cgccggcgcgccagaagaggtgaaacagtttagcggtatttcacgtccagagtcgtggggccgctggtccaacgc

SEQ ID NO: 423944 - DNA, 75 bp, synthetic construct
  source 1..75: mol_type = other DNA
ggtgctggggatgcgtctgacctggaacaaacgctacattacgctggcaccgattgcgaccgtgcttggtctggc

SEQ ID NO: 423945 - DNA, 75 bp, synthetic construct
  source 1..75: mol_type = other DNA
aggagctgttaggcgatatggtgtttgttgacctgccggaagtgggcgcaacggttagcgcgggcgatgactgcg

SEQ ID NO: 423946 - DNA, 75 bp, synthetic construct
  source 1..75: mol_type = other DNA
ctgtcgtaaccaacgaagggaacattctcggccactcgccgcgtaagctcggcattggtatggtggaaatcaaag

SEQ ID NO: 423947 - DNA, 75 bp, synthetic construct
  source 1..75: mol_type = other DNA
ctgtgaatgttaacaatgaaatccaggaaggcttatttcagtcggggcgcattatggtagaaagtttgcagcata

SEQ ID NO: 423948 - DNA, 75 bp, synthetic construct
  source 1..75: mol_type = other DNA
atgatcacgtcccggtataacgatgaagtattttcagaaggaattattgtggcgactaagatgtggatgatccgc

SEQ ID NO: 423949 - DNA, 75 bp, synthetic construct
  source 1..75: mol_type = other DNA
agcaaggatgcgcgctatgaggccgatcgttctacaatcccgttgacgctatggacacttgacgatttggtccgt

SEQ ID NO: 423950 - DNA, 75 bp, synthetic construct
  source 1..75: mol_type = other DNA
aaatcatatggtgacgcagttaattgggaatgtttgctaaaagcgataccagacggtgaggatatatatatcata

SEQ ID NO: 423951 - DNA, 75 bp, synthetic construct
  source 1..75: mol_type = other DNA
taagcccgcgcttccccagatttttaggcaacatgaaaagcattcacaatttaatgataaggttatagaagcagg

SEQ ID NO: 423952 - DNA, 75 bp, synthetic construct
  source 1..75: mol_type = other DNA
tgttggcgatagtgattgctctggtgctatcgctgacttcttcaatatcgtgaagaaaaacaagcatggctttct

SEQ ID NO: 423953 - DNA, 75 bp, synthetic construct
  source 1..75: mol_type = other DNA
aatatgatagattttttataccttataaaggtaaatataaacgatatcgcttgcattctaaaattgcagctattt

SEQ ID NO: 423954 - DNA, 75 bp, synthetic construct
  source 1..75: mol_type = other DNA
caaaaaaagcatcttgggtatggttaatttgaaacttaggccgttaattctttatataagaacgtattctgaatt

SEQ ID NO: 423955 - DNA, 75 bp, synthetic construct
  source 1..75: mol_type = other DNA
attgatccttctgagttagagtttatgaaggcagaaataaaaagagaaatcaaaaaaagcatcttgggtatggtt

SEQ ID NO: 423956 - DNA, 75 bp, synthetic construct
  source 1..75: mol_type = other DNA
cgatcgttctacaatcccgttgacgctatggacgctggacgatttggtacgcgcgttagtggaaaactatgagca

SEQ ID NO: 423957 - DNA, 75 bp, synthetic construct
  source 1..75: mol_type = other DNA
agaatacattgggttctacgctgacggttttccagctgccagaatttgcgctagaagagcttttgcaggataaga

SEQ ID NO: 423958 - DNA, 75 bp, synthetic construct
  source 1..75: mol_type = other DNA
gttttttatgttctggactcttttcccggggcgagaagttataaataagtataatttacagttattgaaagtaga

SEQ ID NO: 423959 - DNA, 75 bp, synthetic construct
  source 1..75: mol_type = other DNA
tgagcggtatgacctgattcgcggcaacatccgcctgaaagcggcgctggagcgggtagcgcaggagggggaatg

SEQ ID NO: 423960 - DNA, 75 bp, synthetic construct
  source 1..75: mol_type = other DNA
agagtatctcagaactacgtaagtcattaaaagataatgatgaagatagtcctgtctatatcgctactgtaccaa

SEQ ID NO: 423961 - DNA, 75 bp, synthetic construct
  source 1..75: mol_type = other DNA
aagccacatttcgtgcaaaagctgacagtgaaatatcctggcgtcaggatgctgttgatgctggtatcgcaactg

SEQ ID NO: 423962 - DNA, 75 bp, synthetic construct
  source 1..75: mol_type = other DNA
aaaatatcagatgcagaaaacatgaaagccacatttcgtgcaaaagctgacagtgaaatatcctggcgtcaggat

SEQ ID NO: 423963 - DNA, 75 bp, synthetic construct
  source 1..75: mol_type = other DNA
atggtttttttcctgttgtcgttaggtatctgtgtagcactggtagcgttttcaagtcttgatacacgtcttcct

SEQ ID NO: 423964 - DNA, 75 bp, synthetic construct
  source 1..75: mol_type = other DNA
tttgctcaatccacgcgatattgacattaatatggtaaataaaagttgtaacagctggagttccccgtatcagct

SEQ ID NO: 423965 - DNA, 75 bp, synthetic construct
  source 1..75: mol_type = other DNA
tcgcgctcaacagtgctttatgtcggtgaaattggtagataatgcagatggttcaaccatgttggataaacgtta

SEQ ID NO: 423966 - DNA, 75 bp, synthetic construct
  source 1..75: mol_type = other DNA
gcggcagcaatttccggtgcgtaaagcaaagggtggcaggcaaaggggtgagacagtagttgttgatgatcagtg

SEQ ID NO: 423967 - DNA, 75 bp, synthetic construct
  source 1..75: mol_type = other DNA
gaccgggtgggcgatacgctgacagcagcatttacccggaccaatactgatttacgcgcgctgggcgaaaccatg

SEQ ID NO: 423968 - DNA, 75 bp, synthetic construct
  source 1..75: mol_type = other DNA
acgtcagcaatttccggtgcgtaaggcaaaaggcgggaggcaaagggaagaggtagttggtgttgatgatgagtg

SEQ ID NO: 423969 - DNA, 75 bp, synthetic construct
  source 1..75: mol_type = other DNA
tgtctgaatggaaaaaatacagggtcttactgatgcgtgttgatacagctaaacccgaatggcctacacccccgg

SEQ ID NO: 423970 - DNA, 75 bp, synthetic construct
  source 1..75: mol_type = other DNA
atatatcagcgccggttcatggcctgaaaatggcgctgatgttgatgatgaaacaatggcaatttacacaggcgt

SEQ ID NO: 423971 - DNA, 75 bp, synthetic construct
  source 1..75: mol_type = other DNA
atgaataaattttataaaggctctttctatccggaagcactaaaagatgtatatatcagcgccggttcatggcct

SEQ ID NO: 423972 - DNA, 75 bp, synthetic construct
  source 1..75: mol_type = other DNA
atgaaaacaatcgaacaaaaaattgaacagcgccgcgagtggcagaaggcagccagagaacgagcgatcgctcgg

SEQ ID NO: 423973 - DNA, 75 bp, synthetic construct
  source 1..75: mol_type = other DNA
ctcgccagcaggcattgatgttacgccatcaggccgcaaactcgtcgcgcgatgtgcgtcgtcagctggacagtg

SEQ ID NO: 423974 - DNA, 75 bp, synthetic construct
  source 1..75: mol_type = other DNA
gttggatgagcaatttgccgagctgaaagctgatgatgccatcagcgagcaactggcgaaattaaaagccaaaat

SEQ ID NO: 423975 - DNA, 75 bp, synthetic construct
  source 1..75: mol_type = other DNA
gaccagatggaagcagaagcggaaagtcacagcttcggtaaacaaagatcgttggatgagcaatttgccgagctg

SEQ ID NO: 423976 - DNA, 75 bp, synthetic construct
  source 1..75: mol_type = other DNA
tgagctgggattgcgtgcgcaacttagcgcctcacgcagccaggggctgaatgcgttaagcgaggcgattatcgc

SEQ ID NO: 423977 - DNA, 75 bp, synthetic construct
  source 1..75: mol_type = other DNA
atgtactcaccggcaaaatattctgccgattactgaacacgcatccggctcctcaggttttgatttattctggtt

SEQ ID NO: 423978 - DNA, 75 bp, synthetic construct
  source 1..75: mol_type = other DNA
ttattgtcatttaataaataatgacattctttcatcattagactggccccctgaatctccagacaaccagtatca

SEQ ID NO: 423979 - DNA, 75 bp, synthetic construct
  source 1..75: mol_type = other DNA
gatgtgtcgatggtcgccgggcaaatgaccgccgtttctcgcgtatttggcgattctaatctcggcgtttcgctg

SEQ ID NO: 423980 - DNA, 75 bp, synthetic construct
  source 1..75: mol_type = other DNA
catcgagcgcaagaaagccagtcttatgcgccccgtcacgctgaataaaggcaatgtgttcacgattaagaaagt

SEQ ID NO: 423981 - DNA, 75 bp, synthetic construct
  source 1..75: mol_type = other DNA
aaaatatcctcggtggttatggttattggacgaaagaaacaattctctaccccggtgaatcattatcttttataa

SEQ ID NO: 423982 - DNA, 75 bp, synthetic construct
  source 1..75: mol_type = other DNA
gcaaactggatgaagcgatggctcgctttgaatcttttgagcgtcgtatcgatcaaatggaagctgaagctgaaa

SEQ ID NO: 423983 - DNA, 75 bp, synthetic construct
  source 1..75: mol_type = other DNA
tgaaaaacagaaactgaccgatttaattgcctctctggagcatgaggtgacactggttgacgatacgctggcgcg

SEQ ID NO: 423984 - DNA, 75 bp, synthetic construct
  source 1..75: mol_type = other DNA
tttgtggcttaggatatatagtgaacaatatacaaaattaacaaatgaagccgacttggatagaattgctaacca

SEQ ID NO: 423985 - DNA, 75 bp, synthetic construct
  source 1..75: mol_type = other DNA
atgcacaccgctttttcttccccgtcttctgcccctgccgcgccgctgatgccggtctctgacgccgttcatgag

SEQ ID NO: 423986 - DNA, 75 bp, synthetic construct
  source 1..75: mol_type = other DNA
attgagccttctgatgtagagtttatgaaggcagaaatcaaaagagaagttaaaaaaagtatattaggtataagt

SEQ ID NO: 423987 - DNA, 75 bp, synthetic construct
  source 1..75: mol_type = other DNA
atgatccgctgccatcttgctcgactcatgggcgaacataagatgcgtatagctgatgttgtcagggaaactggc

SEQ ID NO: 423988 - DNA, 75 bp, synthetic construct
  source 1..75: mol_type = other DNA
atttctggttcccgccgggagatatcaacgggcgagaacatcatctgcatattattttgaccttccgcgaatcgc

SEQ ID NO: 423989 - DNA, 75 bp, synthetic construct
  source 1..75: mol_type = other DNA
aatccgggatgctatcgatcgccgtatcgctaaacagaaagaacgcccgccagccagcaaagcgctgaaaagcgc

SEQ ID NO: 423990 - DNA, 75 bp, synthetic construct
  source 1..75: mol_type = other DNA
gattatcaaaaaagagtacggcggactggagttctcagcttatgcccagtctcgcgtgctgcaaaaactctccgg

SEQ ID NO: 423991 - DNA, 75 bp, synthetic construct
  source 1..75: mol_type = other DNA
ctatcaccgcgtgagcttatttatcagcagtctgattttgctcgcctggacagctgccctcggcgtcgctggtct

SEQ ID NO: 423992 - DNA, 75 bp, synthetic construct
  source 1..75: mol_type = other DNA
cagcagggcttcccgtgacagctacgatgtttatgatgcacggctaactatgctgctgacgatgcaaccaggttt

SEQ ID NO: 423993 - DNA, 75 bp, synthetic construct
  source 1..75: mol_type = other DNA
ttagcacggtcaggtagcaggaagtcaacggtattcaaagcactgatggaaacaatccatcaaatggaaaaagaa

SEQ ID NO: 423994 - DNA, 75 bp, synthetic construct
  source 1..75: mol_type = other DNA
cttctgcccctgccgcgccactgataccggtctctgatgccgttcaggagcgatttatccgcctgcctgaagtga

SEQ ID NO: 423995 - DNA, 75 bp, synthetic construct
  source 1..75: mol_type = other DNA
cgcctgctttattatgtgcaatatcttcaatcatactggcagtaggaatgataagtattttacgtaaacgttatc

SEQ ID NO: 423996 - DNA, 75 bp, synthetic construct
  source 1..75: mol_type = other DNA
atcatgcccgatggctgcagcggtatctggattcgcgcaggggcggcagtgacggggactttttcctgctattgc

SEQ ID NO: 423997 - DNA, 75 bp, synthetic construct
  source 1..75: mol_type = other DNA
atgacgcagatgattcctaaaacgcaggtcccggtaaaacgcgccggacgcatcgatcccattgccttcttcgag

SEQ ID NO: 423998 - DNA, 75 bp, synthetic construct
  source 1..75: mol_type = other DNA
gtggatgatattgatcaagaatatcaagaagatgaaaatgaaggctgcgatgctgaacgcaatgaccgtttagaa

SEQ ID NO: 423999 - DNA, 75 bp, synthetic construct
  source 1..75: mol_type = other DNA
ctttgccagagtatgtaaagtagcaatgatttctctcttacctgcacatggcaccgtaagaatttttgatgctaa

SEQ ID NO: 424000 - DNA, 75 bp, synthetic construct
  source 1..75: mol_type = other DNA
tggtgaaaccaacgttaagccgggtgatatcctgcgtgtgaaagtcgagcacgccgatgagtacgatttgtgggg

SEQ ID NO: 424001 - DNA, 75 bp, synthetic construct
  source 1..75: mol_type = other DNA
gcgatttaatttccccggacgccagttgctgctgacgatgctggatattccgtttgccgtgtcgccggtggttgc

SEQ ID NO: 424002 - DNA, 75 bp, synthetic construct
  source 1..75: mol_type = other DNA
cggaaaatgagataccatccccggtgaaaaccacatttgcccccttgagcgcttccgcgatgggagttcccatga

SEQ ID NO: 424003 - DNA, 75 bp, synthetic construct
  source 1..75: mol_type = other DNA
tattatggtactgatttaagaaaagccttgaaaaggctaggaaaagacttagctgttccttatattaatgagcaa

SEQ ID NO: 424004 - DNA, 75 bp, synthetic construct
  source 1..75: mol_type = other DNA
cggtacaagaatcactggaagccattggtgaagcgttgaatgaaaacggcaaggtaattgtgaccggttgtctgg

SEQ ID NO: 424005 - DNA, 75 bp, synthetic construct
  source 1..75: mol_type = other DNA
ttgagcaaagccgaatattgggcacagaaagccgccgacagcggtgatgctgatgcctgcgcgctgttagcgcag

SEQ ID NO: 424006 - DNA, 75 bp, synthetic construct
  source 1..75: mol_type = other DNA
atgaaaaaaattatcgcattgatgttgtttttgacattctttgcccacgcctccgagcctggcagccagtattta

SEQ ID NO: 424007 - DNA, 75 bp, synthetic construct
  source 1..75: mol_type = other DNA
gatgctactcgacttcctgaaagaagcacgtctggatcgcgttggctgctttaaatacagcccggttgaaggtgc

SEQ ID NO: 424008 - DNA, 75 bp, synthetic construct
  source 1..75: mol_type = other DNA
gagccgtccgattggcgaagtgttaagtgaagcgaaacgtctggttgatgcgggcgttaaagagattctggtgat

SEQ ID NO: 424009 - DNA, 75 bp, synthetic construct
  source 1..75: mol_type = other DNA
caccttctgcattattccgtctatgcgcggcgacctggtgagccgtccgattggcgaagtgttaagtgaagcgaa

SEQ ID NO: 424010 - DNA, 75 bp, synthetic construct
  source 1..75: mol_type = other DNA
gaagacgaagcggcgattttgcttggcgcgtctggctggcagatgttccgtcgcgttacattgccgaacattcgc

SEQ ID NO: 424011 - DNA, 75 bp, synthetic construct
  source 1..75: mol_type = other DNA
gctgcctacagccatctgccgccgattcttgacagattccgcgcggaacacccgtcagtggagatcaaactcact

SEQ ID NO: 424012 - DNA, 75 bp, synthetic construct
  source 1..75: mol_type = other DNA
tccatcggtggaaattaagctcaccaccggtgatgcggcggatgcaatggaaaaagtggtcactggagaagcaga

SEQ ID NO: 424013 - DNA, 75 bp, synthetic construct
  source 1..75: mol_type = other DNA
ttgagaaggtcttcggcttttgcgaacaggacaacctcgaagaatttcgcttcgacgaggacggcctgggcgctg

SEQ ID NO: 424014 - DNA, 75 bp, synthetic construct
  source 1..75: mol_type = other DNA
ccttttccattatcgccggtgttgatccccaggtgggcctctactcggcgttctgtattcctctcgttatggcct

SEQ ID NO: 424015 - DNA, 75 bp, synthetic construct
  source 1..75: mol_type = other DNA
agggtatcgccaacattggcgccgcatttattggcggtatggctgggtgcgcgatgatcggtcagtcggtgatca

SEQ ID NO: 424016 - DNA, 75 bp, synthetic construct
  source 1..75: mol_type = other DNA
tttggcgattgccggtaagccagagacattgcccggcgcggtggcattttcgatgctggagaatctggcggtggt

SEQ ID NO: 424017 - DNA, 75 bp, synthetic construct
  source 1..75: mol_type = other DNA
aaaagaggatgaaggtattcgccctgtatacgctgttgctgacagggattacagtgttttccctctggctggccg

SEQ ID NO: 424018 - DNA, 75 bp, synthetic construct
  source 1..75: mol_type = other DNA
accggaataccgggctccttttcttcgtatggccactgtcagtgttttgtttgttctgctgtgtgaatactccat

SEQ ID NO: 424019 - DNA, 75 bp, synthetic construct
  source 1..75: mol_type = other DNA
ggtgatgttaagccagggcagccaggaagacgaagcggcgattttgcttggcgcgtccggctggcagatgttccg

SEQ ID NO: 424020 - DNA, 75 bp, synthetic construct
  source 1..75: mol_type = other DNA
cgaccgtcaatacttgccacaccgtttcgaggtagtggcgcggtatttgatccggatgatgaagctgttcgcggg

SEQ ID NO: 424021 - DNA, 75 bp, synthetic construct
  source 1..75: mol_type = other DNA
agcgccatggcgagcaaagacaaactcatcatcgagctgtcgcagccgacctactccattaacggcgtggggaaa

SEQ ID NO: 424022 - DNA, 75 bp, synthetic construct
  source 1..75: mol_type = other DNA
cggcaaagcctctctggatggcggtacgctactgactaacgacgctggcgaaatgctgtttgccgagcaccattt

SEQ ID NO: 424023 - DNA, 75 bp, synthetic construct
  source 1..75: mol_type = other DNA
gaacaaacaaaaggcgctgcactggttgaacctgagctgtatggaagggtttgataccgggtgtgaagagtttga

SEQ ID NO: 424024 - DNA, 75 bp, synthetic construct
  source 1..75: mol_type = other DNA
tgggataaacaatattgtgtgcccgggtctgcgggagaatgctctgattccagatgatactgtgcccgtaattcc

SEQ ID NO: 424025 - DNA, 75 bp, synthetic construct
  source 1..75: mol_type = other DNA
tgagtcattttcagaactattttaaaaataaagtaggaaaaacgcctggacaatatcgtaaagattatcgtaaag

SEQ ID NO: 424026 - DNA, 75 bp, synthetic construct
  source 1..75: mol_type = other DNA
cactgatgttaaatcgacttccaccacatgatacctattcaggaaccgttaacgctttaattaaaatgcttgata

SEQ ID NO: 424027 - DNA, 75 bp, synthetic construct
  source 1..75: mol_type = other DNA
cgcatcttttgacaaaaataaaagaatattatgcgcagcacctgagtatctgcaaaaatatccgaggccacaatc

SEQ ID NO: 424028 - DNA, 75 bp, synthetic construct
  source 1..75: mol_type = other DNA
cgggagccactctatcgcagtatgaagttgcgcgtctgcgtagagtttctggcggcgtggtgccagcaacggctg

SEQ ID NO: 424029 - DNA, 75 bp, synthetic construct
  source 1..75: mol_type = other DNA
aatttactggattcaataaaagcttatattgaccataatttctatgaacccatccgtctggatgctctggcgact

SEQ ID NO: 424030 - DNA, 75 bp, synthetic construct
  source 1..75: mol_type = other DNA
gcgggcgttttggcgtcaacctcgtgactggctggcaaaagcccgagtatgagcagatgggcatctggcctggcg

SEQ ID NO: 424031 - DNA, 75 bp, synthetic construct
  source 1..75: mol_type = other DNA
tgccgagaaagcagcgcaagcgggcagtaaagaaggtgaagtaacgctggcgcatattctggtaaatacgcaagc

SEQ ID NO: 424032 - DNA, 75 bp, synthetic construct
  source 1..75: mol_type = other DNA
gtttgtacgtcctgtgtcgatgttattactagcattaataccaattggtgttgcttatgtaattgatgtttttta

SEQ ID NO: 424033 - DNA, 75 bp, synthetic construct
  source 1..75: mol_type = other DNA
ctactggtctgaagagtatgagaaatatattaagataaacaaattcaaaatagataataacaacacacaaaaatc

SEQ ID NO: 424034 - DNA, 75 bp, synthetic construct
  source 1..75: mol_type = other DNA
acgcgacagctgccaccttaacgttacctccggcaatcgtcgcccgtatggccgcaaccatcgactccatctctg

SEQ ID NO: 424035 - DNA, 75 bp, synthetic construct
  source 1..75: mol_type = other DNA
gccgtgacctcgcgcattcagatttacgccactgccgccaccttaacgttacctccggcaatcgtcgcccgtatg

SEQ ID NO: 424036 - DNA, 75 bp, synthetic construct
  source 1..75: mol_type = other DNA
aactgatgcgcaattatcctgagttacaggtgcattttgaattgttcgatcggcaaattgatttagtgcaggata

SEQ ID NO: 424037 - DNA, 75 bp, synthetic construct
  source 1..75: mol_type = other DNA
attttcagtgaggtctcccctcgtccacatgataccgggatggtgacgttaatttctcaagatctctcagagttt

SEQ ID NO: 424038 - DNA, 75 bp, synthetic construct
  source 1..75: mol_type = other DNA
aattaaccatgaatcgcgagggcatccgccgtctggcggcagaagagcttcaaattcccacttcaacgtatcgtt

SEQ ID NO: 424039 - DNA, 75 bp, synthetic construct
  source 1..75: mol_type = other DNA
ccctgcattgttaaaccggtgatgagctcttccggcaaggggcagacgtttattcgttctgcagagcaacttgct

SEQ ID NO: 424040 - DNA, 75 bp, synthetic construct
  source 1..75: mol_type = other DNA
acgggctattgatgcgctgctgcaggggctgtgtttccactatgacccgctggccaaccgtgtccagtgctccat

SEQ ID NO: 424041 - DNA, 75 bp, synthetic construct
  source 1..75: mol_type = other DNA
aaagtttgagaaacgcgatctggcacaggcggtgattaacgctgcatacctggtggcctatgcagatggtgaatg

SEQ ID NO: 424042 - DNA, 75 bp, synthetic construct
  source 1..75: mol_type = other DNA
actggctactgcagagagtgttgatgaagcgattgagcgcgcaaagcacgccgcagcacagataaaagtacaagc

SEQ ID NO: 424043 - DNA, 75 bp, synthetic construct
  source 1..75: mol_type = other DNA
aatctgcagctggcgaacctcacaaatatctgtcctggattacctcttattctcactggtgggacgaagagaaca

SEQ ID NO: 424044 - DNA, 75 bp, synthetic construct
  source 1..75: mol_type = other DNA
gacgacttttggaaagatggtgaagaaggtgcttatgcgatgggttatgaggatgggcgtgacaaaacggtaatt

SEQ ID NO: 424045 - DNA, 75 bp, synthetic construct
  source 1..75: mol_type = other DNA
gtctgcgtggaatttctggcggcatggtgccagcaacggctgggcaagcccgacgaaggctatcaggtcatgtag

SEQ ID NO: 424046 - DNA, 75 bp, synthetic construct
  source 1..75: mol_type = other DNA
tcacgttgtcgataaagccattgtgaaagaaaaccgctatgctattcgcgctcaggtatctgcgtggatcgccag

SEQ ID NO: 424047 - DNA, 75 bp, synthetic construct
  source 1..75: mol_type = other DNA
tgggaaaatatcatcgcgccgcagctggatgcccgtacgcgtccgtgcaatttccatccacatttgaagaaataa

SEQ ID NO: 424048 - DNA, 75 bp, synthetic construct
  source 1..75: mol_type = other DNA
tattgaccgtttagggcgtaataccgttgatgtgctctctaacgtggaggcactacagactaaaggtgtgagggt

SEQ ID NO: 424049 - DNA, 75 bp, synthetic construct
  source 1..75: mol_type = other DNA
gcaattgcctggcattctggagacatcgctgatggcggctgaaatcgaccctaacgtcgaaatctggatgctgtt

SEQ ID NO: 424050 - DNA, 75 bp, synthetic construct
  source 1..75: mol_type = other DNA
aagtaaacgcagaaaagcaatctggtggcgtcaggtttaacgttattcaggtaaaaaatgaggtgcttatgtgtt

SEQ ID NO: 424051 - DNA, 75 bp, synthetic construct
  source 1..75: mol_type = other DNA
tccctgttccgcgtcatccgcgagctgaaatcgcaaggccgcggtattgtctatatctcccaccgcatgaaagaa

SEQ ID NO: 424052 - DNA, 75 bp, synthetic construct
  source 1..75: mol_type = other DNA
tattctcgccggttttgtggtgagctggctgtatggtcgctcgctgcgattcctcagccgctggggcggtgatga

SEQ ID NO: 424053 - DNA, 75 bp, synthetic construct
  source 1..75: mol_type = other DNA
aagttcaattctggaagaaaacctggagcggcgtttccgtctggcggcgttgcgttccgaacgcgcagaactgta

SEQ ID NO: 424054 - DNA, 75 bp, synthetic construct
  source 1..75: mol_type = other DNA
tgtttgtcggcgtggtgatgttgcctgttctgctgcaacacattgaagtcgcggatcattcgcagcagttgaaag

SEQ ID NO: 424055 - DNA, 75 bp, synthetic construct
  source 1..75: mol_type = other DNA
tctttggtggatatttgttaattcgcgccccgatgctgtaatgacctactcctatgagtgcagtcactgcggtaa

SEQ ID NO: 424056 - DNA, 75 bp, synthetic construct
  source 1..75: mol_type = other DNA
tatacgaccacccagtcgaatgaaccgcccgccggggtgttcagacagaaactgcagtatgcccgggatgtccgt

SEQ ID NO: 424057 - DNA, 75 bp, synthetic construct
  source 1..75: mol_type = other DNA
agggcattcaggacgcctctctcgcatcgagatgggaggctctgaccgaaataggggttgagctggcgctggatg

SEQ ID NO: 424058 - DNA, 75 bp, synthetic construct
  source 1..75: mol_type = other DNA
atgttgcgggcctgaagcaggcaatcaaaacgccgtcggaagagtacgcgaagattggtatagagaaagacggca

SEQ ID NO: 424059 - DNA, 75 bp, synthetic construct
  source 1..75: mol_type = other DNA
cgctttaaaacgctgtaccgtgaagggctgaaaaatcgctatggcgcgctgatgcaaaccatctccggcgtacac

SEQ ID NO: 424060 - DNA, 75 bp, synthetic construct
  source 1..75: mol_type = other DNA
gacctgtttatggtctggtgtgcgttagctgacgcgccggaaatgagcagtagcgaacttgcctgtacacgcgtc

SEQ ID NO: 424061 - DNA, 75 bp, synthetic construct
  source 1..75: mol_type = other DNA
gctaacttctcttctatcgggattatcgcgggcgcggttaaaggtctgaacgaagagcaaggtaacgtggtttct

SEQ ID NO: 424062 - DNA, 75 bp, synthetic construct
  source 1..75: mol_type = other DNA
acgactatatgccaccgtacaaagcgggactggatgcaggcagcggcgcggtgatggtggcgctgaactctctca

SEQ ID NO: 424063 - DNA, 75 bp, synthetic construct
  source 1..75: mol_type = other DNA
agctgccgatgtccttcccgcgttctgtcgggcagatcccggtgtactacagccatctgaataccggtcgtccgt

SEQ ID NO: 424064 - DNA, 75 bp, synthetic construct
  source 1..75: mol_type = other DNA
aaatacacttcacgctatttcgatgaagctaacggtgcgctttacccgttcggttatggtctgagctataccact

SEQ ID NO: 424065 - DNA, 75 bp, synthetic construct
  source 1..75: mol_type = other DNA
tgtcggtaagctgttagaaggggaatattttacggtgcgtggctaccagaaaggaaccgtacacattgtctttaa

SEQ ID NO: 424066 - DNA, 75 bp, synthetic construct
  source 1..75: mol_type = other DNA
gttgtgaaagtaaacggtcagttgattgagcctcgggaatccgaagatttggtacttatcgccctgaacaagccc

SEQ ID NO: 424067 - DNA, 75 bp, synthetic construct
  source 1..75: mol_type = other DNA
ctggctgctgaaagatgtgctgcgcgatcagtggggctttaaaggcattaccgtttccgatcatggcgcaatcaa

SEQ ID NO: 424068 - DNA, 75 bp, synthetic construct
  source 1..75: mol_type = other DNA
aatctgcaaccattgcggtggttggcccgctggcagacagcaagcgtgacgtgatgggaagctggtcggcggcag

SEQ ID NO: 424069 - DNA, 75 bp, synthetic construct
  source 1..75: mol_type = other DNA
tgattaaacatggcacggcggcagacccggaagatgcggtgcgcgtggcgctgaaatccggcatcaacatgagca

SEQ ID NO: 424070 - DNA, 75 bp, synthetic construct
  source 1..75: mol_type = other DNA
ttaatttgcacagcttcctggtggcggtggtgggagctattctcgttctgggcgtattccgcctcctgcgaagag

SEQ ID NO: 424071 - DNA, 75 bp, synthetic construct
  source 1..75: mol_type = other DNA
tgcttatgaagcggcagatgatggcctgaatatgacctgggcaccgatggtcgatgtctcgcgcgatccgcgctg

SEQ ID NO: 424072 - DNA, 75 bp, synthetic construct
  source 1..75: mol_type = other DNA
aatctgccaccatcgcggtggttggcccactggcagacagcaaacgtgatgtcatgggaagctggtcagcagccg

SEQ ID NO: 424073 - DNA, 75 bp, synthetic construct
  source 1..75: mol_type = other DNA
ggtgaaaacggtaaagtgctgtatgccaaaggggcgaacgttaccagtgacaaaggcattatcgatttcctgaat

SEQ ID NO: 424074 - DNA, 75 bp, synthetic construct
  source 1..75: mol_type = other DNA
tagggcaatcacgaagaactatccattaaggcttgtcatcgagatcactgagggggttcaagacaaatctctagc

SEQ ID NO: 424075 - DNA, 75 bp, synthetic construct
  source 1..75: mol_type = other DNA
gtggttcgtgttctcgacggtaaaattttcaccgaagacaatgttgactggaaaaaactcaccagcggattgcca

SEQ ID NO: 424076 - DNA, 75 bp, synthetic construct
  source 1..75: mol_type = other DNA
taccgccgtgcttaaccgttggctggacgtaaccgaaaaagataaaaacacccgcagtgccacgttctacaacac

SEQ ID NO: 424077 - DNA, 75 bp, synthetic construct
  source 1..75: mol_type = other DNA
ttgctgggctttgatggttcgccggtttatgacgataccgccgtgcttaaccgctggctggacgttaccgaaaaa

SEQ ID NO: 424078 - DNA, 75 bp, synthetic construct
  source 1..75: mol_type = other DNA
ggtcaacccaccaccacagtgacgacgacagggggtaacgcagcagcaactatcacagccgcaggcggcacgccg

SEQ ID NO: 424079 - DNA, 75 bp, synthetic construct
  source 1..75: mol_type = other DNA
caaacgcggtggtgattcaatatcaggataaaccgtacgttcgcctgaacggcggcgattgggtgccatacccgc

SEQ ID NO: 424080 - DNA, 75 bp, synthetic construct
  source 1..75: mol_type = other DNA
ccggatgaatatgatgatctcatatcaggaacttgttcgcaccttccacaatggattcgcattaccgtttttgtg

SEQ ID NO: 424081 - DNA, 75 bp, synthetic construct
  source 1..75: mol_type = other DNA
cataccgctgatatggcgcgcgctgccgaattcatggcaggacatctggactcactggctgacggcaaagaggga

SEQ ID NO: 424082 - DNA, 75 bp, synthetic construct
  source 1..75: mol_type = other DNA
tgagtcggtacagagatacatcgtgaagccgggagaagtccacgccgtgaggccgcacccgttgccgtcagggca

SEQ ID NO: 424083 - DNA, 75 bp, synthetic construct
  source 1..75: mol_type = other DNA
atggcaaagactattaaaattactcaaacccgcagtgcaatcggtcgtctgccgaaacacaaggcaacgctgctt

SEQ ID NO: 424084 - DNA, 75 bp, synthetic construct
  source 1..75: mol_type = other DNA
gcttgccgtgcttttgaggttattcgcggttctgatgtgatggacgccgttgccgacttggaggatgaagagtga

SEQ ID NO: 424085 - DNA, 75 bp, synthetic construct
  source 1..75: mol_type = other DNA
cggcatccgtccgggtatcaccacactgtggatatggctgcggacgtggtgcggtggcgcactggccagagagca

SEQ ID NO: 424086 - DNA, 75 bp, synthetic construct
  source 1..75: mol_type = other DNA
ctgtggatgtggccggggccgtggtgcggttgcacactggcctgaccatgacaatgatgcaattccgcagaaggg

SEQ ID NO: 424087 - DNA, 75 bp, synthetic construct
  source 1..75: mol_type = other DNA
tacaacacgcttccactgcatgacggcaaccattatccgggcgtcagcaaaaccgcagattacaaagcgcgggcg

SEQ ID NO: 424088 - DNA, 75 bp, synthetic construct
  source 1..75: mol_type = other DNA
cttcagggcatttatggcctcagcggaggtggcccgtgattttgttgagctgcatcttccgacggaataccggta

SEQ ID NO: 424089 - DNA, 75 bp, synthetic construct
  source 1..75: mol_type = other DNA
atctggcagttactaccattgccttcctctactgcatctgggccgtggtggggtccggagcgaaagaggttatgt

SEQ ID NO: 424090 - DNA, 75 bp, synthetic construct
  source 1..75: mol_type = other DNA
tgacaccgccggggccattgtttccttctgcgcagctgcgggttgcttaggttcactgggcggctggacgttgct

SEQ ID NO: 424091 - DNA, 75 bp, synthetic construct
  source 1..75: mol_type = other DNA
ccgccacagaacgattattgcttttgccgttgatgacaataaagtctttatcgcaggtgtttatcatggcggaca

SEQ ID NO: 424092 - DNA, 75 bp, synthetic construct
  source 1..75: mol_type = other DNA
cgcggtgctggacagaacgactcctgctgaaataaaggagataataaatattgctattggcatgattcgcggaac

SEQ ID NO: 424093 - DNA, 75 bp, synthetic construct
  source 1..75: mol_type = other DNA
attaaaaagcttatgtttaaagatggttcgggagcataccggattcatcttggtcaaaatgaagtggttcatatt

SEQ ID NO: 424094 - DNA, 75 bp, synthetic construct
  source 1..75: mol_type = other DNA
tctttacactggtgccatatctttacacctgtgcggcgttactgctgctcggccacggtcactttggtaaagcac

SEQ ID NO: 424095 - DNA, 75 bp, synthetic construct
  source 1..75: mol_type = other DNA
ggtactgaaagatccgttggtattaactatcacctgtgttgtggtgctgtggatcttcgttctgcttaatatcgt

SEQ ID NO: 424096 - DNA, 75 bp, synthetic construct
  source 1..75: mol_type = other DNA
tggccgtaaagtgatggtcgtcgtagtgccagagcacggcggcgcgctgaaaggcgacagaatgcaggtatctgg

SEQ ID NO: 424097 - DNA, 75 bp, synthetic construct
  source 1..75: mol_type = other DNA
tgatcccaatcgtcgggattgccgtattcggctggttctggttccacggagaaacctatatggcggcatggaacg

SEQ ID NO: 424098 - DNA, 75 bp, synthetic construct
  source 1..75: mol_type = other DNA
aacgttacgctgtggtcgttcatcggtgtggaaagtgcctccgttgccgcaggtgtggtgaaaaacccgaaacgc

SEQ ID NO: 424099 - DNA, 75 bp, synthetic construct
  source 1..75: mol_type = other DNA
gccattgtttccttctgcgcagctgcgggttgcttaggttcactgggcggctggacgttgctggcgggtcaaacg

SEQ ID NO: 424100 - DNA, 75 bp, synthetic construct
  source 1..75: mol_type = other DNA
gctaagtgaagaaacctgccagaaactacgcgatgcgctgccagaacatgtagtaatctctaacccgctcgatct

SEQ ID NO: 424101 - DNA, 75 bp, synthetic construct
  source 1..75: mol_type = other DNA
gtgattaaaagcggacgtagcccggcggcacagcgactgctcaacacgacggcaggaatggacccggcatgggat

SEQ ID NO: 424102 - DNA, 75 bp, synthetic construct
  source 1..75: mol_type = other DNA
gcccgctatctggttattcaggggatcaaagtaaaaagattcgtgcgcgcagtgcgctacgcccattggatgttg

SEQ ID NO: 424103 - DNA, 75 bp, synthetic construct
  source 1..75: mol_type = other DNA
tccacggcctgttggtgcaaagtatggctaaccgtgctggcgctcaggagttgcgggttgtggttgagcacgatc

SEQ ID NO: 424104 - DNA, 75 bp, synthetic construct
  source 1..75: mol_type = other DNA
tggatatcgacgttgacgaattgctcgattatctggcgcgcgacagtaaaaccagtgccatcctgctctacctcg

SEQ ID NO: 424105 - DNA, 75 bp, synthetic construct
  source 1..75: mol_type = other DNA
tatcgcacaccggaaggaactatcaccgcttttatgcatatggttgagtaccgtcgaaaccagaagcagttacgc

SEQ ID NO: 424106 - DNA, 75 bp, synthetic construct
  source 1..75: mol_type = other DNA
tggtgctgcatgggtatatgaacgttacaacgcggatgagtcattaccggctctgcaacgggaagcgcaggaaca

SEQ ID NO: 424107 - DNA, 75 bp, synthetic construct
  source 1..75: mol_type = other DNA
ctgcgcaaaatggcaacaagatgaccaaaaactatcgtgccagctacaacgttgaaggcgctttccaggcctcca

SEQ ID NO: 424108 - DNA, 75 bp, synthetic construct
  source 1..75: mol_type = other DNA
tctgcaacgggaagcgcaggaacaaaaacgcggtttgtgggccgacgcaaatccggttccaccgtgggagtggcg

SEQ ID NO: 424109 - DNA, 75 bp, synthetic construct
  source 1..75: mol_type = other DNA
cttcgaacagtggcttaggccgtttggtgggaattgtgcttacgcaagcccacttcattacaggtgttccaccca

SEQ ID NO: 424110 - DNA, 75 bp, synthetic construct
  source 1..75: mol_type = other DNA
aatcgtccgggggctggatgatatctggcaggccattcaaatcatcctgcgtactcctcgcggcagcgacccgca

SEQ ID NO: 424111 - DNA, 75 bp, synthetic construct
  source 1..75: mol_type = other DNA
gaaacaaagtattacacggaatattatttcttcagttgactataataaaaaaaaagaaatgcagacaagagtaat

SEQ ID NO: 424112 - DNA, 75 bp, synthetic construct
  source 1..75: mol_type = other DNA
cgttgctgggcgttggtgaatcgagcgacgcttaccatatttcagccccgcatccgcagggcgaaggggcgatcc

SEQ ID NO: 424113 - DNA, 75 bp, synthetic construct
  source 1..75: mol_type = other DNA
cttcggcgaagagctgaagaaaatgggcatgaacattattaatgacgacatcaccgggcgagtacataaggaccg

SEQ ID NO: 424114 - DNA, 75 bp, synthetic construct
  source 1..75: mol_type = other DNA
tttgccacggcccggcggcttttctggcgcttcgccacggcgataacccactgaatggttattccatttgcgcat

SEQ ID NO: 424115 - DNA, 75 bp, synthetic construct
  source 1..75: mol_type = other DNA
ctgcaaaaatatccgcagccacaatccttacaggaattaagtcgtcatgactgcctggtgaccaaagagcgcgat

SEQ ID NO: 424116 - DNA, 75 bp, synthetic construct
  source 1..75: mol_type = other DNA
atgactgttcaaacaagtaagaatccgcagatcgatattgctgaagataatgcgttcttcccttcagaattttcg

SEQ ID NO: 424117 - DNA, 75 bp, synthetic construct
  source 1..75: mol_type = other DNA
ctgaatggttattccatttgcgcattcccagacgccgcagacaaacaaacgccagagattggctatatgccgggt

SEQ ID NO: 424118 - DNA, 75 bp, synthetic construct
  source 1..75: mol_type = other DNA
attctggtgatcgccgctgacgaacgctatttgccgaccgataacggtaaactattctcgacgggcaaccatccc

SEQ ID NO: 424119 - DNA, 75 bp, synthetic construct
  source 1..75: mol_type = other DNA
tgcgtcattatctgacggtaaaaacgggggagatccccataagcgctaacttaagggttgaaccatctgaagaat

SEQ ID NO: 424120 - DNA, 75 bp, synthetic construct
  source 1..75: mol_type = other DNA
gaggcatccggcggggaacttcagtacgaccccaaagtttatgacgaatatcgtaaggcaaagcgggcggggcgg

SEQ ID NO: 424121 - DNA, 75 bp, synthetic construct
  source 1..75: mol_type = other DNA
tttttggcagcaaaacaaagcttgccaatgtcgcaggagttaggctggcaagcgttgctgcatggggggaactgg

SEQ ID NO: 424122 - DNA, 75 bp, synthetic construct
  source 1..75: mol_type = other DNA
cgggcattacaatatgccaatgcctgcggtgcactggcggtaacccgacgtggcccaatggagggaacgtctcgc

SEQ ID NO: 424123 - DNA, 75 bp, synthetic construct
  source 1..75: mol_type = other DNA
atactaataataccaaacacaattgattttaaaacttttgtgaataatgatattgtcgtacataaaattaaaaaa

SEQ ID NO: 424124 - DNA, 75 bp, synthetic construct
  source 1..75: mol_type = other DNA
gtcgaactgaagctgaacgcggaagctgtcgaggcgctgaacgagctggcggaatcgcgcaatatgagccgtagc

SEQ ID NO: 424125 - DNA, 75 bp, synthetic construct
  source 1..75: mol_type = other DNA
taatcaacttaaagccattcttgcaggacaatccgttaccgtctcttatacgcaaacagatcgctacggacgaat

SEQ ID NO: 424126 - DNA, 75 bp, synthetic construct
  source 1..75: mol_type = other DNA
aatgaagacggtacgctggcacgcattgaagagaaatacctggggcatggcgatgattttgattacgtcgatacg

SEQ ID NO: 424127 - DNA, 75 bp, synthetic construct
  source 1..75: mol_type = other DNA
aaattatcaaccaggcccaacctattattccgtttcacaacaactggtctataaagtaggtcagtatcgaccacg

SEQ ID NO: 424128 - DNA, 75 bp, synthetic construct
  source 1..75: mol_type = other DNA
tgtttcagcgcgttcacccggaactcgccgtagcgctcgatatcaccgatgaacaaccggtgacctggtttagcc

SEQ ID NO: 424129 - DNA, 75 bp, synthetic construct
  source 1..75: mol_type = other DNA
tctctgcggaaagcgaagaaatgcgtcagcactttttctccgtcgccactctggcctctttcattgctgcgcaac

SEQ ID NO: 424130 - DNA, 75 bp, synthetic construct
  source 1..75: mol_type = other DNA
ctagcgactggcttgcgggtgttgagtggcggtcacgtaatatctggctcgaggcagagtacgctgaacgcgttt

SEQ ID NO: 424131 - DNA, 75 bp, synthetic construct
  source 1..75: mol_type = other DNA
gccgttatttgagaaatacgcaggggaaattgactggcgtttactggcggcaattgcctatcaggaatcacactg

SEQ ID NO: 424132 - DNA, 75 bp, synthetic construct
  source 1..75: mol_type = other DNA
cgaaaccttaagcattccgctgcctgcggttgttgctgtttccactgatatcaactccccacaaattccttcgat

SEQ ID NO: 424133 - DNA, 75 bp, synthetic construct
  source 1..75: mol_type = other DNA
tttttcaacctccccatttctttctcacaactcttgatcgccttgctgaaacgagcatgatcttacccagcaata

SEQ ID NO: 424134 - DNA, 75 bp, synthetic construct
  source 1..75: mol_type = other DNA
accaggggctgaatgagcacggatacattattccgggtcttggcgatgccggtgataaaatctttggtacaaaat

SEQ ID NO: 424135 - DNA, 75 bp, synthetic construct
  source 1..75: mol_type = other DNA
accgggaaaaattaccggaacagatgatgaaagccatgacacatcagttacgtcttgttatgaaacaaaaacggt

SEQ ID NO: 424136 - DNA, 75 bp, synthetic construct
  source 1..75: mol_type = other DNA
accgggaaaaattaccggaacagatgatgaaagccatggcgtatcagttgcgtcttgttatgaaacgaaaactgt

SEQ ID NO: 424137 - DNA, 75 bp, synthetic construct
  source 1..75: mol_type = other DNA
tctatgcctgcattttctctatcggagtttgtttggttctgggggcaggagtgtcatcattaatttatttcagca

SEQ ID NO: 424138 - DNA, 75 bp, synthetic construct
  source 1..75: mol_type = other DNA
atggttacagtcgctgaactgcaggcgctgcgtcaggcgcgccttgatttattaaccggtaaacgggtggtgtcg

SEQ ID NO: 424139 - DNA, 75 bp, synthetic construct
  source 1..75: mol_type = other DNA
cttttgtttatccaattgccggttactccaagaaaatcaaatcgctggatgaactgcaggatggttcgcaggttg

SEQ ID NO: 424140 - DNA, 75 bp, synthetic construct
  source 1..75: mol_type = other DNA
gatgaaaaagatccgaaccacattaaagtcggcgtgattgtcggtgccgaacagcaggttgcagaagtcgcgcag

SEQ ID NO: 424141 - DNA, 75 bp, synthetic construct
  source 1..75: mol_type = other DNA
aatctgaaaattgttgagctggaagcaccgcagctgccgcgttctctggacgacgcgcaaatcgctctggcagtt

SEQ ID NO: 424142 - DNA, 75 bp, synthetic construct
  source 1..75: mol_type = other DNA
ctgaatatcgatgccccggaaaagaaacaaccctttggacgctggtcaactaatcaacttaaagccattcttgca

SEQ ID NO: 424143 - DNA, 75 bp, synthetic construct
  source 1..75: mol_type = other DNA
atatcgatgcccctgaaaagaaacaaccttttggacgctggtcaacaaatcaacttaaaaccctgctcgcaggcc

SEQ ID NO: 424144 - DNA, 75 bp, synthetic construct
  source 1..75: mol_type = other DNA
atcaacaccacctatgccagccagattggcctgactccggcgaaagacggcatctttgtagaagacaaagagtcc

SEQ ID NO: 424145 - DNA, 75 bp, synthetic construct
  source 1..75: mol_type = other DNA
ccggtaaacgggtggtgtctgtccagaaagatggtcgcagaattgaatatacggcggcttctctggatgagctta

SEQ ID NO: 424146 - DNA, 75 bp, synthetic construct
  source 1..75: mol_type = other DNA
gcttaaccgtgcgatcaatgatgctgagtcggtactggggacaacccgccgtcgccgtcgtccgctgggagtgag

SEQ ID NO: 424147 - DNA, 75 bp, synthetic construct
  source 1..75: mol_type = other DNA
atgcaagcgctttatctggaaattaaaaatctcatcatcagcaccctcaatctggacgagttgactcctgatgat

SEQ ID NO: 424148 - DNA, 75 bp, synthetic construct
  source 1..75: mol_type = other DNA
gcttaaccgggcgatcaatgatgcggagtcggtactggggacccgccgtcgccgtcgtccgctgggagtgaggtt

SEQ ID NO: 424149 - DNA, 75 bp, synthetic construct
  source 1..75: mol_type = other DNA
aagatggtcgcagaattgaatatacggcggcttctctggatgagcttaaccgggcgatcaatgatgcggagtcgg

SEQ ID NO: 424150 - DNA, 75 bp, synthetic construct
  source 1..75: mol_type = other DNA
aaaattttgttccatcgggaaacaaaagattctgggcattcactgctttggcgagcgcgctgccgaaattattca

SEQ ID NO: 424151 - DNA, 75 bp, synthetic construct
  source 1..75: mol_type = other DNA
ccgatatgttcaagttacttggtgtcaacgaagtccgtctgttaaccaacaacccgaaaaaagtcgaaattctga

SEQ ID NO: 424152 - DNA, 75 bp, synthetic construct
  source 1..75: mol_type = other DNA
gatgagcgcgatttcactctttgcgccgatatgttcaagttactcggcgtcaatgaggttcgccttctaaccaat

SEQ ID NO: 424153 - DNA, 75 bp, synthetic construct
  source 1..75: mol_type = other DNA
gctgggcaaaattgctgtggcgcttaaaagtcagcggtgttcgtactgcgcgggtgccgctaatgggcgtgcgcg

SEQ ID NO: 424154 - DNA, 75 bp, synthetic construct
  source 1..75: mol_type = other DNA
ctataggaggccgtaatatgaggcttcattatatccagtttatggatggttttagtgtagagcctattcctggtg

SEQ ID NO: 424155 - DNA, 75 bp, synthetic construct
  source 1..75: mol_type = other DNA
tcattatatccagtttatggatggttttagtgtagagcctattcctggtggactttgggaccatcttggggcaag

SEQ ID NO: 424156 - DNA, 75 bp, synthetic construct
  source 1..75: mol_type = other DNA
atggaagtgtattgccggaaaatgagctggaggctttacgacatattgcaagaagcaaccagaatgacactatta

SEQ ID NO: 424157 - DNA, 75 bp, synthetic construct
  source 1..75: mol_type = other DNA
ttgggcgtattaccgcgcaaatcgataccttgcaccgtgagcgttacggtgaagataccggtcatttcggaatga

SEQ ID NO: 424158 - DNA, 75 bp, synthetic construct
  source 1..75: mol_type = other DNA
atggctaatcaactcatccccgtattcaacggcactatcgacaacgaaacaactcttctagttaacgctcgtgat

SEQ ID NO: 424159 - DNA, 75 bp, synthetic construct
  source 1..75: mol_type = other DNA
gcgcattgctgaatatggattcgttgaaagcctggactatattttgatttgccaaaatgggcaaaccaaaggtcg

SEQ ID NO: 424160 - DNA, 75 bp, synthetic construct
  source 1..75: mol_type = other DNA
aaaaatccggggacggaccatatcatctggcaggcgtgggtggcaaaaaaagccgggcagatagttgggcgtatt

SEQ ID NO: 424161 - DNA, 75 bp, synthetic construct
  source 1..75: mol_type = other DNA
attcgcgaccatgggcgatcaacttaaatatctggtgccggacgatatgatctacatcgctgagattgattctgc

SEQ ID NO: 424162 - DNA, 75 bp, synthetic construct
  source 1..75: mol_type = other DNA
gatcgacgcgctggagatgtcatggatcctcgaaaccaatacgggcatgaataacatgctggaacgtattggcgc

SEQ ID NO: 424163 - DNA, 75 bp, synthetic construct
  source 1..75: mol_type = other DNA
tcgtgcaggccatgcccgtggtgagaacgtttgatagcggcagcaccagttttttgcgctatcaacgcgcccttg

SEQ ID NO: 424164 - DNA, 75 bp, synthetic construct
  source 1..75: mol_type = other DNA
ttccgcattatcgattttgcgttgtccaactgcatcaactccgggatccgccgtatgggcgtgatcacccagtac

SEQ ID NO: 424165 - DNA, 75 bp, synthetic construct
  source 1..75: mol_type = other DNA
ttgaccgcgcttgtgtcattccggaaggaatggtgattggtgaggatgcagaagaggatgcacgtcgtttctatc

SEQ ID NO: 424166 - DNA, 75 bp, synthetic construct
  source 1..75: mol_type = other DNA
cctgccgtttgctgtgcgatgaaaaaacactacaacagtggcgctatccgccttccggattcggcatcacctacc

SEQ ID NO: 424167 - DNA, 75 bp, synthetic construct
  source 1..75: mol_type = other DNA
atctacacaacgttaattcctgatgatcatgtgattttatctatcgaggcattcattgaatacctggaaaggctc

SEQ ID NO: 424168 - DNA, 75 bp, synthetic construct
  source 1..75: mol_type = other DNA
ccatcaaaaggtgaagttcttggtgcagcacaaaaccttaatgagatcacctcaatacttgctggcaacagtaag

SEQ ID NO: 424169 - DNA, 75 bp, synthetic construct
  source 1..75: mol_type = other DNA
ccccgtatatctcgactacgatttatgttaaagggaataaaagatggccttttgaaaaaacattcatttataaaa

SEQ ID NO: 424170 - DNA, 75 bp, synthetic construct
  source 1..75: mol_type = other DNA
taggcatctcaaaggatgtcatggcttttatttcggccagtcctgagtgtggactcactgtaaaagaatggagtt

SEQ ID NO: 424171 - DNA, 75 bp, synthetic construct
  source 1..75: mol_type = other DNA
gcttctatcagacatgcttaccagtgaagggctatgtggtggaaatgtctggatccatgacacactggaaaacta

SEQ ID NO: 424172 - DNA, 75 bp, synthetic construct
  source 1..75: mol_type = other DNA
ttcgatatgtaacaaaagatgctgatggacagcctgttgtaaaaatgcctgataatgcagttctcagggaggcga

SEQ ID NO: 424173 - DNA, 75 bp, synthetic construct
  source 1..75: mol_type = other DNA
tccggctgactccgttgagcgccagacggcagaacgattaattaacgcctgcccggcaggtctttttgcgctcac

SEQ ID NO: 424174 - DNA, 75 bp, synthetic construct
  source 1..75: mol_type = other DNA
gaaatagacaccggtcaccgccttaatgcatcaggagcaagtactcccggaagcgaaacctctgtggacagtttt

SEQ ID NO: 424175 - DNA, 75 bp, synthetic construct
  source 1..75: mol_type = other DNA
tgttaaagagctttcagtttgtagtggaggttcatacactcgtgtttggagagccctcaaaactcttgataatga

SEQ ID NO: 424176 - DNA, 75 bp, synthetic construct
  source 1..75: mol_type = other DNA
ctcagggaggcgacacgacttgaccagacaagcgccctttttgaacgggcaagaccaatgctgaaaagccttctg

SEQ ID NO: 424177 - DNA, 75 bp, synthetic construct
  source 1..75: mol_type = other DNA
ctgcgacggccgcattatcagcggcaacgatattcaggaaatggccgaatcgtttgaccctcgcgtctacggttg

SEQ ID NO: 424178 - DNA, 75 bp, synthetic construct
  source 1..75: mol_type = other DNA
ttttgaatttcagacctggggagaaaacagacgtattccggtggatttggatgggttacgtttggtttcttttct

SEQ ID NO: 424179 - DNA, 75 bp, synthetic construct
  source 1..75: mol_type = other DNA
atgagcatggtcgtggttgttacagaaaatgtccctccgcgcttacgtggacggctcgcaatctggctactggaa

SEQ ID NO: 424180 - DNA, 75 bp, synthetic construct
  source 1..75: mol_type = other DNA
gcgcagaaggtctatacctcaatggaaattcagccgaactttgccaacaccggcaaatgttatctggtggggctg

SEQ ID NO: 424181 - DNA, 75 bp, synthetic construct
  source 1..75: mol_type = other DNA
ctcgctgagatggaaaccgccttttccgcacttaagcaggaggtgactgaccaggtggatgaaaccagccaggca

SEQ ID NO: 424182 - DNA, 75 bp, synthetic construct
  source 1..75: mol_type = other DNA
atggcaaaaaaagtctcaaaattctttcgcatcggcgtcgagggtgacacctgcgacggccgcattatcagcggc

SEQ ID NO: 424183 - DNA, 75 bp, synthetic construct
  source 1..75: mol_type = other DNA
ggagcggtttatacacggtgatgatgatttagatccattggttaaaatggctattgcgcactatcagtttgagtg

SEQ ID NO: 424184 - DNA, 75 bp, synthetic construct
  source 1..75: mol_type = other DNA
cagggattgttgattaacattcttccgatgctggaagcgaaagattcctcacgcattgagaacatcgtaacaacc

SEQ ID NO: 424185 - DNA, 75 bp, synthetic construct
  source 1..75: mol_type = other DNA
acaacgatttgccgatactgccgcctgacctggagcgcattgaaacacgcagcgtacttaaagcatgcataagtg

SEQ ID NO: 424186 - DNA, 75 bp, synthetic construct
  source 1..75: mol_type = other DNA
gcttttgagctctggaaactggcctctttattctgtaagaaaatagagaacatagagtggtgcatgaatagagca

SEQ ID NO: 424187 - DNA, 75 bp, synthetic construct
  source 1..75: mol_type = other DNA
tgtggtgccggaactggatatgtacgatcgcaattggccaattcgcacctacaatgaatcattaccgccagcgaa

SEQ ID NO: 424188 - DNA, 75 bp, synthetic construct
  source 1..75: mol_type = other DNA
aatgtggatgattaaccgtgatgggacaaatgagcgtaaagtgcatgagcaccaacctggtgaaagttgcacaca

SEQ ID NO: 424189 - DNA, 75 bp, synthetic construct
  source 1..75: mol_type = other DNA
caacctgaccgccaccgaaacgcgcgtcactgagctggaaaccgcctttgcacagctaaagcaggacgtgaccag

SEQ ID NO: 424190 - DNA, 75 bp, synthetic construct
  source 1..75: mol_type = other DNA
cggtcgctcgtaatgagcttgcgttaaaattttcggctcacccagcagttttggtgatgctcaatcgtatgaaga

SEQ ID NO: 424191 - DNA, 75 bp, synthetic construct
  source 1..75: mol_type = other DNA
aataatgacgtcttccgtggagcgtaagcgaaacacggcgtcagttatttccgatgcaaagccagaagtacagag

SEQ ID NO: 424192 - DNA, 75 bp, synthetic construct
  source 1..75: mol_type = other DNA
tagggttattgcctacataaactttgttaataagcggttctttgtgaagcacataacgaatcacgcagagtatga

SEQ ID NO: 424193 - DNA, 75 bp, synthetic construct
  source 1..75: mol_type = other DNA
cataacaagcaccatgatcatcgtaatgaccaccgtggcgatcatcgtccggggccggacaaacatcatcgctaa

SEQ ID NO: 424194 - DNA, 75 bp, synthetic construct
  source 1..75: mol_type = other DNA
aaagagctgaactcatcatacacgaacaagctgtatgacattgcgtttgagactatctacatggtgacgaagaac

SEQ ID NO: 424195 - DNA, 75 bp, synthetic construct
  source 1..75: mol_type = other DNA
gcggagtgcaacaactcaaacattctatgtaatggacaaggacactatctctcagattctttctgagcctgaagc

SEQ ID NO: 424196 - DNA, 75 bp, synthetic construct
  source 1..75: mol_type = other DNA
aacattgaacgaaggcgtcttattgcagcctatgtcgatcaacaactatcgcctctgaatcttcgtcccaaagaa

SEQ ID NO: 424197 - DNA, 75 bp, synthetic construct
  source 1..75: mol_type = other DNA
ttgatgctgcaagtgattcgacatatgtgagtagagagttgggcgaatcgagaggtgttagtgaagtgtatgcaa

SEQ ID NO: 424198 - DNA, 75 bp, synthetic construct
  source 1..75: mol_type = other DNA
ccgccgtctctgagcaggtacagaccaacctgaccgccaccgaaacgcgcgtcactgagctggaaaccgcctttg

SEQ ID NO: 424199 - DNA, 75 bp, synthetic construct
  source 1..75: mol_type = other DNA
ctgcctatgttgaccagcaacttggcccattgaatctacgcccaaaagaaaaacagcaatacgtcaaccgcaaaa

SEQ ID NO: 424200 - DNA, 75 bp, synthetic construct
  source 1..75: mol_type = other DNA
caaagcggtaaaaatcaatacggttataccggtagaaagccttcttgctccgcacttgatcatggagctacacga

SEQ ID NO: 424201 - DNA, 75 bp, synthetic construct
  source 1..75: mol_type = other DNA
gcctctgaatcttcgtcccaaagaaaaacagcagtatgtgaaccgtaagactcggcaggccttgcttggtcgtaa

SEQ ID NO: 424202 - DNA, 75 bp, synthetic construct
  source 1..75: mol_type = other DNA
tctgctacgcccggaagacttacgcgttgacgaaatcaacgacgacaaccacgtcgaagggctgattggttacgt

SEQ ID NO: 424203 - DNA, 75 bp, synthetic construct
  source 1..75: mol_type = other DNA
gcgatgtatatccgccagctactggcacaacgccacctccatccacaaataaacttttgcatcactgccttcgcc

SEQ ID NO: 424204 - DNA, 75 bp, synthetic construct
  source 1..75: mol_type = other DNA
aacgcagcaccatcgaatatgataaacgcgggcgtccggtgagtgtgacggaaggcggtctgacgcgcagcatgg

SEQ ID NO: 424205 - DNA, 75 bp, synthetic construct
  source 1..75: mol_type = other DNA
agcgttatatggaattaaaaataaagcaaaacatgtaatttgtttcggggcagaatatgttttacaactcccttt

SEQ ID NO: 424206 - DNA, 75 bp, synthetic construct
  source 1..75: mol_type = other DNA
ggaatagcattgaatcatgtgaataaatttgatgaagccatcaataattataagtgctgtatcaacgaagatcca

SEQ ID NO: 424207 - DNA, 75 bp, synthetic construct
  source 1..75: mol_type = other DNA
tctggaaggattcgaagaccgctttgtcgatcagatctccggcgggcagcagcagcgcgtggcgctggcccgcgc

SEQ ID NO: 424208 - DNA, 75 bp, synthetic construct
  source 1..75: mol_type = other DNA
gaatgggccgtgaggcgatggtcgccagtgatgcggcgctactggcgtcgggtacggcagccctggagtgcatgc

SEQ ID NO: 424209 - DNA, 75 bp, synthetic construct
  source 1..75: mol_type = other DNA
cgtggcgcggaagtggagatgcttagcgccgatttcctgaaaacggcccagcttttgcgccagacgtatcctgat

SEQ ID NO: 424210 - DNA, 75 bp, synthetic construct
  source 1..75: mol_type = other DNA
gctgataagatggatctgcgggagtctcagggatggctgaaccgtggttatgaaggcgcagctgttggtgcagcg

SEQ ID NO: 424211 - DNA, 75 bp, synthetic construct
  source 1..75: mol_type = other DNA
gaaaaaacggatgccagcgtccagaccgataatgtggcggcattgaagcagggaacgtccggatataaagtacag

SEQ ID NO: 424212 - DNA, 75 bp, synthetic construct
  source 1..75: mol_type = other DNA
ctgcatattcgtgccgatctgacaaagcgttttggcgaactgaagccagatgtttttgttggtattgatgcgcct

SEQ ID NO: 424213 - DNA, 75 bp, synthetic construct
  source 1..75: mol_type = other DNA
cgtgaactgcatcagcagatccgctgcaatgccgatgagcaggcggcacaagccgttctggagttagcacaatga

SEQ ID NO: 424214 - DNA, 75 bp, synthetic construct
  source 1..75: mol_type = other DNA
tattctatcaatgtcgtagcccagaaatgcggctataacagtacttcatatttcatatgtgcatttaaagattat

SEQ ID NO: 424215 - DNA, 75 bp, synthetic construct
  source 1..75: mol_type = other DNA
attgggaatcaagcgacatggatcggtggcatatgcaaagattgcttgataatggcctgatatatagaaagccgt

SEQ ID NO: 424216 - DNA, 75 bp, synthetic construct
  source 1..75: mol_type = other DNA
agcgatatgttgcaggaggtcaggacaagaaacatacctgtaggcaaaggtgcattacgtggggcggtaatcact

SEQ ID NO: 424217 - DNA, 75 bp, synthetic construct
  source 1..75: mol_type = other DNA
ggtgaagtcacggaagaagataaatcagtagccagcgaactactgaagcggagactggagcagaaaaacagtcag

SEQ ID NO: 424218 - DNA, 75 bp, synthetic construct
  source 1..75: mol_type = other DNA
acgaccgcgacgagcccccggacggctgggtgattctgggctcgccggaagcaccggtggatattcaggacgtcc

SEQ ID NO: 424219 - DNA, 75 bp, synthetic construct
  source 1..75: mol_type = other DNA
gcgagcctatgactggggaagttcggcgtttaaggactttgttttggcgcgatttctggacttgccggaactgat

SEQ ID NO: 424220 - DNA, 75 bp, synthetic construct
  source 1..75: mol_type = other DNA
atttgcataaggtatttaacatcgtctatttacttaaaggtaataaggtgatgataagacctgatgacgatccat

SEQ ID NO: 424221 - DNA, 75 bp, synthetic construct
  source 1..75: mol_type = other DNA
gtcaatggcagataccgtattgagaacagtgcatttcaggcagacagtgtggaggctttccgtaaaagctacgtt

SEQ ID NO: 424222 - DNA, 75 bp, synthetic construct
  source 1..75: mol_type = other DNA
atgcgtaaaagcagactgatatctctttttttgtgtctggtattgtcaggcacagtatatgcagaggaaaacgca

SEQ ID NO: 424223 - DNA, 75 bp, synthetic construct
  source 1..75: mol_type = other DNA
ggctaccggtctgaccatggagttccagttcgggactaactggtcttactattcccactatgtagggatatcttc

SEQ ID NO: 424224 - DNA, 75 bp, synthetic construct
  source 1..75: mol_type = other DNA
gcatcattcaggaacaaacaacaaagcggcaacgcaagaaccgcagacgcgtaaaccgtctgtgcgagtactggc

SEQ ID NO: 424225 - DNA, 75 bp, synthetic construct
  source 1..75: mol_type = other DNA
ggaacgggaattgccgattggtcacggcgtattacgcggcgcgttaatatcgtatatccacacaaccagatacct

SEQ ID NO: 424226 - DNA, 75 bp, synthetic construct
  source 1..75: mol_type = other DNA
gcccgggcttttcaacgtggagaatataaagcccctgaaaactggcgtgatccgtgatgtgcttaaggacgctaa

SEQ ID NO: 424227 - DNA, 75 bp, synthetic construct
  source 1..75: mol_type = other DNA
gggtgtagggattgccacagggttgattggtatggctgccgatgcaatggtggaggatatcaactacaccatgat

SEQ ID NO: 424228 - DNA, 75 bp, synthetic construct
  source 1..75: mol_type = other DNA
ctgggaagcgggatcacaggttataactccagttcagccggtgccaccctcggtgtgggaattgctgcgggcctt

SEQ ID NO: 424229 - DNA, 75 bp, synthetic construct
  source 1..75: mol_type = other DNA
gtgcgaaaattcagaccagtactgaaacgggtaaccagcataaataccagacccgtgtggtctcaaatgcgaaca

SEQ ID NO: 424230 - DNA, 75 bp, synthetic construct
  source 1..75: mol_type = other DNA
gtggcttgcgcagtgcgggctgacggcggaacagatggccgcgcaactggaggcggaatacatcccggagaggaa

SEQ ID NO: 424231 - DNA, 75 bp, synthetic construct
  source 1..75: mol_type = other DNA
ctggatccaggcgaatgtgctcaaggccgataaaatggaccttcgtgagtctcagggctggttaagccggggtta

SEQ ID NO: 424232 - DNA, 75 bp, synthetic construct
  source 1..75: mol_type = other DNA
atggaatgtgtatgtctcataatgattatggcacaagaaatttgtatgcaattaaataaattgatgactgttatg

SEQ ID NO: 424233 - DNA, 75 bp, synthetic construct
  source 1..75: mol_type = other DNA
aggcacctgaacctcccgcagcttgaccgggactacgactggaacgacaacggacagctaatccgcatcagcggc

SEQ ID NO: 424234 - DNA, 75 bp, synthetic construct
  source 1..75: mol_type = other DNA
ctgcctgcggtaatagagaaatccgttgagccgatgaagtcaatcgacggtatcaagattattcaggtcgatggt

SEQ ID NO: 424235 - DNA, 75 bp, synthetic construct
  source 1..75: mol_type = other DNA
tgaaaccatctggcttgaaccttccacggatcgcaccgtttatctgcaaatcaaaaatacttccgataaggacat

SEQ ID NO: 424236 - DNA, 75 bp, synthetic construct
  source 1..75: mol_type = other DNA
gcattactggattcaggcgaacgtactgaaagctgataaaatggatctgcgggaagcacagggctttctgagtcg

SEQ ID NO: 424237 - DNA, 75 bp, synthetic construct
  source 1..75: mol_type = other DNA
gaaaaaacaaacgccagcgtgcagaccgataatgtcgcggctctgaaacagggcacttctggttataaagtacag

SEQ ID NO: 424238 - DNA, 75 bp, synthetic construct
  source 1..75: mol_type = other DNA
aataattgaatcgcgtgcggcgaaaactttaggtgagtgtaccagaggagctcatagtggactgcctttttatcg

SEQ ID NO: 424239 - DNA, 75 bp, synthetic construct
  source 1..75: mol_type = other DNA
atctggaagtcaaaacccagatgagtgaaaccatctggcttgaaccttccactgatcgcactgtttatctgcaaa

SEQ ID NO: 424240 - DNA, 75 bp, synthetic construct
  source 1..75: mol_type = other DNA
gccgataaaatggaccttcgtgaatctcagggttggttaagccggggttatgagggggcagtgactggcgccgct

SEQ ID NO: 424241 - DNA, 75 bp, synthetic construct
  source 1..75: mol_type = other DNA
ggccctttcagggtgtggtgcgatgagcacagcaatcaagaagcgtaaccttgaggtgaaaactcagatgagtga

SEQ ID NO: 424242 - DNA, 75 bp, synthetic construct
  source 1..75: mol_type = other DNA
cagcaatcaagaagcgtaatcttgaagtcaaaactcagatgagtgaaaccatctggctggagccttccagtgaac

SEQ ID NO: 424243 - DNA, 75 bp, synthetic construct
  source 1..75: mol_type = other DNA
aaggcatactactggattcaggccaatgtcctgaaggcagaaaaaatggatttgcgggagtcacaaacctggctg

SEQ ID NO: 424244 - DNA, 75 bp, synthetic construct
  source 1..75: mol_type = other DNA
cacactcggtgtgggccttgctgccggtctggtgggtatggctgcagatgcgatggtggaagatgtgaactatac

SEQ ID NO: 424245 - DNA, 75 bp, synthetic construct
  source 1..75: mol_type = other DNA
attccagctctgccggtgcggcgctgggtgtagggattgccacagggttgattggtatggctgccgatgcaatgg

SEQ ID NO: 424246 - DNA, 75 bp, synthetic construct
  source 1..75: mol_type = other DNA
gattgccacagggttgattggtatggctgccgatgcaatggtggaggatatcaactacaccatgatcacggatgt

SEQ ID NO: 424247 - DNA, 75 bp, synthetic construct
  source 1..75: mol_type = other DNA
cgctggggttgtatttcaattacctggtgcatggtatgggcgtcattttgatgaccctgaatatggcctcgctgg

SEQ ID NO: 424248 - DNA, 75 bp, synthetic construct
  source 1..75: mol_type = other DNA
tttgcttttgtcattggttttacctctgctggaggtgttgtgcaaattggcctgacgttaatggctgaacgtttc

SEQ ID NO: 424249 - DNA, 75 bp, synthetic construct
  source 1..75: mol_type = other DNA
actcgcgtcgtctctaacgctaataaagttaacctcaagttccctgaagcccagcctgttcttgaagaccagctg

SEQ ID NO: 424250 - DNA, 75 bp, synthetic construct
  source 1..75: mol_type = other DNA
tcagtgatgccgttaaagacaaaggctaccaggttgttagctcacctgacaaggcatactactggattcaggcca

SEQ ID NO: 424251 - DNA, 75 bp, synthetic construct
  source 1..75: mol_type = other DNA
tggaagatgtgaactataccatgatcacggatgtacagattgcagagcgtactaaggcaacggtgacaacggata

SEQ ID NO: 424252 - DNA, 75 bp, synthetic construct
  source 1..75: mol_type = other DNA
ctgggtacaggctaatgtcctcaaagcccagaaaatggacttacgtgaagcgcaaggtttcctgaaaacgggcta

SEQ ID NO: 424253 - DNA, 75 bp, synthetic construct
  source 1..75: mol_type = other DNA
gaatttactcgtgagcaggccacccaagaagtgttaatggctgccgctgtgggcaagcttaatcgcgtgaatcag

SEQ ID NO: 424254 - DNA, 75 bp, synthetic construct
  source 1..75: mol_type = other DNA
atggaagcattactacagcttaaaggcattgataaagcctttccgggcgtaaaagccctctcgggcgccgcgtta

SEQ ID NO: 424255 - DNA, 75 bp, synthetic construct
  source 1..75: mol_type = other DNA
atggaagcgttactacagcttataggtatcgataaagcgttcccgggcgtaaaagccctctcgggcgccgcgtta

SEQ ID NO: 424256 - DNA, 75 bp, synthetic construct
  source 1..75: mol_type = other DNA
ctggctgtgtacgccgaacgccgccaggaccgcaacgggccttacgcctgcctgatgagtatcaccctgaactga

SEQ ID NO: 424257 - DNA, 75 bp, synthetic construct
  source 1..75: mol_type = other DNA
ctggcggtatacgccgaacgccgccaggaccgcaacgggccctatgcctgtctgatgagtatcaccctgaactga

SEQ ID NO: 424258 - DNA, 75 bp, synthetic construct
  source 1..75: mol_type = other DNA
atgaaaattatcagtaaacgccgggcaatgacgatataccgccagcatcctgagtcccgaatctttcgctactgc

SEQ ID NO: 424259 - DNA, 75 bp, synthetic construct
  source 1..75: mol_type = other DNA
ccataccgtctgccggggcagcagcatgatgaggaatcagggctgtactataaccggaaccggtactatgacccg

SEQ ID NO: 424260 - DNA, 75 bp, synthetic construct
  source 1..75: mol_type = other DNA
ggtggaagatgagatcaaccgtctgcgctataactggcaggagagtcgcccctccacgcttacggcgttgctggg

SEQ ID NO: 424261 - DNA, 75 bp, synthetic construct
  source 1..75: mol_type = other DNA
ctggcgaccgcgggaggcatgctttctactgttctgatgatgccactggttaatttaattggcggtgataataaa

SEQ ID NO: 424262 - DNA, 75 bp, synthetic construct
  source 1..75: mol_type = other DNA
gcatcactgaccgaagattcgctgattgagatgatggtgggccgcaagctggaagatcaatatccgcacctggac

SEQ ID NO: 424263 - DNA, 75 bp, synthetic construct
  source 1..75: mol_type = other DNA
ttcctcggtcgtgagtttgtaaatcgctttggcaaaattgactggaaaaccatgtatgccgaagcggataaactc

SEQ ID NO: 424264 - DNA, 75 bp, synthetic construct
  source 1..75: mol_type = other DNA
cgcggtggtaaggcagcacagccggacggccatacgctggcgcggctgtggggggcgctgccgccggatatccgg

SEQ ID NO: 424265 - DNA, 75 bp, synthetic construct
  source 1..75: mol_type = other DNA
ttcctgacatttccggcgtgctggcggtatacggcgaacgccgccaggaccgtaacgggccttatgcctgtctga

SEQ ID NO: 424266 - DNA, 75 bp, synthetic construct
  source 1..75: mol_type = other DNA
gatggacacgatggcagaagcacacatgtgggcggtggataaaccgcttaacccgtcgctagcccgcgacattat

SEQ ID NO: 424267 - DNA, 75 bp, synthetic construct
  source 1..75: mol_type = other DNA
tatacctttgttaatgataattgtagtattcatagggttggattcagtcgcatatataagcggttatttcaaaaa

SEQ ID NO: 424268 - DNA, 75 bp, synthetic construct
  source 1..75: mol_type = other DNA
tggacaagacttgatcctcttccatattcacagagaatattgaatattgcccatgattttcctataacgaaagaa

SEQ ID NO: 424269 - DNA, 75 bp, synthetic construct
  source 1..75: mol_type = other DNA
tggcaatttgacagtcaaaggtaatatttccactttctctctttctaatccatgggttattctcggtgatgtgac

SEQ ID NO: 424270 - DNA, 75 bp, synthetic construct
  source 1..75: mol_type = other DNA
gtttccttttaataaacccgttctgatcactgacgtgctgaccgccagtggtaaagcgggtgagtccggtacgct

SEQ ID NO: 424271 - DNA, 75 bp, synthetic construct
  source 1..75: mol_type = other DNA
ttgccccaggaaaaacggcggctgattatgagttttcaagctctgcctcctgggtcgatgttgatgctaccggta

SEQ ID NO: 424272 - DNA, 75 bp, synthetic construct
  source 1..75: mol_type = other DNA
ttcttcccaagctgactcgctgattaaaatttcgcggatctgggccgatttttttcccgcaaacacatcgaatca

SEQ ID NO: 424273 - DNA, 75 bp, synthetic construct
  source 1..75: mol_type = other DNA
cggacgaagcaattggtgttgttgaccgggctaaagcactcgaccaaccatttatgctttatctggcttataacg

SEQ ID NO: 424274 - DNA, 75 bp, synthetic construct
  source 1..75: mol_type = other DNA
gcgtggttggcggagaatggtcgccagacagaatgcgaagaattgctggcatggcacctttttccgtggtcaaca

SEQ ID NO: 424275 - DNA, 75 bp, synthetic construct
  source 1..75: mol_type = other DNA
tgaaaagatgcattgttattacccactggcagatttagtcgtcattccttcccagttccaggaaccattttgcat

SEQ ID NO: 424276 - DNA, 75 bp, synthetic construct
  source 1..75: mol_type = other DNA
attttgtcctgaaatcatatgatgaaacagtccttgctgttatccagtttggtgaaactgcaaccgtcagacagc

SEQ ID NO: 424277 - DNA, 75 bp, synthetic construct
  source 1..75: mol_type = other DNA
aacagtcctggctgttatccagtttggtgaaaccgcaaccgtcagacagcaaaagaaaaaactgattatccagcg

SEQ ID NO: 424278 - DNA, 75 bp, synthetic construct
  source 1..75: mol_type = other DNA
cttgggaaaccatggtaaagttcgggtgtcacagaaccccgaaccgcagcggttgaaattcgaccaatccaaagc

SEQ ID NO: 424279 - DNA, 75 bp, synthetic construct
  source 1..75: mol_type = other DNA
tctaacagcatttatattgatggcattcgcgatatcggcagcgtctcgcgcgacaccttcaataccgagcaggtc

SEQ ID NO: 424280 - DNA, 75 bp, synthetic construct
  source 1..75: mol_type = other DNA
agcaggattacctgatgacggcgattatgggtggggcgtcgaatattactcagcccaccagcgatgtgaatagct

SEQ ID NO: 424281 - DNA, 75 bp, synthetic construct
  source 1..75: mol_type = other DNA
gcaatggcgcaaacgctaatggtcagacggataccttcgcgatttatgccttcgatacgctgcaaatcacccgtg

SEQ ID NO: 424282 - DNA, 75 bp, synthetic construct
  source 1..75: mol_type = other DNA
taatgcgaacaaggttaacctgaaatttgaagaggcgaagcctgttctcgaagaccagctggccaaatcaatcgc

SEQ ID NO: 424283 - DNA, 75 bp, synthetic construct
  source 1..75: mol_type = other DNA
aaaaaacggcatgtgtcggatgagtttaaattcagtaaaggcgtttggtatataacgatgccagtatcttcctta

SEQ ID NO: 424284 - DNA, 75 bp, synthetic construct
  source 1..75: mol_type = other DNA
atgagcacagcaatcaagaagcgtaaccttgaggtgaagactcagatgagtgagaccatctggcttgaacccgcc

SEQ ID NO: 424285 - DNA, 75 bp, synthetic construct
  source 1..75: mol_type = other DNA
ggcagcggtaacagtgccaaccgcaccgattttaaaccgcaaaaagccaacaccagcgagattggcaccaaatgg

SEQ ID NO: 424286 - DNA, 75 bp, synthetic construct
  source 1..75: mol_type = other DNA
cagtaatttcgcccttgcgcagtctggtagcggtaacagtgccagccgtaccgactttaaaccgcaaaaagccaa

SEQ ID NO: 424287 - DNA, 75 bp, synthetic construct
  source 1..75: mol_type = other DNA
acgccccggacgtcgtgtctccgtcattgccggccttgagtggaaagacattcccgccggacagtccaccggaag

SEQ ID NO: 424288 - DNA, 75 bp, synthetic construct
  source 1..75: mol_type = other DNA
ctgcggtacgtctgaatatgatgggcgaaaaaacgcacgatgccgggcgcgataaagtcaaaaatgagcgttacg

SEQ ID NO: 424289 - DNA, 75 bp, synthetic construct
  source 1..75: mol_type = other DNA
tctaacagcatttatattgatggcatccgcgatattggtagtgtctcacgtgacactttcaataccgaacaggtg

SEQ ID NO: 424290 - DNA, 75 bp, synthetic construct
  source 1..75: mol_type = other DNA
gtgcgggcgcacggtatatcggcagtatgcataaaggttcagacggcgcggtgggaacgccagcgtttaccgaag

SEQ ID NO: 424291 - DNA, 75 bp, synthetic construct
  source 1..75: mol_type = other DNA
tcagttccactctggccctttcagggtgtggtgcgatgagcacagcaatcaagaagcgtaaccttgaggtgaaga

SEQ ID NO: 424292 - DNA, 75 bp, synthetic construct
  source 1..75: mol_type = other DNA
cagcatcactatgtttgtcttcatcttcgtgattggtgtattgcatcaactggtgacacctatccagtgggtaat

SEQ ID NO: 424293 - DNA, 75 bp, synthetic construct
  source 1..75: mol_type = other DNA
atgcagaaaaatgtgactcccggcaggcgaaaaggctgccctaattatcctcccgaatttaaacggcagctcgct

SEQ ID NO: 424294 - DNA, 75 bp, synthetic construct
  source 1..75: mol_type = other DNA
aaatggcgccaacagtggcgcgagggaaagctgttgttgccttcctctgagagtcctcagctacttcctgtgact

SEQ ID NO: 424295 - DNA, 75 bp, synthetic construct
  source 1..75: mol_type = other DNA
ttatgccgcagcagatcatcgccgtgcagagattgtcatgaaccagtactttgataaggttcccggtaatgtctg

SEQ ID NO: 424296 - DNA, 75 bp, synthetic construct
  source 1..75: mol_type = other DNA
agcatattcaatttaccccaatgttatcaagaaggaaatttcataacaactgctcaaataatattaagaacacat

SEQ ID NO: 424297 - DNA, 75 bp, synthetic construct
  source 1..75: mol_type = other DNA
acaaatttgtatttactggaggccgcggtggcgcagggcatgctatggtcacggttgcttcagatatcgccgaag

SEQ ID NO: 424298 - DNA, 75 bp, synthetic construct
  source 1..75: mol_type = other DNA
aagccttagccgatactattttaaaatcgtggtctacaaatgttgaaagtgtgaagcaggctttcgaagacactg

SEQ ID NO: 424299 - DNA, 75 bp, synthetic construct
  source 1..75: mol_type = other DNA
taagcttattgaacgttattggagtacattggaggcagaacttctgagagataatgttgctgtcattatccctga

SEQ ID NO: 424300 - DNA, 75 bp, synthetic construct
  source 1..75: mol_type = other DNA
ctttgggccagtgatccgaaacaacaactcgcataccttgcgacaaaacgctggtctcgcttgcactgtcctgac

SEQ ID NO: 424301 - DNA, 75 bp, synthetic construct
  source 1..75: mol_type = other DNA
gagtcctcagctacttcctgtgactctcgatgccaccgccgtacggccagaggcgcatgctgaggaccctgagct

SEQ ID NO: 424302 - DNA, 75 bp, synthetic construct
  source 1..75: mol_type = other DNA
ggggtgtaattactctgagtgactatttgaggatgaatgtaatggatgaagaaacaccggtgcctcaaaaatttg

SEQ ID NO: 424303 - DNA, 75 bp, synthetic construct
  source 1..75: mol_type = other DNA
atgagcaacgacatcgcaaacatcaacgcaccagtagacacagcaatcgctggaactgctgcaactattttcagc

SEQ ID NO: 424304 - DNA, 75 bp, synthetic construct
  source 1..75: mol_type = other DNA
aaccgccggaaaataaacagcagagcttcagccgtgcacttgacgtttctcttgatggcagccaggcaggaaaca

SEQ ID NO: 424305 - DNA, 75 bp, synthetic construct
  source 1..75: mol_type = other DNA
tcgatccttttaataccgcacagaaaaaaacagagaaaccagaggaagaaaaagtcatttcttctgaaaagactg

SEQ ID NO: 424306 - DNA, 75 bp, synthetic construct
  source 1..75: mol_type = other DNA
aatgaccaggacggtgatgcagccagtacggaaaagacggtagaactggttaaaaatggggcgtctgtatcattg

SEQ ID NO: 424307 - DNA, 75 bp, synthetic construct
  source 1..75: mol_type = other DNA
gtgcacaaattgctagccagaaaattttacctcgtgattatcagcaacttttggaaaatccggatgcagcagtta

SEQ ID NO: 424308 - DNA, 75 bp, synthetic construct
  source 1..75: mol_type = other DNA
taagaaagatattacaaaaaaagtagtcgaaagggtttcaaatgcactaaataatgcagttaaagaagcacagca

SEQ ID NO: 424309 - DNA, 75 bp, synthetic construct
  source 1..75: mol_type = other DNA
acatggagcaaagtgaagtggcgattgttgaattgcattttgatggcgatattgcacctgatcaccaagtatccc

SEQ ID NO: 424310 - DNA, 75 bp, synthetic construct
  source 1..75: mol_type = other DNA
gaactcacaggctgtgtcttcggcgcgatcccccttcagcttccatccaaaactcaaactggttgccgaccccct

SEQ ID NO: 424311 - DNA, 75 bp, synthetic construct
  source 1..75: mol_type = other DNA
gtcgttacccatgaagcggtaggtaaatgtgaagcggtgtcagaaattcgtggcaccgctttaggccagggggct

SEQ ID NO: 424312 - DNA, 75 bp, synthetic construct
  source 1..75: mol_type = other DNA
taaatctgtaattctgaacaccacagattacttgcgcattgcgcaaccagaactggtcaaattccgccgtactac

SEQ ID NO: 424313 - DNA, 75 bp, synthetic construct
  source 1..75: mol_type = other DNA
aaataataaagataatcagactgattatacggccaacagtagacaggcatttgctgatattgcgagagaatcatt

SEQ ID NO: 424314 - DNA, 75 bp, synthetic construct
  source 1..75: mol_type = other DNA
gagaagggaacagccgcatatttgatgtataaaacgggcacgtttaatcatggtcagggagccgtgtttatcgct

SEQ ID NO: 424315 - DNA, 75 bp, synthetic construct
  source 1..75: mol_type = other DNA
gctggccagtccagcggaggtcgatgaactaacaggctgcgtcttcggtgctattccaccttttagtttccatcc

SEQ ID NO: 424316 - DNA, 75 bp, synthetic construct
  source 1..75: mol_type = other DNA
accatgttctgctacatcgtcggtgtgagcaaatgcctgcgtgatatccagactcacgcggagtacatcaacgac

SEQ ID NO: 424317 - DNA, 75 bp, synthetic construct
  source 1..75: mol_type = other DNA
cagatgttacagttgcctctgtaactaatctgatggatgtctgcttaaaagcagtttcaaatactaatcaaccag

SEQ ID NO: 424318 - DNA, 75 bp, synthetic construct
  source 1..75: mol_type = other DNA
aggtgctgtagcagagttcgcggccatgatgagctatattgtcggcgccagtaaatgcctgcgcgatatccagac

SEQ ID NO: 424319 - DNA, 75 bp, synthetic construct
  source 1..75: mol_type = other DNA
agcgccccactcaagccaaactaccgtgaacacatccattcacctgaaggtgttcttggtttgagagagcactct

SEQ ID NO: 424320 - DNA, 75 bp, synthetic construct
  source 1..75: mol_type = other DNA
atgaacaataacaaactggctaccagtgaattaataagccttgccgacagcgcaatatctttaaacaacgcagcg

SEQ ID NO: 424321 - DNA, 75 bp, synthetic construct
  source 1..75: mol_type = other DNA
agggcgacatgaccggccagggaaagatcatcaaaagttcactttttgtactaaataattcgcattttatgttta

SEQ ID NO: 424322 - DNA, 75 bp, synthetic construct
  source 1..75: mol_type = other DNA
tcgcatatcagaatacgaattcattgaaaatcaagactatattttgctttccaatttgggaaagcaaacatctgg

SEQ ID NO: 424323 - DNA, 75 bp, synthetic construct
  source 1..75: mol_type = other DNA
ctggcgcatgttgcccaggacagcgaaattccggttgcttttggggttttgaccactgaaagcattgaacaagcg

SEQ ID NO: 424324 - DNA, 75 bp, synthetic construct
  source 1..75: mol_type = other DNA
accatgttctgctacatcgtcggtgtgagtaaatgcctgcgtgatatccagacccacgcggagtacatcaacgac

SEQ ID NO: 424325 - DNA, 75 bp, synthetic construct
  source 1..75: mol_type = other DNA
tcgtgaagaattatcaccggcagacaaagcgcaaaaggttgtagccagcttcatgcccgccattctggaagcgat

SEQ ID NO: 424326 - DNA, 75 bp, synthetic construct
  source 1..75: mol_type = other DNA
tacagtgccccactgaagcccggctaccgcagcctgattcattctccgtctggtgttctcggcctgacggagaac

SEQ ID NO: 424327 - DNA, 75 bp, synthetic construct
  source 1..75: mol_type = other DNA
tcgccgtctggtgttctcggcctgacggagaactcactgctgatgaatctgctgaaccagttacaggacgacggg

SEQ ID NO: 424328 - DNA, 75 bp, synthetic construct
  source 1..75: mol_type = other DNA
ctcaccgtcagtttctctgcgccgcatggccgatgaacacggcacggataaaactatcgcccagaaactagcgcg

SEQ ID NO: 424329 - DNA, 75 bp, synthetic construct
  source 1..75: mol_type = other DNA
ttgttgtagcacaaaacaaactatcgaattaacaaaaagacttgtcaatgccggcgccgattacatttccgttgt

SEQ ID NO: 424330 - DNA, 75 bp, synthetic construct
  source 1..75: mol_type = other DNA
tattacacgtagaccaattcatatgccaaacgacgcgatcgttgaagacatcaaggaaatgttgaaaggctataa

SEQ ID NO: 424331 - DNA, 75 bp, synthetic construct
  source 1..75: mol_type = other DNA
tctataacctgccgggccagacaggattaagcatcgaatacgaaacggcaaatcgtttagccgatatcaaaaata

SEQ ID NO: 424332 - DNA, 75 bp, synthetic construct
  source 1..75: mol_type = other DNA
gtatccagcctggtgacaagatggcaggtcgtcatggtaacaagggtgtaatttctaagatcaacccgatcgaag

SEQ ID NO: 424333 - DNA, 75 bp, synthetic construct
  source 1..75: mol_type = other DNA
tccgggtgaagcaggtatcgacatctacaacctgaccaaatacacccgttctaaccagaacacttgtatcaacca

SEQ ID NO: 424334 - DNA, 75 bp, synthetic construct
  source 1..75: mol_type = other DNA
tttataacttgccgggtcagacagggttgagtattgaatatgaaacggcaaaccgtttagccgatattgaaaata

SEQ ID NO: 424335 - DNA, 75 bp, synthetic construct
  source 1..75: mol_type = other DNA
cgagaaaagccaggtgcagcatatggtccgcaccttgctgaaactgcccgctaatccacaggcggatgccgccga

SEQ ID NO: 424336 - DNA, 75 bp, synthetic construct
  source 1..75: mol_type = other DNA
atggctattattctcggcattgatccgggttcgcgcgtgaccggctatggcgtaattcgccaggtaggcaggcaa

SEQ ID NO: 424337 - DNA, 75 bp, synthetic construct
  source 1..75: mol_type = other DNA
actcaaccgtcggcgttgtacaaacgcgtaaggcgttacaggctgcgggtatgacttttcgcgtcagcgatattc

SEQ ID NO: 424338 - DNA, 75 bp, synthetic construct
  source 1..75: mol_type = other DNA
tgcgctggcgattgccatcacccactgccatgtcagccagaatgcgatgcagatgagcgaatcgaggctgaatct

SEQ ID NO: 424339 - DNA, 75 bp, synthetic construct
  source 1..75: mol_type = other DNA
cgcgcggcgtggcgattgtggcggcggtgaatcaggaattgccggtatttgaatacgcggcacgtcaggtaaagc

SEQ ID NO: 424340 - DNA, 75 bp, synthetic construct
  source 1..75: mol_type = other DNA
gaatacgcggcacgtcaggtaaagcaaacggtggtaggtattggtagtgccgaaaaaagccaggtgcagcatatg

SEQ ID NO: 424341 - DNA, 75 bp, synthetic construct
  source 1..75: mol_type = other DNA
caacctgttcgtacgtatcgaccgtcgccgtaaactgcctgctaccatcattctgcgcgccctgaactacaccac

SEQ ID NO: 424342 - DNA, 75 bp, synthetic construct
  source 1..75: mol_type = other DNA
acctgaatttctggcctgccgggccgattttccgccgtctgggtgcgttctttattcgccgtacttttaaaggca

SEQ ID NO: 424343 - DNA, 75 bp, synthetic construct
  source 1..75: mol_type = other DNA
cgcgaaacgctgcaacgttatgccatcaccttctggttgttgagtgccaacccgtcgatcaaccgcggtacgctg

SEQ ID NO: 424344 - DNA, 75 bp, synthetic construct
  source 1..75: mol_type = other DNA
caggaggaagtttagtaattagaaaaagggtttttgagaagattaagtttgaatgcataaaccgtggcgaagaca

SEQ ID NO: 424345 - DNA, 75 bp, synthetic construct
  source 1..75: mol_type = other DNA
gcacggcatcaacgcaccggagttcttcgacaaagcggtgttcagttctctggtgctgacgctgcgtgatgaagg

SEQ ID NO: 424346 - DNA, 75 bp, synthetic construct
  source 1..75: mol_type = other DNA
aaccggctttatcagggcatcaacgtccacaacgccgaacgcgttcgccagttggcccacgacggtcatgagctg

SEQ ID NO: 424347 - DNA, 75 bp, synthetic construct
  source 1..75: mol_type = other DNA
ctcgccatcggtttcactgcgccgcatggctgatgaacacggcacggataaaaccatcgctcaaaaactggcgcg

SEQ ID NO: 424348 - DNA, 75 bp, synthetic construct
  source 1..75: mol_type = other DNA
gcaaccgcgtctgaatccgctgcactgcaatacctggcaccgtacgctggttgcgcaatgggtgaatacttccgt

SEQ ID NO: 424349 - DNA, 75 bp, synthetic construct
  source 1..75: mol_type = other DNA
caaacgtgcgctggaaatcgaagaaatgcagctcaaacaggcgaagaaagacctgtctgaagaactgcaaatcct

SEQ ID NO: 424350 - DNA, 75 bp, synthetic construct
  source 1..75: mol_type = other DNA
cgttaagtctgatgacgtgaatggtcgtactaagatgtataaaaacatcgtggacggcaaccatcagatggagcc

SEQ ID NO: 424351 - DNA, 75 bp, synthetic construct
  source 1..75: mol_type = other DNA
gcacacatggcaaatccaagatgaagattatcttaaaaattgtcaagtggttaaagatgaatttgataaaaaatt

SEQ ID NO: 424352 - DNA, 75 bp, synthetic construct
  source 1..75: mol_type = other DNA
aaaataaatcacacttcggatatgaagttaatcatcttcaagaagccttttcgatatatgatggtcattttgaaa

SEQ ID NO: 424353 - DNA, 75 bp, synthetic construct
  source 1..75: mol_type = other DNA
actcaacggtcggcgttgtacaaacgcgtaaggcgttacaggcagcgggtatgacctttcgcgtcagcgatattc

SEQ ID NO: 424354 - DNA, 75 bp, synthetic construct
  source 1..75: mol_type = other DNA
ttgcgctatgaaatacgccgcgagtttgcaccctatgtaggcgtctcctggaatcagctttacgggaaaacatcc

SEQ ID NO: 424355 - DNA, 75 bp, synthetic construct
  source 1..75: mol_type = other DNA
cgtgcgtaccgtgctggaagccttaccggcggcgtcgcacccgatggatgttatgcgcaccggtgtttccgcgct

SEQ ID NO: 424356 - DNA, 75 bp, synthetic construct
  source 1..75: mol_type = other DNA
tcagctgtacggaacaacgtccgacatggcgaaaagggaaggcgaaaaagacagtcagatagtattcctggcggg

SEQ ID NO: 424357 - DNA, 75 bp, synthetic construct
  source 1..75: mol_type = other DNA
aagctgcgctggagtggctgaacagtgcaaaagtgactgatgcactgctgttatggcccggggtggacagcaatg

SEQ ID NO: 424358 - DNA, 75 bp, synthetic construct
  source 1..75: mol_type = other DNA
gtcatgctggtcagccctgggattcctggtctgacgctgtcctgtcagatctgcggctgttgcttaaacgtctcc

SEQ ID NO: 424359 - DNA, 75 bp, synthetic construct
  source 1..75: mol_type = other DNA
ttgccgtcggtgcattgatgcgtgagctttacccccaaagtgcgctgctgcttagcagcgcactgctcggtgggg

SEQ ID NO: 424360 - DNA, 75 bp, synthetic construct
  source 1..75: mol_type = other DNA
ttccgccgctgctgcaaatcttcttctggtactttgccgtgttgcgcaatttgcccggaccacgccaggcagtga

SEQ ID NO: 424361 - DNA, 75 bp, synthetic construct
  source 1..75: mol_type = other DNA
gtgtattgtgttcgcttctttttaggcttctttatcggtctggcgagactttcggataactggctgctacgaaaa

SEQ ID NO: 424362 - DNA, 75 bp, synthetic construct
  source 1..75: mol_type = other DNA
atgtgtcgcttcgcagggcgttgtatatgcccgcaatggtagccaccagtaagactgagtggggacgggcgttcc

SEQ ID NO: 424363 - DNA, 75 bp, synthetic construct
  source 1..75: mol_type = other DNA
atgtttattaaattactttcctttatatgtggtttgttactgggatttgcactattgagtggctcctctgttatt

SEQ ID NO: 424364 - DNA, 75 bp, synthetic construct
  source 1..75: mol_type = other DNA
ttattgtcggtttgctcaatacgctactggtttcagcattgtgtattgtgttcgcttctgttctgggcttcttta

SEQ ID NO: 424365 - DNA, 75 bp, synthetic construct
  source 1..75: mol_type = other DNA
ctggtactttgccgtgttgcgcaatttgcccggaccacgccaggcagtgagtgcgtttgatctggcctttttgag

SEQ ID NO: 424366 - DNA, 75 bp, synthetic construct
  source 1..75: mol_type = other DNA
tggtgattcgttttgctccctcagtatgagggaaatggtggttctgtttagtcatatttttcatagtcacagcac

SEQ ID NO: 424367 - DNA, 75 bp, synthetic construct
  source 1..75: mol_type = other DNA
gcactatcttcagccgggcagtctgtaccggacagcgcgctggcttgaaatgaaaacggagcacagtcttccctg

SEQ ID NO: 424368 - DNA, 75 bp, synthetic construct
  source 1..75: mol_type = other DNA
cgatatggaccttatcgagatgcagcccgcattttcgccgcgagggttattggcaaaatatctcttttcttcaga

SEQ ID NO: 424369 - DNA, 75 bp, synthetic construct
  source 1..75: mol_type = other DNA
gagcttgccgatactcagattcgttttccagcgttcttgttagcgactcattattgggaaggtcgctggctgatg

SEQ ID NO: 424370 - DNA, 75 bp, synthetic construct
  source 1..75: mol_type = other DNA
agctgcgcgaaggccgcgtcaccttaccactacgcgaccgaccggggcatacactggtgctcggcaccacccgcg

SEQ ID NO: 424371 - DNA, 75 bp, synthetic construct
  source 1..75: mol_type = other DNA
aaatctatgatccgatcctggacgggctgcgcagtgcgatccgttatgaccggacctattttgataaaattgtgg

SEQ ID NO: 424372 - DNA, 75 bp, synthetic construct
  source 1..75: mol_type = other DNA
tctgccggctggcggggcgggtaaaaatgtggtgaacctgcactgtgatgagtttaacgaactgatgggcgatga

SEQ ID NO: 424373 - DNA, 75 bp, synthetic construct
  source 1..75: mol_type = other DNA
ctgattatttggttattctccggcgtctttggtgggctcatcagcgcctgttatgcgttacgcgatagtgatcag

SEQ ID NO: 424374 - DNA, 75 bp, synthetic construct
  source 1..75: mol_type = other DNA
aactataatgctataactctgggaaatggttggaatacaccgctgggtgccatctcttttgacgctacccgatcg

SEQ ID NO: 424375 - DNA, 75 bp, synthetic construct
  source 1..75: mol_type = other DNA
acgatgctgttttgtccccctaccatgatcagggacatatcgcgaccaagatggtggattttcatcgcacgatat

SEQ ID NO: 424376 - DNA, 75 bp, synthetic construct
  source 1..75: mol_type = other DNA
cgggcattttttgacggtgaaggggagtcggtaaaaaccgttgaagtcgtgttacggccccaagtgtggaaccgc

SEQ ID NO: 424377 - DNA, 75 bp, synthetic construct
  source 1..75: mol_type = other DNA
ttgaataatgctctggccgcagctcaacagaagatcacgattatttccccctggttatcctggcaaaaagtggag

SEQ ID NO: 424378 - DNA, 75 bp, synthetic construct
  source 1..75: mol_type = other DNA
ttgtaggctttcatgtcactagggaaccgcgctcttttgcgtatccttttgtctcctcaccgtatgatcggtgtt

SEQ ID NO: 424379 - DNA, 75 bp, synthetic construct
  source 1..75: mol_type = other DNA
tcaaccagcgcgattccggtatcaaatgtatctatgttgctatcggtcagaaagcgtccaccatttctaacgtgg

SEQ ID NO: 424380 - DNA, 75 bp, synthetic construct
  source 1..75: mol_type = other DNA
atcctcatatgttaaggcatgcttgcggttatgaattggcggagcgtggtgcagatactcgtttaattcaggatt

SEQ ID NO: 424381 - DNA, 75 bp, synthetic construct
  source 1..75: mol_type = other DNA
gggtgacagaagacacagcagcctccaataaaatgacatatataagaaaagatgctgataagggagatgctactg

SEQ ID NO: 424382 - DNA, 75 bp, synthetic construct
  source 1..75: mol_type = other DNA
atgccttgcaagcgtatcgcatcggtcactggctgtggaatcaggggcgtcgcgcactggctattttcctgcaaa

SEQ ID NO: 424383 - DNA, 75 bp, synthetic construct
  source 1..75: mol_type = other DNA
taaaccgattaccgaggagtttattcgcggcatgagtgcgggggtgccaatcctcgggacagtgaccaaaaagtg

SEQ ID NO: 424384 - DNA, 75 bp, synthetic construct
  source 1..75: mol_type = other DNA
caatcacggcgatctggtgaataaaatcctccgtgcaggtaacgaccatgagaaagagtacctggtcacggttga

SEQ ID NO: 424385 - DNA, 75 bp, synthetic construct
  source 1..75: mol_type = other DNA
gttgggggagtggcgcgatttaactgacgacgaactcatcgagctctttaagctcattgaaaattcctcttccgg

SEQ ID NO: 424386 - DNA, 75 bp, synthetic construct
  source 1..75: mol_type = other DNA
gttcgataccgccatcgctgccatcggtttttactggcactgtttatcggcttacgcagccgcaaaaaaacgcgg

SEQ ID NO: 424387 - DNA, 75 bp, synthetic construct
  source 1..75: mol_type = other DNA
tcccagtttgatggaagcttttccacgctcaccggggacagccaatattttaattaaagcatttgtttccagcgg

SEQ ID NO: 424388 - DNA, 75 bp, synthetic construct
  source 1..75: mol_type = other DNA
ctggttagccagtggctggcacaatacggacaatttgtcgctggcatgtcatacaccatgtcggtaatgctgcca

SEQ ID NO: 424389 - DNA, 75 bp, synthetic construct
  source 1..75: mol_type = other DNA
ccaccgccgctggcgttccggcacgcattgtcggtaaaccagacagcgataagccatcaatggatatggatcagc

SEQ ID NO: 424390 - DNA, 75 bp, synthetic construct
  source 1..75: mol_type = other DNA
ggcggtgattgaaaacgacgtgtcgattctgcaatccgtcacccttggcggtactgggaaaactagcggcgaccg

SEQ ID NO: 424391 - DNA, 75 bp, synthetic construct
  source 1..75: mol_type = other DNA
gcaaattggcctgacgttaatggctgaacgtttcccctatgctaaggaaggtgcgaataagcggggaaattcttc

SEQ ID NO: 424392 - DNA, 75 bp, synthetic construct
  source 1..75: mol_type = other DNA
aactgtaccgagaaatgtgcagagttgtcggtaaagttgtgctggaaatgcgcgatctggggcaggaaccaaagc

SEQ ID NO: 424393 - DNA, 75 bp, synthetic construct
  source 1..75: mol_type = other DNA
tagaggagtaaccgatgttgatatatttagttttggtaggtttggtggtggaatcgagatcttcatattagctct

SEQ ID NO: 424394 - DNA, 75 bp, synthetic construct
  source 1..75: mol_type = other DNA
aaataagtatgagccagtaagtgccttacggctatttaattactgtctgcttgccgcattattatgcgctattgt

SEQ ID NO: 424395 - DNA, 75 bp, synthetic construct
  source 1..75: mol_type = other DNA
agccctgctttttcccgtttcgtactgtatatcttccatccagcgggtatactgatcccttcctttaaatccaca

SEQ ID NO: 424396 - DNA, 75 bp, synthetic construct
  source 1..75: mol_type = other DNA
agcctgaccaaacgggataacttcggtgaaatccggatcaacctgaactggcaccggggcagtagcaaatcaggc

SEQ ID NO: 424397 - DNA, 75 bp, synthetic construct
  source 1..75: mol_type = other DNA
gacgatgcggtgaagcaacggggtgaaataaaagtgggagtcatgggcaatatcagtcagcgagtgtccctgcgc

SEQ ID NO: 424398 - DNA, 75 bp, synthetic construct
  source 1..75: mol_type = other DNA
ttttttgctttactattattcaaatatttctttttgtattttgttatcgtgttaatcgtcgtttatcatgtttat

SEQ ID NO: 424399 - DNA, 75 bp, synthetic construct
  source 1..75: mol_type = other DNA
taccagcttggctggactgcctgggctggaaaggccatgcatgataacccggtgacgggcatgattttcgaacct

SEQ ID NO: 424400 - DNA, 75 bp, synthetic construct
  source 1..75: mol_type = other DNA
gacgcagttttatcaggcatggcgcagcgcccagtccgccgggggcggtctggataaacaggaatatgaccgttt

SEQ ID NO: 424401 - DNA, 75 bp, synthetic construct
  source 1..75: mol_type = other DNA
atgggaaatcgaacaaaagatgacgaactgtaccgcgagatgtgcagggtagtcggtaaagttgtgctggaaatg

SEQ ID NO: 424402 - DNA, 75 bp, synthetic construct
  source 1..75: mol_type = other DNA
ttgttctacaccgtcacccgtgcagaaagcacaacgggtaaaggttgatcctctgcgttcgttgaatatggaagc

SEQ ID NO: 424403 - DNA, 75 bp, synthetic construct
  source 1..75: mol_type = other DNA
ctgacggtcatgctgcttgatatcgactatttcaaaagcattaacgataactatggacatgaatgtggcgataaa

SEQ ID NO: 424404 - DNA, 75 bp, synthetic construct
  source 1..75: mol_type = other DNA
cctggcggcatcggcccatctggtgcgtgagtcccgcaatccggacggtctggccaccacgctggcgcactattt

SEQ ID NO: 424405 - DNA, 75 bp, synthetic construct
  source 1..75: mol_type = other DNA
gccctaccctgcccgcaggcgcggagctggttgacgaacccgcgtggttatggccgcggaatccaccaattcgtg

SEQ ID NO: 424406 - DNA, 75 bp, synthetic construct
  source 1..75: mol_type = other DNA
ccgaaaacccgcaatcagcggggcgtgtatctgtgtgaagtggggacggacaccgcaaaagaaattctctatgcc

SEQ ID NO: 424407 - DNA, 75 bp, synthetic construct
  source 1..75: mol_type = other DNA
tggatctgtgaaaacacgggcatgtggacccgtgacggcctgacgtttttcagcgcccggggtgatgaaattccg

SEQ ID NO: 424408 - DNA, 75 bp, synthetic construct
  source 1..75: mol_type = other DNA
cgctttctgatttggcgcggttatatgattttctggtgctggccagtaaacctgctgccgccagaacggtgcagt

SEQ ID NO: 424409 - DNA, 75 bp, synthetic construct
  source 1..75: mol_type = other DNA
cgccgcaggcgttcatgcggtgattgtgccgaaagatcgctccgcacagctcaacgccacggcgaaaaaagtggc

SEQ ID NO: 424410 - DNA, 75 bp, synthetic construct
  source 1..75: mol_type = other DNA
tccccacgctgcgactgattcgctatgcgatgggtgattactctttggataatcttgccaatggcgaatggcgag

SEQ ID NO: 424411 - DNA, 75 bp, synthetic construct
  source 1..75: mol_type = other DNA
agaatcttcatatacacccgggaaatgggaaacactgccgtttcaggttgccattatgaacagcatgggaaatga

SEQ ID NO: 424412 - DNA, 75 bp, synthetic construct
  source 1..75: mol_type = other DNA
gttccctgtctgaaaattctttccccctggctggggcgtaagcaccgggataacacactgacattaaaaagattc

SEQ ID NO: 424413 - DNA, 75 bp, synthetic construct
  source 1..75: mol_type = other DNA
atgaagccacgtcgtatgccatccgttttcctgatgatccggagattttttcgcagacagaggcgcagcaactgg

SEQ ID NO: 424414 - DNA, 75 bp, synthetic construct
  source 1..75: mol_type = other DNA
gcctgaaagacctttccccatggctgggtcgtaaacatcgtgacaatactctcacgctgaaacgcttttcatcgg

SEQ ID NO: 424415 - DNA, 75 bp, synthetic construct
  source 1..75: mol_type = other DNA
gcccaaatccattcgcggctcgacgcctaaaatcaaaggcacctgccagatcgaaaaagcggccaacgagtcggc

SEQ ID NO: 424416 - DNA, 75 bp, synthetic construct
  source 1..75: mol_type = other DNA
gtacgaaatccgttacgaacttaatggccagactatttatgtattgcgtctgtggcacacacgagaaaacaggta

SEQ ID NO: 424417 - DNA, 75 bp, synthetic construct
  source 1..75: mol_type = other DNA
ccattccagatcgccatcatgaacagcatggggaatgatcagatccgcactgttaatctgattaaatctgcccgt

SEQ ID NO: 424418 - DNA, 75 bp, synthetic construct
  source 1..75: mol_type = other DNA
cgaaagcgttttctacctctgtgaacatcatggctgcgtgatccatcagtctgagcttgaccagagtaacgggcg

SEQ ID NO: 424419 - DNA, 75 bp, synthetic construct
  source 1..75: mol_type = other DNA
cctgatgatccggagattttttcgcagacagaggcgcagcaactggtcgcggaagagcttgtggagaagtgggaa

SEQ ID NO: 424420 - DNA, 75 bp, synthetic construct
  source 1..75: mol_type = other DNA
ctgagcttgaccagagtaacgggcggtggatctgtgaaaacacgggcatgtggacccgtgacggcctgatgtttt

SEQ ID NO: 424421 - DNA, 75 bp, synthetic construct
  source 1..75: mol_type = other DNA
tgtttttgaaaatatattagaagattcattttgttatccattgaaggaattgcagaatggaataatttatacctt

SEQ ID NO: 424422 - DNA, 75 bp, synthetic construct
  source 1..75: mol_type = other DNA
aatcagcggggcgtgtatctgtgtgaagtggggacggacaccgcaaaagaaattctctatgcccgtatgaaagcc

SEQ ID NO: 424423 - DNA, 75 bp, synthetic construct
  source 1..75: mol_type = other DNA
attaactgacggcacaaccgcaccgaatggttcttataacgtggcgattagcgccagtaacggtggtacgcagtt

SEQ ID NO: 424424 - DNA, 75 bp, synthetic construct
  source 1..75: mol_type = other DNA
gttcatgctgaccaggtatttacacagtggtgtggcaaacccgccacgataaaggatttaaaacgcattacaaca

SEQ ID NO: 424425 - DNA, 75 bp, synthetic construct
  source 1..75: mol_type = other DNA
cgttgctgtgtttgccgatgactgcgatggcagtacaactgaccgcagcagacaatgaagcctcacaaaaaatac

SEQ ID NO: 424426 - DNA, 75 bp, synthetic construct
  source 1..75: mol_type = other DNA
atgaggtatatagttgccttaacgggaggcattggcagtggcaagagtaccgttgccaatgcgtttgctgatctc

SEQ ID NO: 424427 - DNA, 75 bp, synthetic construct
  source 1..75: mol_type = other DNA
ccaatggaaaacaacgagctgacgtcgcaattggcgcaaatcagcacggtcagcgggattgaaaaactcaatacc

SEQ ID NO: 424428 - DNA, 75 bp, synthetic construct
  source 1..75: mol_type = other DNA
aacggtgcttataacgtcgcgatcagcgccagtaacggcggtacacaacgggttgttcagccactgcagtttgct

SEQ ID NO: 424429 - DNA, 75 bp, synthetic construct
  source 1..75: mol_type = other DNA
atgatttcagacgaactgagggcggctaattctgcaggagcgatagcaaccggcctccttgcgctaaaaattcct

SEQ ID NO: 424430 - DNA, 75 bp, synthetic construct
  source 1..75: mol_type = other DNA
atgagtgacgaaaaaaaatttgatttcaaaaagcactggctggggctgtctcctgatgagcgtgaagcatttgca

SEQ ID NO: 424431 - DNA, 75 bp, synthetic construct
  source 1..75: mol_type = other DNA
gttgaatgggctgatcaaaattattatctgccgaaagaatcttcatatggtgagggagaatggaaaacgctgcca

SEQ ID NO: 424432 - DNA, 75 bp, synthetic construct
  source 1..75: mol_type = other DNA
atacgatgctgataaattctatgagcagttatatgataaaggattgagagaagataacgcctatcaatatatcaa

SEQ ID NO: 424433 - DNA, 75 bp, synthetic construct
  source 1..75: mol_type = other DNA
ccatacgcggctcaacgccaaaaattaaaggctcctgtcagattgagaaagccgcgaatgaatctgcgcatttca

SEQ ID NO: 424434 - DNA, 75 bp, synthetic construct
  source 1..75: mol_type = other DNA
atatgaaggacgtaatcgccaggtgcgccgcatgaccgcccatgttggtttccccacgctgcgactgattcgcta

SEQ ID NO: 424435 - DNA, 75 bp, synthetic construct
  source 1..75: mol_type = other DNA
cccggttcagggcgtttatgcagcaggtcgtcttgaccgcgatagcgaagggttactggtgctgaccaataacgg

SEQ ID NO: 424436 - DNA, 75 bp, synthetic construct
  source 1..75: mol_type = other DNA
ataccatgcaaaaaacttcttttagaaatcaccaggttaagcgattcagctcgcaacgttccactaggcgcaaac

SEQ ID NO: 424437 - DNA, 75 bp, synthetic construct
  source 1..75: mol_type = other DNA
tgctatgacgaactctcctcgtttgaaccggatgtggaaaaggaaggctcgccaacgctgcttggcgataaacgt

SEQ ID NO: 424438 - DNA, 75 bp, synthetic construct
  source 1..75: mol_type = other DNA
atggttcctgacaccaccaaatacggacgggcaattatccgtttgcttggcgctacccgtgttggtcaccttgat

SEQ ID NO: 424439 - DNA, 75 bp, synthetic construct
  source 1..75: mol_type = other DNA
ggtgtacgaccccggattccgtggtgaatatgcactgcaagggcatcgattattctgcaaatggcttctcgaaaa

SEQ ID NO: 424440 - DNA, 75 bp, synthetic construct
  source 1..75: mol_type = other DNA
ctgtggggaggcgcagtatctgaaatttggcgatgaatccacgccttttgggcttaaatgggagaaggacagccc

SEQ ID NO: 424441 - DNA, 75 bp, synthetic construct
  source 1..75: mol_type = other DNA
cggcaacgttttcttagcctcgatcatcaggaaaatttttgtctgtggaccaaactggtggagctttctggtcat

SEQ ID NO: 424442 - DNA, 75 bp, synthetic construct
  source 1..75: mol_type = other DNA
actgtacagcaaagtattatcgaagggctggtctgggagcaggcgacacccacaacgattactcatccacagcaa

SEQ ID NO: 424443 - DNA, 75 bp, synthetic construct
  source 1..75: mol_type = other DNA
gctgtacagcaaagtattatcgaagggctggtctgggaacgggcgacacccacaacgattactcatccacaacgg

SEQ ID NO: 424444 - DNA, 75 bp, synthetic construct
  source 1..75: mol_type = other DNA
agtggtgggctgattttcttgatgcgaatcgggatgggatggtcaggccgtttgagtgtgttgccaatagattat

SEQ ID NO: 424445 - DNA, 75 bp, synthetic construct
  source 1..75: mol_type = other DNA
taaaggctcctgccagattgagaaagccgcgaatgaatctgcgcatttcatgcggttttatgtcccttgccctca

SEQ ID NO: 424446 - DNA, 75 bp, synthetic construct
  source 1..75: mol_type = other DNA
tcatcgggcgtcggtttctggtgcctgggcggcgctgccgccaaaaactaccgtgaaaaatccgtggatgtggtc

SEQ ID NO: 424447 - DNA, 75 bp, synthetic construct
  source 1..75: mol_type = other DNA
tgctgcatattcaggattacgaagtggacgccatgctggggctgggccttgccggaaaaggcaaaggcggcaaag

SEQ ID NO: 424448 - DNA, 75 bp, synthetic construct
  source 1..75: mol_type = other DNA
atggagattatattccataaatgcgaatttgtcggagaaatggcagtcgttcagcaggcacaacgtaatctctgt

SEQ ID NO: 424449 - DNA, 75 bp, synthetic construct
  source 1..75: mol_type = other DNA
tattgatggagattatattccacaaatgcgaatttgtcggagaaatggctgttgtgcaacaggcacaacgtaatc

SEQ ID NO: 424450 - DNA, 75 bp, synthetic construct
  source 1..75: mol_type = other DNA
ggtattttattgagcataaatcccgaaacagtctgctttttcagcccacggattctgccgctgaagattttatga

SEQ ID NO: 424451 - DNA, 75 bp, synthetic construct
  source 1..75: mol_type = other DNA
aaaaacgcggcgcggcagatgccgtattgccgtcgaaactgaccaatattctggcggtaggcggtaacgcggtga

SEQ ID NO: 424452 - DNA, 75 bp, synthetic construct
  source 1..75: mol_type = other DNA
ctgctgaagatgggcgattgccatctggtggtgcaaaaacgcggcgcggcagatgccgtattgccgtcgaaactg

SEQ ID NO: 424453 - DNA, 75 bp, synthetic construct
  source 1..75: mol_type = other DNA
acatggcacagaaactttgtacctgcagtttcttctgctgctacaaatttattgaaaaaacaatcagaatctctg

SEQ ID NO: 424454 - DNA, 75 bp, synthetic construct
  source 1..75: mol_type = other DNA
ccacacctgatatcagtagcatctcacaaggtgagtttatttatacaggttctgctgttcttgaatgtctcggga

SEQ ID NO: 424455 - DNA, 75 bp, synthetic construct
  source 1..75: mol_type = other DNA
actctgcggcgtaattaaaaccccggttcgccacaaactgaccggcgaaacacttatccgcaattttgctgttat

SEQ ID NO: 424456 - DNA, 75 bp, synthetic construct
  source 1..75: mol_type = other DNA
tggtttcatcgacaacaatggcccgacccatgaaaaccaactgggcgctggtgcttttggtggttaccaggttaa

SEQ ID NO: 424457 - DNA, 75 bp, synthetic construct
  source 1..75: mol_type = other DNA
ctgttgttgattacctgatctctaaaggtatcccggcagacaagatctccgcacgtggtatgggcgaatccaacc

SEQ ID NO: 424458 - DNA, 75 bp, synthetic construct
  source 1..75: mol_type = other DNA
agataatgggttgctcccctgtgttgtggttataaaaacacttgcagggacaacattgcgtcagaacggaatggg

SEQ ID NO: 424459 - DNA, 75 bp, synthetic construct
  source 1..75: mol_type = other DNA
ccagcgcgtcaggttgcgcgtgaaaccggcgcgcactacggtggtgtgctctatgtcgattccctgagcacagaa

SEQ ID NO: 424460 - DNA, 75 bp, synthetic construct
  source 1..75: mol_type = other DNA
tattccggcaatcagcgcagtttgcgtgattttcgtcggcatcctcggcgctgtgtttggccatacattgcttaa

SEQ ID NO: 424461 - DNA, 75 bp, synthetic construct
  source 1..75: mol_type = other DNA
tgcgatgcgtattcgcaccaaagcagcgcgcggtctggcgatggggacagcctcgcacgccctcggtacggcgcg

SEQ ID NO: 424462 - DNA, 75 bp, synthetic construct
  source 1..75: mol_type = other DNA
ccaatggtatgaatctggaattgtggttccaacgcttttaccagcatcttaatggggttccagaagtaattgtct

SEQ ID NO: 424463 - DNA, 75 bp, synthetic construct
  source 1..75: mol_type = other DNA
acccggacctgttcacggcaaattacgacggcattgatacgtttgccatgagtgatttttttgcttttgtggcaa

SEQ ID NO: 424464 - DNA, 75 bp, synthetic construct
  source 1..75: mol_type = other DNA
accactgctgcaactgaatataccgctgccatgaaaaccatcagggctggcctgcttgcgttgtttgtacctgaa

SEQ ID NO: 424465 - DNA, 75 bp, synthetic construct
  source 1..75: mol_type = other DNA
gcctgggtgtttcctaccgtttcggtcagggcgaagcagctccagtagttgctccggctccagctccggcaccgg

SEQ ID NO: 424466 - DNA, 75 bp, synthetic construct
  source 1..75: mol_type = other DNA
gacggaagccatcccgcagtgggcggcggaagagggctttacggtcacggactatcagcagtctggcgatgcggc

SEQ ID NO: 424467 - DNA, 75 bp, synthetic construct
  source 1..75: mol_type = other DNA
cgtgaagcgcgcgccgaagcctttgtcaccatgcgcagcgagacgctggcgatgatcattgatggtcgccaccac

SEQ ID NO: 424468 - DNA, 75 bp, synthetic construct
  source 1..75: mol_type = other DNA
tgccatccactgatgctcagcaaagttgaagtcaatttacaggccgagccggagcacaatcgggtacgaattgaa

SEQ ID NO: 424469 - DNA, 75 bp, synthetic construct
  source 1..75: mol_type = other DNA
ggacggtgtggtgctgggtggcctgattatttctgccattgctttcattgttgtggcgaatgctgcgatttccac

SEQ ID NO: 424470 - DNA, 75 bp, synthetic construct
  source 1..75: mol_type = other DNA
gccctatttttattaattccaatattaatttacgccttccgaaaatctgactggaaagatccaaactctgatttc

SEQ ID NO: 424471 - DNA, 75 bp, synthetic construct
  source 1..75: mol_type = other DNA
gtgcagtctcggttgcatttattgatgttgatatgggggtggcagaatcaattgccagtaataaatggtatattt

SEQ ID NO: 424472 - DNA, 75 bp, synthetic construct
  source 1..75: mol_type = other DNA
gggatctgattgagaagcatcatattgcggtacggagctccaactttacgttgtacgaagattattccaaccggt

SEQ ID NO: 424473 - DNA, 75 bp, synthetic construct
  source 1..75: mol_type = other DNA
catatttgatgcagccagcgaagacaacagccgtgtggccggtatttatgttcgtttactgttactcaccggatt

SEQ ID NO: 424474 - DNA, 75 bp, synthetic construct
  source 1..75: mol_type = other DNA
agggaacgttgtggctgcctgaaaccaaaaatggctcgggcagactggtgcacctcaatgactgggcgataaagc

SEQ ID NO: 424475 - DNA, 75 bp, synthetic construct
  source 1..75: mol_type = other DNA
atgtcgcaactgacccatatcaacgccgctggcgaagcgcacatggtggatgtctccgccaaagcggaaactgtg

SEQ ID NO: 424476 - DNA, 75 bp, synthetic construct
  source 1..75: mol_type = other DNA
ccgggatagcgtatgcgaaagcaggggtaatgctctccgctatgactgacggcacagagcaactcagcctgtttg

SEQ ID NO: 424477 - DNA, 75 bp, synthetic construct
  source 1..75: mol_type = other DNA
gatgaaagcttcatgctactgaaaaacatggacaaaatagtagattttgaagagtacggatgcctgatcagacga

SEQ ID NO: 424478 - DNA, 75 bp, synthetic construct
  source 1..75: mol_type = other DNA
ggcgcatttagttcgctggcgttggtactgtgcgggattattacgtcgctcgttgcgccgttccttttcccaatt

SEQ ID NO: 424479 - DNA, 75 bp, synthetic construct
  source 1..75: mol_type = other DNA
ctgtggggaggagcagtatctgaaatttggcgatgatgcctcgcctttcggtcttaagtgggagaagaataaacc

SEQ ID NO: 424480 - DNA, 75 bp, synthetic construct
  source 1..75: mol_type = other DNA
ctgaactggaccagagcaacgggcggtggatctgtgaaaacacaggcatgtggacccgtgacggtctgacgtttt

SEQ ID NO: 424481 - DNA, 75 bp, synthetic construct
  source 1..75: mol_type = other DNA
gagttattgctggaaaaagtctgccactatgatgcgcaggttcccctgcgggtggtttacctgaccgcagggatc

SEQ ID NO: 424482 - DNA, 75 bp, synthetic construct
  source 1..75: mol_type = other DNA
tgggaaacattgccgtttcaggttgccataatgaacagtatgggtaatgacctgatccgcactgttaatctgatt

SEQ ID NO: 424483 - DNA, 75 bp, synthetic construct
  source 1..75: mol_type = other DNA
ataatatgatggctgccgtttcggttgcgctgcagcctctggtcagggttgtaccgatgacggcagttgaatggg

SEQ ID NO: 424484 - DNA, 75 bp, synthetic construct
  source 1..75: mol_type = other DNA
ttgagcataaatcacgcaacagccttcttttccagcccacggattctgctgctgaagattttatgaaatctcatg

SEQ ID NO: 424485 - DNA, 75 bp, synthetic construct
  source 1..75: mol_type = other DNA
cgtgccagaagagatgagcaggacgacgatgagatgagtctggaagaaatcgcggctgcactgagtggaggataa

SEQ ID NO: 424486 - DNA, 75 bp, synthetic construct
  source 1..75: mol_type = other DNA
tgctatgacgaactctcctcgtttgaaccggatgtggaaaaagaaggctcgccgacgctgcttggcgataaacgt

SEQ ID NO: 424487 - DNA, 75 bp, synthetic construct
  source 1..75: mol_type = other DNA
tcgggctgctggcggaactcagcggcctgcatcgcaccactgtgcggcgactgctggagacgctgcaggaagagg

SEQ ID NO: 424488 - DNA, 75 bp, synthetic construct
  source 1..75: mol_type = other DNA
atgattttttattgtgcgctcagtataggaagggtgttttcggctacaatcaaaacatgcccgaatgtgcaccag

SEQ ID NO: 424489 - DNA, 75 bp, synthetic construct
  source 1..75: mol_type = other DNA
acgtcgtatgccatccgttttcctgatgatccggagattttttcgcagacagaggcgcagcaactggtcgcggaa

SEQ ID NO: 424490 - DNA, 75 bp, synthetic construct
  source 1..75: mol_type = other DNA
tcccgggaagaagagacgacccggccaaccctgaaagaactggcagcgaagctgtccggaggagtgaatggttac

SEQ ID NO: 424491 - DNA, 75 bp, synthetic construct
  source 1..75: mol_type = other DNA
aaacatcgtgataataccctcacgctgaaacgtttttcatcgggcgtgggcttctggtgcctgggcggggctgcc

SEQ ID NO: 424492 - DNA, 75 bp, synthetic construct
  source 1..75: mol_type = other DNA
cgattcgggacgtgccatgcctgaaagacctttccccgtggctgggtcgtaaacatcgtgacaatactctcacgc

SEQ ID NO: 424493 - DNA, 75 bp, synthetic construct
  source 1..75: mol_type = other DNA
ctgtggggaggagcagtatctgaaatttggcgatgagtccacgccttttggccttaaatgggagaaggacagccc

SEQ ID NO: 424494 - DNA, 75 bp, synthetic construct
  source 1..75: mol_type = other DNA
cctctcacgccctcggtacggcgcgctgtgccgagctggattatcaggaaggcgcatttagttcgctggcactgg

SEQ ID NO: 424495 - DNA, 75 bp, synthetic construct
  source 1..75: mol_type = other DNA
cggtatttggccatacattgcttaatgcgatgcgtattcgtaccaaagctgcgcgcggtctggcaatggggacag

SEQ ID NO: 424496 - DNA, 75 bp, synthetic construct
  source 1..75: mol_type = other DNA
tgggcggcgctgccgccaaaaactaccgtgaaaaatccgtggatgtggtctgttatgacgagctttcctcgttcg

SEQ ID NO: 424497 - DNA, 75 bp, synthetic construct
  source 1..75: mol_type = other DNA
attacgtgtgtccgtgcaacgctggcagcttgatctgctgtactggcaaaatcccgggaagaagagacgacccgg

SEQ ID NO: 424498 - DNA, 75 bp, synthetic construct
  source 1..75: mol_type = other DNA
atgactatttcccgtgtctgctgggacaccggggggatcgatggtgaaattgtttatcagagatcaaaaaaacac

SEQ ID NO: 424499 - DNA, 75 bp, synthetic construct
  source 1..75: mol_type = other DNA
tgtggatgcggcgatcaacaaaaaataccgccatgcagatggaaccgaaatgaccatttcccgtgtctgctggga

SEQ ID NO: 424500 - DNA, 75 bp, synthetic construct
  source 1..75: mol_type = other DNA
agggacgcaggcaaccttcatggaaagttatcaaccgccataaaatctctaagagcaattggtcctggttcgaat

SEQ ID NO: 424501 - DNA, 75 bp, synthetic construct
  source 1..75: mol_type = other DNA
tactgaacatttaagcatcgatgagcttttttactttattgatataccaaagccaccatctttcagtaatgcaat

SEQ ID NO: 424502 - DNA, 75 bp, synthetic construct
  source 1..75: mol_type = other DNA
atccgctactacaccttcaacgactccgacctgtcgctgatccgccagcgacgcggcgacgccaaccgcctcggc

SEQ ID NO: 424503 - DNA, 75 bp, synthetic construct
  source 1..75: mol_type = other DNA
agaacatgcttatatggcgcactgccacctgctggagcatgaagataccgggatgatgttagggtttacggtata

SEQ ID NO: 424504 - DNA, 75 bp, synthetic construct
  source 1..75: mol_type = other DNA
attccgtcgcgctgggcgtggcttcgggtttgccgctgtggagtcgaacagtttttgccgccgaacgtccaacac

SEQ ID NO: 424505 - DNA, 75 bp, synthetic construct
  source 1..75: mol_type = other DNA
acggtgacgttgaacgttgatcaacctgccgctacctgctggttccatccgcatcaacatggcaaaaccgggcga

SEQ ID NO: 424506 - DNA, 75 bp, synthetic construct
  source 1..75: mol_type = other DNA
ggaagcgatgattggaccgcaatgttttattgccgattccgttgttgcaagccaggcatatttgggcgcacaggt

SEQ ID NO: 424507 - DNA, 75 bp, synthetic construct
  source 1..75: mol_type = other DNA
caggtggcgatggggctggctggtctggtggtgattgaagatgacgagatcctgaaattaatgctgccaaaacag

SEQ ID NO: 424508 - DNA, 75 bp, synthetic construct
  source 1..75: mol_type = other DNA
ctgcaactctctatggatccgatgctcgatatgatggggatgcagatgttaatggagaaatatggcgatcaggca

SEQ ID NO: 424509 - DNA, 75 bp, synthetic construct
  source 1..75: mol_type = other DNA
accggtgaaggtgagcgaactgccggtgctgatgggcgagcgttttgaagtgctggtggaggttaacgacaacaa

SEQ ID NO: 424510 - DNA, 75 bp, synthetic construct
  source 1..75: mol_type = other DNA
tgattgaagatgacgagatcctgaaattaatgctgccaaaacagtggggtatcgatgatgttccggtgatcgttc

SEQ ID NO: 424511 - DNA, 75 bp, synthetic construct
  source 1..75: mol_type = other DNA
ggtgaaggtgagcgaactgccggtgctgatgggcgagcgttttgaagtgctggtggaggttaacgacaacaaacc

SEQ ID NO: 424512 - DNA, 75 bp, synthetic construct
  source 1..75: mol_type = other DNA
cggacgtccacggctgtttggttgctttgggtcggcggcctgcgcgactatctccggtattctttatggtttcga

SEQ ID NO: 424513 - DNA, 75 bp, synthetic construct
  source 1..75: mol_type = other DNA
tatctgttggatctcaagactttttaaccgcttttttgcaacattatacagataatgccgctccatggttcatta

SEQ ID NO: 424514 - DNA, 75 bp, synthetic construct
  source 1..75: mol_type = other DNA
gcggattcgagacaattatcgttatatgccgctcatggtgatgcggtgttgactgatggtgctttatggatgctg

SEQ ID NO: 424515 - DNA, 75 bp, synthetic construct
  source 1..75: mol_type = other DNA
gcgggacgataccggcgaaaccgtggcggtggaagttgagacccgtttcaaagtgaaggaagtcgataacggcga

SEQ ID NO: 424516 - DNA, 75 bp, synthetic construct
  source 1..75: mol_type = other DNA
catcattaaaccgaaatataaaattttggtttgagcaatgtggattatctaaagaaagagttattcattgtattg

SEQ ID NO: 424517 - DNA, 75 bp, synthetic construct
  source 1..75: mol_type = other DNA
aatacagcggaactgcttaatcgttcatttagaacattgaatgtacatactttaaaaaactttctctatatttca

SEQ ID NO: 424518 - DNA, 75 bp, synthetic construct
  source 1..75: mol_type = other DNA
aaccgcttttctgcaacattatacagataatgctgctccatggttcattatgaatgcagatggagaatatttgct

SEQ ID NO: 424519 - DNA, 75 bp, synthetic construct
  source 1..75: mol_type = other DNA
attcagattgcagaccaggtaattattgatgaaactgcaggtgaagttgttatcggcgcgaatacccgtatttgt

SEQ ID NO: 424520 - DNA, 75 bp, synthetic construct
  source 1..75: mol_type = other DNA
ttgatgaaactgcaggtgaagttgttatcggcgcgaatacccgtatttgtcatggtgccgttattcagggtccgg

SEQ ID NO: 424521 - DNA, 75 bp, synthetic construct
  source 1..75: mol_type = other DNA
agagctgtgcaatgagcatctaccgggtcagaacatccatgctgtcctgaaagaaaatgtgattgataagctgaa

SEQ ID NO: 424522 - DNA, 75 bp, synthetic construct
  source 1..75: mol_type = other DNA
attattttgcctgggcgaattatttccccgaacacgcaacttggcccgcgcgtgattgtagaacgtaatttacct

SEQ ID NO: 424523 - DNA, 75 bp, synthetic construct
  source 1..75: mol_type = other DNA
tatttatgcacatcgccagatacctaagtatagggatatccataaagaaccttatgtgatttttgtcgttaatct

SEQ ID NO: 424524 - DNA, 75 bp, synthetic construct
  source 1..75: mol_type = other DNA
gaaaggaagtcacaagacaggccgatgtgaaccggatacaaccgctgattaacgagctggagaagctacccagac

SEQ ID NO: 424525 - DNA, 75 bp, synthetic construct
  source 1..75: mol_type = other DNA
cgtgcgttcctgctccagttcctgcgaaaggaagtcacaagacaggccgatgtgaaccggatacagccgctgatt

SEQ ID NO: 424526 - DNA, 75 bp, synthetic construct
  source 1..75: mol_type = other DNA
atgagcagaacactcgaacagaagattgctgatgctgaggccagattacagcgcctgaaggcgaagagcaggaat

SEQ ID NO: 424527 - DNA, 75 bp, synthetic construct
  source 1..75: mol_type = other DNA
tcacgatctgcgcattctggtaattgaccttgaccctcaggcatccagcacaatgttcctcgaccatactcacag

SEQ ID NO: 424528 - DNA, 75 bp, synthetic construct
  source 1..75: mol_type = other DNA
tttacgccagcaacattctggactcttctctgcctcgtctggatggatttgagcgatgcggcgagtctttcgaca

SEQ ID NO: 424529 - DNA, 75 bp, synthetic construct
  source 1..75: mol_type = other DNA
gtgctattctcccttgcgggtttgctgaacggcgtgtttgccaaaacgttcgatgacatcagcctggtgccaacc

SEQ ID NO: 424530 - DNA, 75 bp, synthetic construct
  source 1..75: mol_type = other DNA
gtcactgccacgtttggatggattcgaacgatgtggtgaatcttttgacactattattagtgctaaccctgtttc

SEQ ID NO: 424531 - DNA, 75 bp, synthetic construct
  source 1..75: mol_type = other DNA
ggtcatatacgcccgctcgcggcgtcgggtacgcgtggtgccggaagcgtttcctgaacaaagcgtgccggaagg

SEQ ID NO: 424532 - DNA, 75 bp, synthetic construct
  source 1..75: mol_type = other DNA
ggatccgaaagccgatccgctgaatgaagaagagatgtcgcgtctcgctcttgggatgcgtactcaactgcaaaa

SEQ ID NO: 424533 - DNA, 75 bp, synthetic construct
  source 1..75: mol_type = other DNA
tgctgatgatctctggctcggcgctggcgactatcgatgtgttgcagtttaaagatgaagcgcaggagcagcagt

SEQ ID NO: 424534 - DNA, 75 bp, synthetic construct
  source 1..75: mol_type = other DNA
cagagggtattatcgctaccggctgcgataaattaggttgttatattggtcagcgttcacgtcttggcgtgcagg

SEQ ID NO: 424535 - DNA, 75 bp, synthetic construct
  source 1..75: mol_type = other DNA
tggttcgaaatgggattgccatcgcggtactgtttattgccacgcttatcgttggcgctatcgtgaacttcgtga

SEQ ID NO: 424536 - DNA, 75 bp, synthetic construct
  source 1..75: mol_type = other DNA
aagtgcgccctgaatggcttagttctggtattggtgaaatgagggatggtgcacatgaagaaccatccaatatcc

SEQ ID NO: 424537 - DNA, 75 bp, synthetic construct
  source 1..75: mol_type = other DNA
tgcgcttattgattcgattgaacaggatggacacacctgcaatctcatcggaaatgtcggttttatgtccaaaat

SEQ ID NO: 424538 - DNA, 75 bp, synthetic construct
  source 1..75: mol_type = other DNA
ggagtcattagttgcagaatatttaccgggtcttaaaccttctgaagtgctcagaaagacaatcattgatcgtat

SEQ ID NO: 424539 - DNA, 75 bp, synthetic construct
  source 1..75: mol_type = other DNA
actgatatcggtgccggtattgagaacacccctgacggcatgcagagtcaggtgctgctggcagcagacaggatt

SEQ ID NO: 424540 - DNA, 75 bp, synthetic construct
  source 1..75: mol_type = other DNA
agcactatctgaaaaagatgggagtatctgaaagatcagccaagctagttagggttgtagggcaaagcatggaac

SEQ ID NO: 424541 - DNA, 75 bp, synthetic construct
  source 1..75: mol_type = other DNA
aagtacgccctgaatggcttagttctggtattggtgaaatgagggatggtacacatgaagaaccatccaatatcc

SEQ ID NO: 424542 - DNA, 75 bp, synthetic construct
  source 1..75: mol_type = other DNA
ccattagccaaaaagcagctagtggaatggcaggaactggcgggttacaaaatgattggtgtacgctcctccagc

SEQ ID NO: 424543 - DNA, 75 bp, synthetic construct
  source 1..75: mol_type = other DNA
aagtttgatgaaacgctttttaatattcgagatatgaatgtttatcgtcgcggtatagtgacattagcctgtatt

SEQ ID NO: 424544 - DNA, 75 bp, synthetic construct
  source 1..75: mol_type = other DNA
cagttcatttaacaatgctgctaaattactcaatattacgcaacctgcattaacgcgaagaataaaaaagatgga

SEQ ID NO: 424545 - DNA, 75 bp, synthetic construct
  source 1..75: mol_type = other DNA
gatggcaggtagcgtttcttccctgaacgtttcggttgcgaccggaatttgcttatttgaagcagttcgccagcg

SEQ ID NO: 424546 - DNA, 75 bp, synthetic construct
  source 1..75: mol_type = other DNA
gacggcgtaaccgatccgcataacctcggtgcgtgcctgcgtagcgcggacgccgctggcgttcatgcagtgatt

SEQ ID NO: 424547 - DNA, 75 bp, synthetic construct
  source 1..75: mol_type = other DNA
tcagggcattatcgcccgcgtgaagcctggacgtcagtatcaggaaaacgatctgccggatctgatcgcttcgct

SEQ ID NO: 424548 - DNA, 75 bp, synthetic construct
  source 1..75: mol_type = other DNA
atctgaacatgtttaacgacggccttagctatatgggcgttgttgaatccgtgacgctgccgaagctgacccgca

SEQ ID NO: 424549 - DNA, 75 bp, synthetic construct
  source 1..75: mol_type = other DNA
agtaattcgcatgtgatcccagcattgctgcgtcgcttccacgaggcgacggcacagaatgcaccggacgtggtg

SEQ ID NO: 424550 - DNA, 75 bp, synthetic construct
  source 1..75: mol_type = other DNA
cattaacgtcggcacgggcgttgactgcactatccgtgagctggcgcaaaccatcgccaaagtggtgggttacaa

SEQ ID NO: 424551 - DNA, 75 bp, synthetic construct
  source 1..75: mol_type = other DNA
cagactttggcataaacatgaacaacgtcacaaattcatccattgattttaccccactggtcaacgagccgttcg

SEQ ID NO: 424552 - DNA, 75 bp, synthetic construct
  source 1..75: mol_type = other DNA
ccctattcttcgattattggtatcccactggtggaacccgttatacgtcggacattggggattattcgccgcaaa

SEQ ID NO: 424553 - DNA, 75 bp, synthetic construct
  source 1..75: mol_type = other DNA
gaagatacaattattggtcccaagatcattgttgaacataatttagataaagggaagtatattctaaaacaggaa

SEQ ID NO: 424554 - DNA, 75 bp, synthetic construct
  source 1..75: mol_type = other DNA
ttattccatttcaagatcaccaatcttcacttcgagttcaatactggttgtaaaaccgttatccgggctgacggt

SEQ ID NO: 424555 - DNA, 75 bp, synthetic construct
  source 1..75: mol_type = other DNA
ggacgtggttatgaagcattgacccgcttcactcactggttggcagaaatccagcgtctggcggagcgggagccg

SEQ ID NO: 424556 - DNA, 75 bp, synthetic construct
  source 1..75: mol_type = other DNA
gcggcggtgacctttaccaataaggcggcgcgcgagatgaaagagcgtgtcgggcagacgctggggcgcaaagag

SEQ ID NO: 424557 - DNA, 75 bp, synthetic construct
  source 1..75: mol_type = other DNA
cgcaggatgatctgatttgggaacaggagcgcaaagtggtcagcgccgaagaacggatgcagaaagggcaaagcc

SEQ ID NO: 424558 - DNA, 75 bp, synthetic construct
  source 1..75: mol_type = other DNA
gcgactgattcgctatgcgatgggagattactctttggataatcttgccaatggcgaatggcgagaagtgacaga

SEQ ID NO: 424559 - DNA, 75 bp, synthetic construct
  source 1..75: mol_type = other DNA
tgggcagacgctggggcgcaaagaggcgcgtgggttgatgatctccaccttccatacattagggctggatatcat

SEQ ID NO: 424560 - DNA, 75 bp, synthetic construct
  source 1..75: mol_type = other DNA
caataacccgcacgtctttgaaaagcgtcttttttctgaactgggttacggcacagagctaaaagttttaagcgc

SEQ ID NO: 424561 - DNA, 75 bp, synthetic construct
  source 1..75: mol_type = other DNA
taccttatgaccgcccagctcgacggcgtggttgagcgctgcaatcagcactggctgaccggggagggcaacgta

SEQ ID NO: 424562 - DNA, 75 bp, synthetic construct
  source 1..75: mol_type = other DNA
cgaccgtcaggcgtgacccggtgcagcagtcacagctcacctccgtgatttacctcatgaccgcccagctcgacg

SEQ ID NO: 424563 - DNA, 75 bp, synthetic construct
  source 1..75: mol_type = other DNA
gcgcaacgtcggtcagctcgtcagcgaactgatgcaggtgcaggactgtgccactgttcgccgtgacccggcgca

SEQ ID NO: 424564 - DNA, 75 bp, synthetic construct
  source 1..75: mol_type = other DNA
cgcgatctgatccacggcatggattatgaatcctggctgtacgaaacatcgcccagcccgaaagccgccgaaatg

SEQ ID NO: 424565 - DNA, 75 bp, synthetic construct
  source 1..75: mol_type = other DNA
aggacttgctggcttatctgcgcgtgctgactaacccggacgatgacagcgcatttctgcgtatcgttaacacgc

SEQ ID NO: 424566 - DNA, 75 bp, synthetic construct
  source 1..75: mol_type = other DNA
gcgcaacgtcggccagctcgtcggcgacctgatgcaggtgcaggactgcgcgaccgttaggcgtgaccctgcgca

SEQ ID NO: 424567 - DNA, 75 bp, synthetic construct
  source 1..75: mol_type = other DNA
ttttgcgccgctttcatgatgctgtggaaaacaattctccgaatgttgttgtttggggaagtggtactccaaagc

SEQ ID NO: 424568 - DNA, 75 bp, synthetic construct
  source 1..75: mol_type = other DNA
gcactggtttttgattattcggcctgttatgacgcagaagaagactccagaaaaccggtttatgcgaactggggt

SEQ ID NO: 424569 - DNA, 75 bp, synthetic construct
  source 1..75: mol_type = other DNA
ggctgaaagggcatcatagtggtatgccatactgggcacaggggagtaccacagaaatgcgtcccaaaaacattg

SEQ ID NO: 424570 - DNA, 75 bp, synthetic construct
  source 1..75: mol_type = other DNA
aaattgaagactggctgaatgaacaactttatcaaagtgcggctttacatgctgatgaatataataatgcaataa

SEQ ID NO: 424571 - DNA, 75 bp, synthetic construct
  source 1..75: mol_type = other DNA
agattaatggactcggtggttttatgctccagaataattccgttacaggtgcctttggcggctggaccgatctgg

SEQ ID NO: 424572 - DNA, 75 bp, synthetic construct
  source 1..75: mol_type = other DNA
gtttggtatgtgaataattatgcgtggggaaattatgagtccggtggcacaattacagtgacatgcctcaacctt

SEQ ID NO: 424573 - DNA, 75 bp, synthetic construct
  source 1..75: mol_type = other DNA
aacggtagttacagtaatcttggatcacacagaggatcattttcgggccgcaatacaggaagtgggacgctgttt

SEQ ID NO: 424574 - DNA, 75 bp, synthetic construct
  source 1..75: mol_type = other DNA
ctcactttccagtaaaaccatcacggtaaatgaattaattcagcagggatatctgaacaacggtttttcccgctc

SEQ ID NO: 424575 - DNA, 75 bp, synthetic construct
  source 1..75: mol_type = other DNA
aacattccggacgttacaaaatggtttcgggatatctggttaagggcaggtttctgtacgggaatattacggttc

SEQ ID NO: 424576 - DNA, 75 bp, synthetic construct
  source 1..75: mol_type = other DNA
gaagtaaagaagaagctggagcatttatcttaacatctttggaatcagggccattgatgtcgatgattattctgg

SEQ ID NO: 424577 - DNA, 75 bp, synthetic construct
  source 1..75: mol_type = other DNA
ctatcagcaactccttcagtgcggatcaggcagacaccacgggtactgcaggcgtgtctggcggtactgagctga

SEQ ID NO: 424578 - DNA, 75 bp, synthetic construct
  source 1..75: mol_type = other DNA
tggcggccaggtaaaaggtggtactgtacgcgctgatggacgcctctatacaggcgagtatttacagcttgaaaa

SEQ ID NO: 424579 - DNA, 75 bp, synthetic construct
  source 1..75: mol_type = other DNA
atagcctggcaggcagaacgctcgaaagaagaagactttaaatcaagcattaagccggaagattttgtgaagtga

SEQ ID NO: 424580 - DNA, 75 bp, synthetic construct
  source 1..75: mol_type = other DNA
ttcccggtatcctcagcttgcccgtgcttatcccgggtgtaagctgccggatttgcgcggtgtttttatccgtgg

SEQ ID NO: 424581 - DNA, 75 bp, synthetic construct
  source 1..75: mol_type = other DNA
agctcgaaaactatcgcggtgcgggaatgaacggcagcgcaccggtagacctcggccttgatgacgatgcgctgt

SEQ ID NO: 424582 - DNA, 75 bp, synthetic construct
  source 1..75: mol_type = other DNA
tggcgtcgtctccggcgatcgtcaaatttgtgggaggcacccctgccgatgccaccaataacagccgtcggatgc

SEQ ID NO: 424583 - DNA, 75 bp, synthetic construct
  source 1..75: mol_type = other DNA
tgaacggcgtgtttgccaaaacgtttgatgacatcagcctggtgccgacctttgtgttaacgccactcacttatt

SEQ ID NO: 424584 - DNA, 75 bp, synthetic construct
  source 1..75: mol_type = other DNA
cctattaccgcctgacgattgatggtagcgacgtcatcgaaatcgacaccgtcaacatggtcgagaaggtgaacg

SEQ ID NO: 424585 - DNA, 75 bp, synthetic construct
  source 1..75: mol_type = other DNA
atgataaagaaaagagtttatgttgctgggcatcagggcatggtcggctctgctatttaccgacaattatcggtt

SEQ ID NO: 424586 - DNA, 75 bp, synthetic construct
  source 1..75: mol_type = other DNA
gaagggatatgcagcctgaatctgtgtggttacaggccacagccactacggcgaatatatatcccaaaatcaaac

SEQ ID NO: 424587 - DNA, 75 bp, synthetic construct
  source 1..75: mol_type = other DNA
gatatgcatggcttcagctatatgcagttcatcgtaccggggctgatcatgatgtcggtgatcaccaatgcctac

SEQ ID NO: 424588 - DNA, 75 bp, synthetic construct
  source 1..75: mol_type = other DNA
cacggaacgggcggatagtgctctatatttcagattacaaagtaacccgggctgaggtgttggaaccggaaaaac

SEQ ID NO: 424589 - DNA, 75 bp, synthetic construct
  source 1..75: mol_type = other DNA
tatcaatggtcagagtgccacactgaaaggtgatattacgagtgaagacggctggctatgtagtggcacactaaa

SEQ ID NO: 424590 - DNA, 75 bp, synthetic construct
  source 1..75: mol_type = other DNA
ctggtcactacctttggcgtactggtggtctttattgtggcgttttatttgatttgctggtcgctgatccaacgt

SEQ ID NO: 424591 - DNA, 75 bp, synthetic construct
  source 1..75: mol_type = other DNA
tctgtttgttggcattctggtgacggcaatttcactgttttttgtgccgtttcaggtgcattcgtgggtattcgt

SEQ ID NO: 424592 - DNA, 75 bp, synthetic construct
  source 1..75: mol_type = other DNA
ctttctcggtataaatgatgtaccgctggtgacaacctttagcgtgttggttgtctttattgtcgcattttacct

SEQ ID NO: 424593 - DNA, 75 bp, synthetic construct
  source 1..75: mol_type = other DNA
tcagggagaaccgacggccctgacgcaaaccatggccggacgtagctttctgatgaccagcccgcacgagggcaa

SEQ ID NO: 424594 - DNA, 75 bp, synthetic construct
  source 1..75: mol_type = other DNA
gacttttgctcgcctgctggagtttacgtctcttggcccgtttaccgggcgcctggcgggtaagctctcaggcgg

SEQ ID NO: 424595 - DNA, 75 bp, synthetic construct
  source 1..75: mol_type = other DNA
ccgcaaattgctgcaacgggcattgaaactgccgcaggtcagcgacgggatgattcaggggaaatccgtgcgcct

SEQ ID NO: 424596 - DNA, 75 bp, synthetic construct
  source 1..75: mol_type = other DNA
aatggcggtggatgccatgcgtaatggtgcattcgatttcattgagaaaccaagtagctcagataaattattgag

SEQ ID NO: 424597 - DNA, 75 bp, synthetic construct
  source 1..75: mol_type = other DNA
ctatagtttatattgaggatagtgacgatgtacgttttgcctgtgaacaaacgctcacgctggctggttatcgtg

SEQ ID NO: 424598 - DNA, 75 bp, synthetic construct
  source 1..75: mol_type = other DNA
caataatatttacctgtttttcctcattcgcgcagagtattaatatcccaataaacatcattacagatgaaggtg

SEQ ID NO: 424599 - DNA, 75 bp, synthetic construct
  source 1..75: mol_type = other DNA
aaaccgggaagggacatccggtacgcgcgccagggtacggctgaagaaagatcaatacgttgtaaaccagatata

SEQ ID NO: 424600 - DNA, 75 bp, synthetic construct
  source 1..75: mol_type = other DNA
gagagtaaatgcggggagttgagcaaagcatttgtgcggatggacagccgttatggcgggattggtttgggatta

SEQ ID NO: 424601 - DNA, 75 bp, synthetic construct
  source 1..75: mol_type = other DNA
aaaccggcaagagacttctggcacgcgcgcctggatacggctgaagaaagatcagtacgtggcaaaccagatata

SEQ ID NO: 424602 - DNA, 75 bp, synthetic construct
  source 1..75: mol_type = other DNA
gtcgggcgcagaacgaaaaaatctcccgtatgagcgaggcgttcggcctgaaaagtatcgcctcccacgccaccg

SEQ ID NO: 424603 - DNA, 75 bp, synthetic construct
  source 1..75: mol_type = other DNA
cagattatagacaccgtagcatttctgactcgatggtctttttattccctgcattgttaaatctctggcttatca

SEQ ID NO: 424604 - DNA, 75 bp, synthetic construct
  source 1..75: mol_type = other DNA
atcgtctatctctgcaaacggccaaaacactatctatcactatttaaaacatttctttttggtagtgttgccata

SEQ ID NO: 424605 - DNA, 75 bp, synthetic construct
  source 1..75: mol_type = other DNA
gaaacaggttgtggtaaagaagtcgtcgccagaatgctgcatcactggagtacccgccgtcaggggcagtttgtt

SEQ ID NO: 424606 - DNA, 75 bp, synthetic construct
  source 1..75: mol_type = other DNA
ctagagcaattctatcaaaaggagcgatcattcctaatggttgtattatgggtgcatcatcatttttaaataaag

SEQ ID NO: 424607 - DNA, 75 bp, synthetic construct
  source 1..75: mol_type = other DNA
atgagaaagcctaataacgctgtagggccgcaggtccgtaataaaaagaaagctgcgaaagggaaactgatcccg

SEQ ID NO: 424608 - DNA, 75 bp, synthetic construct
  source 1..75: mol_type = other DNA
atgagaaagccaaataatgccgtagggccgcaggtccgtaataaaaagaaggcagcgaaagggaaactgatcccg

SEQ ID NO: 424609 - DNA, 75 bp, synthetic construct
  source 1..75: mol_type = other DNA
agctgttgagcgggacaactcgtgtgcttacccgacaggcggaaagggttcttgttcgccctgcaaccgaagcag

SEQ ID NO: 424610 - DNA, 75 bp, synthetic construct
  source 1..75: mol_type = other DNA
tgtataccccgaccgctgacggcaagggtgtgaatatcatcaactggaatggggctgacaccagtctgacagatg

SEQ ID NO: 424611 - DNA, 75 bp, synthetic construct
  source 1..75: mol_type = other DNA
atgaaagaacttgcgcaaaatgaaatattttccgaaaccagtcctgatgcaataaatgaactcaaagaaattgca

SEQ ID NO: 424612 - DNA, 75 bp, synthetic construct
  source 1..75: mol_type = other DNA
aacgacatagctatagctgcactgcggatacatcgggcgcagctggatgcggaaagaacaggtatcaccaatact

SEQ ID NO: 424613 - DNA, 75 bp, synthetic construct
  source 1..75: mol_type = other DNA
caactgccgcgcaagacgttatacgacaaactcaacaagcatcaaattcagccgcaggtttatcgtctggaatca

SEQ ID NO: 424614 - DNA, 75 bp, synthetic construct
  source 1..75: mol_type = other DNA
atgtggttagcctgaatattccacctctacgccaacgacgagaagatatccctgaactgttttactggttcgcca

SEQ ID NO: 424615 - DNA, 75 bp, synthetic construct
  source 1..75: mol_type = other DNA
ctggctattgccaactacgaagatcgctttgtggtgccgagcagtcatcgtgaactggcgcgggaagccttcccg

SEQ ID NO: 424616 - DNA, 75 bp, synthetic construct
  source 1..75: mol_type = other DNA
gtctgcggcagacgcgggtgaactgggcagcaacggcattctgccagacgtcgaaagcctgcgtattccggtaca

SEQ ID NO: 424617 - DNA, 75 bp, synthetic construct
  source 1..75: mol_type = other DNA
ggaaagaacaggtatcaccaatactcctgcactaaaggcggcactgagtatggacggaaaaaaacagctgaataa

SEQ ID NO: 424618 - DNA, 75 bp, synthetic construct
  source 1..75: mol_type = other DNA
ctgcaaaaagagctggaagcgcgtaccgccgacaacttaacgcccatcaccattcacagcgccactctcgaaatc

SEQ ID NO: 424619 - DNA, 75 bp, synthetic construct
  source 1..75: mol_type = other DNA
ggggcgtggcgcaggaagctatcgccattggtgcgaaaaccttatggatgcagctaggggtgattaatgagcaag

SEQ ID NO: 424620 - DNA, 75 bp, synthetic construct
  source 1..75: mol_type = other DNA
cgggatgccgggttaaatgtggtgatggatcgctgcccggctattgagatccctcgcctgggcctggccaaataa

SEQ ID NO: 424621 - DNA, 75 bp, synthetic construct
  source 1..75: mol_type = other DNA
tgaccgtagaagccacgctaaccaaactacactatctgcttagccaggaactggataccgaaactattcgtaagg

SEQ ID NO: 424622 - DNA, 75 bp, synthetic construct
  source 1..75: mol_type = other DNA
ttatcaatttggtttgcagcaggtttagctggactactcgctttgctttatctgtatggctctattattaaagaa

SEQ ID NO: 424623 - DNA, 75 bp, synthetic construct
  source 1..75: mol_type = other DNA
tctctatggttcgattatcaaagaaacagccaatgcaacattccaaaaagtagccgtctcgccttacaatggtca

SEQ ID NO: 424624 - DNA, 75 bp, synthetic construct
  source 1..75: mol_type = other DNA
ctttcatatcacctgatctgaaaatcagttttaaagaattcagtaatacggtgcttaaaggatttttggcctata

SEQ ID NO: 424625 - DNA, 75 bp, synthetic construct
  source 1..75: mol_type = other DNA
gcgttcgcctggcggggcggtgaaatttaacaccgtcacaccgtcggtgaccgggcgctggttctccggcaatca

SEQ ID NO: 424626 - DNA, 75 bp, synthetic construct
  source 1..75: mol_type = other DNA
gtcacttactacggcaagctgggtgcagtcgagccagtgtataaagaaactctgtcctatgtggacggtatctga

SEQ ID NO: 424627 - DNA, 75 bp, synthetic construct
  source 1..75: mol_type = other DNA
cgttcgcttcccgatggttccgctgatgagcgtgccgatccagtatcgcggcctgtatcagctcgtaacctatta

SEQ ID NO: 424628 - DNA, 75 bp, synthetic construct
  source 1..75: mol_type = other DNA
ctaccggtaatgccctcgcccatgccggcgttattggcggcgcggatatgactgtagaagccacattaaccaaac

SEQ ID NO: 424629 - DNA, 75 bp, synthetic construct
  source 1..75: mol_type = other DNA
acattacggggcgctcacgcattgatgacgcatttgcccgcaaaggtttgccggcagatattgtattaagtgcac

SEQ ID NO: 424630 - DNA, 75 bp, synthetic construct
  source 1..75: mol_type = other DNA
tggttttggctgatgcgatcaacggtattgctatcggtagtaacgcgcgtgcaaatcatgcaaacagtattgcga

SEQ ID NO: 424631 - DNA, 75 bp, synthetic construct
  source 1..75: mol_type = other DNA
caccgcttccgctctggcagtactggcgcggccttggcggctggaacttctactttctggtcaagtttgccctgc

SEQ ID NO: 424632 - DNA, 75 bp, synthetic construct
  source 1..75: mol_type = other DNA
gttttccaaaaatcattttattacgaagaattctcgaacgttaaagatgaaattgatgatccaattttattgaaa

SEQ ID NO: 424633 - DNA, 75 bp, synthetic construct
  source 1..75: mol_type = other DNA
aaaataaaggtaatgtaacatacaggattgttgtgtctgaagatgcaacacgtttgtttattgaacttgaaaaac

SEQ ID NO: 424634 - DNA, 75 bp, synthetic construct
  source 1..75: mol_type = other DNA
gcggcgggggaaacggaaaatccgcacaaggtgattccggttgcgatccgcaccaccattgcgcgcctgattatc

SEQ ID NO: 424635 - DNA, 75 bp, synthetic construct
  source 1..75: mol_type = other DNA
ggatgatgtgatcctgccctcctatgacgaactcagcaccatgctcgaccagcgtcagcaaaccttgctgttgcc

SEQ ID NO: 424636 - DNA, 75 bp, synthetic construct
  source 1..75: mol_type = other DNA
cattcacagcgccaccctcgaaatcgaagcggtggtttcggcgttaaacgatctggtcagtcgcctgaccagcac

SEQ ID NO: 424637 - DNA, 75 bp, synthetic construct
  source 1..75: mol_type = other DNA
aagaattctcgaacgttaaagatgaaattgatgatccaattttattgaaattctatacagatactattgtgaagg

SEQ ID NO: 424638 - DNA, 75 bp, synthetic construct
  source 1..75: mol_type = other DNA
gaggtaaaacctgacaacaaaacgggggctaatcttgaaaccagacacttcaagaatagccgcaaaatgttgtca

SEQ ID NO: 424639 - DNA, 75 bp, synthetic construct
  source 1..75: mol_type = other DNA
atgacgctcgcgcagtttgccatgactttctggcacgacctggcggcaccgatcctggcggggattattaccgca

SEQ ID NO: 424640 - DNA, 75 bp, synthetic construct
  source 1..75: mol_type = other DNA
ggctgcgcgtcaccgtgtttgtctcggcaatggtcgtctggctggcggtcagcccgctgctgccggcctttaccc

SEQ ID NO: 424641 - DNA, 75 bp, synthetic construct
  source 1..75: mol_type = other DNA
agcttaagcgcaccatgaaaacacgccacctgattatgctctcgctgggtggcgtgattgggacagggttattct

SEQ ID NO: 424642 - DNA, 75 bp, synthetic construct
  source 1..75: mol_type = other DNA
ctcatatgctgcggcatgcctgtggctttgctcttgctgatcgtggtgtggatacccgtttgatacaagactatc

SEQ ID NO: 424643 - DNA, 75 bp, synthetic construct
  source 1..75: mol_type = other DNA
atgaataaacacacattaacccgtatttcagaagaagcctttcacgagcttacccgaattaaacgagctactaac

SEQ ID NO: 424644 - DNA, 75 bp, synthetic construct
  source 1..75: mol_type = other DNA
tgactgaatcgctggcgcgtcattacgcacgcacttacggcagcaacagcgagctgctgctcggcaatgcggggg

SEQ ID NO: 424645 - DNA, 75 bp, synthetic construct
  source 1..75: mol_type = other DNA
caggaattgcaggcgtttcgccttttgcggtggtgaagcggacagcgatccccatggcagtcggtttcgtggtga

SEQ ID NO: 424646 - DNA, 75 bp, synthetic construct
  source 1..75: mol_type = other DNA
cagtttcgctgccccccaggtagtcgataaagtcgcagcagtcgtcaataacggcgtcgtgctggaaagcgacgt

SEQ ID NO: 424647 - DNA, 75 bp, synthetic construct
  source 1..75: mol_type = other DNA
tccgctgtgtgatgatgagtccgattcgccgcaggctatcactcgtgattacacccttgatatccatgatgaaaa

SEQ ID NO: 424648 - DNA, 75 bp, synthetic construct
  source 1..75: mol_type = other DNA
aaaaagcagttaagccgtgacgatatcgtctggacttactccggtgtgcgtccgctgtgtgatgatgagtccgac

SEQ ID NO: 424649 - DNA, 75 bp, synthetic construct
  source 1..75: mol_type = other DNA
tgaaggcgaccgcgacgattatgccgctcgcctgcgccgccgctatccgttcctgactgaatcgctggcgcgtca

SEQ ID NO: 424650 - DNA, 75 bp, synthetic construct
  source 1..75: mol_type = other DNA
tcaaaacccactttacagcgaccattcgcgactgctccgctcttcttttgccgatatccttaaccatgccgataa

SEQ ID NO: 424651 - DNA, 75 bp, synthetic construct
  source 1..75: mol_type = other DNA
atgccaacacaggttgcaacagagggacgactggcagtagacccgaacacaaggagaacaaccaaaggaaccaac

SEQ ID NO: 424652 - DNA, 75 bp, synthetic construct
  source 1..75: mol_type = other DNA
attgcattcgggaagcagcacgaagaactggcaaaacacagaaaaggcgatctgattctggtgcacggaaacttg

SEQ ID NO: 424653 - DNA, 75 bp, synthetic construct
  source 1..75: mol_type = other DNA
gcgctgattttggtaaactggctatcgctcactctgccgatcagcaggcactgaatggcggccagatgggctggg

SEQ ID NO: 424654 - DNA, 75 bp, synthetic construct
  source 1..75: mol_type = other DNA
ccataccacctcttcagaaatgagactgactttgcaggactggcaactgggtgaagccgagatcccagaagaaga

SEQ ID NO: 424655 - DNA, 75 bp, synthetic construct
  source 1..75: mol_type = other DNA
atggatccaacacgtgcaagcaaggcctggaaagaagcccttaccgatcaggggatcgatgtaattagcgaagtc

SEQ ID NO: 424656 - DNA, 75 bp, synthetic construct
  source 1..75: mol_type = other DNA
tcgccgcaggctattacccgtgattacacccttgatatccatgatgaaaacggcaaagcaccgctgctgtcggta

SEQ ID NO: 424657 - DNA, 75 bp, synthetic construct
  source 1..75: mol_type = other DNA
ggcggcctctctggatgatcttaaccgggcgatcaatgatgcggagtcagtgctggggacaacaagccgccgccg

SEQ ID NO: 424658 - DNA, 75 bp, synthetic construct
  source 1..75: mol_type = other DNA
acttaaccgtgcgatcaatgatgcggaggccgtactcggcacaacttgccgccgtcgtcgtccgctgggagtgag

SEQ ID NO: 424659 - DNA, 75 bp, synthetic construct
  source 1..75: mol_type = other DNA
aggtaaaccccggcgcccatgaagagtatcagcgtcggcacaacccgatctggccggaactggaagcggtattga

SEQ ID NO: 424660 - DNA, 75 bp, synthetic construct
  source 1..75: mol_type = other DNA
tatcgctacgacgatttgccgttactgccgccgcccggtaccgtggcgcgtcgtctgatagaagatacagtggcg

SEQ ID NO: 424661 - DNA, 75 bp, synthetic construct
  source 1..75: mol_type = other DNA
gcggcgtgcaactggcggagttttatcgttcgcataaatactgcggatattgcgggcatgaaatgtatccgagca

SEQ ID NO: 424662 - DNA, 75 bp, synthetic construct
  source 1..75: mol_type = other DNA
agcagcggcgtcacgatatggggtcggtacgtcaggtcattgatctcgatgttgggctgtttcaactggccggac

SEQ ID NO: 424663 - DNA, 75 bp, synthetic construct
  source 1..75: mol_type = other DNA
cccgcatctgcgtccggcgtggatgatccgtattggtctgtttatgtacgatcatctgggtaaacgcaccagcct

SEQ ID NO: 424664 - DNA, 75 bp, synthetic construct
  source 1..75: mol_type = other DNA
cgcctgcgccgccgttacccgttcctgactgaatcgctggcacgtcactacgcacgcacttacggcagcaacagc

SEQ ID NO: 424665 - DNA, 75 bp, synthetic construct
  source 1..75: mol_type = other DNA
tggctaaatgcggatcaacaatctcgtgtgagtcagtggctgggggagtatacgcagcagaagttgtcgctggcg

SEQ ID NO: 424666 - DNA, 75 bp, synthetic construct
  source 1..75: mol_type = other DNA
cggtggatcgcaccgatggcatcagcatgacctttgccgactggcgctttaacctgcgctcctccaacaccgaac

SEQ ID NO: 424667 - DNA, 75 bp, synthetic construct
  source 1..75: mol_type = other DNA
tggctgaatgcgcagcaacagtctcgtgtgagtcagtggctggtagagtatacgcagcaaaaattgtcgctggcg

SEQ ID NO: 424668 - DNA, 75 bp, synthetic construct
  source 1..75: mol_type = other DNA
tggctgaatgcagaacaacaatctcgcgtgagtcagtggttggtggagtatacgcagcagaggttatcgctagcg

SEQ ID NO: 424669 - DNA, 75 bp, synthetic construct
  source 1..75: mol_type = other DNA
cgattatgcttatgacgacggtcgctatacatggcttggctttagtccaacaaagaaaatacctagcgtgtttgt

SEQ ID NO: 424670 - DNA, 75 bp, synthetic construct
  source 1..75: mol_type = other DNA
tttatggtcatttccagcgacgataaagcgcacaaggtgattaaagcccgccgttcagccaatgatttcttaggt

SEQ ID NO: 424671 - DNA, 75 bp, synthetic construct
  source 1..75: mol_type = other DNA
aaccagggtcaaatcggcgaatacgataccgctatcgccagcatcgccaaacgagcagatgaagtgtacttcctg

SEQ ID NO: 424672 - DNA, 75 bp, synthetic construct
  source 1..75: mol_type = other DNA
ataccgccatcgccagcatcgccaaacgtgcggatgaagtgtacttcctgaaagaagggaattttgaagccgata

SEQ ID NO: 424673 - DNA, 75 bp, synthetic construct
  source 1..75: mol_type = other DNA
cccgtttgccagcagtgttaacggcctgatttttgccgattacattgccgccagtggttccacgcaaaaatcgct

SEQ ID NO: 424674 - DNA, 75 bp, synthetic construct
  source 1..75: mol_type = other DNA
tccgggatgaaagatacctggacggtcactgcagttaaaccgaaatatcagacctatgtggtggtgatcggtgaa

SEQ ID NO: 424675 - DNA, 75 bp, synthetic construct
  source 1..75: mol_type = other DNA
gctgtccggcgaaaaaaagagagtgaaaaaacacgctggagtaaattcgacagcctgtgtctggtattcagcgtg

SEQ ID NO: 424676 - DNA, 75 bp, synthetic construct
  source 1..75: mol_type = other DNA
aatctccgttcaggtttaaatttaggggcgtggcgttttcgcgattattctacatggagtcgttcaggtaattca

SEQ ID NO: 424677 - DNA, 75 bp, synthetic construct
  source 1..75: mol_type = other DNA
aggaaggaactttatcaggttaaacaggtggtgaagggaatgaagaacgggatatccggcgtattacgcgaggta

SEQ ID NO: 424678 - DNA, 75 bp, synthetic construct
  source 1..75: mol_type = other DNA
caagatagcggtaactttgggggttgagcacccaaaggtccctgtaaatggggagctcaacattatgacgacgga

SEQ ID NO: 424679 - DNA, 75 bp, synthetic construct
  source 1..75: mol_type = other DNA
cttttgctatggcgaacattgcctcgcgtacaaaaagttctggtcggtgtcagttcgctggtggcggcttgttat

SEQ ID NO: 424680 - DNA, 75 bp, synthetic construct
  source 1..75: mol_type = other DNA
ttttgttcttaaaatgcctcgttccggcatcaatcactaccgagtccctgccgtccccttattgagcgccgcgta

SEQ ID NO: 424681 - DNA, 75 bp, synthetic construct
  source 1..75: mol_type = other DNA
ttgctgaattatgacttttctggtaataacgatcgtggtgattactcttcaaataactattatttaaatcttcgc

SEQ ID NO: 424682 - DNA, 75 bp, synthetic construct
  source 1..75: mol_type = other DNA
atgaagagaacgctctcggaccaatggctcgtttttgatttacgtgatgagctgcatcatcaggtggaaaaaaca

SEQ ID NO: 424683 - DNA, 75 bp, synthetic construct
  source 1..75: mol_type = other DNA
gcgctgaatgtgttgctgcctgatgcgaccgactggcaagtgtatgaagctggttccgtattcaatgttcccggc

SEQ ID NO: 424684 - DNA, 75 bp, synthetic construct
  source 1..75: mol_type = other DNA
gcccgtaccgggcttgaagaagtccaacgcgatcatgcgaaataacgagacggaaaaatggctttacccaaacgg

SEQ ID NO: 424685 - DNA, 75 bp, synthetic construct
  source 1..75: mol_type = other DNA
acgaacacccatttgaccagattgtgtacccggacgattcggagcggtttattcatgtgccgaccacgctcgaga

SEQ ID NO: 424686 - DNA, 75 bp, synthetic construct
  source 1..75: mol_type = other DNA
taagcagacagtgcaaaataataagtccgatgaagatggtaatgaatcatctgaagtggttaacgttgcgcttga

SEQ ID NO: 424687 - DNA, 75 bp, synthetic construct
  source 1..75: mol_type = other DNA
cgtcacgaaaaaagatgagatcccgctgatagccgctgatattcggaaggtgttcaatcggaatatgtcaagata

SEQ ID NO: 424688 - DNA, 75 bp, synthetic construct
  source 1..75: mol_type = other DNA
tggttccgtattcaatgttcccggccacagtgaattccatttgcaagttgctgaaccgacctcttatttgtgccg

SEQ ID NO: 424689 - DNA, 75 bp, synthetic construct
  source 1..75: mol_type = other DNA
catctttgttgcctcgattcgtggtgatgtgcagcagcaggtgaaaacgctggagaaaaccaccgttgccgacac

SEQ ID NO: 424690 - DNA, 75 bp, synthetic construct
  source 1..75: mol_type = other DNA
ttgctgaaatatctgcaaatgaatgcgtctgataccgcaggtaaggctcacggcgataagaaggaagaaaaataa

SEQ ID NO: 424691 - DNA, 75 bp, synthetic construct
  source 1..75: mol_type = other DNA
ccgcgtttcgggaagaaatgtttggccccgttgcggcaatcaccattgcgaaagatgcagaacatgcgctggaac

SEQ ID NO: 424692 - DNA, 75 bp, synthetic construct
  source 1..75: mol_type = other DNA
gcctgtggaaggtttgaagaaacccaacgcaatcatgcgcaacgacgagacagaaaagtggctttacccgaacgg

SEQ ID NO: 424693 - DNA, 75 bp, synthetic construct
  source 1..75: mol_type = other DNA
ctggcgtggcccgttttatggcctccttgtttccaccgagcacaatgaaaacttgccgtctactggacgcaggcg

SEQ ID NO: 424694 - DNA, 75 bp, synthetic construct
  source 1..75: mol_type = other DNA
tcgataaacgtgaagaacgcaccttgctgaaatatctgcaaatgaatgcgtccgacactgcaggcaaggttcacg

SEQ ID NO: 424695 - DNA, 75 bp, synthetic construct
  source 1..75: mol_type = other DNA
cgtgtaatccgcgttccggatacgtatgacccggagacccgcacctacagcggcacatggacaggggcgtttaag

SEQ ID NO: 424696 - DNA, 75 bp, synthetic construct
  source 1..75: mol_type = other DNA
ccgatgggctggctgccgccgtaggttcgaataagcagacagcagaagcaatcatcggcaacgcgctggctattg

SEQ ID NO: 424697 - DNA, 75 bp, synthetic construct
  source 1..75: mol_type = other DNA
cgtgcgcgcaatcaatgccgcagaaatttcttccggatggggctcttcagaagagaaaacgctgacgggtaaagt

SEQ ID NO: 424698 - DNA, 75 bp, synthetic construct
  source 1..75: mol_type = other DNA
actatatccagtccaacaactatgcagctggttctgctggttggaagttgaataaagctggagatgctgaattca

SEQ ID NO: 424699 - DNA, 75 bp, synthetic construct
  source 1..75: mol_type = other DNA
caggatctcgttgctcgctttggcacaaatcagctcgaaatgacagccattggttgtaccagacagtcagaagcg

SEQ ID NO: 424700 - DNA, 75 bp, synthetic construct
  source 1..75: mol_type = other DNA
catcgtgtcgttcgatgttggtcttgacggtaagatcccacagcctggttatatcatcgcggttgccgatgagct

SEQ ID NO: 424701 - DNA, 75 bp, synthetic construct
  source 1..75: mol_type = other DNA
ttcactcaggcgtcggccacgaaaatcaacacgctgactgttacctccggagaaaatactgcagccattacggta

SEQ ID NO: 424702 - DNA, 75 bp, synthetic construct
  source 1..75: mol_type = other DNA
cgcagataaacgtcatcacggcgaccgtgaacgggcatacctccgccatcaccactaacgctcaggctatagcca

SEQ ID NO: 424703 - DNA, 75 bp, synthetic construct
  source 1..75: mol_type = other DNA
cttataaggatacggctaatacaactaagaccatcacagtcatggctaacctttctggtgttcctaaatatccag

SEQ ID NO: 424704 - DNA, 75 bp, synthetic construct
  source 1..75: mol_type = other DNA
cgcgcgctaacgttgttggcggtcgcttcacctattcgagcagcaccacgaaaagccgctacaccacagcactgg

SEQ ID NO: 424705 - DNA, 75 bp, synthetic construct
  source 1..75: mol_type = other DNA
gcgggaatgcagtcgcaggtgctcttcctggcagaccgcttcgcggttatgacccaggctggagggaccgtgact

SEQ ID NO: 424706 - DNA, 75 bp, synthetic construct
  source 1..75: mol_type = other DNA
ctgcgtgattttgcggccatattccgtggcatgacgtactggggaggcgatcagatcgttgctctggccgatatg

SEQ ID NO: 424707 - DNA, 75 bp, synthetic construct
  source 1..75: mol_type = other DNA
cggcaacagcgcgaatctggaccgtctcgacgaggtgatcgtcagtgagaaggaagccacagcacgttcattgct

SEQ ID NO: 424708 - DNA, 75 bp, synthetic construct
  source 1..75: mol_type = other DNA
agacagtaaaccgcggcgcagttcagccggggatgctcgtcaaacacaaggattcaacctggacggcatcagcta

SEQ ID NO: 424709 - DNA, 75 bp, synthetic construct
  source 1..75: mol_type = other DNA
gttaacccgcccggacaaaaccacgctcacaatcgaaatcacccgccgatgggaggccaccattaatgccgtatg

SEQ ID NO: 424710 - DNA, 75 bp, synthetic construct
  source 1..75: mol_type = other DNA
gtacagcaacagtattgtggatacgcccacgtactttgcctttgcaaaaggggccgggctgatgggggaggccgg

SEQ ID NO: 424711 - DNA, 75 bp, synthetic construct
  source 1..75: mol_type = other DNA
gtgattcagaacaaagtcgatccacaaaccggagaagtgattgatcaaggaacactggatcatctgaccggacaa

SEQ ID NO: 424712 - DNA, 75 bp, synthetic construct
  source 1..75: mol_type = other DNA
cgttattggggagcctgcgtaaaggttcatttaatggcatggttgcacgtacgctgccgaaaattgccccggcgg

SEQ ID NO: 424713 - DNA, 75 bp, synthetic construct
  source 1..75: mol_type = other DNA
gtgattcagaacaaagttgatccgcaaaccggagaagtgattgatcagggtacgctggaccacctgaccgggcaa

SEQ ID NO: 424714 - DNA, 75 bp, synthetic construct
  source 1..75: mol_type = other DNA
gcgcagcaggataacgctgaacccaatcgtctgcttgtggtcgaaggctatatggacgtggtggcgctggcgcaa

SEQ ID NO: 424715 - DNA, 75 bp, synthetic construct
  source 1..75: mol_type = other DNA
acgcctggagctctggacattaaaccaggagctggcgaaaaagggatttaacggcttaagtgccgaagagcgatc

SEQ ID NO: 424716 - DNA, 75 bp, synthetic construct
  source 1..75: mol_type = other DNA
tccttaagcttgaccgggtgccaagtgctaaggccggtgacaggataatggtaaacctgccgtcgggtattaccc

SEQ ID NO: 424717 - DNA, 75 bp, synthetic construct
  source 1..75: mol_type = other DNA
tctatcttcgtcaggaattaggcaacaagttaggcatacttgatgacagccagcttgaacgattaatgccgaaag

SEQ ID NO: 424718 - DNA, 75 bp, synthetic construct
  source 1..75: mol_type = other DNA
tcagttgatggacggtctgaatacgttttaccaacaatctttacagcaacctgttgccacgtctgcgcgccagta

SEQ ID NO: 424719 - DNA, 75 bp, synthetic construct
  source 1..75: mol_type = other DNA
tacgctggcactgccattgatatcgcaagtgccgggcgaaacgctgcgaatatatcttcgtcaggaattaggcaa

SEQ ID NO: 424720 - DNA, 75 bp, synthetic construct
  source 1..75: mol_type = other DNA
tccaatcttgagaagcgttttaaagaagaggtgggtgaaaccatccatgccatgattcatgccgagaagctggag

SEQ ID NO: 424721 - DNA, 75 bp, synthetic construct
  source 1..75: mol_type = other DNA
gaacgcatggcggtatgtgaagagaccatcgcgcgcattgatccgacctggagctgttttatgtgtttatcctgc

SEQ ID NO: 424722 - DNA, 75 bp, synthetic construct
  source 1..75: mol_type = other DNA
gaagaaggacatgccatcaccgattatcagcagattggcgatgcagcgtggagcatcaccgttcaaaaagcctga

SEQ ID NO: 424723 - DNA, 75 bp, synthetic construct
  source 1..75: mol_type = other DNA
cagcgcgccgtgttcggttgctaaagctaatattgataaaacgctaagtgagttgaccgcagactgggaacatcc

SEQ ID NO: 424724 - DNA, 75 bp, synthetic construct
  source 1..75: mol_type = other DNA
ggctggggcgcaccgcaaagtggttgatctggcaaaactgcaaatcaccctcgcgctggaacgtgaatctgtctg

SEQ ID NO: 424725 - DNA, 75 bp, synthetic construct
  source 1..75: mol_type = other DNA
ccaacaaaacagaagaggcgttggtttatatcgacaggcaaatcgacgcggtaaacgcagcggggagtgaatatt

SEQ ID NO: 424726 - DNA, 75 bp, synthetic construct
  source 1..75: mol_type = other DNA
tggtaattggcgtcgatcctatcgcccatcgctgtgatattgcccgtcgccacgggcggatttctgccttaaccc

SEQ ID NO: 424727 - DNA, 75 bp, synthetic construct
  source 1..75: mol_type = other DNA
tctggtgatcgccgcggctgcctttgtgaaagtggcagaggctgcgattaccaccttttctgaagtccgtgatga

SEQ ID NO: 424728 - DNA, 75 bp, synthetic construct
  source 1..75: mol_type = other DNA
gccgtctgcgcctgatggcgcgtctggcgggaatggtcatggtgacgtttttgctgggtagtctgacaccggcac

SEQ ID NO: 424729 - DNA, 75 bp, synthetic construct
  source 1..75: mol_type = other DNA
atgaactgccattaggttttaaacagcggctggcactggcctgctcgctgatgcatgaaccggacattctgtttc

SEQ ID NO: 424730 - DNA, 75 bp, synthetic construct
  source 1..75: mol_type = other DNA
agagcagcgttatgctattgcaccggcgttcacctggcgtccggatgataaaaccaattttaccttcctttctta

SEQ ID NO: 424731 - DNA, 75 bp, synthetic construct
  source 1..75: mol_type = other DNA
tcgggcagattaaaggctattcccaggacggtgtggtgctgggggggctgattatttcagccattgctttcattg

SEQ ID NO: 424732 - DNA, 75 bp, synthetic construct
  source 1..75: mol_type = other DNA
taatgatgactatacgttaacggacagtcatcagggagaagatgcacagccgctgtctgcgttctactttgtcat

SEQ ID NO: 424733 - DNA, 75 bp, synthetic construct
  source 1..75: mol_type = other DNA
ctacagcaaatacgcttgggcctggtagtcgttatgaaattgatgcgactattgccgatatctatttagttgctg

SEQ ID NO: 424734 - DNA, 75 bp, synthetic construct
  source 1..75: mol_type = other DNA
attgaaaggctctttcggttaatcgttgaatctgaattattaaatgacaagaaaattaatatcacatcggctcat

SEQ ID NO: 424735 - DNA, 75 bp, synthetic construct
  source 1..75: mol_type = other DNA
atgccttattgccagattatagaaatgctggtgcaccaggaaagccaagaaccttggcaggttctaaaaagtcag

SEQ ID NO: 424736 - DNA, 75 bp, synthetic construct
  source 1..75: mol_type = other DNA
gtcgacgtccccattgttggggttggcggctcgtatcaccttgcagaaagttacccacccgttcattacattgcc

SEQ ID NO: 424737 - DNA, 75 bp, synthetic construct
  source 1..75: mol_type = other DNA
ggggaaaaactccctcagatccaatgaattttacgtggcgttttctggctttaagcgcagcaaagccgcgcatta

SEQ ID NO: 424738 - DNA, 75 bp, synthetic construct
  source 1..75: mol_type = other DNA
agacgatttgtggacttgtttgctcagtattttcctcgcattccccaagaggattacccaacactacgtcagttt

SEQ ID NO: 424739 - DNA, 75 bp, synthetic construct
  source 1..75: mol_type = other DNA
cctgcaacgctacgttgaaagccatcttcaggaagataatggactttgcttcgatctgttggatctcttgctcca

SEQ ID NO: 424740 - DNA, 75 bp, synthetic construct
  source 1..75: mol_type = other DNA
tagaagcgctgctggcaacacgcgccgatattttagttgcccttcagcgctacgatgaagctcgtgaagtgattg

SEQ ID NO: 424741 - DNA, 75 bp, synthetic construct
  source 1..75: mol_type = other DNA
atgcgattgatgagtcgattgaactgctgcaaagctatgttgaaagccacatccaggaagataacggcctttgct

SEQ ID NO: 424742 - DNA, 75 bp, synthetic construct
  source 1..75: mol_type = other DNA
agcgtttatctgaaattaaatcgaataaaaagtctgttcgtgaaaatgagaaattatcaaatacttccttaaaac

SEQ ID NO: 424743 - DNA, 75 bp, synthetic construct
  source 1..75: mol_type = other DNA
gacgtttttagcagaatggttgtgggattctatatcggatttcataatccatcctatgttgttgccatgcaggcg

SEQ ID NO: 424744 - DNA, 75 bp, synthetic construct
  source 1..75: mol_type = other DNA
gaaggggcgaagaacaacacctattctcgtaatgagaagatggtcggctacagcttcgatcacgaatttaacgac

SEQ ID NO: 424745 - DNA, 75 bp, synthetic construct
  source 1..75: mol_type = other DNA
ggaaaccgcactgggacaaaccttctctgtcgtggccacccccgtcaaaggcgaagggcgtgtctaccgcctgat

SEQ ID NO: 424746 - DNA, 75 bp, synthetic construct
  source 1..75: mol_type = other DNA
agggcgcgtgcctggggctggatattcggcgcgtggtagaaacgggtattacgccgcttatcaataccggtatcg

SEQ ID NO: 424747 - DNA, 75 bp, synthetic construct
  source 1..75: mol_type = other DNA
atgacccgcaacggcaatatgttcgggattcgggtaagcgggctgggtgaacgctggtttactgcgcctgtaaac

SEQ ID NO: 424748 - DNA, 75 bp, synthetic construct
  source 1..75: mol_type = other DNA
gcaagactggcacacagcccggctaatcatggaacgctgggggcatggtggtcttgtaacgctggggtttcacga

SEQ ID NO: 424749 - DNA, 75 bp, synthetic construct
  source 1..75: mol_type = other DNA
cgtgcggggatcccgctggatgtgatgtatgacgtcgtgaccaatgccgccggaaattcctggatgttcgaaaac

SEQ ID NO: 424750 - DNA, 75 bp, synthetic construct
  source 1..75: mol_type = other DNA
tttatcccgggtgacaaagtcaccgccatcacagcgccaggtggaatgctggcagacaagcggctgacaacggcc

SEQ ID NO: 424751 - DNA, 75 bp, synthetic construct
  source 1..75: mol_type = other DNA
gtgcaaccggcttcttcacttatcagcgaactaaaccagggcaaaacactgcttcacgccgggccgccaatgcgc

SEQ ID NO: 424752 - DNA, 75 bp, synthetic construct
  source 1..75: mol_type = other DNA
tcatatcaatgtttcttcatcttcagtcctgttctcagaagcatcgtcatttataaacagctccttgaatattca

SEQ ID NO: 424753 - DNA, 75 bp, synthetic construct
  source 1..75: mol_type = other DNA
cttctgtcgaccggggcgcgatggggcgaggtagcggcactggagcagcgccgtgttcttcattgtcgaatcact

SEQ ID NO: 424754 - DNA, 75 bp, synthetic construct
  source 1..75: mol_type = other DNA
gcttcacgccgggccaccaatgcgctggcaggagatgaccgggccaatgaaaggggcgtgcgtgggcgcatgtct

SEQ ID NO: 424755 - DNA, 75 bp, synthetic construct
  source 1..75: mol_type = other DNA
gattggcgcaggcaccgtgcgggcaccgctggcgtgttttgaacaggcgctggaagcactggctgaaagcatggg

SEQ ID NO: 424756 - DNA, 75 bp, synthetic construct
  source 1..75: mol_type = other DNA
agggggaagtgaacttcattccttgccaccatgtgaatgctgtcggaccaatgggcggtattacctctgccagta

SEQ ID NO: 424757 - DNA, 75 bp, synthetic construct
  source 1..75: mol_type = other DNA
atggatgacccgtgcgtgcataaacttaatacaacgatgctcaccgagctacgtgtgtccaggatagagcagggg

SEQ ID NO: 424758 - DNA, 75 bp, synthetic construct
  source 1..75: mol_type = other DNA
tggcattgataataagcagacatttgcaaaatggttgaagtgccttaatctcataaggaatcgttgcgctcacca

SEQ ID NO: 424759 - DNA, 75 bp, synthetic construct
  source 1..75: mol_type = other DNA
taagtctgctatgtgagcaaacacctgaaatactctgcaccatccaagcaagcgtcagtacgttcattgcgctat

SEQ ID NO: 424760 - DNA, 75 bp, synthetic construct
  source 1..75: mol_type = other DNA
tgatagaacgtttgccagcagaaacgcagcgccagttccgggatgaattggggcgttatcttgcccgtaatcaga

SEQ ID NO: 424761 - DNA, 75 bp, synthetic construct
  source 1..75: mol_type = other DNA
tcaaccactgagcctgtggggcatggagctgggttggacactgccagagctggcttctgctcagcaggtaggacg

SEQ ID NO: 424762 - DNA, 75 bp, synthetic construct
  source 1..75: mol_type = other DNA
caatatctccgtgctggagtacgtgaaagttaactgtatcgcgttccaggaaaacggcgaaccgctggaaatcgt

SEQ ID NO: 424763 - DNA, 75 bp, synthetic construct
  source 1..75: mol_type = other DNA
atgattacttttgatcaggcaaccgttgatagctctggtgcctttctcatcggggagctggagcgactcgaccag

SEQ ID NO: 424764 - DNA, 75 bp, synthetic construct
  source 1..75: mol_type = other DNA
aaaccggtgtcgcctcttccccggattgtggcgcgtacaattatggtctttctggtattgatgctattgatttcc

SEQ ID NO: 424765 - DNA, 75 bp, synthetic construct
  source 1..75: mol_type = other DNA
gcacgcaaagattcagacaacgatgatttatgcccatcttgcgccggattacttgcaggatgcggtgagatttaa

SEQ ID NO: 424766 - DNA, 75 bp, synthetic construct
  source 1..75: mol_type = other DNA
taccgcactcatctcatccggccattttcttaacgataaccccgttcaaggccttaaaggaatgaaggttaacga

SEQ ID NO: 424767 - DNA, 75 bp, synthetic construct
  source 1..75: mol_type = other DNA
tgatagaacgtttgccgccagaaacgcagcgccagttccgggatgaattggggcgttatcttacccgtaatcaga

SEQ ID NO: 424768 - DNA, 75 bp, synthetic construct
  source 1..75: mol_type = other DNA
ttattttggcaaaaataaacgatattcttgtcgactttaatgagttaaacaggcaaataaataactttcctgaaa

SEQ ID NO: 424769 - DNA, 75 bp, synthetic construct
  source 1..75: mol_type = other DNA
ctgaaaacgcccaaaacgaaagcgttctggcgcagtcacgtcttgatgagcagaggctggaagctcttcttaaag

SEQ ID NO: 424770 - DNA, 75 bp, synthetic construct
  source 1..75: mol_type = other DNA
ccgtcatgattgttggcctcgccatttttctgcttggtggctggatcatgaatctggtgaaactcgtgaacggtg

SEQ ID NO: 424771 - DNA, 75 bp, synthetic construct
  source 1..75: mol_type = other DNA
cgctttcgacaaaaaagataaaaatatcaatcacgaacaggcagagcaaaaagctctcgataatgtcccgccgct

SEQ ID NO: 424772 - DNA, 75 bp, synthetic construct
  source 1..75: mol_type = other DNA
gccaaaagcagcggctacttgatcgtcgatatttataatgaaatcctgcgcatgctgtccaaccgcattgctgga

SEQ ID NO: 424773 - DNA, 75 bp, synthetic construct
  source 1..75: mol_type = other DNA
ctggtgccgattttgacttctgtctggtcgcgtaaagttaaagccagagtggcgaagatcgaaatattaggtgcg

SEQ ID NO: 424774 - DNA, 75 bp, synthetic construct
  source 1..75: mol_type = other DNA
gctattgatggagtgactcctgcgggtaaaaacggagccgccgaagccacttacatttatctgaacggcacacgg

SEQ ID NO: 424775 - DNA, 75 bp, synthetic construct
  source 1..75: mol_type = other DNA
atgaccaaagaccatgcacaaggtgtatttatccgttttattgattttcgcggtgaactgttattacgcgcatcc

SEQ ID NO: 424776 - DNA, 75 bp, synthetic construct
  source 1..75: mol_type = other DNA
ctgaacaacagaaacaataaagccacttccacgcctacagttacgactcgtggatgtcggggatggagtttgccg

SEQ ID NO: 424777 - DNA, 75 bp, synthetic construct
  source 1..75: mol_type = other DNA
tgtcctcccaaaaaaactgctgaatgaaatgattgagcaggcgtaccaggactttgtggcaaatgagcaacacaa

SEQ ID NO: 424778 - DNA, 75 bp, synthetic construct
  source 1..75: mol_type = other DNA
tacgctgggcaacctgacggcggagcaactcaccgttgcaccgggtcatgtggtggttaacgatctccagaccct

SEQ ID NO: 424779 - DNA, 75 bp, synthetic construct
  source 1..75: mol_type = other DNA
gcatggcgatgattttgattacgtcgatacgcgcacatttttacgcgccgtcgatgcggtactgccgcagttaaa

SEQ ID NO: 424780 - DNA, 75 bp, synthetic construct
  source 1..75: mol_type = other DNA
gggatcctgttgggtgtggcagtaattatcgtgaccggtattccgttgattatcgccgataaattgattggcggt

SEQ ID NO: 424781 - DNA, 75 bp, synthetic construct
  source 1..75: mol_type = other DNA
ttccgttccgctgaaactgtccggaaaaatccacaaacagcctgaaagtattgcccgaagtcgtggtgcccccca

SEQ ID NO: 424782 - DNA, 75 bp, synthetic construct
  source 1..75: mol_type = other DNA
aaaaaaactgctgaatgaaatgattgagcaggcgtaccaggactttgtggcaaatgagcaacacaagacactgag

SEQ ID NO: 424783 - DNA, 75 bp, synthetic construct
  source 1..75: mol_type = other DNA
tgaaaaggcacgtcaggttaatggcgataaaccctatatcgaaattatttgtatggattcagaagcagaaatcca

SEQ ID NO: 424784 - DNA, 75 bp, synthetic construct
  source 1..75: mol_type = other DNA
gaaaaccttatttatcagccggaaaacctaccggattgatgggcacggtgagatggtcatcaatgtggatgttgc

SEQ ID NO: 424785 - DNA, 75 bp, synthetic construct
  source 1..75: mol_type = other DNA
atgtccaacatttggggtgcagttcacgcctggcagcaatggcgtctggcggaaaacctcagcgtgacactcccc

SEQ ID NO: 424786 - DNA, 75 bp, synthetic construct
  source 1..75: mol_type = other DNA
atggtggcactggatggcaagccgctggcaagcggtgaagtgcctctggatgttggcccgcaaggtaagcagttg

SEQ ID NO: 424787 - DNA, 75 bp, synthetic construct
  source 1..75: mol_type = other DNA
atgaactggctttcaaatcactttgggaaaatttggctggcaattctggctctcatggccgccggttgggtatcc

SEQ ID NO: 424788 - DNA, 75 bp, synthetic construct
  source 1..75: mol_type = other DNA
atgttggcgttttctattcagtatagaagtgggagcggctgggcgagatgcggaagttctggaatgtttcttttt

SEQ ID NO: 424789 - DNA, 75 bp, synthetic construct
  source 1..75: mol_type = other DNA
gactgaagcaatttggctacttttgcaatgtgacaagttatggcagagctggctggtggcgaagaattttgacga

SEQ ID NO: 424790 - DNA, 75 bp, synthetic construct
  source 1..75: mol_type = other DNA
taagtactatgtaaatgacactacaaatagtaagtactacgatgccgaagtagatactagtaagggtgaaattaa

SEQ ID NO: 424791 - DNA, 75 bp, synthetic construct
  source 1..75: mol_type = other DNA
tggaaatatttacaggttatatgatgaatactgttattaaggcagggggagaggctttatctgaaaaacttatat

SEQ ID NO: 424792 - DNA, 75 bp, synthetic construct
  source 1..75: mol_type = other DNA
cggtgaactgttattacgcgcatcagctattgatggagtcgtcccatcagaaaaaaatgcagctacttacgttta

SEQ ID NO: 424793 - DNA, 75 bp, synthetic construct
  source 1..75: mol_type = other DNA
gccaagaaaacaggtagcactttagttgtaaatggcgccacctacaatgtcagcgcagatggtaaaacggtaact

SEQ ID NO: 424794 - DNA, 75 bp, synthetic construct
  source 1..75: mol_type = other DNA
atctggcaaaaattgatgcgaaaactctcggcctggacggttttaatatcgatggcgcgcagaaagcaaccggca

SEQ ID NO: 424795 - DNA, 75 bp, synthetic construct
  source 1..75: mol_type = other DNA
actgcggctactcagaaagatcaactgattaaagttgccgctgactctgacggctcggctgcgggatatgtaaca

SEQ ID NO: 424796 - DNA, 75 bp, synthetic construct
  source 1..75: mol_type = other DNA
atgcgtcccgcgactatcgcccccttatcgccatacgataaatgggatggtgagaaatgggtgactgatactgaa

SEQ ID NO: 424797 - DNA, 75 bp, synthetic construct
  source 1..75: mol_type = other DNA
gcggctttatcgggcatgtatgctgcgggggccagtatgatccttggcggtgtggcgcagatgctggcaccgaaa

SEQ ID NO: 424798 - DNA, 75 bp, synthetic construct
  source 1..75: mol_type = other DNA
gtgatgcaggtgaaaccgaattgtctgcccgtcttaatgagccgctggcaaatggtgccgtgatccacatcgttc

SEQ ID NO: 424799 - DNA, 75 bp, synthetic construct
  source 1..75: mol_type = other DNA
gtgaaaacgggagcagaagccatccgggcgctggccacgcagctccctgcgtttcgtcagaaactgagcgatggc

SEQ ID NO: 424800 - DNA, 75 bp, synthetic construct
  source 1..75: mol_type = other DNA
ttacaacgatttggccgccgcatcgacctgcgtgtgaaaacgggggccgaagcagtccgggcgctgaccacacag

SEQ ID NO: 424801 - DNA, 75 bp, synthetic construct
  source 1..75: mol_type = other DNA
ctggttttatattccttattagccttatttgtttttattcccgatctcatcatcctcccgttgaaatggattaat

SEQ ID NO: 424802 - DNA, 75 bp, synthetic construct
  source 1..75: mol_type = other DNA
cgtggggtcacgggtgatttcgcaggagatcagcacggcagatgaaggagatggtggtcaggttgtggtgattgg

SEQ ID NO: 424803 - DNA, 75 bp, synthetic construct
  source 1..75: mol_type = other DNA
gtgcagggctggctgctattgcactggctgccggaggcggtggtggaagcagtcgtcataagagtacagctgagg

SEQ ID NO: 424804 - DNA, 75 bp, synthetic construct
  source 1..75: mol_type = other DNA
tgaacgaaggctggtaccagatacgtattgccgggcgtgatgcaggtgaaaacgaattatccgtccggcttaatg

SEQ ID NO: 424805 - DNA, 75 bp, synthetic construct
  source 1..75: mol_type = other DNA
ggtgtgtttcaggcggtgctgggtgcggcgctgattgcggtggcatggtggaaccctgttggctggctgggggcc

SEQ ID NO: 424806 - DNA, 75 bp, synthetic construct
  source 1..75: mol_type = other DNA
cgcggctttatcgggcatgtatgcggcaggggccagtatgatcctgggcggtgtggcacagatgctggcaccgaa

SEQ ID NO: 424807 - DNA, 75 bp, synthetic construct
  source 1..75: mol_type = other DNA
gtgaaaacgggggctgaagccatccgcgcactggccacacagtttccgtcgtttcgccagaaactgaatgagggc

SEQ ID NO: 424808 - DNA, 75 bp, synthetic construct
  source 1..75: mol_type = other DNA
gtggggtcacgtgtggcatctcaggagatcagcacggcagatgaaggggatggtggtcaggttgtggtaattggg

SEQ ID NO: 424809 - DNA, 75 bp, synthetic construct
  source 1..75: mol_type = other DNA
cgcgtctggcgggagccaaaagtggcggtgtgtttcaggcggtgctgggtgcggcgctgattgcggtggcgtggt

SEQ ID NO: 424810 - DNA, 75 bp, synthetic construct
  source 1..75: mol_type = other DNA
ggtgaaatgcgcgtgggctcccgcgtggtatctcaggagatcagcactgcagaggaaggcgatggtggtcaggtt

SEQ ID NO: 424811 - DNA, 75 bp, synthetic construct
  source 1..75: mol_type = other DNA
ggtgaaatgcgcgtgggttcccgagtggtatctcaggagatcagcactgcagatgaaggcgatggtggtcaggtt

SEQ ID NO: 424812 - DNA, 75 bp, synthetic construct
  source 1..75: mol_type = other DNA
ggtgaaatgcgcgtgggatcccgagtggtatctcaggagatcagcactgcagaggaaggcgatggtggtcaggtt

SEQ ID NO: 424813 - DNA, 75 bp, synthetic construct
  source 1..75: mol_type = other DNA
ggtgaaatgcgcgtggggtcccgggtggtatctcaggagatcagcactgcagaggaaggcgatggtggtcaggtt

SEQ ID NO: 424814 - DNA, 75 bp, synthetic construct
  source 1..75: mol_type = other DNA
ggtgaaatgcgcgtggggtcccgcgtggtatctcaggagatcagcactgcagacgaaggcgatggtggtcaggtt

SEQ ID NO: 424815 - DNA, 75 bp, synthetic construct
  source 1..75: mol_type = other DNA
ggtgaaatgcgcgtggggtcccgagtggtatctcaggagatcagcactgcagaagaaggcgatggtggtcaggtt

SEQ ID NO: 424816 - DNA, 75 bp, synthetic construct
  source 1..75: mol_type = other DNA
gcagcgatgacgcttggtggtgttgcacagatgctggcccctaaacccaaaactccacgtacacagacaacggat

SEQ ID NO: 424817 - DNA, 75 bp, synthetic construct
  source 1..75: mol_type = other DNA
cgcgtggggtcacgtgtggcatctcaggagatcagcacggcagatgaaggggatggtggtcaggttgtggtaatt

SEQ ID NO: 424818 - DNA, 75 bp, synthetic construct
  source 1..75: mol_type = other DNA
tgacggtgagtttttcaactggctggaagataatctggatgcgctgctcaatctggatggtccggcaatggcgta

SEQ ID NO: 424819 - DNA, 75 bp, synthetic construct
  source 1..75: mol_type = other DNA
ttccgttggcaattggtaagagtgaagttcgcagcggcgtttcgcacgagcttgttcttaacgccattgccgatt

SEQ ID NO: 424820 - DNA, 75 bp, synthetic construct
  source 1..75: mol_type = other DNA
ccgtgttgtttatgtcgtcagtgatgctgccgttatttatggcagaaggtaccagcatcgacaaactgatccgtg

SEQ ID NO: 424821 - DNA, 75 bp, synthetic construct
  source 1..75: mol_type = other DNA
tatgacaatgttgtgtgtaacgcatgagatggggtttgcgcgaaccgtcgctgaccgggtgatttttatggatcg

SEQ ID NO: 424822 - DNA, 75 bp, synthetic construct
  source 1..75: mol_type = other DNA
caggggccagtatgatcctgggcggtgtggcgcagatgctggcaccgaaagccagaactccccgcacacagacaa

SEQ ID NO: 424823 - DNA, 75 bp, synthetic construct
  source 1..75: mol_type = other DNA
tccctctggcgtcaccaggcatggcacgcatctgcctttacggggatttgcaacgatttggccgccgcatcgacc

SEQ ID NO: 424824 - DNA, 75 bp, synthetic construct
  source 1..75: mol_type = other DNA
gggataaacatgctcttgaaatcacctgtaaaaactggaaagccagtggtgaagatgcggaaatgttaattccag

SEQ ID NO: 424825 - DNA, 75 bp, synthetic construct
  source 1..75: mol_type = other DNA
atgcaaaaattatatccccgtggcactatggacattatggtgaaaatgctatgttttataaaacattctttttcg

SEQ ID NO: 424826 - DNA, 75 bp, synthetic construct
  source 1..75: mol_type = other DNA
ccgcgtctggcgggagctaaaagtggcggtgtgtttcaggtggtgctgggggcggcgctgattgcggtggcatgg

SEQ ID NO: 424827 - DNA, 75 bp, synthetic construct
  source 1..75: mol_type = other DNA
attttagcttaataacaaaggtttcactgtttacaaaattcattagtattcttttaatagttttctttgttaaga

SEQ ID NO: 424828 - DNA, 75 bp, synthetic construct
  source 1..75: mol_type = other DNA
ccggcgtttcgtcagaaactgagcgatggctggtatcagatacggattgccgggcgtgatacaggtgaaaacgaa

SEQ ID NO: 424829 - DNA, 75 bp, synthetic construct
  source 1..75: mol_type = other DNA
tatgtcttcggtcatgctgccgttgtttatggcagaaggcaccagtatcgacaaactgatccgcgcgctggttgg

SEQ ID NO: 424830 - DNA, 75 bp, synthetic construct
  source 1..75: mol_type = other DNA
tggtgctgtcatcggtaatcttggggtggccatgatggtggggggtatcacgcagatgctcacccccagggcgaa

SEQ ID NO: 424831 - DNA, 75 bp, synthetic construct
  source 1..75: mol_type = other DNA
gcccacagcgaccagcacggataacggtaagcagaacacctatttctcatcactggataacatggttgcccaggg

SEQ ID NO: 424832 - DNA, 75 bp, synthetic construct
  source 1..75: mol_type = other DNA
agtcgtcataagagtacagctgagggtgagcagaagccggttcagcctgaaggcggtcaggagactggaaaaaca

SEQ ID NO: 424833 - DNA, 75 bp, synthetic construct
  source 1..75: mol_type = other DNA
acacgtgacggatgcgaacggtaacggcaaggcagacacagccgagcaggccgtggccgatgcggaagctgcggt

SEQ ID NO: 424834 - DNA, 75 bp, synthetic construct
  source 1..75: mol_type = other DNA
ttatcaaatcgttgtctgaaaaaactgctgcgttagaaacacattccgctgacacggttttgagaaagaaattag

SEQ ID NO: 424835 - DNA, 75 bp, synthetic construct
  source 1..75: mol_type = other DNA
caaccgttgatcccgcctggttgggtatgtcgacggaagggtatgttttcgccgcactgatctactggatcttct

SEQ ID NO: 424836 - DNA, 75 bp, synthetic construct
  source 1..75: mol_type = other DNA
tctgaattcagatgattttaaatctcaggatatagagggggggatattaaaaatctcaggtagttcaggtgcatc

SEQ ID NO: 424837 - DNA, 75 bp, synthetic construct
  source 1..75: mol_type = other DNA
gacggtaacggcaaggcggatgcagcagaagcgtccctggctgcagcggaagccgccgttcaggcagcggaagcg

SEQ ID NO: 424838 - DNA, 75 bp, synthetic construct
  source 1..75: mol_type = other DNA
agtgacattctcttttcaatgggtgcggcgatgacgcttggcggtgtggcgcagatgctggcaccgaaagccaga

SEQ ID NO: 424839 - DNA, 75 bp, synthetic construct
  source 1..75: mol_type = other DNA
gcgtcttgcgggagcaaaaagtggcggtgtgtttcaggcggtgctgggtgcggcgttgattgctacggcaatctg

SEQ ID NO: 424840 - DNA, 75 bp, synthetic construct
  source 1..75: mol_type = other DNA
ctgcctttacggggattttcaacgatttggccgccgcatcgaacttcgtgtgaaaacgggggcagaagcaatccg

SEQ ID NO: 424841 - DNA, 75 bp, synthetic construct
  source 1..75: mol_type = other DNA
aatggtgccgtgatccacatcgtaccgcgtctggcgggtgccaaaagtggcggtgtttttcaggcagtgctgggt

SEQ ID NO: 424842 - DNA, 75 bp, synthetic construct
  source 1..75: mol_type = other DNA
gatcgctcactggagcgaaatgcacagtgacggcatgaagatcgcccgtccgcgccagttgtacaccggctatga

SEQ ID NO: 424843 - DNA, 75 bp, synthetic construct
  source 1..75: mol_type = other DNA
tgatgcaggtgaaacagaattatcagcccgtcttaatgaaccgctggcgaatggtgccgtgatccacatcgtgcc

SEQ ID NO: 424844 - DNA, 75 bp, synthetic construct
  source 1..75: mol_type = other DNA
gcccagatgctggcaccgaaagcccggacgcccacagcgaccagcacggataacggtaagcagaacacctatttt

SEQ ID NO: 424845 - DNA, 75 bp, synthetic construct
  source 1..75: mol_type = other DNA
ctgcctttacggggatttccaacgatttggccgccgcatcgagcttcgtgtgaaaacgggggcagaagctatccg

SEQ ID NO: 424846 - DNA, 75 bp, synthetic construct
  source 1..75: mol_type = other DNA
tgtacggtgaaatgcgcgtggggtcacgtgttgtctctcaggagattagcacggcagatgaaggggacggtggtc

SEQ ID NO: 424847 - DNA, 75 bp, synthetic construct
  source 1..75: mol_type = other DNA
tgtggcccagatgctggcaccgaaagccaggacgcccacggcagccagtacagataacggcaaacagaacacgta

SEQ ID NO: 424848 - DNA, 75 bp, synthetic construct
  source 1..75: mol_type = other DNA
taacagacccgccatatctcgtcggtttacgtgaccgttccgggcgcaccatcgccggcgataaaaccgatgaat

SEQ ID NO: 424849 - DNA, 75 bp, synthetic construct
  source 1..75: mol_type = other DNA
tggcgtcaccgggcatggcacgcatctgcctttacggggattttcaacgatttggccgccgcatcgaccttcgtg

SEQ ID NO: 424850 - DNA, 75 bp, synthetic construct
  source 1..75: mol_type = other DNA
cgtcactggacaacatgattgctcaggggaattcggtgccggtgccttacggtgaaatgctggttggttcacgac

SEQ ID NO: 424851 - DNA, 75 bp, synthetic construct
  source 1..75: mol_type = other DNA
tgtggctcagatgctggccccgaaggcaaaaacaccggattaccgcgcaacggataacggcagacagaacacgta

SEQ ID NO: 424852 - DNA, 75 bp, synthetic construct
  source 1..75: mol_type = other DNA
gtatgacgcttggcggtgttgcacagatgctggcccctaaacccaaaaccccccgcacacagacaacggataacg

SEQ ID NO: 424853 - DNA, 75 bp, synthetic construct
  source 1..75: mol_type = other DNA
tgcaggctggctgggagctgcggctttatcgggcatgtatgctgcgggggccagtatgatccttggcggtgtggc

SEQ ID NO: 424854 - DNA, 75 bp, synthetic construct
  source 1..75: mol_type = other DNA
ggtgaaatgctggttggctcccggcgaatatcccaggacgtcagcacccgtgatgaaggcgctggcgggaaggtg

SEQ ID NO: 424855 - DNA, 75 bp, synthetic construct
  source 1..75: mol_type = other DNA
agaccggcagcgtggccatccgtgcggagcgctggatcaactggcgtcgtcgccgtaccgcggcggtggcggtga

SEQ ID NO: 424856 - DNA, 75 bp, synthetic construct
  source 1..75: mol_type = other DNA
gcccggtggggcagtgtacggtgcgccgggtcagcgaagggctggaaatcacggcaacactggcgaagcccgtgc

SEQ ID NO: 424857 - DNA, 75 bp, synthetic construct
  source 1..75: mol_type = other DNA
cggacatgaccctgctgggtggctccttccaggggctgccggtgattgtctcccagtacgtgggtgaccagctgg

SEQ ID NO: 424858 - DNA, 75 bp, synthetic construct
  source 1..75: mol_type = other DNA
tgccgcaattacaggaatgtatggtgcgggggccagtatgatccttggcggtgtggcccagatgctggcccctaa

SEQ ID NO: 424859 - DNA, 75 bp, synthetic construct
  source 1..75: mol_type = other DNA
acagtgggcaggcagcctgtctgaataccaggaatatgcgcaggactttattgattacctgcgtccgcagaccat

SEQ ID NO: 424860 - DNA, 75 bp, synthetic construct
  source 1..75: mol_type = other DNA
atgctggagctcagatgtctcaagatcagaatgcagggggagaaacacgatacgtatataacggtagttccggaa

SEQ ID NO: 424861 - DNA, 75 bp, synthetic construct
  source 1..75: mol_type = other DNA
tggcgtcaccgggcatggcacgcatctgcctttacggggatttgcaacgatttggccgccgcatcgacctgcgtg

SEQ ID NO: 424862 - DNA, 75 bp, synthetic construct
  source 1..75: mol_type = other DNA
atgcattttctgcgctgggagctgatggaggtatctgccgtcaccgttcctgcgaatgcggaatgcaccatccag

SEQ ID NO: 424863 - DNA, 75 bp, synthetic construct
  source 1..75: mol_type = other DNA
cgcgtctggcgggtgccaaaagtggcggtgtgtttcaggctgtgctgggggcggctgttatggcggttgctatat

SEQ ID NO: 424864 - DNA, 75 bp, synthetic construct
  source 1..75: mol_type = other DNA
gggcaatgtcctgcctgttctgtacggtgaaatgcgcgtggggtcacgtgtggcatctcaggagatcagcacggc

SEQ ID NO: 424865 - DNA, 75 bp, synthetic construct
  source 1..75: mol_type = other DNA
gcggctgtatcgggtatgtatgcggcaggggccagtatgatcctgggcggtgtggcgcagatgctggcaccgaaa

SEQ ID NO: 424866 - DNA, 75 bp, synthetic construct
  source 1..75: mol_type = other DNA
gagtaatctgctgttttctctcggtgccagtatgacgcttggcggtgttgcacagatgctggcacctaaagccaa

SEQ ID NO: 424867 - DNA, 75 bp, synthetic construct
  source 1..75: mol_type = other DNA
gtgcgcattgccgggcgtgatgcaggcgaaaatgaattatctgcccgtcttaatgaaccgctggcaaatggtgcc

SEQ ID NO: 424868 - DNA, 75 bp, synthetic construct
  source 1..75: mol_type = other DNA
ctggcgggagctaaaagtggcggtgtgtttcaggtggtgctgggggcggcgctgattgcggtggcatggtggaac

SEQ ID NO: 424869 - DNA, 75 bp, synthetic construct
  source 1..75: mol_type = other DNA
tggtatcaggtgcgcattgccgggcgtgatgcaggcgaaaatgaattatcagcccgtcttaatgagccgctggcg

SEQ ID NO: 424870 - DNA, 75 bp, synthetic construct
  source 1..75: mol_type = other DNA
aacagcaaacagaacacctatttttcttcactggataacatggttgcccagggtcaatgtcctgcccgttctgta

SEQ ID NO: 424871 - DNA, 75 bp, synthetic construct
  source 1..75: mol_type = other DNA
gggcaatgttctgcccgttctgtacggtgaaatgcgcgtggggtcgcgggtggtctctcaggagatcagcacggc

SEQ ID NO: 424872 - DNA, 75 bp, synthetic construct
  source 1..75: mol_type = other DNA
atggcgagtaatctgctgttttctctcggtgccagtatggtgctcggtggtgtggcgcagatgctggcaccgaaa

SEQ ID NO: 424873 - DNA, 75 bp, synthetic construct
  source 1..75: mol_type = other DNA
tgcccgtcttaatgagccgctggcaaatggtgccgtgatccacatagttccgcgtctggcgggtgccaaaagtgg

SEQ ID NO: 424874 - DNA, 75 bp, synthetic construct
  source 1..75: mol_type = other DNA
atacgaacggtcaggtaacaaacgcatcgtatgcaaaagttattgagacggtgcttaaaagcggcgtgcaggctg

SEQ ID NO: 424875 - DNA, 75 bp, synthetic construct
  source 1..75: mol_type = other DNA
ggacgacttcaaatgggaaggtgtgcaggtgtgcggctacagccctcttccgtggatcaaggttccagtggcggt

SEQ ID NO: 424876 - DNA, 75 bp, synthetic construct
  source 1..75: mol_type = other DNA
ccaccattatattcgtgcggccttagtgcgctgtaatatccaacgatatagtccgttattgcgtgagctgcatcg

SEQ ID NO: 424877 - DNA, 75 bp, synthetic construct
  source 1..75: mol_type = other DNA
caaaccgctttcatttgtttatgacatagccgatatcattaaatttgattcggttgtgccaaaggcatttgaaat

SEQ ID NO: 424878 - DNA, 75 bp, synthetic construct
  source 1..75: mol_type = other DNA
agcggcagtattagctgcgggatatgcgcccgctattggttttatccatagtggcaaaccgctttcatttgttta

SEQ ID NO: 424879 - DNA, 75 bp, synthetic construct
  source 1..75: mol_type = other DNA
gtctgggtcggtgaagcgggtgttcgcgtctactcttccggacaacccggtggggcgcgtgctgataagttactc

SEQ ID NO: 424880 - DNA, 75 bp, synthetic construct
  source 1..75: mol_type = other DNA
atacgtggaagctggttgacgttccgggctggattgacaaaaaatcgttcgccaacgtcaaaggaatgaatgaat

SEQ ID NO: 424881 - DNA, 75 bp, synthetic construct
  source 1..75: mol_type = other DNA
actggaaaaaacgtggctggaaaaccgcagacaaaaaaccagtaaaaaatgtcgatctctggcaacgtcttgatg

SEQ ID NO: 424882 - DNA, 75 bp, synthetic construct
  source 1..75: mol_type = other DNA
atgcttaaacaggtagaaattttcaccgatggttcgtgtctgggtaatcctggacctgggggttacggcgctatt

SEQ ID NO: 424883 - DNA, 75 bp, synthetic construct
  source 1..75: mol_type = other DNA
tacaaaacggcaaagcggaggccatcgatccccgtcctctgcatgacgataaaggcgcgatcaacggtctgccgc

SEQ ID NO: 424884 - DNA, 75 bp, synthetic construct
  source 1..75: mol_type = other DNA
ttgctgggtaagatcaagaaaggtgattttgagaaagcgattaatgccaagattgggcaggacaaatactgcttc

SEQ ID NO: 424885 - DNA, 75 bp, synthetic construct
  source 1..75: mol_type = other DNA
gcgatcaatgccaagattgggcagaccagatactgcttctcgctggataacaataaccccagcttccccattcgt

SEQ ID NO: 424886 - DNA, 75 bp, synthetic construct
  source 1..75: mol_type = other DNA
tcccgttaaaagatcgcacctccatgatcttcctccagtacggtcaaatcgacgtactggacggcgctttcgtgc

SEQ ID NO: 424887 - DNA, 75 bp, synthetic construct
  source 1..75: mol_type = other DNA
gtccggcggtgctgccggctgggtgggtgagggtaaggcaaaacccctgacgaagtttgattttgaatccatcac

SEQ ID NO: 424888 - DNA, 75 bp, synthetic construct
  source 1..75: mol_type = other DNA
tggcagcctcccttgaggaggtcatgaccaaagccgcagaggaagggcgcacgctggatgtggaggaggaagagc

SEQ ID NO: 424889 - DNA, 75 bp, synthetic construct
  source 1..75: mol_type = other DNA
cgaagatctcttctaccgacttaatgttatcccgataactcttccaccgctgcgtgaacgtcaggaagatattga

SEQ ID NO: 424890 - DNA, 75 bp, synthetic construct
  source 1..75: mol_type = other DNA
ccccggcgtccatcacccatgatgtgaagggcacggcatcaaccggtaacccggatgcggatgcagaggctgcgt

SEQ ID NO: 424891 - DNA, 75 bp, synthetic construct
  source 1..75: mol_type = other DNA
ggatgtggaggaggaagagcattacgacaacaccgcagcggaaatccgtcaggtggatgcgcacctgaagcgtct

SEQ ID NO: 424892 - DNA, 75 bp, synthetic construct
  source 1..75: mol_type = other DNA
ggagcgctggatcaactggcgacgtcgacgtactgcggcggtggcggtgatcaccggtgtgaactacggcagtac

SEQ ID NO: 424893 - DNA, 75 bp, synthetic construct
  source 1..75: mol_type = other DNA
ttaatgttatcccgataactctgccaccgctgcgtgaacgtcaggaagatattgaactactggtgctgaaccgcc

SEQ ID NO: 424894 - DNA, 75 bp, synthetic construct
  source 1..75: mol_type = other DNA
ggcgaaataccgtgcaggctccaataaccatgaaggcgtactggacattatcgataaagttcttaaacacgaagc

SEQ ID NO: 424895 - DNA, 75 bp, synthetic construct
  source 1..75: mol_type = other DNA
gtcaatcgttgcatcagtgctgccacatcatgcctgtacggtatttctgaagctgcagtattagctgcgggatat

SEQ ID NO: 424896 - DNA, 75 bp, synthetic construct
  source 1..75: mol_type = other DNA
ttgttaatcagacagctttaaaaacactcggtgttgtacaaaataatattattggaaaacctgttcgtttcagac

SEQ ID NO: 424897 - DNA, 75 bp, synthetic construct
  source 1..75: mol_type = other DNA
tggaagacggaataaaccctttattgctatcaactgtgccgcgatcccggagcagcttctggaaagtgagctgtt

SEQ ID NO: 424898 - DNA, 75 bp, synthetic construct
  source 1..75: mol_type = other DNA
gaaaaacagatgattcgcgaggcgctttcacgtcataacagtaaaaagcaagtcgcggatgaactgggaattggt

SEQ ID NO: 424899 - DNA, 75 bp, synthetic construct
  source 1..75: mol_type = other DNA
tccccgatgagattgcgcgatattttgattataaagcgtatgcacgggatttgtttctggacagcctgaccttta

SEQ ID NO: 424900 - DNA, 75 bp, synthetic construct
  source 1..75: mol_type = other DNA
tggcgtgtttatctgcgatgaaactctccgtgatggaatcatcatcaacggtgaattcgagaaagcaaaatttag

SEQ ID NO: 424901 - DNA, 75 bp, synthetic construct
  source 1..75: mol_type = other DNA
tgacaaagagtttaatacgaaattgagcattaattccatcaaaagcatttattattatgtaacaaaacaacctat

SEQ ID NO: 424902 - DNA, 75 bp, synthetic construct
  source 1..75: mol_type = other DNA
ttcaaagatttaatgacctacctatgcatatgcgaaacagcattgagctgaggatggaaaatgcagccgataaag

SEQ ID NO: 424903 - DNA, 75 bp, synthetic construct
  source 1..75: mol_type = other DNA
tggtaaataccatcatcgcacttttcaaagataccagcctggtgatcatcatcgggttgttcgatcttttcagta

SEQ ID NO: 424904 - DNA, 75 bp, synthetic construct
  source 1..75: mol_type = other DNA
ggtctggcaatcaccactctcgaacctgttcgtggttcctgtcagtttactgtttacgattattgcggtgcatta

SEQ ID NO: 424905 - DNA, 75 bp, synthetic construct
  source 1..75: mol_type = other DNA
gaagctgtgaacagcgtcaacatgaccgctggccgcattattcatctgattgataaggacattcgcatccagaaa

SEQ ID NO: 424906 - DNA, 75 bp, synthetic construct
  source 1..75: mol_type = other DNA
ggcaaatctggtaaccggcgatgtgtcatggcgtcagcgcccaccatcagtaaatattcgcggtgtggatgcggt

SEQ ID NO: 424907 - DNA, 75 bp, synthetic construct
  source 1..75: mol_type = other DNA
tcttattcatatcttttggggctacagcagagtgctgggtcgttggagatatgcgcggaataagctattcagaac

SEQ ID NO: 424908 - DNA, 75 bp, synthetic construct
  source 1..75: mol_type = other DNA
accatacgcagcttatgctcgtagaggccaaattgactaaagcgttatacaaaatggtcagtcaaaccgtggggt

SEQ ID NO: 424909 - DNA, 75 bp, synthetic construct
  source 1..75: mol_type = other DNA
tcaacacaaagaaaaggtgattgatgaaattgttgttgaagttgagaaaattgtcgataaatttaaagcagaact

SEQ ID NO: 424910 - DNA, 75 bp, synthetic construct
  source 1..75: mol_type = other DNA
aaccctttcaaaaggcgttcagggatggtgtgaagcgaaccgtgacgagctgacgaacggcggcaaagtgaaaag

SEQ ID NO: 424911 - DNA, 75 bp, synthetic construct
  source 1..75: mol_type = other DNA
aggaaatcaacaaggaagcgattttactggaaccgaaagcggtcgcaggtgttgccggaattacagttaaatcgg

SEQ ID NO: 424912 - DNA, 75 bp, synthetic construct
  source 1..75: mol_type = other DNA
aacaaaagagctaatgaggcagtacccggaggatgaaaaattccgtatgcgcgtacacggctttagcgaaacaat

SEQ ID NO: 424913 - DNA, 75 bp, synthetic construct
  source 1..75: mol_type = other DNA
gcgcaggtgaaagtgcttaaacgcgataaagcgccggctcgtgaaaaagcattgaaattgctggagcgcgtggga

SEQ ID NO: 424914 - DNA, 75 bp, synthetic construct
  source 1..75: mol_type = other DNA
ccgtcgatggtatcgtggttaacgacaagaaaaccgatctggcaaagctgcgttcccgagtcgggatggtgttcc

SEQ ID NO: 424915 - DNA, 75 bp, synthetic construct
  source 1..75: mol_type = other DNA
gaagaaggaaaaattttcactaaaggagacaaagtgttaattatttgccgactttctgcaacgcgatatttggcg

SEQ ID NO: 424916 - DNA, 75 bp, synthetic construct
  source 1..75: mol_type = other DNA
ttgttaatggcactggcgttccgatggcggaatgcaaaatttatttagatgcactggttaataccagtgaagtgg

SEQ ID NO: 424917 - DNA, 75 bp, synthetic construct
  source 1..75: mol_type = other DNA
gacggcgctggaaaacgtcatgtttggtccgctacgcgtgcgtggcgcgaacaaagaagaggcggaaaaactggc

SEQ ID NO: 424918 - DNA, 75 bp, synthetic construct
  source 1..75: mol_type = other DNA
gcagcgtgtggcgatcgctcgcgcattgtgtatggatcctattgcgatgctgttcgacgaaccgacgtcggcgct

SEQ ID NO: 424919 - DNA, 75 bp, synthetic construct
  source 1..75: mol_type = other DNA
agcaaaagttcgatttattcaacaaagccgctctccggtgctcttgatgcacatcttgaccattatgattccata

SEQ ID NO: 424920 - DNA, 75 bp, synthetic construct
  source 1..75: mol_type = other DNA
actcgcgaagagaaaaaggttaagtcagccgcatcagttacgcgcagccgtaaaaccaagaaggggcagccagta

SEQ ID NO: 424921 - DNA, 75 bp, synthetic construct
  source 1..75: mol_type = other DNA
actcgcgaagagaaaaaggtcaaatcagccgcatcagttacgcgcagccgtaaaactaagaaagggcagccagta

SEQ ID NO: 424922 - DNA, 75 bp, synthetic construct
  source 1..75: mol_type = other DNA
taacatccgaattgcttaggttcgaacgtaggcctcaggttgatagaaatatcgcctggggcttttgtccatctg

SEQ ID NO: 424923 - DNA, 75 bp, synthetic construct
  source 1..75: mol_type = other DNA
caaagaaacgcgtttcttcttccgccatgccgggttcccatttacgggttgtatgggtatcgcccaccgataaat

SEQ ID NO: 424924 - DNA, 75 bp, synthetic construct
  source 1..75: mol_type = other DNA
taccggtaaagtcgttgcccctggattccacgcgaccatagttcagctattacagaagaagaatatgttggtagc

SEQ ID NO: 424925 - DNA, 75 bp, synthetic construct
  source 1..75: mol_type = other DNA
cgaaagctataattcagcactgcaagctttttccatcttttgttcatctacgttgacacataataatataggctt

SEQ ID NO: 424926 - DNA, 75 bp, synthetic construct
  source 1..75: mol_type = other DNA
tgaatttatgcaccagtgaacatctgctggttcatcatccgatgctggaaggcattctcctgtctgaatgtgaac

SEQ ID NO: 424927 - DNA, 75 bp, synthetic construct
  source 1..75: mol_type = other DNA
ttaaactggtctggctttgctggcttgatttaatgaccggaaacagccttgaagactggacagagaacctgaaac

SEQ ID NO: 424928 - DNA, 75 bp, synthetic construct
  source 1..75: mol_type = other DNA
aatggtgaaaaacctgagatcgccattgttccccagagcctgcaccggatcattaacggtaatgataaaaaagcc

SEQ ID NO: 424929 - DNA, 75 bp, synthetic construct
  source 1..75: mol_type = other DNA
tctgacgcccggatggatatcattcaatggtgaaaaacccgagatcgccatcgtaccccagagtctgcaccggct

SEQ ID NO: 424930 - DNA, 75 bp, synthetic construct
  source 1..75: mol_type = other DNA
tggctgaaaagacgaagtggaagcctggctgcaggcgcgtattgcacagtcccgtccgtaattcttaaccgttca

SEQ ID NO: 424931 - DNA, 75 bp, synthetic construct
  source 1..75: mol_type = other DNA
agcggtagcgagctgcgtctgaagctggtctggctgtgctggtacgatttgatgctgggcaattgccttgatgac

SEQ ID NO: 424932 - DNA, 75 bp, synthetic construct
  source 1..75: mol_type = other DNA
ttaccgaagctattcttgctaatcctcctgacaacattgattgtgcaaataggcatcatgctggtggtcgttcct

SEQ ID NO: 424933 - DNA, 75 bp, synthetic construct
  source 1..75: mol_type = other DNA
gcagtagtgggttgttcgacctggttcagaatatgtcaccggaacagcaacaaattttgctgcaggcttcagcgg

SEQ ID NO: 424934 - DNA, 75 bp, synthetic construct
  source 1..75: mol_type = other DNA
gaaggcattctgctgtctgaatgtgaacgtctgaggcagcgttctctggcaaataaactgatcagcctcttccgt

SEQ ID NO: 424935 - DNA, 75 bp, synthetic construct
  source 1..75: mol_type = other DNA
gacgactggacggagaatctgaaacggaaatcagaaaaagagctggaggaatggatcatcaaccgtcagaagcag

SEQ ID NO: 424936 - DNA, 75 bp, synthetic construct
  source 1..75: mol_type = other DNA
actgttaatgaagacctgagcgtcagtttatttacccaggagcatctgctgactcaccatcccatgctggagggg

SEQ ID NO: 424937 - DNA, 75 bp, synthetic construct
  source 1..75: mol_type = other DNA
atccgatgctggaaggcattctcctgtctgaatgtgaacgtctgaggcagcgttcgctggcaaataaactgatca

SEQ ID NO: 424938 - DNA, 75 bp, synthetic construct
  source 1..75: mol_type = other DNA
ttacgtgctgttgcgtcgtattactggtattcgcaccattatgctgacgggccatatcatgttccagcaagcggg

SEQ ID NO: 424939 - DNA, 75 bp, synthetic construct
  source 1..75: mol_type = other DNA
tatatgttcttcgctggccgcgcactgcgtgcagaagaagatgcagaaaaaaaacaggcagaacagtctgcttaa

SEQ ID NO: 424940 - DNA, 75 bp, synthetic construct
  source 1..75: mol_type = other DNA
cggcggctggcgtgcggcgctgaagatttgtctggtgatggggatgatcgaaatctttggttgcgtctgggcggt

SEQ ID NO: 424941 - DNA, 75 bp, synthetic construct
  source 1..75: mol_type = other DNA
ttgttttaaattgggagaatgctttagaaacaataaagtgtctgtcttcactttttgcacttgagtatgataatt

SEQ ID NO: 424942 - DNA, 75 bp, synthetic construct
  source 1..75: mol_type = other DNA
ccatcggtcaactgattgcagttggcatcctggtcgcctgcggctcttccattctgattatccctggctttatcc

SEQ ID NO: 424943 - DNA, 75 bp, synthetic construct
  source 1..75: mol_type = other DNA
ctttggttgcgtctgggcggtgaaacttaccggtatgagtgcctggatggggatggcggactggtcgattctggc

SEQ ID NO: 424944 - DNA, 75 bp, synthetic construct
  source 1..75: mol_type = other DNA
cggtattcaaatacaaaaatggcgatgatgtccgggagatagccaaaattaacattactctccaaaaagaagagg

SEQ ID NO: 424945 - DNA, 75 bp, synthetic construct
  source 1..75: mol_type = other DNA
ggctccatctttgtcagagtcaaaggaacacaccatagatattcaaaaaataacggatgcctttgtgaaggagtt

SEQ ID NO: 424946 - DNA, 75 bp, synthetic construct
  source 1..75: mol_type = other DNA
ataacgttaatacagtttttggtagtgtaagttgtaatgaaaacaattctaccaacaccatggagctagtagctc

SEQ ID NO: 424947 - DNA, 75 bp, synthetic construct
  source 1..75: mol_type = other DNA
ggtttcatgttgttgcaggcagggtccggcatcctgaccagcaccttcaaaccggtggtggcgaaaatgtccgaa

SEQ ID NO: 424948 - DNA, 75 bp, synthetic construct
  source 1..75: mol_type = other DNA
tggcaggcaaagtgaactggacggtgtacatcctgcaaaccggtttctccttcgcggtggcgatcttcatcatca

SEQ ID NO: 424949 - DNA, 75 bp, synthetic construct
  source 1..75: mol_type = other DNA
tgacggacggctgtggtttctccatcggtcaccagcaacagtttgcatcatggattgcctataaagttgcgccgt

SEQ ID NO: 424950 - DNA, 75 bp, synthetic construct
  source 1..75: mol_type = other DNA
atgatctggtggtgaatttatgcaccagcgaacacctgctggttcatcatccgatgctggaagggatcctgctgt

SEQ ID NO: 424951 - DNA, 75 bp, synthetic construct
  source 1..75: mol_type = other DNA
ctgcattttctgcgctgggaactgatggaggtgtctgccgtcaccgtgcccgcgaatgcggaatgcaccatccgg

SEQ ID NO: 424952 - DNA, 75 bp, synthetic construct
  source 1..75: mol_type = other DNA
aacctattacgcctgaagcagaaaacgcggcggattgggtgttaaatagcctggcagacctgccgcaagcgataa

SEQ ID NO: 424953 - DNA, 75 bp, synthetic construct
  source 1..75: mol_type = other DNA
aacctattacacctgaagcagaaaacgcggcagattgggtgttaaatagcctggcagacctgccgcaagcgataa

SEQ ID NO: 424954 - DNA, 75 bp, synthetic construct
  source 1..75: mol_type = other DNA
ttctgctgatgacgggcatgtgtcaggccgttgcgcagaccattccggacggctatgtgcaggtggcccgtgcac

SEQ ID NO: 424955 - DNA, 75 bp, synthetic construct
  source 1..75: mol_type = other DNA
taagactctgattgaagactcggttggcaaagtggatgttggttctacgctggtcgaaagtgccggggaaacgat

SEQ ID NO: 424956 - DNA, 75 bp, synthetic construct
  source 1..75: mol_type = other DNA
cagactttgtggacccgaaaaaagcggcggtggccgatgtttcccctgcgtccatcacccatgatgtgaagggca

SEQ ID NO: 424957 - DNA, 75 bp, synthetic construct
  source 1..75: mol_type = other DNA
cctcatctgaccgttctacagaactgtaccctggcaccgatttgggtacgcaagatgccaaagaaagaggctgaa

SEQ ID NO: 424958 - DNA, 75 bp, synthetic construct
  source 1..75: mol_type = other DNA
tctgtgtggcccttcaggttccggtaaatcgacaaccattcgttgtattaatcatctggaagaacatcaacaggg

SEQ ID NO: 424959 - DNA, 75 bp, synthetic construct
  source 1..75: mol_type = other DNA
tttctctggcagcatgaccattcccgccctgtaggccagtgtacggtgcgtcgggtcagggaagggctggaaatc

SEQ ID NO: 424960 - DNA, 75 bp, synthetic construct
  source 1..75: mol_type = other DNA
atcgacaactttgaatttatcgacggtgttattgacgccatgcgcgagctaaaaaaaatgggctttgcgctggtg

SEQ ID NO: 424961 - DNA, 75 bp, synthetic construct
  source 1..75: mol_type = other DNA
ctgtgtgtaacacatgagatggggtttgcacgaaccgtcgctgacagggtgatttttatggatcgtggggagata

SEQ ID NO: 424962 - DNA, 75 bp, synthetic construct
  source 1..75: mol_type = other DNA
atcacctggaagaacatcaacagggaagaatcgtagtggatggcatcgaacttaacgaagatatccgcaatattg

SEQ ID NO: 424963 - DNA, 75 bp, synthetic construct
  source 1..75: mol_type = other DNA
aagcagaacgcagcactgacggatctgatggatcagtacgtgctcctggcataccgcacaacggttgacgataac

SEQ ID NO: 424964 - DNA, 75 bp, synthetic construct
  source 1..75: mol_type = other DNA
gcctgtatcgcagcaggtattgcttcactgtggggacctgcgcacggtggtgctaacgaagcggcgctgaaggca

SEQ ID NO: 424965 - DNA, 75 bp, synthetic construct
  source 1..75: mol_type = other DNA
gcaacaatcaatgatatcggcggtattctggagttgatccgcccgctggagcagcaaggtattctggtgcgtcgt

SEQ ID NO: 424966 - DNA, 75 bp, synthetic construct
  source 1..75: mol_type = other DNA
ttattgcccagccgcttggcgtggatgatggtgtggattactgccatagcgggcgcatccggcggattgatgaag

SEQ ID NO: 424967 - DNA, 75 bp, synthetic construct
  source 1..75: mol_type = other DNA
gtgaatgagttcaaggggatattatttgataaaaatggaaggtcttcagagtttctacttaatttttatgaatgt

SEQ ID NO: 424968 - DNA, 75 bp, synthetic construct
  source 1..75: mol_type = other DNA
gctcatcagtttgttccgccagttcagtggtagcgaattgcgtctgaagctggtctggctgtgctggtacgattt

SEQ ID NO: 424969 - DNA, 75 bp, synthetic construct
  source 1..75: mol_type = other DNA
atggctataagcgacacaaaactgcgtactatttatggtaaaccatattctggcccacaagaagtggctgatgct

SEQ ID NO: 424970 - DNA, 75 bp, synthetic construct
  source 1..75: mol_type = other DNA
atgtctactcaacttgatcccacccagctggccattgaatttttacgccgtgaccagagcaatctttcacctgcc

SEQ ID NO: 424971 - DNA, 75 bp, synthetic construct
  source 1..75: mol_type = other DNA
catcaacaggtcaaggaagatatcgacgcagagcagttggctaccggagacttatcggagcgactgcaggacttg

SEQ ID NO: 424972 - DNA, 75 bp, synthetic construct
  source 1..75: mol_type = other DNA
cttccgtcagtttggtggcacggagttgcgcctcaaactggtctggctttgctggcttgatttaatgaccggaaa

SEQ ID NO: 424973 - DNA, 75 bp, synthetic construct
  source 1..75: mol_type = other DNA
atcaacgtcgtcagtggcaattttattattgcacaaccgctgggcgtggatgatggcgtggattactgccatagc

SEQ ID NO: 424974 - DNA, 75 bp, synthetic construct
  source 1..75: mol_type = other DNA
tctgcaccggctgatttatggctctgacaaacgggccacgccgcccctggatgatgatctggtggtgaacttatg

SEQ ID NO: 424975 - DNA, 75 bp, synthetic construct
  source 1..75: mol_type = other DNA
atgtctactcaacttgatcccacccaactggccattgaatttttacgccgtgaccaaagcaatctttcacctgcc

SEQ ID NO: 424976 - DNA, 75 bp, synthetic construct
  source 1..75: mol_type = other DNA
aaaaaactgcctttgcccgcaagctgcgtgagccgaaatatggcgctgcggcggacaaagttcctgccgatcaac

SEQ ID NO: 424977 - DNA, 75 bp, synthetic construct
  source 1..75: mol_type = other DNA
ggccagcggcgaggacgggaaaggcgatgctctgatctcggtgaagcaacctttcattagttcatttattcgtac

SEQ ID NO: 424978 - DNA, 75 bp, synthetic construct
  source 1..75: mol_type = other DNA
aaggatgaaaatcggatccgcttctttattggtgatgttcgtgataaagatcgtctttatcgcgcattggatggc

SEQ ID NO: 424979 - DNA, 75 bp, synthetic construct
  source 1..75: mol_type = other DNA
aaaaaatgagatatcaccaccaaacggcacttcttatacagcctcagaaatttctatcaagcgtgttcctgatgg

SEQ ID NO: 424980 - DNA, 75 bp, synthetic construct
  source 1..75: mol_type = other DNA
taccgcctacatgggcgatcccattatcacatctgctactggatttaaaacggacgtactagaacttggtgcggc

SEQ ID NO: 424981 - DNA, 75 bp, synthetic construct
  source 1..75: mol_type = other DNA
gcgtgagccgaaatatggcgctgcggcggacaaagttcctgccgatcaactgcgtaaaggtgacatcgtgctggt

SEQ ID NO: 424982 - DNA, 75 bp, synthetic construct
  source 1..75: mol_type = other DNA
atggttgatcaggactggatggattccgggactcccggaacatggacagatgaaagcaggcatcctgatacacgt

SEQ ID NO: 424983 - DNA, 75 bp, synthetic construct
  source 1..75: mol_type = other DNA
ctgaaaattatcgctcatctacagcgtccagaaaacgtatagacgcctccttacgcaggttagcatccgttacct

SEQ ID NO: 424984 - DNA, 75 bp, synthetic construct
  source 1..75: mol_type = other DNA
ccgctgccgcgctggaagagcaggccagtcgcctgaccgaagctgtggcagtgttccggattcagcaacagcagc

SEQ ID NO: 424985 - DNA, 75 bp, synthetic construct
  source 1..75: mol_type = other DNA
cactatgtctaccgctacgatgaatacggcaggctggcggagaagacggaccgtatcccggaaggggttatccgg

SEQ ID NO: 424986 - DNA, 75 bp, synthetic construct
  source 1..75: mol_type = other DNA
caccggctgaaatattagagggaggcttctttaaagtaaaaatgccgattacctttgagctgacggagttaaggg

SEQ ID NO: 424987 - DNA, 75 bp, synthetic construct
  source 1..75: mol_type = other DNA
tgtctggtgagacactggttcttggttctgccacaacagtaacaggaacaaaatttggggggggcgttactttcg

SEQ ID NO: 424988 - DNA, 75 bp, synthetic construct
  source 1..75: mol_type = other DNA
agaagaactgtcagcggcacacctgcggctttccagaacggtgatagaacacatggactggcaccagtgcattaa

SEQ ID NO: 424989 - DNA, 75 bp, synthetic construct
  source 1..75: mol_type = other DNA
atgtctgaatatcgtcgttattacatcaaggggggaacctggtttttcacggtaaatttacggaatcgtcgaagc

SEQ ID NO: 424990 - DNA, 75 bp, synthetic construct
  source 1..75: mol_type = other DNA
catgctatccgcaataccaaagactatcgccatcatgttgattatatttatataaatccagtaaaacataccaaa

SEQ ID NO: 424991 - DNA, 75 bp, synthetic construct
  source 1..75: mol_type = other DNA
cgctccgtaacgttattattaaagttaagcgagacagaccttttgaaattaacgcttgggtagttttgccggagc

SEQ ID NO: 424992 - DNA, 75 bp, synthetic construct
  source 1..75: mol_type = other DNA
atgcagatacagcaggaaatcaatgttctccacagctttcgtgagtttaacaacaatgactgtgaggttcgtgat

SEQ ID NO: 424993 - DNA, 75 bp, synthetic construct
  source 1..75: mol_type = other DNA
aacgcctgggcagttttgccagagcatatgcattgcatatggacattacctgaaggcgatgatgatttttcctct

SEQ ID NO: 424994 - DNA, 75 bp, synthetic construct
  source 1..75: mol_type = other DNA
tctcaacgtttcatcgcgatgtcgcgaaggggttatatcccatcgattgggcgggggacgtaacggattttagtg

SEQ ID NO: 424995 - DNA, 75 bp, synthetic construct
  source 1..75: mol_type = other DNA
aaattagcggcacaatcttgttccgtgaggactatctgaataaaccgcagactcaacaagcggtcagctatctgc

SEQ ID NO: 424996 - DNA, 75 bp, synthetic construct
  source 1..75: mol_type = other DNA
aggtcaagccggacggtaccgccctgtggccatcaaaaattttgccgtggtccgatcttatgaccggaaagattg

SEQ ID NO: 424997 - DNA, 75 bp, synthetic construct
  source 1..75: mol_type = other DNA
ggggagcttcacgccgctcatcagaatcgaaacagagaatggcgaacaggcgaaggcgcggcaccggagcctggc

SEQ ID NO: 424998 - DNA, 75 bp, synthetic construct
  source 1..75: mol_type = other DNA
gacaaactggtatctgttattgctgacaaaaaagaatttcttgaatacaaagaaaatcctcttaacgccacacaa

SEQ ID NO: 424999 - DNA, 75 bp, synthetic construct
  source 1..75: mol_type = other DNA
agaagagattttcgcaattgaagaagatccgcacttctataaaaagtatgttctctattacagtatcgcggaaga

SEQ ID NO: 425000 - DNA, 75 bp, synthetic construct
  source 1..75: mol_type = other DNA
gcaggatacgccggaagaaacgctcaccgacattcagcgggcggcccggttctactacctgcagaaacaggcatt

SEQ ID NO: 425001 - DNA, 75 bp, synthetic construct
  source 1..75: mol_type = other DNA
atcgtcgtactggcggtgattttcgccgtctggtttggtattaaaacgtcgctggtggcaccgatgaatcgcctg

SEQ ID NO: 425002 - DNA, 75 bp, synthetic construct
  source 1..75: mol_type = other DNA
ttcgtgaaggtgagatgggcgacgctaggcatagcaacacacgggccgcagctgatatctacttccaactggtcg

SEQ ID NO: 425003 - DNA, 75 bp, synthetic construct
  source 1..75: mol_type = other DNA
aaaattttttgtgagtttcaccggagtatcgtgaacagatgcgccgatgagattcgcaaggttggcgtcaaagtc

SEQ ID NO: 425004 - DNA, 75 bp, synthetic construct
  source 1..75: mol_type = other DNA
ggatgcagttgagtatctgcatatgatgtctgacgctggcattcgcatcaaaggagacgcaggagaacaaaacga

SEQ ID NO: 425005 - DNA, 75 bp, synthetic construct
  source 1..75: mol_type = other DNA
gagagccgatttgatggtgatgatgcgctaattcatcgtgaagttgttggatatcttcccatttgcagaattgaa

SEQ ID NO: 425006 - DNA, 75 bp, synthetic construct
  source 1..75: mol_type = other DNA
gctgactgcgattgagatgtacaaaccaactgtgcgcatcgtggaagttaatgtgccacgcgcccctggcattcg

SEQ ID NO: 425007 - DNA, 75 bp, synthetic construct
  source 1..75: mol_type = other DNA
ctgggccgcgtcgtgaccttgtgaaagctggcgcacttattctggccgaaattgaacgcatagaccgcgccgcag

SEQ ID NO: 425008 - DNA, 75 bp, synthetic construct
  source 1..75: mol_type = other DNA
atgaacaagattgactatcaggcactgcgtgaggcagcagaaaaagcaacgtgtggtgcgtggtcgctcgaatat

SEQ ID NO: 425009 - DNA, 75 bp, synthetic construct
  source 1..75: mol_type = other DNA
gcgggaaatactgctcccggaacgtagcagcatgcttcatcgaacagattttcacgatgattaccaaacggtaat

SEQ ID NO: 425010 - DNA, 75 bp, synthetic construct
  source 1..75: mol_type = other DNA
gaatggaggccaaaacacggactgatctggtggtgatgtcagacgagccagatgatgaaactgaaaaactggctg

SEQ ID NO: 425011 - DNA, 75 bp, synthetic construct
  source 1..75: mol_type = other DNA
gccgcctcaggtgcaggctgttgtgctcgacctgtgggttaatcttctggatgtgccgcagaaacaggagtttgt

SEQ ID NO: 425012 - DNA, 75 bp, synthetic construct
  source 1..75: mol_type = other DNA
tgatgaaaaacgatcatggatccacgccgcgtttttctcagcgtcagttactgtctctctgttctgatattgaca

SEQ ID NO: 425013 - DNA, 75 bp, synthetic construct
  source 1..75: mol_type = other DNA
ttagttgaagcaatcattgttgcgatagaaaacgaacaggaacgtctttttgatgaagattacctaatggattcg

SEQ ID NO: 425014 - DNA, 75 bp, synthetic construct
  source 1..75: mol_type = other DNA
ttgtttttaattgtttgttgcgagttaatatcaagttcacaattaaaaagaatattttgtgtagtatgtgtgatt

SEQ ID NO: 425015 - DNA, 75 bp, synthetic construct
  source 1..75: mol_type = other DNA
tctttatgatagcatttttttatacatgtcgttacacttataaaataagaggaacatataaatatatattcatgt

SEQ ID NO: 425016 - DNA, 75 bp, synthetic construct
  source 1..75: mol_type = other DNA
tatcagcatcgcgttgacccggaagtgccaatcgaagacgttgccggtgcagttaaagatctgattgcagaaggt

SEQ ID NO: 425017 - DNA, 75 bp, synthetic construct
  source 1..75: mol_type = other DNA
tctacgctgaatagcagttgggttgagttgttgcagacgcgtaacaccctcaaccgcgcgggcatccgctacatg

SEQ ID NO: 425018 - DNA, 75 bp, synthetic construct
  source 1..75: mol_type = other DNA
ggcctggaaaatccagattcgtggtggagcggcgacagaatcagactgggtacgtgctggtggtcgtaatccgga

SEQ ID NO: 425019 - DNA, 75 bp, synthetic construct
  source 1..75: mol_type = other DNA
atattacgttaacactgctgtttctattcatattgtgttttttcggagggaatatatctgtagccattattaatg

SEQ ID NO: 425020 - DNA, 75 bp, synthetic construct
  source 1..75: mol_type = other DNA
gctaataccgacgttgaatcgctggaaacgcacgcacgacaggcgggtatgcgtacgctttttgaaaacggctgc

SEQ ID NO: 425021 - DNA, 75 bp, synthetic construct
  source 1..75: mol_type = other DNA
cagttcctgtctgaatggtcgtcccaatgcttgtaaaaataatcaaacgcttggcgtgcaacgtcaggggggaat

SEQ ID NO: 425022 - DNA, 75 bp, synthetic construct
  source 1..75: mol_type = other DNA
atgccaaaaaaccggtgagttatcagagtgcaaccttcctgatgaaagaactggatatccgtggttcccgaaatg

SEQ ID NO: 425023 - DNA, 75 bp, synthetic construct
  source 1..75: mol_type = other DNA
cgatgagcaatggtctaacgcagaacgcggtaagttttatcggccattgaaaactcaggcttcggtgcgtattga

SEQ ID NO: 425024 - DNA, 75 bp, synthetic construct
  source 1..75: mol_type = other DNA
gagaaaagagtctgatgattatccgcacaacccacatacagaagacttaagccagtttgcatacactgtaagaag

SEQ ID NO: 425025 - DNA, 75 bp, synthetic construct
  source 1..75: mol_type = other DNA
tattacactgcagcaatcggtaagtggcacttatcaaaaatcagcaacgtaggtgtgcctgaagaaaaacaaacc

SEQ ID NO: 425026 - DNA, 75 bp, synthetic construct
  source 1..75: mol_type = other DNA
cagaaattgaatccttgggtattggtgaggtaattaaagttttttttgtttttattttgtttattataatttcat

SEQ ID NO: 425027 - DNA, 75 bp, synthetic construct
  source 1..75: mol_type = other DNA
cagtatatgctttttatgaaacagcaaaattgttctatttacagcaaacctttaagcctagtaagaagatcggag

SEQ ID NO: 425028 - DNA, 75 bp, synthetic construct
  source 1..75: mol_type = other DNA
gccctgatttgcgttttaaagatggttcaaattcttattataacaaattttataattttgatcatcaagttggcg

SEQ ID NO: 425029 - DNA, 75 bp, synthetic construct
  source 1..75: mol_type = other DNA
aactgttttactgcctgcaacgcgggatcagcgaagaagacgccatctcgatgattgttaacggtttctgcaaag

SEQ ID NO: 425030 - DNA, 75 bp, synthetic construct
  source 1..75: mol_type = other DNA
ctaacagtattactgaaattagatttcctaatggtgataagggacaggttagaggttatgacggtgtacttaaag

SEQ ID NO: 425031 - DNA, 75 bp, synthetic construct
  source 1..75: mol_type = other DNA
cccccggctcacgatctcgaaacattcgccgtctgggttggtatggcaagagaagcgggtattgaggttattgat

SEQ ID NO: 425032 - DNA, 75 bp, synthetic construct
  source 1..75: mol_type = other DNA
acagtgagcatacattaccatttttggtcacctagtgaatttccaaaggttcagattgataaaaatggagctatg

SEQ ID NO: 425033 - DNA, 75 bp, synthetic construct
  source 1..75: mol_type = other DNA
ttcctgccgtagtcaggtaaaacgggttgaaggcacgggggtacgccatcctgtgcaggctttactggagattat

SEQ ID NO: 425034 - DNA, 75 bp, synthetic construct
  source 1..75: mol_type = other DNA
ccaaatggcaaagcccagcatatcaaaggttttcttaatcgttttgcgaagacggcgaaaaagacggcggatttc

SEQ ID NO: 425035 - DNA, 75 bp, synthetic construct
  source 1..75: mol_type = other DNA
caatactcttaactgccagcgccaattctgaatgctggattgtcacaaacctgcacgggtacggggcaatgaatg

SEQ ID NO: 425036 - DNA, 75 bp, synthetic construct
  source 1..75: mol_type = other DNA
ataatgttgttagaaagaccttcagaaaaattaggctctatggggtggcattttaaaaaagcagagtatttacta

SEQ ID NO: 425037 - DNA, 75 bp, synthetic construct
  source 1..75: mol_type = other DNA
agataggtaaaaactatcgtttcgagatcactctaattgagttgctaagacatacaattgtgcataatgcaggaa

SEQ ID NO: 425038 - DNA, 75 bp, synthetic construct
  source 1..75: mol_type = other DNA
gctccctggtttcctgtgtcgatatattcaaggttttgattaaacaatattatgattatccacttatgattgtcg

SEQ ID NO: 425039 - DNA, 75 bp, synthetic construct
  source 1..75: mol_type = other DNA
gagcgccaatccatttttgacttctttcgcctcgctatttcattcggtttatcacacttactttacgtcgataac

SEQ ID NO: 425040 - DNA, 75 bp, synthetic construct
  source 1..75: mol_type = other DNA
cctggcatgaacatatttatgaaatgagcgccaatccgtttttgacatctttcgcttcactatttcattcggttt

SEQ ID NO: 425041 - DNA, 75 bp, synthetic construct
  source 1..75: mol_type = other DNA
ggcaccgcagaacagaaggcacatcttaatacgctgatggccgaaatggtggcattaaaagaaaatttccgccgg

SEQ ID NO: 425042 - DNA, 75 bp, synthetic construct
  source 1..75: mol_type = other DNA
tcaggcctgggtggacaatatcgtggagaaggacacccgtccgacttttgtggtgacgccgtccttcttcaaggt

SEQ ID NO: 425043 - DNA, 75 bp, synthetic construct
  source 1..75: mol_type = other DNA
cttccctggcggcagaccagacccgctatatctttcgcggggacaaggatgcgctgaccatcacggtcaccaaca

SEQ ID NO: 425044 - DNA, 75 bp, synthetic construct
  source 1..75: mol_type = other DNA
gaaaattgccacggataacgagacggcacagaaactgctgatgttcatgccgggtgatgaagtacaggtgaaggg

SEQ ID NO: 425045 - DNA, 75 bp, synthetic construct
  source 1..75: mol_type = other DNA
catagtatttgcgccaaaataccgaagacaggtgttctacagagagaagcgtagagcaagaggctgtattttgag

SEQ ID NO: 425046 - DNA, 75 bp, synthetic construct
  source 1..75: mol_type = other DNA
ggtattacgtcgatacggtgggtaagaacacggtgaagatacaggattacataaagcaccagcttgaagaggata

SEQ ID NO: 425047 - DNA, 75 bp, synthetic construct
  source 1..75: mol_type = other DNA
gattatgattttgaacaactccagtcattggccgaccgtcggctttacctcgcaaaacaggccgggcgcaatcgg

SEQ ID NO: 425048 - DNA, 75 bp, synthetic construct
  source 1..75: mol_type = other DNA
gatgcgattgtccaaagcgatggcgacgcggcatttaaagcttgtcaggcgctgctacgctcacctgataagtga

SEQ ID NO: 425049 - DNA, 75 bp, synthetic construct
  source 1..75: mol_type = other DNA
gtgaactcagatggcatttccccagagttaacaaggaaatatctcggcgaaaaagccgctgaaaacttacaatca

SEQ ID NO: 425050 - DNA, 75 bp, synthetic construct
  source 1..75: mol_type = other DNA
atcaccggggaagcgatcaacaccgaacaggaaaatccgcccagcacaaagcgaaatattaaggttaaaaaataa

SEQ ID NO: 425051 - DNA, 75 bp, synthetic construct
  source 1..75: mol_type = other DNA
ggcaggcgttgaacgtatctatgcgatgcgtaaaaaagccgtaggcctgcttggcaatgcaaaaggcgccgccaa

SEQ ID NO: 425052 - DNA, 75 bp, synthetic construct
  source 1..75: mol_type = other DNA
tggcgctattttgcccgcaacgacgccagccaggccgaactggcggcagaggctttacataatgcgttagtagcg

SEQ ID NO: 425053 - DNA, 75 bp, synthetic construct
  source 1..75: mol_type = other DNA
tgttattgacctgctgtaccaacaccgtgtcgatccagatgtcccgattgaagatgttgcaggaacggtaaaaga

SEQ ID NO: 425054 - DNA, 75 bp, synthetic construct
  source 1..75: mol_type = other DNA
cgacatcatcctttctcaggatgactcgcgaaagataacccaggcgcttgaaaccattaaaatcgtcggcgaacg

SEQ ID NO: 425055 - DNA, 75 bp, synthetic construct
  source 1..75: mol_type = other DNA
tgttggggggcgatattctcgatacgcaacctttacccgtcgaactggcggaaacgctgggtaaatccaatacca

SEQ ID NO: 425056 - DNA, 75 bp, synthetic construct
  source 1..75: mol_type = other DNA
tttagaagaaaagataagattgtgtaatactttgaaaaataaacaatatcagtgggttattactgaagcctatga

SEQ ID NO: 425057 - DNA, 75 bp, synthetic construct
  source 1..75: mol_type = other DNA
tcgacgcattgccatcgtttcggcagatattgcttcacgcggtatcgactgggatcatgaagagtcttcattaat

SEQ ID NO: 425058 - DNA, 75 bp, synthetic construct
  source 1..75: mol_type = other DNA
tctcaacgttccatcgcgatgtggcgcgagggttatatcccattgattgggcgggagacataacggattttagtg

SEQ ID NO: 425059 - DNA, 75 bp, synthetic construct
  source 1..75: mol_type = other DNA
ttactccatccttcgggcaatcatgcgtggcaaaccccgaaaaattccggggatgggtaaggttaatcgcggcct

SEQ ID NO: 425060 - DNA, 75 bp, synthetic construct
  source 1..75: mol_type = other DNA
tggataaggttaatcgaggtctcctgtcagaactggctgcatcgcgcatgaatccattactgatacaaccggagt

SEQ ID NO: 425061 - DNA, 75 bp, synthetic construct
  source 1..75: mol_type = other DNA
gatttgcgctcgctgccgtcaaatgttcgcctggttgactggatacccatgggtgtcttcctcaacggcgcagat

SEQ ID NO: 425062 - DNA, 75 bp, synthetic construct
  source 1..75: mol_type = other DNA
gctagatccggactgctggcgggtgcgccacgttcgctttcatcacggttttaccaatattgaattttacgatcc

SEQ ID NO: 425063 - DNA, 75 bp, synthetic construct
  source 1..75: mol_type = other DNA
tgctccgtaacgccattattaaagttaagcgagacaggccttttgaaatcaacgcttgggtcgttttgccagagc

SEQ ID NO: 425064 - DNA, 75 bp, synthetic construct
  source 1..75: mol_type = other DNA
tcggctggcaggtgtgccgtgagctggctggcgttgaacgtatctatgcaatgcgcaaaaaagccgttggcctgc

SEQ ID NO: 425065 - DNA, 75 bp, synthetic construct
  source 1..75: mol_type = other DNA
cagctctatcacacccgttatttacgcccgctgcgcgaccacctcgtcgctacggtcgagagctacgcgccgctg

SEQ ID NO: 425066 - DNA, 75 bp, synthetic construct
  source 1..75: mol_type = other DNA
ttggcaatgctaaaggggcagccaaaccgatcccatttgccgaagatacctgcgtaccgccggaacatctggcgg

SEQ ID NO: 425067 - DNA, 75 bp, synthetic construct
  source 1..75: mol_type = other DNA
tggtggtgcaggacccctttaccagctattacgatgcgcaagtggtggcggattttgtccgtctggtcgaaaaat

SEQ ID NO: 425068 - DNA, 75 bp, synthetic construct
  source 1..75: mol_type = other DNA
acctgaaaccgtacggctatttttttgcgccggaactctcaaccagtaatcgggcaacgcttggtgggatgataa

SEQ ID NO: 425069 - DNA, 75 bp, synthetic construct
  source 1..75: mol_type = other DNA
atattgtctggcattccgtcagcgagttgattaccgatgtgcctgacaaagagatgctcgggctgaacattgtgg

SEQ ID NO: 425070 - DNA, 75 bp, synthetic construct
  source 1..75: mol_type = other DNA
atcgccagtcatcaagcaggtgtcatcggctggcaggtgtgccgtgagctggcgggggttgaacgtatctatgca

SEQ ID NO: 425071 - DNA, 75 bp, synthetic construct
  source 1..75: mol_type = other DNA
gagtcacagccagtggctacagtcagcggtgaatcatggtatttctttggtcactgtaccgaagttaccgccttg

SEQ ID NO: 425072 - DNA, 75 bp, synthetic construct
  source 1..75: mol_type = other DNA
cactgattgacgagcgagttaatgcactctgtgtgcggcttgatgagctgattgccagccaacaggcaggagtga

SEQ ID NO: 425073 - DNA, 75 bp, synthetic construct
  source 1..75: mol_type = other DNA
gctacgtttgctggccgatcgcggcgtagatcccttaaagctggagcaggaactaccggaaacgcgcgccagttt

SEQ ID NO: 425074 - DNA, 75 bp, synthetic construct
  source 1..75: mol_type = other DNA
tatttgcccgttttggcgcgaaactggaaaatgtcagcgtgggttgctgcggcatggcagggacttacggacatg

SEQ ID NO: 425075 - DNA, 75 bp, synthetic construct
  source 1..75: mol_type = other DNA
aagctacggtatgttcggtcacgtcgacgcaggtgtcttgcacgtccgtccagcgctggatatgtgcgatcctca

SEQ ID NO: 425076 - DNA, 75 bp, synthetic construct
  source 1..75: mol_type = other DNA
ccgaaaacctttaacttcttcattaaccagccgctggtgcgcaaactctcggaaaaacatatcggcatggttgat

SEQ ID NO: 425077 - DNA, 75 bp, synthetic construct
  source 1..75: mol_type = other DNA
cctggcaaaagggcgtccggcgctgcctcagaaacccttaccggatgtgcagggctggaaatattcaggcaatcg

SEQ ID NO: 425078 - DNA, 75 bp, synthetic construct
  source 1..75: mol_type = other DNA
accagcctgcaaccgctgattgagtctttcacacatcccggcgcaattgtgctcgacccctttgccggaagtggc

SEQ ID NO: 425079 - DNA, 75 bp, synthetic construct
  source 1..75: mol_type = other DNA
gatggtcagcttctacggctggcaccgtattgaccgctttatggcggcctggaaacgcgccggattcagcgtggc

SEQ ID NO: 425080 - DNA, 75 bp, synthetic construct
  source 1..75: mol_type = other DNA
atgaagttaaaacaacaaactgtgcgactttcacgtcgcacccttaccgatcctccatatctcgtcggtttccgt

SEQ ID NO: 425081 - DNA, 75 bp, synthetic construct
  source 1..75: mol_type = other DNA
tcaacctgcgtcgccgcccttcagtccggacgccggtatatcggtatcgagctgcttgagcagtatcaccgtgcc

SEQ ID NO: 425082 - DNA, 75 bp, synthetic construct
  source 1..75: mol_type = other DNA
atggcccgtattcctgataacgccattgatttcatactgactgacccgccgtacctcgtcggttttcgtgaccgt

SEQ ID NO: 425083 - DNA, 75 bp, synthetic construct
  source 1..75: mol_type = other DNA
tggtcatctggttttccctaaaacctacacatcgaaggctgcatatgtgggctatcgccatgaatgcgcctacat

SEQ ID NO: 425084 - DNA, 75 bp, synthetic construct
  source 1..75: mol_type = other DNA
gcattgatgttatggcccgtattcctgataacgccattgatttcatccttaccgatcctccatatctcgtcggtt

SEQ ID NO: 425085 - DNA, 75 bp, synthetic construct
  source 1..75: mol_type = other DNA
tcaacctgcgtcgctgccctccagtccggacgccggtatatcggtatcgagctgcttgaacagtatcaccgtgcc

SEQ ID NO: 425086 - DNA, 75 bp, synthetic construct
  source 1..75: mol_type = other DNA
atggcggcctggaaacgcgccggattcagcgtggcagggcacctcgtgttcaccaaaaactacacatccaaatct

SEQ ID NO: 425087 - DNA, 75 bp, synthetic construct
  source 1..75: mol_type = other DNA
gcgtcccgattatggctggctttccggacaatgccgtcgatttcatcctgaccgatccgccctacctggttggat

SEQ ID NO: 425088 - DNA, 75 bp, synthetic construct
  source 1..75: mol_type = other DNA
atgtcccgttttatcttgggtgactgcgtgcgagttatgccccgtattcctgataacgccattgatttcatactg

SEQ ID NO: 425089 - DNA, 75 bp, synthetic construct
  source 1..75: mol_type = other DNA
ggcgttcgccgcctggcgcaggttgagcgggcgagaaggatgccggcggccaatgacggtgcgttttatcccgac

SEQ ID NO: 425090 - DNA, 75 bp, synthetic construct
  source 1..75: mol_type = other DNA
atgaagaaagcaatgttggtgatatcgggactactgttttcaccgttggcggcagcaggacagatcacaatgacc

SEQ ID NO: 425091 - DNA, 75 bp, synthetic construct
  source 1..75: mol_type = other DNA
atgaccgatccccagcaggatacgaccgagaatggtaagacgctttgcacctacgaaaacagcatctatctgttc

SEQ ID NO: 425092 - DNA, 75 bp, synthetic construct
  source 1..75: mol_type = other DNA
taccggactccctacttccctgaacgggaaatccgcgcatttgcagacaaggcaaacagcacccgaacactgctt

SEQ ID NO: 425093 - DNA, 75 bp, synthetic construct
  source 1..75: mol_type = other DNA
cacaggcgaacgcgtttgtaaatgcccttcgcagtggtcagcgagcccgcgttcccgctttaaagctggagtact

SEQ ID NO: 425094 - DNA, 75 bp, synthetic construct
  source 1..75: mol_type = other DNA
tgcgctgcagattgacatgtggtcgctgcttaactggattgataacggacaaggtaatcaccgcatcggcgatta

SEQ ID NO: 425095 - DNA, 75 bp, synthetic construct
  source 1..75: mol_type = other DNA
tgcgtcaggtttatctgcaacgcatgacatggttctttgagctcgatgccgtgcacctgcaagccattaacccta

SEQ ID NO: 425096 - DNA, 75 bp, synthetic construct
  source 1..75: mol_type = other DNA
tgccaagtgtttgagaaaattgcacgagaaggcagaaaatttggtcttgggatggtggtttcctcgcaacgacca

SEQ ID NO: 425097 - DNA, 75 bp, synthetic construct
  source 1..75: mol_type = other DNA
ccggacgccggtatatcggtgtcgagctgcttgaacagtatcaccgtgccggacagcaacgactggccgccgtgc

SEQ ID NO: 425098 - DNA, 75 bp, synthetic construct
  source 1..75: mol_type = other DNA
accgacccgccgtacctcgtcggtttccgtgaccgttcagggcgcaccattgctggcgataaaaccgatgaatgg

SEQ ID NO: 425099 - DNA, 75 bp, synthetic construct
  source 1..75: mol_type = other DNA
aattcagtggccgggacaattttaccgcctacggaaaaccattcgatgaagacgagcacgttcgtctgagggcag

SEQ ID NO: 425100 - DNA, 75 bp, synthetic construct
  source 1..75: mol_type = other DNA
cgagagaattgttgataaatcgctcgataagctaataaacacaataaatacgtatctttcttcacgaagtggatc

SEQ ID NO: 425101 - DNA, 75 bp, synthetic construct
  source 1..75: mol_type = other DNA
aacagctatgtattagtctcatgtgataatggttacttagttgggcaaatagagtggcttgcagttgagcattca

SEQ ID NO: 425102 - DNA, 75 bp, synthetic construct
  source 1..75: mol_type = other DNA
atgtcccgttttgtcctcggtaactgcatcgatgttatggcccgtatccctgataacgccattgatttcatatta

SEQ ID NO: 425103 - DNA, 75 bp, synthetic construct
  source 1..75: mol_type = other DNA
ttcgtgaccgtcaggggcgtaccattgccggcgataaaaccgacgaatggctgcaaccggcctgtaatgagatgt

SEQ ID NO: 425104 - DNA, 75 bp, synthetic construct
  source 1..75: mol_type = other DNA
agcattctcaaatgtgtatcagaccgatgatctgtacgctaaaactgacacaacatcattgttcgcacctgcggc

SEQ ID NO: 425105 - DNA, 75 bp, synthetic construct
  source 1..75: mol_type = other DNA
tgacggacccgccatatctcgtcggtttacgtgaccgttccgggcgcaccatcgccggcgataaaaccgatgaat

SEQ ID NO: 425106 - DNA, 75 bp, synthetic construct
  source 1..75: mol_type = other DNA
aattaggttacaacatgttggctatattaaaacagtctgctacttgcttacttatgtttattttggtttaaaaaa

SEQ ID NO: 425107 - DNA, 63 bp, synthetic construct
  source 1..63: mol_type = other DNA
cagcgattgtcagctggtggcgtaaccggaagtaaggtgaaaacgggcgtcaggctgccgtga

SEQ ID NO: 425108 - DNA, 75 bp, synthetic construct
  source 1..75: mol_type = other DNA
tcacagacccgccatatctcgtcggtttccgtgaccgttccgggcgcaccatcgccggcgataaaaccgatgaat

SEQ ID NO: 425109 - DNA, 75 bp, synthetic construct
  source 1..75: mol_type = other DNA
ttactgacccgccatatctcgtcggtttacgtgaccgttccgggcgcaccatcgccggcgataaaaccgatgaat

SEQ ID NO: 425110 - DNA, 75 bp, synthetic construct
  source 1..75: mol_type = other DNA
ttacagacccgccatatctcgtcggttttcgtgaccgttccgggcgcaccatcgccggcgataaaaccgatgaat

SEQ ID NO: 425111 - DNA, 75 bp, synthetic construct
  source 1..75: mol_type = other DNA
tgactgacccgccatatctcgtcggttttcgtgaccgttccgggcgcaccatcgccggcgataaaaccgatgaat

SEQ ID NO: 425112 - DNA, 75 bp, synthetic construct
  source 1..75: mol_type = other DNA
tgacagacccgccatatctcgtcggtttgcgtgaccgttccgggcgcaccatcgccggcgataaaaccgatgaat

SEQ ID NO: 425113 - DNA, 75 bp, synthetic construct
  source 1..75: mol_type = other DNA
tcaccgacccgccatatctcgtcggtttacgtgaccgttccgggcgcaccatcgccggcgataaaaccgatgaat

SEQ ID NO: 425114 - DNA, 75 bp, synthetic construct
  source 1..75: mol_type = other DNA
atgttccgcgtactgaaaaaagacgcgttaatggtgagcttctacggctggaaccgcgtcgatcgctttatggcc

SEQ ID NO: 425115 - DNA, 75 bp, synthetic construct
  source 1..75: mol_type = other DNA
gaaggcttcataccgaacagttacccgctccgcatgcttcggtaggctacaggcgacggaacgcctggttttact

SEQ ID NO: 425116 - DNA, 75 bp, synthetic construct
  source 1..75: mol_type = other DNA
tgggctggaaatattcaggcaaccgccatcacccgacggaaaagcctgttaccagcctgcaaccactgattgaga

SEQ ID NO: 425117 - DNA, 75 bp, synthetic construct
  source 1..75: mol_type = other DNA
agggcacctcgtgttcaccaaaaactacacatccaaatctgcgtatgtcgcgtaccgccacgaatgcgcgtacat

SEQ ID NO: 425118 - DNA, 75 bp, synthetic construct
  source 1..75: mol_type = other DNA
gggcagcaacgccttgccgccgtgcaacgggccattcagcagggggccgcgaatgataactggtttgaaccggag

SEQ ID NO: 425119 - DNA, 75 bp, synthetic construct
  source 1..75: mol_type = other DNA
cctcagaaacccttaccggatgtgcagggctggaaatattcaggcaatcgtcatcacccgacggaaaagcctgtt

SEQ ID NO: 425120 - DNA, 75 bp, synthetic construct
  source 1..75: mol_type = other DNA
cgctccgcatgcttcggtaggctacaggcgacggaacgcctggttttactacttcattcacataaagttaaaaca

SEQ ID NO: 425121 - DNA, 75 bp, synthetic construct
  source 1..75: mol_type = other DNA
ccagcctgcaaccactgattgagagcttcacacatccgaacgcgattgtgctggacccgtttgcaggcagcggct

SEQ ID NO: 425122 - DNA, 75 bp, synthetic construct
  source 1..75: mol_type = other DNA
ggtcagcaacgccttgccgccgtacaacgggccatgcagcagggggccgcgaatgataactggtttgaaccggag

SEQ ID NO: 425123 - DNA, 75 bp, synthetic construct
  source 1..75: mol_type = other DNA
acctggtcttcaccaaaaactacacatcgaaggccgcatatgtgggctatcgccacgaatgcgcctacatcctgg

SEQ ID NO: 425124 - DNA, 75 bp, synthetic construct
  source 1..75: mol_type = other DNA
tgataacgccattgatttcatcctcaccgacccgccgtacctcgtcggtttccgtgaccgttccgggcgcaccat

SEQ ID NO: 425125 - DNA, 75 bp, synthetic construct
  source 1..75: mol_type = other DNA
tggctgagaattctcaaagatggcataattgctgcaaattatgggtcggcagactcttattacagattaggaaaa

SEQ ID NO: 425126 - DNA, 75 bp, synthetic construct
  source 1..75: mol_type = other DNA
ccggcccggccccgtaaccctctgccggatgtgctgggctggaaatattcaggcaatcgtcatcacccgacggaa

SEQ ID NO: 425127 - DNA, 75 bp, synthetic construct
  source 1..75: mol_type = other DNA
gaaagcggtatttgccagggcaaaagcggatctgctgggggagttcgccactgtagggcgacgtgaaacccatcc

SEQ ID NO: 425128 - DNA, 75 bp, synthetic construct
  source 1..75: mol_type = other DNA
atcaggatgagccgctgacgaataacgggttctggccggatctgaatctgaaggactttcaggcgcagcggtcac

SEQ ID NO: 425129 - DNA, 75 bp, synthetic construct
  source 1..75: mol_type = other DNA
gccgtttatgcccgtgccaaggccgatcttatgggcgagttcgccaccattggtcgccgtgaaacctatccgggg

SEQ ID NO: 425130 - DNA, 75 bp, synthetic construct
  source 1..75: mol_type = other DNA
gcggcaagccagtgacggtgacgccaacagcgatcaccaacggcgtgacgttctggcccgatctcgatctggccg

SEQ ID NO: 425131 - DNA, 75 bp, synthetic construct
  source 1..75: mol_type = other DNA
gcggcaagccggtgacggtgacgccaacagcgatcaccaacggcgtgacattctggcccgatctcgatctggccg

SEQ ID NO: 425132 - DNA, 75 bp, synthetic construct
  source 1..75: mol_type = other DNA
cgggacaggaaagcatggaaacccgtgccgggttactggctgaagcgtcagtggttatccgccgtatgaaagggc

SEQ ID NO: 425133 - DNA, 75 bp, synthetic construct
  source 1..75: mol_type = other DNA
tgtacaatctcatttttctggtgcacaaacaatacaactcaatggtaatggaatctctgaaagcataatcaggag

SEQ ID NO: 425134 - DNA, 75 bp, synthetic construct
  source 1..75: mol_type = other DNA
cctgaatggtaccgatcgctggcatacaggtatgatggctggctatggtcataataataacagtacgaatgccct

SEQ ID NO: 425135 - DNA, 75 bp, synthetic construct
  source 1..75: mol_type = other DNA
aatgaagcaggtatctggatgtataataaaggaaaacataatcgctggcgtgacaacagtagtcagctgagaacc

SEQ ID NO: 425136 - DNA, 75 bp, synthetic construct
  source 1..75: mol_type = other DNA
atgtcagcacattggtcctgacaggcaacggcacagtacaggttgatacttccggagaggttattgctgatactg

SEQ ID NO: 425137 - DNA, 75 bp, synthetic construct
  source 1..75: mol_type = other DNA
caaaaggcctgacggcttcgctggaaaccggttatacctggaaagcaggtgagttcagcggcagtcatggcagcc

SEQ ID NO: 425138 - DNA, 75 bp, synthetic construct
  source 1..75: mol_type = other DNA
attttttctggcgggtataattcattagatatttattcagattctgtgattaatggtgatattaaactagctagt

SEQ ID NO: 425139 - DNA, 75 bp, synthetic construct
  source 1..75: mol_type = other DNA
gaaggcggtttttgccagggcaaaagctgacctgttgggggagtttgccaccgttgggcggcgtgactctcaccc

SEQ ID NO: 425140 - DNA, 75 bp, synthetic construct
  source 1..75: mol_type = other DNA
cttccggcgcaaacaccgaccctgaaatgggcctgtttgaaactggctaaactggggcgatggcatgacagcaaa

SEQ ID NO: 425141 - DNA, 75 bp, synthetic construct
  source 1..75: mol_type = other DNA
aaacaaggcctgtgcgtattatgatggcgaccagctggcaccggaagttatccaggtactgaaagatcgcggtca

SEQ ID NO: 425142 - DNA, 75 bp, synthetic construct
  source 1..75: mol_type = other DNA
gccacaacccttgcggaaatcaacgataactaccagtttgcctgccagcaggtgggaagactgttgctggcttat

SEQ ID NO: 425143 - DNA, 75 bp, synthetic construct
  source 1..75: mol_type = other DNA
catcgaacagattttcacgatgattaccaaacggtaatggcatacaaagtttctgaggtcatcgctgcaatccgc

SEQ ID NO: 425144 - DNA, 75 bp, synthetic construct
  source 1..75: mol_type = other DNA
atggatgagctgacgatagagattctgactgatgatgcagattatgatctactgcgattcgactgcggcgaggaa

SEQ ID NO: 425145 - DNA, 75 bp, synthetic construct
  source 1..75: mol_type = other DNA
aagtcattcccttcctacgaacggatatttatcattctttgaaattcaatgataaaaacaaattattgcaagata

SEQ ID NO: 425146 - DNA, 75 bp, synthetic construct
  source 1..75: mol_type = other DNA
ggtttgtgggaccgcactttattgtggatcgcccctgtagtgcgccgcaggggatgttcccgctggttcccttct

SEQ ID NO: 425147 - DNA, 75 bp, synthetic construct
  source 1..75: mol_type = other DNA
gtcagcctaaatggcgcgatgccgcaaacaaggcctgtgcgtattacgatggtgaccagttgccaccagaagttc

SEQ ID NO: 425148 - DNA, 75 bp, synthetic construct
  source 1..75: mol_type = other DNA
gccggcgaaatcaatgatgatctggtcagtgtggcggcaaggtatcgcaatgctggccatgagcgcgcggcggac

SEQ ID NO: 425149 - DNA, 75 bp, synthetic construct
  source 1..75: mol_type = other DNA
gccagcctaaatggcgtgatgccgcaaacaaggcctgtgcgtattacgatggcgatcagttgccaccggaagttc

SEQ ID NO: 425150 - DNA, 75 bp, synthetic construct
  source 1..75: mol_type = other DNA
tgccgtcttggcaacatgaataaggcccgctccgatgcctatgcggaacaaatcaaggcgggcctcagttgggtg

SEQ ID NO: 425151 - DNA, 75 bp, synthetic construct
  source 1..75: mol_type = other DNA
atcgcgatgatcgccagcgtcgccagaccattgtcctcaatgctgaaggtgataatggtgaactgaccaatgata

SEQ ID NO: 425152 - DNA, 75 bp, synthetic construct
  source 1..75: mol_type = other DNA
gtaatttttccggtgtttttaccgtgaataagggggctcatttggctgtatccacggctgataatctggggacag

SEQ ID NO: 425153 - DNA, 75 bp, synthetic construct
  source 1..75: mol_type = other DNA
tcaccgcaaacaacatcgcggtgatcggcgggctggcgaccagcggaattttgactgtttctatctttaaactgg

SEQ ID NO: 425154 - DNA, 75 bp, synthetic construct
  source 1..75: mol_type = other DNA
acctatcggcgcagtagctggcgcattaggcgcggcgttctcaaccaacgggccgccgatggttatctacgggat

SEQ ID NO: 425155 - DNA, 75 bp, synthetic construct
  source 1..75: mol_type = other DNA
ccgttgtttctgtgtcagcgcctgatgcttcgtcttcagtgctatcaggacagccggagaatgatatcgcgtcat

SEQ ID NO: 425156 - DNA, 75 bp, synthetic construct
  source 1..75: mol_type = other DNA
cccggcgaacggcgaaccaatcatcgttccgtctcaggacgttgttctgggtctgtactatatgacccgtgactg

SEQ ID NO: 425157 - DNA, 75 bp, synthetic construct
  source 1..75: mol_type = other DNA
cgtcgtctggttgacgtggcgcaggacctggtggttaccgaagacgattgtggtacccatgaaggtatcatgatg

SEQ ID NO: 425158 - DNA, 75 bp, synthetic construct
  source 1..75: mol_type = other DNA
tttgagtaaagtcgtcacctcagtcgaatccggacttggcggtacgctgggccatattggtttgatatttggctt

SEQ ID NO: 425159 - DNA, 75 bp, synthetic construct
  source 1..75: mol_type = other DNA
gttcaacaataaagaatgtgtttcccggggaaacaacggcggtcacacagcccaaaaagaatatacaggatattt

SEQ ID NO: 425160 - DNA, 75 bp, synthetic construct
  source 1..75: mol_type = other DNA
tgctcttatcttcgataggatttttatagctcaggtaatatcagtttatttatcatttgatttttattcaaactt

SEQ ID NO: 425161 - DNA, 75 bp, synthetic construct
  source 1..75: mol_type = other DNA
catggctgctggttattgagctgctggcgatattgctgttgatccctggcgactggacagacaaagccatcaaaa

SEQ ID NO: 425162 - DNA, 75 bp, synthetic construct
  source 1..75: mol_type = other DNA
cggctgttttttatcagtacatacaggaggcgggtaaaaatccggatgatatcggccatattatttcttcttttg

SEQ ID NO: 425163 - DNA, 75 bp, synthetic construct
  source 1..75: mol_type = other DNA
gatacaagcaaatatgttgcacatatgaaaagcggaggcgatagcatatgtgatattttttatagttcaaaaatt

SEQ ID NO: 425164 - DNA, 75 bp, synthetic construct
  source 1..75: mol_type = other DNA
tgaaaggtggcgttggtaagtcaacattggctaccaatattgctaatcatctttcagataaacttgggcaaaaaa

SEQ ID NO: 425165 - DNA, 75 bp, synthetic construct
  source 1..75: mol_type = other DNA
caatccaggctctactgaagagcatggatctggagcaagagtgcgaacagctgcgtgaagagctgaacgaaacca

SEQ ID NO: 425166 - DNA, 75 bp, synthetic construct
  source 1..75: mol_type = other DNA
atactggagcattatggactttgctctgcgtggctatctggggccgctaaaaacgtttatttcggagattgagaa

SEQ ID NO: 425167 - DNA, 75 bp, synthetic construct
  source 1..75: mol_type = other DNA
ctgcgtgaagagctgaacgaaaccaactccgaaaccaagcgtaaaaagttgaccaagcgtatcaaactgctggaa

SEQ ID NO: 425168 - DNA, 75 bp, synthetic construct
  source 1..75: mol_type = other DNA
gttatcgtgggtcgtctgatcccggcaggtactggttacgcgtaccaccaggatcgtatgcgtcgccgtgctgcg

SEQ ID NO: 425169 - DNA, 75 bp, synthetic construct
  source 1..75: mol_type = other DNA
tcattgttgaagagcagggcaaactctccgggtttgggggcgttgcaggaaatctgagcaatagtggtatagtcg

SEQ ID NO: 425170 - DNA, 75 bp, synthetic construct
  source 1..75: mol_type = other DNA
atctgcgtgccggagggcggcaggcgctgcgcctcaccgcacaaacgttgccggattttctctttaccgcgttgc

SEQ ID NO: 425171 - DNA, 75 bp, synthetic construct
  source 1..75: mol_type = other DNA
gatcgctggcatacaggtatgatggctggctatggtcataatcataacagtacgaatgccctgagcaccggatac

SEQ ID NO: 425172 - DNA, 75 bp, synthetic construct
  source 1..75: mol_type = other DNA
caggagactactcgcgtgctgaccgaagcagctgttgcgggcaaacgcgacgaactgcgtggtctgaaagagaac

SEQ ID NO: 425173 - DNA, 75 bp, synthetic construct
  source 1..75: mol_type = other DNA
ggtgaagctccggctgcaccgcaggtgactgcagaagacgcatctgccagcctggcagaactgctgaacgcaggt

SEQ ID NO: 425174 - DNA, 75 bp, synthetic construct
  source 1..75: mol_type = other DNA
ctgttcaaaccgttcatctacggcaagcttgaactgcgtggtcttgctaccaccattaaagctgcgaagaaaatg

SEQ ID NO: 425175 - DNA, 75 bp, synthetic construct
  source 1..75: mol_type = other DNA
atggcgtcagctcaacgtgtttgaaggtgaacgtgtagaacgtggtgacgtaatttccgacggtccggaagcgcc

SEQ ID NO: 425176 - DNA, 75 bp, synthetic construct
  source 1..75: mol_type = other DNA
cgcgctggaagagttcggtgatgaattcgacgcgaagatgggggcggaagcaatccaggctctgctgaagagcat

SEQ ID NO: 425177 - DNA, 75 bp, synthetic construct
  source 1..75: mol_type = other DNA
tctttggccgacatgatcaaaggtaaacaggggcgtttccgtcagaacctgctcggtaaacgtgttgactactcc

SEQ ID NO: 425178 - DNA, 75 bp, synthetic construct
  source 1..75: mol_type = other DNA
aatgaaatgcgcaaagatggagataacgcattggcatcttggatcaagagaattttacgtaaagagcttcaatta

SEQ ID NO: 425179 - DNA, 75 bp, synthetic construct
  source 1..75: mol_type = other DNA
gtggcgcgttaatcgagaagaaagtggtcgcccaaactctctttgaacccgtctggattggctggaatgaacaga

SEQ ID NO: 425180 - DNA, 75 bp, synthetic construct
  source 1..75: mol_type = other DNA
aattgtctttatctatatcaagagcaagggcaacttgtcgttaaacaatggttatgaggagagcaataccggtga

SEQ ID NO: 425181 - DNA, 75 bp, synthetic construct
  source 1..75: mol_type = other DNA
aacgccgttgacactgacgctgtccagtaactcagtctctcacgaaatctttctgccagaaacaaccctagctga

SEQ ID NO: 425182 - DNA, 75 bp, synthetic construct
  source 1..75: mol_type = other DNA
ttgaaaaaataaaaaaagaacaaaacacatggcaggatctgtccacaaaagaacaaaaattacagcttattaaag

SEQ ID NO: 425183 - DNA, 75 bp, synthetic construct
  source 1..75: mol_type = other DNA
gaagggtgatgctacaaagatatcttgagttaacaatgaaggatcaagttggtttgttatcttctcaagaagcta

SEQ ID NO: 425184 - DNA, 75 bp, synthetic construct
  source 1..75: mol_type = other DNA
atattagcagtatcgaatctcgactggcggcgttggaacaacgtttaaaaaatgcggaatcccgcgcccaggcgg

SEQ ID NO: 425185 - DNA, 75 bp, synthetic construct
  source 1..75: mol_type = other DNA
cattagactaaaagatcatctcaatcgttttccagacttttataatgcatctttagtaaaggaggaagctgaaga

SEQ ID NO: 425186 - DNA, 75 bp, synthetic construct
  source 1..75: mol_type = other DNA
tgctgaagacccgctgacctgtgtggcacgcggtggcggcaaagcactggaaatgatcgacatgcacggcggcga

SEQ ID NO: 425187 - DNA, 75 bp, synthetic construct
  source 1..75: mol_type = other DNA
ttgcacccgtggcggattaggacacatttcccaggctgtagataattacaccttcaaaacacgcctggactggca

SEQ ID NO: 425188 - DNA, 75 bp, synthetic construct
  source 1..75: mol_type = other DNA
gcaggccgtcgatgacaaaaacatgtacatgcatttttttgaagagatgacggtctatgctcctgtccctgtacc

SEQ ID NO: 425189 - DNA, 75 bp, synthetic construct
  source 1..75: mol_type = other DNA
caggccccttccagttgatggttagcggattacgggcaaaagataatgatgatcgaaaagatgccaatggtgatc

SEQ ID NO: 425190 - DNA, 75 bp, synthetic construct
  source 1..75: mol_type = other DNA
catcggataaaacattttctttaaaactgatgtgccatcagggtatggtccgcatcgaccgcagatcattatcgg

SEQ ID NO: 425191 - DNA, 75 bp, synthetic construct
  source 1..75: mol_type = other DNA
ttaaaaatgaaagatcatcttagtttgcaatcttctcaggaagcaaatgagtttcttgaaatatctacttttatt

SEQ ID NO: 425192 - DNA, 75 bp, synthetic construct
  source 1..75: mol_type = other DNA
agtgtcactcagctccagcaggccacacgccattctgatattatggcggcccgggtacaggtcgcctttgactcc

SEQ ID NO: 425193 - DNA, 75 bp, synthetic construct
  source 1..75: mol_type = other DNA
ggcaggaaagcagtattctggcccatgctaacttggccatggacgctaaacagttagccgaggccactctcggta

SEQ ID NO: 425194 - DNA, 75 bp, synthetic construct
  source 1..75: mol_type = other DNA
ttattgttcacagcgatagcacctgccatttggggcagcacctacattgtcaccacccaatacctgccgaacttc

SEQ ID NO: 425195 - DNA, 75 bp, synthetic construct
  source 1..75: mol_type = other DNA
agtccctactcttctctggcgcacggttacgccaacagtaaatggccacgaacaataccgaaaattccctcggga

SEQ ID NO: 425196 - DNA, 75 bp, synthetic construct
  source 1..75: mol_type = other DNA
aaaatagtcgtgaaggtttgaaatttctacaggcgcaagctgacttattaacaagtctcaaggagaaaattccca

SEQ ID NO: 425197 - DNA, 75 bp, synthetic construct
  source 1..75: mol_type = other DNA
gctgccgaaagagtctcgttactggttacgtgaaattttgttatgtgccgatggtgaaccgtggcttgccggtcg

SEQ ID NO: 425198 - DNA, 75 bp, synthetic construct
  source 1..75: mol_type = other DNA
attatacagaagctgaatttttacagcttgtaacaacaatttgtaatgcggacacttccagtgaagaagaactgg

SEQ ID NO: 425199 - DNA, 75 bp, synthetic construct
  source 1..75: mol_type = other DNA
ctgaatctggcagacattgttgcggaatacgcccgtattcaaaaggaagaaacatcaaaaatattgtatcaatat

SEQ ID NO: 425200 - DNA, 75 bp, synthetic construct
  source 1..75: mol_type = other DNA
ctctgctcacctttaccgcctggcaactggcggccggaggacttctgctcgttccagtagctttagtgtttgatc

SEQ ID NO: 425201 - DNA, 75 bp, synthetic construct
  source 1..75: mol_type = other DNA
gaccgattacgtggttaaagagcctcaacctgatggcacagggctcacgaatatttttttagagcctcacacgtc

SEQ ID NO: 425202 - DNA, 75 bp, synthetic construct
  source 1..75: mol_type = other DNA
gctgccgaaagagtctcgttactggttacgtgaaattttgttatgtgctgatggtgaaccctggcttgccgggcg

SEQ ID NO: 425203 - DNA, 75 bp, synthetic construct
  source 1..75: mol_type = other DNA
gggcaatattgctgccattcgcccaatgaaagatggcgttatcgctgatttcttcgtgactgaaaagatgctcca

SEQ ID NO: 425204 - DNA, 75 bp, synthetic construct
  source 1..75: mol_type = other DNA
taacacgcaggttgaccgtgtgatttacggaattaactgcacggatttatctctcgctgacaggggcagggctgc

SEQ ID NO: 425205 - DNA, 75 bp, synthetic construct
  source 1..75: mol_type = other DNA
attgctgaggtggctgattcggttgttcgtgactgccttgtttctcgggccatttatagtgatgtaccagagcat

SEQ ID NO: 425206 - DNA, 75 bp, synthetic construct
  source 1..75: mol_type = other DNA
accgtattcgtattgaggctattgaccctgaaaagggtgatggtttccgttacatcgtgaagtacatcaccaaaa

SEQ ID NO: 425207 - DNA, 75 bp, synthetic construct
  source 1..75: mol_type = other DNA
ctggacctggcttgatgcgacctatcgcagcaatgtttgcaatgaacaggattgtaacggtaaccggatgccagg

SEQ ID NO: 425208 - DNA, 75 bp, synthetic construct
  source 1..75: mol_type = other DNA
ctaacgaccaaatcgatttataccgttatcgtgctgatcagatccgccagattagcgatgccttacgtcagggga

SEQ ID NO: 425209 - DNA, 75 bp, synthetic construct
  source 1..75: mol_type = other DNA
gtatgagtctaaagcagcaagaaacatgcttctccgccttgcaaacgtcaagcctggaactccggcatatgagcg

SEQ ID NO: 425210 - DNA, 75 bp, synthetic construct
  source 1..75: mol_type = other DNA
gtcagtgaatattttcggtggctacaaagtccaggggcgcggcgatgaagcgggcgatcgactgctcagcgatgc

SEQ ID NO: 425211 - DNA, 75 bp, synthetic construct
  source 1..75: mol_type = other DNA
agccttagaagccgctggtgcacagttgctggtgctggaatgcgtaccagttgaactggcaaaacgtattaccga

SEQ ID NO: 425212 - DNA, 75 bp, synthetic construct
  source 1..75: mol_type = other DNA
ctgactgaacgcgcggttccggtatgtggtcatttaggtttaacgccgcagtcagtgaacattttcggcggctac

SEQ ID NO: 425213 - DNA, 75 bp, synthetic construct
  source 1..75: mol_type = other DNA
ctctcgctgacaggggcagggctgccggactggtatcacagtttggctcgttttcgttcaccgtggcgcatgctt

SEQ ID NO: 425214 - DNA, 75 bp, synthetic construct
  source 1..75: mol_type = other DNA
atgactatagcttcgccaaactctttgctgatgaagggcttaacgtcatgctggtgggcgattcgctgggcatga

SEQ ID NO: 425215 - DNA, 75 bp, synthetic construct
  source 1..75: mol_type = other DNA
agcattagaagcggcaggcgcacaacttctggtgctggaatgcgtgccggttgaactggcaaaacgtattaccga

SEQ ID NO: 425216 - DNA, 75 bp, synthetic construct
  source 1..75: mol_type = other DNA
gaaaaatttagccaatgccaaactgggcgtacgcattgatgacgccagcaaattaagcctgattttcaatagtgt

SEQ ID NO: 425217 - DNA, 75 bp, synthetic construct
  source 1..75: mol_type = other DNA
gtgccaggcaaagcagatgcgctcggtttaggctgggtgtatatggcgccgaaggatggacgtccgggaattatt

SEQ ID NO: 425218 - DNA, 75 bp, synthetic construct
  source 1..75: mol_type = other DNA
gaaggacaccacctacacgccatctcctgaccagtgccgtcgtttaatggtagccgaacgaggcgccagtccatg

SEQ ID NO: 425219 - DNA, 75 bp, synthetic construct
  source 1..75: mol_type = other DNA
caacgcgcgagcaacgctggaaatacctttccactgccaaactaaaagccgcgccgggcagccaggccgcgtact

SEQ ID NO: 425220 - DNA, 75 bp, synthetic construct
  source 1..75: mol_type = other DNA
tgctgaagacccgctgacctgtgtggcgcgcggtggcggcaaagcgctggaaatgatcgacatgcacggcggcga

SEQ ID NO: 425221 - DNA, 75 bp, synthetic construct
  source 1..75: mol_type = other DNA
gctttaaaaatatgagcgatggcatcaatgacctggtgaccgagctaagcgggaataaaccgttggttatccccg

SEQ ID NO: 425222 - DNA, 75 bp, synthetic construct
  source 1..75: mol_type = other DNA
gcacatcgtccggtgtttgtctggccaacgcgcgagcaacgctggaaatacctttctacggcgaagctgaaagcc

SEQ ID NO: 425223 - DNA, 75 bp, synthetic construct
  source 1..75: mol_type = other DNA
caatgaccgatgcctggaatatctatctggcagccgggcgaggttttgaaacgccgacgattaatgagctgtctt

SEQ ID NO: 425224 - DNA, 75 bp, synthetic construct
  source 1..75: mol_type = other DNA
tccgacagaccgttttgcccgcactgcttgtcctttcccccgttgtttttgccgctgatgaacagactatgattg

SEQ ID NO: 425225 - DNA, 75 bp, synthetic construct
  source 1..75: mol_type = other DNA
ggcaacagccaccaaccattgaagccagcagttactacggcagttttggcagctggcgctatgggctcaaagcaa

SEQ ID NO: 425226 - DNA, 75 bp, synthetic construct
  source 1..75: mol_type = other DNA
ttgctgagcgcggtgccagtccgtgcaataacacgctggcggcaattggcagcggcggagtctattccacgcctg

SEQ ID NO: 425227 - DNA, 75 bp, synthetic construct
  source 1..75: mol_type = other DNA
aaaaatcattatattggcccattcattttgtaattggatttagtaaaacatgttatagaactattgttgatattg

SEQ ID NO: 425228 - DNA, 75 bp, synthetic construct
  source 1..75: mol_type = other DNA
ttcccccgccgtttttgccgctgatgaacaaaccatgattgtcagtgccgcgccgcaggtggtttccgagctgga

SEQ ID NO: 425229 - DNA, 75 bp, synthetic construct
  source 1..75: mol_type = other DNA
atggccatgttcctggtgctcctgatgcaggcgctgttccacacgcatctgggaggtgctctggttttttcagaa

SEQ ID NO: 425230 - DNA, 75 bp, synthetic construct
  source 1..75: mol_type = other DNA
ccagcctatgtttttatgtttatcgaagcgatggccgacgccgcggtgctgggtggaatgccacgcgcacaggcc

SEQ ID NO: 425231 - DNA, 75 bp, synthetic construct
  source 1..75: mol_type = other DNA
atcaacgccgcagagtcagcgcaggaagtggcacaaatcaccgacatcgtttttgccgccgttaaaccgggcatc

SEQ ID NO: 425232 - DNA, 75 bp, synthetic construct
  source 1..75: mol_type = other DNA
atggagtattgagcccagctcaaccactaataagaatatggacaggggaattgaatctttggttagataaagtca

SEQ ID NO: 425233 - DNA, 75 bp, synthetic construct
  source 1..75: mol_type = other DNA
aactgactgcgttaaaaaaacataaaagtcagagccagcgagattatatgcgcccggagcgtctgcgtgcagttg

SEQ ID NO: 425234 - DNA, 75 bp, synthetic construct
  source 1..75: mol_type = other DNA
gtaatcaggacgtgatggtcatgagcccggacagcgatttcttccgctatatgaagacgccgagctccgcgacgc

SEQ ID NO: 425235 - DNA, 75 bp, synthetic construct
  source 1..75: mol_type = other DNA
cgtaaaatttcttgccgtaggtgatgatttccgctttggcgctggtcgtgaaggcgatttcttgttattacagaa

SEQ ID NO: 425236 - DNA, 75 bp, synthetic construct
  source 1..75: mol_type = other DNA
gaagaagctcagcatgacatggctgctgaagcggggatcaatcccgcatgcattgatgagatcgcagagtttttg

SEQ ID NO: 425237 - DNA, 75 bp, synthetic construct
  source 1..75: mol_type = other DNA
attttgatattgccgatgagtacgcgaccgaatgcgtcaaacctgtctcagactctgaacgcacagcgctggccc

SEQ ID NO: 425238 - DNA, 75 bp, synthetic construct
  source 1..75: mol_type = other DNA
ttccgctgttttggcgaggcggaggtgattgccgaaccgatgatccacccggtggtcggcgtgagcggttcttca

SEQ ID NO: 425239 - DNA, 75 bp, synthetic construct
  source 1..75: mol_type = other DNA
aaaggcttccgtgccgcagtgatcgaagcgatgacgaagtgtatggaaaaatcagaaaaactcagcaaatcctga

SEQ ID NO: 425240 - DNA, 75 bp, synthetic construct
  source 1..75: mol_type = other DNA
aaagatatggtctgctcaccgggaggcaccaccattgaagcggtacgcgtactggaagagaaaggcttccgtgcc

SEQ ID NO: 425241 - DNA, 75 bp, synthetic construct
  source 1..75: mol_type = other DNA
atgcgctacaaagtcacactgttcttgctgactatgattctctgcttaacagggttctattcctgcaacaagaac

SEQ ID NO: 425242 - DNA, 75 bp, synthetic construct
  source 1..75: mol_type = other DNA
ctcggcgacggcagcgtggcactgattgttgatgtttctgccttgcagacgataaaccgcgaacaacgtatggcg

SEQ ID NO: 425243 - DNA, 75 bp, synthetic construct
  source 1..75: mol_type = other DNA
cgtcgcgggcgcgaaaaccgaagccacccagggaattgtggtgatcttacaaagtggcggtcgccgctacgcctt

SEQ ID NO: 425244 - DNA, 75 bp, synthetic construct
  source 1..75: mol_type = other DNA
cttggcgacggaagcgtagcactgattgttgatgtctcagccttgcaggcaataaaccgcgaacaatgtatggcg

SEQ ID NO: 425245 - DNA, 75 bp, synthetic construct
  source 1..75: mol_type = other DNA
agctggcgcagaatacggcttcgacatcaccagtacgcaaactttctgtgaaggtggcgtgcgtatcagtagtac

SEQ ID NO: 425246 - DNA, 75 bp, synthetic construct
  source 1..75: mol_type = other DNA
atgaagctgatacgcggcatacataatctcagccaggccccacaggaggggtgtgtgctgactattggtaatttt

SEQ ID NO: 425247 - DNA, 75 bp, synthetic construct
  source 1..75: mol_type = other DNA
atgagcgaatatttcagaatacttcagggactgccggacggtccttttacccgcaaacatgccgaagccgttgcc

SEQ ID NO: 425248 - DNA, 75 bp, synthetic construct
  source 1..75: mol_type = other DNA
atgagcgaatatttcagaatacttcagggactgcctgacggctcctttacccgcgaacaggccgaagccgttgtc

SEQ ID NO: 425249 - DNA, 75 bp, synthetic construct
  source 1..75: mol_type = other DNA
cggtaaaagtattgaagtatgcaatattggcaacaaaaaaatagtggctggcttgcatacatatctactaagaga

SEQ ID NO: 425250 - DNA, 75 bp, synthetic construct
  source 1..75: mol_type = other DNA
gtttgccggttctgacgcaataatctttaacggtaatatcgttaacgcgtccttgcttattgccgcacagttaga

SEQ ID NO: 425251 - DNA, 75 bp, synthetic construct
  source 1..75: mol_type = other DNA
gtgaatccaccagcatccgtgtagcggtagaaaaggttgatcaattaattaacctcgtcggcgagctggttatca

SEQ ID NO: 425252 - DNA, 75 bp, synthetic construct
  source 1..75: mol_type = other DNA
cgcgacgaattatcctttcgcgcctgaaggccggcgaagtcgacctgctggaagaagagctggggcatctgacaa

SEQ ID NO: 425253 - DNA, 75 bp, synthetic construct
  source 1..75: mol_type = other DNA
gccagttgcgttcaatacaccaaaggagaagcaggactgggttatgtcacatcaactggttctgccgcgaaagga

SEQ ID NO: 425254 - DNA, 75 bp, synthetic construct
  source 1..75: mol_type = other DNA
gcagttgtatgagcgtggagaactcgttgatgtgctgtggggggaacttgaatggtcttccccgacagatgacga

SEQ ID NO: 425255 - DNA, 75 bp, synthetic construct
  source 1..75: mol_type = other DNA
ctacaaaacaactggcacagggaaatatgactggttaaaccctgaatcgatcggcgttaatgatgtcacgcccgc

SEQ ID NO: 425256 - DNA, 75 bp, synthetic construct
  source 1..75: mol_type = other DNA
ccgtattctgaaaacccaaaataaatcacagctaagcagttggttcactcgagtccacgaaagcggttcagcaga

SEQ ID NO: 425257 - DNA, 75 bp, synthetic construct
  source 1..75: mol_type = other DNA
ggcttctggacccatggagggagtggttaaaagagcaacgagaaagtggtaattataacgccagtcggatatggc

SEQ ID NO: 425258 - DNA, 75 bp, synthetic construct
  source 1..75: mol_type = other DNA
ccggcagtcgccattacaccacggctgtaaccggaacccccggaagccggtacattattacggggccggatacag

SEQ ID NO: 425259 - DNA, 75 bp, synthetic construct
  source 1..75: mol_type = other DNA
gaatattatggcctattaaacaaagacattaataaacatatacaagtacattatgccgaatcagatatggtctgg

SEQ ID NO: 425260 - DNA, 75 bp, synthetic construct
  source 1..75: mol_type = other DNA
cattatatcctctgcacctgtagtctcctcattacattttatcgctgaacatgcgaaatatactttgttgtcatg

SEQ ID NO: 425261 - DNA, 75 bp, synthetic construct
  source 1..75: mol_type = other DNA
tcactcgagtccacgaaagcggatcagcagaatttcggcgcgtggccgcggggatggaagctgatgctgcggcta

SEQ ID NO: 425262 - DNA, 75 bp, synthetic construct
  source 1..75: mol_type = other DNA
aaatagcgcagcaactggcactcgagttctaccgtattctgaaaacccaaaataaatcacagctaagtagcttgt

SEQ ID NO: 425263 - DNA, 75 bp, synthetic construct
  source 1..75: mol_type = other DNA
aagctgatgctgcagctatatgtgaggcaatcagtagtcgctggagtaatggtgttgtcgaaggtcatgtaaatc

SEQ ID NO: 425264 - DNA, 75 bp, synthetic construct
  source 1..75: mol_type = other DNA
ctatatgtgaggcaaccagcagccgctggagtaacggtgttgtcgaaggtcatgtaaatcgcctgaagatgctga

SEQ ID NO: 425265 - DNA, 75 bp, synthetic construct
  source 1..75: mol_type = other DNA
tcactcgagtccacgaaagcggatcagcagaatttcggggcgtggccgcggggatggaagctgatgctgccgcta

SEQ ID NO: 425266 - DNA, 75 bp, synthetic construct
  source 1..75: mol_type = other DNA
tcactcgagtccacgaaagcggatcagcagaatttcggcgcgtggcggcggggatggaagctgatgctgccgcta

SEQ ID NO: 425267 - DNA, 75 bp, synthetic construct
  source 1..75: mol_type = other DNA
tgctgcaaaacttcggtagtagccacgacatcatggtccgcatgccgcctgctgaaggcgaaactggcggccagg

SEQ ID NO: 425268 - DNA, 75 bp, synthetic construct
  source 1..75: mol_type = other DNA
caaattctgtcgctggcactgctgctgcgctacagcctggatgccgatgatgcggcttccgccattgaacgcgcc

SEQ ID NO: 425269 - DNA, 75 bp, synthetic construct
  source 1..75: mol_type = other DNA
cagacctcagtgaagagcagaagcagacgataagtacgctggcaactgtgtcagcagggctggccggcggtctaa

SEQ ID NO: 425270 - DNA, 75 bp, synthetic construct
  source 1..75: mol_type = other DNA
cagccgcgccatcagcaatcagctgacactaatatggaattcgccaattacggtccgtttgagctgcttcaggca

SEQ ID NO: 425271 - DNA, 75 bp, synthetic construct
  source 1..75: mol_type = other DNA
gtttgtctatattgtgctgctgtgggggcattatcatgaaggatggcgtggacgccgcgtcgtctggtttaacgt

SEQ ID NO: 425272 - DNA, 75 bp, synthetic construct
  source 1..75: mol_type = other DNA
cccgcaaatggttgacactgacggcggatcagcattataaaaattcggaaaaattactggctgaacttcccatac

SEQ ID NO: 425273 - DNA, 75 bp, synthetic construct
  source 1..75: mol_type = other DNA
accgcggcaaccgagctttccgctattcatggccactcaacatcgcaatatagccttgccgggttttatcttcat

SEQ ID NO: 425274 - DNA, 75 bp, synthetic construct
  source 1..75: mol_type = other DNA
ggttcgggtattggctatggcattggtaaaggactttcatggggtgttaatgcaggggcaaactggtggaaaggt

SEQ ID NO: 425275 - DNA, 75 bp, synthetic construct
  source 1..75: mol_type = other DNA
atgagtggtggtacatcggcaataggttatggtgtaggtaaggttgttcaagggccactggagaaagtaattaat

SEQ ID NO: 425276 - DNA, 75 bp, synthetic construct
  source 1..75: mol_type = other DNA
cggaatgttgtatcctggcgtgaagcagtcagacctcagtgaagagcagaagcagacgataagtacgctggcaac

SEQ ID NO: 425277 - DNA, 75 bp, synthetic construct
  source 1..75: mol_type = other DNA
gccctggcaggtggtgcagcaccgtatctggctgaagtggtgaaaaccatgaccacagacccggttacaggtgag

SEQ ID NO: 425278 - DNA, 75 bp, synthetic construct
  source 1..75: mol_type = other DNA
atggcgaagtatggcactggtagtgaaattcagcggggtatccaggtcgcgatggcagcgcttcagggcctggcg

SEQ ID NO: 425279 - DNA, 75 bp, synthetic construct
  source 1..75: mol_type = other DNA
gtagggctggctctggcaacaggtacagtggcactactccccggtagtgctcaggctatgtggggactgggagca

SEQ ID NO: 425280 - DNA, 75 bp, synthetic construct
  source 1..75: mol_type = other DNA
gtgttttcggcaacctgccttataacatctccacaccgttgatgttccatctgtttagctatactgatgccattg

SEQ ID NO: 425281 - DNA, 75 bp, synthetic construct
  source 1..75: mol_type = other DNA
aaactttctcaacgatcagttcgtgatcgacagcattgtttctgccattaacccgcaaaagggccaggcgatggt

SEQ ID NO: 425282 - DNA, 75 bp, synthetic construct
  source 1..75: mol_type = other DNA
gcgtcgaggtgttaacgggaatggggatcgacccggcgatgcgagcggaaaatatctctgtcgcgcaatattgcc

SEQ ID NO: 425283 - DNA, 75 bp, synthetic construct
  source 1..75: mol_type = other DNA
tcccgatttattagtctgatgtgtgaaaaagaaccggagctgaaaatagcgcagcaactggtactcgagttctac

SEQ ID NO: 425284 - DNA, 75 bp, synthetic construct
  source 1..75: mol_type = other DNA
cgactcgtggcaaagagaaaattaaaagccgcacaatgtcactggaggacgaatacttcgaactgctggaaatga

SEQ ID NO: 425285 - DNA, 75 bp, synthetic construct
  source 1..75: mol_type = other DNA
agtcaccgcaggaaatcgaggacatcgtgaaactgaacgaggcgatcacagctgccgatgtcacgatgcgtaccg

SEQ ID NO: 425286 - DNA, 75 bp, synthetic construct
  source 1..75: mol_type = other DNA
ttgaaacgtagtctgcttttttctgccgtgctgtatgcggcgtcattgacctccgtccatgcggcgcagccgatc

SEQ ID NO: 425287 - DNA, 75 bp, synthetic construct
  source 1..75: mol_type = other DNA
aaaaactataacaaactacaaaaaaatcaaaaatccggcatacccggctcaggagagtctgttaatacacttata

SEQ ID NO: 425288 - DNA, 75 bp, synthetic construct
  source 1..75: mol_type = other DNA
ctgatgaactatggcttgcttaacgacccttctttaacagcatcaatcacgccaaatgcaacaggcgctggcgga

SEQ ID NO: 425289 - DNA, 75 bp, synthetic construct
  source 1..75: mol_type = other DNA
attcgcgccatctggaaggtgatgcaccggcagggctttatctctgatggtgcggaaaccgcccttaaccgctgg

SEQ ID NO: 425290 - DNA, 75 bp, synthetic construct
  source 1..75: mol_type = other DNA
aatgggacgcccattacgctggtgaatctggcaacccataccagcgccctgccccgtgaacagcccggtggcgcg

SEQ ID NO: 425291 - DNA, 75 bp, synthetic construct
  source 1..75: mol_type = other DNA
gccaggcgcacgcgtaccgacctacaatgggacgcccattacgctggtgaatctggcaacccataccagcgccct

SEQ ID NO: 425292 - DNA, 75 bp, synthetic construct
  source 1..75: mol_type = other DNA
agttgtcaccaaagaaatcacctgagccagaactgtctgtgcctgcagcattgctccgtcgtccggaacgcctta

SEQ ID NO: 425293 - DNA, 75 bp, synthetic construct
  source 1..75: mol_type = other DNA
cgatcagcgtacgctggcgacctggttcagaaaatatccggaaatacaggttgtctcgcgtgatcgcagtggaat

SEQ ID NO: 425294 - DNA, 75 bp, synthetic construct
  source 1..75: mol_type = other DNA
tccgcggaaaacgcaaaacagcacaatgtcctgaatgctttaagcgtagctactctgttcatagttgtcgtcggc

SEQ ID NO: 425295 - DNA, 75 bp, synthetic construct
  source 1..75: mol_type = other DNA
atcagcaccctgcgtctcgacaagctgcacgttcttggcaagggcgaacaggtgctggcctatccgggcaccacg

SEQ ID NO: 425296 - DNA, 75 bp, synthetic construct
  source 1..75: mol_type = other DNA
agaaaattatgctttccgatttattagtctgatgtgtgaaaaagaaccggagttgaaaatagcgcagcaactggt

SEQ ID NO: 425297 - DNA, 75 bp, synthetic construct
  source 1..75: mol_type = other DNA
gccagaactgtctgtgcctgcagcatcgctccgtcgtccagaacggcttaaaacagcaaacccgcaaaaacggca

SEQ ID NO: 425298 - DNA, 75 bp, synthetic construct
  source 1..75: mol_type = other DNA
agacacttctacagttaccttgcggatggcgatgcagtcaacaaattattagctctgacggtatcctccatctcc

SEQ ID NO: 425299 - DNA, 75 bp, synthetic construct
  source 1..75: mol_type = other DNA
tgcgtttggcattaccggcggccatatccctaaatttgccaaaaatttcctcgccgaaacgggcgacatccgcgc

SEQ ID NO: 425300 - DNA, 75 bp, synthetic construct
  source 1..75: mol_type = other DNA
ccgaagcgggagacatccgcgctgctgtacggcagtatatggctgaagtggagtccggcgcttatccgggcgaag

SEQ ID NO: 425301 - DNA, 75 bp, synthetic construct
  source 1..75: mol_type = other DNA
gttcaggggcacgactccacactcccggtaaccgttgaagatatcgcttatcacaccgccgccgtgcgtcgtggc

SEQ ID NO: 425302 - DNA, 75 bp, synthetic construct
  source 1..75: mol_type = other DNA
gattgatctgggcgaaacgccggagcagatcctcagcaaactggatgacgatcgcatcaaagatgacgatgtacg

SEQ ID NO: 425303 - DNA, 75 bp, synthetic construct
  source 1..75: mol_type = other DNA
tgatcgcgatatcgttatcatcagcaccctgcgactcgacaaactgcacgttctcggcaagggtgagcaagtgct

SEQ ID NO: 425304 - DNA, 75 bp, synthetic construct
  source 1..75: mol_type = other DNA
tgggacgcgaaccgcactcggtgattggttcatcgtgcattggcgcatcggttatcggcggtatctgtaataact

SEQ ID NO: 425305 - DNA, 75 bp, synthetic construct
  source 1..75: mol_type = other DNA
ggggcgaacgtgagctggagatgtacggcgcagcccgtattggctgggcggcagagctgaacgtggcgtcagcac

SEQ ID NO: 425306 - DNA, 75 bp, synthetic construct
  source 1..75: mol_type = other DNA
gtatgactatagaatataagttcgaaatacttgcaaggtttttttattacatagaacaagataaaaaaatacctt

SEQ ID NO: 425307 - DNA, 75 bp, synthetic construct
  source 1..75: mol_type = other DNA
agtacggttaatgctgctctctatgttgtgcgatatggtcaacaacaaaccgcagcaggataaaccttccgataa

SEQ ID NO: 425308 - DNA, 75 bp, synthetic construct
  source 1..75: mol_type = other DNA
cttttacagcggtaccatggaagttgggtggcggaacattgaatgccggaaaattcagtgcggtagcaacaatga

SEQ ID NO: 425309 - DNA, 75 bp, synthetic construct
  source 1..75: mol_type = other DNA
ctacaaatctttttgtgagaactgcggttatataactatgcatgcagtgactccggtattgaactggttgggatc

SEQ ID NO: 425310 - DNA, 75 bp, synthetic construct
  source 1..75: mol_type = other DNA
atgaatgagttcaagaggtgtatacgcgtgtttagttactccccctttaaagtgcggttaatgctgctctcgatg

SEQ ID NO: 425311 - DNA, 75 bp, synthetic construct
  source 1..75: mol_type = other DNA
tttctcaacttcatcaaatcttttacgacgatgaaggattaatcgatgcggaaaagagcgtgaccattttataca

SEQ ID NO: 425312 - DNA, 75 bp, synthetic construct
  source 1..75: mol_type = other DNA
cttcccgggcccagcccacggtgccggttaatgtggcggagccgctgcgcggggattaccgccgggagcagcgat

SEQ ID NO: 425313 - DNA, 75 bp, synthetic construct
  source 1..75: mol_type = other DNA
gcggcggatggctcgctgggtgtgcgcgcggtgggtagtatgaacggcagtgcgggtctggtgtattccccggtc

SEQ ID NO: 425314 - DNA, 75 bp, synthetic construct
  source 1..75: mol_type = other DNA
actctcccacgcaccatcgattattacgcgacattgccgacagaaactgcggcccacgcctttgtggaggacgtg

SEQ ID NO: 425315 - DNA, 75 bp, synthetic construct
  source 1..75: mol_type = other DNA
ctggttgctggcgacgatgggcaacatccctcgtcctgagtttattggcattgccgagaagggtggtaatattga

SEQ ID NO: 425316 - DNA, 75 bp, synthetic construct
  source 1..75: mol_type = other DNA
acctggttctgtatgctgcattccggcttgatgattctggaagctaacctgaattaccgaatcggttcgagcttt

SEQ ID NO: 425317 - DNA, 75 bp, synthetic construct
  source 1..75: mol_type = other DNA
catttccattgcctttgtgctctatatcctgacctatgcctatatttctgccagtggttcgattctgcatcacac

SEQ ID NO: 425318 - DNA, 75 bp, synthetic construct
  source 1..75: mol_type = other DNA
ttgaactcatgggtacgcaaagcgatatcgaaaacgttcgtaaaggagtaaccgaattttggcaacgacaaccgc

SEQ ID NO: 425319 - DNA, 75 bp, synthetic construct
  source 1..75: mol_type = other DNA
taataaatgcatcgttctatccaacactttccaggaagagagaaaagaaaatattaatgcaattaatgtatataa

SEQ ID NO: 425320 - DNA, 75 bp, synthetic construct
  source 1..75: mol_type = other DNA
gcgatgagtctccctgtgtgatagcaccagccagtccggttccttcgccttcaggagcattatctttctggagac

SEQ ID NO: 425321 - DNA, 75 bp, synthetic construct
  source 1..75: mol_type = other DNA
ctcatgatcgatgggtgcgtagctagattaagaaagtacaaaccagaagagtatgagttagttatagcccatttt

SEQ ID NO: 425322 - DNA, 75 bp, synthetic construct
  source 1..75: mol_type = other DNA
tcgttaccctaaaaaacggtaaaccgggcgttaaactttacgacaatacgattcataagattgtcgggcttgacg

SEQ ID NO: 425323 - DNA, 75 bp, synthetic construct
  source 1..75: mol_type = other DNA
tcgttaccctgaaaaacggtaaaccgggcgttaaactttacgacaatacgattcataaggttgtcgggcttgacg

SEQ ID NO: 425324 - DNA, 75 bp, synthetic construct
  source 1..75: mol_type = other DNA
atgagtatgaaggattcggtgtaggtgcaacctatgctaaatctgaccgcactaatgatcaggttatctacggta

SEQ ID NO: 425325 - DNA, 75 bp, synthetic construct
  source 1..75: mol_type = other DNA
gattcagtgtgatgatgacgaaggcattatgatagacagttgtgtggctcggttgagaaggtataaaccagagga

SEQ ID NO: 425326 - DNA, 75 bp, synthetic construct
  source 1..75: mol_type = other DNA
attgtacccaatgaccaggttgatcagcctgattcccaggtcgtcgggcattgtgctaatgatacgcataaaatt

SEQ ID NO: 425327 - DNA, 75 bp, synthetic construct
  source 1..75: mol_type = other DNA
atgagtttgatcgtctacttctccagtcgctccgaaaatacgcagcgttttatcgaacgtttagggctgcctgcg

SEQ ID NO: 425328 - DNA, 75 bp, synthetic construct
  source 1..75: mol_type = other DNA
ggttgcgtaaatataagtcagaagattacgagctgataatcgcccactttgttattggaatttcgctccgtacaa

SEQ ID NO: 425329 - DNA, 75 bp, synthetic construct
  source 1..75: mol_type = other DNA
ttgcgaagaagcgaaagtgctctgatggaacgataaggaaggagctacaaactgcaataggattcgttgaagggt

SEQ ID NO: 425330 - DNA, 75 bp, synthetic construct
  source 1..75: mol_type = other DNA
ggttgagaaggtataaaccagaggaatatgagctcatcatcgcccactttgttatcggtatctcattacgcacta

SEQ ID NO: 425331 - DNA, 75 bp, synthetic construct
  source 1..75: mol_type = other DNA
tcgacccaggcaaacgtatcgccacccaggccggcgaactcttaacgctgaagccaaaagaatttgctctgctgg

SEQ ID NO: 425332 - DNA, 75 bp, synthetic construct
  source 1..75: mol_type = other DNA
tctgggagccgacgattatctttgtaaaccttttgcattgatagaagtcgcagccaggctggaagctctgatgcg

SEQ ID NO: 425333 - DNA, 75 bp, synthetic construct
  source 1..75: mol_type = other DNA
tgttattccgtctgtggctatcgaccgcatcatcgcgcagcgtaacgaaggtattgcactgttcatgcaggcgat

SEQ ID NO: 425334 - DNA, 75 bp, synthetic construct
  source 1..75: mol_type = other DNA
aacagcaaacccgcaaaaaacggcatcagcgttggacagaggttatggccctgcataacaagggatgtagtttca

SEQ ID NO: 425335 - DNA, 75 bp, synthetic construct
  source 1..75: mol_type = other DNA
atgttaatagtcaatcctgatactcaccgtcccctcgtcctgcttcccggccgtgatcagcgtacgctggcgacc

SEQ ID NO: 425336 - DNA, 75 bp, synthetic construct
  source 1..75: mol_type = other DNA
actactgccgcaagacttccttcagtgtcccgggtaagccgctggttgatgccctggagaataatcaggggtgaa

SEQ ID NO: 425337 - DNA, 75 bp, synthetic construct
  source 1..75: mol_type = other DNA
accatggtcggaattgccgttggcattcagtttctggccacggtattaacacgaggttatgccggacggctggcc

SEQ ID NO: 425338 - DNA, 75 bp, synthetic construct
  source 1..75: mol_type = other DNA
ctttgccagcaaaggatgggcgatggcgggctttacgctcactgcctttggcggcgcatttgtcgttatgcgcgt

SEQ ID NO: 425339 - DNA, 75 bp, synthetic construct
  source 1..75: mol_type = other DNA
ttatcgggactttcgtttcgctctactttgccagcaaaggatgggcgatggcgggctttactcttaccgcgtttg

SEQ ID NO: 425340 - DNA, 75 bp, synthetic construct
  source 1..75: mol_type = other DNA
atgttcggtctgaggaaagtaaatcgaaacactcatacgtttgaaaccacttttcaaaattggaaagaaaatggc

SEQ ID NO: 425341 - DNA, 75 bp, synthetic construct
  source 1..75: mol_type = other DNA
tgcatgacgggagcgccgatctcgctgttaccacatctatgcctgatgaccgtctgtacggctatgcacatctac

SEQ ID NO: 425342 - DNA, 75 bp, synthetic construct
  source 1..75: mol_type = other DNA
ccgcgcatggttctattcctgatgccgttgctgcaacacagcagggcgtgttcagttttctcaccaagcctgtcg

SEQ ID NO: 425343 - DNA, 75 bp, synthetic construct
  source 1..75: mol_type = other DNA
catgtcagcgtgatgagtggaacagccagctgatgagcgacacctgtcctgaaatcaccctggacaatgtactgg

SEQ ID NO: 425344 - DNA, 75 bp, synthetic construct
  source 1..75: mol_type = other DNA
aatcagaaaggtgatttcgcacaaaatgcagctaaaaatgccggagttaaccttgccgctcagggtgttctttcc

SEQ ID NO: 425345 - DNA, 75 bp, synthetic construct
  source 1..75: mol_type = other DNA
ggttctctgaagtcaaggaaggattcagccggaagcgttattgaagacattacaactaaaatgggagatacacct

SEQ ID NO: 425346 - DNA, 75 bp, synthetic construct
  source 1..75: mol_type = other DNA
caaacactaaatctggaacaccagcctatgaaagagcgttaagtaacgctgcaaatgccgtcaggccgctgtttg

SEQ ID NO: 425347 - DNA, 75 bp, synthetic construct
  source 1..75: mol_type = other DNA
ggcgctggcgattccggttatcggtattggcgcggggaatgtaaccgacggacaaatcctcgtgatgcacgacgc

SEQ ID NO: 425348 - DNA, 75 bp, synthetic construct
  source 1..75: mol_type = other DNA
gcaactgtcatgcgcgcgggtgcgaatatggtcaaaatcgaaggcggtgcctggctggtagaaacagttcaaatg

SEQ ID NO: 425349 - DNA, 75 bp, synthetic construct
  source 1..75: mol_type = other DNA
ccgaggaagggctgaacgtgatgctggtgggcgactcgctggggatgaccgttcaggggcatgaatctacccttc

SEQ ID NO: 425350 - DNA, 75 bp, synthetic construct
  source 1..75: mol_type = other DNA
atgccattcaggagataacaaatggagatgatgcctttgagttacttgataagctgagaactcagttccgcattg

SEQ ID NO: 425351 - DNA, 75 bp, synthetic construct
  source 1..75: mol_type = other DNA
acggactgatggaaaacccgacgacagccaacgcaatcctagacaggctggtacataacgcacacagactggtac

SEQ ID NO: 425352 - DNA, 75 bp, synthetic construct
  source 1..75: mol_type = other DNA
ctggtacgtccgttttatctgctggaggggcgcaacgttcctgacttccggagcagcatcggggcgcagtatggt

SEQ ID NO: 425353 - DNA, 75 bp, synthetic construct
  source 1..75: mol_type = other DNA
acgctggcgctgttatcaatgacgtcaccaataaaatgggtaatgccgcagttgataccacaaacactatgaatg

SEQ ID NO: 425354 - DNA, 75 bp, synthetic construct
  source 1..75: mol_type = other DNA
cgcatcgctcagattctgtcctccagtaatcaaccaactcaaaaccaaaagcagcctgtagaacagcaagatgga

SEQ ID NO: 425355 - DNA, 75 bp, synthetic construct
  source 1..75: mol_type = other DNA
tggtaacctaaaaaccggaggcgcgctattggctggggaaacagggattggccttatgtcgagggtttatgaaag

SEQ ID NO: 425356 - DNA, 75 bp, synthetic construct
  source 1..75: mol_type = other DNA
ttcatgactggtcgcaccacaggtgttgcaacctatcgtaacaacgacttctttggtctggttgatggtctgaac

SEQ ID NO: 425357 - DNA, 75 bp, synthetic construct
  source 1..75: mol_type = other DNA
cccctcgtcctgcttcccggccgtgatcagcgtacgctggcgacctggttcagaaaatatccggaaatacaggtt

SEQ ID NO: 425358 - DNA, 75 bp, synthetic construct
  source 1..75: mol_type = other DNA
ccggcttgttcacgtaaaatttttgccgagtcgcttgctcccttcgccggttcacaccagcagtcttcacaggcg

SEQ ID NO: 425359 - DNA, 75 bp, synthetic construct
  source 1..75: mol_type = other DNA
ttcagaaaatatccggaaatacaggttgtctcgcgtgatcgcagtggagtctatgcaacagcagcacgtgaaggt

SEQ ID NO: 425360 - DNA, 75 bp, synthetic construct
  source 1..75: mol_type = other DNA
aaaggctggaacccaccggttactactgccgtcagacttccttcagtgtcccgggtaagccgctggttgatgccc

SEQ ID NO: 425361 - DNA, 75 bp, synthetic construct
  source 1..75: mol_type = other DNA
ccgcaaaaaacggcatcagcattggacagaagttatggccctgcataacaagggatgtagtttcagggcactctc

SEQ ID NO: 425362 - DNA, 75 bp, synthetic construct
  source 1..75: mol_type = other DNA
cgtcagggatgcggttgccaaatggcgtaaaggctggaacccaccggttactactgccgtcagacttccttcagt

SEQ ID NO: 425363 - DNA, 75 bp, synthetic construct
  source 1..75: mol_type = other DNA
ccgtattctgaaaacccaaaataaatcacagctaagcagctggttcactcgagtccacgaaagcggctcagcaga

SEQ ID NO: 425364 - DNA, 75 bp, synthetic construct
  source 1..75: mol_type = other DNA
gtcagtcgctgggtgggttcaggaacattccctgaaatgtcaaccaggcttccaaagcgaggcttctggccccat

SEQ ID NO: 425365 - DNA, 75 bp, synthetic construct
  source 1..75: mol_type = other DNA
tacagacatatgcctctgatacgtcttgttgccagtgagttgtcaccaaagaaatcacctgagccagaacagtct

SEQ ID NO: 425366 - DNA, 75 bp, synthetic construct
  source 1..75: mol_type = other DNA
gggattaatagccggaggtgaggctggaaaacgggctgcaacggcagtgggtctccgttgcagtgcagatactct

SEQ ID NO: 425367 - DNA, 75 bp, synthetic construct
  source 1..75: mol_type = other DNA
atgatgtacagacatatgcctctgatacgtcttgttgtcagagagttatcactgaataaatcacctgagccagaa

SEQ ID NO: 425368 - DNA, 75 bp, synthetic construct
  source 1..75: mol_type = other DNA
cgcctgaaggtgctgatacgccagatgtatggtcgagccggatttgaactacttaggcggagggtaatgagtcca

SEQ ID NO: 425369 - DNA, 75 bp, synthetic construct
  source 1..75: mol_type = other DNA
ttgagtttgatccggcgagtttttgtgagcaggatttactctggctgccacactacgcgcaactgcaacacgctg

SEQ ID NO: 425370 - DNA, 75 bp, synthetic construct
  source 1..75: mol_type = other DNA
gtcccctcgtcctgcttcccggccgtgatcagcgtacgctggcaacctggttcagaaaatatccggaaatacatg

SEQ ID NO: 425371 - DNA, 75 bp, synthetic construct
  source 1..75: mol_type = other DNA
aaaaacggtcgtgcgtctatttcgctgggttacatcggcatccacgaaaccattaacgcgctgttcggcggcgag

SEQ ID NO: 425372 - DNA, 75 bp, synthetic construct
  source 1..75: mol_type = other DNA
ctacgacgccttccagtcgctggaatatgaagtgaataccctgcacaccgccaacggtcagacgccatttgtaac

SEQ ID NO: 425373 - DNA, 75 bp, synthetic construct
  source 1..75: mol_type = other DNA
ttcttccaaagataaaacccgtcttgccttcgctggcctgaaattcggtgactacggctccatcgattatggccg

SEQ ID NO: 425374 - DNA, 75 bp, synthetic construct
  source 1..75: mol_type = other DNA
agaggactggaaccttgctggggcaggagcttcgtaaacgtaaaactcctcaggaaaaaattcatgttaagcggg

SEQ ID NO: 425375 - DNA, 75 bp, synthetic construct
  source 1..75: mol_type = other DNA
aagctgccccccttattacgccagaagaaacgtatctacatgaaatcccatcttctgactgaagccaggacacaa

SEQ ID NO: 425376 - DNA, 75 bp, synthetic construct
  source 1..75: mol_type = other DNA
ggcgagctacgccaaccggtgtggcctgcggaggtatacggcagtattagccactgcggggctacggcattggcc

SEQ ID NO: 425377 - DNA, 75 bp, synthetic construct
  source 1..75: mol_type = other DNA
gccgaacatttagccggacggattgctgctgttcatgcgttgcgggagtatggctataaatgtgtgcccgcaatt

SEQ ID NO: 425378 - DNA, 75 bp, synthetic construct
  source 1..75: mol_type = other DNA
atgcggcgtgaacgccttatccggcctacaaaaaaattcaatatattgcaggaccatgtaggcctgataagcgta

SEQ ID NO: 425379 - DNA, 75 bp, synthetic construct
  source 1..75: mol_type = other DNA
tgagtgctacgagtgtggctttaccggtgagttcgagtgcaccagcaaaggcttcacttgcccgaaatgtggtaa

SEQ ID NO: 425380 - DNA, 75 bp, synthetic construct
  source 1..75: mol_type = other DNA
cgtttgtcaccgccagctacaacaagcaccgtaaaacggcggaagagtggagcatcccggacgccgaaggctacg

SEQ ID NO: 425381 - DNA, 75 bp, synthetic construct
  source 1..75: mol_type = other DNA
atgtacagacatatacctctgatacgtcttgttgccagtgagttgtcaccaaagaaatcacctgatccagaacca

SEQ ID NO: 425382 - DNA, 75 bp, synthetic construct
  source 1..75: mol_type = other DNA
tgacctttaatggcaagccgattgatccgaacgccatgttcctggttgccaccaataactatcgcgcttacggcg

SEQ ID NO: 425383 - DNA, 75 bp, synthetic construct
  source 1..75: mol_type = other DNA
cattaacggtcgcgccacgcttgacgacgcctgtaccaccgccgatctgcactttaccgatgctgcaggcgatga

SEQ ID NO: 425384 - DNA, 75 bp, synthetic construct
  source 1..75: mol_type = other DNA
agcaacagccgcactcttcgtcggtgggcagcagcgcggtggcgcaaaacagcacggtggatgacacggcggata

SEQ ID NO: 425385 - DNA, 75 bp, synthetic construct
  source 1..75: mol_type = other DNA
ccggtcaatgggcgctttcgggtggcggcgtggagcctggcgaacgaattgaagaggcactacgccgcgaaattc

SEQ ID NO: 425386 - DNA, 75 bp, synthetic construct
  source 1..75: mol_type = other DNA
aagagaaagggcagtatccgatgaataaagtcgcgaccgatgatatcgggtttgcgatttatcaggtggatttga

SEQ ID NO: 425387 - DNA, 75 bp, synthetic construct
  source 1..75: mol_type = other DNA
tcagataaagccgcagcgtttattaaagagaaagggcagtatccgatgaataaagtcgcgaccgatgatatcggg

SEQ ID NO: 425388 - DNA, 75 bp, synthetic construct
  source 1..75: mol_type = other DNA
tgggatccctggcggcgggtggcaattcggattttcaattttttgtattctgttagttgttcttattggtggtgt

SEQ ID NO: 425389 - DNA, 75 bp, synthetic construct
  source 1..75: mol_type = other DNA
tggaagagggcacaggcccaaccgattgcggtggctggttggtggatgtgtgtgacgcgttgaccgatcattcca

SEQ ID NO: 425390 - DNA, 75 bp, synthetic construct
  source 1..75: mol_type = other DNA
tcgcgggcaactcgacagccgggtggaaggatttatgctcggcgagctggatatgctgaaaaacggtatcaactc

SEQ ID NO: 425391 - DNA, 75 bp, synthetic construct
  source 1..75: mol_type = other DNA
cgattacggcatcccgccgggcgattacgacgtttcggtggtgaccaacaccggcgaagaagaggtgccgattga

SEQ ID NO: 425392 - DNA, 75 bp, synthetic construct
  source 1..75: mol_type = other DNA
agatctgtgcggccatgaaccatgctttagtggaggctcttgatggcgtagaaattttcgatcctcaaaaaataa

SEQ ID NO: 425393 - DNA, 75 bp, synthetic construct
  source 1..75: mol_type = other DNA
ggcgggagtgcaagcggctccaggagaaccaagcattgatttgggaagcttggctggccttccatgtgaaatagc

SEQ ID NO: 425394 - DNA, 75 bp, synthetic construct
  source 1..75: mol_type = other DNA
tttgacagaaatcacgccgtggaccttcagcgatgatattcgcaccaagacgtatgcagatggtcgcaaggaaga

SEQ ID NO: 425395 - DNA, 75 bp, synthetic construct
  source 1..75: mol_type = other DNA
cgagaatatctggaagtcgcaatcgggattaagccggataacggcaacaaatcagaacggcaactggctggatgt

SEQ ID NO: 425396 - DNA, 75 bp, synthetic construct
  source 1..75: mol_type = other DNA
aatcaaaatattgccgcctatgccgcgctatctcaggcagaaaataccactaacaatagcgactatctgtatacg

SEQ ID NO: 425397 - DNA, 75 bp, synthetic construct
  source 1..75: mol_type = other DNA
cgccggacatacagtgcaaactggtactgcgaagacaccgagcaccatttcaactcagatatccgggacattaca

SEQ ID NO: 425398 - DNA, 75 bp, synthetic construct
  source 1..75: mol_type = other DNA
atgaatagtcgagttgcttgtaccaagtttgacctccctatcaatactaatttggataacaatcacacgcttaca

SEQ ID NO: 425399 - DNA, 75 bp, synthetic construct
  source 1..75: mol_type = other DNA
cgctcttctttgatgtggccaggatcatccgggcaaaacaacctgcaatttttgttctggaaaacgtaaaaaatc

SEQ ID NO: 425400 - DNA, 75 bp, synthetic construct
  source 1..75: mol_type = other DNA
cgttatggcatgccagcgtcagtacattaggctggcgtgttgattcccggcttggtgattttcgtccctgggcgc

SEQ ID NO: 425401 - DNA, 75 bp, synthetic construct
  source 1..75: mol_type = other DNA
gtatttggtattacgcttggtacgggctgtggcggtggcattgccatcaagcagcgaccgtttataggggcctgg

SEQ ID NO: 425402 - DNA, 75 bp, synthetic construct
  source 1..75: mol_type = other DNA
tgctgacagggatcgccttacccggcagtatctcgccactcactggcctgattaaaaacgcgaatattcaggtga

SEQ ID NO: 425403 - DNA, 75 bp, synthetic construct
  source 1..75: mol_type = other DNA
ttcaccactcccattgtaaaagcacagcacggcgacagtagcggaatgcgtggcgctgcctggcttgctatgcgc

SEQ ID NO: 425404 - DNA, 75 bp, synthetic construct
  source 1..75: mol_type = other DNA
gatgggattttagcataggcgaaaagcactttaatgatcctgtcaatttggcaaggcgcccacgccgtttaaccc

SEQ ID NO: 425405 - DNA, 75 bp, synthetic construct
  source 1..75: mol_type = other DNA
tgattaactttgatatattagctgaagaagataaagaagaaattaaaaacataataaacaaatataacaaaaatg

SEQ ID NO: 425406 - DNA, 75 bp, synthetic construct
  source 1..75: mol_type = other DNA
gaaaacgatcaacttgcctcagtagtgattaactttgatatattagctgaagaagataaagaagaaattaaaaac

SEQ ID NO: 425407 - DNA, 75 bp, synthetic construct
  source 1..75: mol_type = other DNA
cagttgcatgtgccaatgccgctgggggccgcctcacgggaggtttatagccaggcgcgcgcagcgggtcgcggt

SEQ ID NO: 425408 - DNA, 75 bp, synthetic construct
  source 1..75: mol_type = other DNA
cgaagccctgaatcttcccttcgatgttgccgtcaaggtaatgagcggtactgccgccggtaaaggccacttcac

SEQ ID NO: 425409 - DNA, 75 bp, synthetic construct
  source 1..75: mol_type = other DNA
acgtggagctggcccgccgttccctgtatgagcagcaccccgaaaaaatgccgcgtgcggataatcgccgctggt

SEQ ID NO: 425410 - DNA, 75 bp, synthetic construct
  source 1..75: mol_type = other DNA
agtttgagccgtggattgaaccgcctttccgtgggacaacaaaagttatcatcagggcgattaagcgcggattct

SEQ ID NO: 425411 - DNA, 75 bp, synthetic construct
  source 1..75: mol_type = other DNA
tgtcggctgaagccgccgtactgtgtgaagccctgaatcttcccttcgatattgccgtcaaggtgatgagcggca

SEQ ID NO: 425412 - DNA, 75 bp, synthetic construct
  source 1..75: mol_type = other DNA
tagggcaaatgggttcgcctatggcgagcaatttactgcggcagggacaccagcttcgcgtattcgatgtcaacc

SEQ ID NO: 425413 - DNA, 75 bp, synthetic construct
  source 1..75: mol_type = other DNA
ttcagtggtactgttgacattatctggccagaatatcagcacaatcccagtccggtatatatacctaaaatcatt

SEQ ID NO: 425414 - DNA, 75 bp, synthetic construct
  source 1..75: mol_type = other DNA
tattctatcctgccgcgtcaatttccgattataaattgagcgaagatgaaatcgccacattcactgatattagcg

SEQ ID NO: 425415 - DNA, 75 bp, synthetic construct
  source 1..75: mol_type = other DNA
cactactgggcgcattaacgacggtgatattcctcgctcgctttcattgccgccagctacggcgctttggcttaa

SEQ ID NO: 425416 - DNA, 75 bp, synthetic construct
  source 1..75: mol_type = other DNA
cgctggaacagcctttcagaaattatctgggacgaattccgcgaacagttcacgccgggggcttttgctgactat

SEQ ID NO: 425417 - DNA, 75 bp, synthetic construct
  source 1..75: mol_type = other DNA
tcagccggaaatacaggaacgcacgctggatggcccttcgctgggatggtgaaaccatgaaaaatggcagcttca

SEQ ID NO: 425418 - DNA, 75 bp, synthetic construct
  source 1..75: mol_type = other DNA
aaaggcagcagctgataagaaagcagcggcagaaaaagccgccgcagacaaaaaagcggcagctgcaaaagcagc

SEQ ID NO: 425419 - DNA, 75 bp, synthetic construct
  source 1..75: mol_type = other DNA
tttgaacgctggcggaacagtgaaaatgcgcagctgattcgccagcagatccagtcgttatgtgccgcagagccg

SEQ ID NO: 425420 - DNA, 75 bp, synthetic construct
  source 1..75: mol_type = other DNA
agcgatttatttttatggtccgactggaatccactcaacgccaatgtttctaggaactgtgctactggtggcaaa

SEQ ID NO: 425421 - DNA, 75 bp, synthetic construct
  source 1..75: mol_type = other DNA
aatgcaggagcgcctgccggaaccatcaaaatcgacaaggagcttgtgacgttcgaaggtaactttgatgaatcg

SEQ ID NO: 425422 - DNA, 75 bp, synthetic construct
  source 1..75: mol_type = other DNA
ctatgaatatacaggctgtatcaccgatgagcacggacactcctttcagatttcgccttcagggcaacaacccaa

SEQ ID NO: 425423 - DNA, 75 bp, synthetic construct
  source 1..75: mol_type = other DNA
tgattctggaaagtattccattcccactacgcagcacgctggatgaagtcgttactctgctggcacattcttctc

SEQ ID NO: 425424 - DNA, 75 bp, synthetic construct
  source 1..75: mol_type = other DNA
gcttaaactaaatgtcaggcatactcatgtcgataaccaagactatattccagaagatagtgataaaaaacacac

SEQ ID NO: 425425 - DNA, 75 bp, synthetic construct
  source 1..75: mol_type = other DNA
aatgtcgtcacgcatgatggcacaggagaccccggaacgttatgctaccgcatgtcatttgcaaaaacgacagat

SEQ ID NO: 425426 - DNA, 75 bp, synthetic construct
  source 1..75: mol_type = other DNA
ctggcgcgtcacctggccacgttactcgggagttttacgtttgactggtcgattttgccggaaagcccgcgcaaa

SEQ ID NO: 425427 - DNA, 75 bp, synthetic construct
  source 1..75: mol_type = other DNA
aaaaaggcacgctacaggcacagttcgcccaactaccgtccgtgccacagctggcacgccagttgatgacgctgc

SEQ ID NO: 425428 - DNA, 75 bp, synthetic construct
  source 1..75: mol_type = other DNA
atgcgctgttggttcgccagcaaattcagtcgttatgtgccgccgacccgctgctttcagcgttttcgctgctga

SEQ ID NO: 425429 - DNA, 75 bp, synthetic construct
  source 1..75: mol_type = other DNA
caaacacaccaaaaggaagtactgcttatgatagagcgatcagacgggtatctgaaactcttacacctctaattc

SEQ ID NO: 425430 - DNA, 75 bp, synthetic construct
  source 1..75: mol_type = other DNA
aacaggacttacccgttgttccctcgcaattactgaagttaccgtgtattaatctgcagttacccacgcatggac

SEQ ID NO: 425431 - DNA, 75 bp, synthetic construct
  source 1..75: mol_type = other DNA
cgaagccctgttgcagcagcagcttcagacacagtggcaaactacctggcaacagcattttgccaccgcgccgtg

SEQ ID NO: 425432 - DNA, 75 bp, synthetic construct
  source 1..75: mol_type = other DNA
aatattgccttgtcgatcatggtgttgctggtggcgatgtttacccagcgcacgctcgagtttgctgcgtttccg

SEQ ID NO: 425433 - DNA, 75 bp, synthetic construct
  source 1..75: mol_type = other DNA
ccatcgccgggatcctcatcatggtcattaacgttgttggcggattgctggttggtgtgttgcaacatggcatga

SEQ ID NO: 425434 - DNA, 75 bp, synthetic construct
  source 1..75: mol_type = other DNA
gaagcgacgtggaacgatgtgcaactggaagattctctgggaatggaagtgggttatcgcctgatcccgatggtc

SEQ ID NO: 425435 - DNA, 75 bp, synthetic construct
  source 1..75: mol_type = other DNA
cgcattgcaacagctgttacaaatctatcagtccaccagtgaatggcagaaagcaattgatgttgcagaacgcct

SEQ ID NO: 425436 - DNA, 75 bp, synthetic construct
  source 1..75: mol_type = other DNA
caggataaagcggtagacctgtttcttgatatgctcaaagaggacacaggcaccgttgaagctcaccttacgctc

SEQ ID NO: 425437 - DNA, 75 bp, synthetic construct
  source 1..75: mol_type = other DNA
gcacaggtctatattacgcgccagcttcagcgtcatccgaccatgcgtgtgttccataagctaatggattaccac

SEQ ID NO: 425438 - DNA, 75 bp, synthetic construct
  source 1..75: mol_type = other DNA
ttactcggcctggtgcctggaatgccgaacctggtatttttgctgttcactgccggattgctggggctggcctgg

SEQ ID NO: 425439 - DNA, 75 bp, synthetic construct
  source 1..75: mol_type = other DNA
aggtggtcgaagcgttcggtcacttcctcgttggtggcaatttcgctatcggtatcgtggtgtttgtcattctcg

SEQ ID NO: 425440 - DNA, 75 bp, synthetic construct
  source 1..75: mol_type = other DNA
agcgccctgccagtcggtcttatcgaacagcagcgctggagtcgtgccacggacacctacggtgttaagcaccag

SEQ ID NO: 425441 - DNA, 75 bp, synthetic construct
  source 1..75: mol_type = other DNA
cgcagcagttactggatcgcgtcgcccaggagatgccaaagctaacggaggacttagttcctggcgtcgtcacgt

SEQ ID NO: 425442 - DNA, 75 bp, synthetic construct
  source 1..75: mol_type = other DNA
cggggcgctggctggcgatcaacccggggacagccgccggaacattacccggcgaagcgacggtcgacccggcgt

SEQ ID NO: 425443 - DNA, 75 bp, synthetic construct
  source 1..75: mol_type = other DNA
tggtaccgctgccgggacgttacctggtgaggcgaccgtcgatccggcatttggcctgaatgctatctggattga

SEQ ID NO: 425444 - DNA, 75 bp, synthetic construct
  source 1..75: mol_type = other DNA
catcatgatgggacgcgtgtttatggcgaaaggagaatacgccaaagccgtcgaaagtctgcaacgcgtgatatc

SEQ ID NO: 425445 - DNA, 75 bp, synthetic construct
  source 1..75: mol_type = other DNA
ctgggcgctgtttttacccgtgattattattggcggtttccgctcaggtttattcacgccaacagaagcgggggc

SEQ ID NO: 425446 - DNA, 75 bp, synthetic construct
  source 1..75: mol_type = other DNA
ggatggatatctttgatgtgcaaattctggcacaaacgttggtaaatggcgcagacagcttctccctgttagcca

SEQ ID NO: 425447 - DNA, 75 bp, synthetic construct
  source 1..75: mol_type = other DNA
atgacaattcttatatttattgtcagtttgttaggcgctatcgcgattggtgttcccattgcctgggcattatta

SEQ ID NO: 425448 - DNA, 75 bp, synthetic construct
  source 1..75: mol_type = other DNA
ctgacctcaaaactattctccactccaaacgcgccaatatttattatctggaaaaatgccgggtgcaggtgaatg

SEQ ID NO: 425449 - DNA, 75 bp, synthetic construct
  source 1..75: mol_type = other DNA
caacgtattgtcgacctgccaatgaaactggtgggtcacaggccaggcggtctgggttacgttggcgtgctggcg

SEQ ID NO: 425450 - DNA, 75 bp, synthetic construct
  source 1..75: mol_type = other DNA
aggtgaagaggctcagcaggaatcccgtgataatcttggactgaaaagcgctgccacaatgacgccacagagcga

SEQ ID NO: 425451 - DNA, 75 bp, synthetic construct
  source 1..75: mol_type = other DNA
ctgagcacggcacaaccgcgcgtaatccacatcgaggccaccagcgaacagaaagcccgtcagcaatccccggct

SEQ ID NO: 425452 - DNA, 75 bp, synthetic construct
  source 1..75: mol_type = other DNA
cagcgacgatctcgatcgtgccatgaccttgctaaaaaaggggcggcggcagataaaaacagcgcccgcgtatcc

SEQ ID NO: 425453 - DNA, 75 bp, synthetic construct
  source 1..75: mol_type = other DNA
tatctacatcgacgatcctatatcttcgttagatgagcataacgcaatcacagttggcagtcatctggcgcaact

SEQ ID NO: 425454 - DNA, 75 bp, synthetic construct
  source 1..75: mol_type = other DNA
acctgttctcacttagtactcacttacgcacagaactgataagcaagaaggcaatcctgctgtacgcctacaacg

SEQ ID NO: 425455 - DNA, 75 bp, synthetic construct
  source 1..75: mol_type = other DNA
atgactatcttaatagaaaacattcccatgcccagtaggctcttactgacatggcaaccggttgacggaggctct

SEQ ID NO: 425456 - DNA, 75 bp, synthetic construct
  source 1..75: mol_type = other DNA
gggcgggcagcccgccaggcccggatgttcatcagttacagcgaagtcagcataaaaaatcccgacaacagcggc

SEQ ID NO: 425457 - DNA, 75 bp, synthetic construct
  source 1..75: mol_type = other DNA
aggttaatcttaacgttaccgaggacaatttcatcgccaataacattggaatgaccaggctacaggcaacagtga

SEQ ID NO: 425458 - DNA, 75 bp, synthetic construct
  source 1..75: mol_type = other DNA
agtttattcgcgggtgggatgatgggcgaggtgttgattccgcgagactgctactttcaagtcaggcggcatcta

SEQ ID NO: 425459 - DNA, 75 bp, synthetic construct
  source 1..75: mol_type = other DNA
tacccaaatctggcaaaggcttacccaacattaaaattaccagatttacgcggtgaatttattcgtggctgggat

SEQ ID NO: 425460 - DNA, 75 bp, synthetic construct
  source 1..75: mol_type = other DNA
tcttgttctgcacgatatatcaggcaatccgatcaaagtttctgaagggctggaatttgtgcaatcaggtactaa

SEQ ID NO: 425461 - DNA, 75 bp, synthetic construct
  source 1..75: mol_type = other DNA
taacaatacagacacagacaaccgtgaaagtcactggcaactcaagcaccgcacatgttgctagctttatcgctg

SEQ ID NO: 425462 - DNA, 75 bp, synthetic construct
  source 1..75: mol_type = other DNA
aatggggagatatggggcattacacgactgacgctggttttcaatcaaatatgtattggtcatctagtcccgcaa

SEQ ID NO: 425463 - DNA, 75 bp, synthetic construct
  source 1..75: mol_type = other DNA
cccaattagacaccttaagtcaatttgaccctgaattgtctggttttcttaagcgaaaatttgcagcaagtcacg

SEQ ID NO: 425464 - DNA, 75 bp, synthetic construct
  source 1..75: mol_type = other DNA
ctttcattcacggttttagggccagtgaacttcttgatttacgtttatccgatattgatgcatctggaaaacaac

SEQ ID NO: 425465 - DNA, 75 bp, synthetic construct
  source 1..75: mol_type = other DNA
aaagagaaaataataacttcaacgcgttagttttagatatcagaatgcagcatgcggcgaaaatgatcacatcca

SEQ ID NO: 425466 - DNA, 75 bp, synthetic construct
  source 1..75: mol_type = other DNA
cctgatttacgcggtgagtttatccgtggttgggatgatgggcgaggtgtggatgcgggaagggtcatcttaagc

SEQ ID NO: 425467 - DNA, 75 bp, synthetic construct
  source 1..75: mol_type = other DNA
cttctccagtcgtaccacgttacctgacagcgcccgtgttgccagcgcatctaccatccctaatcgcgatgcgcg

SEQ ID NO: 425468 - DNA, 75 bp, synthetic construct
  source 1..75: mol_type = other DNA
gataatcccttgcgattcatgagtacaacattgcatccagctacaaatcaaccatattatgtaagacatatggtc

SEQ ID NO: 425469 - DNA, 75 bp, synthetic construct
  source 1..75: mol_type = other DNA
caggcagggcaacatgcagacgctgccgcccgggcaaaagaagaggtaaaaaaactggcggaaggtgttcagcag

SEQ ID NO: 425470 - DNA, 75 bp, synthetic construct
  source 1..75: mol_type = other DNA
atggcttcgcaacaagccctgcaggatcggatactaaaagaaatcattgagcgtatcccgcaaagagaagtctct

SEQ ID NO: 425471 - DNA, 75 bp, synthetic construct
  source 1..75: mol_type = other DNA
tcaaatcttacgaaggtgtggcgatggaatatacttttctggtcgcgctggcgcaggggacattacccggtcagc

SEQ ID NO: 425472 - DNA, 75 bp, synthetic construct
  source 1..75: mol_type = other DNA
gctggaagggtttacgctgtttaccgactggctggtggttgaagagcgtcagcgcgggttaaccagtttgcgcca

SEQ ID NO: 425473 - DNA, 75 bp, synthetic construct
  source 1..75: mol_type = other DNA
gcatgacagcaaacgcacaggtcgccccggttgggtagtcatgtgggatggctggttcagacttcaggatatggt

SEQ ID NO: 425474 - DNA, 75 bp, synthetic construct
  source 1..75: mol_type = other DNA
tggatgtcgtacatggttggtatgtgggcattcagctttattcttcgcttctttgatctgcaacgcattctgacc

SEQ ID NO: 425475 - DNA, 75 bp, synthetic construct
  source 1..75: mol_type = other DNA
tatggacaccggtgaacgccgcgtattaaaacaaactgaagtgcccggttttgatgcagagaattaccgtagtga

SEQ ID NO: 425476 - DNA, 75 bp, synthetic construct
  source 1..75: mol_type = other DNA
atgcatttgttctgcaataccatatgacacccgatattacgccatatatagaatatgattaccttgaccgtcagg

SEQ ID NO: 425477 - DNA, 75 bp, synthetic construct
  source 1..75: mol_type = other DNA
tggtgatatgtctcgtgataacgttcatcgttgggatggatatgtcacttaccatattaatagtgatttcacctt

SEQ ID NO: 425478 - DNA, 75 bp, synthetic construct
  source 1..75: mol_type = other DNA
tgacatgaccaacttctacacgatcaactatgaaagtgagcttttagaagaggtcaaagtgaacgaatcgatcag

SEQ ID NO: 425479 - DNA, 75 bp, synthetic construct
  source 1..75: mol_type = other DNA
tttctgccgcgccgcaaagatcacgaatacagccttgatcactaccagcatcggttttatctgcgttccaaccgc

SEQ ID NO: 425480 - DNA, 75 bp, synthetic construct
  source 1..75: mol_type = other DNA
gctgcccgcctcatttttgccaggcgacagcttgttgatactggctggcgcattgattgcccagggggttatgga

SEQ ID NO: 425481 - DNA, 75 bp, synthetic construct
  source 1..75: mol_type = other DNA
gtttgaccgccacggtctgctggcgctgctggctggacgttttcttgcatttgtccgtacgctgctgccaaccat

SEQ ID NO: 425482 - DNA, 75 bp, synthetic construct
  source 1..75: mol_type = other DNA
agtgataatatatggcagctattagacaccttatggaataaagcaaaggtgttaggtaaaacattacacgacatg

SEQ ID NO: 425483 - DNA, 75 bp, synthetic construct
  source 1..75: mol_type = other DNA
gaattaagcagatcaacctgccgaccgaagtgtctgaagcgatctacaaccgtatgcgtgccgagcgtgaagcgg

SEQ ID NO: 425484 - DNA, 75 bp, synthetic construct
  source 1..75: mol_type = other DNA
cttctacgcattcatccgtagcctgcgagcttatgagaaaagcttctctggtaatcaggacgtgatggtcatgag

SEQ ID NO: 425485 - DNA, 75 bp, synthetic construct
  source 1..75: mol_type = other DNA
accttagctggtaaactgtcgaccccaatggaagatgtcatgtgggatataatgaggatggctattattttatcc

SEQ ID NO: 425486 - DNA, 75 bp, synthetic construct
  source 1..75: mol_type = other DNA
ctctccgcaaaactggccgcagcactggccggggcgagtgctaccgtatccatgcaggggctggccgctgtaggt

SEQ ID NO: 425487 - DNA, 75 bp, synthetic construct
  source 1..75: mol_type = other DNA
ctggcttgggatattcgtcttaatgattatcaccgcgtttgtttccatgatagcggaagtcatgatcttattact

SEQ ID NO: 425488 - DNA, 75 bp, synthetic construct
  source 1..75: mol_type = other DNA
cagggctcactctggtgctggtactcaatcgcttcgatgagatcccggaatttgtccagtttgcgggcgtactgg

SEQ ID NO: 425489 - DNA, 75 bp, synthetic construct
  source 1..75: mol_type = other DNA
tgttgtttgtttcgcaccacgctgaagatgcgcctgcctgtattacccatcgtctggagttcgtgccggacggtg

SEQ ID NO: 425490 - DNA, 75 bp, synthetic construct
  source 1..75: mol_type = other DNA
cgatggcctggatgttgcctcacgtcagcagctggctgagctactcgcctcgttacatcagtccggtattactct

SEQ ID NO: 425491 - DNA, 75 bp, synthetic construct
  source 1..75: mol_type = other DNA
gggccgcatcatgcgtggtgaaggcgatgccgaagcagccaaactgtttgctgatgcattcagtaaagatccgga

SEQ ID NO: 425492 - DNA, 75 bp, synthetic construct
  source 1..75: mol_type = other DNA
gtggcgacatttcgcaagcggaagtgctgttgaaacgtaagttctctgaccgtctgcgttctgaaattggtcgcc

SEQ ID NO: 425493 - DNA, 75 bp, synthetic construct
  source 1..75: mol_type = other DNA
ctcaccatgccgaagatgcgccagcctgcatcacccatcgactggagttcgtgccgaacggcgaccactatcgct

SEQ ID NO: 425494 - DNA, 75 bp, synthetic construct
  source 1..75: mol_type = other DNA
ggtatcgctggatatcgctgaactgaagcgtcgtatgtgccgggaaatcccggaagtccgcaatgtgcaccatgt

SEQ ID NO: 425495 - DNA, 75 bp, synthetic construct
  source 1..75: mol_type = other DNA
gatatagcgatgtttgatgccacgctgagttttctggagcatggactgatggcatatatcgcgactgggaagtca

SEQ ID NO: 425496 - DNA, 75 bp, synthetic construct
  source 1..75: mol_type = other DNA
tgatggcatatatcgcgacagggaagtcaccacaacgtctgggaaatcgccatccctacatggcaccttttgatg

SEQ ID NO: 425497 - DNA, 75 bp, synthetic construct
  source 1..75: mol_type = other DNA
tatgccaggcactggagcttacggaactggttaatgatccccgatttagcagcaatattttacgcgtacaaaacc

SEQ ID NO: 425498 - DNA, 75 bp, synthetic construct
  source 1..75: mol_type = other DNA
cagatggggtagcagatatgatttccaccaatacaaaatatttagtatggaacaacaaaggtggtgtaggaaaaa

SEQ ID NO: 425499 - DNA, 75 bp, synthetic construct
  source 1..75: mol_type = other DNA
atatgttaaagagttttatttctacaaaccccgaacttatcacaattaatttactacataagataaatgaaataa

SEQ ID NO: 425500 - DNA, 75 bp, synthetic construct
  source 1..75: mol_type = other DNA
ccttattaaaaagagaacatcttttaaaaaacacaaataatacctcgccacttacacagatcagaaactctcttg

SEQ ID NO: 425501 - DNA, 75 bp, synthetic construct
  source 1..75: mol_type = other DNA
ccgtccagatggagtaccagccttgccgcgggccggattgccaccttaaccagggagcatccggccattcacatc

SEQ ID NO: 425502 - DNA, 75 bp, synthetic construct
  source 1..75: mol_type = other DNA
caccacacgatcacgacgctttgttggaacagatccagcattatctgatggagcattatcagattgaacacgcca

SEQ ID NO: 425503 - DNA, 75 bp, synthetic construct
  source 1..75: mol_type = other DNA
cacatgcttactgatactgcggctctgcttttcgccctgcttgccgtacaattttctcgtcgcccacctaccatt

SEQ ID NO: 425504 - DNA, 75 bp, synthetic construct
  source 1..75: mol_type = other DNA
atatattgagcggacgttaaaaacgcaggcagctgaagtttggttagccagaatacatgaagttggtgtacccgt

SEQ ID NO: 425505 - DNA, 75 bp, synthetic construct
  source 1..75: mol_type = other DNA
aaatccgcacgagtctcgataaagcaaggatgtataccatccttgctccggtagcggcgatgtttatctcggctg

SEQ ID NO: 425506 - DNA, 75 bp, synthetic construct
  source 1..75: mol_type = other DNA
gcttggcatatttattttaatgcttattacagcttttgtttcaatgatagctgaagtgatgattctattactgag

SEQ ID NO: 425507 - DNA, 75 bp, synthetic construct
  source 1..75: mol_type = other DNA
cgcaccacgctgaagatgcgcctgcctgtattacccatcgtcttgagttcgtgccggacggtggactctatcgct

SEQ ID NO: 425508 - DNA, 75 bp, synthetic construct
  source 1..75: mol_type = other DNA
gcgtcgactggagcgcaccatcagtgggcgatcccgttactgttgtttctgagggtggggatacgcggaacggtg

SEQ ID NO: 425509 - DNA, 75 bp, synthetic construct
  source 1..75: mol_type = other DNA
ggctgtatattggtgaactggtgcttgacgatcctacattccataaaaaagaaaccactcttttagccagccgta

SEQ ID NO: 425510 - DNA, 75 bp, synthetic construct
  source 1..75: mol_type = other DNA
catcgcatttggaggacgagataagtaatacctgtaagcttactagttttgtgatgggcaattacattgagtttc

SEQ ID NO: 425511 - DNA, 75 bp, synthetic construct
  source 1..75: mol_type = other DNA
atgaccacctttacccaaaaagaactgattaaagaaattaaagaacgcatcagcagcctcgacgtacgagacgat

SEQ ID NO: 425512 - DNA, 75 bp, synthetic construct
  source 1..75: mol_type = other DNA
atgtgcagcactggaaaaaaagtaataccagtgtcagctgaactgccgccagcaaatgaaagtgttctgttattt

SEQ ID NO: 425513 - DNA, 75 bp, synthetic construct
  source 1..75: mol_type = other DNA
tagttatgctcgggctgcacattgacgacaaagctccgccaagcaatgacccccatgatcatgtcactgcatact

SEQ ID NO: 425514 - DNA, 75 bp, synthetic construct
  source 1..75: mol_type = other DNA
ctatcgttgatttttcagagcaagtcaaagccattgtagaagattttcaaactggcagaaaaaaatgggttttca

SEQ ID NO: 425515 - DNA, 75 bp, synthetic construct
  source 1..75: mol_type = other DNA
atggtctggcgtacctggaattttgaggacggtgccgggtactggttgaaccatgccatcagggatttcgggatt

SEQ ID NO: 425516 - DNA, 75 bp, synthetic construct
  source 1..75: mol_type = other DNA
aggactgtgccgggtactggatgaaccagtcatcagggatttcgggattcgtaagtaagagaggtgccggacggg

SEQ ID NO: 425517 - DNA, 75 bp, synthetic construct
  source 1..75: mol_type = other DNA
gttagagccactaggaatggtggctatcacaagaaggcgcatttcagatttaccggtgaagatggtcaaggccat

SEQ ID NO: 425518 - DNA, 75 bp, synthetic construct
  source 1..75: mol_type = other DNA
tttgcagcacttttgttgttcgtgtcagattgggacctcaacattgctattggtaagttttctaagattgccaga

SEQ ID NO: 425519 - DNA, 75 bp, synthetic construct
  source 1..75: mol_type = other DNA
ctggtctggcgaaactggaattatgaatccggtgccaatgatgcgctcaatagctacctgcaaagccatgggctg

SEQ ID NO: 425520 - DNA, 75 bp, synthetic construct
  source 1..75: mol_type = other DNA
atgaccacctttacccaaaaagaactgattaaagaaattaaagatcgcatcagcagcctcgacgttcgagacgat

SEQ ID NO: 425521 - DNA, 75 bp, synthetic construct
  source 1..75: mol_type = other DNA
tattgagcgccgtgcttatgaaatcgcactcctatctctggaagtagagccagatgaacgcgaagcctatgaatt

SEQ ID NO: 425522 - DNA, 75 bp, synthetic construct
  source 1..75: mol_type = other DNA
tatgttccgtaaactgaaagtttacgcgggtaacgagcacaaccacgcggcacagcaaccgcaagttcttgacat

SEQ ID NO: 425523 - DNA, 75 bp, synthetic construct
  source 1..75: mol_type = other DNA
gaacgcttaccgcgcctttcaatacaggagccgttggttctattactggtgcttctgattttgctaatgtatata

SEQ ID NO: 425524 - DNA, 75 bp, synthetic construct
  source 1..75: mol_type = other DNA
tggcttcaccacaaattgcagatgtcgattttactgagccgggaagacataacgcctgtagctttattatcaacg

SEQ ID NO: 425525 - DNA, 75 bp, synthetic construct
  source 1..75: mol_type = other DNA
aagggtttcttcgtgggagatgtgtaccgcgagatctgaaagtgaatgaaacagatgctgaatacctggtacgta

SEQ ID NO: 425526 - DNA, 75 bp, synthetic construct
  source 1..75: mol_type = other DNA
gggggcaaaaagaaaccggagaatggcagtggacatttcaggtcggggaccttgaaaacgtcaatatcactcact

SEQ ID NO: 425527 - DNA, 75 bp, synthetic construct
  source 1..75: mol_type = other DNA
atgtcatggcagcaattcaaacacgcttggttgattaaattctgggcacccatccctgcggtcatcgcggcgggt

SEQ ID NO: 425528 - DNA, 75 bp, synthetic construct
  source 1..75: mol_type = other DNA
atgaccacctttacccaaaaagaactgattaaagaaattaaagagcgcatcagcagcctcgacgtgcgagacgat

SEQ ID NO: 425529 - DNA, 75 bp, synthetic construct
  source 1..75: mol_type = other DNA
atgaccacctttacccaaaaagaactgattaaagaaattaaagaccgcatcagcagcctcgacgtccgagacgat

SEQ ID NO: 425530 - DNA, 75 bp, synthetic construct
  source 1..75: mol_type = other DNA
tgccgctgctctgtgggccaacaacgttaaattacgtatgccgcgcagccgtatccgcattatgcaggccattat

SEQ ID NO: 425531 - DNA, 75 bp, synthetic construct
  source 1..75: mol_type = other DNA
ggcgcgacgtcgtttccgtctcgggatgctggtctttttcggcatgttgggttgggccctgctgactgcaatgaa

SEQ ID NO: 425532 - DNA, 75 bp, synthetic construct
  source 1..75: mol_type = other DNA
tgccgcagcgctgtgggccaacaatgtcaaactgcgcatgccgcgcagccgtatccgcattatgcaggccattat

SEQ ID NO: 425533 - DNA, 75 bp, synthetic construct
  source 1..75: mol_type = other DNA
ttgttcttttattcactgccagtaaagactaatcatcatccttactggattaaaagtggtgtggttaaaagattt

SEQ ID NO: 425534 - DNA, 75 bp, synthetic construct
  source 1..75: mol_type = other DNA
gtcttctgaaagcgattgttatctaccatcccgttttattattcttccagctccattaaggcaaaaagtaaaaag

SEQ ID NO: 425535 - DNA, 75 bp, synthetic construct
  source 1..75: mol_type = other DNA
attagtaaaagaaagagaaatcattaacagcaggaagaaacataaacaggagcagggaccatcgctggctgaact

SEQ ID NO: 425536 - DNA, 75 bp, synthetic construct
  source 1..75: mol_type = other DNA
gtcagggcaccatattattctgaaagcccgacagaatacatctgcagtggtcatgagaacggtggctacagtggt

SEQ ID NO: 425537 - DNA, 75 bp, synthetic construct
  source 1..75: mol_type = other DNA
gaacgagctgattatcggggttgatgacacctttcctttttctctgcttgcgccgcttattgaactcttttatca

SEQ ID NO: 425538 - DNA, 75 bp, synthetic construct
  source 1..75: mol_type = other DNA
gaatgagctggtgataggcgtcgatgatacctttcctttttcactgcttgcgccactcattgaagctttttatca

SEQ ID NO: 425539 - DNA, 75 bp, synthetic construct
  source 1..75: mol_type = other DNA
ggtaatgtaaaccttatctatccgtgtgtttacaataaagcttccgaattagagcttcatagtctctctaaaatt

SEQ ID NO: 425540 - DNA, 75 bp, synthetic construct
  source 1..75: mol_type = other DNA
gcaattcaatggtttcatggccattcttttgatttaaataaaaggcaagtaaaacaacatcgagcaagattaaga

SEQ ID NO: 425541 - DNA, 75 bp, synthetic construct
  source 1..75: mol_type = other DNA
tcttcatcaccagagttaatttcatctattagacaatggacacctttagtattcggattcactacaacaacatta

SEQ ID NO: 425542 - DNA, 75 bp, synthetic construct
  source 1..75: mol_type = other DNA
tgggcggaactccggttgatgtctttcgtaataaagagttaatgacaattttcacccccatcattaaaaacgatt

SEQ ID NO: 425543 - DNA, 75 bp, synthetic construct
  source 1..75: mol_type = other DNA
ggaaacgccttgctcatttatccgactgtatataacaaagcacatgaaattaagcttcactcccttaataaaata

SEQ ID NO: 425544 - DNA, 75 bp, synthetic construct
  source 1..75: mol_type = other DNA
tattgattattgtcgtgaatctggcattgtgcgctttgagcaaaaattgaaatctagatttttacagcgtaaagg

SEQ ID NO: 425545 - DNA, 75 bp, synthetic construct
  source 1..75: mol_type = other DNA
ccgagctggcgaaaagcttttccggcgtctgggcgctgagcaatgcccagttgaccgtcgggccaggagaaatcc

SEQ ID NO: 425546 - DNA, 75 bp, synthetic construct
  source 1..75: mol_type = other DNA
ttcttggacttttgtatagtagtgcatttgaaaatagtaaaaacaccgggttgaataagattatattcataaata

SEQ ID NO: 425547 - DNA, 75 bp, synthetic construct
  source 1..75: mol_type = other DNA
tttgagcgaacctatctgatagaatcaaatgatccattgattattaatgaatacttaggaaatggtggaaacatc

SEQ ID NO: 425548 - DNA, 75 bp, synthetic construct
  source 1..75: mol_type = other DNA
tgcgcggtgagataggtggtgtatacagagatgcccgtgctcatactgacagtcaggtcacagcagtacgtgatg

SEQ ID NO: 425549 - DNA, 75 bp, synthetic construct
  source 1..75: mol_type = other DNA
tatttggttaaactagataggaaaagtattcctgatgttcttatggggaatagatttattgatactttttctaga

SEQ ID NO: 425550 - DNA, 75 bp, synthetic construct
  source 1..75: mol_type = other DNA
tgacgcaagctatcgctgattatctctcaacatttgagcgttgcgaactcgatgggatactgtttacttccgcgc

SEQ ID NO: 425551 - DNA, 75 bp, synthetic construct
  source 1..75: mol_type = other DNA
atcggggcggagaatataaccattatctggaagagtatgaaggtgaacctctcttctctattctggagcaagagg

SEQ ID NO: 425552 - DNA, 75 bp, synthetic construct
  source 1..75: mol_type = other DNA
attcaacggcgggtattatctggattgatggtggcggtcagtcacttgaaaaagtagctgtgattgaccgtcaac

SEQ ID NO: 425553 - DNA, 75 bp, synthetic construct
  source 1..75: mol_type = other DNA
cttgaaagtgcaagtgtgattgacagaaatggaaatgctaacggtgatgctagtgttactggaaaaaactttgct

SEQ ID NO: 425554 - DNA, 75 bp, synthetic construct
  source 1..75: mol_type = other DNA
acgtcgcgccgaccacccccgttgcccgcctgagcgtggcccagcagcagatggtcgagatcgcgagagcgctga

SEQ ID NO: 425555 - DNA, 75 bp, synthetic construct
  source 1..75: mol_type = other DNA
taaatcaatgttcagaatgccgatgatagctgcattcctgacggttatattaggtatggctatcttgatgggcta

SEQ ID NO: 425556 - DNA, 75 bp, synthetic construct
  source 1..75: mol_type = other DNA
catcggcagtgccggcgcaagcctgacggaagtgatattacttaaatcaatgttcagaatgccgatgatagctgc

SEQ ID NO: 425557 - DNA, 75 bp, synthetic construct
  source 1..75: mol_type = other DNA
cttaatcccattatcgtcggactaatgtgggtgacctttggttggaaagtcaccttgttgtacgcgattatcgcc

SEQ ID NO: 425558 - DNA, 75 bp, synthetic construct
  source 1..75: mol_type = other DNA
accacatcttgctgtaccgcaaaacctgctgttaattgctgtagtgcagccaaaacggctccccccagcctgctg

SEQ ID NO: 425559 - DNA, 75 bp, synthetic construct
  source 1..75: mol_type = other DNA
cgcccagtaaaggtattgctgaatttgctgctggcgaaataggtgagaaagagatcaagaaggcaagtgagaact

SEQ ID NO: 425560 - DNA, 75 bp, synthetic construct
  source 1..75: mol_type = other DNA
gcgaacctggttgaagagaaaattgagaaaaccgccatctccattcgagctgtgctgaccaactacgtcaaggct

SEQ ID NO: 425561 - DNA, 75 bp, synthetic construct
  source 1..75: mol_type = other DNA
gatgcgcgaagacgacgatcggagctacgagaagctggtcgataccatgctgtccattaagatcgacaagctgcg

SEQ ID NO: 425562 - DNA, 75 bp, synthetic construct
  source 1..75: mol_type = other DNA
gagtccggccgccagctgatggatgcgctggtgacctttttatcgcgcaaccatcataatgtgattattgaaggt

SEQ ID NO: 425563 - DNA, 75 bp, synthetic construct
  source 1..75: mol_type = other DNA
cgcgtcatgtatgtcgcaaaatttgaagaagcggtttacgtattgcattgttttcaaaagaaaacacagactacc

SEQ ID NO: 425564 - DNA, 75 bp, synthetic construct
  source 1..75: mol_type = other DNA
agaacccgaaccacgcccggtaacgcgaaggcgtaaacctgaaacagaggaagaagaagttggcacgccagcccc

SEQ ID NO: 425565 - DNA, 75 bp, synthetic construct
  source 1..75: mol_type = other DNA
ggatgacgtacaggctatcgcccgtaggctggcatcggcaaactgctctggtagcggtaaggctgtttgtatcta

SEQ ID NO: 425566 - DNA, 75 bp, synthetic construct
  source 1..75: mol_type = other DNA
atgccagaaattgcatccctacaacttttcaaaatactatctgatgaaacccgcctgggtatcgtgctactgctc

SEQ ID NO: 425567 - DNA, 75 bp, synthetic construct
  source 1..75: mol_type = other DNA
attccattctgggctgctcaggtgattgagcaggcctggttaagccaacaggacgatgtacaggccatcgcccgt

SEQ ID NO: 425568 - DNA, 75 bp, synthetic construct
  source 1..75: mol_type = other DNA
ggtttctcttgttatctgtatcgtgacgttcttcatcgccagctgggtgctgggccgccaggggaaacagcagag

SEQ ID NO: 425569 - DNA, 75 bp, synthetic construct
  source 1..75: mol_type = other DNA
catattccttcctgggccgctcaggtgattgagcaggcctggttaagccaacaggacgacgtgcagaccatcgcc

SEQ ID NO: 425570 - DNA, 75 bp, synthetic construct
  source 1..75: mol_type = other DNA
acaggacgacgttcaggtcatcgcacgcaagctggcttcagttaactgctccggtagcagtaaggctgtctgcat

SEQ ID NO: 425571 - DNA, 75 bp, synthetic construct
  source 1..75: mol_type = other DNA
gcctgcgttcacttatttcacgtaacccgtttgcaccgcgtgaaattgagccggttattggtgaagccgttgatg

SEQ ID NO: 425572 - DNA, 75 bp, synthetic construct
  source 1..75: mol_type = other DNA
gactccgacgagccgccggtagttcgctacgacgtgcagaacaaagcgggcgtttccaacctgctggatatcctt

SEQ ID NO: 425573 - DNA, 75 bp, synthetic construct
  source 1..75: mol_type = other DNA
cgacgctggatacgctggccttgtatctggcttgtggtatcgatcctgagaaaagcaccatttttgttcagtccc

SEQ ID NO: 425574 - DNA, 75 bp, synthetic construct
  source 1..75: mol_type = other DNA
acttttataaaaattgtattaaacatgcactgccatggatggtgttggctattttgtttcattacagcgccttgc

SEQ ID NO: 425575 - DNA, 75 bp, synthetic construct
  source 1..75: mol_type = other DNA
ctgaaatcgatgtttcgcacgccgatgattattgcctttctgatggtaattttaggaatggcagtggtcatggga

SEQ ID NO: 425576 - DNA, 75 bp, synthetic construct
  source 1..75: mol_type = other DNA
cggtatgctgactgaattgcaggaacgctatcaccgtttccgcaacgatgaagccttcctgcaacaggtgatgaa

SEQ ID NO: 425577 - DNA, 75 bp, synthetic construct
  source 1..75: mol_type = other DNA
gctacgacgtgcagaacaaagcgggggtttctaacctgctggatatcctttctgcagtgactggccagagcatcc

SEQ ID NO: 425578 - DNA, 75 bp, synthetic construct
  source 1..75: mol_type = other DNA
ctatcaccgcgtgagcttatttatcagcagtctgattttgctcgcctggacagccgccctcggcgttgctggtct

SEQ ID NO: 425579 - DNA, 75 bp, synthetic construct
  source 1..75: mol_type = other DNA
gaattttgttcagtatcacaccactgttaacgtcaccatgacagacattcttcgtctgatcctgcgtatgcgacc

SEQ ID NO: 425580 - DNA, 75 bp, synthetic construct
  source 1..75: mol_type = other DNA
aaattttgttcagtatcacaccactgttgacgtcaccatgacagacattcttcgtctgatcctgcgtatgcgacc

SEQ ID NO: 425581 - DNA, 75 bp, synthetic construct
  source 1..75: mol_type = other DNA
agataaattacaattaattataaatggtaataataatagcgatagcaatggttccattctatatttttatggagg

SEQ ID NO: 425582 - DNA, 75 bp, synthetic construct
  source 1..75: mol_type = other DNA
gtggattcctggctctgctgcgcaaacaattaattgtgatgcgtcgctatatggcaccgcaacgtgatgtttatg

SEQ ID NO: 425583 - DNA, 75 bp, synthetic construct
  source 1..75: mol_type = other DNA
cgagccttcgccggctgtgccggctacgacgtggtgggaatatttaaggaaacaggttcaggaactaaactcgac

SEQ ID NO: 425584 - DNA, 75 bp, synthetic construct
  source 1..75: mol_type = other DNA
ctactggtacaagtatgttggcctgaacggtgctatcgtcggcatgaccaccttcggtgaatctgctccggcaga

SEQ ID NO: 425585 - DNA, 75 bp, synthetic construct
  source 1..75: mol_type = other DNA
acaagtgataaaaaatggctcgttcgtgcgtgggtgactaattatgctgacaatattaaaactgataaattcatt

SEQ ID NO: 425586 - DNA, 75 bp, synthetic construct
  source 1..75: mol_type = other DNA
ttaatagcagaatcaaactcatttatcggcctcataagcttaacgaaacagacaaagttaatgctgcatttaagt

SEQ ID NO: 425587 - DNA, 75 bp, synthetic construct
  source 1..75: mol_type = other DNA
catttcacgaactggagcgggtgcttaatttcccgcaatcaagtctgtgcctcaaacgagagaaacaagacgaaa

SEQ ID NO: 425588 - DNA, 75 bp, synthetic construct
  source 1..75: mol_type = other DNA
gtggttatgtgctgaaagactgtgctggtcagccggaactgatcttcatcgcgaccggttctgaagttgaactgg

SEQ ID NO: 425589 - DNA, 75 bp, synthetic construct
  source 1..75: mol_type = other DNA
aacggtgctatcgtcggtatgaccaccttcggtgaatctgctccggcagagctgctgtttgaagagttcggcttc

SEQ ID NO: 425590 - DNA, 75 bp, synthetic construct
  source 1..75: mol_type = other DNA
cgaagacggcccgactcaccagccggttgagcaggtcgcttctctgcgcgtaaccccgaacatgtctacatggcg

SEQ ID NO: 425591 - DNA, 75 bp, synthetic construct
  source 1..75: mol_type = other DNA
gaactgatcttcatcgcgaccggttctgaagttgaactggcggttgctgcctacgaaaaactgactgccgaaggc

SEQ ID NO: 425592 - DNA, 75 bp, synthetic construct
  source 1..75: mol_type = other DNA
cagctgggctggaaatatgcaccgttcgaaatcccgtctgaaatctatgctcagtgggatgcgaaagaagcaggc

SEQ ID NO: 425593 - DNA, 75 bp, synthetic construct
  source 1..75: mol_type = other DNA
ttggctgacaccgcgcggtggtgagctaatcgcctatctcggacattaccaacgccagcgtctggtagccgacgg

SEQ ID NO: 425594 - DNA, 75 bp, synthetic construct
  source 1..75: mol_type = other DNA
gtgaaggcgcgcgtggtttccatgccgtctaccgatgcattcgacaagcaggatgcggcttaccgtgaatccgta

SEQ ID NO: 425595 - DNA, 75 bp, synthetic construct
  source 1..75: mol_type = other DNA
aggttgcccgcagccgcgccaccccgttgttggatttgatcatgacagcgttgatgccccatccaccgcaaaaac

SEQ ID NO: 425596 - DNA, 75 bp, synthetic construct
  source 1..75: mol_type = other DNA
cctctaaaaactggcgtttgccaactggataacgcgaacgtgactgacgcgatcctcagcagggcaggagggtca

SEQ ID NO: 425597 - DNA, 75 bp, synthetic construct
  source 1..75: mol_type = other DNA
gctatcctggcgctggaaaaggagtacgccaacaaaaagctggcggcttacgtcttcccaggcagaaatttatcg

SEQ ID NO: 425598 - DNA, 75 bp, synthetic construct
  source 1..75: mol_type = other DNA
cagattgtacagtttactgccgcagatgcgctggctgccgatcgccagttgttttcatctccagcggatatcacg

SEQ ID NO: 425599 - DNA, 75 bp, synthetic construct
  source 1..75: mol_type = other DNA
ctggaaaaagagtacgccaacaaaaagctggcggcttacatcttcccaggcagaaatttatcgttaacagtagac

SEQ ID NO: 425600 - DNA, 75 bp, synthetic construct
  source 1..75: mol_type = other DNA
gcagaatggagcatgttggttcagttgtttaatcagcgattactggaacggatccagtccggtgagttgaagact

SEQ ID NO: 425601 - DNA, 75 bp, synthetic construct
  source 1..75: mol_type = other DNA
ctttagtggcaacactgttgttgcttcctggacgacttattgccgcggcattaccacaggatgacaagttaatta

SEQ ID NO: 425602 - DNA, 75 bp, synthetic construct
  source 1..75: mol_type = other DNA
aataatatgcaggatgctgcgaatgcattaatggcagagttggcaaccctcgatcaacatggtttttctgctgaa

SEQ ID NO: 425603 - DNA, 75 bp, synthetic construct
  source 1..75: mol_type = other DNA
cttgccggatgtaaggaaataaacgcgcagggtatgtgttcgctggtgggttttacgcaaatagtgaacaaaatg

SEQ ID NO: 425604 - DNA, 75 bp, synthetic construct
  source 1..75: mol_type = other DNA
atttctcctgcaacaagcacagggaatgccggagccggggtggggaaggatcaccgattcacaccagtggaacac

SEQ ID NO: 425605 - DNA, 75 bp, synthetic construct
  source 1..75: mol_type = other DNA
ggacacgatactaatctggcaaatctcggcggcgcactggagctcaactggacgcttccaggtcagccggataac

SEQ ID NO: 425606 - DNA, 75 bp, synthetic construct
  source 1..75: mol_type = other DNA
tgatcagcatggtttttctgctgaagaactcgatgatgtcaaatctacccgcctcacctggctgaaaaatgcggt

SEQ ID NO: 425607 - DNA, 75 bp, synthetic construct
  source 1..75: mol_type = other DNA
gaagtagacgctgaacgcggcgtaattactgaggaatggcgtgcccatcaggatgcgaaatggcgcacctctcag

SEQ ID NO: 425608 - DNA, 75 bp, synthetic construct
  source 1..75: mol_type = other DNA
cgtaaaacaggcgaagcctttgctgccgggctggctcccgactgtgcaataaccgtacatactcagtcagacact

SEQ ID NO: 425609 - DNA, 75 bp, synthetic construct
  source 1..75: mol_type = other DNA
aaagccgggagtgctggcggcaggtaattatgaggggcgcctgaatattgttttggctcaaagtactaataccta

SEQ ID NO: 425610 - DNA, 75 bp, synthetic construct
  source 1..75: mol_type = other DNA
ggcttcctgccgtacacctcgacgttcctgatgtttgtcgaatacgcacgcaacgcggtgcgcatggcggcgctg

SEQ ID NO: 425611 - DNA, 75 bp, synthetic construct
  source 1..75: mol_type = other DNA
tataccaatgctaatagcgtgacttccttaggtgcaaggctggcaatgtacgaaattggtttggatatattcaaa

SEQ ID NO: 425612 - DNA, 75 bp, synthetic construct
  source 1..75: mol_type = other DNA
atgggctcgcagcattccgattatcgttatatccgctatagccctcttactcgttattaataattgcaaaaatac

SEQ ID NO: 425613 - DNA, 75 bp, synthetic construct
  source 1..75: mol_type = other DNA
atcggcacagcaatggatttaacaccaactattttggttatgactccagtacttgttcctttaattaaacaagct

SEQ ID NO: 425614 - DNA, 75 bp, synthetic construct
  source 1..75: mol_type = other DNA
gatagcagctgcttattcattatttgtcggtgtgtttatttatcgcggcataaacttagggtcgatttatggatt

SEQ ID NO: 425615 - DNA, 75 bp, synthetic construct
  source 1..75: mol_type = other DNA
tgggcatgatcctgaatccatccgtgccgcgattgatgttgcaaagtcgattaccaccatgccgacgttaattat

SEQ ID NO: 425616 - DNA, 75 bp, synthetic construct
  source 1..75: mol_type = other DNA
ccttaggtgcaagactagcaatgtatgaaattggtttagatatattcaaagaatcacctttttcatttagatctg

SEQ ID NO: 425617 - DNA, 75 bp, synthetic construct
  source 1..75: mol_type = other DNA
cattgaaaccttacactctgaaatcatcaatgattttagagataataacttatatattatgttttttttcaatga

SEQ ID NO: 425618 - DNA, 75 bp, synthetic construct
  source 1..75: mol_type = other DNA
agggtttcaccctatcgtatatcaaaacggtgacctggcaggccgaacggttactgaatcaagaaacaccactgg

SEQ ID NO: 425619 - DNA, 75 bp, synthetic construct
  source 1..75: mol_type = other DNA
acgtacatctacataatgagataattgaagcagggtcactgaaaggtctgatgggaattttttccacacttttcc

SEQ ID NO: 425620 - DNA, 75 bp, synthetic construct
  source 1..75: mol_type = other DNA
ctgagaggggcattggatttttctaacgtacatctgcataatgagataattgaagctgcttcactgaaaggtatg

SEQ ID NO: 425621 - DNA, 75 bp, synthetic construct
  source 1..75: mol_type = other DNA
agccagctaaaatcaaaaaaagagagtgtattatacactttgtattctctgtcatttctaattgctggatatgca

SEQ ID NO: 425622 - DNA, 75 bp, synthetic construct
  source 1..75: mol_type = other DNA
atggcattattaatatttgcaggttcacttctgttatcgatgtttatctgtttacctatcgccttttcactaatt

SEQ ID NO: 425623 - DNA, 75 bp, synthetic construct
  source 1..75: mol_type = other DNA
gtgctggatatgatcgctactctcctttccgacggcgcatcggttgccgaagtcacccaggacaacagcgacgaa

SEQ ID NO: 425624 - DNA, 75 bp, synthetic construct
  source 1..75: mol_type = other DNA
cagcgaagaacagctggcaaactttacccgcttactcactcataatgaaaaaggcaaaacccgcctgtccagcgt

SEQ ID NO: 425625 - DNA, 75 bp, synthetic construct
  source 1..75: mol_type = other DNA
cggtcagcggcagtgcctatcgcgtgacaattccagccgtactgcaaatcgcctgcctgcgccggatggttagcg

SEQ ID NO: 425626 - DNA, 75 bp, synthetic construct
  source 1..75: mol_type = other DNA
gttaaaacttactggtgatgatccaagtaagcctgttgatatgacggtacttctgggggccaaacccctggggac

SEQ ID NO: 425627 - DNA, 75 bp, synthetic construct
  source 1..75: mol_type = other DNA
agtgtcgcatcggcactaacccgctgatcgtcgccattccttccacgccgatcaccatggtcgatatgtcgatgt

SEQ ID NO: 425628 - DNA, 75 bp, synthetic construct
  source 1..75: mol_type = other DNA
tgatcgtcgccattccttctaccccaatcaccatggtcgatatgtcgatgtcgatgttctcttacggcatgttag

SEQ ID NO: 425629 - DNA, 75 bp, synthetic construct
  source 1..75: mol_type = other DNA
cgatggtgaagtggtcggcggcggtgggattgcgccattaaccgggagtgagtcggacatttgcgaactgcaaaa

SEQ ID NO: 425630 - DNA, 75 bp, synthetic construct
  source 1..75: mol_type = other DNA
ttgtatcaagtgtatagtcagcctggccatgcatattgggtggttgagtacgagggtgaagtggtcggcggcggt

SEQ ID NO: 425631 - DNA, 75 bp, synthetic construct
  source 1..75: mol_type = other DNA
ctggcaggatgtgaagagcgaaatgcgcagggcatgtgttcgttggccggttttacgcaaatcgtgaatgaagca

SEQ ID NO: 425632 - DNA, 75 bp, synthetic construct
  source 1..75: mol_type = other DNA
atgaatgttaattacctgaatgattcagatctggattttctccagcattgcagtgaggaacagttggcaaatttc

SEQ ID NO: 425633 - DNA, 75 bp, synthetic construct
  source 1..75: mol_type = other DNA
tccgtttacgcaaacttactgctgccgataatgcagccatcgccagcgtcatccgccaggtttctgcagagtatg

SEQ ID NO: 425634 - DNA, 75 bp, synthetic construct
  source 1..75: mol_type = other DNA
ccttaatggcgatggaggaggcaagagaaatgggcttcaaacgctgctatctggaaacgaccgcttttttgaaag

SEQ ID NO: 425635 - DNA, 75 bp, synthetic construct
  source 1..75: mol_type = other DNA
ttggtgatatccaggatgacagcattctggagcacctggacgatgacagttcggcggaaactgtgcgtttccctg

SEQ ID NO: 425636 - DNA, 75 bp, synthetic construct
  source 1..75: mol_type = other DNA
cggcgggatgcaggtttatgttccgagggggaatattctggagaatcttgtccgggatatgcgtatctggcgtga

SEQ ID NO: 425637 - DNA, 75 bp, synthetic construct
  source 1..75: mol_type = other DNA
tcaacagccagtttaaaaatgatatgcagcgttacgcccaactgttctggcattgcacattaagtgacgccgact

SEQ ID NO: 425638 - DNA, 75 bp, synthetic construct
  source 1..75: mol_type = other DNA
tgattacccatgatatagaagaagcggtgtttatggcgaccgaactggttctgctttcaccggggccggggcgtg

SEQ ID NO: 425639 - DNA, 75 bp, synthetic construct
  source 1..75: mol_type = other DNA
gtacgttcatcgtggaaatgtaacttcattggttcactttgatgagataaaaaacctctggattccagtaaaaga

SEQ ID NO: 425640 - DNA, 75 bp, synthetic construct
  source 1..75: mol_type = other DNA
tataaatatattcattttgaaataattgggaaaggtgattcatgtaaaaatttaattgagttttcatatcatgat

SEQ ID NO: 425641 - DNA, 75 bp, synthetic construct
  source 1..75: mol_type = other DNA
cccgccgatctgctgttgctgactgtcgcaccagaaaaactggttggtttttcctcttttgattttgcccgccag

SEQ ID NO: 425642 - DNA, 75 bp, synthetic construct
  source 1..75: mol_type = other DNA
cgccgcgattctattaacgtgcagaaactgattggtgcgacggatggtttcatcctccgcccattcctttatggt

SEQ ID NO: 425643 - DNA, 75 bp, synthetic construct
  source 1..75: mol_type = other DNA
cgcaaattaccgtctatctgcaaaaaacgctggacgatgacgccgcggcgggtgtggtagcgcagttacaggccg

SEQ ID NO: 425644 - DNA, 75 bp, synthetic construct
  source 1..75: mol_type = other DNA
ctgtcgcgccagaaaaaatggtcggtttttcctcttttgattttgcccgtcaggcattaattccattgccaaagc

SEQ ID NO: 425645 - DNA, 75 bp, synthetic construct
  source 1..75: mol_type = other DNA
cagttaacaacgcttggcaaaacgttaggcgaagagcatcgcgccgcagaacaagccaatctcgccagccgcttc

SEQ ID NO: 425646 - DNA, 75 bp, synthetic construct
  source 1..75: mol_type = other DNA
aggcttacacaatgtggcgcaaatagccgatcgccacggactgacgcaggtttccatggagaatctgctacgctg

SEQ ID NO: 425647 - DNA, 75 bp, synthetic construct
  source 1..75: mol_type = other DNA
gttgctgaatttgattgctggttttgtgccttatcagcatggcagcattcaactggcgggtaagggtattcaggg

SEQ ID NO: 425648 - DNA, 75 bp, synthetic construct
  source 1..75: mol_type = other DNA
aggagataaattttacatagccaacagtatggggtttgcagctgtagctctattgtttaccggtgcttgttacaa

SEQ ID NO: 425649 - DNA, 75 bp, synthetic construct
  source 1..75: mol_type = other DNA
aggagataaatttcacatagctaacagtatggggtttgcagctgcagctctattgtttatcggtgtctgttacaa

SEQ ID NO: 425650 - DNA, 75 bp, synthetic construct
  source 1..75: mol_type = other DNA
gttgagtttttgcctgtcagtttgttgacgccaatggcccaggatttaggcatttcggaaggggttgccgggcaa

SEQ ID NO: 425651 - DNA, 75 bp, synthetic construct
  source 1..75: mol_type = other DNA
gactgagaaacactgatgctcgtcttacaaatgaacttcctggggcattgtctgaagatgttctgcttaaatact

SEQ ID NO: 425652 - DNA, 75 bp, synthetic construct
  source 1..75: mol_type = other DNA
ttccctggcgggctttattctgatggcggggatagcgtcgtcactcggggataactatctcaatactgcgatagc

SEQ ID NO: 425653 - DNA, 75 bp, synthetic construct
  source 1..75: mol_type = other DNA
gttcaaagggcattgggatttcgacttctagcaatgccttatgtatttttagtgatagcgaaaacaaatacacac

SEQ ID NO: 425654 - DNA, 75 bp, synthetic construct
  source 1..75: mol_type = other DNA
ggtctggctacggtatatcgcgtactgaaccagtttgacgacgctggtatcgtcacccgccacaattttgaaggc

SEQ ID NO: 425655 - DNA, 75 bp, synthetic construct
  source 1..75: mol_type = other DNA
cgcttacactgaatcaaaagcgtactactcaaatttcagacttactaaattaggacttgatggtattattgatgt

SEQ ID NO: 425656 - DNA, 75 bp, synthetic construct
  source 1..75: mol_type = other DNA
ggcgcaatgtgcaggataacgtggcgtttggcctgcaactggcggggatggagaaaacgccacgtctggaaatcg

SEQ ID NO: 425657 - DNA, 75 bp, synthetic construct
  source 1..75: mol_type = other DNA
gcacgctataacgggcataaagcctttaacgaccaaatccgcgcagactggatgctgattattgaatccagccca

SEQ ID NO: 425658 - DNA, 75 bp, synthetic construct
  source 1..75: mol_type = other DNA
aggctggtcgcgaaatgagcgatgaagagctcaaagaaaacccagctgtagagcaagaatgggacattcagtggg

SEQ ID NO: 425659 - DNA, 75 bp, synthetic construct
  source 1..75: mol_type = other DNA
tttttagctacggcacacagcatgttggttcgctttactactgcataccggccaggaattttgatacgactcaaa

SEQ ID NO: 425660 - DNA, 75 bp, synthetic construct
  source 1..75: mol_type = other DNA
aattctggtactgcgtttgtcatcggcggttgcggaagtggcacaggttttcggaacgaagtttgatatcaatgg

SEQ ID NO: 425661 - DNA, 75 bp, synthetic construct
  source 1..75: mol_type = other DNA
cgcccatgcgagatgcacgtcattggcaaaatcaaaaatcacatactgaaaatgccgttatcgggaagcgtagtg

SEQ ID NO: 425662 - DNA, 75 bp, synthetic construct
  source 1..75: mol_type = other DNA
agcccggcacgcgatgccgccattgcccgcgaagctattttgcacggtgccgatgctgtttatatcggcggccct

SEQ ID NO: 425663 - DNA, 75 bp, synthetic construct
  source 1..75: mol_type = other DNA
ctgcagcattagttacatcatattatccactgatttcaaagtcacctaccagagaaaatattagattttattttg

SEQ ID NO: 425664 - DNA, 75 bp, synthetic construct
  source 1..75: mol_type = other DNA
gatggtaaaacggtgctattcgcggcgttgaccggcagcctggaaaaccatccggatggctttaattttaaataa

SEQ ID NO: 425665 - DNA, 75 bp, synthetic construct
  source 1..75: mol_type = other DNA
gccgggtgcgctgtttgtaccaaacagtctgttaaaccagttccgccgtgaagccgccgacatgctggatgctgc

SEQ ID NO: 425666 - DNA, 75 bp, synthetic construct
  source 1..75: mol_type = other DNA
agtcgtcggttttcgtgccaatacggtagagaaaaccggagaaaatcagtaccgcgtctggcccaatgaaatgcc

SEQ ID NO: 425667 - DNA, 75 bp, synthetic construct
  source 1..75: mol_type = other DNA
cgtgtttaacgcatcttacgttaaagcaccgaacagcccggctgttactgctggtcatgtaaccactaacgcact

SEQ ID NO: 425668 - DNA, 75 bp, synthetic construct
  source 1..75: mol_type = other DNA
gatggtgtagttactctggatactgcgaacgtaacggataactttactgaagtaagcacaacggctgtcggttta

SEQ ID NO: 425669 - DNA, 75 bp, synthetic construct
  source 1..75: mol_type = other DNA
aattgtttgcttattttttctacgcctctataaaaatgggtttgacgaaatcaaatattttcagaatgaaatcac

SEQ ID NO: 425670 - DNA, 75 bp, synthetic construct
  source 1..75: mol_type = other DNA
cggtttaccgctggataaccatccgcagtccaggaaaattcgtgcgctatggcttgaaatggttgctgccggcat

SEQ ID NO: 425671 - DNA, 75 bp, synthetic construct
  source 1..75: mol_type = other DNA
atgttacaggggctgaccggtaaagcctcaaccaaaggaatggataccacacaactaaactgcgtgctggaatcc

SEQ ID NO: 425672 - DNA, 75 bp, synthetic construct
  source 1..75: mol_type = other DNA
caaagcatctttaaccatgagttccattagctttgcaaatgccagcggcactctgaacaataatatgaacgtcac

SEQ ID NO: 425673 - DNA, 75 bp, synthetic construct
  source 1..75: mol_type = other DNA
tggccattattggttccatgagcgaaatcgctcaacagcagattgccacactgcattcacacccacgcaccacac

SEQ ID NO: 425674 - DNA, 75 bp, synthetic construct
  source 1..75: mol_type = other DNA
atttgtcgggcgatagtggatgtacacgggggcaccattaccgcgttcaaccgaccggaaggtggtgcctgtttt

SEQ ID NO: 425675 - DNA, 75 bp, synthetic construct
  source 1..75: mol_type = other DNA
cggtcgcccggcctcgcgccgctggtggcgtcgggaaacctttgccgaccgactggcgcgcatcgcccccgacct

SEQ ID NO: 425676 - DNA, 75 bp, synthetic construct
  source 1..75: mol_type = other DNA
caaccgaccggaaggtggtgcctgttttcgtgttacacttccccagcaaactgcccctgaacttgaagaatttca

SEQ ID NO: 425677 - DNA, 75 bp, synthetic construct
  source 1..75: mol_type = other DNA
tgatgtttccagaatgaaatattataactacgataatgagaagttttccacagcaatatttaatggagagaaatg

SEQ ID NO: 425678 - DNA, 75 bp, synthetic construct
  source 1..75: mol_type = other DNA
aactacgataatgagaagttttccacagcaatatttaatggagagaaattggagtttttacttttaatgacaaat

SEQ ID NO: 425679 - DNA, 75 bp, synthetic construct
  source 1..75: mol_type = other DNA
gacgtggtgctggtggacttgcccccggacgatctgcgtcaacggctgaaagaaggcaaagtctatattgccggg

SEQ ID NO: 425680 - DNA, 75 bp, synthetic construct
  source 1..75: mol_type = other DNA
aggaatcgatgcgcgaacgctacgtttttaccgatgttcagttacgcggttattatccgtcctatgtgttgaatg

SEQ ID NO: 425681 - DNA, 75 bp, synthetic construct
  source 1..75: mol_type = other DNA
cggtgatgacgaaagcaggcgggtttggcgatgggaccacgttgcgtcaggttctgaattttatcgaggagaaaa

SEQ ID NO: 425682 - DNA, 75 bp, synthetic construct
  source 1..75: mol_type = other DNA
cagaaaggcgaccactgcattgtccacacctgtaacgattctgtagcaaggcatcagatcgacaccctttgccag

SEQ ID NO: 425683 - DNA, 75 bp, synthetic construct
  source 1..75: mol_type = other DNA
tggatatgaccgcgcaagtgcatattcagctcaccgatgtgaaaaatgtgctgacgatccctctgtcggcgttag

SEQ ID NO: 425684 - DNA, 75 bp, synthetic construct
  source 1..75: mol_type = other DNA
agtgggagcgtcgcggatttaacatcaaaatggaagacggcgatctcgatgtactgcgcgaaggcacctgcgatt

SEQ ID NO: 425685 - DNA, 75 bp, synthetic construct
  source 1..75: mol_type = other DNA
atcttggtttcagctattacatgaccaacgcagtgaaggccgaaggcggcaccggcgatgcgatctctggttttg

SEQ ID NO: 425686 - DNA, 75 bp, synthetic construct
  source 1..75: mol_type = other DNA
acgccgcactggtcaaagccagctttgtgggcgaagcctggacccgcgccacagagcaggaaaaacgccgccagg

SEQ ID NO: 425687 - DNA, 75 bp, synthetic construct
  source 1..75: mol_type = other DNA
atgagcaggttgcgcgttttccggcagacaggatggtttatcgcgggcctgatggcgggcttacccgccagtgcc

SEQ ID NO: 425688 - DNA, 75 bp, synthetic construct
  source 1..75: mol_type = other DNA
gcgagaacggcaccctgctggagtccagccgggggctgtccgggattgatgaaattaagcaactgttcggcgcaa

SEQ ID NO: 425689 - DNA, 75 bp, synthetic construct
  source 1..75: mol_type = other DNA
acggacaagggggggaggaagagccatcatatcgatgccactgagccgctatcaaggttatctattgtagagggt

SEQ ID NO: 425690 - DNA, 75 bp, synthetic construct
  source 1..75: mol_type = other DNA
aatgttcaagtttgcacgcctcggcccaagcagcctgaaaaccggtcgctatcactttgagcagtcttccacgac

SEQ ID NO: 425691 - DNA, 75 bp, synthetic construct
  source 1..75: mol_type = other DNA
atgaccgcctgctggcaccgctgtccccgtcagggtttgacggggacagcggtcaaagccggttttgtgggcgag

SEQ ID NO: 425692 - DNA, 75 bp, synthetic construct
  source 1..75: mol_type = other DNA
agaatcaggcgcttgaacaagccttttgccagttgacgggaaatcagcatgccatcgcggtcagttcagccaccg

SEQ ID NO: 425693 - DNA, 75 bp, synthetic construct
  source 1..75: mol_type = other DNA
aacgttacggcatcgcagttatcgaagatgctgcccatgccgtcggtacgtattacaaagggcgacatattggcg

SEQ ID NO: 425694 - DNA, 75 bp, synthetic construct
  source 1..75: mol_type = other DNA
ccagaaccagcaaggcaatttgcgccgcggcgttggcgtcgcctgttttagctacacctctaacacctggcctgt

SEQ ID NO: 425695 - DNA, 75 bp, synthetic construct
  source 1..75: mol_type = other DNA
gcgcgcaggtcagcggtcagttgaaaacgctgtcggtggcgattggcgataaagtaaaaaaagaccagcttttag

SEQ ID NO: 425696 - DNA, 75 bp, synthetic construct
  source 1..75: mol_type = other DNA
tgatggaagcgttaaaagaaagaggcattggtaccgggttacatttccgcgccgctcacacacaaaaatattatc

SEQ ID NO: 425697 - DNA, 75 bp, synthetic construct
  source 1..75: mol_type = other DNA
ttacctgcgcggaaggcggcctgattgttaccgataatgaaagcctcgcccgccagttacgcatgttgaaatttc

SEQ ID NO: 425698 - DNA, 75 bp, synthetic construct
  source 1..75: mol_type = other DNA
agttctgcggttttgacaccaagcgcattgataaacaacttagagagcgttttgatgcctcattgacgcgtattg

SEQ ID NO: 425699 - DNA, 75 bp, synthetic construct
  source 1..75: mol_type = other DNA
caaatcaaggatgtactaccgacgccggaaaaggttaacgacgctattttctattacgcccgttttgaagtcccc

SEQ ID NO: 425700 - DNA, 75 bp, synthetic construct
  source 1..75: mol_type = other DNA
ttcggtatggctgccgttctgtctgttattgttctgggtgatgaatccggctacgaaatgggcgacgtgcagaaa

SEQ ID NO: 425701 - DNA, 75 bp, synthetic construct
  source 1..75: mol_type = other DNA
caggcactactaagtcgttggccggaacatcgtcgtgttgaactgatcaccaccgatggctttcttcatcccaac

SEQ ID NO: 425702 - DNA, 75 bp, synthetic construct
  source 1..75: mol_type = other DNA
gatgctaacgggtttagtgttcactctgtacgcactatcttaaggtcagagacagcgataggcacgttaccagca

SEQ ID NO: 425703 - DNA, 75 bp, synthetic construct
  source 1..75: mol_type = other DNA
ttactggtcagtttggtgacatgttagcccgtattgaggctggggagtttccagaaggtacaattctgctagttg

SEQ ID NO: 425704 - DNA, 75 bp, synthetic construct
  source 1..75: mol_type = other DNA
gttgagattgtcaaagggcttgaagcgggcgatgaagtggtgattggtgaggccaaaccaggagctgcacaatga

SEQ ID NO: 425705 - DNA, 75 bp, synthetic construct
  source 1..75: mol_type = other DNA
caaaactgacggctccagcacgctggcaagttttggtgagcgtgtaggcaatcaaaaactgtcgctggaaaaaat

SEQ ID NO: 425706 - DNA, 75 bp, synthetic construct
  source 1..75: mol_type = other DNA
gacgcagttaacgaatacaaccagaaagtgcagttgacctttaataatctgaaaaccgacggttccagcacgctg

SEQ ID NO: 425707 - DNA, 75 bp, synthetic construct
  source 1..75: mol_type = other DNA
atggcgctatatggacggcttcgcgcctgtctcgccattctgtctcccacgctgaacgagccgattccgtcccat

SEQ ID NO: 425708 - DNA, 75 bp, synthetic construct
  source 1..75: mol_type = other DNA
ctacaggtttgcagcaggcgcggcagcgcatcaaagcactggaagacgccttacgagcacatggattaatcaact

SEQ ID NO: 425709 - DNA, 75 bp, synthetic construct
  source 1..75: mol_type = other DNA
cggtcagatcacgttaaacgggcagaaaatgccactggaagattttgttgggatgtttgcgatgccggcattaaa

SEQ ID NO: 425710 - DNA, 75 bp, synthetic construct
  source 1..75: mol_type = other DNA
acgaagtaagcaaaccactgtttgatatggcaaaaggtgaaacgccttttgagattaactcccgcattggttaca

SEQ ID NO: 425711 - DNA, 75 bp, synthetic construct
  source 1..75: mol_type = other DNA
cgacaataatcaaaccaggcaatatgccggttcagtggctgcgttaccaggatgaaaaaatgactcaggctgaat

SEQ ID NO: 425712 - DNA, 75 bp, synthetic construct
  source 1..75: mol_type = other DNA
tatgccttctatcggtccgaaaacgcgtaaaccggcttatgcgtcgtttgaaaaaattaatggtttccatcgcct

SEQ ID NO: 425713 - DNA, 75 bp, synthetic construct
  source 1..75: mol_type = other DNA
atttaggcgctaaagaggcggtggggatcccttgtcgcccggattacgtgctatatccgcttatgcagtctgatg

SEQ ID NO: 425714 - DNA, 75 bp, synthetic construct
  source 1..75: mol_type = other DNA
gaaaatctccaggtcatgctggcagaaagcgccgaccatgcccgacgcgtgctgcaaagcattctggcactgatc

SEQ ID NO: 425715 - DNA, 75 bp, synthetic construct
  source 1..75: mol_type = other DNA
aatgccgaccatgccggatctgccacaactggaaagcgcgtttgtcgaaatcaatgaaccacaatccgcatacgg

SEQ ID NO: 425716 - DNA, 75 bp, synthetic construct
  source 1..75: mol_type = other DNA
agtggcaagaattacccgttatcaccacaccagaagcggcactggcagaagacgcagcaccaatccataacggcg

SEQ ID NO: 425717 - DNA, 75 bp, synthetic construct
  source 1..75: mol_type = other DNA
ggatgacggttatgaagcgggactcaatggcttctggcgactggtaaacctgttacagttcctgccggatatgac

SEQ ID NO: 425718 - DNA, 75 bp, synthetic construct
  source 1..75: mol_type = other DNA
ttctgccggtggtgaagtgaaaacgccggagcaactgacaccagaacaacgtcagcttcttgaacaaatgcaggc

SEQ ID NO: 425719 - DNA, 75 bp, synthetic construct
  source 1..75: mol_type = other DNA
ttcttgacgccatggaagatgtccagccactgaaatgcgctactgatgtctactggcatccaacgcgtaaccaac

SEQ ID NO: 425720 - DNA, 75 bp, synthetic construct
  source 1..75: mol_type = other DNA
cgcatcatggcggcagcggggcgtgttacgtcgcactacgtaaaacggcgcaggcgaagcaagaaaactgggagc

SEQ ID NO: 425721 - DNA, 75 bp, synthetic construct
  source 1..75: mol_type = other DNA
aggtcgccgacagcgttgccgcctttttacgggcggcgttcccgctaaacagcccgctgtttaacggtgagaata

SEQ ID NO: 425722 - DNA, 75 bp, synthetic construct
  source 1..75: mol_type = other DNA
cgcagtcgaagccgcagcaagctgcgccggttgctcgtgccgctgacgcgccaaaaccgacggcggagaaaaaag

SEQ ID NO: 425723 - DNA, 75 bp, synthetic construct
  source 1..75: mol_type = other DNA
ccgattaaagggaaagaaaatgccgacggcaccctgaatcgcctgaagatggcgggtcatacaaactgtattcga

SEQ ID NO: 425724 - DNA, 75 bp, synthetic construct
  source 1..75: mol_type = other DNA
tacgcagatcccgcacattgttcgccgcgttgtcggtcaggcgttggatattccctggtcatgcgtgcgggtaat

SEQ ID NO: 425725 - DNA, 75 bp, synthetic construct
  source 1..75: mol_type = other DNA
gatcattctgttgctggttcttaatctcgccaccgtgaaaatgtttggtgagatggagttctggttcgcgatgat

SEQ ID NO: 425726 - DNA, 75 bp, synthetic construct
  source 1..75: mol_type = other DNA
agatggagttctggtttgcgatgatcaaaattgtcgccatcgtgtcactgattgtcgttggtttgatcatggtga

SEQ ID NO: 425727 - DNA, 75 bp, synthetic construct
  source 1..75: mol_type = other DNA
gaattgctgctttcgaatctggaatacaaatcttttagtgacttcgcttccgatctactcgggccgtgggcagga

SEQ ID NO: 425728 - DNA, 75 bp, synthetic construct
  source 1..75: mol_type = other DNA
gctatggcaaaagactataaatacgttatggaactggacgaggcacaacgcaatgatctcattattcttgtcgcc

SEQ ID NO: 425729 - DNA, 75 bp, synthetic construct
  source 1..75: mol_type = other DNA
gcacgatatactgacgattatgttatggcgggcatgtgttacgcgaaatatgtacgtagccctatcgcacatggt

SEQ ID NO: 425730 - DNA, 75 bp, synthetic construct
  source 1..75: mol_type = other DNA
gtatgtgaatcctagcgtgattggcgcgttcacgatgattacaaccgtttccgcgattctgtttatgttcgtctg

SEQ ID NO: 425731 - DNA, 75 bp, synthetic construct
  source 1..75: mol_type = other DNA
tgtcgttaaaagatttggcgatggatgccttctaccaccctgaacgcggcgggcagctctctgccgaaagctcca

SEQ ID NO: 425732 - DNA, 75 bp, synthetic construct
  source 1..75: mol_type = other DNA
tcagaggccgctgtttattgtcgaaaacggttttggcgcttacgacaaagtggaagaagatggcagcatcaacga

SEQ ID NO: 425733 - DNA, 75 bp, synthetic construct
  source 1..75: mol_type = other DNA
gttgaacgaccggaagagccgttaatgtcgttaaaagatttggcgatggacgctttctaccaccctgaacgcggc

SEQ ID NO: 425734 - DNA, 75 bp, synthetic construct
  source 1..75: mol_type = other DNA
aaggtttaagtggcttctttgccggattccagatagcggttttcgctttcgtggggattgagctggtaggtacaa

SEQ ID NO: 425735 - DNA, 75 bp, synthetic construct
  source 1..75: mol_type = other DNA
gctgctggttaccccgctgtggtttatcgcgctggggttgggctggttgtttattggtaaaaaacgcatggcgaa

SEQ ID NO: 425736 - DNA, 75 bp, synthetic construct
  source 1..75: mol_type = other DNA
cggaaatcggtcagggtgccgacaccgtcttctcgcaaatggtggcagaaaccgtgggggttccggtcagcgacg

SEQ ID NO: 425737 - DNA, 75 bp, synthetic construct
  source 1..75: mol_type = other DNA
atctggagcgccagcggcaacacgaagctgatagagaaaggcaccaccgcatcattactttaccgcgccatagcg

SEQ ID NO: 425738 - DNA, 75 bp, synthetic construct
  source 1..75: mol_type = other DNA
aaccggacacccgcgcgatctgacattaatccactcgctgggtattggcgatcgcgactgcaaaggcactaaccg

SEQ ID NO: 425739 - DNA, 75 bp, synthetic construct
  source 1..75: mol_type = other DNA
attgtagtacttaattcaaataaatcagattgtaaacttattgctgatgaccagcaaaggaaacttgctcatgtt

SEQ ID NO: 425740 - DNA, 75 bp, synthetic construct
  source 1..75: mol_type = other DNA
ggataaactgctaacctgttcatggcagccaggcgtgcgtcaccgcattacgcctgaggcgttagatgctgccgt

SEQ ID NO: 425741 - DNA, 75 bp, synthetic construct
  source 1..75: mol_type = other DNA
agcaggcattaagagaaacgggacgggataaacagttaacctgttcatggcagccaggcgtgcgccaccgtatta

SEQ ID NO: 425742 - DNA, 75 bp, synthetic construct
  source 1..75: mol_type = other DNA
taaaaggtcaggcactaccacgtataaaagaagcactacgagtatggaataattttcactcaagagtacgtaata

SEQ ID NO: 425743 - DNA, 75 bp, synthetic construct
  source 1..75: mol_type = other DNA
ttatctttatgccattgtagttctttgaaacatatagacggttcctttcctgagacgctcaggaattccgtatat

SEQ ID NO: 425744 - DNA, 75 bp, synthetic construct
  source 1..75: mol_type = other DNA
acaacataagcgaaatactcattgctattgatgaaaaaggtaatcttattgaaccacaaaaggaatcatcagaag

SEQ ID NO: 425745 - DNA, 75 bp, synthetic construct
  source 1..75: mol_type = other DNA
caaaaacaatatacatttgataaaaacgctaaaaatgaaaaatattacaatttaaatatttatgatatgtttttt

SEQ ID NO: 425746 - DNA, 75 bp, synthetic construct
  source 1..75: mol_type = other DNA
gtggctgtaacctgtcaggtgcgtctctgaaaaacacatctttcaagagctctgttctggaggagagtgatttat

SEQ ID NO: 425747 - DNA, 75 bp, synthetic construct
  source 1..75: mol_type = other DNA
agtcatatggttgatatgttatctcctaatacatcaactaactggatgtcattttttttatataaggatggagaa

SEQ ID NO: 425748 - DNA, 75 bp, synthetic construct
  source 1..75: mol_type = other DNA
gattttactgtcatcatcggatgataatctggaaatgatgttatctttaaatgatatgtatagtatgttatctcc

SEQ ID NO: 425749 - DNA, 75 bp, synthetic construct
  source 1..75: mol_type = other DNA
tggcagatattcctgttcttcatgcttgtcctgccgggcaaaaagagacaccgctaccatgtgtgattttttatc

SEQ ID NO: 425750 - DNA, 75 bp, synthetic construct
  source 1..75: mol_type = other DNA
ccatccatcatcatgtatccggggggaagtggaccttcttatagtatgagtagttccacatccagtgcaacagcg

SEQ ID NO: 425751 - DNA, 75 bp, synthetic construct
  source 1..75: mol_type = other DNA
tgcggtggaattgccggaaatattattaaatgcgttgctatcagtgaatccgttcgcggtgaaggactggcgctg

SEQ ID NO: 425752 - DNA, 75 bp, synthetic construct
  source 1..75: mol_type = other DNA
tcggtactgaacccttttgtcgcgttaccgcccagtacaaccaggatatgcgctactggctggaaacgccgacta

SEQ ID NO: 425753 - DNA, 75 bp, synthetic construct
  source 1..75: mol_type = other DNA
ctgcatacagaaagaaaaataacaaaagcaggattgggcaaaatttcctctggtttactacctgttaataccgtg

SEQ ID NO: 425754 - DNA, 75 bp, synthetic construct
  source 1..75: mol_type = other DNA
ccgaattaaaagccacggcagaactgtttccgttggcgatgcaggacagtgagttgggggaaattccggaagggt

SEQ ID NO: 425755 - DNA, 75 bp, synthetic construct
  source 1..75: mol_type = other DNA
gggctttgagcatatcgactatgcgcttggctgcacgggccatgtcgattgtgaagtgcggatgctacgcgaact

SEQ ID NO: 425756 - DNA, 75 bp, synthetic construct
  source 1..75: mol_type = other DNA
ctgtatcaagtgtatagtcagcctggccacgcatattgggtggttgagtacgagggtgaagtggtcggcggcggt

SEQ ID NO: 425757 - DNA, 75 bp, synthetic construct
  source 1..75: mol_type = other DNA
accgccagcatgatgggatcgggctattttacatcgctcgcccgttcactgtttccaccgctgatacctgaaacg

SEQ ID NO: 425758 - DNA, 75 bp, synthetic construct
  source 1..75: mol_type = other DNA
tcgcctatgagcggcacagcacgcatctgtttatttataccaaaaccgaatacgaggcgctgttccgccagtgcg

SEQ ID NO: 425759 - DNA, 75 bp, synthetic construct
  source 1..75: mol_type = other DNA
gccgatattccacgcctgactgtgcatcgcggctcagaatacatcatctcccgcgcttggtgtaactcaccgctt

SEQ ID NO: 425760 - DNA, 75 bp, synthetic construct
  source 1..75: mol_type = other DNA
ccacagtcgaagtatttattaccgtaacccgcgatgaaaagcttatcgcgtgcggtggaattgccggaaatatta

SEQ ID NO: 425761 - DNA, 75 bp, synthetic construct
  source 1..75: mol_type = other DNA
ggtgtctgaagatattgcaaaactgcaaataaaaagtggtagaatcgaaccagaatacacaacagatattagtgt

SEQ ID NO: 425762 - DNA, 75 bp, synthetic construct
  source 1..75: mol_type = other DNA
cccggatggattgaccccgatactttcaagtgcaatgaacacgctgagactgtaagactgattttcaagctgctg

SEQ ID NO: 425763 - DNA, 75 bp, synthetic construct
  source 1..75: mol_type = other DNA
atagttcctacagacccattaccattaactgacggagctgcaatctttgaaattgctgagaaaaatcttttgaat

SEQ ID NO: 425764 - DNA, 75 bp, synthetic construct
  source 1..75: mol_type = other DNA
aattttctggggatgattgatgtggggaatgatggggaagcagaaaaggaaatagcatctctacagcatgaggtt

SEQ ID NO: 425765 - DNA, 75 bp, synthetic construct
  source 1..75: mol_type = other DNA
ttccgtgttagtcagaagtgggaacaacgtgcaaagcttgcccttgctggtaaacaacgtttaacaaagatggtc

SEQ ID NO: 425766 - DNA, 75 bp, synthetic construct
  source 1..75: mol_type = other DNA
aacgctacagaacgacactgaaatcaccatacctacaaacccgttaccgctaaatgatgggtcaccaatctttga

SEQ ID NO: 425767 - DNA, 75 bp, synthetic construct
  source 1..75: mol_type = other DNA
ttgcacgtcacctacaggctaataacattagttcattctcacgacgtaaagatgctaacgggtttagcgttcatt

SEQ ID NO: 425768 - DNA, 75 bp, synthetic construct
  source 1..75: mol_type = other DNA
atgatccgcgatctgatcataaagacgccgtacaatcctggcgaacggctgccgccggagcgtgaaattgcagaa

SEQ ID NO: 425769 - DNA, 75 bp, synthetic construct
  source 1..75: mol_type = other DNA
gcgcgccagttgcttgagagtaatatcgccgagtttgctgctttgcaggccactcgtgaagatattgtgaaaatg

SEQ ID NO: 425770 - DNA, 75 bp, synthetic construct
  source 1..75: mol_type = other DNA
cagcagcgaaagcggtgacatgcagtttcaccttgccattgccgaagcgacccataacagcatgttggtagagct

SEQ ID NO: 425771 - DNA, 75 bp, synthetic construct
  source 1..75: mol_type = other DNA
ataagtttatcaccaccgactatttgcaacagtgccagaagctattcagcaacgagctgccgccatgcctgataa

SEQ ID NO: 425772 - DNA, 75 bp, synthetic construct
  source 1..75: mol_type = other DNA
attttccaacgtcgatgatatctattttgatggttatctctttgactcctggccattggataaagttgacgcctg

SEQ ID NO: 425773 - DNA, 75 bp, synthetic construct
  source 1..75: mol_type = other DNA
gtccggatgccaacgtctgcaatgatgccggtccttttgagctgttacaggcgcgtcagttactggaaagtaaca

SEQ ID NO: 425774 - DNA, 75 bp, synthetic construct
  source 1..75: mol_type = other DNA
aagctatcgaccgcataggtcgtcttgagcatcttgaaacagaagccttgatgaatcgcattattgctcatggta

SEQ ID NO: 425775 - DNA, 75 bp, synthetic construct
  source 1..75: mol_type = other DNA
gtttgtttatggttttaataaagtcatccaagaagggcttgggggactaatcgagttaagttttgatattgacga

SEQ ID NO: 425776 - DNA, 75 bp, synthetic construct
  source 1..75: mol_type = other DNA
gagacaaaatactgtgctccaccaatggagttaaacaccatcgcctcatattaagtgagattgtagcacagtgcg

SEQ ID NO: 425777 - DNA, 75 bp, synthetic construct
  source 1..75: mol_type = other DNA
agaatccatatatctaacactagaattgaataatttaagatcaaatagaaaatcaaacaaaagaaattttgaaca

SEQ ID NO: 425778 - DNA, 75 bp, synthetic construct
  source 1..75: mol_type = other DNA
tgcatcaagaagtggacttcatttattaggttctatctggaacatagtaatgagtgcggtccccggctttaacac

SEQ ID NO: 425779 - DNA, 75 bp, synthetic construct
  source 1..75: mol_type = other DNA
aggatatgatgaggagcttctcgatattactgatgactcacctgagttagaggaaacgttgcccgcgatatcaga

SEQ ID NO: 425780 - DNA, 75 bp, synthetic construct
  source 1..75: mol_type = other DNA
atgaacctcagcaacgtggctcatcttatagagtgatagaatcgatagaaaacactgattttatttatcaaaaaa

SEQ ID NO: 425781 - DNA, 75 bp, synthetic construct
  source 1..75: mol_type = other DNA
aagctatcgaccgtataggccgattagagcatcttgaaacagaagcattgatgaaccgcatcttaggcaacggga

SEQ ID NO: 425782 - DNA, 75 bp, synthetic construct
  source 1..75: mol_type = other DNA
gtcagagacaacgagaggtacactaccagcatcacagcgcaatgaccgccccgctataccgaactactacgaagc

SEQ ID NO: 425783 - DNA, 75 bp, synthetic construct
  source 1..75: mol_type = other DNA
ttgcacgtcaccttcaaagcaacggtataaagtcgtttagtcgccgtaaagatgctaatgggttctctgttcact

SEQ ID NO: 425784 - DNA, 75 bp, synthetic construct
  source 1..75: mol_type = other DNA
gccccacaaaaagaaacatcagagaaagaaatatctccagagaaaattttactaaatttcttcttaaaacatatt

SEQ ID NO: 425785 - DNA, 75 bp, synthetic construct
  source 1..75: mol_type = other DNA
aatatcttacaaggggcagcatcagcgaaagtggctggattatccccaaaaacgctcctgtcgagccagtaggat

SEQ ID NO: 425786 - DNA, 75 bp, synthetic construct
  source 1..75: mol_type = other DNA
cagaaaaccattatatggaggcaataagaaataagtttacaaataacaaacctctaaattttgacaatatgtacg

SEQ ID NO: 425787 - DNA, 75 bp, synthetic construct
  source 1..75: mol_type = other DNA
gcattacgtctgggcccgggagtttggggagtgcaaaggtaaaaaacactatcacctgatgctgctggttaaccg

SEQ ID NO: 425788 - DNA, 75 bp, synthetic construct
  source 1..75: mol_type = other DNA
atgacctacaaatacaaccccttctggcagcaacgtattcgtgagacggtgctgcacgcactgaatgttcatcca

SEQ ID NO: 425789 - DNA, 75 bp, synthetic construct
  source 1..75: mol_type = other DNA
actggccggaatgattaaacaggcgtggtgcagtgccctgggagtggatgtcgggtgccatgccacgctggtgca

SEQ ID NO: 425790 - DNA, 75 bp, synthetic construct
  source 1..75: mol_type = other DNA
tatcctgcaaagaaggtgaagtgactgaaggcgtattcgaaaaataccgtatcgctacctacaaagaagccagct

SEQ ID NO: 425791 - DNA, 75 bp, synthetic construct
  source 1..75: mol_type = other DNA
tcagcggcgtatcctgcaaagaaggtgaagtcactgaaggcgtattcgaaaaataccgtatcgctacctacaaag

SEQ ID NO: 425792 - DNA, 75 bp, synthetic construct
  source 1..75: mol_type = other DNA
gtgagcggcacttggaaaaccaacctcacgccagacaaactgggcgtggtggcgctggacccggatgcactctca

SEQ ID NO: 425793 - DNA, 75 bp, synthetic construct
  source 1..75: mol_type = other DNA
ttccgtatttatttattcgttgattcttatccggggggtacttgcactatgtccactaaaattaaaaaaaatagt

SEQ ID NO: 425794 - DNA, 75 bp, synthetic construct
  source 1..75: mol_type = other DNA
atatgcatttgtgactttttttctttgttatatggggataagaaaatataatatctatccttatgtgccattgtt

SEQ ID NO: 425795 - DNA, 75 bp, synthetic construct
  source 1..75: mol_type = other DNA
gcaggcttctggttttacccgtatgcaggtggcgctgtcggtgatgaaaaccgccattccactggtcttgctgac

SEQ ID NO: 425796 - DNA, 75 bp, synthetic construct
  source 1..75: mol_type = other DNA
tggtgcagtgccctgggggtggatgctggatgctatgccacgctggtgcattttccggtcaggccggcggtgtgg

SEQ ID NO: 425797 - DNA, 75 bp, synthetic construct
  source 1..75: mol_type = other DNA
gctgtcgttcattttcggcccactgcgtagcgtaccgatgggcgtgcgtgtggtcaccggtatcagctttggctt

SEQ ID NO: 425798 - DNA, 75 bp, synthetic construct
  source 1..75: mol_type = other DNA
gtcgtttgcaatcagtacgctatgccgcctctgcgaagtttgatcccgagcataaagtctggcgcctgtcgcagg

SEQ ID NO: 425799 - DNA, 75 bp, synthetic construct
  source 1..75: mol_type = other DNA
ctaaagcatctggcggtagcttccgtcaggtcaccagcatggaagaagcattcaaagatgcagacatcgtttatc

SEQ ID NO: 425800 - DNA, 75 bp, synthetic construct
  source 1..75: mol_type = other DNA
tccgggctcactggccggcatgattaaacaggcctggtgcagtgccctgggggtggatgccgggccttatgccac

SEQ ID NO: 425801 - DNA, 75 bp, synthetic construct
  source 1..75: mol_type = other DNA
tccgggctcactggccggaatgattcaacaggcctggtgcagtgccctgggggtggatgccgggccttatgccac

SEQ ID NO: 425802 - DNA, 75 bp, synthetic construct
  source 1..75: mol_type = other DNA
tccgggttcactggccgggatgatttaacaggcctggtgcagtgccctgggggtggatgccgggccttatgccac

SEQ ID NO: 425803 - DNA, 75 bp, synthetic construct
  source 1..75: mol_type = other DNA
aacggacgcagctgtgatatcccgcttcatcaatgccctgaaagcccgaatcaacgcttaccagaaacgtaagca

SEQ ID NO: 425804 - DNA, 75 bp, synthetic construct
  source 1..75: mol_type = other DNA
acgtgctgactatctggcgaaggaacataccaaagctcacgccactggtgagcgtaatttcggctgcagtcgggg

SEQ ID NO: 425805 - DNA, 75 bp, synthetic construct
  source 1..75: mol_type = other DNA
tccggggtcactggccggtatgatttaacaggcctggtgcagtgccctgggggtggatgccgggccttatgccac

SEQ ID NO: 425806 - DNA, 75 bp, synthetic construct
  source 1..75: mol_type = other DNA
gtcaaccgggatacctggtgtcgtgccggtgattaccgcgctccggaatcactggccgggatgattaaacaggcg

SEQ ID NO: 425807 - DNA, 75 bp, synthetic construct
  source 1..75: mol_type = other DNA
tggtgcagtgccctgggagtggatgccggggccatgcacaccgcctgtttcatcattccggccagtgaccccgga

SEQ ID NO: 425808 - DNA, 75 bp, synthetic construct
  source 1..75: mol_type = other DNA
ctgggggcaggcaacgcctatatgcgtgaagtgggagccgcgcttgacgacggctacaaacagggcgtactgccg

SEQ ID NO: 425809 - DNA, 75 bp, synthetic construct
  source 1..75: mol_type = other DNA
tccgggatcactggccggcatgattcaacaggcctggtgcagtgccctgggggtggatgccgggccttatgccac

SEQ ID NO: 425810 - DNA, 75 bp, synthetic construct
  source 1..75: mol_type = other DNA
tggggagtgcaaaggtaaaaaacactatcacctgatgctgctggtcaaccgggatacctggtgtcgtgccggcga

SEQ ID NO: 425811 - DNA, 75 bp, synthetic construct
  source 1..75: mol_type = other DNA
aaacactatcacctgatgctgctggtcaaccgggatacctggtgtcgtgccggtgattaccgcgctccgggatca

SEQ ID NO: 425812 - DNA, 75 bp, synthetic construct
  source 1..75: mol_type = other DNA
tggtcaccggtattagcttcggttttgtcttctacgtactggaccagatcttcggcccgctgacgttggtttatg

SEQ ID NO: 425813 - DNA, 75 bp, synthetic construct
  source 1..75: mol_type = other DNA
agcagcagttaaaacagcaggtgcatttatcagctttcaggctgtactatccagttatcagaagattatggaagt

SEQ ID NO: 425814 - DNA, 75 bp, synthetic construct
  source 1..75: mol_type = other DNA
ggttctatcgctgactggtttaatggtgtggctaataaaattgctaacttccaagagccaatgagtaaccttgtt

SEQ ID NO: 425815 - DNA, 75 bp, synthetic construct
  source 1..75: mol_type = other DNA
taataagacttttgaccgtctggaagctagagtaaaaagtactaaagttttccgtttcacaagtcaggttaatga

SEQ ID NO: 425816 - DNA, 75 bp, synthetic construct
  source 1..75: mol_type = other DNA
agttttacgcattaagtggtaaagctggtcagatggataattctaagtttaatgaatcccttgctaaactaaatg

SEQ ID NO: 425817 - DNA, 75 bp, synthetic construct
  source 1..75: mol_type = other DNA
cgttcaattgatttcgtatttgataaagatgcaggtcaggtaaaagagttcacaaagtcattagctcaaacaacg

SEQ ID NO: 425818 - DNA, 75 bp, synthetic construct
  source 1..75: mol_type = other DNA
gtaaagatgcaggtcaagtaaaagagttcacaaagtcattagctcaaacaacgggtttagatatcgctgaactgc

SEQ ID NO: 425819 - DNA, 75 bp, synthetic construct
  source 1..75: mol_type = other DNA
cattctttagatttacacaagcatctagtgaccagttcacagcggatatgctattaagctcaggctatccagagg

SEQ ID NO: 425820 - DNA, 75 bp, synthetic construct
  source 1..75: mol_type = other DNA
gtgaactttgctcttgataatttaaaccctgaagcagctaagaatccgaacttacatcaatcaggtattggcaca

SEQ ID NO: 425821 - DNA, 75 bp, synthetic construct
  source 1..75: mol_type = other DNA
atgatgtgaaaggttggtttaatagtgcagctatgaatcttgctaacttccagcatccagaattaatcaccatga

SEQ ID NO: 425822 - DNA, 75 bp, synthetic construct
  source 1..75: mol_type = other DNA
gggtcagaagagttatttaaaaaccttacaggttattctcgtttaatgggtcgttcagatgagcagattcaaaga

SEQ ID NO: 425823 - DNA, 75 bp, synthetic construct
  source 1..75: mol_type = other DNA
gcaattgttaggccggatgcaccatctttctttactttcaatcaagcatctaatgaccagttcacgcaggatatg

SEQ ID NO: 425824 - DNA, 75 bp, synthetic construct
  source 1..75: mol_type = other DNA
accagcattaacggtgacagagcagctaatagtcttgatagtttgagttcagcagcagttaaaacagcaggtgca

SEQ ID NO: 425825 - DNA, 75 bp, synthetic construct
  source 1..75: mol_type = other DNA
tattgctgtaaataaagttgttggtgtaaccagaagtatttacgggcttatgactgctatcacaagattaggtca

SEQ ID NO: 425826 - DNA, 75 bp, synthetic construct
  source 1..75: mol_type = other DNA
gatggtgaaacgcagaaggctgccagccaacaatcagcgtcatccatagtgactgcaccaaagagtgaacctccc

SEQ ID NO: 425827 - DNA, 75 bp, synthetic construct
  source 1..75: mol_type = other DNA
tgctgttaatcctccaaaacaaccgagacagccacgaattagcggcaacagagcaatcacagcagcttattcagc

SEQ ID NO: 425828 - DNA, 75 bp, synthetic construct
  source 1..75: mol_type = other DNA
gctagagcaaaaaatactaaagctttccgtttcacaagtcaggttaatgacgctattaatcctccaaaacaatca

SEQ ID NO: 425829 - DNA, 75 bp, synthetic construct
  source 1..75: mol_type = other DNA
aacgcgttccggtacgtatccgcctcgataaccagcaagacaatatctggcctgcgggaacgactgccaccgtgg

SEQ ID NO: 425830 - DNA, 75 bp, synthetic construct
  source 1..75: mol_type = other DNA
ttcaccatcgaccagccgcgctatcaaaaggcgcttgaggaagcgcaagccgatgttgcttattatcaggtactg

SEQ ID NO: 425831 - DNA, 75 bp, synthetic construct
  source 1..75: mol_type = other DNA
attgaacaggcctggtgcagtgccctgggggtggatgccggatgccatgccacgctggtgcattttccggcctgg

SEQ ID NO: 425832 - DNA, 75 bp, synthetic construct
  source 1..75: mol_type = other DNA
accaaagtacacaggtcaaaaagttcattcaagatttaactcaaattactggtatggacacaaccgaaacacaag

SEQ ID NO: 425833 - DNA, 75 bp, synthetic construct
  source 1..75: mol_type = other DNA
gaaaccagctttatgacctttagcggtaatatctacgaccaatacgcagaagctacgctattaagttcatcattc

SEQ ID NO: 425834 - DNA, 75 bp, synthetic construct
  source 1..75: mol_type = other DNA
ggttctatcgctgactggtttaatggtgcagctaataaaattgctaacttccaagaaccgatgaataacttcgta

SEQ ID NO: 425835 - DNA, 75 bp, synthetic construct
  source 1..75: mol_type = other DNA
atgggctaagattggtggttctatcgctgactggtttaatggtgcagctaataaaattgctaacttccaagagcc

SEQ ID NO: 425836 - DNA, 75 bp, synthetic construct
  source 1..75: mol_type = other DNA
agaaagtacacaggcacaactagggaacttgaaaaactcttggaataccacgcttgatagtatcttcagaggttc

SEQ ID NO: 425837 - DNA, 75 bp, synthetic construct
  source 1..75: mol_type = other DNA
ttatgctgagttggtaaactttgctcttgataatttaaaccctgaagctgctaagaatccgaacttacatcaatc

SEQ ID NO: 425838 - DNA, 75 bp, synthetic construct
  source 1..75: mol_type = other DNA
gcgacgacatgaccgcagaactgctcaatttgtggcatctcacgggtcaggcagacaaagcggcggacattctcg

SEQ ID NO: 425839 - DNA, 75 bp, synthetic construct
  source 1..75: mol_type = other DNA
ctggcgatgctggaatataaccgcgcagatttcccgcaagcggtggcgtatgccagtcaggcgctgaaacgcgca

SEQ ID NO: 425840 - DNA, 75 bp, synthetic construct
  source 1..75: mol_type = other DNA
tcgcggcgctggagagtatcgatgaatgttggtttgctcgtcacttactggcctgtttttactacaacaagcgca

SEQ ID NO: 425841 - DNA, 75 bp, synthetic construct
  source 1..75: mol_type = other DNA
gcctggcggcgaccggcgatcgcaccatcaatatccacagttattacaacgatcagccagttgattatctcttct

SEQ ID NO: 425842 - DNA, 75 bp, synthetic construct
  source 1..75: mol_type = other DNA
gctgtaacctggcgctggcgatgctggaatataaccgcgccgatttcccgcaagcggtggcgtatgccactcagg

SEQ ID NO: 425843 - DNA, 75 bp, synthetic construct
  source 1..75: mol_type = other DNA
aattgccctgaaacgcgacgacatgaccgcagaactgctcaatttgtggcatctcaccggtcaggcagacaaagc

SEQ ID NO: 425844 - DNA, 75 bp, synthetic construct
  source 1..75: mol_type = other DNA
aagccacaatacgaaagtacgtgcatgggaagatctatccaggtatagacagcgcagctttggtggctcacgcat

SEQ ID NO: 425845 - DNA, 75 bp, synthetic construct
  source 1..75: mol_type = other DNA
accgttgtttacgccaattgttgaacctgtacagcagccgcaacaaccggttgcaccgcagcagcagtatcagca

SEQ ID NO: 425846 - DNA, 75 bp, synthetic construct
  source 1..75: mol_type = other DNA
ttccggtaaatctgtcggtgtgaacgcgatgatcctgagcatgctttataaagcacagccagaagatgtgcgttt

SEQ ID NO: 425847 - DNA, 75 bp, synthetic construct
  source 1..75: mol_type = other DNA
caggtaaaaaacagtggagttggggacacagtgaatttggccaggcgtgggataagagtctgaccgacaataacg

SEQ ID NO: 425848 - DNA, 75 bp, synthetic construct
  source 1..75: mol_type = other DNA
aaagccattgccttatggcaacgttgcgtagagatgtcgccggagtttgccgacggctggcgcgggttagcgatc

SEQ ID NO: 425849 - DNA, 75 bp, synthetic construct
  source 1..75: mol_type = other DNA
tgcccgtgaacacagaagatgcagatgctgcggcagaggcagaactggctcgtcagtttgctcaaactcaacaac

SEQ ID NO: 425850 - DNA, 75 bp, synthetic construct
  source 1..75: mol_type = other DNA
gaaggtcgtttacctgggcagactgataacgacatctggttctggcaggcagtatgcgcgaaaacgcagggcgat

SEQ ID NO: 425851 - DNA, 75 bp, synthetic construct
  source 1..75: mol_type = other DNA
gaaaaagaaaaccgcagccttaacgatgctgagggcgcaaaatttgacgaattacgcgctaaagctgaatccctc

SEQ ID NO: 425852 - DNA, 75 bp, synthetic construct
  source 1..75: mol_type = other DNA
cacgctggagaagatggaggctgctgccgtttcctctgatggtcttatcgacctgctgtataagctgaaagccaa

SEQ ID NO: 425853 - DNA, 75 bp, synthetic construct
  source 1..75: mol_type = other DNA
agcagaaagccgcactcaaaacacagatgcgttccatgctggacaaagccgacaccgaaaagcgcagcctgaacg

SEQ ID NO: 425854 - DNA, 75 bp, synthetic construct
  source 1..75: mol_type = other DNA
atgcgtcccgcgactatcgcccctttaccgccatacgataaatgggatggtgagaaatgggtgactgatactgaa

SEQ ID NO: 425855 - DNA, 75 bp, synthetic construct
  source 1..75: mol_type = other DNA
atgcgtcccgcgactatcgccccattaacgccatacgataaatgggatggtgagaaatgggtgacggatactgaa

SEQ ID NO: 425856 - DNA, 75 bp, synthetic construct
  source 1..75: mol_type = other DNA
gttctaaaggcagcactggcgatgtacaacagccaggatgaaaacataaagaatcactggctacttgagtctgca

SEQ ID NO: 425857 - DNA, 75 bp, synthetic construct
  source 1..75: mol_type = other DNA
atggcgggacaacagcggttttggtgtccgaaatcgtacaattctgaacatctacgcaagggaatgtacgaaagt

SEQ ID NO: 425858 - DNA, 75 bp, synthetic construct
  source 1..75: mol_type = other DNA
atttttaaaaatacgcagaccattaaatgtccaaagagattatcagggagttacattgcaaatatggcgcaaaaa

SEQ ID NO: 425859 - DNA, 75 bp, synthetic construct
  source 1..75: mol_type = other DNA
accgcagaactgctcaatttgtggcatctcacaggtcaggccgacaaagcggcggacattctcgctacgcgcaaa

SEQ ID NO: 425860 - DNA, 75 bp, synthetic construct
  source 1..75: mol_type = other DNA
atcatcccagcattgctggcaggcgtagtgatgagcagaatcattacacgtctacccggattggatatttcatgt

SEQ ID NO: 425861 - DNA, 75 bp, synthetic construct
  source 1..75: mol_type = other DNA
gtccgaaatcgtacaattctgtacatctacgcaaggaaatgtacggaagtaagccaaatggttatcggacggtcg

SEQ ID NO: 425862 - DNA, 75 bp, synthetic construct
  source 1..75: mol_type = other DNA
aagccaaatggttatcggacggtaggaacatttcgtacatcctttacgttcagtgagttagctggcttggatgta

SEQ ID NO: 425863 - DNA, 75 bp, synthetic construct
  source 1..75: mol_type = other DNA
ggcgacagccgtccgttgcataaaccgacgacgccgctgccttctctggatttgctgacaccgccgccgagcgaa

SEQ ID NO: 425864 - DNA, 75 bp, synthetic construct
  source 1..75: mol_type = other DNA
ctggaacgcgatgatgatgctggtttacgggatatgctgaaccgtgctgactatctcgcgaaagagtacaccaaa

SEQ ID NO: 425865 - DNA, 75 bp, synthetic construct
  source 1..75: mol_type = other DNA
gtaccggcagcaacggacgcggctgtgatatcccgcttcatcaatgccctgaaagcccgaatcgacgcttaccag

SEQ ID NO: 425866 - DNA, 75 bp, synthetic construct
  source 1..75: mol_type = other DNA
tggtgcagtgccctgggggtggatgccgggtgccatgccacgctggtgcattttccggcctggccggcggtgtgg

SEQ ID NO: 425867 - DNA, 75 bp, synthetic construct
  source 1..75: mol_type = other DNA
aaaacactatcacctgctgctgctggtcaaccgggatacctggtgtcgtgcaggtgattaccgcgatccggggtc

SEQ ID NO: 425868 - DNA, 75 bp, synthetic construct
  source 1..75: mol_type = other DNA
gggagtttggggagtgcaaaggtaaaaaacactatcacctgatgctgctggtcaaccgggatcactggccgggat

SEQ ID NO: 425869 - DNA, 75 bp, synthetic construct
  source 1..75: mol_type = other DNA
aacggacgcggctgtgatatcccgcttcatcaatgccctgaaagcccgaatcgacgcttaccagaaacgtaagca

SEQ ID NO: 425870 - DNA, 75 bp, synthetic construct
  source 1..75: mol_type = other DNA
aacggacgcagctgtgatatcccgcttcatcaatgccctgaaagcccgaatcgacgcttaccagaaacgtaagcg

SEQ ID NO: 425871 - DNA, 75 bp, synthetic construct
  source 1..75: mol_type = other DNA
aacggacgcagctgtgatatcccgcttcatcaatgccctgaaagcccgaatccacgcttaccagaaccgtaagca

SEQ ID NO: 425872 - DNA, 75 bp, synthetic construct
  source 1..75: mol_type = other DNA
aacggacgcagctgtgatatcccgcttcatcaatgccctgaaagcccgaatccacgcttaccagaaacgtaagcc

SEQ ID NO: 425873 - DNA, 75 bp, synthetic construct
  source 1..75: mol_type = other DNA
caacggacgcagctgtgatatcccgcttcatcaatgccctgaaagcccgaatccacgcttaccagaaacgtaagc

SEQ ID NO: 425874 - DNA, 75 bp, synthetic construct
  source 1..75: mol_type = other DNA
aacggacgcagctgtgatatcccgcttcatcaatgccctgaaagcccgaatcgacgcttaccagaagcgtaagca

SEQ ID NO: 425875 - DNA, 75 bp, synthetic construct
  source 1..75: mol_type = other DNA
aacggacgcagctgtgatatcccgcttcatcaatgccctgaaagcccgaatcgacgcttaccagaatcgtaagct

SEQ ID NO: 425876 - DNA, 75 bp, synthetic construct
  source 1..75: mol_type = other DNA
tgccctgggggtggatgccggatgctatgccacgctggcgaattttccggcctggccggtggtgtggctggagcg

SEQ ID NO: 425877 - DNA, 75 bp, synthetic construct
  source 1..75: mol_type = other DNA
tgaagacaacgaagagtacgaagatgaaaaccacggcaaacagcatgaatcgcgccgtgctcgtattcttcgtgg

SEQ ID NO: 425878 - DNA, 75 bp, synthetic construct
  source 1..75: mol_type = other DNA
gagcattctgttcctgattgtggtgtacagcatcatcttctacggtttcaaaacctggctgaaggtgcgtaacag

SEQ ID NO: 425879 - DNA, 75 bp, synthetic construct
  source 1..75: mol_type = other DNA
atgaaggaaattacattacacgaagccgctgaacgtgcgcaccagacagaaattatttgccgacttcttgaggtg

SEQ ID NO: 425880 - DNA, 75 bp, synthetic construct
  source 1..75: mol_type = other DNA
tgcctgccatgacccagtacattgacggtactggtccgctgtggaaaggcgctctgttcccgttcctgttcatca

SEQ ID NO: 425881 - DNA, 75 bp, synthetic construct
  source 1..75: mol_type = other DNA
cgcagaagatacggttatagtaaacgaccatgacatttcagccatcaaagattgttggcaaaaaaattcagatga

SEQ ID NO: 425882 - DNA, 75 bp, synthetic construct
  source 1..75: mol_type = other DNA
ggcgacgggagccgcagcgacggttgctgcgcctgttttcagcctggcaaatagcggtgcgccgcgtccgcaagt

SEQ ID NO: 425883 - DNA, 75 bp, synthetic construct
  source 1..75: mol_type = other DNA
tacgggatatgctgaaccgtgctgactatctcgcgaaagagtataccaaagtcaacggtaccggtgagcgtaatt

SEQ ID NO: 425884 - DNA, 75 bp, synthetic construct
  source 1..75: mol_type = other DNA
gggaattcggtgtgctcaggggtaaaaaacactatcacctgatactgctggtcaaccgtgatacctggtgtggtg

SEQ ID NO: 425885 - DNA, 75 bp, synthetic construct
  source 1..75: mol_type = other DNA
gggatacctggtgtcgtgccggcgattaccgcgctccgggatcactggccgggatgattaaacaggcctggtgca

SEQ ID NO: 425886 - DNA, 75 bp, synthetic construct
  source 1..75: mol_type = other DNA
ttgatggtctggacagtgaattgctgaactcatttatcaacgaattaggctgggaagcgttactcaacacccgtg

SEQ ID NO: 425887 - DNA, 75 bp, synthetic construct
  source 1..75: mol_type = other DNA
tgtggctggaacgcgatgatgacactggctttcagcaggtgctggaacgtgctgactatctggcgaaggaacata

SEQ ID NO: 425888 - DNA, 75 bp, synthetic construct
  source 1..75: mol_type = other DNA
tttctgccatcacccacaatgcgcgattgagcttaatgtcggtatcaatgctgtgaatggcccgggtatggatac

SEQ ID NO: 425889 - DNA, 75 bp, synthetic construct
  source 1..75: mol_type = other DNA
tactgggcgatgaagtaatgagtccggcaatcagtttgatcatgccacaaggtgtgatcgatgcgctccaaagca

SEQ ID NO: 425890 - DNA, 75 bp, synthetic construct
  source 1..75: mol_type = other DNA
cccttacaggtcgcattaaaacgtcaaccactcaggcaaccaaaggtttagagaacgctgtcgccatcacgttaa

SEQ ID NO: 425891 - DNA, 75 bp, synthetic construct
  source 1..75: mol_type = other DNA
acctcatatatggctgaaaaatcacagtacgattttgttggcgcgtggtgtcacgatgaagatggtggtttgcta

SEQ ID NO: 425892 - DNA, 75 bp, synthetic construct
  source 1..75: mol_type = other DNA
cggaatacggtttttgaaaatcctgacattgtaaaaacctgtacggtcagggatttgaagaatgattttatgaac

SEQ ID NO: 425893 - DNA, 75 bp, synthetic construct
  source 1..75: mol_type = other DNA
tgacaaaaaaattacggcacaccatgccatcattccgacccggcaggtctttgatatcagggcactgagtgagga

SEQ ID NO: 425894 - DNA, 75 bp, synthetic construct
  source 1..75: mol_type = other DNA
gccaaagagacgctggctgtcgcccagtcattatatgagacgcataaagcgacgacctatccgcgaaccgactgt

SEQ ID NO: 425895 - DNA, 75 bp, synthetic construct
  source 1..75: mol_type = other DNA
agatatttgctgcttgggtaagtaatgcttttagtaaaaaaactatagagtgtttcaagctacaaactatcactg

SEQ ID NO: 425896 - DNA, 75 bp, synthetic construct
  source 1..75: mol_type = other DNA
ttggtcatggttcttatggtatttctattgatagtcaaaacaaagcattatatataagcgatagcgatattcaga

SEQ ID NO: 425897 - DNA, 75 bp, synthetic construct
  source 1..75: mol_type = other DNA
gtattacgacttgcatagccaatgaagataaacgtgacgacaaacgacgcagcagtcttcttttctttcacactt

SEQ ID NO: 425898 - DNA, 75 bp, synthetic construct
  source 1..75: mol_type = other DNA
actactccgccggagtggacatttctcgctataaaaatgtgcctgttccaacctcatatatggccgaaaaatcgc

SEQ ID NO: 425899 - DNA, 75 bp, synthetic construct
  source 1..75: mol_type = other DNA
ttttttcccacgacacaggttcaccgctgctcaagccttctgccagtaaatcccgcaggacacctggagacgtga

SEQ ID NO: 425900 - DNA, 75 bp, synthetic construct
  source 1..75: mol_type = other DNA
cgcgccagctttcacttttttcagaaacgcatttttttcccacgacacaggttcaccgctgctcaagccttctgc

SEQ ID NO: 425901 - DNA, 75 bp, synthetic construct
  source 1..75: mol_type = other DNA
gatacagcaaagcgatcccgctttatctgcgatcatctcgcggcttgatatgaagcatgtttcccgtatctggaa

SEQ ID NO: 425902 - DNA, 75 bp, synthetic construct
  source 1..75: mol_type = other DNA
gctttaggttcaattttaactgttatattaggtttttgggcaatgaatgtttggcggcgacaggaggctctgaag

SEQ ID NO: 425903 - DNA, 75 bp, synthetic construct
  source 1..75: mol_type = other DNA
tgtttggccaaatacatacattattgatctgagtgataattcatatgttcttgaattattaagtgatgcctattc

SEQ ID NO: 425904 - DNA, 75 bp, synthetic construct
  source 1..75: mol_type = other DNA
tagatcagttaaataaaatccttgcaccttatggtgcaaggaagctgtccaatactgaattatctattcttgatg

SEQ ID NO: 425905 - DNA, 75 bp, synthetic construct
  source 1..75: mol_type = other DNA
atgtcgcgagtcaatcatctgtcttcgctttcatttttggcggttctggttttagcggggtgtagcagtcaggcg

SEQ ID NO: 425906 - DNA, 75 bp, synthetic construct
  source 1..75: mol_type = other DNA
actgaattatcccgccagctatagcgcaccgatataccgctttgctgattttaacgctggctggtacgccagccg

SEQ ID NO: 425907 - DNA, 75 bp, synthetic construct
  source 1..75: mol_type = other DNA
cgtcaggaagtcttcagtcgccgcggcgggttgtggtttggtacttaccatttactgaattatcccgccagctat

SEQ ID NO: 425908 - DNA, 75 bp, synthetic construct
  source 1..75: mol_type = other DNA
caggggattgtttttcaggctcactggcgacctgctgtgcaatattgtgatgatgagcatcgttgtattcatgtt

SEQ ID NO: 425909 - DNA, 75 bp, synthetic construct
  source 1..75: mol_type = other DNA
gcgggcaggaagccggaacggaaacattgccgcttctccgtgaggggggcgtctgtgcgatagtggaggcaaagg

SEQ ID NO: 425910 - DNA, 75 bp, synthetic construct
  source 1..75: mol_type = other DNA
gcttatggcgcacagtttgcggccccctggcggcagagtgtcttacccgttattcctgaacagtggaaaatggtg

SEQ ID NO: 425911 - DNA, 75 bp, synthetic construct
  source 1..75: mol_type = other DNA
ggataccgtttttacaccacgctcgagcaacctttcactgccaaaacgttttaccgatcttgataaggatcgtgc

SEQ ID NO: 425912 - DNA, 75 bp, synthetic construct
  source 1..75: mol_type = other DNA
actaatttacatgctctaactgcaagaacggtaatagatcttattatggatcgtttttcaaataaatcttttgct

SEQ ID NO: 425913 - DNA, 75 bp, synthetic construct
  source 1..75: mol_type = other DNA
atggcacgggagttgattgcggcgttgccggaaacgctgacgagcccgggtatgacggcattatgggagcaggca

SEQ ID NO: 425914 - DNA, 75 bp, synthetic construct
  source 1..75: mol_type = other DNA
ctgctggccctcccccgggatttcgccctgcacaggctggcagcagagaagtacaacctgctcgcagaaacggcc

SEQ ID NO: 425915 - DNA, 75 bp, synthetic construct
  source 1..75: mol_type = other DNA
atgagccgtagcgagagcagaaaaacagacgatcgaatccaggtgagatgttccacagaagtgaaagctaaactc

SEQ ID NO: 425916 - DNA, 75 bp, synthetic construct
  source 1..75: mol_type = other DNA
gcacatctgattcagccaacctttattacggaatatccggcagaagtgtccccgctggcgcgccgtaatgatgtt

SEQ ID NO: 425917 - DNA, 75 bp, synthetic construct
  source 1..75: mol_type = other DNA
ctctatatggcttacgcagattacaaagatcttatcgagctgaccgaatcgctgttccgtactctggcacaggat

SEQ ID NO: 425918 - DNA, 75 bp, synthetic construct
  source 1..75: mol_type = other DNA
atcatcaataattattgttctctatactcgattagatcaattaatgattatgcgaatgttaggggctgattcagt

SEQ ID NO: 425919 - DNA, 75 bp, synthetic construct
  source 1..75: mol_type = other DNA
aatcgcccgctgacggacttccggggaaaaccgagtatttttagtcatcctgtttacctctttctcagtgagttt

SEQ ID NO: 425920 - DNA, 75 bp, synthetic construct
  source 1..75: mol_type = other DNA
acgggacaagatgtgtttttggagtaccgccgacacgcggcggccgtccaaaaacgtcttggtcagggcaagccc

SEQ ID NO: 425921 - DNA, 75 bp, synthetic construct
  source 1..75: mol_type = other DNA
gattaaagcggtactataaattttattcgaatgaggaagttgacgctattcgtaataatggaactactgatggga

SEQ ID NO: 425922 - DNA, 75 bp, synthetic construct
  source 1..75: mol_type = other DNA
tcaaacctcaccgttccccatgcagctattgctggacgataaacgcatggtgcaggtgatcaacggtcagccgcc

SEQ ID NO: 425923 - DNA, 75 bp, synthetic construct
  source 1..75: mol_type = other DNA
cgatctcagggtcagatgttgatcgcccgcgaccaggggttattgtgggatcaaacctcaccgttccccatgcag

SEQ ID NO: 425924 - DNA, 75 bp, synthetic construct
  source 1..75: mol_type = other DNA
gtgatggctggtggtacgaatacccccgcacaaactgtgaaattggggaatgaatcttatcaggtgatgagcgcg

SEQ ID NO: 425925 - DNA, 75 bp, synthetic construct
  source 1..75: mol_type = other DNA
tgagacttatcaggtgatgagtgcgtgcaaaccgcatgattgcggctcgcaacgtattgcggtgatgtggtccga

SEQ ID NO: 425926 - DNA, 75 bp, synthetic construct
  source 1..75: mol_type = other DNA
gttcatcgtcacaaaaaagactggccagtgacagccttcagcagttaatgaagaatattaaagatgtagctgagg

SEQ ID NO: 425927 - DNA, 75 bp, synthetic construct
  source 1..75: mol_type = other DNA
taagcgatgccaaaccatgtagccgacacatgatcggcatgtccatcaatctgcagaccagcggcccgcattggg

SEQ ID NO: 425928 - DNA, 75 bp, synthetic construct
  source 1..75: mol_type = other DNA
cgccaggtggtgaaggatgctttttatattcatcagcataaaggaaccaccagtgccgtgcggcgggtggtggag

SEQ ID NO: 425929 - DNA, 75 bp, synthetic construct
  source 1..75: mol_type = other DNA
caacttcactggagcgccgactggcgcaagcgtgcagcgggatttctgatttgcaggtgccgctgcgtgacctgt

SEQ ID NO: 425930 - DNA, 75 bp, synthetic construct
  source 1..75: mol_type = other DNA
agcataaagggaccaccagtgccgtgcgtcgggtggtggagccgttcggctttctgatccgcattattgagtggt

SEQ ID NO: 425931 - DNA, 75 bp, synthetic construct
  source 1..75: mol_type = other DNA
gtgcgtatttctcttcaggaattacaacttgagttattggttgaatatgcactttttttcagtgtaatgggtggc

SEQ ID NO: 425932 - DNA, 75 bp, synthetic construct
  source 1..75: mol_type = other DNA
atctgcaggttccactgcgcgacctgtggaacccggcaacgtgtccggtccgctttctgccttatctggcctggg

SEQ ID NO: 425933 - DNA, 75 bp, synthetic construct
  source 1..75: mol_type = other DNA
tggtggcagaccggagagacaccgggcacgtttcgcctggacattggtgtgcaggaccagggcatcactgaagat

SEQ ID NO: 425934 - DNA, 75 bp, synthetic construct
  source 1..75: mol_type = other DNA
tgctactgctactgctactgctactgctactgctactgctactgctactgctactgctactgctactgctcttct

SEQ ID NO: 425935 - DNA, 75 bp, synthetic construct
  source 1..75: mol_type = other DNA
attcaggaaattccgggggatattttcacagcggcggcaacttatgacggtgaagttattaccatttatccaggc

SEQ ID NO: 425936 - DNA, 75 bp, synthetic construct
  source 1..75: mol_type = other DNA
taagcgatgccaaaccatgtagccgtcacatgatcggcatgtccatcaaactgcagaccagcggcccgcattggg

SEQ ID NO: 425937 - DNA, 75 bp, synthetic construct
  source 1..75: mol_type = other DNA
ttcttagcaataactaatttaggttttgataatatcctgattaacgaattcaatcaggataaaaggcataatgaa

SEQ ID NO: 425938 - DNA, 75 bp, synthetic construct
  source 1..75: mol_type = other DNA
acctgaaaggtaaaaaaatcgccatgacctgggcctactccccaagctatggcaaaccgctctctgtaccacaag

SEQ ID NO: 425939 - DNA, 75 bp, synthetic construct
  source 1..75: mol_type = other DNA
aatcacttgaattacatgctgttgcagaaaatcacgtcacacctctttatcagttaatctgtaaaaataaaacct

SEQ ID NO: 425940 - DNA, 75 bp, synthetic construct
  source 1..75: mol_type = other DNA
ttcagtaccgattatttaatcgatcttgtcacacgctttattaactggcagatgattggggccatttttgtttta

SEQ ID NO: 425941 - DNA, 75 bp, synthetic construct
  source 1..75: mol_type = other DNA
attcttggtgggggaattggtgttgccgtcaccgctgcgcttcatcgaaaaaatcagccggtagaacaaacaaca

SEQ ID NO: 425942 - DNA, 75 bp, synthetic construct
  source 1..75: mol_type = other DNA
cgaaacccatacttcaacaacaacttccagcgttcgttcagatcctaaattctgggtttctgtcggcgcaattgc

SEQ ID NO: 425943 - DNA, 75 bp, synthetic construct
  source 1..75: mol_type = other DNA
cccatcccgacgcatcgatggcggcgatcgggcccgatgcggcgtggctggtggcgccgcacgagatgggcgccg

SEQ ID NO: 425944 - DNA, 75 bp, synthetic construct
  source 1..75: mol_type = other DNA
tgttatggatcatacagcagccaaactatctgatctaaatattaaacgtattaaagcgactcctgaaggaaaagg

SEQ ID NO: 425945 - DNA, 75 bp, synthetic construct
  source 1..75: mol_type = other DNA
gatgattggggccatttttgttttattagtggcctggttattcctgtcacaatggattcgcattaccgtttttgt

SEQ ID NO: 425946 - DNA, 75 bp, synthetic construct
  source 1..75: mol_type = other DNA
cgttctgttggtgttggaagcgcttcgggaatagatgatggcgttgttagcgaaacccatacttcaacaacaact

SEQ ID NO: 425947 - DNA, 75 bp, synthetic construct
  source 1..75: mol_type = other DNA
cggattgcgtttaggtatgggaggattaacgagtggtggcgagagcgcagtaagttctgtaaatgccgcaccaac

SEQ ID NO: 425948 - DNA, 75 bp, synthetic construct
  source 1..75: mol_type = other DNA
aggacttcctgcaaacccatcgaggcttgctgcagctacatctgagacatgcttgcttggaggatttgaagttct

SEQ ID NO: 425949 - DNA, 75 bp, synthetic construct
  source 1..75: mol_type = other DNA
gtacttatgcgattctgacaaacaacagcgctggattgcgtttaggtatgggtggattaacggggaatggcggga

SEQ ID NO: 425950 - DNA, 75 bp, synthetic construct
  source 1..75: mol_type = other DNA
atcgataagaacggaaacgctattccgtctggggaattaagagatgatgttgttgcacaaatagcagaacaagct

SEQ ID NO: 425951 - DNA, 75 bp, synthetic construct
  source 1..75: mol_type = other DNA
cgaaactcgtacttcatcaacagcttccagcgttcgttcagatcctaaattctgggtttctatcggcgcaattgc

SEQ ID NO: 425952 - DNA, 75 bp, synthetic construct
  source 1..75: mol_type = other DNA
ctgggtcaccacgtccgactgggattcgaacggcatcctcgacgaatatgccgcgcccgacggccccgacgcggt

SEQ ID NO: 425953 - DNA, 75 bp, synthetic construct
  source 1..75: mol_type = other DNA
atgcgcttgcagccgggtttcttgttacatcttttctgtccccaatgtacgaattaatattcggaaatatcatga

SEQ ID NO: 425954 - DNA, 75 bp, synthetic construct
  source 1..75: mol_type = other DNA
ataatatttgggggtgtccggatattcctgctgaaacgccgtatgcgccgggagaacagtttcagggagggtaat

SEQ ID NO: 425955 - DNA, 75 bp, synthetic construct
  source 1..75: mol_type = other DNA
atgtatgtcattccgattatgttatatgcgcttgcagctggttttcttgctgcggcttctctgtcgccgttgtgc

SEQ ID NO: 425956 - DNA, 75 bp, synthetic construct
  source 1..75: mol_type = other DNA
gtaaccagaagtatttacgggcttatgactgctatcacaagattaggtcaggtcgctgatactacagcggataac

SEQ ID NO: 425957 - DNA, 75 bp, synthetic construct
  source 1..75: mol_type = other DNA
gcattatcacagatggctggtaagggtcagattatggctgaagagcttaaggggcaactggctgaagctgttcct

SEQ ID NO: 425958 - DNA, 75 bp, synthetic construct
  source 1..75: mol_type = other DNA
taggcccgtatataaccgacatcggcagaacctatcagccaggagaaactgtatcgggttcacgccttaagcgat

SEQ ID NO: 425959 - DNA, 75 bp, synthetic construct
  source 1..75: mol_type = other DNA
tccaaaaaaaggcctgatttggcattttcagggatcgggtaaatccttgttgatcctttacgccgctaaaatgct

SEQ ID NO: 425960 - DNA, 75 bp, synthetic construct
  source 1..75: mol_type = other DNA
ccgacggtacttatcgttgtggaccggcgagatctggacagccaaattaacgagacctttggtggagccgacgtt

SEQ ID NO: 425961 - DNA, 75 bp, synthetic construct
  source 1..75: mol_type = other DNA
ttgttgagcgtgttcgtagaggctatccaaaaaaaggtcttatttggcatttccagggatcgggtaaatccttgt

SEQ ID NO: 425962 - DNA, 75 bp, synthetic construct
  source 1..75: mol_type = other DNA
ggctttgaccaagcttttcctggaaacacgcccggaaactacccctaagttaatcggtgatgttgtagagcaaat

SEQ ID NO: 425963 - DNA, 75 bp, synthetic construct
  source 1..75: mol_type = other DNA
tattcgcgatgatattgacgagttgatcatggatgagcacgcaatttttaccctgacggctaaagaacaggaaca

SEQ ID NO: 425964 - DNA, 75 bp, synthetic construct
  source 1..75: mol_type = other DNA
atattgttgagcattttaccagccatgttatgccgaaaaagatgaaaggcatggttgtggtatacgatcgcgaag

SEQ ID NO: 425965 - DNA, 75 bp, synthetic construct
  source 1..75: mol_type = other DNA
cagatattccctccattctggtcgaaacggcgtttatcagtaacgttgaggaagagcgtaaactgaaaacggcga

SEQ ID NO: 425966 - DNA, 75 bp, synthetic construct
  source 1..75: mol_type = other DNA
agtattttccttttggtgggctacaacgcgactttatgcgtattgcatcaacagttgcagcacgaggtcaccatg

SEQ ID NO: 425967 - DNA, 75 bp, synthetic construct
  source 1..75: mol_type = other DNA
ttggccaggataaaccgcgaaaattcgaagtgctggcagaaaaactcggcgtgcggagcaacgtgcatttctttt

SEQ ID NO: 425968 - DNA, 75 bp, synthetic construct
  source 1..75: mol_type = other DNA
ttccagaagcattatcaaactgaacctgaacgttttaaaattcttccccccggcatctatccggacagaaaatac

SEQ ID NO: 425969 - DNA, 75 bp, synthetic construct
  source 1..75: mol_type = other DNA
acagttgccgcacggggccaccatgttcgggtatatacacagtcgtgggaaggcgattgcccggaagcatttgag

SEQ ID NO: 425970 - DNA, 75 bp, synthetic construct
  source 1..75: mol_type = other DNA
ggcctgggcggaaaatgcgcgacattatgctgatacacaagatttatacagtctgccagagaaagcggcggatat

SEQ ID NO: 425971 - DNA, 75 bp, synthetic construct
  source 1..75: mol_type = other DNA
caggatgtctttcgtccatgcagtgactgtcatggaagcatacctgatgtactgcgccagggctctgctggaaca

SEQ ID NO: 425972 - DNA, 75 bp, synthetic construct
  source 1..75: mol_type = other DNA
aatacggcaacatgatcgacatgggtatcctggatccaaccaaagtaacccgttctgctctgcagtacgcggctt

SEQ ID NO: 425973 - DNA, 75 bp, synthetic construct
  source 1..75: mol_type = other DNA
gcgcggcgtaaacgtgctggcagatgcagtgaaagttaccctcggtccgaaaggccgtaacgtagttctggataa

SEQ ID NO: 425974 - DNA, 75 bp, synthetic construct
  source 1..75: mol_type = other DNA
gtcgtaaagctatgctgcaggatatcgcaaccctgactggcggtaccgtgatctctgaagagatcggtatggagc

SEQ ID NO: 425975 - DNA, 75 bp, synthetic construct
  source 1..75: mol_type = other DNA
gcatttgagcgagcgactttcgaacatggtaaatcgacgaaacttatgatgctgaccgataagcaaatcgccgat

SEQ ID NO: 425976 - DNA, 75 bp, synthetic construct
  source 1..75: mol_type = other DNA
actcatatcccgaatgacagaggaagagcgaagtaaacttatcgaagcactcaaaacgtcttcaggtgacaacac

SEQ ID NO: 425977 - DNA, 75 bp, synthetic construct
  source 1..75: mol_type = other DNA
actcatctcccgaatgacagaggaagagcgaagtaaccttatcgaagcactaaaaacgtcttcaggtgtaaaata

SEQ ID NO: 425978 - DNA, 75 bp, synthetic construct
  source 1..75: mol_type = other DNA
actttggtattgaaacaccatcggcgctggataacttcacccaggctattcagtcacaaattttaggtggcctgc

SEQ ID NO: 425979 - DNA, 75 bp, synthetic construct
  source 1..75: mol_type = other DNA
gctcaagctcaacttctacactccgttcagatcctaaactttggctgtcgctggggagtattgccgcaggtctga

SEQ ID NO: 425980 - DNA, 75 bp, synthetic construct
  source 1..75: mol_type = other DNA
atcccaatgtgaataattcaattcctccagcaccgccgttgccttcgcaaaccgacggtgcaagaggttctcagg

SEQ ID NO: 425981 - DNA, 75 bp, synthetic construct
  source 1..75: mol_type = other DNA
tccctcagtcatatccgtctcaggtatgtatgtcgatgagcaggaatgtccgcgaacagcgatttctttcgggga

SEQ ID NO: 425982 - DNA, 75 bp, synthetic construct
  source 1..75: mol_type = other DNA
gcgtgaaaagatgaaaaccctgtcgcgtcactcggatacggcgaaagcgttcgcatacctgctgaaacagtggga

SEQ ID NO: 425983 - DNA, 75 bp, synthetic construct
  source 1..75: mol_type = other DNA
ggaggactaacggggggggctggcgcagcgagtaccccgaataaccctcctgcacggggatccgatcgtttcgtt

SEQ ID NO: 425984 - DNA, 75 bp, synthetic construct
  source 1..75: mol_type = other DNA
tgatagaggggcgcttgatactctgaataaggctattggttcctcgtcatttcgtgttgaaactcaggacgatgg

SEQ ID NO: 425985 - DNA, 75 bp, synthetic construct
  source 1..75: mol_type = other DNA
tgtgtcaacggctgccagtattgaacagggaaatgagatcaataagcagttatcaagtgcaatgtctcagattca

SEQ ID NO: 425986 - DNA, 75 bp, synthetic construct
  source 1..75: mol_type = other DNA
ctcagtaaccgggagtttactgaagatgccattaacatgaggaaatatgagccttatctgctcaatgataattcc

SEQ ID NO: 425987 - DNA, 75 bp, synthetic construct
  source 1..75: mol_type = other DNA
atgaaaacgttattaccaaacgttaatacgtctgaaggttgttttgatattggtgttctgctcagtaaccgggag

SEQ ID NO: 425988 - DNA, 75 bp, synthetic construct
  source 1..75: mol_type = other DNA
tcaggtctacaaaacgctgctggtcgcagtgaacggcgatatgaaacatctggcggtggccgttacgccggtcgc

SEQ ID NO: 425989 - DNA, 75 bp, synthetic construct
  source 1..75: mol_type = other DNA
atgacacccgcagttaaattactcgaaaaaaacaagatttcgtttcaaatccatacctacgagcacgatccggct

SEQ ID NO: 425990 - DNA, 75 bp, synthetic construct
  source 1..75: mol_type = other DNA
ttctgtcgcaggtattccggttgctattgatgccagtccggaatgggctgttgaagccacaagatggacagaacg

SEQ ID NO: 425991 - DNA, 75 bp, synthetic construct
  source 1..75: mol_type = other DNA
gattcaagcggctggtaatggcgggtggcgtgagtgctaaccgcactctgcgggcgaaacttgcggaaatgatga

SEQ ID NO: 425992 - DNA, 75 bp, synthetic construct
  source 1..75: mol_type = other DNA
ggtaccgacgaccagactcgtgccgatattgcccgcgcctttgaagatgcggtggtcgatacgctgatgattaaa

SEQ ID NO: 425993 - DNA, 75 bp, synthetic construct
  source 1..75: mol_type = other DNA
tgctaatccgcaggaaggttctgttgtttttgacgatcagatccgtggtccgatcgagttcagcaaccaggagct

SEQ ID NO: 425994 - DNA, 75 bp, synthetic construct
  source 1..75: mol_type = other DNA
aacggtgcgatgatcgcctatgccggaatggtgcggtttaaagcaggcgcgacggcggatctcggcgttagcgtg

SEQ ID NO: 425995 - DNA, 75 bp, synthetic construct
  source 1..75: mol_type = other DNA
gctttaagcgactggtcatggcgggcggcgtgagtgctaaccgcacgttacgggcgaagctggctgaaatgatga

SEQ ID NO: 425996 - DNA, 75 bp, synthetic construct
  source 1..75: mol_type = other DNA
catgtgcgtaaaaccgtaccgttgatccaggcggcgctaaaggagtctggtttaacggcaaaagacattgatgct

SEQ ID NO: 425997 - DNA, 75 bp, synthetic construct
  source 1..75: mol_type = other DNA
gattcaaaaatgtggcttgaagcaaataaagcgatgaaatcagctatcaaccttccgtggtatcgcaggaaatga

SEQ ID NO: 425998 - DNA, 75 bp, synthetic construct
  source 1..75: mol_type = other DNA
atgccgtcagcaaatctgccagtgcgttcaacaccgacaagctgctgtggctgaaccatcactacattaacgcgc

SEQ ID NO: 425999 - DNA, 75 bp, synthetic construct
  source 1..75: mol_type = other DNA
gcatacgtcacgacaatgtgaccgaagatgacatcactgacctgattgcgcgcggtgaactcaccgctgccacgc

SEQ ID NO: 426000 - DNA, 75 bp, synthetic construct
  source 1..75: mol_type = other DNA
aacaggatacctgctgcggatttggcggcacgttctcggtcaaaatggccgaaatatccggcgagatggtgaaag

SEQ ID NO: 426001 - DNA, 75 bp, synthetic construct
  source 1..75: mol_type = other DNA
atgcgcaatgaaatagccattaatcaccagatgcttcgtgcggcacaaaacaaagcagtaatagcccgatttatt

SEQ ID NO: 426002 - DNA, 75 bp, synthetic construct
  source 1..75: mol_type = other DNA
accagatgcttcgtgcagcacaaaataaagcagtaatagccagatttattggtgattccaaaatgtggcttgaag

SEQ ID NO: 426003 - DNA, 75 bp, synthetic construct
  source 1..75: mol_type = other DNA
agccatctacaatcaagtaatagcgatgttgttgctgctgcagctataagtattgcagtgacagagatgaaaacc

SEQ ID NO: 426004 - DNA, 75 bp, synthetic construct
  source 1..75: mol_type = other DNA
tgctattaccgttctcggttatctgttttatatcggtgatcggaccaaaaccgatcttccttatctggaaaatac

SEQ ID NO: 426005 - DNA, 75 bp, synthetic construct
  source 1..75: mol_type = other DNA
ctggactgggagcaggtacaaaaggcgcatgaggcctataaacgtctgcctggcggtgcgcgtaacgacgcgggc

SEQ ID NO: 426006 - DNA, 75 bp, synthetic construct
  source 1..75: mol_type = other DNA
tggttgtgtgtgacagccatatggtcaaacgctatcaaggttactgcgtgttaactgctacattcagacaagtgt

SEQ ID NO: 426007 - DNA, 75 bp, synthetic construct
  source 1..75: mol_type = other DNA
gcagggagaacaatcgaaaaagcgcaagagaaagaaggattacttgtttttttaggaatgaaatccgttaatgac

SEQ ID NO: 426008 - DNA, 75 bp, synthetic construct
  source 1..75: mol_type = other DNA
ttattcctgaatgatgctacaaaacaagattttgataaaaggaaaatggagtttacatatcctggagcaaataaa

SEQ ID NO: 426009 - DNA, 75 bp, synthetic construct
  source 1..75: mol_type = other DNA
aacggggaaaaaaccgtatgatttattattcctgaatgatgctacaaaacaagattttgataaaaggaaaatgga

SEQ ID NO: 426010 - DNA, 75 bp, synthetic construct
  source 1..75: mol_type = other DNA
tcaccatcgcaggtaatttaaaagatatgtggcgcaatattgtcaccgtcggtaacgatattgaaacacgcagta

SEQ ID NO: 426011 - DNA, 75 bp, synthetic construct
  source 1..75: mol_type = other DNA
tgggcatggttctgctggtctacctcttcttaaatgcggagatgaatttttatcaccggcagatattgtcgaccg

SEQ ID NO: 426012 - DNA, 75 bp, synthetic construct
  source 1..75: mol_type = other DNA
gaaaatacaacaaaatttatctgtcaggggatggttctgctggcctaccccttcttaagtgcggagatgaatttt

SEQ ID NO: 426013 - DNA, 75 bp, synthetic construct
  source 1..75: mol_type = other DNA
atggcatttgcgatgaaagtaatctctcaagttgaagcgcagcgtaaaattctggaagaagcagtttccactgcg

SEQ ID NO: 426014 - DNA, 75 bp, synthetic construct
  source 1..75: mol_type = other DNA
gggcaccgggctggtggtgacggaattgatgggccagggcgtgagtgcaattaccggtgattattcccgtggtgc

SEQ ID NO: 426015 - DNA, 75 bp, synthetic construct
  source 1..75: mol_type = other DNA
ggcctttgacgcaccggatctcgacttgttccaccctgcggaagtttccccggatgaagccattgaactggcggc

SEQ ID NO: 426016 - DNA, 75 bp, synthetic construct
  source 1..75: mol_type = other DNA
gcatacgccacgacaatgtgaccgaagacgacatcaccagcctgattatgcgcggtgaactgactgcatccactc

SEQ ID NO: 426017 - DNA, 75 bp, synthetic construct
  source 1..75: mol_type = other DNA
ctggaaaaactgggttgtcgcgttaatttccccgagaagcaagggtgttgcggccagccagccatcaacagcggt

SEQ ID NO: 426018 - DNA, 75 bp, synthetic construct
  source 1..75: mol_type = other DNA
ggcgcagttctcagtgaagtcgcttccggtgtgatgaacacgaaaaccaaagggaaggtctcactcaatctggaa

SEQ ID NO: 426019 - DNA, 75 bp, synthetic construct
  source 1..75: mol_type = other DNA
cctgtgtgcagaagctgttgaagcgctgaaagcgcagtgtgttgctaatccggacgtgcaggtcgttatttctga

SEQ ID NO: 426020 - DNA, 75 bp, synthetic construct
  source 1..75: mol_type = other DNA
cattacacggcggtagggcagttggctcagcatgaagacacttctacggtgcagcttagcggcaacctgtttagc

SEQ ID NO: 426021 - DNA, 75 bp, synthetic construct
  source 1..75: mol_type = other DNA
acaccttggcatcactgatgtaggggcaagactcaatggtcgcgcagtgtaccatccttcatgtagcctttcccg

SEQ ID NO: 426022 - DNA, 75 bp, synthetic construct
  source 1..75: mol_type = other DNA
ggcttgagctactgccgtttcacgctcaggaaacgtgctgcgggtttggcggcacattctctgtaaaaatggcgg

SEQ ID NO: 426023 - DNA, 75 bp, synthetic construct
  source 1..75: mol_type = other DNA
gattttggcccacgtattggcgatatcccggacgcattactggcgcggatcatggcctgtcgacctttagtatca

SEQ ID NO: 426024 - DNA, 75 bp, synthetic construct
  source 1..75: mol_type = other DNA
aatgttggcggctgcgcgctgaatattgccatggcgttaaaacgcctcggcatcgaagcagacaacgcattgccg

SEQ ID NO: 426025 - DNA, 75 bp, synthetic construct
  source 1..75: mol_type = other DNA
ctcaatcgtcaggaggctgagattgccgccgaacgttttgctttatccgcagagataacaacacttggcaagcaa

SEQ ID NO: 426026 - DNA, 75 bp, synthetic construct
  source 1..75: mol_type = other DNA
ttgaagatcagattggcgaacttcttggcgcgaaagtggtgatcctgctggtgggtgaacgtccggggttggggc

SEQ ID NO: 426027 - DNA, 75 bp, synthetic construct
  source 1..75: mol_type = other DNA
atattttcattaacgacctcgacggcggggtatttgttaacaaacttggcgcggtattaagtgaagttgcctttg

SEQ ID NO: 426028 - DNA, 75 bp, synthetic construct
  source 1..75: mol_type = other DNA
cgcaagtcgttgatacgattggtgcaggtgatagccatgcaggtggcgtacttgccgggctggcatccggtctgt

SEQ ID NO: 426029 - DNA, 75 bp, synthetic construct
  source 1..75: mol_type = other DNA
gtttcgctgcgtggtagcgtggcgtggcagaaagggagtgatgattttgcccagacggcagggtttttgtcgatg

SEQ ID NO: 426030 - DNA, 75 bp, synthetic construct
  source 1..75: mol_type = other DNA
gtcagacgctggaagaactggtcacgcagatccgcgctcgctacccgtccgtacttctgatggcagatatagcaa

SEQ ID NO: 426031 - DNA, 75 bp, synthetic construct
  source 1..75: mol_type = other DNA
taacagtattctgctatctgacgcaatggcgatggtcagcctgataggagatcgccttaaccagaacgacaagta

SEQ ID NO: 426032 - DNA, 75 bp, synthetic construct
  source 1..75: mol_type = other DNA
agcagtacggggcagaccggtatgcagtgaactgcatattgccccgtcaacgtattaccattgtcagcaacagcg

SEQ ID NO: 426033 - DNA, 75 bp, synthetic construct
  source 1..75: mol_type = other DNA
ctggcagatgtcctgaaacaatgtgcggttccccccgcgctgcccggcaatcgtatccccggaagcgtggtctgg

SEQ ID NO: 426034 - DNA, 75 bp, synthetic construct
  source 1..75: mol_type = other DNA
atggcagccagtttcagccacatcactggcggaaatactgaaacaaagtgaagttcctccggcccttccgggtca

SEQ ID NO: 426035 - DNA, 75 bp, synthetic construct
  source 1..75: mol_type = other DNA
gcattaggcgctcatactgtggtggttgggggggcaataactcgtccgcagcaaataacggcacgctttatcgcg

SEQ ID NO: 426036 - DNA, 75 bp, synthetic construct
  source 1..75: mol_type = other DNA
gcctgccgtggtttgcgttgattaacatcagtttttcatcgttggttttgcttcgaggggtattgtttaatgaag

SEQ ID NO: 426037 - DNA, 75 bp, synthetic construct
  source 1..75: mol_type = other DNA
tattggaattatgcgaattattcattcagtaaaaaagattgaacgtttttcactggtgaataacgatacaaataa

SEQ ID NO: 426038 - DNA, 75 bp, synthetic construct
  source 1..75: mol_type = other DNA
gcaatcggcatatctcgtgtatccgtaacaaaatgggaaaatggctcttcaaaacctgacggtgagaatttgcat

SEQ ID NO: 426039 - DNA, 75 bp, synthetic construct
  source 1..75: mol_type = other DNA
tggttttgctaaatccccattaacaccagagcagttaaagcgaatagcagagttgatgaaaagtattaatcatgt

SEQ ID NO: 426040 - DNA, 75 bp, synthetic construct
  source 1..75: mol_type = other DNA
tttcagcagtggttcttccctggtccgaatggtgtgaggagccacaggcgctgacgcttttcggacaggtacaaa

SEQ ID NO: 426041 - DNA, 75 bp, synthetic construct
  source 1..75: mol_type = other DNA
gacgcgaccagttgtgttaaaaatatgatcgcagacttagaaaaaagcgcaaaaataaaacgttccgaactcgat

SEQ ID NO: 426042 - DNA, 75 bp, synthetic construct
  source 1..75: mol_type = other DNA
agcatggagacagcaaaatggcgtaggcccaatgccagcggcaattggggcattgtgtcagcggtgcgttgggac

SEQ ID NO: 426043 - DNA, 75 bp, synthetic construct
  source 1..75: mol_type = other DNA
tctaatgcgtctcttgatgcgattgaggtgctggctaacgccttgagcgtcgagccgtgggagttgttatcgtca

SEQ ID NO: 426044 - DNA, 75 bp, synthetic construct
  source 1..75: mol_type = other DNA
atggaactcagaaacgtcacgcgttattacccgaaagagatgccttatggtgaaggcattcagtatttccgcagt

SEQ ID NO: 426045 - DNA, 75 bp, synthetic construct
  source 1..75: mol_type = other DNA
acgcagccgatggttcctgttttcaccccggtttggcgagcacccgtgatggttcgtttggcgtaggtgataaag

SEQ ID NO: 426046 - DNA, 75 bp, synthetic construct
  source 1..75: mol_type = other DNA
cgctgcgaatcctggtcgatggcccgccgccgtgctccgtgaagggaagcgcggtggaatttggcaatgtggtga

SEQ ID NO: 426047 - DNA, 75 bp, synthetic construct
  source 1..75: mol_type = other DNA
atgcgagtgactaagctcgttgacgtgagattggattcaaaatgtctcatatggagcgtggccttacagtggtca

SEQ ID NO: 426048 - DNA, 75 bp, synthetic construct
  source 1..75: mol_type = other DNA
accacttatgataactaatgaagatgtaattcttaaacatctacgatctgcggcaaatggcaaagtggatagtta

SEQ ID NO: 426049 - DNA, 75 bp, synthetic construct
  source 1..75: mol_type = other DNA
atgttccagcttccgtgttgcagctgcatccttcgctgatggtaatcgctgataaagccgctgccgcagaattag

SEQ ID NO: 426050 - DNA, 75 bp, synthetic construct
  source 1..75: mol_type = other DNA
gggcgcggtgacgttctaaaagttattcggcttgtgaaccataacgccgacgctggcggctatcagggactttct

SEQ ID NO: 426051 - DNA, 75 bp, synthetic construct
  source 1..75: mol_type = other DNA
atgtatcccgtctttatcccgttggttttaccattgtggaagtggatgaactaccggatggcttttgtatagagg

SEQ ID NO: 426052 - DNA, 75 bp, synthetic construct
  source 1..75: mol_type = other DNA
ttcttataaatggaggaaaatatatttatgacagacccatgcacaaaccatccgcaaacaagttatccaatgata

SEQ ID NO: 426053 - DNA, 75 bp, synthetic construct
  source 1..75: mol_type = other DNA
aattccgcctgcgttcatagataacgatgagcgggagctatcagaatgggatgattgggagatctctgtatgcga

SEQ ID NO: 426054 - DNA, 75 bp, synthetic construct
  source 1..75: mol_type = other DNA
attcaaaatgtctcatatggagcgtggccttacagtggtcaaagctgcacattcagtgcatgaaaaagaccttga

SEQ ID NO: 426055 - DNA, 75 bp, synthetic construct
  source 1..75: mol_type = other DNA
tatgtgcgtgggacgtttaaaaatccgcaggctggggtgaaagccgggccgttgattgctcgcggagccgttgcg

SEQ ID NO: 426056 - DNA, 75 bp, synthetic construct
  source 1..75: mol_type = other DNA
tggcgctgctgaccaaaacggtctggttgccgtggatcaagctggaaaagcctgatgcgcgcctgattcgcctct

SEQ ID NO: 426057 - DNA, 75 bp, synthetic construct
  source 1..75: mol_type = other DNA
ggtgtcgatttacggcttaaattttctggcgattcgctgggtgatctctatgaactgacgggcgttctgctgccc

SEQ ID NO: 426058 - DNA, 75 bp, synthetic construct
  source 1..75: mol_type = other DNA
catggcagcagtttgccgattagcgatctttcaacccatatcatcctcaaaaacgctgacctgcgcctgcaaccg

SEQ ID NO: 426059 - DNA, 75 bp, synthetic construct
  source 1..75: mol_type = other DNA
accgttgattggcgttgattccgggaaaggggcagaaaagtcgaaacggtctgaacagaagaagggcgaaaaaag

SEQ ID NO: 426060 - DNA, 75 bp, synthetic construct
  source 1..75: mol_type = other DNA
tgttcagcctgcgggcaaagtgctgccatatgaccgcttcgaaaccgataaatgggatgcgatggatgccgatgt

SEQ ID NO: 426061 - DNA, 75 bp, synthetic construct
  source 1..75: mol_type = other DNA
tatctacgtagcatggagaccgcaaagtggcgtaggcctaatgccagtggcaattggggcattgtgtcagcggtg

SEQ ID NO: 426062 - DNA, 75 bp, synthetic construct
  source 1..75: mol_type = other DNA
tggcacgttttccgaagcacttgagtatctacgtagcatggagaccgcaaagtggcgtaggcctaatgccagtgg

SEQ ID NO: 426063 - DNA, 75 bp, synthetic construct
  source 1..75: mol_type = other DNA
tggcacgttttatgaagctcttgaatatctacgtagcatggagacagcaaaatggcgtaggcccaatgccagcgg

SEQ ID NO: 426064 - DNA, 75 bp, synthetic construct
  source 1..75: mol_type = other DNA
atgaaagcgttctttctggccggatctgccgcgctattgctggcctgtggcgtgaccgttttcccggcaatggcg

SEQ ID NO: 426065 - DNA, 75 bp, synthetic construct
  source 1..75: mol_type = other DNA
tcgtatcccttattcttgccgcgcgggcatttgtggaagttgccgtgttcagcttttagaaggcgaagtcacgcc

SEQ ID NO: 426066 - DNA, 75 bp, synthetic construct
  source 1..75: mol_type = other DNA
ctggcatggtgttactggcctgcggctccgcctgggccgatagtaaaacggtcaacttaacgcttcgtatactgg

SEQ ID NO: 426067 - DNA, 75 bp, synthetic construct
  source 1..75: mol_type = other DNA
atatcattatttatatccaccattaatcctttccctgtagcgaaggattttcataatgcttacttcaccttgtat

SEQ ID NO: 426068 - DNA, 75 bp, synthetic construct
  source 1..75: mol_type = other DNA
gaactgaaaaactactttaccagtctgtgtgcagaggaaggggtaactcaggcagagttgatagaaaggcttatc

SEQ ID NO: 426069 - DNA, 75 bp, synthetic construct
  source 1..75: mol_type = other DNA
gactcccgaattaaacatcagttacaacaggggcgtctgtgggtatggatgcctgaacaaccaggacttgttgaa

SEQ ID NO: 426070 - DNA, 75 bp, synthetic construct
  source 1..75: mol_type = other DNA
gaggacgcagcagctgaaaaactcagtaaaacagcgcaggtaactccgctcccaaaagacccgacccagccctga

SEQ ID NO: 426071 - DNA, 75 bp, synthetic construct
  source 1..75: mol_type = other DNA
tctccaagaaaataaattagatgacagtttttattgcaatcaatattgcaatcttgaattcaaaccttttgaaat

SEQ ID NO: 426072 - DNA, 75 bp, synthetic construct
  source 1..75: mol_type = other DNA
ccgctgttgcaagaaaacgtcttacacacaaagagataaaagtttttgtcaaaaatcctctgaaagatctcatgg

SEQ ID NO: 426073 - DNA, 75 bp, synthetic construct
  source 1..75: mol_type = other DNA
atgacagaatcaacatcccgtcgcccggcatatgctcgcctgttggatcgtgcggtacgcattctggcggtgcgc

SEQ ID NO: 426074 - DNA, 75 bp, synthetic construct
  source 1..75: mol_type = other DNA
atcagattacgtttaccggacgtgatgcaaacggcgttttacccatgtttacccgcgtacaggccatgaccggta

SEQ ID NO: 426075 - DNA, 75 bp, synthetic construct
  source 1..75: mol_type = other DNA
catcacgtgccgccacgctggggcgcgatattgtcccagccagattatcagtgcattgtccgtttccggggtgta

SEQ ID NO: 426076 - DNA, 75 bp, synthetic construct
  source 1..75: mol_type = other DNA
aacggctggcaacctgcgcaggtcagtcagttgcttgatgagattgataacgttgacctgctggtgaccaatctg

SEQ ID NO: 426077 - DNA, 75 bp, synthetic construct
  source 1..75: mol_type = other DNA
gaaatttcgcgcgagcggtcagcccgtgtttctggtgcgcgttggctggtctgccgattacgccgaagcattaaa

SEQ ID NO: 426078 - DNA, 75 bp, synthetic construct
  source 1..75: mol_type = other DNA
ccagtaccgaacagcacaacaacagcatcaaccatatctacccgcgcattgcccgtgtgcgtcgcgtggaagaga

SEQ ID NO: 426079 - DNA, 75 bp, synthetic construct
  source 1..75: mol_type = other DNA
gctcgccgactgtactctcaccgttttcaaaaagctcaaaacccaagaactgatcaagtccgtcaacggtcagcc

SEQ ID NO: 426080 - DNA, 75 bp, synthetic construct
  source 1..75: mol_type = other DNA
cttcctcattgagtcaaaagcggtttgtgcgcagaggtaagcctatgtctgactctgagaaacagatggccgctg

SEQ ID NO: 426081 - DNA, 75 bp, synthetic construct
  source 1..75: mol_type = other DNA
aaccgcagccttttgtttatcgccgtagcggcgcttaccagaaactcaccattggctcagactggggtcaactgt

SEQ ID NO: 426082 - DNA, 75 bp, synthetic construct
  source 1..75: mol_type = other DNA
ccacctcaaagggggaccggaatccgtcggaagttcgcctgctggttcagatacagcgtaatggtggctgggtga

SEQ ID NO: 426083 - DNA, 75 bp, synthetic construct
  source 1..75: mol_type = other DNA
ataaaaatgaaatattttcaaggagtgatgatgtgaagtttattgaagggaatactcaagaggtagatatgtggt

SEQ ID NO: 426084 - DNA, 75 bp, synthetic construct
  source 1..75: mol_type = other DNA
agttaatcggattgttgctttaatatccatcgtaactatgttctatcttcatttatctctcattgaaaaaataaa

SEQ ID NO: 426085 - DNA, 75 bp, synthetic construct
  source 1..75: mol_type = other DNA
ctaccttccgggcgtgtgtacaacatcaccaacggcgaacatcgcacactgcgcagcatcgtgcagaagctgatc

SEQ ID NO: 426086 - DNA, 75 bp, synthetic construct
  source 1..75: mol_type = other DNA
agccgccgctaacccactacggcgtctccaagttgaattttgactttacgctggatattacgcgcgcgcaggaag

SEQ ID NO: 426087 - DNA, 75 bp, synthetic construct
  source 1..75: mol_type = other DNA
ttgaggatttcccggacgctgaagaacggcggttaatgtacgtggcgctgacccgggcacgccatcgggtatggg

SEQ ID NO: 426088 - DNA, 75 bp, synthetic construct
  source 1..75: mol_type = other DNA
agacgacgttgtttgccgttggtgatgactggcaggcgatttatcgcttcagcggtgcgcaaatgtcactcacta

SEQ ID NO: 426089 - DNA, 75 bp, synthetic construct
  source 1..75: mol_type = other DNA
ttattactggcgtttggccgaaaagcggcagaagagatggacgagcggattcgcgaacggctgcataccgaagag

SEQ ID NO: 426090 - DNA, 75 bp, synthetic construct
  source 1..75: mol_type = other DNA
ggtgttttacgccagcaactggatttgattgccacgcgcaccggagaaaataaatggctgacgcgtgagcaaacc

SEQ ID NO: 426091 - DNA, 75 bp, synthetic construct
  source 1..75: mol_type = other DNA
aggcgctcggttgcagcataatcaggcgtataccgaagctatgcttaccgagtatgcggattttttccgtcaggt

SEQ ID NO: 426092 - DNA, 75 bp, synthetic construct
  source 1..75: mol_type = other DNA
agagagccagcttgatgctttgctggataaactctcaggttatgccaaaccggatgagcgcattctggtactggc

SEQ ID NO: 426093 - DNA, 75 bp, synthetic construct
  source 1..75: mol_type = other DNA
aacattttaaaatcatccgtgcacatgatgctgtacaatcaggttgaaaacactgccagaggatgcattgagtca

SEQ ID NO: 426094 - DNA, 75 bp, synthetic construct
  source 1..75: mol_type = other DNA
gaaattgccgataaagagttcatcgtgtttgtcggcccgtcgggctgcggtaagtcgaccaccctgcgcatgatt

SEQ ID NO: 426095 - DNA, 75 bp, synthetic construct
  source 1..75: mol_type = other DNA
gccgcatccggcatgaacaaagctcactttgtctgcaatctgattccgggccaccatgcccagtttattctttac

SEQ ID NO: 426096 - DNA, 75 bp, synthetic construct
  source 1..75: mol_type = other DNA
agtttttggttaaagaaggcgatctccttttcaatcgtactaacagtaaggaacttgttggtaaaacagctgtgt

SEQ ID NO: 426097 - DNA, 75 bp, synthetic construct
  source 1..75: mol_type = other DNA
gaagcttcaagtaaatatattacatagaattgtttcagataatgaaacagggcaatccctttataaaaagatagg

SEQ ID NO: 426098 - DNA, 75 bp, synthetic construct
  source 1..75: mol_type = other DNA
aatatgaagaaagagcaagagacattatggaactgctttctcttgcatcatctatagagattcatactcagcagt

SEQ ID NO: 426099 - DNA, 75 bp, synthetic construct
  source 1..75: mol_type = other DNA
agggagttctggtgcagagggtattacgtcgatacgatgggtaagaacacggcgaagatacaggattacataaag

SEQ ID NO: 426100 - DNA, 75 bp, synthetic construct
  source 1..75: mol_type = other DNA
aatcaacaattaatttgtttgaaaaacttgtcgttaataacaagttaaccttaagagatacttttggttgggtaa

SEQ ID NO: 426101 - DNA, 75 bp, synthetic construct
  source 1..75: mol_type = other DNA
cattttgcagtaagcaaatggattttttctctatattcgattttgaagaagaggaaaaagaaataataactatag

SEQ ID NO: 426102 - DNA, 75 bp, synthetic construct
  source 1..75: mol_type = other DNA
attgcttgtgaagatgttaattttcccgggcatggtcacagcattttgttatccgtggatccgattagcttcaac

SEQ ID NO: 426103 - DNA, 75 bp, synthetic construct
  source 1..75: mol_type = other DNA
aaaaggtttttttaaagcaaaatgtgaagctgtattaaggtgggattatatgaaaaaaatgaaaatcatttcacc

SEQ ID NO: 426104 - DNA, 75 bp, synthetic construct
  source 1..75: mol_type = other DNA
gtagagcaataggcagtattttgagaaagctgtgcgagtggaaaagcgtacggattcttgaagctgaatgctgtg

SEQ ID NO: 426105 - DNA, 75 bp, synthetic construct
  source 1..75: mol_type = other DNA
tgccgcaatcgttggggaaactctggttacttgtcagcatggcgctcggcgtaattttcgtctggatgatgacct

SEQ ID NO: 426106 - DNA, 75 bp, synthetic construct
  source 1..75: mol_type = other DNA
gggcgtttaccggctcgcgacgcggaggtcgcgccgggctgtttgaaatcgcccacggtggcacgctgtttttgg

SEQ ID NO: 426107 - DNA, 75 bp, synthetic construct
  source 1..75: mol_type = other DNA
gcaatgtgtagcgggtggttttatcgttctggctttggcgctgctcaaaggcgacctgcgagcagaatcccagca

SEQ ID NO: 426108 - DNA, 75 bp, synthetic construct
  source 1..75: mol_type = other DNA
ttgtgtttgttcctgcccaatgacagtacgttgattaaggggctaaaagcgcatatgtcgcgaagtagtggggaa

SEQ ID NO: 426109 - DNA, 75 bp, synthetic construct
  source 1..75: mol_type = other DNA
cctcaacatgctgcgcagtctgatcatgcaatataaaccgacgcatgcagcggtggtctttgacgccaagggaaa

SEQ ID NO: 426110 - DNA, 75 bp, synthetic construct
  source 1..75: mol_type = other DNA
tgtggttggcacgggatagccatataccgacatataatccctgcgcacactctcaccagtgacgataacaatcgt

SEQ ID NO: 426111 - DNA, 75 bp, synthetic construct
  source 1..75: mol_type = other DNA
ctggaagaaaaagaggttacccgcgtcggcgggcatcagcctgttccggtggatgtgcgggtcattagcgccact

SEQ ID NO: 426112 - DNA, 75 bp, synthetic construct
  source 1..75: mol_type = other DNA
ttacgcaacccggagcaggtttccgtcgctctacgcggcaagattgccgccgctcttgatgaactgggctatatt

SEQ ID NO: 426113 - DNA, 75 bp, synthetic construct
  source 1..75: mol_type = other DNA
aggatgtggctgaccgtgtaggcgtgaccaaaatgacggtcagccgttttttacgcaacccggagcaggtttccg

SEQ ID NO: 426114 - DNA, 75 bp, synthetic construct
  source 1..75: mol_type = other DNA
tagcgtgatggttgagcaatcttcttcttactcttccggtattgaactgattcgccaggcgcggcgggaatatcc

SEQ ID NO: 426115 - DNA, 75 bp, synthetic construct
  source 1..75: mol_type = other DNA
atggaatatcgacgggctgatcctcaccgaacgtacccacacgccgcgcaccttaaagatgattgaagtggcagg

SEQ ID NO: 426116 - DNA, 75 bp, synthetic construct
  source 1..75: mol_type = other DNA
atgctggcgcactacggttataaaccggaaatggagcaagaacgcctcgaatccatgctctcctggaatatcgac

SEQ ID NO: 426117 - DNA, 75 bp, synthetic construct
  source 1..75: mol_type = other DNA
caggttttcgcggaagtattacgcggcatcgaaagcgtcaccgacgcgcacggttatcagactatgctggcgcac

SEQ ID NO: 426118 - DNA, 75 bp, synthetic construct
  source 1..75: mol_type = other DNA
ccgttcagaacagctttgggaagaaaggttcctttagcgtgggtgaacgtcgatagctcaaacggtcgagcaact

SEQ ID NO: 426119 - DNA, 75 bp, synthetic construct
  source 1..75: mol_type = other DNA
cttgaaggccgcaagggagcagaagaaggactcagcctgcagagtcgcccggatggcaggaccatgctggtgaac

SEQ ID NO: 426120 - DNA, 75 bp, synthetic construct
  source 1..75: mol_type = other DNA
ggacgattaatcagaagaaatccacggcagggacgaacgttgatgaaaatgcccaacctcagaaaagtgcggcgt

SEQ ID NO: 426121 - DNA, 75 bp, synthetic construct
  source 1..75: mol_type = other DNA
agtgctggggatgactctggcactgatgatggccagtcagagtgcgatggcctccctggcagcagaccagacccg

SEQ ID NO: 426122 - DNA, 75 bp, synthetic construct
  source 1..75: mol_type = other DNA
taaaattgattgcgacggtgttataaagaacattcctgtaagcacatataacaaactaatatacgcctataataa

SEQ ID NO: 426123 - DNA, 75 bp, synthetic construct
  source 1..75: mol_type = other DNA
tatttttatactctcgtgtttatcagcggcatggtctgcattaaagggaaatgaaaaaatctttgatataagtgg

SEQ ID NO: 426124 - DNA, 75 bp, synthetic construct
  source 1..75: mol_type = other DNA
ggacaattaacaagaagaaaccgacagcaccggaagcagcaaaaactgagaaagcggataccgcagagcagaaat

SEQ ID NO: 426125 - DNA, 75 bp, synthetic construct
  source 1..75: mol_type = other DNA
cgtgcggcgttgtttgcgacccgtatatttgtgtgagttcagatggcatttccccagagttaacaaggaaatatc

SEQ ID NO: 426126 - DNA, 75 bp, synthetic construct
  source 1..75: mol_type = other DNA
tattgcagtggcgctgcgcacgaagctgaaactgttctaccgcccgaaggcactgcttgaaggccgcaagggggc

SEQ ID NO: 426127 - DNA, 75 bp, synthetic construct
  source 1..75: mol_type = other DNA
gagaaagacacccgtccgacctttgtggtaacgccgtccttcttcaaggtgaagccggaggggcagcagacactg

SEQ ID NO: 426128 - DNA, 75 bp, synthetic construct
  source 1..75: mol_type = other DNA
ggaccattaaccagaaaaagactgcagccccttccgggcagaaggcatctgattcgccggttaatccgtctgata

SEQ ID NO: 426129 - DNA, 75 bp, synthetic construct
  source 1..75: mol_type = other DNA
ccggctctggagggcagcggtattgcggtggcgctgcgcacgaagctgaagctgttctatcgtccgaaggcactg

SEQ ID NO: 426130 - DNA, 75 bp, synthetic construct
  source 1..75: mol_type = other DNA
aaaagttgagtctttagatgattatggtgaactgaaagtttgggatattaacggtaagaatatcagtgatggaaa

SEQ ID NO: 426131 - DNA, 75 bp, synthetic construct
  source 1..75: mol_type = other DNA
tggatggcttaaagaatatgattctattgcgttgcagcaggcggtaattaacctcgacgtggcttttctaatttt

SEQ ID NO: 426132 - DNA, 75 bp, synthetic construct
  source 1..75: mol_type = other DNA
tttataacaccgtgttaggtaaggtatacgacgatcaggacacggcagtagaagcaaatgaactggaacaactca

SEQ ID NO: 426133 - DNA, 75 bp, synthetic construct
  source 1..75: mol_type = other DNA
aaaaccaaattctataacgttaatggtgaacgtgtgccaatgctcgccagcttccttgatacatcgaacggtcga

SEQ ID NO: 426134 - DNA, 75 bp, synthetic construct
  source 1..75: mol_type = other DNA
atgaaactgatttctaataaggcaaaattaaaaaagattcttaaaaatgccgcaaaatatatcactccaccgcct

SEQ ID NO: 426135 - DNA, 75 bp, synthetic construct
  source 1..75: mol_type = other DNA
cctgttattcaaactcctgaaccacgtcgaaacattatcaaacgaaacagaccagttaataagcctcgtggtttc

SEQ ID NO: 426136 - DNA, 75 bp, synthetic construct
  source 1..75: mol_type = other DNA
gagagcaacccgtgaaagtgaagtagcaggattctggatcagtcgtctgtattcacctttcagcacgatccgcgc

SEQ ID NO: 426137 - DNA, 75 bp, synthetic construct
  source 1..75: mol_type = other DNA
cttccttgatacatcgaacggtcgattcactcaagccggataccgtatttgcggcaagtggaagaacctacacgc

SEQ ID NO: 426138 - DNA, 75 bp, synthetic construct
  source 1..75: mol_type = other DNA
ggaacaacgcgcaaccactttcggtgatgatgcaaggatcgtaattgcttctactccaacttcgcgggatggggc

SEQ ID NO: 426139 - DNA, 75 bp, synthetic construct
  source 1..75: mol_type = other DNA
tatctgaacagttgaaacggcagggtaatacgacacgttgggtaaaagttggacagcaacgtaacgagggattgg

SEQ ID NO: 426140 - DNA, 75 bp, synthetic construct
  source 1..75: mol_type = other DNA
accatcaaagagcatgggatatattatctgatacttatgatgatatgaagagattaaatttaggtgggactgatc

SEQ ID NO: 426141 - DNA, 75 bp, synthetic construct
  source 1..75: mol_type = other DNA
taagtgaatctgttaagcgtactactactggcgtgagatgggtaaaaaatccaggtgcgacacgaaacgaggcgc

SEQ ID NO: 426142 - DNA, 75 bp, synthetic construct
  source 1..75: mol_type = other DNA
caagaacgggtggttttacccttaaaattctgggcgtaaacaaccttaaaacgatgatccgtgaaatgattaacc

SEQ ID NO: 426143 - DNA, 75 bp, synthetic construct
  source 1..75: mol_type = other DNA
cagttgggtaagaccatgattcttaacggaattatcttccatcggatcgcgagtaaccctactaatatcggggtg

SEQ ID NO: 426144 - DNA, 75 bp, synthetic construct
  source 1..75: mol_type = other DNA
tatcagaaacaggtcatattcatataataaataatgtatataattttattgttaagtatgtaaaggataatacag

SEQ ID NO: 426145 - DNA, 75 bp, synthetic construct
  source 1..75: mol_type = other DNA
tgttctacagagagaagcgtagagcaataggcagtattttgagaaagctgtgtgagtggaaaagtgtacggattc

SEQ ID NO: 426146 - DNA, 75 bp, synthetic construct
  source 1..75: mol_type = other DNA
aaacgctattatctgggtaatgctgacgagatcgcagcaaaagcagctgctgttgctaaccagggtaaagcgaaa

SEQ ID NO: 426147 - DNA, 75 bp, synthetic construct
  source 1..75: mol_type = other DNA
ttgtgggtactgatgggcattggctttatcgcctcaatgcttcaccttggctcacctatgcgcgcctttaactca

SEQ ID NO: 426148 - DNA, 75 bp, synthetic construct
  source 1..75: mol_type = other DNA
ctgatgtcctggcggatcgtgcttttggccgttgccctgtgcttgtggattgcaccacagctaaaaggttatcag

SEQ ID NO: 426149 - DNA, 75 bp, synthetic construct
  source 1..75: mol_type = other DNA
ggcgttggtgccggattatggtgcgctgatggcctggcggatcgtacttttggcagtggcgttgtgtttgtggat

SEQ ID NO: 426150 - DNA, 75 bp, synthetic construct
  source 1..75: mol_type = other DNA
gggtactacgtcgatacggtgggtaagaacacggcgaagatacaggattacataaagcaccagcttgaagaggat

SEQ ID NO: 426151 - DNA, 75 bp, synthetic construct
  source 1..75: mol_type = other DNA
agtaaacgcagtctgatgctctgtgagcaatttagagatctaaaattcaaatacaggaacagggagttttggtgt

SEQ ID NO: 426152 - DNA, 75 bp, synthetic construct
  source 1..75: mol_type = other DNA
tgttcccgcctgactatgttaaccagttgcgtgtttttgccgtggttaaccagttccgtcttcagtattcagagg

SEQ ID NO: 426153 - DNA, 75 bp, synthetic construct
  source 1..75: mol_type = other DNA
acgagcaggtgaaacagtggcgtcgtggttttgcggtgactccgccggaactgactaaagatgatgagcgttatc

SEQ ID NO: 426154 - DNA, 75 bp, synthetic construct
  source 1..75: mol_type = other DNA
acggtaactctttacgtgcgctggtgaaatatcttgataacatgagcgaagaagagattcttgagctgaatatcc

SEQ ID NO: 426155 - DNA, 75 bp, synthetic construct
  source 1..75: mol_type = other DNA
actgaaagtctggcgctgaccattgaccgcgtgatcccttactggaatgaaaccattctgccgcgtatgaagagc

SEQ ID NO: 426156 - DNA, 75 bp, synthetic construct
  source 1..75: mol_type = other DNA
tgaaaatatcaccgaacgctttttgtcgtcggtgaaaagcgcgtcagtgccgaggtggttgcggcacagttggtg

SEQ ID NO: 426157 - DNA, 75 bp, synthetic construct
  source 1..75: mol_type = other DNA
gacagagcacaaaggaagtcgccgccggctccgctttacccggccatgcagggcatggccttgtgggttttcagt

SEQ ID NO: 426158 - DNA, 75 bp, synthetic construct
  source 1..75: mol_type = other DNA
gtgatcccgcctcctactcgatgcacagaccccccccagcctagcagggggttccggaaagctttcagctttgag

SEQ ID NO: 426159 - DNA, 75 bp, synthetic construct
  source 1..75: mol_type = other DNA
catagtttttgcgccaaaataccgaagacaagtgttctacagagagaagcgtagagcaataggctgtattttgag

SEQ ID NO: 426160 - DNA, 75 bp, synthetic construct
  source 1..75: mol_type = other DNA
gaacacggcgaagatacaggactacataaagcaccagcttgaagatgataaaatgggggagcagttatcgattcc

SEQ ID NO: 426161 - DNA, 75 bp, synthetic construct
  source 1..75: mol_type = other DNA
cctgcatccccgccttatcgcccggcttttatggaggcacggcaccgcccggtgtcgcggaatatgtgaacaacg

SEQ ID NO: 426162 - DNA, 75 bp, synthetic construct
  source 1..75: mol_type = other DNA
ccgcctttttcctgccggtcccggacagagcacaaaggaagtcgccgccggctccgctttacccggccatgcggg

SEQ ID NO: 426163 - DNA, 75 bp, synthetic construct
  source 1..75: mol_type = other DNA
gtcgtcggtgaaaagcgcgtcagtgccgaggtggtcgcggcacagttggtgaaagaggtgaaacgctacctggca

SEQ ID NO: 426164 - DNA, 75 bp, synthetic construct
  source 1..75: mol_type = other DNA
tggagaggtgctactggctggtgtgccgcgccatgttgctgagcgtgaaatcgctacgctggcgggtagtttttc

SEQ ID NO: 426165 - DNA, 75 bp, synthetic construct
  source 1..75: mol_type = other DNA
acggtcgcccatccctcatgccatctgctgaccaatatcgcggtggtggagcgtttcttgccggtgcggtttagt

SEQ ID NO: 426166 - DNA, 75 bp, synthetic construct
  source 1..75: mol_type = other DNA
gcggcggcgattaccgcttcgccatcggtagcgcaggtagctgcatgttggtgctgcaaacggtgctgcccgcgc

SEQ ID NO: 426167 - DNA, 75 bp, synthetic construct
  source 1..75: mol_type = other DNA
acggtcgcgcatccctcatgccatctgctgaccaatatcgcggtggtggaacggttcttacctgtgcggtttact

SEQ ID NO: 426168 - DNA, 75 bp, synthetic construct
  source 1..75: mol_type = other DNA
gccatctgctgaccaatatcgcggtgctggagcgcttcttgccggtacggttttgtttgatagaaacagatggcg

SEQ ID NO: 426169 - DNA, 75 bp, synthetic construct
  source 1..75: mol_type = other DNA
agcgatccgaaccgcctgaacacgctgttcccgcctgactatgttaaccagttgcgtgtttttgccgtggttaac

SEQ ID NO: 426170 - DNA, 75 bp, synthetic construct
  source 1..75: mol_type = other DNA
cattaactttctcattttaggttttgccggttcggtcattgtgactggtggcctgaaattaattgataaaacact

SEQ ID NO: 426171 - DNA, 75 bp, synthetic construct
  source 1..75: mol_type = other DNA
cgatgattgccgttgatgcgtggctccaggccgagcaaccgcgtgtgcgtatgattatgcaggtacacgatgaac

SEQ ID NO: 426172 - DNA, 75 bp, synthetic construct
  source 1..75: mol_type = other DNA
cgtaccgggcgtgggtgaaaaaaccgcgcaggcactgctgcaaggtcttggtgggctggatacgctgtatgctga

SEQ ID NO: 426173 - DNA, 75 bp, synthetic construct
  source 1..75: mol_type = other DNA
gttaaccggtacacgcaaatcagaaatgctgaatgtcatgcacaaacatattgatcgggataacaggtcgttatt

SEQ ID NO: 426174 - DNA, 75 bp, synthetic construct
  source 1..75: mol_type = other DNA
gttaaccggtacacgcaaaacagaaatgcttaatgtcaggcatgaacatatcgaccgggccaatcgtactctgtt

SEQ ID NO: 426175 - DNA, 75 bp, synthetic construct
  source 1..75: mol_type = other DNA
tttctttctgataatgcattgtcgctatggtgcaaaggatgttgttatcaaaaatgatggtcttgcaccaataag

SEQ ID NO: 426176 - DNA, 75 bp, synthetic construct
  source 1..75: mol_type = other DNA
aacctttcgtgatgaactgtttgaacattacaaatcacatcgcccgccgatgccggacgatctgcgagcgcagat

SEQ ID NO: 426177 - DNA, 75 bp, synthetic construct
  source 1..75: mol_type = other DNA
gcagccattaacgcgccaatgcagggaaccgccgccgacattatcaaacgggcgatgattgccgttgatgcgtgg

SEQ ID NO: 426178 - DNA, 75 bp, synthetic construct
  source 1..75: mol_type = other DNA
tcctcggaccggaagaggtggtgaataagtacggcgtgccgccagaactgatcatcgacttcctggcgctgatgg

SEQ ID NO: 426179 - DNA, 75 bp, synthetic construct
  source 1..75: mol_type = other DNA
ctcatcaataccatgacgaatacgatccttggcccggaagaggtcgtgaataagtacggtgtaccgccggaactg

SEQ ID NO: 426180 - DNA, 75 bp, synthetic construct
  source 1..75: mol_type = other DNA
cgaagctgaagtcgacttacaccgacaagctgccgttgatgatcaacccgaaaaccgggcgcgtgcatacgtcgt

SEQ ID NO: 426181 - DNA, 75 bp, synthetic construct
  source 1..75: mol_type = other DNA
acgaagcgccagaagtgacggcaacggtgatttcttatgacaactacgtcaccatccttgatgaagaaacactga

SEQ ID NO: 426182 - DNA, 75 bp, synthetic construct
  source 1..75: mol_type = other DNA
ttgagggtcgtattcacggccagcagtatgcaccgtctacctgtaacagggcactggctattctgaaaactatgg

SEQ ID NO: 426183 - DNA, 75 bp, synthetic construct
  source 1..75: mol_type = other DNA
agtgattttcatgttgcttcacttcagccaggtagaacgcgtagtgttatttcagaaacgccgccaaatgactgt

SEQ ID NO: 426184 - DNA, 75 bp, synthetic construct
  source 1..75: mol_type = other DNA
attcgatgatattttatttatggatgatgactttgatgatccttccactaaggatgatcccgtggagaatagtcc

SEQ ID NO: 426185 - DNA, 75 bp, synthetic construct
  source 1..75: mol_type = other DNA
agatacccgccgttgggtagaacatggtttactggattatattgccccacaaatttactggcctttctcacgtag

SEQ ID NO: 426186 - DNA, 75 bp, synthetic construct
  source 1..75: mol_type = other DNA
tttcagaggaagttgaatatgaattaagcaacttcgattgtggagaagagtatctgaatacttttctcactgatc

SEQ ID NO: 426187 - DNA, 75 bp, synthetic construct
  source 1..75: mol_type = other DNA
tttaggcagactggctttggacaaatctcttcaaggtcaggggcttggctcaatgcttgtaactcacgcaatgcg

SEQ ID NO: 426188 - DNA, 75 bp, synthetic construct
  source 1..75: mol_type = other DNA
tcgcctgactattctgcaggaagaccaaggacaattactgactcttgccggtgaacctgacggaaaactccgcgc

SEQ ID NO: 426189 - DNA, 75 bp, synthetic construct
  source 1..75: mol_type = other DNA
gctttttaatgatgaaatggtccgggcaattctggcagatcagaaaacacagacgcggcggattataaagcctca

SEQ ID NO: 426190 - DNA, 75 bp, synthetic construct
  source 1..75: mol_type = other DNA
agcagaactgtgtatctcagtgatgttgcattatctattattgattcgatcccacgggctggcagcaacccctat

SEQ ID NO: 426191 - DNA, 75 bp, synthetic construct
  source 1..75: mol_type = other DNA
ccagagcgtatgcgtcagaccgggcagggcgtaactgaccttcttttgaacaccgttactgccggtaacaatgat

SEQ ID NO: 426192 - DNA, 75 bp, synthetic construct
  source 1..75: mol_type = other DNA
cgtctggcgcaaccgatcacacgatccgctcggttccgatacacgaggcgcagcagcctatgacgaatcctatgc

SEQ ID NO: 426193 - DNA, 75 bp, synthetic construct
  source 1..75: mol_type = other DNA
attacattgctccccaaatttactggccgttctcacggagtgccgcgcgttatgacgtgttggcaaaatggtggg

SEQ ID NO: 426194 - DNA, 75 bp, synthetic construct
  source 1..75: mol_type = other DNA
taatacgaagcccggtactatcagggaactgaatagcactctgtctcaacaaccggcgagcgtctatgtgcaaca

SEQ ID NO: 426195 - DNA, 75 bp, synthetic construct
  source 1..75: mol_type = other DNA
gctacgccagagaagtgccgaaggagaaacacctgaccggcaaaatcttcacgcaacgtatcgaacgtaacaacc

SEQ ID NO: 426196 - DNA, 75 bp, synthetic construct
  source 1..75: mol_type = other DNA
gtttatttataccaaaaccgaatacgaggcgctgttccgccagtgcggtttttccacgctgaccagcgtccccgg

SEQ ID NO: 426197 - DNA, 75 bp, synthetic construct
  source 1..75: mol_type = other DNA
cgcccagtacaaccaggatatgcgctactggctggaaacgccgactatctccgcaccgcccatcgaactggttga

SEQ ID NO: 426198 - DNA, 75 bp, synthetic construct
  source 1..75: mol_type = other DNA
aattcataggtgaacttctttctcacatcaaacataatgagctaccacatgttcttcagataaaaagtcgctctg

SEQ ID NO: 426199 - DNA, 75 bp, synthetic construct
  source 1..75: mol_type = other DNA
atgctgaccagcgatgactggggcagctatggccgggaggtgccgaagaataagcatctgaccggcaaaatattc

SEQ ID NO: 426200 - DNA, 75 bp, synthetic construct
  source 1..75: mol_type = other DNA
atgattatcggtaatctcaaccatttgtcgctggcggggcttcccgcctgggggagaaatattctgctgtgcccg

SEQ ID NO: 426201 - DNA, 75 bp, synthetic construct
  source 1..75: mol_type = other DNA
cggtgaactgaataaacgcgtcctgatccgccagcgggtggatatgcccgcggataactttggcgtggagcctca

SEQ ID NO: 426202 - DNA, 75 bp, synthetic construct
  source 1..75: mol_type = other DNA
atgaaaattcgtcaggcgcagaccagcgcaacctacattctgcctgaccccggcgaactgaataaacgcgtcctg

SEQ ID NO: 426203 - DNA, 75 bp, synthetic construct
  source 1..75: mol_type = other DNA
cagcgcgatctgaacggggcgcggcgctttctgctgctggagtgtacggagctgggcgaatttaggcagagtcac

SEQ ID NO: 426204 - DNA, 75 bp, synthetic construct
  source 1..75: mol_type = other DNA
ctggagtgtacggaactgggtgccgaagaacaaatgggaggacgcagtggatcagacagcatttttacacgttga

SEQ ID NO: 426205 - DNA, 75 bp, synthetic construct
  source 1..75: mol_type = other DNA
cgcgtcctgatccgccagcgggtggatatgcccgcggataactttggcgtggagcctcaatacccggttacgttc

SEQ ID NO: 426206 - DNA, 75 bp, synthetic construct
  source 1..75: mol_type = other DNA
gcgaaggttgtccagaccagtgccaccacctggcaggaaaccgcgcagaccggtgacgccatcatcgtcaggcaa

SEQ ID NO: 426207 - DNA, 75 bp, synthetic construct
  source 1..75: mol_type = other DNA
caatgaggaaacggaagaaacgattcacgtgcctttatttggtcaagatacagaaaatgggtgtttcagttctat

SEQ ID NO: 426208 - DNA, 75 bp, synthetic construct
  source 1..75: mol_type = other DNA
gctgggcgaggctggcgttgatgggtggatagattcgcacttctgggagcgattcggcggcgcattaatggttgg

SEQ ID NO: 426209 - DNA, 75 bp, synthetic construct
  source 1..75: mol_type = other DNA
taattatctgacagacaggaacggaaaaagattgccagttattcctggcatgatagccagcgtggatataaaaac

SEQ ID NO: 426210 - DNA, 75 bp, synthetic construct
  source 1..75: mol_type = other DNA
tatggtggtcttgacggcgtggtgacactggtaagtccggatactttacgtgaccagaaacggccgggagattta

SEQ ID NO: 426211 - DNA, 75 bp, synthetic construct
  source 1..75: mol_type = other DNA
aaaagagaatatggctggcagagccgacccggttgagcgttcacgtatcagggctcccctgagaggcatcgtaaa

SEQ ID NO: 426212 - DNA, 75 bp, synthetic construct
  source 1..75: mol_type = other DNA
gtgtggtggctttggccattattggtgtgagttgaatttcgaagaagtgcaatattatattgacatcacttccga

SEQ ID NO: 426213 - DNA, 75 bp, synthetic construct
  source 1..75: mol_type = other DNA
actgacggcttatgactatgccatttatggtggtcttgacggcgtggtgacactggtaagtccggatactttacg

SEQ ID NO: 426214 - DNA, 75 bp, synthetic construct
  source 1..75: mol_type = other DNA
aatcgctcacgaactgcaactgaagaatgtgaaaaccggcacactcgcggagattgggcaactggctgatctcgc

SEQ ID NO: 426215 - DNA, 75 bp, synthetic construct
  source 1..75: mol_type = other DNA
tgcagacgcgcgatcgcaatatcttcgatgaagggaagatttattgcggcgttcaacttcacggcgcacctggcg

SEQ ID NO: 426216 - DNA, 75 bp, synthetic construct
  source 1..75: mol_type = other DNA
ctggcttgtatatttatcgcatcgtgcatgatttccgtgagatcgctgtacttcatgctcgcgaaggtagtaaac

SEQ ID NO: 426217 - DNA, 75 bp, synthetic construct
  source 1..75: mol_type = other DNA
gaagaaggtatgaagcacgggcaaggggggcattcatcattgcgacgaagctacgcacccgccagccgccttatc

SEQ ID NO: 426218 - DNA, 75 bp, synthetic construct
  source 1..75: mol_type = other DNA
ttttgaccctgttgagaataaagcaattatcaatccaggcgctactggttctggtaatactgtttctgacggtca

SEQ ID NO: 426219 - DNA, 75 bp, synthetic construct
  source 1..75: mol_type = other DNA
agcagtttaaggttgaaacagggaagaataaaaaagaaaggcaaatttttgaacccaagagatctttgaaaggaa

SEQ ID NO: 426220 - DNA, 75 bp, synthetic construct
  source 1..75: mol_type = other DNA
ggcacagcgcgggacgaatcagtcgatgccgccgaacgtgcccgcctttatcataatgccgcatcatcagctgca

SEQ ID NO: 426221 - DNA, 75 bp, synthetic construct
  source 1..75: mol_type = other DNA
agttaggttatcaacctgtcatcacgctggatgaagggatcgagaaaactgccgcctggctgcgcgaccatggaa

SEQ ID NO: 426222 - DNA, 75 bp, synthetic construct
  source 1..75: mol_type = other DNA
atctccggtttcgcgagatcctccaggaggtgaagcctgatttgccaaaagggcaggcgactcatgtgatgcgtc

SEQ ID NO: 426223 - DNA, 75 bp, synthetic construct
  source 1..75: mol_type = other DNA
tatgcttgaatatcggtcagagaaattacaggccggattaatgccgtccagtattaatcgtgatttatgcgttct

SEQ ID NO: 426224 - DNA, 75 bp, synthetic construct
  source 1..75: mol_type = other DNA
gatctgaccgagctggtctcatcgcaggcgaaagtgatgctcgcaggtattgatacgctgtggcattgttccagc

SEQ ID NO: 426225 - DNA, 75 bp, synthetic construct
  source 1..75: mol_type = other DNA
ccagtcatcaccctggatgaaggtatcgagaaaactgccgcctggctacgcgaccacggaaaactgccgcgctaa

SEQ ID NO: 426226 - DNA, 75 bp, synthetic construct
  source 1..75: mol_type = other DNA
gccaccagcggcttaggtcgaaacgcggtagagtttttatgccagaaaggcatcagcgtgcgagcgaccggtcgc

SEQ ID NO: 426227 - DNA, 75 bp, synthetic construct
  source 1..75: mol_type = other DNA
aaagcaaggatgctggaccagactttgtcgccgagaaaaatggtgagactttttgttttgaagtagtcacgccaa

SEQ ID NO: 426228 - DNA, 75 bp, synthetic construct
  source 1..75: mol_type = other DNA
ttattctaatcatttcaatgattatatgttcttgcgaaaaaaacgataacgattgcttatcgacggcagagaata

SEQ ID NO: 426229 - DNA, 75 bp, synthetic construct
  source 1..75: mol_type = other DNA
atggccggtaaagttacggaaaccgctgttgtgggtggcgtgtatacacacaaagatctgcacgttgctgctgtc

SEQ ID NO: 426230 - DNA, 75 bp, synthetic construct
  source 1..75: mol_type = other DNA
tgagtattgatgtggattacatcgatcctggtactggcccggatggtgactttgagcaccatctggaaatgcgtt

SEQ ID NO: 426231 - DNA, 75 bp, synthetic construct
  source 1..75: mol_type = other DNA
ctccgtgattgttgtgctcagcaatgagcgtgatgaaaaagggcagtgggcagcctatgacgccgttcatgatgt

SEQ ID NO: 426232 - DNA, 75 bp, synthetic construct
  source 1..75: mol_type = other DNA
cgtggcgttatgtaccgctatcaggacgtaatgcagttctttgatcagattggtttaacgtcagccaaagataat

SEQ ID NO: 426233 - DNA, 75 bp, synthetic construct
  source 1..75: mol_type = other DNA
ttaacggacgatcgctggtacagatagcgcaggcgcttgctgcgcctttcggcattgaggtggtgaacaacggtg

SEQ ID NO: 426234 - DNA, 75 bp, synthetic construct
  source 1..75: mol_type = other DNA
acagttcagggctggcggcagggcagtggcgcgttatggcgtccggggttatctgtcatcgttttcgacccgctg

SEQ ID NO: 426235 - DNA, 75 bp, synthetic construct
  source 1..75: mol_type = other DNA
caccgggtggcgctattcccggagtacaacccgatcacggtgaaacagttatcgaagtcctcaacaagatgcttg

SEQ ID NO: 426236 - DNA, 75 bp, synthetic construct
  source 1..75: mol_type = other DNA
agtatccgggagcgattttctgtttaccaggtggcggggcagcgtgccggaaacgacgatgatttcggtgaggcc

SEQ ID NO: 426237 - DNA, 75 bp, synthetic construct
  source 1..75: mol_type = other DNA
cgacccgcacggcaggctggtgattggtggtattggctcaacgcgggcacataccgcgctggtactcggggaaaa

SEQ ID NO: 426238 - DNA, 75 bp, synthetic construct
  source 1..75: mol_type = other DNA
ctgatgcttatctgcctgaacccgaagaccccggcgcgcggaaaaagaaaaaagccagagtacaggaggacccgt

SEQ ID NO: 426239 - DNA, 75 bp, synthetic construct
  source 1..75: mol_type = other DNA
attgaacggctggcgcgggatttcagtgtggagatcacccgccagtggccgggagatgagggtatcaccacgctt

SEQ ID NO: 426240 - DNA, 75 bp, synthetic construct
  source 1..75: mol_type = other DNA
tcgctcaggccgccgcagcggtgaaacaggcgcaagccgcctatgactatgcgcagaacttctataaccgccagc

SEQ ID NO: 426241 - DNA, 75 bp, synthetic construct
  source 1..75: mol_type = other DNA
attgcgtcagtaccgttccggtaaccgcgaacaggacatcgcccaggcgaaagccagcctcgaacaggcgcaggc

SEQ ID NO: 426242 - DNA, 75 bp, synthetic construct
  source 1..75: mol_type = other DNA
catggcaaaccgcttctctgatagcactagcgaaattgataatctggcactgctaacggctttaaaagataaata

SEQ ID NO: 426243 - DNA, 75 bp, synthetic construct
  source 1..75: mol_type = other DNA
cttgaccaggcccagccggggcgcaaagtgctgctttataccgatggtcgtccgaacaaaccgtatcacgggcag

SEQ ID NO: 426244 - DNA, 75 bp, synthetic construct
  source 1..75: mol_type = other DNA
tgcagtagagcctggcacggtgctcaatgaaggcggcacggtgtttaccgtctcgctgacgcgtccggtgtgggt

SEQ ID NO: 426245 - DNA, 75 bp, synthetic construct
  source 1..75: mol_type = other DNA
aaggtgctgttttatcccgatggtcgcccggaaaagccgtatcacgggcagattggtttcgtttcgccgactgct

SEQ ID NO: 426246 - DNA, 75 bp, synthetic construct
  source 1..75: mol_type = other DNA
acttgaacgggtcccggaaactatcatgagcgaagttcttggtcgcctgtccactattctgaccctcacatgggg

SEQ ID NO: 426247 - DNA, 75 bp, synthetic construct
  source 1..75: mol_type = other DNA
gcctattgttgtgcccgtaaccagcggaggcaattttgcctgcactgccggctttgcggtgtcgctggatggtgc

SEQ ID NO: 426248 - DNA, 75 bp, synthetic construct
  source 1..75: mol_type = other DNA
ttgccaaagagcagtgttacatcagcggcctttaatcgcgtgacccgcctgcctattgttgtgcccgtaaccagc

SEQ ID NO: 426249 - DNA, 75 bp, synthetic construct
  source 1..75: mol_type = other DNA
tgatatgcgccagcagccaacgcagctggttgaagttccgtggaatgaacagacgccggaacagcgtcagcaaac

SEQ ID NO: 426250 - DNA, 75 bp, synthetic construct
  source 1..75: mol_type = other DNA
tggcagcagcagacgcgtacatcgcaaaccgcgcaggtacagtcgcaaccgcgtcaatctaaaccggcttccact

SEQ ID NO: 426251 - DNA, 75 bp, synthetic construct
  source 1..75: mol_type = other DNA
ggcaaacgactcgaacgggttccggatactatcatgaacgaagttcttggccgcctgtccactattctgacttga

SEQ ID NO: 426252 - DNA, 75 bp, synthetic construct
  source 1..75: mol_type = other DNA
gaatggggtgaggtttagtggggagtgggaacagtttccattaaaggttatggccgaggtgattgtaagccctgt

SEQ ID NO: 426253 - DNA, 75 bp, synthetic construct
  source 1..75: mol_type = other DNA
cagttctgtccgctgccgacaccgaaatctccacactggagaaaaaactcgcctgcctgaaagacgagaagaaag

SEQ ID NO: 426254 - DNA, 75 bp, synthetic construct
  source 1..75: mol_type = other DNA
cccctaatgatgttggtccttctcctttagaatggaaagccccacgattaagcgaagtttcaacattaataacca

SEQ ID NO: 426255 - DNA, 75 bp, synthetic construct
  source 1..75: mol_type = other DNA
taatgagcgtaatattaaaagaagctgacccaaaaaagtttcctgagaagttatcagaggacgccatcgtatctt

SEQ ID NO: 426256 - DNA, 75 bp, synthetic construct
  source 1..75: mol_type = other DNA
ccgctgtggtttatcgcactggggctgggctggttgtttattggtaagaagcgggctgctgaactgcggaaataa

SEQ ID NO: 426257 - DNA, 75 bp, synthetic construct
  source 1..75: mol_type = other DNA
cagatgtttattacaataactatattaccaataacattaatttcatgaaggctactgctactaagaatgaaattg

SEQ ID NO: 426258 - DNA, 75 bp, synthetic construct
  source 1..75: mol_type = other DNA
tggcccggtgaaaggcaaagagaacgcagacagcaccctcaatcggttgaagatggcgggtcatacaaactgcat

SEQ ID NO: 426259 - DNA, 75 bp, synthetic construct
  source 1..75: mol_type = other DNA
cggaggatcctgtacttccttatgtgcatgggttggcactgaaagatgcgattcgtggttcaaaaatgctgacac

SEQ ID NO: 426260 - DNA, 75 bp, synthetic construct
  source 1..75: mol_type = other DNA
taagcaggatggtgaaaaagataacccgccatacagtggaaatagtggtcaaaaatcacgctactggcagtggcc

SEQ ID NO: 426261 - DNA, 75 bp, synthetic construct
  source 1..75: mol_type = other DNA
tggatgtcgttgccgggatcagctacgactggcgtgatagcgtagaagcgaaaaaacatgaaaaagacggcagta

SEQ ID NO: 426262 - DNA, 75 bp, synthetic construct
  source 1..75: mol_type = other DNA
gcttcaagagtttaaagcgttattaaaccgaagagaatcagagaagaaggaaagagagtcactccttgatagatt

SEQ ID NO: 426263 - DNA, 75 bp, synthetic construct
  source 1..75: mol_type = other DNA
cgatcaggatgatgtatgggaacctcttaaattgattgcagctacaactaagattattaagtataatcaagatat

SEQ ID NO: 426264 - DNA, 75 bp, synthetic construct
  source 1..75: mol_type = other DNA
tcaaaaaagatgcccgagcggcgaagctggcaatgtggcagcatctggaaaacgttaagcaacgtctgctggaat

SEQ ID NO: 426265 - DNA, 75 bp, synthetic construct
  source 1..75: mol_type = other DNA
ttgaactgttcgtgttggtggggctgcctgctgccgccagcgtgattaactttgtggtgctgacctctgccgctt

SEQ ID NO: 426266 - DNA, 75 bp, synthetic construct
  source 1..75: mol_type = other DNA
ggtcaccgtccccgatggcaaattaagcccacgattggcggcactgaaaccgggcgatgaagtgcaggtggttag

SEQ ID NO: 426267 - DNA, 75 bp, synthetic construct
  source 1..75: mol_type = other DNA
cccgcggcggcaaacgactcgaacgggtgccagaggctatcatggatgacgttcttggtcgtctggccacgattc

SEQ ID NO: 426268 - DNA, 75 bp, synthetic construct
  source 1..75: mol_type = other DNA
ggtgtaaataatgatattgcaggcaaacacggcaagatgattaattcatcggctgatgataaacgcggcattgtg

SEQ ID NO: 426269 - DNA, 75 bp, synthetic construct
  source 1..75: mol_type = other DNA
cgccaatgataaacgcggcatagtgaagctcggctttacgccgcgcgaaaatgacgaatacacgctgacttatat

SEQ ID NO: 426270 - DNA, 75 bp, synthetic construct
  source 1..75: mol_type = other DNA
gtcgctacggcgcaatctcacaaaccgacatatccagcttattgccattggtggggccattggtacggggctgtt

SEQ ID NO: 426271 - DNA, 75 bp, synthetic construct
  source 1..75: mol_type = other DNA
cccttgatggttatttcttattaaaaaaagggcagtttgcttacaataaaagttactctaatggttatccgatgg

SEQ ID NO: 426272 - DNA, 75 bp, synthetic construct
  source 1..75: mol_type = other DNA
atacgacctttgatgacaaggtgcgtcagcatgccaccacagagatgcaggtgacggcggcacagatgcagaagc

SEQ ID NO: 426273 - DNA, 75 bp, synthetic construct
  source 1..75: mol_type = other DNA
gccactgccgcttacggggccggcgatgtcctgaaaatgggtatcggtggcggcgcatcgaaagccgcacagacg

SEQ ID NO: 426274 - DNA, 75 bp, synthetic construct
  source 1..75: mol_type = other DNA
agaagataatccgaaagtccggttcctgttccgccatcagctgaaagtcatcttaacggctttaatactgaccag

SEQ ID NO: 426275 - DNA, 75 bp, synthetic construct
  source 1..75: mol_type = other DNA
aacggcacgacaccgcctccgcaggtgacataccagtctgtgccggtaccgaaccgtattcagcgtaaaacgttc

SEQ ID NO: 426276 - DNA, 75 bp, synthetic construct
  source 1..75: mol_type = other DNA
tgggacaggacaatgccgccctggcagagcaggtaaaagccctgggtgcaaatcccgtcaccgcgaccggtgagc

SEQ ID NO: 426277 - DNA, 75 bp, synthetic construct
  source 1..75: mol_type = other DNA
gcgatgtcctgaaaatggggatcggtggcggtgcatcgaaagcggcacagacactcagtgactactacatcaaac

SEQ ID NO: 426278 - DNA, 75 bp, synthetic construct
  source 1..75: mol_type = other DNA
gtcagatggacgaagccgatgcccattatgactggcattacgcctcttattgtctggctgctgaaatccagctta

SEQ ID NO: 426279 - DNA, 75 bp, synthetic construct
  source 1..75: mol_type = other DNA
atgcagcacctcgctatcgctcaggattacagcttgttgctcatcgacaccgatcgttttaaacacattaacgat

SEQ ID NO: 426280 - DNA, 75 bp, synthetic construct
  source 1..75: mol_type = other DNA
aatccgcgggatgtggcgtatgtcagaacaggcatgccggcgctggtaaaactgacggcctatgattatgccatt

SEQ ID NO: 426281 - DNA, 75 bp, synthetic construct
  source 1..75: mol_type = other DNA
atggccagtatcaacaccattgtgaaacgcaagcagtacctgtggctggggattgtggttgttggtgcagcctcc

SEQ ID NO: 426282 - DNA, 75 bp, synthetic construct
  source 1..75: mol_type = other DNA
gccaccctgatgttgttcatgagctacgtgttaacggattccatccttttcagtggcgtagccggcctgataact

SEQ ID NO: 426283 - DNA, 75 bp, synthetic construct
  source 1..75: mol_type = other DNA
gagatttcagcgacctgaccaggccggagttaattgcccgggctaaacacctggatatcctccgggctcgggtgg

SEQ ID NO: 426284 - DNA, 75 bp, synthetic construct
  source 1..75: mol_type = other DNA
gtaaaaagagttacagaagaagaatatcgctctctgatggatcactgtgttgttgaacaaggtgatttggttatg

SEQ ID NO: 426285 - DNA, 75 bp, synthetic construct
  source 1..75: mol_type = other DNA
tggtcaatgtctggatgtggtgctctcgttaattccgaccttaaaggcgtttttccaacgccatttattggcctg

SEQ ID NO: 426286 - DNA, 75 bp, synthetic construct
  source 1..75: mol_type = other DNA
ggtttgctgcgcgcgaattgcgtcgcagaaatattcatgacgcctttaaattgaacctgtttgagtccgcacggc

SEQ ID NO: 426287 - DNA, 75 bp, synthetic construct
  source 1..75: mol_type = other DNA
gacgaaaccttttctgcgcgcagcggggagcgtcgtagcctggtattttgactttggttttgcgggttttgttat

SEQ ID NO: 426288 - DNA, 75 bp, synthetic construct
  source 1..75: mol_type = other DNA
cttgttggcggcaccatgtactggtggtttgccgcacgtgaattacgccgcagaaatatccataacgcgttcaaa

SEQ ID NO: 426289 - DNA, 75 bp, synthetic construct
  source 1..75: mol_type = other DNA
attctggtggcgctggctgtgttaatcgttggtaagccacttatttcactggtgtttggtgttaagtatctcgaa

SEQ ID NO: 426290 - DNA, 75 bp, synthetic construct
  source 1..75: mol_type = other DNA
ccgccggaacgccagcgggtttgctgggtaaaagttttggcactgttgcaaagttagcgatgaggcagccttttg

SEQ ID NO: 426291 - DNA, 75 bp, synthetic construct
  source 1..75: mol_type = other DNA
aaaatcgccatgacattcttcgacgccgccggaacgccagcgggtttgctgggtaaaagtttttacccagaggtg

SEQ ID NO: 426292 - DNA, 75 bp, synthetic construct
  source 1..75: mol_type = other DNA
tttatctgcaataacgcggtcaaaaaagtggttctcaaagtcaccatcgaagatggttatttccataacaaataa

SEQ ID NO: 426293 - DNA, 75 bp, synthetic construct
  source 1..75: mol_type = other DNA
aagcgattgaaaatatcgacaacattcagcctggcgtcgcccactccatcggtgactcattgacttaccgcgtgg

SEQ ID NO: 426294 - DNA, 75 bp, synthetic construct
  source 1..75: mol_type = other DNA
tcgtcggcaagccgctcatttcgctggtatttggcgtcaaatatctcgaagcatatgacctgatccaggtgatgc

SEQ ID NO: 426295 - DNA, 75 bp, synthetic construct
  source 1..75: mol_type = other DNA
atgcgtttagatccgcgcaccaccagaccgtggttgttagggaaggtgcgaataagcggggaaattcttctcggc

SEQ ID NO: 426296 - DNA, 75 bp, synthetic construct
  source 1..75: mol_type = other DNA
gcagcggggagcgtaatcgcctggtattttgactttggttttgcggggtttgttatagcctggtacgcctcaaat

SEQ ID NO: 426297 - DNA, 75 bp, synthetic construct
  source 1..75: mol_type = other DNA
aacgcaagcagtacctgtggctggggattgtggttgtcggtgcagcctccgcgattggtggggtactgtatctgt

SEQ ID NO: 426298 - DNA, 75 bp, synthetic construct
  source 1..75: mol_type = other DNA
gctgaaaaaatcagcaatgggcgatgatggcaccattctttgctgtagctgtgtaccgaagactgcacttaagct

SEQ ID NO: 426299 - DNA, 75 bp, synthetic construct
  source 1..75: mol_type = other DNA
aatagtggcgttattcgtgttggcgataaggtggaaatcctggcgactaccccgtcaaaaacctacggcacggct

SEQ ID NO: 426300 - DNA, 75 bp, synthetic construct
  source 1..75: mol_type = other DNA
caggtgacgtaccagtctgtgccggtgcctaaccggatacagcgtaaggtgtttacccgtaatgagggaaaacag

SEQ ID NO: 426301 - DNA, 75 bp, synthetic construct
  source 1..75: mol_type = other DNA
ataatatgtcgtcccgtcaggcgtgccatgccgcccggtatgttgtcgcccgggttctgcgaggactgttctggt

SEQ ID NO: 426302 - DNA, 75 bp, synthetic construct
  source 1..75: mol_type = other DNA
agagcaggtaaaagccctgggtgcaaatcccgtcaccgcgaccggtgagcctgtaccgcagacgccagcctcacc

SEQ ID NO: 426303 - DNA, 75 bp, synthetic construct
  source 1..75: mol_type = other DNA
ccgaccggaaggtggtgcctgttttcgtgttacacttccccagcaaacagcccctgaacttgaagaatttcatga

SEQ ID NO: 426304 - DNA, 75 bp, synthetic construct
  source 1..75: mol_type = other DNA
cagtggagttttgataaaggcctgcctgcgggcgcgggcaccgacacgttacccggtgtaccgtaccagattttg

SEQ ID NO: 426305 - DNA, 75 bp, synthetic construct
  source 1..75: mol_type = other DNA
gctgaaaaaatcagctatgagcgacgacggaacaattctttgctgtagttgtgtgccgaagagtacattgaaact

SEQ ID NO: 426306 - DNA, 75 bp, synthetic construct
  source 1..75: mol_type = other DNA
gctgaaaaaatcagctatgagcgacgatggaacaattctttgctgtagttgcgtaccgaagactgcattgaaact

SEQ ID NO: 426307 - DNA, 75 bp, synthetic construct
  source 1..75: mol_type = other DNA
cggccccgcaaccgccagtgcctgcgccggggcctgaaggtgagccgcagccgaccggtttcccgccgcagacgg

SEQ ID NO: 426308 - DNA, 75 bp, synthetic construct
  source 1..75: mol_type = other DNA
tcaccggtaatgaatccacggtgccgatgcagctgcgtatcaccggcctggtggaaatgccgaacagcaaaacgt

SEQ ID NO: 426309 - DNA, 75 bp, synthetic construct
  source 1..75: mol_type = other DNA
aattgaccatatccccgcccagatcggttttaagctgttgagtctgttcaagctgaccgaaacggatcagcgcat

SEQ ID NO: 426310 - DNA, 75 bp, synthetic construct
  source 1..75: mol_type = other DNA
ggatgggcatttcctggcgctggcgcaataatcagatacaactgttccgtctcgacgcccgcacattccagctgg

SEQ ID NO: 426311 - DNA, 75 bp, synthetic construct
  source 1..75: mol_type = other DNA
ggcatccctcagaattaaagacccggattttattaaatcactaaataaaatcagacttgagagtattaatgagat

SEQ ID NO: 426312 - DNA, 75 bp, synthetic construct
  source 1..75: mol_type = other DNA
cggtaacgactataacaacaatggtcatcaagagtatgctgatcaggatctggtcaactatgttgaaattggagc

SEQ ID NO: 426313 - DNA, 75 bp, synthetic construct
  source 1..75: mol_type = other DNA
gaaaagctggatgattttgtatttttggaagactttggtggcaaagatgattctggaacaacagataatagcata

SEQ ID NO: 426314 - DNA, 75 bp, synthetic construct
  source 1..75: mol_type = other DNA
atcgcgccccagtctgccggagcgcatcgacaatgtgctggtctgcccgaacagcaactgtatcagccatgccga

SEQ ID NO: 426315 - DNA, 75 bp, synthetic construct
  source 1..75: mol_type = other DNA
caaaactattgatatgccgattaaggggcatgtcagcttccggggtaaaaacggtatcaagggcgaagtggtgat

SEQ ID NO: 426316 - DNA, 75 bp, synthetic construct
  source 1..75: mol_type = other DNA
ggagccactgccgcttacggggccggcgatgtcctgaaaatggggatcggtggcggtgcatcgaaagcggcacag

SEQ ID NO: 426317 - DNA, 75 bp, synthetic construct
  source 1..75: mol_type = other DNA
tcccggtccggagggggagcctcagcccggtaatgcgcccgttgcttttccgccgcagggggcaggtgcagtgcc

SEQ ID NO: 426318 - DNA, 75 bp, synthetic construct
  source 1..75: mol_type = other DNA
tgccaagttgcatgtccctgataagcgaggtgaacgtgatgcgcttattgctgcaacggcgctcgtacatggaat

SEQ ID NO: 426319 - DNA, 75 bp, synthetic construct
  source 1..75: mol_type = other DNA
tctctgagctacggaaggctcggacaggacgtatagataataatgttgcaaaatgggcattgcatacagatgcgg

SEQ ID NO: 426320 - DNA, 75 bp, synthetic construct
  source 1..75: mol_type = other DNA
cagatgctgaagcagctgggcgacctgaatccgcagcagtttatgtccggcgctcaggaagggggcaacgatggt

SEQ ID NO: 426321 - DNA, 75 bp, synthetic construct
  source 1..75: mol_type = other DNA
gcagtgctcctcttacagagcagagtctggcgagaaatgacggtgaagaccagaccagaagaaacgctgaaaata

SEQ ID NO: 426322 - DNA, 75 bp, synthetic construct
  source 1..75: mol_type = other DNA
ttttgaaggccgcgtagcaacgtcgctgcgtgagcatatcaaattacacaacatggaagatttgtttggtgaagt

SEQ ID NO: 426323 - DNA, 75 bp, synthetic construct
  source 1..75: mol_type = other DNA
cggtttgatgaaaaactccagaacgaactctatatgacgcaggacgaaaaggaacgccgggagcaccagccttgg

SEQ ID NO: 426324 - DNA, 75 bp, synthetic construct
  source 1..75: mol_type = other DNA
atatcgccgataacaaatttttcaacggcgaaacatcaccgctcttttcgcaaagccaggcaaaactggcgcgcc

SEQ ID NO: 426325 - DNA, 75 bp, synthetic construct
  source 1..75: mol_type = other DNA
aactcttatcgttcagaaggaactgataatttaaaacaagaatctcctaagatgcttctatctgaagatgcaatt

SEQ ID NO: 426326 - DNA, 75 bp, synthetic construct
  source 1..75: mol_type = other DNA
actggctcactcgaaagcgcgattttcgcgagagttgtcaaagagggctatacggggctgcgtattgagttatcg

SEQ ID NO: 426327 - DNA, 75 bp, synthetic construct
  source 1..75: mol_type = other DNA
ttcgtgttaatgatggtccgttcgctgacttcaacggcgtcgttgaagaggtggattacgagaagtctcgtctga

SEQ ID NO: 426328 - DNA, 75 bp, synthetic construct
  source 1..75: mol_type = other DNA
ttaataacccaccgcaattgaaagcagtgccagtgaaagagaacggggtacaactgacggcggcggaattcaacg

SEQ ID NO: 426329 - DNA, 75 bp, synthetic construct
  source 1..75: mol_type = other DNA
cagggctgctggtatgcagtgtctgtagtttatctgctatggctggtagtaaacccgtggatttaattctgcgcg

SEQ ID NO: 426330 - DNA, 75 bp, synthetic construct
  source 1..75: mol_type = other DNA
cgtgaatgacccaatgaaaatgggcggcgtcgatttacggcttaaattttccggcgattcgctgggtgatctcta

SEQ ID NO: 426331 - DNA, 75 bp, synthetic construct
  source 1..75: mol_type = other DNA
tggcagatgaagccgtcgagcaaatgcgtgaaatgggcgtaaccccgacgcacgttctgctgcaagccggtgtcg

SEQ ID NO: 426332 - DNA, 75 bp, synthetic construct
  source 1..75: mol_type = other DNA
gacgatctcgcaaacctttttggtgtgaagaaaattctcgttaaggacgaatcaaaacgattcggtctgaacgcc

SEQ ID NO: 426333 - DNA, 75 bp, synthetic construct
  source 1..75: mol_type = other DNA
acaacccattgattactcgcttgtttgtaacaacctggcaatggatgacctgcgtttacagatgcgggcaacaac

SEQ ID NO: 426334 - DNA, 75 bp, synthetic construct
  source 1..75: mol_type = other DNA
acgcgtggcggtatcgctggcgttttactggttatcagagcgtgacaatcaaatcacggagctgatccagaaacg

SEQ ID NO: 426335 - DNA, 75 bp, synthetic construct
  source 1..75: mol_type = other DNA
gccaatattttaattaaagcatttgtttccagcggacaatttttattaccgctaatcattagcctgttagtgtag

SEQ ID NO: 426336 - DNA, 75 bp, synthetic construct
  source 1..75: mol_type = other DNA
tcccagtttgatggaagcttttccacgctcacctgggacagccaatattttaattaaagcattggtaatgactcc

SEQ ID NO: 426337 - DNA, 75 bp, synthetic construct
  source 1..75: mol_type = other DNA
gatactacgtgcaaccacttgggatcacagaccccgccgataactgtaacggcataaccatcaatggcgtttctt

SEQ ID NO: 426338 - DNA, 75 bp, synthetic construct
  source 1..75: mol_type = other DNA
atgagtgatgaaaataaatccagacgctgctcatttgaacttttcccggatgaacggacaggagataagatagca

SEQ ID NO: 426339 - DNA, 75 bp, synthetic construct
  source 1..75: mol_type = other DNA
tgatgccgacactgcaaggctagaatgtccaaagtgtagtaatgaaatcacagaagccgaacgtgtacgaatgat

SEQ ID NO: 426340 - DNA, 75 bp, synthetic construct
  source 1..75: mol_type = other DNA
gcggggcaacgttgtgatccctctgtttaatgctgatggcgagttcaggacccttgagcgcatctggtccgacgg

SEQ ID NO: 426341 - DNA, 75 bp, synthetic construct
  source 1..75: mol_type = other DNA
cgttacgtaccccggcgcagtttgtcggttaccgtggcgataccgctgcgccgacctgcattttgctgaaaaata

SEQ ID NO: 426342 - DNA, 75 bp, synthetic construct
  source 1..75: mol_type = other DNA
atagatcgtacggtcagggagctgataacgctaggaagacgttacaggtatgcccgctggggagaaacgctggac

SEQ ID NO: 426343 - DNA, 75 bp, synthetic construct
  source 1..75: mol_type = other DNA
cagactgcggttacatatattcctttcaggaacagtctgcatttttcatcagtctggcgactccgtcgtcttgtt

SEQ ID NO: 426344 - DNA, 75 bp, synthetic construct
  source 1..75: mol_type = other DNA
gaatcactaccgctggaaaacggcagctatcaggatgtggtggcgtttaaggtggtcgataaacaattacgcatc

SEQ ID NO: 426345 - DNA, 75 bp, synthetic construct
  source 1..75: mol_type = other DNA
tttgatgaccattcctgtgatttgggacagcgaaggtaatgaaattccggaaggtattcttgatggcgtcatgac

SEQ ID NO: 426346 - DNA, 75 bp, synthetic construct
  source 1..75: mol_type = other DNA
cgcctgggttcggcgtttcctcgatgaatcactaccgctggaaaacggcagctatcaggatgtggtggcgtttaa

SEQ ID NO: 426347 - DNA, 75 bp, synthetic construct
  source 1..75: mol_type = other DNA
aaatattactgttaacggtaatacaaccgctattgaactgaccaagaataataaaaataaagatttaaaatttca

SEQ ID NO: 426348 - DNA, 75 bp, synthetic construct
  source 1..75: mol_type = other DNA
aaaaggttctcttattcaagggtatgaatcaagtgctcaattatggtactctcaaggaacatctggggatgtcat

SEQ ID NO: 426349 - DNA, 75 bp, synthetic construct
  source 1..75: mol_type = other DNA
gaactctgctctctctgttcgtgacggcggtcatctgaccgctcagaaagggctctacagtgacggtcgggttca

SEQ ID NO: 426350 - DNA, 75 bp, synthetic construct
  source 1..75: mol_type = other DNA
cggtgatgccggtgcctgggcccgtatcatgaacggcgccggttcagccgatggcgggtacagtgataattacac

SEQ ID NO: 426351 - DNA, 75 bp, synthetic construct
  source 1..75: mol_type = other DNA
aagccagcggttcagacaacaccctgaatgtcagctttatgaagaacccgtctccgggacagtccctgaatatcc

SEQ ID NO: 426352 - DNA, 75 bp, synthetic construct
  source 1..75: mol_type = other DNA
gcagcagaagcactagagcgttatggtattgagttcaatggaaagaaacagattatcggttttcgggttggttcg

SEQ ID NO: 426353 - DNA, 75 bp, synthetic construct
  source 1..75: mol_type = other DNA
attcagttttcctgaagtaacgatccctgatttttctccagtatccgctaaaggcgcaacaactgccattggtaa

SEQ ID NO: 426354 - DNA, 75 bp, synthetic construct
  source 1..75: mol_type = other DNA
cactgtcgatatcctgaaaaatacttttacccaagaggtgaacctcaatggtcagaaaatgacagttaataataa

SEQ ID NO: 426355 - DNA, 75 bp, synthetic construct
  source 1..75: mol_type = other DNA
gtgtcgacttgttcaccggtgtcacgatgacctataccgacagcagcgcagacagtgatgcgttcagcgggaaga

SEQ ID NO: 426356 - DNA, 75 bp, synthetic construct
  source 1..75: mol_type = other DNA
gaatgatttttgatgaggggcaacattattcggtcaccgggaaagataaaacctataaaggggcgggtattgata

SEQ ID NO: 426357 - DNA, 75 bp, synthetic construct
  source 1..75: mol_type = other DNA
taatccattattacgcagtgcctctatgtttcagttaaactggaacaatatgttagccacgaataatacaggtgg

SEQ ID NO: 426358 - DNA, 75 bp, synthetic construct
  source 1..75: mol_type = other DNA
cacactgggacacagaaaagtgctgacagcagtctgattattgatggaaacattaatacacgcaatgacattact

SEQ ID NO: 426359 - DNA, 75 bp, synthetic construct
  source 1..75: mol_type = other DNA
gaacgtcagttttatgaagaacccgactccgggacagtccctgaatattccgctggtcagtgcaccggccggaac

SEQ ID NO: 426360 - DNA, 75 bp, synthetic construct
  source 1..75: mol_type = other DNA
atatatctcccgcgaagtttacacgttactgcgcaatcaaaacaggcggatcaacagtatcccgataacagcttg

SEQ ID NO: 426361 - DNA, 75 bp, synthetic construct
  source 1..75: mol_type = other DNA
agcagacctggatatcatgatcgcgtcaatcgttgatgagctggcacctgagctgatcaagcgtaacgctatcgg

SEQ ID NO: 426362 - DNA, 75 bp, synthetic construct
  source 1..75: mol_type = other DNA
tgttccacagcgatcagggcagccactatacaagcaggcagttccggcagttactgtggcgttaccagatcaaac

SEQ ID NO: 426363 - DNA, 75 bp, synthetic construct
  source 1..75: mol_type = other DNA
cagattatccattccaatattatctctgcaccggatgaattacgcgaacaactcagaaatatgacacgtatgcag

SEQ ID NO: 426364 - DNA, 75 bp, synthetic construct
  source 1..75: mol_type = other DNA
taaacgtaatgctatcggatacgaaagcgcttcacagttgctgatcactgccggagacaatcctcaacggttaag

SEQ ID NO: 426365 - DNA, 75 bp, synthetic construct
  source 1..75: mol_type = other DNA
gacttaactggggtggagatcgtgctgcaaatagtgcacttcacatcattgccatcggacgtttgcgaactgacg

SEQ ID NO: 426366 - DNA, 75 bp, synthetic construct
  source 1..75: mol_type = other DNA
ccgcagctggccgcaggtgggctatacccaaaatttggtcactattgcctgatgccactggcggcagaagggcat

SEQ ID NO: 426367 - DNA, 75 bp, synthetic construct
  source 1..75: mol_type = other DNA
gacgatgcaaggttcggtacgtgtggcgcaaatgtgccatgaatttggcctgacctggggttcacactcaaacaa

SEQ ID NO: 426368 - DNA, 75 bp, synthetic construct
  source 1..75: mol_type = other DNA
acaacatgcgctttggactggagtttgagaaatccgcctttggtaaatacaacgtggataacgccatcaacgcca

SEQ ID NO: 426369 - DNA, 75 bp, synthetic construct
  source 1..75: mol_type = other DNA
taggtgaagggttggctgtgccgcatggcaaaactgctgcggtaaaagaagcggcgtttgcggtcgccacactca

SEQ ID NO: 426370 - DNA, 75 bp, synthetic construct
  source 1..75: mol_type = other DNA
gcgctgtacgtttcgccgattgtttccggtgaggttaaccgcgctgacagacaatacgcagggggcagcaggtct

SEQ ID NO: 426371 - DNA, 75 bp, synthetic construct
  source 1..75: mol_type = other DNA
caatccattattacgtagtgcctccatgtttcagttaaactggaacaatatgtatgcaagtaataataccggtgg

SEQ ID NO: 426372 - DNA, 75 bp, synthetic construct
  source 1..75: mol_type = other DNA
ctacttctctgatgatgctagcagcgatggcgacatgtcatatgcccgtatcggtttcaaaggtgaaactcagat

SEQ ID NO: 426373 - DNA, 75 bp, synthetic construct
  source 1..75: mol_type = other DNA
gaattaaacctggcgtgatttgcattcacgaaggggcatggccggatctggatttaaccgctgacggtatttgta

SEQ ID NO: 426374 - DNA, 75 bp, synthetic construct
  source 1..75: mol_type = other DNA
acgttatgaagcgcgtaatgattttgatgtctttgccgagttgagtgaacgttgggagaagggcggctatgcgcg

SEQ ID NO: 426375 - DNA, 75 bp, synthetic construct
  source 1..75: mol_type = other DNA
cgcgcgttgcatattcttcagcaactgcgtctggaaggcagcgagccggttattttgttgcgcacattacaacgt

SEQ ID NO: 426376 - DNA, 75 bp, synthetic construct
  source 1..75: mol_type = other DNA
accggactgctgcatgacgatttgctgctgatcgtgcgcggcaataaattaagcaaagcgcaggaaaatgctgcc

SEQ ID NO: 426377 - DNA, 75 bp, synthetic construct
  source 1..75: mol_type = other DNA
ggttttgattatgccgttaagtttctacgcagtgaagcgtctggtgtacgtttgttcgccgaccagcttcgcaaa

SEQ ID NO: 426378 - DNA, 75 bp, synthetic construct
  source 1..75: mol_type = other DNA
gcccatgctggttgaaaccgacggcgaaaccgtgtttagctcgcgtggcgcgttagtcacaggaatggaaaactc

SEQ ID NO: 426379 - DNA, 75 bp, synthetic construct
  source 1..75: mol_type = other DNA
aaccctggtggcgcatatcaacacaacggtatgaaccgacatttcccggatattcgttttatctggtgggcgggc

SEQ ID NO: 426380 - DNA, 75 bp, synthetic construct
  source 1..75: mol_type = other DNA
ccaaaactttgaagttgttgctcagtatcagttcgacttcggtctgcgcccgtccatcgcttacctgcaatctaa

SEQ ID NO: 426381 - DNA, 75 bp, synthetic construct
  source 1..75: mol_type = other DNA
accatcaggataccaatcgtctgattcacgcctggcaaaaaccagagctggtggtgatctccgaatgcttctgga

SEQ ID NO: 426382 - DNA, 75 bp, synthetic construct
  source 1..75: mol_type = other DNA
cggtatttgtaaaaacggcgcagtgaacgtgctgaccaaagatctccccagctcgcggctggggaatggctgtgc

SEQ ID NO: 426383 - DNA, 75 bp, synthetic construct
  source 1..75: mol_type = other DNA
attcgtgggcaggatgaatttgttcgcgtgagttgggatgaggcactggagctcatccaccatcaacataaacgt

SEQ ID NO: 426384 - DNA, 75 bp, synthetic construct
  source 1..75: mol_type = other DNA
tcagtcggtgtgggcagagctggaggggttatctcttctgttaagccataaaccactggcggacgtatttatcga

SEQ ID NO: 426385 - DNA, 75 bp, synthetic construct
  source 1..75: mol_type = other DNA
gagataaaccaccagtttgatacccaaaaaaataatagtcgcctgattctggacggtaatgtcgatattacaaat

SEQ ID NO: 426386 - DNA, 75 bp, synthetic construct
  source 1..75: mol_type = other DNA
aaaattaatcatagtgcagcgcttaaccagaacaatgactatagaggtattttctttactgaaaatggtggtact

SEQ ID NO: 426387 - DNA, 75 bp, synthetic construct
  source 1..75: mol_type = other DNA
ttatttggaatagcatccagtggtgcagatgtttggtctattctgaatcagtatgatgaaaatacagttaatggt

SEQ ID NO: 426388 - DNA, 75 bp, synthetic construct
  source 1..75: mol_type = other DNA
acccgggtcacggggttcagccgggtgacaccgacgctgcatgtcgacaccaccggcggcagtacgaagtggatt

SEQ ID NO: 426389 - DNA, 75 bp, synthetic construct
  source 1..75: mol_type = other DNA
aaacgtcagcatgaacaatgggctctggcaactgaccggagactccaccgtcaacaacctgacggcccgcaacag

SEQ ID NO: 426390 - DNA, 75 bp, synthetic construct
  source 1..75: mol_type = other DNA
gatcgatggtgatggttggaaaataccgatgcacgagagtgactatgataacaaaaatccaacaggcacaactat

SEQ ID NO: 426391 - DNA, 75 bp, synthetic construct
  source 1..75: mol_type = other DNA
caatcagcctgaataccatgaccagggcatgggatgtggagttgaagaccacggctaccagcgcgacggctattc

SEQ ID NO: 426392 - DNA, 75 bp, synthetic construct
  source 1..75: mol_type = other DNA
gccagacggcaaactgacattaccgcgcgttgaacaggcggtgaatgatgccgcgcatttcaccccttttcattg

SEQ ID NO: 426393 - DNA, 75 bp, synthetic construct
  source 1..75: mol_type = other DNA
gctctgctactgttatgaaggtaacctgctggcgctggcccaggcactggagcgtttatcgctactctggccgga

SEQ ID NO: 426394 - DNA, 75 bp, synthetic construct
  source 1..75: mol_type = other DNA
atggcgggctttactcttaccgcgtttggcggcgcatttgtcgtgatgcgcgtcatgtttggctggatgccggac

SEQ ID NO: 426395 - DNA, 75 bp, synthetic construct
  source 1..75: mol_type = other DNA
cgtgacaagctgtctccgtatgacaccgaagagatgcttgaggctatgcgtatttttctggaagaacagggaggt

SEQ ID NO: 426396 - DNA, 75 bp, synthetic construct
  source 1..75: mol_type = other DNA
ttatgccgttaagtttctacgcagtgaagcgtctagtgtacgtttgttcgccgacctacttcgcaaagtaggcaa

SEQ ID NO: 426397 - DNA, 75 bp, synthetic construct
  source 1..75: mol_type = other DNA
acgttcggacgactgggactttttagagagtgcattaattagttgggataatttacccgctgttgttctcaagga

SEQ ID NO: 426398 - DNA, 75 bp, synthetic construct
  source 1..75: mol_type = other DNA
agatcgccgacctggtggtcattaaggacgactcagtggcagacggtgcaatggcgaatatgctgcgggcgagag

SEQ ID NO: 426399 - DNA, 75 bp, synthetic construct
  source 1..75: mol_type = other DNA
agatcgcggagctggtggtcattaaggacgactcagtggcagacggtgcaatggcgaatatgctgcgggcgagag

SEQ ID NO: 426400 - DNA, 75 bp, synthetic construct
  source 1..75: mol_type = other DNA
agcgagaaaaaattaaggggcaggttgttgaacttgtacgtctgagtggtcgcgagacgttacgggctctggagg

SEQ ID NO: 426401 - DNA, 75 bp, synthetic construct
  source 1..75: mol_type = other DNA
gccgccagtggtgatgtttacaattccggttacggagtattcccgtctgaacaggctcgtaaagactggcaaaat

SEQ ID NO: 426402 - DNA, 75 bp, synthetic construct
  source 1..75: mol_type = other DNA
ggcgtcagaacataatctgtcgcgagtgccggaaaagcaaggttatgcagcgtgtgctggcgttctatcagggta

SEQ ID NO: 426403 - DNA, 75 bp, synthetic construct
  source 1..75: mol_type = other DNA
tccggaccttatctgctcattacctgacggagaaatacgtcgctacgacaggagattgaacataatttgtagcga

SEQ ID NO: 426404 - DNA, 75 bp, synthetic construct
  source 1..75: mol_type = other DNA
cgtgagacgttacggcaactggaagtcaaaacaggtgcgacaagatatctgatgagcgttcttgccagagagctg

SEQ ID NO: 426405 - DNA, 75 bp, synthetic construct
  source 1..75: mol_type = other DNA
cgagtgccggaagagcgaagttatgcagcgcatattgtcgttttatcagggtaattttcaggaggtgatggcgtg

SEQ ID NO: 426406 - DNA, 75 bp, synthetic construct
  source 1..75: mol_type = other DNA
gatgtgttattcagctggcagtgctatgcgccacggaagcagttcgctgacccggttgaccggccagtctgctat

SEQ ID NO: 426407 - DNA, 75 bp, synthetic construct
  source 1..75: mol_type = other DNA
gagtgccggaagagtgaagttatgcagcgtgtattagcattctatcagggaaatgttcggtatttattgaagtga

SEQ ID NO: 426408 - DNA, 75 bp, synthetic construct
  source 1..75: mol_type = other DNA
ggcgtctgaacataatctgtcgcgagtgtcggaaaagtgaagctatgcagcgtgtgctggcgttttatcagggga

SEQ ID NO: 426409 - DNA, 75 bp, synthetic construct
  source 1..75: mol_type = other DNA
atgggaaacgtttttacacctgaatacaggaagcaactgaaggcgcgcattgtggagctggtacagcgggatggg

SEQ ID NO: 426410 - DNA, 75 bp, synthetic construct
  source 1..75: mol_type = other DNA
ggcacctgaacataatctgtcgcgagtgccggaagagtgaggttatgcagcgagtgttggcgttttatcagggta

SEQ ID NO: 426411 - DNA, 75 bp, synthetic construct
  source 1..75: mol_type = other DNA
acaggctcgtaaggactggcaaaacgcccgcaaaaaactctcgagagcaaagctgaagaaaacatctgtagttga

SEQ ID NO: 426412 - DNA, 75 bp, synthetic construct
  source 1..75: mol_type = other DNA
acaggcgcgtaaggactggcaaaacgcccgcaaaaaactctcgagggcaaaggtgaagaaaacagctgtggttga

SEQ ID NO: 426413 - DNA, 75 bp, synthetic construct
  source 1..75: mol_type = other DNA
gaagagcgggaaaaaattaaagggcaggttgttgaacttgtacgtctgagcggtcgcgagacgttgcggcaactg

SEQ ID NO: 426414 - DNA, 75 bp, synthetic construct
  source 1..75: mol_type = other DNA
gtgaaaagatgcttgcgcagtcgttacaggcgttagaacaggatggttttcttaaccgtatcgcgtatccggtgg

SEQ ID NO: 426415 - DNA, 75 bp, synthetic construct
  source 1..75: mol_type = other DNA
ggcgtcataatatgatttgtactgagtgtcgtaaaagcgaagttatgcagcgcatattgtcgttttatcagggta

SEQ ID NO: 426416 - DNA, 75 bp, synthetic construct
  source 1..75: mol_type = other DNA
gacggagaaatacgccgatatgacgggcgtctgaatataatctgtagcgagtgccgtaagagcgaagttatgaag

SEQ ID NO: 426417 - DNA, 75 bp, synthetic construct
  source 1..75: mol_type = other DNA
gcaggcgcgcaaggactggcaaaacgcccgcaaaaaaactctcaagggcaaagctgaagaaaccatctgtggttg

SEQ ID NO: 426418 - DNA, 75 bp, synthetic construct
  source 1..75: mol_type = other DNA
cgcgagacgttacggcaactggaagcgaaaacaggtgcgacaagatatctgatgagtgttctcgccagagagctg

SEQ ID NO: 426419 - DNA, 75 bp, synthetic construct
  source 1..75: mol_type = other DNA
ggcgccagaacataatctgtcgcgagtgccggaaaagcaaggttatgcagcgtgtgctggcgttttatcagggta

SEQ ID NO: 426420 - DNA, 75 bp, synthetic construct
  source 1..75: mol_type = other DNA
tccggaccttatcaggatattacctgatggagaaatacgccgctacgacagacaacagaacataatctgtcgcga

SEQ ID NO: 426421 - DNA, 75 bp, synthetic construct
  source 1..75: mol_type = other DNA
aactgaagaaaccggttgtggttgatcctgaccttatctggtcattaccagacggagaaatacgccgctacgaca

SEQ ID NO: 426422 - DNA, 75 bp, synthetic construct
  source 1..75: mol_type = other DNA
gattgttgaacttgtacgtctgagcggtcgcgagacgttacggcaactggaagcgaaaacaggtgcgacaagata

SEQ ID NO: 426423 - DNA, 75 bp, synthetic construct
  source 1..75: mol_type = other DNA
ctggctacgggttattcccgtcagaacaggctcgtaaggactggcaaaatgcccgcaaaaaactctcgagggcaa

SEQ ID NO: 426424 - DNA, 75 bp, synthetic construct
  source 1..75: mol_type = other DNA
gctgaagaaaccatctgcggttgatccggaccttatctggtcattacctgacggagaaatacgtcgctacgacag

SEQ ID NO: 426425 - DNA, 75 bp, synthetic construct
  source 1..75: mol_type = other DNA
gacggagaaatacgccgctacgacaggcgtcagaacataatctgtcgcgagtgccggaaaagcgaagttatgcag

SEQ ID NO: 426426 - DNA, 75 bp, synthetic construct
  source 1..75: mol_type = other DNA
ggcgggaaaaaattaaagggcaggttgttgaactcgtgcgccatagtgggcgcgagacgttacgacaactggaag

SEQ ID NO: 426427 - DNA, 75 bp, synthetic construct
  source 1..75: mol_type = other DNA
gcccgcaaaaaactatcgagggcaaagatgaagaaatcggttgcagttgatccggaccttatctggtcattacct

SEQ ID NO: 426428 - DNA, 75 bp, synthetic construct
  source 1..75: mol_type = other DNA
ttgcagaacgcggatttttttataaggttcctgctgtgctaagggattatttatcagctataccggtgggtgatg

SEQ ID NO: 426429 - DNA, 75 bp, synthetic construct
  source 1..75: mol_type = other DNA
gttgccagttgttatgtatacaactccggctacgcgttattcccgtctcaacaggcacgaaaggactggcaaaat

SEQ ID NO: 426430 - DNA, 75 bp, synthetic construct
  source 1..75: mol_type = other DNA
ctggttacgggttattcccgtctgaacaggcgcgtaaggactggcaaaatgccagtaaaaagctctcaagggcaa

SEQ ID NO: 426431 - DNA, 75 bp, synthetic construct
  source 1..75: mol_type = other DNA
ttgcaggtttaggaacactgacaggtacaatcttttttggctttgttggtgataagattggtgtaaaaatagcct

SEQ ID NO: 426432 - DNA, 75 bp, synthetic construct
  source 1..75: mol_type = other DNA
tgtcctcgtagcggtggggatgcgcatgtccgtatttttactccggtgaacgagttgggatttgccggtcatccg

SEQ ID NO: 426433 - DNA, 75 bp, synthetic construct
  source 1..75: mol_type = other DNA
agcaggtggtattgcaccagataattgatcgccggacagcatcactgtgcagtgtcgggatgttaacaaacctga

SEQ ID NO: 426434 - DNA, 75 bp, synthetic construct
  source 1..75: mol_type = other DNA
aaaacgggtgtggcggcgggagcgtgacctgacggggtggatgtcgctgtcgcgtaaaccggaggtgacctggta

SEQ ID NO: 426435 - DNA, 75 bp, synthetic construct
  source 1..75: mol_type = other DNA
ggcgtctgaatataatctgtcgcgagtgccggaagagcgaagctatgcagcgtgtactggctttctatcagggta

SEQ ID NO: 426436 - DNA, 75 bp, synthetic construct
  source 1..75: mol_type = other DNA
gtgccgtaaaagcgaagttatgcagcgtatattgtctttttatcagggaaatgttcgatatttattgaagtatca

SEQ ID NO: 426437 - DNA, 75 bp, synthetic construct
  source 1..75: mol_type = other DNA
gcccgcaaaaaactctcaagggcaaagctgaagaaaccatctgcggttgatccggaccttatctggtcattacca

SEQ ID NO: 426438 - DNA, 75 bp, synthetic construct
  source 1..75: mol_type = other DNA
aactggaaggacagctcgctacgctgcgtcagcgttgtgccccggtagcgcaatttgccacgctaagtgcccgct

SEQ ID NO: 426439 - DNA, 75 bp, synthetic construct
  source 1..75: mol_type = other DNA
agcagttatcgctgcgacgtgccgaagcggtgcgcaactggatgctgcagaccagcgacatcccggccacctgtt

SEQ ID NO: 426440 - DNA, 75 bp, synthetic construct
  source 1..75: mol_type = other DNA
tcatgcccggcatgtaccgggatgcggcggttctgaccggacaactgcgccggttcgcccacagtatggcgacag

SEQ ID NO: 426441 - DNA, 75 bp, synthetic construct
  source 1..75: mol_type = other DNA
cagcgcacacagtatgaagtgtatgactaccccggacgtttcaagggtgctcacgggcagaactttgcccgctgg

SEQ ID NO: 426442 - DNA, 75 bp, synthetic construct
  source 1..75: mol_type = other DNA
gtttcgagtggtgaagtatacaactctggctatgggttattcccgtcagaacaggctcgtaaggactggcaaaac

SEQ ID NO: 426443 - DNA, 75 bp, synthetic construct
  source 1..75: mol_type = other DNA
attagctatcaggcttcaattgccgctggcattcgcatcaaaggagaggagcatggaaataaaaccagaagatga

SEQ ID NO: 426444 - DNA, 75 bp, synthetic construct
  source 1..75: mol_type = other DNA
gtggtgctgtgagtgaaattagctatcaggcttcaattgccgctggcatttgcatcaaaggagaggagcatggaa

SEQ ID NO: 426445 - DNA, 75 bp, synthetic construct
  source 1..75: mol_type = other DNA
ctggtcgctgcgcgaatgggacagcgcgccgccgaaaatcgcccgctggcagcgtaaacgcatccagcatcagga

SEQ ID NO: 426446 - DNA, 75 bp, synthetic construct
  source 1..75: mol_type = other DNA
gcttatgaagcgcgcctggcgcggtgtcgccatgcgctggaaaaaatcgagaataagctggctcgcttaactcgc

SEQ ID NO: 426447 - DNA, 75 bp, synthetic construct
  source 1..75: mol_type = other DNA
cgcagacgactgatttagtcgagcaacagacactgtatcgtgaagtagaagcttatgaagcgcgcctggcgcggt

SEQ ID NO: 426448 - DNA, 75 bp, synthetic construct
  source 1..75: mol_type = other DNA
cagctgattgccggtgaaaccctcttcaccggcaccatcaaccgtacggaagttcatccccgggaagtgattaaa

SEQ ID NO: 426449 - DNA, 75 bp, synthetic construct
  source 1..75: mol_type = other DNA
atgcagcagctttcctttctgcccggagaaatgacgcccggcgagcgcagcctcattcagcgggccctgaaaacc

SEQ ID NO: 426450 - DNA, 75 bp, synthetic construct
  source 1..75: mol_type = other DNA
acccgtccggtgaagtcacacccagtaaggcagaccggcttatcaccgaacgtctggtacaggcactgggtctgg

SEQ ID NO: 426451 - DNA, 75 bp, synthetic construct
  source 1..75: mol_type = other DNA
ccgaggtccatccccgggaagtggtcaaacgtgcactgcacttcaatgccgcagcggtgatactggcccataacc

SEQ ID NO: 426452 - DNA, 75 bp, synthetic construct
  source 1..75: mol_type = other DNA
atggcgggactggagcgggaagagttccgggtgctgtatctgaacaatcagaatcagctgattgccggtgaaacc

SEQ ID NO: 426453 - DNA, 75 bp, synthetic construct
  source 1..75: mol_type = other DNA
gcgtggccttcacctccacccgtgcggcccgggaatggctgattctgaacatggctggactggagcgtgaagaat

SEQ ID NO: 426454 - DNA, 75 bp, synthetic construct
  source 1..75: mol_type = other DNA
ctggccctggtggatatccgggtaccggaccatctgataatcggtggcagccaggttttctcctttgcggaacac

SEQ ID NO: 426455 - DNA, 75 bp, synthetic construct
  source 1..75: mol_type = other DNA
gcagtcactgcaaccatcaacaacagcaccgcgagccagaacgtgatgtttatcgccgatgtcaggacggcgaag

SEQ ID NO: 426456 - DNA, 75 bp, synthetic construct
  source 1..75: mol_type = other DNA
agatcgcagaactggtggtcattaaggacgactcagtggcagacggtgcaatggcgaatatgctgcgggcgagag

SEQ ID NO: 426457 - DNA, 75 bp, synthetic construct
  source 1..75: mol_type = other DNA
cggaagtccatccccgggaagtgattaaacgcgccctgtatcacaatgccgcagccgtggtgctggcgcacaatc

SEQ ID NO: 426458 - DNA, 75 bp, synthetic construct
  source 1..75: mol_type = other DNA
taatacgcttgccggacagacggtcagcgtgttggcaggcaacagcgcaacggtcactccgacggtgaccaccaa

SEQ ID NO: 426459 - DNA, 75 bp, synthetic construct
  source 1..75: mol_type = other DNA
cgtctggtacaggcgctggccctggtggatatccgggtgccggaccatctgatagtcggtggcagccaggtattc

SEQ ID NO: 426460 - DNA, 75 bp, synthetic construct
  source 1..75: mol_type = other DNA
ttgacatccgggtgccggaccatctgatagtcggtggcagccaggtgttctcctttgcggaacacggtctgcttt

SEQ ID NO: 426461 - DNA, 75 bp, synthetic construct
  source 1..75: mol_type = other DNA
ggacattcgcaaggtggataactcgcaaatcaccaaccgcatgcgcagtcgcgactatgacatgatgccgcgcgt

SEQ ID NO: 426462 - DNA, 75 bp, synthetic construct
  source 1..75: mol_type = other DNA
ctggtggatatccgggtgccggaccatctgatagtcggtggcaaccaggttttctcctttgccgaacatggtctg

SEQ ID NO: 426463 - DNA, 75 bp, synthetic construct
  source 1..75: mol_type = other DNA
gctgccgtggtgctggcacacaatcacccgtccggtgaagtcacacccagtaaggcagaccggcttatcactgag

SEQ ID NO: 426464 - DNA, 75 bp, synthetic construct
  source 1..75: mol_type = other DNA
ggttatcgactcgctgatcaatcaaattattgccgcgcagggaaataaagaaaattactgccgttggggcgagca

SEQ ID NO: 426465 - DNA, 75 bp, synthetic construct
  source 1..75: mol_type = other DNA
catgatggttcgcccattactgcccgcgatgtagagtttacttttcaaaaatttatgaccgaaggcgtgccgcaa

SEQ ID NO: 426466 - DNA, 75 bp, synthetic construct
  source 1..75: mol_type = other DNA
acgacacgctatttaccacctccgatgacgagccaggcagttattacccgctgattgccgaaagcgcgcgctatg

SEQ ID NO: 426467 - DNA, 75 bp, synthetic construct
  source 1..75: mol_type = other DNA
ggcacgggaatggctgattctgaacatggcgggactggagcgtgaagagttccgggtgctgtatctgaacaacca

SEQ ID NO: 426468 - DNA, 75 bp, synthetic construct
  source 1..75: mol_type = other DNA
atgcaacaactttcctttctgcccggagaaatgacgcccggcgagcgcagcctcattcagcgggccctgaaaacc

SEQ ID NO: 426469 - DNA, 75 bp, synthetic construct
  source 1..75: mol_type = other DNA
cagctgattgccggtgaaaccctcttcaccggcaccatcaaccgcacggaagtccatccccgggaagtgattaaa

SEQ ID NO: 426470 - DNA, 75 bp, synthetic construct
  source 1..75: mol_type = other DNA
tcagaggccggttcagagatgcggattcgtaccacctggaccaggcctttccgctgctgatgaaacaactggagc

SEQ ID NO: 426471 - DNA, 75 bp, synthetic construct
  source 1..75: mol_type = other DNA
gcacggcagtgctgaagcgtataccggtcgtgaagtgcaggatattcctgcattaccttgcagaccgtgccggta

SEQ ID NO: 426472 - DNA, 75 bp, synthetic construct
  source 1..75: mol_type = other DNA
taaacgcgctctgtaccacaatgccgctgccgtggtgctggcacacaatcacccgtccggtgaagtcacccccag

SEQ ID NO: 426473 - DNA, 75 bp, synthetic construct
  source 1..75: mol_type = other DNA
cgtctggtacaggcactgggcctggtggatatccgggtgccggaccatctgatagtcggtggcagccaggatttc

SEQ ID NO: 426474 - DNA, 75 bp, synthetic construct
  source 1..75: mol_type = other DNA
aagattataaaaaataggccatatcctgccatccatgtcgtatataaagaaagtagttatctttataacttattc

SEQ ID NO: 426475 - DNA, 75 bp, synthetic construct
  source 1..75: mol_type = other DNA
taaagatcgaagaaatacgaatgcataaacatcatgagattcatagggttaagcctcttatgccagctttgtgtc

SEQ ID NO: 426476 - DNA, 75 bp, synthetic construct
  source 1..75: mol_type = other DNA
cctttgatgagtggttcgatgctctggatgataccgatagagcaaacgtgctggcttcgatgatggtgctgcgag

SEQ ID NO: 426477 - DNA, 75 bp, synthetic construct
  source 1..75: mol_type = other DNA
ggatgtgttcagtggctggggcagcagtatcggtaaggccgtgacggcgaaggaagtgatcaccagaacggtgaa

SEQ ID NO: 426478 - DNA, 75 bp, synthetic construct
  source 1..75: mol_type = other DNA
cctgaaaaagagcttgagccttttataaaaatgtgcgcagagaagggcgaacagagtcgcgccattcttaatgct

SEQ ID NO: 426479 - DNA, 75 bp, synthetic construct
  source 1..75: mol_type = other DNA
ggaaaaacattgatatagccgcaacatcagcagcgtgtttttcagaagataacgccaccattatttttgcttcaa

SEQ ID NO: 426480 - DNA, 75 bp, synthetic construct
  source 1..75: mol_type = other DNA
ctgactgtcgggggattacggttgatgagctgcagaaaattcagttcgacagactggatttcactaacttctacg

SEQ ID NO: 426481 - DNA, 75 bp, synthetic construct
  source 1..75: mol_type = other DNA
tccggaccttatctggtcattacctgatggagaaatacgtcgttacgacaggcgtcataatataatttgtactga

SEQ ID NO: 426482 - DNA, 75 bp, synthetic construct
  source 1..75: mol_type = other DNA
atggcaagagtatttacacaggaagaacgggaagaagtgaaagcgcgcattgtggaacttgtacgccagagtgga

SEQ ID NO: 426483 - DNA, 75 bp, synthetic construct
  source 1..75: mol_type = other DNA
cgatgcctttaccgcagatattaaagcgctcacatctaagaatctgacacttgaagaagcaaaacaaagcagtga

SEQ ID NO: 426484 - DNA, 75 bp, synthetic construct
  source 1..75: mol_type = other DNA
gagttcatcaaaatcatggaaaataatactattctccaatctaattttgaccaggtgattgagagcttcgtagca

SEQ ID NO: 426485 - DNA, 75 bp, synthetic construct
  source 1..75: mol_type = other DNA
cagaccgccttatcacggaacgtctggtacaggcgctggccctggtggatatccgggtgccggaccatctgatag

SEQ ID NO: 426486 - DNA, 75 bp, synthetic construct
  source 1..75: mol_type = other DNA
ccgttgataacttcaaagcagaatttgaaaaagcggcagcttcccgctttggttccggctgggcatggctggtgc

SEQ ID NO: 426487 - DNA, 75 bp, synthetic construct
  source 1..75: mol_type = other DNA
ttgacatccgggtgccggaccatctgatagtcggtggcagccatgttttctcctttgcggaacacggtctgcttt

SEQ ID NO: 426488 - DNA, 75 bp, synthetic construct
  source 1..75: mol_type = other DNA
cgcagcctcattcagcgggccctgaaaaccctggaccgccatcttcatgaacccggcgtggccttcacctccacg

SEQ ID NO: 426489 - DNA, 75 bp, synthetic construct
  source 1..75: mol_type = other DNA
gtttcccgaggcttctcaactaaaattcaggagcactttgaaccgccccgggtttcctggagagtgttttatctg

SEQ ID NO: 426490 - DNA, 75 bp, synthetic construct
  source 1..75: mol_type = other DNA
tccgggtgctgtatctgaacaaccagaatcagttgattgccggtgaaaccctcttcaccggcaccattaaccgca

SEQ ID NO: 426491 - DNA, 75 bp, synthetic construct
  source 1..75: mol_type = other DNA
atgcagcagctttcctttctgcccggcgcgatgacgcccggcgagcgcaacctcattcagcgggccctgaaaacc

SEQ ID NO: 426492 - DNA, 75 bp, synthetic construct
  source 1..75: mol_type = other DNA
agatcgctgatctggtggtcattaaggacgactcagtggcagacggtgcaatggcgaatatgctgcgggcgagag

SEQ ID NO: 426493 - DNA, 75 bp, synthetic construct
  source 1..75: mol_type = other DNA
atgacctgcctgactgtctttattatctctgttgcattactgatggtaggtctgtggaatgcgacattattactc

SEQ ID NO: 426494 - DNA, 75 bp, synthetic construct
  source 1..75: mol_type = other DNA
atgctcatgaatgaagacacaaaacgtcagacagatatgaagaatgcggccctgagagcagcagatgtcttacgg

SEQ ID NO: 426495 - DNA, 75 bp, synthetic construct
  source 1..75: mol_type = other DNA
tgttctggaaaggtctgaaaaaaggcaccaccctgcagggtgacctgaaagcggctatcgaacgtgatttcggtt

SEQ ID NO: 426496 - DNA, 75 bp, synthetic construct
  source 1..75: mol_type = other DNA
atggccttctataacagcgataaattcccccagtggcagcaaaaattatttattggcgcgctgaaagataaagat

SEQ ID NO: 426497 - DNA, 75 bp, synthetic construct
  source 1..75: mol_type = other DNA
ttgactaccgcgcagttaatcgctgcctggcagagtggagaaccgtggatcaccagctgggttgaccgcagtgcc

SEQ ID NO: 426498 - DNA, 75 bp, synthetic construct
  source 1..75: mol_type = other DNA
gtcgaatcatcacggcgcgttgattcaggcgggggcgacgccggtctatctggaagcttcacgtaacccgtttgg

SEQ ID NO: 426499 - DNA, 75 bp, synthetic construct
  source 1..75: mol_type = other DNA
ttgctgcggcgatggtcatgggcgcagttgtttccagttctgcatttgcagcaggcaacaacggtaccgcgcgct

SEQ ID NO: 426500 - DNA, 75 bp, synthetic construct
  source 1..75: mol_type = other DNA
cagtccggacgccggtatatcggtatcgagctgcttgaacagtatcaccgtgccggacagcaacgactggccgcc

SEQ ID NO: 426501 - DNA, 75 bp, synthetic construct
  source 1..75: mol_type = other DNA
caccgtgccggacagcaacgcctggccgccgttcatcgggccatgcagcagggggccgcgaatgattactggttt

SEQ ID NO: 426502 - DNA, 75 bp, synthetic construct
  source 1..75: mol_type = other DNA
cggggaatcgcctgctatattgcgctggcaatctctggtggatcagtcaatgcatgggctgatgattcaattcaa

SEQ ID NO: 426503 - DNA, 75 bp, synthetic construct
  source 1..75: mol_type = other DNA
tcggtgcggctaaactgaccggcggtggcactaccacaccgaaagatttccagatccgtttacaggattgcgtgt

SEQ ID NO: 426504 - DNA, 75 bp, synthetic construct
  source 1..75: mol_type = other DNA
ttaaagcctggttagtaggtgaaactgcagcggtaacaccaaccccagcgccgtttgaaacgctaacgacgttcc

SEQ ID NO: 426505 - DNA, 75 bp, synthetic construct
  source 1..75: mol_type = other DNA
gggggggagggatgattactggaagtatatgcataatattcatacatggtctttacctatttatggtctccatag

SEQ ID NO: 426506 - DNA, 75 bp, synthetic construct
  source 1..75: mol_type = other DNA
gaaaaaccggcagaaatgctgcagcagataatcagcgcaagcagtcgtccgggtgacctggttgcagattttttt

SEQ ID NO: 426507 - DNA, 75 bp, synthetic construct
  source 1..75: mol_type = other DNA
agggagtaaagataactactggaaatatatgcataatgtacatatatggtctttgcctttttatggccttcagag

SEQ ID NO: 426508 - DNA, 75 bp, synthetic construct
  source 1..75: mol_type = other DNA
caccgtgccggacagcaacgtctggccgccgtccatcgggccatgcagcagggggccgcgaatgattactggttt

SEQ ID NO: 426509 - DNA, 75 bp, synthetic construct
  source 1..75: mol_type = other DNA
caccgtgccggacagcaacgactggccgccgtacaacgggccatgcagcagggggccgcgaatgattactggttt

SEQ ID NO: 426510 - DNA, 75 bp, synthetic construct
  source 1..75: mol_type = other DNA
taccacaatgccgctgccgtggtactggcacacaatcacccgtccggtgaagtcacacccagtaaggcagaccgg

SEQ ID NO: 426511 - DNA, 75 bp, synthetic construct
  source 1..75: mol_type = other DNA
ctatcatcttcctgcatattcttcattagaatataaagggtcctttggctcaataaatgcaggttatgctgactg

SEQ ID NO: 426512 - DNA, 75 bp, synthetic construct
  source 1..75: mol_type = other DNA
ctcttttttacgtaagaagcaggaatctgaccgccagaaaggaaaaaacgccaggctggcagaacgctatgcaca

SEQ ID NO: 426513 - DNA, 75 bp, synthetic construct
  source 1..75: mol_type = other DNA
atcgtcacgagctgggcgatgatattactccgcgctttaaggcggagtatgtcgacggctcaaaaggcacgccaa

SEQ ID NO: 426514 - DNA, 75 bp, synthetic construct
  source 1..75: mol_type = other DNA
tgataaccacgaattactcgctaaagaatggcgggagtctgctgaatctctcggcctgcatatcggtgaacagca

SEQ ID NO: 426515 - DNA, 75 bp, synthetic construct
  source 1..75: mol_type = other DNA
ccagttccagttctttggtatcccctcccgtcaggtatggcgtgaactccgccgccttgccagtcagatggcccg

SEQ ID NO: 426516 - DNA, 75 bp, synthetic construct
  source 1..75: mol_type = other DNA
gccgatcgtcagaaaggcaaaaagagctggcaggctgaacgctacgcgcgcggaaccctgcgcaaaatattcgaa

SEQ ID NO: 426517 - DNA, 75 bp, synthetic construct
  source 1..75: mol_type = other DNA
gcgaaggaagaagcctttttcgcacaatccaccgtgggtaaaaaactcatggcatcccttgaggaagccggacag

SEQ ID NO: 426518 - DNA, 75 bp, synthetic construct
  source 1..75: mol_type = other DNA
cgtggtgaagtatggaaagtgactgcggactttggggttaacttcaaagaagcagagttttactccttttatgaa

SEQ ID NO: 426519 - DNA, 75 bp, synthetic construct
  source 1..75: mol_type = other DNA
agcagaattttactcattttatgaaagtaatgtactcaatcatgctgtagcagggagaaatcatacggtttcagc

SEQ ID NO: 426520 - DNA, 75 bp, synthetic construct
  source 1..75: mol_type = other DNA
ttgcatgtgccctgacaacggctatctgccatttcccggcatattcttcattagaatataaaggtgctttcggct

SEQ ID NO: 426521 - DNA, 75 bp, synthetic construct
  source 1..75: mol_type = other DNA
gttcgcccgggcgacgggcgtatcgcgtactggagcgccacaacccgccgcatcgtcatcacacaggagtcgtca

SEQ ID NO: 426522 - DNA, 75 bp, synthetic construct
  source 1..75: mol_type = other DNA
gaaggtccgcaacggctgaaggatgacgcaatggatgcggttcttgctgccgctgatgccggatgttttgccacc

SEQ ID NO: 426523 - DNA, 75 bp, synthetic construct
  source 1..75: mol_type = other DNA
acaggaagccgatcgccagaaaggaaaaaagaactggcaggctgaacgttacgcgcgcggaaccctgcgcaaaat

SEQ ID NO: 426524 - DNA, 75 bp, synthetic construct
  source 1..75: mol_type = other DNA
tgaaacggatagctttattatgtcggggagatcgcagaaagctggcgcttgccggcgaaacaattagcttattac

SEQ ID NO: 426525 - DNA, 75 bp, synthetic construct
  source 1..75: mol_type = other DNA
atctgaagcacaggatgtgctaaccagggaggtcgaacgaaaagttaccgctgacatgatgattgagtttatcag

SEQ ID NO: 426526 - DNA, 75 bp, synthetic construct
  source 1..75: mol_type = other DNA
cccacaaacggcggatgaactggctacgtttttcggcatcacatcacgcaaagtggcttcaacgctggcaatggc

SEQ ID NO: 426527 - DNA, 75 bp, synthetic construct
  source 1..75: mol_type = other DNA
actgcatgccgggcggtaatttaccagcagagccgaaagctgcatcggtagcggaaactgatggtaaagcctttc

SEQ ID NO: 426528 - DNA, 75 bp, synthetic construct
  source 1..75: mol_type = other DNA
ggcgataatttaccagcagagccgaaagccgcgctggtaacggaaagtgatggtaaggcctttcctcagccagca

SEQ ID NO: 426529 - DNA, 75 bp, synthetic construct
  source 1..75: mol_type = other DNA
ggcgtcgttgataaaactggtcacacctggtttctggctggcgaaggtgaatcccgggtaaccgaagagcggcca

SEQ ID NO: 426530 - DNA, 75 bp, synthetic construct
  source 1..75: mol_type = other DNA
aagctgcgccggtaacgaaaacggctggtaaagcctttccccagccagcaggtgttgcattaccagtacaggaag

SEQ ID NO: 426531 - DNA, 75 bp, synthetic construct
  source 1..75: mol_type = other DNA
gcggaaacggatggtaaagcctttcctcagccagcaggtgctgcgttaccagtccgggacgcagcaacacaggaa

SEQ ID NO: 426532 - DNA, 75 bp, synthetic construct
  source 1..75: mol_type = other DNA
ggcaaaaagtcatatccggaagtgggaacgtgtctgcgccgcgctgcaggagctgaacaagcaccgggatattat

SEQ ID NO: 426533 - DNA, 75 bp, synthetic construct
  source 1..75: mol_type = other DNA
acacaggaagaaattaaaacagaaacggtggcggatattgtgcggtcactgccatcgttcaccgaaaaacatacc

SEQ ID NO: 426534 - DNA, 75 bp, synthetic construct
  source 1..75: mol_type = other DNA
aaagtgaaccggtgtcaccggtaccgaaagtgacagcgcaaatgctgactgaggcgattgaacaacatggcccac

SEQ ID NO: 426535 - DNA, 75 bp, synthetic construct
  source 1..75: mol_type = other DNA
actgcatgccgggcggtaatttaccagcagagccgaaagttaaatcgatagcggaaacccatggtaaagcctttc

SEQ ID NO: 426536 - DNA, 75 bp, synthetic construct
  source 1..75: mol_type = other DNA
aggcaaaatatacttagaaaattaatagggagatgtcatgaaggtattgatgccatccatacattcacagacaat

SEQ ID NO: 426537 - DNA, 75 bp, synthetic construct
  source 1..75: mol_type = other DNA
taatttaccagcagagccgaaagctgcatcggtagcggaaaccgatggtaaagcctttcctcagccagccggtgt

SEQ ID NO: 426538 - DNA, 75 bp, synthetic construct
  source 1..75: mol_type = other DNA
gggcgatccccggtgctatggcgagccagtttgctgcgctggcaggggcttgcgttgttggcttaattgtctttg

SEQ ID NO: 426539 - DNA, 75 bp, synthetic construct
  source 1..75: mol_type = other DNA
aatacaggtggaataaaactcacgacaatggagcaacgacagggcagtaatgatgggccttttcttgatgttgtt

SEQ ID NO: 426540 - DNA, 75 bp, synthetic construct
  source 1..75: mol_type = other DNA
gggcggtatcagaacagcggaggataactctgctgactggcgggtgccgttgcgacagctttgctccctaccggc

SEQ ID NO: 426541 - DNA, 75 bp, synthetic construct
  source 1..75: mol_type = other DNA
ccaaatatcccgatcgcggcgttttgctctcctatggtgggcagtaaggtttcacgagatgagggatacgaatca

SEQ ID NO: 426542 - DNA, 75 bp, synthetic construct
  source 1..75: mol_type = other DNA
gcatggcgcgtaagacaaaaagtagaagctgaaaatcttgaagagtcagccagactggcttcaaaattgaagatt

SEQ ID NO: 426543 - DNA, 75 bp, synthetic construct
  source 1..75: mol_type = other DNA
atgagtggtttatattcgccagcggagttaatacagactgttaatgccgaagatattcaatggcagattaactct

SEQ ID NO: 426544 - DNA, 75 bp, synthetic construct
  source 1..75: mol_type = other DNA
cagctttgaagttttatataaatgtgattaaagaattagatattaacaaaaatctttggttaatggatgatacaa

SEQ ID NO: 426545 - DNA, 75 bp, synthetic construct
  source 1..75: mol_type = other DNA
ggtggaaagcgtccgggaaagccttcccgttgctgaacagcaacgcattctggaacaaaaactggtgatgctgtc

SEQ ID NO: 426546 - DNA, 75 bp, synthetic construct
  source 1..75: mol_type = other DNA
atggaaaccgtattacatgcactgaaagcgatgggaaaagccaattctgttgaactggcggcacgacttgatatc

SEQ ID NO: 426547 - DNA, 75 bp, synthetic construct
  source 1..75: mol_type = other DNA
cgtctgatgtatctcgacctggattattaccaggggcagtgcagtctgcgctcggatattcacagtacgcggcag

SEQ ID NO: 426548 - DNA, 75 bp, synthetic construct
  source 1..75: mol_type = other DNA
accggcttgccgtcaggttgtcgttgattatcagccgcctggtgtccggtgaaactctgtttattcgcaaactgg

SEQ ID NO: 426549 - DNA, 75 bp, synthetic construct
  source 1..75: mol_type = other DNA
accggctggctgtcaggctgtcactgataatcagccgcctggttgccggtgaaacgctgaacatggcgcggctgg

SEQ ID NO: 426550 - DNA, 75 bp, synthetic construct
  source 1..75: mol_type = other DNA
gctgaacgttggcaatggctaacattttccccatggttcttactggtggtatggcgattaaacgcctggcgaacg

SEQ ID NO: 426551 - DNA, 75 bp, synthetic construct
  source 1..75: mol_type = other DNA
ctggcggattagcagcctcagagagcaaattttacctcgttggtatcatcagtggtttggcgtgccagtggataa

SEQ ID NO: 426552 - DNA, 75 bp, synthetic construct
  source 1..75: mol_type = other DNA
cttgatactccacatcagggtcaagtgacggtcaatttttcagcgcaaggctggcggattagcagcctcagagag

SEQ ID NO: 426553 - DNA, 75 bp, synthetic construct
  source 1..75: mol_type = other DNA
gcacgcttccagccgcaggacgggaaatggcgtatcgcgccgtactaccacctgtttggcagcgatgaattgtca

SEQ ID NO: 426554 - DNA, 75 bp, synthetic construct
  source 1..75: mol_type = other DNA
ctggtgctgggcgaagacgttacccagaccggcgcgcgcgtcgcgctggcagtgcgtcaggcggtgaaaggtaaa

SEQ ID NO: 426555 - DNA, 75 bp, synthetic construct
  source 1..75: mol_type = other DNA
aaataaccattcctgtgtggttaaggttgatgacgggacgaatagcattcttctaaccggtgatattgaagcccc

SEQ ID NO: 426556 - DNA, 75 bp, synthetic construct
  source 1..75: mol_type = other DNA
atgatggaacagtcacttatcccacaggctacggcactttcattggccgcacaacgcacgataaaacgcgcctta

SEQ ID NO: 426557 - DNA, 75 bp, synthetic construct
  source 1..75: mol_type = other DNA
cggcaccaccacgccgaaaagtttccagattcgcctgcaagattgcgtatttgatactcaggaaacaatgaccac

SEQ ID NO: 426558 - DNA, 75 bp, synthetic construct
  source 1..75: mol_type = other DNA
aaaatgggcccccttgagcgcgaagtgtttgtcgtgttgtacctcaataaccagaaccagctgcttgcccacgaa

SEQ ID NO: 426559 - DNA, 75 bp, synthetic construct
  source 1..75: mol_type = other DNA
cactatgtctaccgacacgatgaatacggcaggctgacggagaagacggaccgcatcccggcgggtgtgatacgg

SEQ ID NO: 426560 - DNA, 75 bp, synthetic construct
  source 1..75: mol_type = other DNA
atgcgttcgggaatgcacttgccgggcagacggtcagcgtgatggcggacaacggtgcagcggtcgcttcgacga

SEQ ID NO: 426561 - DNA, 75 bp, synthetic construct
  source 1..75: mol_type = other DNA
tcgttgatatccgtgtgcctgaccaccttatcgtcggtggtacgcagatattgtcgttcgctgaacacggtctgc

SEQ ID NO: 426562 - DNA, 75 bp, synthetic construct
  source 1..75: mol_type = other DNA
gtatgccgcagccgtacatcaaactcaacccagcggatgccgcgaagttgggtgtgaacgcgggtacacgcgtct

SEQ ID NO: 426563 - DNA, 75 bp, synthetic construct
  source 1..75: mol_type = other DNA
actgggcgtgacagtccgggaacaatttaaaaaaaagcttgaggatgtgctgaaaaggccgcgcaatccatcggc

SEQ ID NO: 426564 - DNA, 75 bp, synthetic construct
  source 1..75: mol_type = other DNA
cgaatacaggtattgatcatctcgaacaattgattaacgtcaaccttttctcttctgacagaatgtcattttgtg

SEQ ID NO: 426565 - DNA, 75 bp, synthetic construct
  source 1..75: mol_type = other DNA
aaaatcttcaatctaaagctagtgcttttttggtaagtggtttttctgttggaaatattattgcggcacaaataa

SEQ ID NO: 426566 - DNA, 75 bp, synthetic construct
  source 1..75: mol_type = other DNA
atgctgacaccggcacaacgataccttcagcgcacgatggcgcatcatagggctgatccattcaatcgcgaagag

SEQ ID NO: 426567 - DNA, 75 bp, synthetic construct
  source 1..75: mol_type = other DNA
gtgctgaaaagaccgcgcaatccatcgactaaactacgggatttgccggactgctacaaaattaagcttcgcaca

SEQ ID NO: 426568 - DNA, 75 bp, synthetic construct
  source 1..75: mol_type = other DNA
gagcctgagctgcaaagcaaaatcgacgtcatcgtgcaggcactggctggtgcgaagaaaccgttgattatctcc

SEQ ID NO: 426569 - DNA, 75 bp, synthetic construct
  source 1..75: mol_type = other DNA
gttactacaaagattacgctgacggtacggacctgggcgtttacggtgcgcacgacaacgtctacttcggtcgcc

SEQ ID NO: 426570 - DNA, 75 bp, synthetic construct
  source 1..75: mol_type = other DNA
cgaaatcgaatcttacgatgcggtactggtactgggcgaagacgttacccagaccggcgcgcgcgtcgcgctggc

SEQ ID NO: 426571 - DNA, 75 bp, synthetic construct
  source 1..75: mol_type = other DNA
accaggcaaaatttgagttaaatttaatgagcaagttctcaaattttattataaataaaccattttcagcgataa

SEQ ID NO: 426572 - DNA, 75 bp, synthetic construct
  source 1..75: mol_type = other DNA
aggggaaggaaaagagcgaaaaacctgagaagaaagataccgttgagtggcagttatgtgatcctatggaggtaa

SEQ ID NO: 426573 - DNA, 75 bp, synthetic construct
  source 1..75: mol_type = other DNA
gcgtcagcgttgtgccccggtagcgcaatttgccacgctaagcgcccgttttgacaggcacctttttcagactcg

SEQ ID NO: 426574 - DNA, 75 bp, synthetic construct
  source 1..75: mol_type = other DNA
tggtggagatccgggtccccgaccacctgatagtcggcggcaggcaaatattctcattcgccgaacatggtcttc

SEQ ID NO: 426575 - DNA, 75 bp, synthetic construct
  source 1..75: mol_type = other DNA
atacagcgcttacagacagaccggggaagagagttttttgccgttaaggtgcaggagaaattgaaagaatacagc

SEQ ID NO: 426576 - DNA, 75 bp, synthetic construct
  source 1..75: mol_type = other DNA
aaaacgcaaaacagttttatattcatcatggttttaagccatcaaaaactcaggtgcaaacattgtttcttaaac

SEQ ID NO: 426577 - DNA, 75 bp, synthetic construct
  source 1..75: mol_type = other DNA
aaaacgcaaaacagttttatattcatcatggttttaagccatcaaaaagccaggagcaaacattgtttcttaaac

SEQ ID NO: 426578 - DNA, 75 bp, synthetic construct
  source 1..75: mol_type = other DNA
atctgacgttgggtgattttgatggtcagcgagtagaggctttaacaatgtgggttgccctgagcaaagtaaggg

SEQ ID NO: 426579 - DNA, 75 bp, synthetic construct
  source 1..75: mol_type = other DNA
cgaatttctttttaggaaaatcaggggtatatccgctgttaaaaaaaacaacccccttttggctgtatctgcctt

SEQ ID NO: 426580 - DNA, 75 bp, synthetic construct
  source 1..75: mol_type = other DNA
cagaaaacatatatctgttacaggtgaactatttaaattttacataaaagatattatcagattatattgctataa

SEQ ID NO: 426581 - DNA, 75 bp, synthetic construct
  source 1..75: mol_type = other DNA
cgtctggtacaggcactgggcctggtggatatccgggtgccggaccatctgatagttggtggcaaccaggttttc

SEQ ID NO: 426582 - DNA, 75 bp, synthetic construct
  source 1..75: mol_type = other DNA
tccgggtgctgtatctgaacaaccagaatcaactgattgccggtgaaaccctcttcaccggcaccatcaaccgca

SEQ ID NO: 426583 - DNA, 75 bp, synthetic construct
  source 1..75: mol_type = other DNA
atgacggcagagcacatcagggactggcaacaaccgcgccacgcagtagggcgggaaggaacggggatccccgca

SEQ ID NO: 426584 - DNA, 75 bp, synthetic construct
  source 1..75: mol_type = other DNA
aacattaggtgatgaaatcctgtcttttgcatgtgaatattcgaaagctgcagtcaaaaaagaattagcgcaata

SEQ ID NO: 426585 - DNA, 75 bp, synthetic construct
  source 1..75: mol_type = other DNA
aaaaggcactctgatgcattagcgttaatacccaataaagcattacctaaaagtgtcccaacaagagtaagaaac

SEQ ID NO: 426586 - DNA, 75 bp, synthetic construct
  source 1..75: mol_type = other DNA
cggaagttcagcgtagaactggatatagcaaggcatggatttatcgccttatggggcaaggcaaatttcctgcat

SEQ ID NO: 426587 - DNA, 75 bp, synthetic construct
  source 1..75: mol_type = other DNA
caaagctctatgctttgcttgatgaggagatgaaggctgtaacggctattggggcatacagcggtatgcggatca

SEQ ID NO: 426588 - DNA, 75 bp, synthetic construct
  source 1..75: mol_type = other DNA
cctcttcaccggcaccatcaaccgcacggaagtccatccccgggaagtgattaaacgcgccctgtatcacaatgc

SEQ ID NO: 426589 - DNA, 75 bp, synthetic construct
  source 1..75: mol_type = other DNA
aaaacctttgatgacggcagagttgaggcggaagaggttcgaccgttccctgcgttcgtaagaggcgatgattaa

SEQ ID NO: 426590 - DNA, 75 bp, synthetic construct
  source 1..75: mol_type = other DNA
aattcaaagtgaggttgagaaagctattgatgagtataaacaatggcaacgttcggttatgggaagagatataaa

SEQ ID NO: 426591 - DNA, 75 bp, synthetic construct
  source 1..75: mol_type = other DNA
actgaagatggctggttggagcgatgccaattattcaaacaattatactatcaaaccaggtgaagtgagtccgct

SEQ ID NO: 426592 - DNA, 75 bp, synthetic construct
  source 1..75: mol_type = other DNA
gcggggatcagtacagtcaccgcaaccatcaacagcagcagtcagagccgggatgtgacatttatcgccgatgtc

SEQ ID NO: 426593 - DNA, 75 bp, synthetic construct
  source 1..75: mol_type = other DNA
cggaggtccatccccgggaagtgattaaacgtgccctgtaccacaatgccgccgccgtggtgctggcacacgatc

SEQ ID NO: 426594 - DNA, 75 bp, synthetic construct
  source 1..75: mol_type = other DNA
agtgttgggggggatagcacgaaaacaaacctcagaaaggaataaaggcggtctctataccagaataaaaaaaga

SEQ ID NO: 426595 - DNA, 75 bp, synthetic construct
  source 1..75: mol_type = other DNA
ggccagacgggacggtggagatcagtgtcaccagccagacggcaggaatcagtgtggtcaccgccagcatcaaca

SEQ ID NO: 426596 - DNA, 75 bp, synthetic construct
  source 1..75: mol_type = other DNA
ttcacgaaatagcgcatcaacgattgaactaaaaaaatacgtcgaattgttgtcatttaaagaaatcaagcaaat

SEQ ID NO: 426597 - DNA, 75 bp, synthetic construct
  source 1..75: mol_type = other DNA
ccgtatctcaaatcggcttgttgttcgctatagatatcttggttttagggagtggtcctctattcgtttttacgg

SEQ ID NO: 426598 - DNA, 75 bp, synthetic construct
  source 1..75: mol_type = other DNA
cgtcaaggcggtggcctttgtcggcatcgacatcgaggatcagcgctatattgacagccgcgatatcaccggcaa

SEQ ID NO: 426599 - DNA, 75 bp, synthetic construct
  source 1..75: mol_type = other DNA
gcccagcacaagcaaccgctgccgcagctcctgaccaacatgaacctgatgaaccaggggctgctcaacgtggcg

SEQ ID NO: 426600 - DNA, 75 bp, synthetic construct
  source 1..75: mol_type = other DNA
tgcccacgctgtcaggcgaaaatccgtgatggtcgcgactggtcgctaacccgactggcggcaatggcttttact

SEQ ID NO: 426601 - DNA, 75 bp, synthetic construct
  source 1..75: mol_type = other DNA
gttttatttcggcgcagcggttattttaactattcttgcagtggaatggctggacagccgcttactttgggatgc

SEQ ID NO: 426602 - DNA, 75 bp, synthetic construct
  source 1..75: mol_type = other DNA
ttgttgtttcctgccaacctgttacctatttcgatcatttatctgaacggtggtcgacaagaagatacgatcctt

SEQ ID NO: 426603 - DNA, 75 bp, synthetic construct
  source 1..75: mol_type = other DNA
ggcaataccgtagcgccagtgataccggcaactgggttaacgccgatggtgcgattttctacccctatattggtc

SEQ ID NO: 426604 - DNA, 75 bp, synthetic construct
  source 1..75: mol_type = other DNA
tgaaagtggcggggaaaacccttactcaagtccgtaatgaaattaccgcgcgtctggatgcggtgattgaaagtc

SEQ ID NO: 426605 - DNA, 75 bp, synthetic construct
  source 1..75: mol_type = other DNA
gggggcgatggtctttttctgcgttattggtgcccccctcattctggtgacctccatagcttatttatggtttgg

SEQ ID NO: 426606 - DNA, 75 bp, synthetic construct
  source 1..75: mol_type = other DNA
ttgtggcgttggtgattttaacgacggtgacgttgtcacatctcaatgtcgaagaactgtgggagcgattttatc

SEQ ID NO: 426607 - DNA, 75 bp, synthetic construct
  source 1..75: mol_type = other DNA
cgagatatcctggatatttcgctcaccttcaggccacgggttatccggtattaatgtgcaggaaaccggaagtga

SEQ ID NO: 426608 - DNA, 75 bp, synthetic construct
  source 1..75: mol_type = other DNA
cagggcaattattactcaggaaatcggagacagacgctatctgcaacgaaaaaagaatctttcggatgtggaaga

SEQ ID NO: 426609 - DNA, 75 bp, synthetic construct
  source 1..75: mol_type = other DNA
ctatttctatcatttatctgaatggtggccggcaggaagatacaattctttccgggattatgtcgctggcaagta

SEQ ID NO: 426610 - DNA, 75 bp, synthetic construct
  source 1..75: mol_type = other DNA
tctataaaggtgcaggattatgcgcacattcaggcgggtattggtctgttctcttttgttgcattagtgatattg

SEQ ID NO: 426611 - DNA, 75 bp, synthetic construct
  source 1..75: mol_type = other DNA
gataaattctcatcagagtgcctattgtccgcgctgtcaggcaaaaattcgcgacgggcgcgactggtcgctaac

SEQ ID NO: 426612 - DNA, 75 bp, synthetic construct
  source 1..75: mol_type = other DNA
cagtatactgatggttatcttgatagtggatataggccacaacgtcgtgtatcaacgcagattattcagaacaca

SEQ ID NO: 426613 - DNA, 75 bp, synthetic construct
  source 1..75: mol_type = other DNA
cgggcgcggggaaagggactcaggctcagttcatcatggagaaatatggtattccgcaaatctccactggcgata

SEQ ID NO: 426614 - DNA, 75 bp, synthetic construct
  source 1..75: mol_type = other DNA
tatgcgtgggcggatgtcgtcgtttgccgctccggtgcgttaacggtgagtgaaatcgccgcggcaggactaccg

SEQ ID NO: 426615 - DNA, 75 bp, synthetic construct
  source 1..75: mol_type = other DNA
agtcttatattgatagtttcgcggtaggcggcgcaactcccgattctatgcggtgggtcgagcagaataatggtg

SEQ ID NO: 426616 - DNA, 75 bp, synthetic construct
  source 1..75: mol_type = other DNA
aatattatccaactaaatttggacgaaattatgtcctgaggaatgtaaatattgagctaccaagggaccgtaata

SEQ ID NO: 426617 - DNA, 75 bp, synthetic construct
  source 1..75: mol_type = other DNA
tcgccgcgttcacgcgccgtctggtcgtgtttatcacgttaaattcaatccgccgaaagtagaaggcaaagacga

SEQ ID NO: 426618 - DNA, 75 bp, synthetic construct
  source 1..75: mol_type = other DNA
accaaatacgcgaaagtcgacggcaccaaaccggttgctgaagtccgtgcggatctggaaaaaattctcggctaa

SEQ ID NO: 426619 - DNA, 75 bp, synthetic construct
  source 1..75: mol_type = other DNA
cttttaatgcgcaaaaacaagcgctgaaatggggactggcaggtttttccagtaccaccgtctggctggtatttg

SEQ ID NO: 426620 - DNA, 75 bp, synthetic construct
  source 1..75: mol_type = other DNA
atttattgatgatatggcggcggcgtatgcgtgggcagatgtcgttgtttgccgctccggtgcgttaacggtgag

SEQ ID NO: 426621 - DNA, 75 bp, synthetic construct
  source 1..75: mol_type = other DNA
tgtcattcacggtaccatttagtgcattttcgagttatagcaatgcatcactaagcagtcgcgtaatcacaaata

SEQ ID NO: 426622 - DNA, 75 bp, synthetic construct
  source 1..75: mol_type = other DNA
tggtgatggcaggcggaaccggtggacatgtattcccggggctggcggttgcgcaccatctaatggctcagggtt

SEQ ID NO: 426623 - DNA, 75 bp, synthetic construct
  source 1..75: mol_type = other DNA
ccttgtattgctcagcttaggtttgtgggtatttggcagtgaagtcattaatgctactgcggtaggtctgctggc

SEQ ID NO: 426624 - DNA, 75 bp, synthetic construct
  source 1..75: mol_type = other DNA
atgtctttagcaaaagataatatatggaaactattggccccactggtggtgatgggcgtcatgtttcttatccct

SEQ ID NO: 426625 - DNA, 75 bp, synthetic construct
  source 1..75: mol_type = other DNA
gctggcattagaaaatctctcgaccggcaatttaagaaagttcacgctgtcgtgtgacagttcttccacgaagag

SEQ ID NO: 426626 - DNA, 75 bp, synthetic construct
  source 1..75: mol_type = other DNA
caggcgtgtccccaacagcacctggccgggcgcgaaattccgcatcgatacggagaatgccgccggcacggtcac

SEQ ID NO: 426627 - DNA, 75 bp, synthetic construct
  source 1..75: mol_type = other DNA
gctgagcgtggacagtgatttctccctgaaaggctcgtcgctcgatgtgctgctgccgttttacaacaccccgaa

SEQ ID NO: 426628 - DNA, 75 bp, synthetic construct
  source 1..75: mol_type = other DNA
ggacgtgtattgcagggcagcaacagtggtgatgcagcccgccagatgctgaccagccaggcttccgggcaggca

SEQ ID NO: 426629 - DNA, 75 bp, synthetic construct
  source 1..75: mol_type = other DNA
gacgacacccgcctgaacctcagcctgacataccgtatcggtgaaccgctggcacatcaactggacagcagtaag

SEQ ID NO: 426630 - DNA, 75 bp, synthetic construct
  source 1..75: mol_type = other DNA
gtccccgaccgttaccgattatgacgaacgtccggctgacggctgggatatccgtgccgaaggctggctgcctgc

SEQ ID NO: 426631 - DNA, 75 bp, synthetic construct
  source 1..75: mol_type = other DNA
atgaggaaaacgattggctactcaatggtagccgtgcagttctttgcgcaaatttccccggcatttgccggcgtt

SEQ ID NO: 426632 - DNA, 75 bp, synthetic construct
  source 1..75: mol_type = other DNA
gacctgcgtaacgatccgctggcaatgcagcgtctgaaagaagcggcagaaaaagcgaaaatcgagctgtcttct

SEQ ID NO: 426633 - DNA, 75 bp, synthetic construct
  source 1..75: mol_type = other DNA
gcaccacgccttctatcattgcctatacccaggatggtgaaactctagttggtcagccggctaaacgtcaggcag

SEQ ID NO: 426634 - DNA, 75 bp, synthetic construct
  source 1..75: mol_type = other DNA
aggtagctctaacggtgtggaactaaccggactgcaactggatgaagaaagaaaacatgtgatgaaaattatgca

SEQ ID NO: 426635 - DNA, 75 bp, synthetic construct
  source 1..75: mol_type = other DNA
ctggttattacaagcgcattttgccctggcatttatgagtttcttttttatcttcggccatctctatctttgcac

SEQ ID NO: 426636 - DNA, 75 bp, synthetic construct
  source 1..75: mol_type = other DNA
tttaatccgctacaacaggcggcttatttgggcgtgatgtatggactattgccattgttgttattaacgggatta

SEQ ID NO: 426637 - DNA, 75 bp, synthetic construct
  source 1..75: mol_type = other DNA
gattatggatggcaccactcctcgtgtgctggagaatgccgaaggcgatcgcaccacgccttctattattgccta

SEQ ID NO: 426638 - DNA, 75 bp, synthetic construct
  source 1..75: mol_type = other DNA
acggttgaaaaagagcgtgtttatccgggaagcagacagacggtcaccctgacgctgacggatgccgcaggcaac

SEQ ID NO: 426639 - DNA, 75 bp, synthetic construct
  source 1..75: mol_type = other DNA
aaaaaattaaaacagcgaacggcgtgcagggaaacaacctgatccgcacattttccatggagtttgacggcgcgg

SEQ ID NO: 426640 - DNA, 75 bp, synthetic construct
  source 1..75: mol_type = other DNA
atgagcacaattattactgaacagtacgaacactggtgtgcgaatcagctcatcagtggaaaacctgcgcgcccg

SEQ ID NO: 426641 - DNA, 75 bp, synthetic construct
  source 1..75: mol_type = other DNA
aaaagctctatccgcaaaaggaggagcaggtggaggcgttaaaacgccatctgaacttcttcaactcagagcaga

SEQ ID NO: 426642 - DNA, 75 bp, synthetic construct
  source 1..75: mol_type = other DNA
gacagggccattattactcaggaaatcggagacagacgctatctgcaacgaaaaaagaatctttcggatgtggaa

SEQ ID NO: 426643 - DNA, 75 bp, synthetic construct
  source 1..75: mol_type = other DNA
aatatctctttgatgaggagattttgccggtatgcagcggcagtttgcttgcaatgtccgatcaaaaactgtcag

SEQ ID NO: 426644 - DNA, 75 bp, synthetic construct
  source 1..75: mol_type = other DNA
tgcagataatattggcggtgtctattacaaagcaaaacagatttatattaatggtgcatggcgcaccatatccgg

SEQ ID NO: 426645 - DNA, 75 bp, synthetic construct
  source 1..75: mol_type = other DNA
cgaacatcactcctgtattttgatcgactcgatgatgatcgacgacgcgaatatctggcgcttcaacgtcgccgg

SEQ ID NO: 426646 - DNA, 75 bp, synthetic construct
  source 1..75: mol_type = other DNA
aatgatcccatgcaatgatagctgttccgtagtagggaaagttatcgccagtcagtggcctgaagagacatttag

SEQ ID NO: 426647 - DNA, 75 bp, synthetic construct
  source 1..75: mol_type = other DNA
atgccgccggcacagtcacctggaccgcctcctctccggcggtgagcattaacggcaatgtcatgaccgtgaaga

SEQ ID NO: 426648 - DNA, 75 bp, synthetic construct
  source 1..75: mol_type = other DNA
ggctatacgctggggcgcgattcgattatcagtctgctgcagggaggcgcatcaaggagcttatctacggcgcta

SEQ ID NO: 426649 - DNA, 75 bp, synthetic construct
  source 1..75: mol_type = other DNA
tgatgtgtttgtttaccggaggtgtgttgttgttttccggagtggtatttgctgtagatgtacagattaaaatca

SEQ ID NO: 426650 - DNA, 75 bp, synthetic construct
  source 1..75: mol_type = other DNA
atgccctccatagtaaccatgagacaacaatacgatatgtacttttggaatgcaaacaaaaaatacatcttgtgc

SEQ ID NO: 426651 - DNA, 75 bp, synthetic construct
  source 1..75: mol_type = other DNA
gcagaccatgaccaccgatgacggcagttcacgtgctcaggcggaagtccacaatggtgtgcgtatggacatcgc

SEQ ID NO: 426652 - DNA, 75 bp, synthetic construct
  source 1..75: mol_type = other DNA
atatggcgatgaaccgtgagcgcgtcgccctgaaccgggaacaccccgacgaactggcacagatggtggatgatg

SEQ ID NO: 426653 - DNA, 75 bp, synthetic construct
  source 1..75: mol_type = other DNA
cggtctggcccgtctggtggcggtgatgtacatgctgaaatcctttaccgtgcgcgactggtgggcattcgcgga

SEQ ID NO: 426654 - DNA, 75 bp, synthetic construct
  source 1..75: mol_type = other DNA
aagcccttcatgcaccccgcaaaatcgacctgcgcaaggaggccgaactgcttggcgtgaatatcgtgaccgata

SEQ ID NO: 426655 - DNA, 75 bp, synthetic construct
  source 1..75: mol_type = other DNA
tactgacggacaggaaccccatcgatggtgagccattgtcaccggggaaatttatcgtccataagccccgcctga

SEQ ID NO: 426656 - DNA, 75 bp, synthetic construct
  source 1..75: mol_type = other DNA
gcttcagaaagaacttgatgcggatgagtttgcgacgcagctggcgatgctctgttttaaagcccggtcgctggg

SEQ ID NO: 426657 - DNA, 75 bp, synthetic construct
  source 1..75: mol_type = other DNA
gcttccgggctgaatcccggcaggctggcaggtattctgcgcaatgccgccgacggcatcacacgtgattttttt

SEQ ID NO: 426658 - DNA, 75 bp, synthetic construct
  source 1..75: mol_type = other DNA
ccctgcgtgactggcagaaaaccggcgaggcgttcacaaacccggtgctgacactggcgcaggaatgcgacagtt

SEQ ID NO: 426659 - DNA, 75 bp, synthetic construct
  source 1..75: mol_type = other DNA
ctcagggctttgtcgaattccatgactacttaggtctgtgtaaatatcgcgattgcaaacacgataccgatccgg

SEQ ID NO: 426660 - DNA, 75 bp, synthetic construct
  source 1..75: mol_type = other DNA
atggaagccccgcaaatccctgagctgatgtttgatttgctcgacgggctgggaaaaggcgtggcggtctgtgaa

SEQ ID NO: 426661 - DNA, 75 bp, synthetic construct
  source 1..75: mol_type = other DNA
atccttgctgaagagatggaagaacgcgatttgcattacgcctcggtgctgcgcacccgcaagctgacggtggcg

SEQ ID NO: 426662 - DNA, 75 bp, synthetic construct
  source 1..75: mol_type = other DNA
aaccggtgaggaagacacgctgaaaaaagaggcgctcaacgaagcacaggcccgtccgcgtcaggctggcgtgcg

SEQ ID NO: 426663 - DNA, 75 bp, synthetic construct
  source 1..75: mol_type = other DNA
tattaccctgaggaagggttggatggttaccgcagtgttgaacttcctgatacagaatatctgactcttcgtatt

SEQ ID NO: 426664 - DNA, 75 bp, synthetic construct
  source 1..75: mol_type = other DNA
ttccttgatgaagtgcgcaagcaatacgtggtgaccgcgcgtgcgaaaggggtcagtgaaaaaaatattctctgg

SEQ ID NO: 426665 - DNA, 75 bp, synthetic construct
  source 1..75: mol_type = other DNA
atgttccatatgaaggagtaaaagcccgtatgttcagactaaacgagagtattgatcaggctctacaccatttct

SEQ ID NO: 426666 - DNA, 75 bp, synthetic construct
  source 1..75: mol_type = other DNA
atggtgtccacgtacatttagatgctaatgattctagaggcttgttaaatctgaaatatctatgttctctcttag

SEQ ID NO: 426667 - DNA, 75 bp, synthetic construct
  source 1..75: mol_type = other DNA
gtccagaattcatctggcgtttccactccctgcaaaaacactgcgatcacttcgcaattgccgcaactgaaaaag

SEQ ID NO: 426668 - DNA, 75 bp, synthetic construct
  source 1..75: mol_type = other DNA
ggaaacatgtgttccgcaacgccatgctgctggtgattgccggttttccggcgacgtttatcagcatgtttttta

SEQ ID NO: 426669 - DNA, 75 bp, synthetic construct
  source 1..75: mol_type = other DNA
tgtatattttcaccctgattggcctgctgctgaatatcgtcagtgatatcagctatacactggtcgatccgcgta

SEQ ID NO: 426670 - DNA, 75 bp, synthetic construct
  source 1..75: mol_type = other DNA
ggacggcgagacgctgctggaactggattatctggcgaatatcttcaaagtgaatggcgtggatcagttgagcac

SEQ ID NO: 426671 - DNA, 75 bp, synthetic construct
  source 1..75: mol_type = other DNA
gagttgcccgctgggttcgacaaactggagggcgaaatcaagtggaacagcttctatcgcgaagtgatgcgccat

SEQ ID NO: 426672 - DNA, 75 bp, synthetic construct
  source 1..75: mol_type = other DNA
gttcttgctcattccgcagccggaaaaagttatatgtgggaatgccccgatttcttcaggtgtggtaattttcac

SEQ ID NO: 426673 - DNA, 75 bp, synthetic construct
  source 1..75: mol_type = other DNA
gtattaccaacgccaatatctatatcaacggcaataacctgctgggccgcgcggaggagattaagctgccggata

SEQ ID NO: 426674 - DNA, 75 bp, synthetic construct
  source 1..75: mol_type = other DNA
gaggaggtcaaactcccggacgtctccatgaccatgcaggagcataaggcgctggggatggtgggcaaagtggaa

SEQ ID NO: 426675 - DNA, 75 bp, synthetic construct
  source 1..75: mol_type = other DNA
ccaatgattacgtgacgcgtgagatcattggcgaaagcatcgtgctggtacgcggtcgtgataaggttttgcgcg

SEQ ID NO: 426676 - DNA, 75 bp, synthetic construct
  source 1..75: mol_type = other DNA
tcagcatttttgccgggcagtctggcgtcggtaaatccagcctgctgaacgcgttgctggggctgcaaaaagaga

SEQ ID NO: 426677 - DNA, 75 bp, synthetic construct
  source 1..75: mol_type = other DNA
cagttaaatgccggaaccgttcgccgctggttgccgtctgcggggattgtgtggcgaagggctgcgccaactctg

SEQ ID NO: 426678 - DNA, 75 bp, synthetic construct
  source 1..75: mol_type = other DNA
tcgcaaaatacagccaacaaccactggtgaaatatatcggccagccggtcgtcaacattgtcaaactcaatctgg

SEQ ID NO: 426679 - DNA, 75 bp, synthetic construct
  source 1..75: mol_type = other DNA
gattgggtaaaggatgtttgcgaagttgtttatttgccaagaacaccatcaatatccactacggagattattgaa

SEQ ID NO: 426680 - DNA, 75 bp, synthetic construct
  source 1..75: mol_type = other DNA
agcaaaagctcagccttatttatcagtctgttgaaacatctgaaattgacataccgacgggctaaaactatcacg

SEQ ID NO: 426681 - DNA, 75 bp, synthetic construct
  source 1..75: mol_type = other DNA
gcgtgagcttattaagcattatcccggtgatttcggttatcagcgttcccgctggagtactgaactgctggcgat

SEQ ID NO: 426682 - DNA, 75 bp, synthetic construct
  source 1..75: mol_type = other DNA
gcagttactgaaaaaggtccgccattttatggaaaccgccagcccattccccggaggaaaacatggtcaggcaaa

SEQ ID NO: 426683 - DNA, 75 bp, synthetic construct
  source 1..75: mol_type = other DNA
atgaaagattacaagcctcgttatgaagatctttataaatattatcaggtctggttgaccgattttacgaagctg

SEQ ID NO: 426684 - DNA, 75 bp, synthetic construct
  source 1..75: mol_type = other DNA
cagtaaatgagctgcaaaccattcaggacatgttgcgctggtcggtgagccgcttcagcgcggcaaatatctggt

SEQ ID NO: 426685 - DNA, 75 bp, synthetic construct
  source 1..75: mol_type = other DNA
ccggattcacggcgtacgcgatacgctggctatcgaagagtgggtaaaagagttctcggaaattggtcaacactt

SEQ ID NO: 426686 - DNA, 75 bp, synthetic construct
  source 1..75: mol_type = other DNA
ggagcaatctggcagtcagtaacccggtgctggataaacagatagccgcacgcgttgccgcattacgggccgcta

SEQ ID NO: 426687 - DNA, 75 bp, synthetic construct
  source 1..75: mol_type = other DNA
agcgggctggacaataacatcaccccgcaagcggcggcctggcagatcccacgcgtggcgaaagcgcgtaatctc

SEQ ID NO: 426688 - DNA, 75 bp, synthetic construct
  source 1..75: mol_type = other DNA
acccggatgccagcgcgaacgttccggttgaactggtgacggcgtcggcaagcgggctggacaataacatcaccc

SEQ ID NO: 426689 - DNA, 75 bp, synthetic construct
  source 1..75: mol_type = other DNA
tgtttatcgtgttcagattgtttggtcgtgaatggtcgtttgacctcaaggacagaaccagaacagataaccata

SEQ ID NO: 426690 - DNA, 75 bp, synthetic construct
  source 1..75: mol_type = other DNA
aaatcgcagccaagggtaagacggcggctcgcgttactcctgaacacattgccagcataatcgccagcgaacatt

SEQ ID NO: 426691 - DNA, 75 bp, synthetic construct
  source 1..75: mol_type = other DNA
ataatctggtaaccggtgcagcttcacagttagccgctaatggtgtgctgacggtggctggcaccgacccgtcag

SEQ ID NO: 426692 - DNA, 75 bp, synthetic construct
  source 1..75: mol_type = other DNA
atgagcgaccagcaaatcgaaaaagaaatcgttgagaaaggcaaaacagccccgcgaatcactcctcagcacatc

SEQ ID NO: 426693 - DNA, 75 bp, synthetic construct
  source 1..75: mol_type = other DNA
cacgctgatgtggaatccgccgatggcgacgttcaccgctgcaatattcgccgtaccatccgttcgctggtaacc

SEQ ID NO: 426694 - DNA, 75 bp, synthetic construct
  source 1..75: mol_type = other DNA
aaatcgttgagaaaggcaaaacggcaccgcgtgtaacacctgagaaaattgaaggcctcatttgcagtgagcatt

SEQ ID NO: 426695 - DNA, 75 bp, synthetic construct
  source 1..75: mol_type = other DNA
gaaggcctcatttgcagtgagcattttttcactgctgcgcagggtgatcaccaggctaaagaagatgaccttatt

SEQ ID NO: 426696 - DNA, 75 bp, synthetic construct
  source 1..75: mol_type = other DNA
tgcttgttgtgttccgattgttcggtcgtacatggacgcttgaccttaaggataatgaccacacagaaccccgtt

SEQ ID NO: 426697 - DNA, 75 bp, synthetic construct
  source 1..75: mol_type = other DNA
tacgtactcgtcagagtgcttattgtctttagaatgttcggtcgtacatggacgcttgaccttaaggataatgac

SEQ ID NO: 426698 - DNA, 75 bp, synthetic construct
  source 1..75: mol_type = other DNA
tgtttatcgtgttcagattgtttggtcgtgaatggtcgtttgacctcaaggacaggactcgaacagataaccaca

SEQ ID NO: 426699 - DNA, 75 bp, synthetic construct
  source 1..75: mol_type = other DNA
agcagcaaacggggctgacgcctcagcgttacctgaaccgcctgcgactgatgaaagcccgacatctgctacgcc

SEQ ID NO: 426700 - DNA, 75 bp, synthetic construct
  source 1..75: mol_type = other DNA
agtaaccacttttcgacgctgtttcgccgtgagtttaactggtcaccgcgtgatattcgccaggggcgggatggt

SEQ ID NO: 426701 - DNA, 75 bp, synthetic construct
  source 1..75: mol_type = other DNA
tgcttgttgtctttaaattgttcggtcgcacatggacgcttgaccttaaggataatgaccatacagacccccgct

SEQ ID NO: 426702 - DNA, 75 bp, synthetic construct
  source 1..75: mol_type = other DNA
tttgactgcccgggtcatcaggggggtgagtttttccgtcgccatccggcaggcaatcagttcgtggaatatttt

SEQ ID NO: 426703 - DNA, 75 bp, synthetic construct
  source 1..75: mol_type = other DNA
tgttacatgcggaaaactcgatgaaatcgatgccacgggttatggcatcccggtatttattgctactgaaaatca

SEQ ID NO: 426704 - DNA, 75 bp, synthetic construct
  source 1..75: mol_type = other DNA
cgggcaaaagaggcgcgtccgttccgcctcgctgtgattcagctaggcacctacgacggtacgatttataacgcc

SEQ ID NO: 426705 - DNA, 75 bp, synthetic construct
  source 1..75: mol_type = other DNA
gcaccggagctgcagggtgtctatatcgaagaacatgatggtcgtaagcaagtttggtgctatgtcatcaagcct

SEQ ID NO: 426706 - DNA, 75 bp, synthetic construct
  source 1..75: mol_type = other DNA
atgtcagaattaaaaattgccgttagccgttcttgcccggattgtttttccactcatcgtgcatgcgtgaatatt

SEQ ID NO: 426707 - DNA, 75 bp, synthetic construct
  source 1..75: mol_type = other DNA
gattgtgtggtaaatggcattaatgcccgcaaactgatcctcgataactgtcagcatattcgtccgttcgtacct

SEQ ID NO: 426708 - DNA, 75 bp, synthetic construct
  source 1..75: mol_type = other DNA
aaacagtgcggaagcggtaatccatcgtgccaaaatggaatttggcaagatccgcgacggttttgtcattccatt

SEQ ID NO: 426709 - DNA, 75 bp, synthetic construct
  source 1..75: mol_type = other DNA
ctattgcttatcagacgcgtgacgtactggaagcaatgcaggccgactccggtattcgtctgcacgcgctgcgcg

SEQ ID NO: 426710 - DNA, 75 bp, synthetic construct
  source 1..75: mol_type = other DNA
tggcgggcgcatccattcagtggctgcgcgatgagatgaagttgattaacgacgcctacgattccgaatatttcg

SEQ ID NO: 426711 - DNA, 75 bp, synthetic construct
  source 1..75: mol_type = other DNA
atgagcgatatcagcgatatgggtgaaccgtcggtttttcccatggagccggagagcggaacatcaggacgtcag

SEQ ID NO: 426712 - DNA, 75 bp, synthetic construct
  source 1..75: mol_type = other DNA
ttcttttttccccactgacgttatgtatttcagccgtggcctctgccgcgaagaccgcggtaaaacgaaaaaaat

SEQ ID NO: 426713 - DNA, 75 bp, synthetic construct
  source 1..75: mol_type = other DNA
gaacgtatcgtggtcgcaggaggatcgctgacggagctaatctacgcgatgggcgctggcgaacgcgtggttggt

SEQ ID NO: 426714 - DNA, 75 bp, synthetic construct
  source 1..75: mol_type = other DNA
tgatgcgcttgggggtattcgtgccgaagccatcaaagagcaaaggagaaagtaaagagattgatgccaccaaag

SEQ ID NO: 426715 - DNA, 75 bp, synthetic construct
  source 1..75: mol_type = other DNA
tcattactacgccatccactggtagaaagtgccaaccaaatcgccatgacacgttatctcgaagcacagcccgtg

SEQ ID NO: 426716 - DNA, 75 bp, synthetic construct
  source 1..75: mol_type = other DNA
tatgtgggggtcgcctcagaaaacggaatctatggtcactcccgtttttgcaacaccgattttgacgataagtcg

SEQ ID NO: 426717 - DNA, 75 bp, synthetic construct
  source 1..75: mol_type = other DNA
cggcgcagatcgcggatctggtggtcattaaggacggttcagaggcggacggtgcgacggcgaacacgctgcggg

SEQ ID NO: 426718 - DNA, 75 bp, synthetic construct
  source 1..75: mol_type = other DNA
gccaacaaagccggttggaaggaaaccgtattattctacgctttcgataagaagaccatgttcataacatttaag

SEQ ID NO: 426719 - DNA, 75 bp, synthetic construct
  source 1..75: mol_type = other DNA
atgaacagccagatgatgccggagcaccttttttctcaggtggtgacggatgtgcaagccatggaacaacagctt

SEQ ID NO: 426720 - DNA, 75 bp, synthetic construct
  source 1..75: mol_type = other DNA
atggcgtcatctccggcgattgttaaatttgtgggaggcacccctgccgatgccaccaataacagccgtcggatg

SEQ ID NO: 426721 - DNA, 75 bp, synthetic construct
  source 1..75: mol_type = other DNA
accatgaagcaccaattgtattgctcggcgacggtagaatgcgccgtcttacccctgtcgaatgtgaaaggctgc

SEQ ID NO: 426722 - DNA, 75 bp, synthetic construct
  source 1..75: mol_type = other DNA
caggagcaggtttttggtcagaagggcatggtacattgcgggcacgtgagcaagaaagccatgagcatcttgtta

SEQ ID NO: 426723 - DNA, 75 bp, synthetic construct
  source 1..75: mol_type = other DNA
tcgttcgcgcgaatccgtgagcgcctggctttgcagtcagctgttggcgagcaaaaccgtatcattaagaaagcg

SEQ ID NO: 426724 - DNA, 75 bp, synthetic construct
  source 1..75: mol_type = other DNA
tgcagtcactgcgaccatcaacaacagcagccagagccggaacgtgacgtttgtcgccgatgtcaggacggcgca

SEQ ID NO: 426725 - DNA, 75 bp, synthetic construct
  source 1..75: mol_type = other DNA
aagagcgaaaagttaaaccagcggcagaattcgaacggtccatattcaaatgggctggtggaaaatttggtgttc

SEQ ID NO: 426726 - DNA, 75 bp, synthetic construct
  source 1..75: mol_type = other DNA
catactattggtcgtaaccatggtcaagaaaatgcagtcgtagctttttcctgcaaagattatggacaagatgtt

SEQ ID NO: 426727 - DNA, 75 bp, synthetic construct
  source 1..75: mol_type = other DNA
gacgcctacgattccgaatatttcgccaccaaagtgcaaaacaccaatggtgtgtatgtggttccggcatttacc

SEQ ID NO: 426728 - DNA, 75 bp, synthetic construct
  source 1..75: mol_type = other DNA
tttggcactctttcgtatgatccccccattggccatgacgccattattgattttatggttgggtattggggagac

SEQ ID NO: 426729 - DNA, 75 bp, synthetic construct
  source 1..75: mol_type = other DNA
gggcggtaattaaagccgaaggaatactgctgcaatgccaacgggatgacaaaacccttagcactaatccgctgg

SEQ ID NO: 426730 - DNA, 75 bp, synthetic construct
  source 1..75: mol_type = other DNA
tgaaggatgcttttatggccgctgcaaaaagcatagaccgtaatgactctcagttaatccgggattttatgcgcc

SEQ ID NO: 426731 - DNA, 75 bp, synthetic construct
  source 1..75: mol_type = other DNA
cgaaatcgaacgacagcagatagtgcgtacccgccaggtcgaagccgaacgggaagtggccatacgggaaattga

SEQ ID NO: 426732 - DNA, 75 bp, synthetic construct
  source 1..75: mol_type = other DNA
aagctgggttgaatcaggtggcgtgtataccacaacccgaatggcgacgattgccagtaccaatcagcacgccaa

SEQ ID NO: 426733 - DNA, 75 bp, synthetic construct
  source 1..75: mol_type = other DNA
gcgcgcatatgttcgtccatccggaaggggaggtgattgctgcagcgggtgcagaaaaggccggggcactttatg

SEQ ID NO: 426734 - DNA, 75 bp, synthetic construct
  source 1..75: mol_type = other DNA
taatttcaaccgctatgcactgcgcggcaacccgggcgcacgcaccgagcagctgtacgacacgctatttacgac

SEQ ID NO: 426735 - DNA, 75 bp, synthetic construct
  source 1..75: mol_type = other DNA
ctcggtatcgatacctggtggtatgacgtcaataaagcggccaaactgccgtcagccagacaacagggagagtag

SEQ ID NO: 426736 - DNA, 75 bp, synthetic construct
  source 1..75: mol_type = other DNA
gacaacctgttaaaagccgacaaacttctcaacgaagcgggctgggtgctgaagggtcagcaacgcgttaatgcc

SEQ ID NO: 426737 - DNA, 75 bp, synthetic construct
  source 1..75: mol_type = other DNA
ctgattctgaacatggcgggactggagcgtgaagaattccgggtgctgtatctgaataaccagaatcagctgatt

SEQ ID NO: 426738 - DNA, 75 bp, synthetic construct
  source 1..75: mol_type = other DNA
atgcagcagctttcctttctgcccggagagatgacgcccggcgagcgcaacctcattcagcgggccctgaaaacc

SEQ ID NO: 426739 - DNA, 75 bp, synthetic construct
  source 1..75: mol_type = other DNA
actggatcgcgtgttaacgtggaattattacatgctgccgatgtggtacatggcggaagaccgtcttgcctggtg

SEQ ID NO: 426740 - DNA, 75 bp, synthetic construct
  source 1..75: mol_type = other DNA
ttacccgcggtaaaacagcaacaaccgacataagtggcggaaatctcgctgaacaggcagtaaccgccgctctgg

SEQ ID NO: 426741 - DNA, 75 bp, synthetic construct
  source 1..75: mol_type = other DNA
gatacgaatgattattcgtctggcgatggggaaaacaataactgttctcattactccagaaaatctcgcattagc

SEQ ID NO: 426742 - DNA, 75 bp, synthetic construct
  source 1..75: mol_type = other DNA
gtcatgccgggttcattctctacctgagcgacccggctcataatgaggcggatattgaagcactgcaagtggcgc

SEQ ID NO: 426743 - DNA, 75 bp, synthetic construct
  source 1..75: mol_type = other DNA
atgagtttgcgtcgggcagtatcggccacctgctggagccggatatcaatcaggaaatctacggcctgcctgaat

SEQ ID NO: 426744 - DNA, 75 bp, synthetic construct
  source 1..75: mol_type = other DNA
gagcgtaattaccgttacgcaggctggaaaaaagcggttaaacgcgcgatggcgtgggaagaacacgacgagtaa

SEQ ID NO: 426745 - DNA, 75 bp, synthetic construct
  source 1..75: mol_type = other DNA
ataactacatgctgaccggtaacatcgttgcaggtaacccgcgcgtagtaaaagccatgctgtcaaatatgcgtg

SEQ ID NO: 426746 - DNA, 75 bp, synthetic construct
  source 1..75: mol_type = other DNA
ttactccagaaaatctcgcattggcattaaccggaaagtcagacctgccagtagagctaaagctgcgaaatgttg

SEQ ID NO: 426747 - DNA, 75 bp, synthetic construct
  source 1..75: mol_type = other DNA
atgtcaacgcggcagatcgtacagcttgctgactcccttgtcaaaggctgggaaaccagaattccggcaatgacg

SEQ ID NO: 426748 - DNA, 75 bp, synthetic construct
  source 1..75: mol_type = other DNA
ctgccgcactctcttaccgcacacaggcaccgctgattgactccttgctcaatgaaattggcgtttcaggcggct

SEQ ID NO: 426749 - DNA, 75 bp, synthetic construct
  source 1..75: mol_type = other DNA
cttatccaaaaacggtctggagcttgaaagtgtgtcgctgacaagtttcaaccagactgcacgggaacattttaa

SEQ ID NO: 426750 - DNA, 75 bp, synthetic construct
  source 1..75: mol_type = other DNA
aagtggcaacgaaggacgatttttttaatatcaaaaaagcaagtgctgaagatctaatgagtgctcatcgcgtgc

SEQ ID NO: 426751 - DNA, 75 bp, synthetic construct
  source 1..75: mol_type = other DNA
ggccctggaagcctggcgcaataacgaggcgaataaacccaaatcccggggtggaaaatcagagacggaaaaagc

SEQ ID NO: 426752 - DNA, 75 bp, synthetic construct
  source 1..75: mol_type = other DNA
tattagcatttccattaattgcactggctaacccgcattatcgtccggacgtggaggtaaacgtaccgccagaag

SEQ ID NO: 426753 - DNA, 75 bp, synthetic construct
  source 1..75: mol_type = other DNA
atgaataaaattggtttttctgttggtcaggcggcgggcgttgcggtagcggacgtaaatgccgatgctattctg

SEQ ID NO: 426754 - DNA, 75 bp, synthetic construct
  source 1..75: mol_type = other DNA
tgttagtggtgcaggagagtgggtacttcacgataaagaactgatagccacacttaacagtctaaaatcaattcc

SEQ ID NO: 426755 - DNA, 75 bp, synthetic construct
  source 1..75: mol_type = other DNA
atttccaactatcgaggaaagaatggctcctggaacaagccagtcttacattatcaaaaatgacagtcataacca

SEQ ID NO: 426756 - DNA, 75 bp, synthetic construct
  source 1..75: mol_type = other DNA
atgaatcacgccgcaatctcttatgacgatattgtccgcctgaagcatcttcgtaacgtgggggagtttgtcacc

SEQ ID NO: 426757 - DNA, 75 bp, synthetic construct
  source 1..75: mol_type = other DNA
aagcacgaaccggatggcattaccaaagaagcgctaatgaaagcaatgactgaattgcttgaccgttacgttgca

SEQ ID NO: 426758 - DNA, 75 bp, synthetic construct
  source 1..75: mol_type = other DNA
ctatgaagttgctcaggcaatcaagcatgaacctgatggcgttacgcaggaaagtctgactaacgcactgacaga

SEQ ID NO: 426759 - DNA, 75 bp, synthetic construct
  source 1..75: mol_type = other DNA
caattgttactcgccgggatcgccatcaacaccctgtgcggtgcggcgatcggcatactgagctatataggcgat

SEQ ID NO: 426760 - DNA, 75 bp, synthetic construct
  source 1..75: mol_type = other DNA
gcaagttgtttagcgaggaaataaaaaaatcagaacggatgcctttttttattgaattaagaagggtgaagaatg

SEQ ID NO: 426761 - DNA, 75 bp, synthetic construct
  source 1..75: mol_type = other DNA
aggtgaacacaaaactcaccaaatgagcgtatggtcgactccgggtaatcccgaaaaccatgccaaacagatcaa

SEQ ID NO: 426762 - DNA, 75 bp, synthetic construct
  source 1..75: mol_type = other DNA
attatctccgcattcgcctttaccggttttctgggttatatcctcggaccaattctgaacacctatctgtctgcc

SEQ ID NO: 426763 - DNA, 75 bp, synthetic construct
  source 1..75: mol_type = other DNA
tggaagtgaatgccgctcagcagaaaaggctttctttaatatagtcaaaaagaataaacatggtttcttacctaa

SEQ ID NO: 426764 - DNA, 75 bp, synthetic construct
  source 1..75: mol_type = other DNA
acggaaaagctacaggtaatagtggtgggagtgaatgcagttcagcagaacgcgcattttttaaaatcaacgcat

SEQ ID NO: 426765 - DNA, 75 bp, synthetic construct
  source 1..75: mol_type = other DNA
aattgcctttgctcactgtttacgcatgacattacgcaaactgccacaggcaaaagtgctggcacattacctcaa

SEQ ID NO: 426766 - DNA, 75 bp, synthetic construct
  source 1..75: mol_type = other DNA
gtcagaaaatatgatcaatggtagaccgatttgcctgtttaaattgcatgagccgctgcgggttgctcactggca

SEQ ID NO: 426767 - DNA, 75 bp, synthetic construct
  source 1..75: mol_type = other DNA
ccgatttgtctgtttaaattgcatgaaccggtacaggttgcacactggaagttttctattgtggagctaccgtgg

SEQ ID NO: 426768 - DNA, 75 bp, synthetic construct
  source 1..75: mol_type = other DNA
ctgatgaaggacttagccagccggggatttcggtgaagacccgttctccaaaaggcgaacacgagcgattaccga

SEQ ID NO: 426769 - DNA, 75 bp, synthetic construct
  source 1..75: mol_type = other DNA
accggactgcaactggacgaagaaaggaagcaagtgatgaaaattatgcagcaggtttgggaagacgacagctgg

SEQ ID NO: 426770 - DNA, 75 bp, synthetic construct
  source 1..75: mol_type = other DNA
gcagtatatggcgcattttgcggaagcgaatttgaatgcgcaactgaagatggctggttggagcgatgccaatta

SEQ ID NO: 426771 - DNA, 75 bp, synthetic construct
  source 1..75: mol_type = other DNA
atgatcgttatctggcagaagaaatcaaaaagtacccgttggcaaaagtagaaagcctgttccacttacgccatg

SEQ ID NO: 426772 - DNA, 75 bp, synthetic construct
  source 1..75: mol_type = other DNA
atgtcggtaacgccggaactgacgctggcgaatatccgtgcgctgtttaatccggcgaattacgacatcattctc

SEQ ID NO: 426773 - DNA, 75 bp, synthetic construct
  source 1..75: mol_type = other DNA
gccggaactgacgctggcgaatatccgtgcgctgtttaatccggcgaattacgacatcattctccgcacgctgac

SEQ ID NO: 426774 - DNA, 75 bp, synthetic construct
  source 1..75: mol_type = other DNA
atcgcatatacaccaattccttttgcttacacactcattttgcatcgtaccgtttacctgttttgcatcatgcta

SEQ ID NO: 426775 - DNA, 75 bp, synthetic construct
  source 1..75: mol_type = other DNA
tatatcagaagctattctgtccctcataaaaggggaaaagtactcaattaagcatgatagcttagatgaaaaaac

SEQ ID NO: 426776 - DNA, 75 bp, synthetic construct
  source 1..75: mol_type = other DNA
ataagacaattaacaatacaagaggtaaaaatgttaatgctaatatcaaacatagtcaaattcaagagataaaaa

SEQ ID NO: 426777 - DNA, 75 bp, synthetic construct
  source 1..75: mol_type = other DNA
aacctttattaaagatgtctggcagcgcgaagcggaaggctcgactggttttgaaaatcatattgcgatcccgca

SEQ ID NO: 426778 - DNA, 75 bp, synthetic construct
  source 1..75: mol_type = other DNA
tctctatgacccccgtcaggaatgcgactatcaatttcttgaagctgagaaatcaatgagagaatggttcgttga

SEQ ID NO: 426779 - DNA, 75 bp, synthetic construct
  source 1..75: mol_type = other DNA
cattgctgacgccgggcgatctggtgttgtttgaccgcaataaccataaatctaaccaccacggtgcgttgctac

SEQ ID NO: 426780 - DNA, 75 bp, synthetic construct
  source 1..75: mol_type = other DNA
cgccgttattcagctaggcacttacgacggtacgatttataacgcccgtcaggtggtggataaaattggtcatct

SEQ ID NO: 426781 - DNA, 75 bp, synthetic construct
  source 1..75: mol_type = other DNA
ttgaaggtctgttcttccccggatttggcgttgacgacgccgctgctgacctgggtgatagcgcaattactgaaa

SEQ ID NO: 426782 - DNA, 75 bp, synthetic construct
  source 1..75: mol_type = other DNA
cgccgctgctgctggagcttaatgaaaacgatccgggcattctggttacgcaatcagtccataaacagcaggcag

SEQ ID NO: 426783 - DNA, 75 bp, synthetic construct
  source 1..75: mol_type = other DNA
aggctggtgcaacaccggtttatctggaaaccgcacgtaacccgtatggctttatcggtggcattgatgcgcact

SEQ ID NO: 426784 - DNA, 75 bp, synthetic construct
  source 1..75: mol_type = other DNA
gacgattcttgctaacttcctgcgcgaaaatggcgtagtgccggaaaaatgcgatcttaactccatcctcttcct

SEQ ID NO: 426785 - DNA, 75 bp, synthetic construct
  source 1..75: mol_type = other DNA
caggacatcctcgccaacctcattgacaacgctctccagtgccgcgcctggcgaagtcaggtgaacgggctgctg

SEQ ID NO: 426786 - DNA, 75 bp, synthetic construct
  source 1..75: mol_type = other DNA
gtgaccaacgtagataaagctgccgaagcggtgattatcgacacgattcgtaaatcttacccacagcacaccatc

SEQ ID NO: 426787 - DNA, 75 bp, synthetic construct
  source 1..75: mol_type = other DNA
tgctggatgatgcgccgcgcgataaatgcgtccatttccgtgagataaatggcatcgctgcggcgtttcaatatt

SEQ ID NO: 426788 - DNA, 75 bp, synthetic construct
  source 1..75: mol_type = other DNA
tgatggatgccgccgccaatgtaccgttcagttcaatggttacggtgatggcgcgtaacggggtgaattttggta

SEQ ID NO: 426789 - DNA, 75 bp, synthetic construct
  source 1..75: mol_type = other DNA
atatcataaatacttcatgtagttatggtcaaatgccgtcatctttagaattagcgcagcggccaagcggtgggg

SEQ ID NO: 426790 - DNA, 75 bp, synthetic construct
  source 1..75: mol_type = other DNA
tcttatcaatgcctttctggtcggcctgtatgccatgggatacagaagtggtcatgactctgcaaagcgtgacgg

SEQ ID NO: 426791 - DNA, 75 bp, synthetic construct
  source 1..75: mol_type = other DNA
tcgtcagttgtgccaggaaatgcatgatttgtatgcccgccacaacgtgaaacaactgcaaaaagagatgttccg

SEQ ID NO: 426792 - DNA, 75 bp, synthetic construct
  source 1..75: mol_type = other DNA
cattcgcctcgcccgtaaatatctgaacggtaaaaaggttatggaagaaaccggggaaaatacgcccccatcagc

SEQ ID NO: 426793 - DNA, 75 bp, synthetic construct
  source 1..75: mol_type = other DNA
atgtcttacaatcgactggtgctcaaactctcttcaaagggtttgcggtcatagatcaagacttcatgtcggtcg

SEQ ID NO: 426794 - DNA, 75 bp, synthetic construct
  source 1..75: mol_type = other DNA
atgctcgcagattgccagaacctcctcgcggaactgggcatcccactagaccctctggaaatggtcggcaatatg

SEQ ID NO: 426795 - DNA, 75 bp, synthetic construct
  source 1..75: mol_type = other DNA
tgaagcccgtaagcaccgttcagccacgcgaaaacactgacgcgccggtagccaatacccgctcgactaaaacga

SEQ ID NO: 426796 - DNA, 75 bp, synthetic construct
  source 1..75: mol_type = other DNA
ggcggtgggttacagcgtaaaacggtaaccagcatcctgatggcgtgggtatttactttaccggcggcaattttt

SEQ ID NO: 426797 - DNA, 75 bp, synthetic construct
  source 1..75: mol_type = other DNA
aaaatcatactggtgttcgcctgctggacagaaccacgcgtgaagtggtgcttacagatgcagggcagcagctgg

SEQ ID NO: 426798 - DNA, 75 bp, synthetic construct
  source 1..75: mol_type = other DNA
ggctattgagtggttggattttggcagtaatcattagtgatatttttgctacaggagagaaattcagacagtgga

SEQ ID NO: 426799 - DNA, 75 bp, synthetic construct
  source 1..75: mol_type = other DNA
aaagttgctgtagtcttaggaggatgttttcttgagctctttattttattattaccttttgttttcttgagctca

SEQ ID NO: 426800 - DNA, 75 bp, synthetic construct
  source 1..75: mol_type = other DNA
atgacggatgttattcttgatgtttcgcatattgcgaagacatttggtcatgttcaggcattaaaagatattaca

SEQ ID NO: 426801 - DNA, 75 bp, synthetic construct
  source 1..75: mol_type = other DNA
atgagcattcacctgccgcacgacgctatccgcgtgaccgtgttcttcggcggttgttcaaactcaacaatgagt

SEQ ID NO: 426802 - DNA, 75 bp, synthetic construct
  source 1..75: mol_type = other DNA
gatgtcgattttggcatcgtcatcgatccaggcccagtgggcgatctgcaatgtgaagcgattctttccgagcct

SEQ ID NO: 426803 - DNA, 75 bp, synthetic construct
  source 1..75: mol_type = other DNA
ggacaggccgcatcgtcggctcagtcagcgtcttccagcgcaggaacggcatcgacaaaggccagtgaagcagcg

SEQ ID NO: 426804 - DNA, 75 bp, synthetic construct
  source 1..75: mol_type = other DNA
ggtttccgtattttacggggaatgacgttgccagtttggcaaccctgacagaagtcgggcgggatattcttgcga

SEQ ID NO: 426805 - DNA, 75 bp, synthetic construct
  source 1..75: mol_type = other DNA
ccggctggtctgacaggtcaggttatgtcgttacgggttcagttaacggaaaccgtgatgaattaattgatacaa

SEQ ID NO: 426806 - DNA, 75 bp, synthetic construct
  source 1..75: mol_type = other DNA
ggacctgacggaatttctaaccgtcagggtaaacaactggccagccgcacgctgtacctgaagcaacaggttgaa

SEQ ID NO: 426807 - DNA, 75 bp, synthetic construct
  source 1..75: mol_type = other DNA
cctccacttcaatatgaatacggggagttgccctgccgtacagttccgtgtgaattacaggaacggcggtatttt

SEQ ID NO: 426808 - DNA, 75 bp, synthetic construct
  source 1..75: mol_type = other DNA
cagcgtcttccagcgcaggaacggcatcgacaaaggccagtgaagcagcgaaaagtgctgctgctgcagagtcat

SEQ ID NO: 426809 - DNA, 75 bp, synthetic construct
  source 1..75: mol_type = other DNA
cgcagttctcaaggatggattctttaatgtaacccgtccgcgaaatattgcatttaactacatagtgagagccgc

SEQ ID NO: 426810 - DNA, 75 bp, synthetic construct
  source 1..75: mol_type = other DNA
ctgattcatgagctgcgacgcgcaccgctcaataccctaagcattgatccgaacaacgccaaccagattattgcc

SEQ ID NO: 426811 - DNA, 75 bp, synthetic construct
  source 1..75: mol_type = other DNA
cagcgcgaaaaggtcttgtccagctcagtagtgccaccaacagcacgtctgaaacgcttgccgcaacaccaaaag

SEQ ID NO: 426812 - DNA, 75 bp, synthetic construct
  source 1..75: mol_type = other DNA
aataaattaccggatttacggggtgagtttattcgtggctgggatgacggacgaggtattgatgcaggacgagag

SEQ ID NO: 426813 - DNA, 75 bp, synthetic construct
  source 1..75: mol_type = other DNA
gattaccttggtttgggagaaggttcggcattacccgttggcgtgcctgttccgtggccttccgccactccgcca

SEQ ID NO: 426814 - DNA, 75 bp, synthetic construct
  source 1..75: mol_type = other DNA
gtcattaatggctgttttggagttggtacgacgaatgcactaggtggtagctcaattgttcttggtgataatgat

SEQ ID NO: 426815 - DNA, 75 bp, synthetic construct
  source 1..75: mol_type = other DNA
agtgaagtaaaaatatcgacagtcaatgcactgaggatatttaattcatcttttggtgccatttttcgccgttct

SEQ ID NO: 426816 - DNA, 75 bp, synthetic construct
  source 1..75: mol_type = other DNA
gatccacggcctgccgctggaagaagtggcaggcggcaaagtgttccacgcgggcacaaaactggcggatgacga

SEQ ID NO: 426817 - DNA, 75 bp, synthetic construct
  source 1..75: mol_type = other DNA
aacaccggcgggatgggggcttactcccctgcgccagtggtgaccgatgaggttcatcagcgcaccatggaacgt

SEQ ID NO: 426818 - DNA, 75 bp, synthetic construct
  source 1..75: mol_type = other DNA
tggccaccagccaggatcacaaacgcgtaggcgataaagataccggaccaaacaccggcgggatgggcgcttact

SEQ ID NO: 426819 - DNA, 75 bp, synthetic construct
  source 1..75: mol_type = other DNA
ggcagcctgtgaagggaagctggacgagaaaacatccgagtgggatgaacgcgcttctctcggcgtggtgatggc

SEQ ID NO: 426820 - DNA, 75 bp, synthetic construct
  source 1..75: mol_type = other DNA
aaccatcgtcggcccggaagcgccgctggtgaaaggcgtggtcgataccttccgcgccgccgggctgaaaatctt

SEQ ID NO: 426821 - DNA, 75 bp, synthetic construct
  source 1..75: mol_type = other DNA
agctctgcctggcggcctgtgaaggcaagctggacgagaaaacgtcagagtgggataagcgcacctcgctcggcg

SEQ ID NO: 426822 - DNA, 75 bp, synthetic construct
  source 1..75: mol_type = other DNA
tgcacacacgcactccgttgcgattggctcacatggacacaccatcaccgtaaacgctgctggtaacgcggaaaa

SEQ ID NO: 426823 - DNA, 75 bp, synthetic construct
  source 1..75: mol_type = other DNA
ccctgatatgcgtggctggacgattaagggcaagcccgccagtggtcgtgccgtattgtctcaggaacaggacgg

SEQ ID NO: 426824 - DNA, 75 bp, synthetic construct
  source 1..75: mol_type = other DNA
gcggtaaaggcagcatatgaccttgctaacgggaaatacactgcacaggacgccaccacagcgcgaaaaggtctt

SEQ ID NO: 426825 - DNA, 75 bp, synthetic construct
  source 1..75: mol_type = other DNA
attggccttggtggcagttctttactggtgcaaaagcacttacccctctcttaccagcttcttgtgctgatctgt

SEQ ID NO: 426826 - DNA, 75 bp, synthetic construct
  source 1..75: mol_type = other DNA
acctttatggggttacaggggatccgatattcgccacccgccagatggcaaaaacgctgcctgctccgctcaacc

SEQ ID NO: 426827 - DNA, 75 bp, synthetic construct
  source 1..75: mol_type = other DNA
gtttatgctaataacgtccatgttatgcgctttgtctccggtagcattcaaagtaataaaaccataaatattacg

SEQ ID NO: 426828 - DNA, 75 bp, synthetic construct
  source 1..75: mol_type = other DNA
tcattcctacacgagaaaatgagggtgaaaatggagatattgggccattaaggccattcggcatcaacttaagaa

SEQ ID NO: 426829 - DNA, 75 bp, synthetic construct
  source 1..75: mol_type = other DNA
gcgtaatggtgcagacatcccgaatccaccgttatttgttcagaatattggtttgcaggatacggttaacaaggc

SEQ ID NO: 426830 - DNA, 75 bp, synthetic construct
  source 1..75: mol_type = other DNA
ccgcccggcaatatttttttgcccttgctgacattgatgaagacggcaacgtgactgacctgcgccccagaggaa

SEQ ID NO: 426831 - DNA, 75 bp, synthetic construct
  source 1..75: mol_type = other DNA
caaaagcctatccggacggtcgtatcccggatatgcgtggctggacaatcaagggaaaacctgccagcggtcgtg

SEQ ID NO: 426832 - DNA, 75 bp, synthetic construct
  source 1..75: mol_type = other DNA
ggggcagccctttgataaagcggtctatccattgctagcgattgcctatcctgcggggattatcccggacatgcg

SEQ ID NO: 426833 - DNA, 75 bp, synthetic construct
  source 1..75: mol_type = other DNA
cattgagggaagcggtaatcatgctcatgtgacatggatcggccctcatgatcactgggtgggtattggtgcgca

SEQ ID NO: 426834 - DNA, 75 bp, synthetic construct
  source 1..75: mol_type = other DNA
ggctattaataatcagcccgtcgcgctggatgaatttattttcgcgtatattccggggctggatgctgataagcc

SEQ ID NO: 426835 - DNA, 75 bp, synthetic construct
  source 1..75: mol_type = other DNA
aatgtgattgtgaccgactttaccggtgattttgacctgctcattgtgccggtgctggcgtggctgcgggaaaat

SEQ ID NO: 426836 - DNA, 75 bp, synthetic construct
  source 1..75: mol_type = other DNA
tggttgccacgggggccagctccatgtcatgggagtaccattataccctcaacgtggtgattgaggatttcagcg

SEQ ID NO: 426837 - DNA, 75 bp, synthetic construct
  source 1..75: mol_type = other DNA
aatgtgattgtctgcgattttgtgggcgaccctgacctgattttcgtgccggtggcggtgtggctgcgtgagaac

SEQ ID NO: 426838 - DNA, 75 bp, synthetic construct
  source 1..75: mol_type = other DNA
tggtaccgcacttacacggataaaaacaaacccacaccacaggacatcggcgcactgcctgcaactgaggcatta

SEQ ID NO: 426839 - DNA, 75 bp, synthetic construct
  source 1..75: mol_type = other DNA
ttcacggcacgcctggcggccatggacgagcgccagcgccgggaaaacatcgatatttacggtaacgctgcattc

SEQ ID NO: 426840 - DNA, 75 bp, synthetic construct
  source 1..75: mol_type = other DNA
agaaaaaaatcagaacccacaacggtaacgaaggtaatgtgctggttcgttccatgctcatggagtacagcggtg

SEQ ID NO: 426841 - DNA, 75 bp, synthetic construct
  source 1..75: mol_type = other DNA
gtaacattgaaataatcagtctgactgttgattcaacggtcgttaccgcaacgaaagaatacgttgataatctgc

SEQ ID NO: 426842 - DNA, 75 bp, synthetic construct
  source 1..75: mol_type = other DNA
ggcggcgctgggaaacgacccgaattttgcgaccaccatgactaacgcgcttgcgggtaagcaaccgaaagatgc

SEQ ID NO: 426843 - DNA, 75 bp, synthetic construct
  source 1..75: mol_type = other DNA
acaacgccaactgcgcgacagggaacgaataatacccaaatcgcaagcacggctttcgttatggctgcgattgcc

SEQ ID NO: 426844 - DNA, 75 bp, synthetic construct
  source 1..75: mol_type = other DNA
tagtgccaccaacagcacgtctgaaacgcaggctgcaacgccgaaagcagtaaaggccgcgtatgaccttgctaa

SEQ ID NO: 426845 - DNA, 75 bp, synthetic construct
  source 1..75: mol_type = other DNA
ggaattcaagaaccaacagaaagcgaagcgccaaatagttatatatcaattttccctattatgtcaggctataga

SEQ ID NO: 426846 - DNA, 75 bp, synthetic construct
  source 1..75: mol_type = other DNA
cggggtctataacgcaaacattagtggcgcatcgacattaatcctccacttcaatatgaatacggggagctgccc

SEQ ID NO: 426847 - DNA, 75 bp, synthetic construct
  source 1..75: mol_type = other DNA
gacaaccgcgcaatttatttcgtggctggagagtcagggggcatttaaccatccttactggatgtgcaaaggctc

SEQ ID NO: 426848 - DNA, 75 bp, synthetic construct
  source 1..75: mol_type = other DNA
atgatgcgatgccctttctgccgcacggcggcccacgttcgcaccagccgctatatgtctgagagcgtcaaagaa

SEQ ID NO: 426849 - DNA, 75 bp, synthetic construct
  source 1..75: mol_type = other DNA
ccgtccgccgcaatgccagataccgtaatcaaaagctggtccagtatggtgtttttgaagttcaacggggcgaaa

SEQ ID NO: 426850 - DNA, 75 bp, synthetic construct
  source 1..75: mol_type = other DNA
ttgcactggccagcattgacgcaaacgggaacataacagacctgcgcccgaaagggacgcttaacgagcaggccg

SEQ ID NO: 426851 - DNA, 75 bp, synthetic construct
  source 1..75: mol_type = other DNA
aattttaaatttatttttaggaatgtcatggctacttttgctcaaaactacagcgcgtcttatgccaagaaaatg

SEQ ID NO: 426852 - DNA, 75 bp, synthetic construct
  source 1..75: mol_type = other DNA
ccgggaaattggtgtatttgatgagcacggcgatttgatcgcggtgggcaatactgccgaaagttacaagccaac

SEQ ID NO: 426853 - DNA, 75 bp, synthetic construct
  source 1..75: mol_type = other DNA
cttgaatgggtaatggaacgacagggtgttttaacccataaagatagcggtattgttaatgatgccaatgactgg

SEQ ID NO: 426854 - DNA, 75 bp, synthetic construct
  source 1..75: mol_type = other DNA
acgcagagccaaacttcgatgtaaatggcaactctccggtcattccggatagttggataagctgtagtgagcgaa

SEQ ID NO: 426855 - DNA, 75 bp, synthetic construct
  source 1..75: mol_type = other DNA
tggtggaaacagatgctcaggcttatgcaaacgctgaatttattgctgcctttaatccaaatgttgcgctggcat

SEQ ID NO: 426856 - DNA, 75 bp, synthetic construct
  source 1..75: mol_type = other DNA
ctaatgatgggtggataattcctggtgcgtcgtggaaaccgtcacactggatgccgctaccagaaccgccgcagg

SEQ ID NO: 426857 - DNA, 75 bp, synthetic construct
  source 1..75: mol_type = other DNA
ggttcaggacgcagagccaaacttcgatgtaaatggcaactctccggtaactccggatggttggataagctgtag

SEQ ID NO: 426858 - DNA, 75 bp, synthetic construct
  source 1..75: mol_type = other DNA
aaatatagagctttcacgtatttatcaggaagtatcttggatgacgtaactcactggatgccgctaccagagcct

SEQ ID NO: 426859 - DNA, 75 bp, synthetic construct
  source 1..75: mol_type = other DNA
aacttgatacagccaagaatggttacatcctcctggttcaggacgcagagccaaacttcgatgtaaatggcaact

SEQ ID NO: 426860 - DNA, 75 bp, synthetic construct
  source 1..75: mol_type = other DNA
ttgtggacaaagacggcgtcgaagtagagagctcaactcactggatgccgctaccggaaccaccgcaggaggtga

SEQ ID NO: 426861 - DNA, 75 bp, synthetic construct
  source 1..75: mol_type = other DNA
gatcgcgatgctgatttgcgctggattcatggcgtaatagttcaggccgcgtggtttgtaaaagcatcactggag

SEQ ID NO: 426862 - DNA, 75 bp, synthetic construct
  source 1..75: mol_type = other DNA
atgcttccatcggaaacgatgatctggcagcctgatttcacagataaaacactctccaggacaccctgggcggtt

SEQ ID NO: 426863 - DNA, 75 bp, synthetic construct
  source 1..75: mol_type = other DNA
agcagttagtccgggtaatgatcttgggcaagcaacccactggatgccgctaccagaaccgccgcaggaggcgaa

SEQ ID NO: 426864 - DNA, 75 bp, synthetic construct
  source 1..75: mol_type = other DNA
gattcatgacgtaatagttcaggccgcgtggtttgtaaaagcatcactggagaagaatgcactatcgggcacccc

SEQ ID NO: 426865 - DNA, 75 bp, synthetic construct
  source 1..75: mol_type = other DNA
attagcctataaatcttattactatatgatatttattggctttttctataaaaaaaatattttttccaatgaaaa

SEQ ID NO: 426866 - DNA, 75 bp, synthetic construct
  source 1..75: mol_type = other DNA
tagtgaccgacggcgagcatgtcgaggttaaatggtgggatgaatctgggtattggaatagttggacggaactta

SEQ ID NO: 426867 - DNA, 75 bp, synthetic construct
  source 1..75: mol_type = other DNA
atggcaattctggatgatgtgattggtgttttttctccaggctggaaagcggcgaggttgcgctcaagagcgtta

SEQ ID NO: 426868 - DNA, 75 bp, synthetic construct
  source 1..75: mol_type = other DNA
gaagcctggcggatacagatccgggggggtgccgcgacggaatccgactggatccgcgcaggcgggcgcaacccg

SEQ ID NO: 426869 - DNA, 75 bp, synthetic construct
  source 1..75: mol_type = other DNA
ccggatgatgttaaacgtcggcgcaaggccgaaattgatgaaaaccgcaggctggatctggtgtttgataccgat

SEQ ID NO: 426870 - DNA, 75 bp, synthetic construct
  source 1..75: mol_type = other DNA
gaagggaaacgcacgtttacagaatttatccgtgaaggtgtgggggttcatgcgtttaacggcgaaatctttgtg

SEQ ID NO: 426871 - DNA, 75 bp, synthetic construct
  source 1..75: mol_type = other DNA
aaaaatccggggacggaccatatcatctggcaggcgtgggtggcaaaaaaagcggggcagatagttgggcgtatt

SEQ ID NO: 426872 - DNA, 75 bp, synthetic construct
  source 1..75: mol_type = other DNA
ctggtattgtggaaatcagccctgtccctggtgctggcgacctgctgcccccgtctgtcattcctcgttcttcgc

SEQ ID NO: 426873 - DNA, 75 bp, synthetic construct
  source 1..75: mol_type = other DNA
gatcgccgaaatgcacaaagattttgatgctttgaacattctgcgcccggatatggagccgcgcgcgacgcacca

SEQ ID NO: 426874 - DNA, 75 bp, synthetic construct
  source 1..75: mol_type = other DNA
tggtgatggttgaccgcgagaagatgtccaaatcgctgggtaacttcttcaccgtgcgtgatgtgctgaaatact

SEQ ID NO: 426875 - DNA, 75 bp, synthetic construct
  source 1..75: mol_type = other DNA
acaagaggaatacgtggagttgagcgacggcactttatcgtggttagggaacgccttgttctggatgcctctacc

SEQ ID NO: 426876 - DNA, 75 bp, synthetic construct
  source 1..75: mol_type = other DNA
gcctcagccattacgaaaaaacggggaaatggcggcagagctggctgcggatatccgccggttgtgggctgaatg

SEQ ID NO: 426877 - DNA, 75 bp, synthetic construct
  source 1..75: mol_type = other DNA
agaacttgatactgccaagaatggttacatcctcctggttcaggacgcagagccaaacttcgatataaatggcaa

SEQ ID NO: 426878 - DNA, 75 bp, synthetic construct
  source 1..75: mol_type = other DNA
aagaactaattaaagaaatcagagagcgaattggcagcctggacgtgcgagacaatattgagcgccgtgcttatg

SEQ ID NO: 426879 - DNA, 75 bp, synthetic construct
  source 1..75: mol_type = other DNA
gtaggtctgcgtctgccaaaagagtggcaacctgtactaacgtatggtgacttaactcgtctggatcctacaaca

SEQ ID NO: 426880 - DNA, 75 bp, synthetic construct
  source 1..75: mol_type = other DNA
aggtgcattccacattgcagaacagcaagttgacggcacaagtgactacctcaaggatggagaatggcctattga

SEQ ID NO: 426881 - DNA, 75 bp, synthetic construct
  source 1..75: mol_type = other DNA
ttgcagaggtgagaggctggaactcctgccgcgccgccatgcttcatggtgccgaacctgtaagccaaacttaca

SEQ ID NO: 426882 - DNA, 75 bp, synthetic construct
  source 1..75: mol_type = other DNA
gatacggtcagcgaaatccgccccgtcaaacatgcttttgataacggcattcaggcccagccgggtatcgactgg

SEQ ID NO: 426883 - DNA, 75 bp, synthetic construct
  source 1..75: mol_type = other DNA
caaaggaatcgaaattaatgataaacctgatgcatggtatttacatgtgggtgcaggagaaaactggcatcgtct

SEQ ID NO: 426884 - DNA, 75 bp, synthetic construct
  source 1..75: mol_type = other DNA
tcagcacattgtatgtgccgaagacgaacaacaattactcaatgcctggcagtatgcaaccgcagaaggacaacc

SEQ ID NO: 426885 - DNA, 75 bp, synthetic construct
  source 1..75: mol_type = other DNA
attgaacgccgtgcttatgaaatcgcactggcatcgctggaagaggatccggtggcatggctgcattcagacaat

SEQ ID NO: 426886 - DNA, 75 bp, synthetic construct
  source 1..75: mol_type = other DNA
ttggcctgcgttacatgcgtgggcgtgcagcggatcgcttcggtcgtttcgtctcctggctttctaccatcggca

SEQ ID NO: 426887 - DNA, 75 bp, synthetic construct
  source 1..75: mol_type = other DNA
cgccagcataacaactacgaagatggtaaacgagagttgactacagatgaaaaggctaaattggctatggggcga

SEQ ID NO: 426888 - DNA, 75 bp, synthetic construct
  source 1..75: mol_type = other DNA
gcgcttctctcggcgtggtgatggctgcgggtggatatccgggcgattaccgcaccggtgatgtgatccacggcc

SEQ ID NO: 426889 - DNA, 75 bp, synthetic construct
  source 1..75: mol_type = other DNA
agctctccggtaactccggctcttctgcctggtggtttcaccattgaggaggcgaaggaattacatgaagacctg

SEQ ID NO: 426890 - DNA, 75 bp, synthetic construct
  source 1..75: mol_type = other DNA
atggtaatggagaagcagggcgaagtagcgatcctgcaaacgcaaggcttaactccgcgacaaatcatgatggtc

SEQ ID NO: 426891 - DNA, 75 bp, synthetic construct
  source 1..75: mol_type = other DNA
gggcttgctgctgagcctgattgtcgccgttgcggcgtttaacattattacctcgctggggctgatggtgatgga

SEQ ID NO: 426892 - DNA, 75 bp, synthetic construct
  source 1..75: mol_type = other DNA
ccgaacctgtaagccagacttacaagttgaacgagctgtcgggcaactctccggtaattccggatggttggataa

SEQ ID NO: 426893 - DNA, 75 bp, synthetic construct
  source 1..75: mol_type = other DNA
tcactggagcagaatgcactatcgggcaactctacggtaactccggatggttggataagctgtagtgagcgaatg

SEQ ID NO: 426894 - DNA, 75 bp, synthetic construct
  source 1..75: mol_type = other DNA
caaaggtaaagggttatttcaattcttttacatgaatggtgttgagggggtatgtgagccgtcacactggatgcc

SEQ ID NO: 426895 - DNA, 75 bp, synthetic construct
  source 1..75: mol_type = other DNA
ctatatgttcgagctgaccttgtgaatggcaactatccggtaactccggatggttggataagctgtagtgagcga

SEQ ID NO: 426896 - DNA, 75 bp, synthetic construct
  source 1..75: mol_type = other DNA
tgatcgcactgttttttattcaacaaggtgcgctgcaaaattttctgccctatcagccggtgacgaccgttgaag

SEQ ID NO: 426897 - DNA, 75 bp, synthetic construct
  source 1..75: mol_type = other DNA
aagccatgcttcagtccggaaactttcgggaaaataaagattcgtcaaccaataattttcggaaaatcccggaag

SEQ ID NO: 426898 - DNA, 75 bp, synthetic construct
  source 1..75: mol_type = other DNA
aatgatgggtggataatacctggtgcgtcgtggataccatcacactggatgcctctaccagaaccgccgcaggag

SEQ ID NO: 426899 - DNA, 75 bp, synthetic construct
  source 1..75: mol_type = other DNA
tgtgaggggcaggcgcgagttttatgggaaaccgatgaagagatggcggagggaaaacccatgagcactattacc

SEQ ID NO: 426900 - DNA, 75 bp, synthetic construct
  source 1..75: mol_type = other DNA
tcaacaaatgccgctgcgggaataaatcacacacggtcaaaacagctcgcggaaatgaaactgccttgtgggatg

SEQ ID NO: 426901 - DNA, 75 bp, synthetic construct
  source 1..75: mol_type = other DNA
tgatgcactgttggttcataagatggctagggctttattgtcgttggtggacgctggtgatacaagcgagggtga

SEQ ID NO: 426902 - DNA, 75 bp, synthetic construct
  source 1..75: mol_type = other DNA
ggtagtgccggatgaaatcgagttagcaattgaaaacctcaagcagaaattagtggaatgcaatcgctataacta

SEQ ID NO: 426903 - DNA, 75 bp, synthetic construct
  source 1..75: mol_type = other DNA
accatcctcaaactaatgaatatggtctgattagcaatgtaacccactggatgccgctaccagagcctccacttt

SEQ ID NO: 426904 - DNA, 75 bp, synthetic construct
  source 1..75: mol_type = other DNA
caactgattggtgatgcacaggaagccactgtcactggctatgagttaatcgctgaagcttggcgtttgatggat

SEQ ID NO: 426905 - DNA, 75 bp, synthetic construct
  source 1..75: mol_type = other DNA
ccgtctgcaaacggcggtggataaagtgccgggcgtcgatctcttcctgcaaccaacgcaggacctgaccatcga

SEQ ID NO: 426906 - DNA, 75 bp, synthetic construct
  source 1..75: mol_type = other DNA
gtgatttatctgctgttcgaccgcctggcattgtggaccaaaagccgctttgcccgtcatgaagaggaggcgtaa

SEQ ID NO: 426907 - DNA, 75 bp, synthetic construct
  source 1..75: mol_type = other DNA
cacgccggtgatttatctgctgttcgaccgcctggcattgtggaccaaaagtcgctttgctcgccatgaagagga

SEQ ID NO: 426908 - DNA, 75 bp, synthetic construct
  source 1..75: mol_type = other DNA
cggcattattcagggcactttgcaggcaccgcaatccagctcctttgcgaatatggcccagcggcaacgccaggt

SEQ ID NO: 426909 - DNA, 75 bp, synthetic construct
  source 1..75: mol_type = other DNA
atcgcgctggtggtaatgattatctacctgtttttacgcaatattccggccaccatcattcctggcgttgcagtg

SEQ ID NO: 426910 - DNA, 75 bp, synthetic construct
  source 1..75: mol_type = other DNA
acggcgcaccaattcgtcttggcgatgtcgctactgtagagcaaggagcagaaaacagctggctcggcgcgtggg

SEQ ID NO: 426911 - DNA, 75 bp, synthetic construct
  source 1..75: mol_type = other DNA
atggcaagaaaggctaagtattcagaggaatggcgaagcagagctgcggctcttcaaaccgagattgaggaggct

SEQ ID NO: 426912 - DNA, 75 bp, synthetic construct
  source 1..75: mol_type = other DNA
cccccgagaagaaaagcggatcagtacgttcctctcgacacaaaagaagcgcatcactctccagatgtgtttgtc

SEQ ID NO: 426913 - DNA, 75 bp, synthetic construct
  source 1..75: mol_type = other DNA
aaaaccagattgaaaaaaacagtacggcgattaccgaacagcaggaacaaatcactgccacgcaaaaaaccgttg

SEQ ID NO: 426914 - DNA, 75 bp, synthetic construct
  source 1..75: mol_type = other DNA
tattcgctgggcgatgcggtgcaggcgattatggacaccgagaagacgctgaatctgccggtggatatcaccacg

SEQ ID NO: 426915 - DNA, 75 bp, synthetic construct
  source 1..75: mol_type = other DNA
caacctgggcggcaggattcattagccatgtttcactggtcgaaattctggtcccattctgtgtgatggcgattg

SEQ ID NO: 426916 - DNA, 75 bp, synthetic construct
  source 1..75: mol_type = other DNA
gtttgccgcccagcagcgcgccagcatcatgcagttcaacagccgcaacggtgagccagtcatgttcaccgaatg

SEQ ID NO: 426917 - DNA, 75 bp, synthetic construct
  source 1..75: mol_type = other DNA
taccggcgctaacgttaactcggcaaaaggtagcctcgacggcccttcccgcgcggtcacgctttccgcgaacga

SEQ ID NO: 426918 - DNA, 75 bp, synthetic construct
  source 1..75: mol_type = other DNA
agtcgggagtatcggcagcgccattggcggtgctttcggtggtggtgcgtctgcctccacggggacggccattca

SEQ ID NO: 426919 - DNA, 75 bp, synthetic construct
  source 1..75: mol_type = other DNA
actttgcagttccagctaacattaccgctggatgtcgccgagcaggaagtgcaggccgcgattaacgctgcgacc

SEQ ID NO: 426920 - DNA, 75 bp, synthetic construct
  source 1..75: mol_type = other DNA
gcgtgcaacaggcgtcagcaaaggtccggggcagcagaaagccgtcaggagcgcggcgtcggctgaagagctgac

SEQ ID NO: 426921 - DNA, 75 bp, synthetic construct
  source 1..75: mol_type = other DNA
ggctgcggcggcgaactttcattttgcgaccggcggatttacgggcacgggcggcaaatatgagcctgcggggat

SEQ ID NO: 426922 - DNA, 75 bp, synthetic construct
  source 1..75: mol_type = other DNA
agctgggcgacaaggttgaataccagaaacgcctgaatgagctggcacagcaggcggtgcggtttgaagagcagc

SEQ ID NO: 426923 - DNA, 75 bp, synthetic construct
  source 1..75: mol_type = other DNA
ggtcgtggactggcgaaggtgctgaatcatccgtggctgaccttaagcgtggcgctcagcacgctgctgcttagc

SEQ ID NO: 426924 - DNA, 75 bp, synthetic construct
  source 1..75: mol_type = other DNA
gatgatgtgcgcacggatgctcagccaggagtcgctgcgtaaacaaaaccgcttctcccgcgcctcggaaaaaat

SEQ ID NO: 426925 - DNA, 75 bp, synthetic construct
  source 1..75: mol_type = other DNA
ggcgaaaaaccgctggcggcagcgctcaagggcgcgggtgaaatcggctttaccattatctcgctgaccttctca

SEQ ID NO: 426926 - DNA, 75 bp, synthetic construct
  source 1..75: mol_type = other DNA
caggcgattgccgccctcggtctgaccagcgaaaccgtgcgcaccgctattaccggcgctaacgttaactcggca

SEQ ID NO: 426927 - DNA, 75 bp, synthetic construct
  source 1..75: mol_type = other DNA
tgctgacgctgtttaccacgccggtgatttatctgctgttcgaccgcctggcattgtggaccaaaagtcgctttg

SEQ ID NO: 426928 - DNA, 75 bp, synthetic construct
  source 1..75: mol_type = other DNA
cggtcatggtatttctcgatttctcgatcaataacctgaccctgatggcgttaaccatcgccaccgggtttgtgg

SEQ ID NO: 426929 - DNA, 75 bp, synthetic construct
  source 1..75: mol_type = other DNA
gaagaaacatcagattgcggccgtaggtttgtttctcggtgacggcgacagcgtcaaagtgacccagcttgatga

SEQ ID NO: 426930 - DNA, 75 bp, synthetic construct
  source 1..75: mol_type = other DNA
aattcacactgaacgcgttattcacacggaaaccgtccgcccggtattccgcaatgtgtgcgctactgatgatta

SEQ ID NO: 426931 - DNA, 75 bp, synthetic construct
  source 1..75: mol_type = other DNA
ttgaccatgattctggtgattgtctgggcaccaactaccgcattggggatcgatatcgtctctaaaatcgggatt

SEQ ID NO: 426932 - DNA, 75 bp, synthetic construct
  source 1..75: mol_type = other DNA
gctgcatatccgccgcctggaaccaggaacggaaattgcgttttacattcctaaccaacgcaccccagtcgcctc

SEQ ID NO: 426933 - DNA, 75 bp, synthetic construct
  source 1..75: mol_type = other DNA
atgtagggtgttttgacgatatcgaggaggcgagaaaggcaatggaaaatgccaggataaaatatcatggtgaat

SEQ ID NO: 426934 - DNA, 75 bp, synthetic construct
  source 1..75: mol_type = other DNA
actgaccgtcaggcgcagcgggagtctgaagcgcagcgtcttcgggacgtgtacggtgataatccgcaggcgctg

SEQ ID NO: 426935 - DNA, 75 bp, synthetic construct
  source 1..75: mol_type = other DNA
cggcaggtggcggggttgccgtactggccgcgcttgctgccgccgcctggcaggcagagcaggctgaccgggcct

SEQ ID NO: 426936 - DNA, 75 bp, synthetic construct
  source 1..75: mol_type = other DNA
gcgccgtttcaggactggaccacgccgctgttgagcgatcgctacgattctcacttattgccaggtgggcaaaaa

SEQ ID NO: 426937 - DNA, 75 bp, synthetic construct
  source 1..75: mol_type = other DNA
gtcttaagtcgcatggcacttcagcttgaagggcaaacggcgttgctgtttcgtcttgcgcgagcgtgggaccgg

SEQ ID NO: 426938 - DNA, 75 bp, synthetic construct
  source 1..75: mol_type = other DNA
gcgattcgcctggaacgcctgaaagataagctgggcaatcgctctaatgccagttgcgaagtggagtttcaggat

SEQ ID NO: 426939 - DNA, 75 bp, synthetic construct
  source 1..75: mol_type = other DNA
attggcctgctgaatgtccatcatcgcgtgaagttattgtatggcgaggggctgcatatccgccgcctggaacca

SEQ ID NO: 426940 - DNA, 75 bp, synthetic construct
  source 1..75: mol_type = other DNA
gaagggcgagtgaaacgcgtgacggagaagccactgatattgattaataactatattggcgatccaaaactcgac

SEQ ID NO: 426941 - DNA, 75 bp, synthetic construct
  source 1..75: mol_type = other DNA
agaaggtattggcctggcagcaacccaggttgatatccatcaacgtatcattgttattgatgtttcggaaaaccg

SEQ ID NO: 426942 - DNA, 75 bp, synthetic construct
  source 1..75: mol_type = other DNA
ctgcaatctgacaacaaaattcagggtgtgggtagtcatatgtcatggagctttctgttttttaaaaaacaattc

SEQ ID NO: 426943 - DNA, 75 bp, synthetic construct
  source 1..75: mol_type = other DNA
gtgctgtgacagaaaacaaaaataatatcgaacagaaccgcagcgatattgctgaccaacagcaacaactcgacg

SEQ ID NO: 426944 - DNA, 75 bp, synthetic construct
  source 1..75: mol_type = other DNA
gcacatgcccagtcaacggctgaccatgccaacgctaacgccaacaccgctctgatgaacggcgtcaaactgtcc

SEQ ID NO: 426945 - DNA, 75 bp, synthetic construct
  source 1..75: mol_type = other DNA
aacggtgaatctgcggtgtctgtcggaacatcttttaatgccggaacgcataccgtgattaaagccggtgtctct

SEQ ID NO: 426946 - DNA, 75 bp, synthetic construct
  source 1..75: mol_type = other DNA
tgggcggcgtactgctggatagtgaagaggcgctggaacgtctgtttagcgccctggtgaattatcgtgagtcac

SEQ ID NO: 426947 - DNA, 75 bp, synthetic construct
  source 1..75: mol_type = other DNA
catgccaacgctaacgccaacaccgctctgatgaacggcgtcaaactttctggtgctgtgacagaaaacaaaaac

SEQ ID NO: 426948 - DNA, 75 bp, synthetic construct
  source 1..75: mol_type = other DNA
agattgaaaaaaacagtacggcgattaccgaacagcaggaacaaatcactgccacgcaaaaaaccgttgccgcca

SEQ ID NO: 426949 - DNA, 75 bp, synthetic construct
  source 1..75: mol_type = other DNA
cttctcttggacttatggtgatggataaacaggccgaagtggcggtactgcagacgcagggattaacttcacgtc

SEQ ID NO: 426950 - DNA, 75 bp, synthetic construct
  source 1..75: mol_type = other DNA
tgtgccgaaggagtgggttgctgtctattacgacaatccggatgaaacacccgccgaaaaattacgctgcgacac

SEQ ID NO: 426951 - DNA, 75 bp, synthetic construct
  source 1..75: mol_type = other DNA
tcagtatgcggtggcggtagctcgtgtagtcggtgatgattttgctaaaccctggtatcagttcttggtgatgcc

SEQ ID NO: 426952 - DNA, 75 bp, synthetic construct
  source 1..75: mol_type = other DNA
gaacccgataaccaatcaagcgcagatcgaccgcgacaatgggcaggataccgccattcagaacgcacagcacac

SEQ ID NO: 426953 - DNA, 75 bp, synthetic construct
  source 1..75: mol_type = other DNA
ggacaatcgtaaagaagccaatgcgggaactgcatctgccatcgctatcgcctcacaaccacaggtgaaaaccgg

SEQ ID NO: 426954 - DNA, 75 bp, synthetic construct
  source 1..75: mol_type = other DNA
ccgctgaaaaaggtgctggatattatccagttgtctgagttcggcgatatcgatcctgatatcacgtttgaattt

SEQ ID NO: 426955 - DNA, 75 bp, synthetic construct
  source 1..75: mol_type = other DNA
cacatggttgggctgcagaacagttgcttaaaacagcagagatgctgttaggcgagcaggaaaatgtcggctgga

SEQ ID NO: 426956 - DNA, 75 bp, synthetic construct
  source 1..75: mol_type = other DNA
gcgtatcgacgatcgtctgattcacggtcaggtcgctacccgctggactaaagaaaccaatgtctcccgtattat

SEQ ID NO: 426957 - DNA, 75 bp, synthetic construct
  source 1..75: mol_type = other DNA
aaataaagaaaaggacgctaaggataaattagataaggagagtaaacggaataagccagggaaggcgacaggtaa

SEQ ID NO: 426958 - DNA, 75 bp, synthetic construct
  source 1..75: mol_type = other DNA
tggcggcagcgacttcaaaagatcagtactggttaccgatgatgtgatcgaaaaagtccgcgcgctgtcggtgct

SEQ ID NO: 426959 - DNA, 75 bp, synthetic construct
  source 1..75: mol_type = other DNA
agtttcaggtggcaacaagattacatgatgttatcaaggaaacgcttagaaatgactataacggcgtgaatcttt

SEQ ID NO: 426960 - DNA, 75 bp, synthetic construct
  source 1..75: mol_type = other DNA
actccggcaaaaccaatgggaccaaatgactacatggttattggccttgcgcgtatcgacgaccgtctgattcac

SEQ ID NO: 426961 - DNA, 75 bp, synthetic construct
  source 1..75: mol_type = other DNA
aaacgtgaagcgccttattattgaggaaactaaccgatacagcgttagccctgaaaaatatctcaaggcggctat

SEQ ID NO: 426962 - DNA, 75 bp, synthetic construct
  source 1..75: mol_type = other DNA
tggttgatagcgacactgctatgatggtgcaaagcttcactgatgcaggtattagcattgactttgacaggctgt

SEQ ID NO: 426963 - DNA, 75 bp, synthetic construct
  source 1..75: mol_type = other DNA
ggtgcaaagcttcattgatgcaggtatcgcaattaattttgataaattactaaagctgatggctgataatgcaga

SEQ ID NO: 426964 - DNA, 75 bp, synthetic construct
  source 1..75: mol_type = other DNA
acgatgcggaaactgtgcgttacttcctgatgtcgggtcactatcgcagtcagttgaactacagcgaagagaacc

SEQ ID NO: 426965 - DNA, 75 bp, synthetic construct
  source 1..75: mol_type = other DNA
atgaacaattacgaattacagatttttgttgatagcgacaccgctctgatgattcaggctttcagtgattccggt

SEQ ID NO: 426966 - DNA, 75 bp, synthetic construct
  source 1..75: mol_type = other DNA
atgaacaattacgaattacagatttttgttgataacgacaccgtgaccatgcttcaacacttcactgatgtaggt

SEQ ID NO: 426967 - DNA, 75 bp, synthetic construct
  source 1..75: mol_type = other DNA
ggctttcacggaacatctcaccgctatattgccgccgaggcgcttgcatcactagatctcgacccggcggatcat

SEQ ID NO: 426968 - DNA, 75 bp, synthetic construct
  source 1..75: mol_type = other DNA
gcgaccagaatctgctgatggccccggttttgctgtggctgcgggataaccagcccgatgccatcaataacccgg

SEQ ID NO: 426969 - DNA, 75 bp, synthetic construct
  source 1..75: mol_type = other DNA
tctccggtcatcgatgagaaacccgcaccagtgccgacagcccccgttgcaccccgccgggtaaaaggctgctac

SEQ ID NO: 426970 - DNA, 75 bp, synthetic construct
  source 1..75: mol_type = other DNA
gttattattggtatggctttatggaatatattgaaaacattaatgcgtgtgatgatgttttttctgagtattgtt

SEQ ID NO: 426971 - DNA, 75 bp, synthetic construct
  source 1..75: mol_type = other DNA
ccgattccagactggcgagctcgctgtcgtttgaaaaggtgtacgtgcttaacgtggtggtgaccgacttcaccg

SEQ ID NO: 426972 - DNA, 75 bp, synthetic construct
  source 1..75: mol_type = other DNA
gtcgtttgagaaccggtacacgctgaatgtggtggtgaccgatttcacggatgatatcgagctgttactcgtccc

SEQ ID NO: 426973 - DNA, 75 bp, synthetic construct
  source 1..75: mol_type = other DNA
cgtcttttcgccgacaacgggcatatcgattcccgactggcgagctcgctgtcgtttgaaaaggtgtacgtgctt

SEQ ID NO: 426974 - DNA, 75 bp, synthetic construct
  source 1..75: mol_type = other DNA
atgttcgacagaatacgggcggcgtgcgcttatgttactgggaccgtaaccgcttttttcggtgcgataaccata

SEQ ID NO: 426975 - DNA, 75 bp, synthetic construct
  source 1..75: mol_type = other DNA
cgttaattattacttcaaatcacaggagaataagcgggcgcaagaggaacacgacgcacgaatggggaataagta

SEQ ID NO: 426976 - DNA, 75 bp, synthetic construct
  source 1..75: mol_type = other DNA
tcgacacgctgtacaaaatgctcaataaccagtccggcctaatggggatttccggcttatccagcgattgccgca

SEQ ID NO: 426977 - DNA, 75 bp, synthetic construct
  source 1..75: mol_type = other DNA
tggttgccacgggagccagctccatgtcgtgggagtaccgttacacactgaacgcggtgattgaggatttcagcg

SEQ ID NO: 426978 - DNA, 75 bp, synthetic construct
  source 1..75: mol_type = other DNA
acgccctcaataaagcagtgccttatgtccgtaataacccggacaaactgcatctgtttgtggataacggttcgc

SEQ ID NO: 426979 - DNA, 75 bp, synthetic construct
  source 1..75: mol_type = other DNA
gttgcccgcgcactcaacgttcacccttcggaaatctggcccagccgttacgaggaagaaggcgaacagcggcaa

SEQ ID NO: 426980 - DNA, 75 bp, synthetic construct
  source 1..75: mol_type = other DNA
atgagcaattacgaattacagattttcgttgataacgacaccgctctgatgattcaggctttcagtgatgcaggt

SEQ ID NO: 426981 - DNA, 75 bp, synthetic construct
  source 1..75: mol_type = other DNA
acaaaaccgaaagtttcagccagccgcgacgcacgaaagccagcggcggtggtggcgatgaactgctgaccgact

SEQ ID NO: 426982 - DNA, 75 bp, synthetic construct
  source 1..75: mol_type = other DNA
ctttccgctatggaaaccgcgtttaccaccttcaggcaggaactgaccggcaaggttgaagaaaccagccaggca

SEQ ID NO: 426983 - DNA, 75 bp, synthetic construct
  source 1..75: mol_type = other DNA
gcggtcaccgatgacccggcgagcctcggcactgaatacctcgaattctgccgtaacgcgaagcacaacccgctg

SEQ ID NO: 426984 - DNA, 75 bp, synthetic construct
  source 1..75: mol_type = other DNA
aaacctcactgccactgaacagcgtcttgccacgctggaaaatgcctttgcgaccctgaaaaaggacgtcaccac

SEQ ID NO: 426985 - DNA, 75 bp, synthetic construct
  source 1..75: mol_type = other DNA
catcattgctgcattgctaaacgcgtattctgatttaccccatgatttgaaaattggtctgcgttccttatcaag

SEQ ID NO: 426986 - DNA, 75 bp, synthetic construct
  source 1..75: mol_type = other DNA
acgataggatacgttgtaacccttcctgcccaaatgcctaattgctggtcatctgaactaccaacaatcgatctt

SEQ ID NO: 426987 - DNA, 75 bp, synthetic construct
  source 1..75: mol_type = other DNA
gcgtgcaacaggcgtcagcaaaggtccggggcagcaggaagccgtcaggagcgcagcgtcggctgaagagctgac

SEQ ID NO: 426988 - DNA, 75 bp, synthetic construct
  source 1..75: mol_type = other DNA
gcgtgcaacaggcgtcagcaaaggtccggggcagcaggaagccgtcaggatcgctgcgtcggctgaagagctgac

SEQ ID NO: 426989 - DNA, 75 bp, synthetic construct
  source 1..75: mol_type = other DNA
gcgtgcaacaggcgtcagcaaaggtccggggcagcaggaagccgtcaggaacgcggcgtcggctgaagagctgac

SEQ ID NO: 426990 - DNA, 75 bp, synthetic construct
  source 1..75: mol_type = other DNA
ggtctctttcccgatggcgacttcaaacgcttaggcgatgtggttgagctgaaagccgagaagattgacgatgat

SEQ ID NO: 426991 - DNA, 75 bp, synthetic construct
  source 1..75: mol_type = other DNA
gcggcgtactgctggatagtgaagaggcgctggaacgtctgtttagcgcactggtgaattatcgtgagtcacatc

SEQ ID NO: 426992 - DNA, 75 bp, synthetic construct
  source 1..75: mol_type = other DNA
atgatgaatccattaattatcaaactgggtggcgtactgctggatagtgaagaggcgctggaacgtctgtttagc

SEQ ID NO: 426993 - DNA, 75 bp, synthetic construct
  source 1..75: mol_type = other DNA
atggcaaaaaaagtctcaaaattctttcgtatcggcgttgagggtgacacctgtgacgggcgtgtcatcagtgcg

SEQ ID NO: 426994 - DNA, 75 bp, synthetic construct
  source 1..75: mol_type = other DNA
tatttcagccagatggcgggcttaacggtgcaaaactttctttctgccgccagcgggattgcggtgatttttgcc

SEQ ID NO: 426995 - DNA, 75 bp, synthetic construct
  source 1..75: mol_type = other DNA
tcgcttcggggtgattatcccggtgatggcaattgccggttcgctggtgagtaaaaagagccaacccgccagctc

SEQ ID NO: 426996 - DNA, 75 bp, synthetic construct
  source 1..75: mol_type = other DNA
ccgtgtcatccgccgctaacaacaacggcagcgcctttgccggattaagcgccaactctccgttctggaactgtt

SEQ ID NO: 426997 - DNA, 75 bp, synthetic construct
  source 1..75: mol_type = other DNA
aataaatacagtatttccccagagcaatttttgaaaggtgctgtgacaatcctgtacgctgacaatattctggtg

SEQ ID NO: 426998 - DNA, 75 bp, synthetic construct
  source 1..75: mol_type = other DNA
gtatcaattgactttgataaattactaaagctaatggctgataactcagaaacaattgaagattttattcagtcg

SEQ ID NO: 426999 - DNA, 75 bp, synthetic construct
  source 1..75: mol_type = other DNA
gaaaagattggttatcgagcaaacgaacaaatacagcattagccctgaaaaatatctcaaggcagctatagcaat

SEQ ID NO: 427000 - DNA, 75 bp, synthetic construct
  source 1..75: mol_type = other DNA
gtatgaaatttacggtatgtggattgatgacatgaacgacgaacaggtagccatgttgaatgcgcggttatcgta

SEQ ID NO: 427001 - DNA, 75 bp, synthetic construct
  source 1..75: mol_type = other DNA
ttcacccgcctgaaaaacagtctcgaccacaccgaaagtctgacccagcagcgccgcagcaaggccaccggtggt

SEQ ID NO: 427002 - DNA, 75 bp, synthetic construct
  source 1..75: mol_type = other DNA
gccactgagcagcgcctcgctgagatggaaaccgccttttccgcacttaagcaggaggtgactgacagggcggat

SEQ ID NO: 427003 - DNA, 75 bp, synthetic construct
  source 1..75: mol_type = other DNA
ctggcgctgaatactgccgtcagctttgtcactaataccaactggcaatcttatagcggtgaaaccacattaagc

SEQ ID NO: 427004 - DNA, 75 bp, synthetic construct
  source 1..75: mol_type = other DNA
catctgcgtaggcgtggtgatgtgggcagaagttcagggtaatccgcatctgctggcactgggcgcggacagcag

SEQ ID NO: 427005 - DNA, 75 bp, synthetic construct
  source 1..75: mol_type = other DNA
cggcctgaacatgctggggctggcggtgctgttttttatgttgctcggtcagcactatctgccgcttaatccgca

SEQ ID NO: 427006 - DNA, 75 bp, synthetic construct
  source 1..75: mol_type = other DNA
ctcacccggctgttggaccagcattacggcctcacactgaatgacacaccgtttgccgatgaacgtgtgattgag

SEQ ID NO: 427007 - DNA, 75 bp, synthetic construct
  source 1..75: mol_type = other DNA
gaacatattgatgccggaatcactctggccgatgccgttaattttctggtggaaaaatacgaactggtacgtatc

SEQ ID NO: 427008 - DNA, 75 bp, synthetic construct
  source 1..75: mol_type = other DNA
tcccgtcaccatctggcagacactgctcacccgactgctggaccagcattacggcctcacactgaatgacacacc

SEQ ID NO: 427009 - DNA, 75 bp, synthetic construct
  source 1..75: mol_type = other DNA
atgaaaacattacctgacacacacgtacgggaggcatcgcgctgcccgtctcccgtcaccatctggcaggcactg

SEQ ID NO: 427010 - DNA, 75 bp, synthetic construct
  source 1..75: mol_type = other DNA
ctcacccggttactggaccagcattacagccttacgctgaatgacacaccgttcgccgatgaacgtgtgattgaa

SEQ ID NO: 427011 - DNA, 75 bp, synthetic construct
  source 1..75: mol_type = other DNA
gtattgatatcctccgggcacgccgggcaaccggcctgatgacacgcgacaactacagaacggtaaataacatta

SEQ ID NO: 427012 - DNA, 75 bp, synthetic construct
  source 1..75: mol_type = other DNA
acaccgttcgctgatgaacgtgtgattgagcagcatattgaggcagggatttcactgtgtgacgcggtgaacttt

SEQ ID NO: 427013 - DNA, 75 bp, synthetic construct
  source 1..75: mol_type = other DNA
tctcccgtcaccatctggcagactctgctctcccgactactgggccagcattacggccttacactgaatgacaca

SEQ ID NO: 427014 - DNA, 75 bp, synthetic construct
  source 1..75: mol_type = other DNA
gaactttcttgttgaaaaatacgcactggtgcgtaccgaccagccggaattcagtgcctgtacccgttctcagtt

SEQ ID NO: 427015 - DNA, 75 bp, synthetic construct
  source 1..75: mol_type = other DNA
aaacggatgttcagacattattcaagtatatggtaagatattaaatatgtgcaatcttagtcaagaaacaatact

SEQ ID NO: 427016 - DNA, 75 bp, synthetic construct
  source 1..75: mol_type = other DNA
ccgggcacgccgggcaaccggcctgatgacacgcgacaactacagaacggtaaataacattaccctgggtaaaca

SEQ ID NO: 427017 - DNA, 75 bp, synthetic construct
  source 1..75: mol_type = other DNA
tcccgtcaccatctggcagacactgctgtcccgactactgggccagcattacggccttacgctgaatgacacacc

SEQ ID NO: 427018 - DNA, 75 bp, synthetic construct
  source 1..75: mol_type = other DNA
aaaatacgcgctggtacgtaccgaccagccgggattcagcgcctgtacccgttctcagttaataaacagtattga

SEQ ID NO: 427019 - DNA, 75 bp, synthetic construct
  source 1..75: mol_type = other DNA
catgaatccgccgttcagtcacgggcaggatatccggcatatcctgcgggccttttccctgttgcgtccgggtgg

SEQ ID NO: 427020 - DNA, 75 bp, synthetic construct
  source 1..75: mol_type = other DNA
ccggcagaatttcagctttttgtgacacctgccccggtctgcgatcgcctggtgacgctggcggaaatcagcaac

SEQ ID NO: 427021 - DNA, 75 bp, synthetic construct
  source 1..75: mol_type = other DNA
taccgttttctgacatccgcgaggagctgccgtgcggcacatttgcttatacccgtgttccgacgatgattattc

SEQ ID NO: 427022 - DNA, 75 bp, synthetic construct
  source 1..75: mol_type = other DNA
atggggtaaagatactgatgcgtgatatccggcaggttcttgagcgctggggtgcatgggcggcaaataaccatg

SEQ ID NO: 427023 - DNA, 75 bp, synthetic construct
  source 1..75: mol_type = other DNA
ttgcacgtaagcatgggcgatctgattgttgggttggcaggatgctccagaaagctgagggcgtagtggagggca

SEQ ID NO: 427024 - DNA, 75 bp, synthetic construct
  source 1..75: mol_type = other DNA
tggaacggtggggggcttgggctgcaaacactcatgaagatgtatcctgggcgtcgatcgctgctggttttaaag

SEQ ID NO: 427025 - DNA, 75 bp, synthetic construct
  source 1..75: mol_type = other DNA
ccctggaaaccaatggtttaagctatcgttatgacagtcagtcagcaccgatattcagtgctctgagtttatctg

SEQ ID NO: 427026 - DNA, 75 bp, synthetic construct
  source 1..75: mol_type = other DNA
ccggcaccgggcccatactgcgggcgattagggataccgcgccgggggccatgtgtgatgcggtggagataaaca

SEQ ID NO: 427027 - DNA, 75 bp, synthetic construct
  source 1..75: mol_type = other DNA
ctgacagaagtattatttatactgatggaaaaatacaaaaatggtgaaatttctcaatctaaactggtgaacctt

SEQ ID NO: 427028 - DNA, 75 bp, synthetic construct
  source 1..75: mol_type = other DNA
tgtggcgacttcatggaatggcagccggtgcagtattacagccggattatcatgaatccgtcgttcagtcacggg

SEQ ID NO: 427029 - DNA, 75 bp, synthetic construct
  source 1..75: mol_type = other DNA
ctgttaccgttttctgacgtccgcgaggagctgccgcgcggcacgtttgcttataccgatgtcccgacgatgatt

SEQ ID NO: 427030 - DNA, 75 bp, synthetic construct
  source 1..75: mol_type = other DNA
caggatatccggcatatcctgcgggccttttccctgttgcgtccgggtggcgtgctggtcgccgtctgtctcaac

SEQ ID NO: 427031 - DNA, 75 bp, synthetic construct
  source 1..75: mol_type = other DNA
ggcctgatgacccgcgacaactacagaacggtaaataacattaccctgggtaaacatccgggggcgaaacaatga

SEQ ID NO: 427032 - DNA, 75 bp, synthetic construct
  source 1..75: mol_type = other DNA
tgaaaaatacgcactggtacgtaccgaccagccaggattcagcgcctgtacccgttctcagttaataaacagtat

SEQ ID NO: 427033 - DNA, 75 bp, synthetic construct
  source 1..75: mol_type = other DNA
ctcacccggttactggaccagcactacggcctcacactgaatgacacaccgttggcggatgaacgtgtgattgag

SEQ ID NO: 427034 - DNA, 75 bp, synthetic construct
  source 1..75: mol_type = other DNA
ctcacccggttactggaccagcactacggcctcacactgaatgacacaccgttcgccgatgaacgtgtgattgag

SEQ ID NO: 427035 - DNA, 75 bp, synthetic construct
  source 1..75: mol_type = other DNA
ttgccattcgcgaagaccgccacgagctgggcaatgacataactccgcgctttaaggcagagtacgtcgacggtt

SEQ ID NO: 427036 - DNA, 75 bp, synthetic construct
  source 1..75: mol_type = other DNA
gcgccagccgcaaagcagacctgctgcggggtggcctgaccagcggaaacaaaaaaacagacagaaacgggactc

SEQ ID NO: 427037 - DNA, 75 bp, synthetic construct
  source 1..75: mol_type = other DNA
accggcctgatgacccgcgacaattacagaacggtaaatgacattacccaggggaagcatccggaggcgaaacaa

SEQ ID NO: 427038 - DNA, 75 bp, synthetic construct
  source 1..75: mol_type = other DNA
tcccgtcaccatctggcagactctgctctcccgactgctggaccagcattacggcctcacactgaatgacacacc

SEQ ID NO: 427039 - DNA, 75 bp, synthetic construct
  source 1..75: mol_type = other DNA
tgtgcgatgcagtgaactttctcgtggaaaaatacgcgctggtgctaccgaccagccgggattcagcgcctgtac

SEQ ID NO: 427040 - DNA, 75 bp, synthetic construct
  source 1..75: mol_type = other DNA
aaaacctggagtgatcgcgggtttgtcgtgttgggatttccatgcaaccagtttcttgaacaagaacctggcagt

SEQ ID NO: 427041 - DNA, 75 bp, synthetic construct
  source 1..75: mol_type = other DNA
ctcacccggttactggaccagcactacggcctcacactgaatgacacaccgtttgctgatgaacgtgtgattgag

SEQ ID NO: 427042 - DNA, 75 bp, synthetic construct
  source 1..75: mol_type = other DNA
ctcacccggttactggaccagcactacggcctcacactgaatgacacaccgttagcagatgaacgtgtgattgag

SEQ ID NO: 427043 - DNA, 75 bp, synthetic construct
  source 1..75: mol_type = other DNA
atcctccgggctcgccgggcgaccggcctgatgacccgcgacaattacagaacggtaaataacattaccctgggt

SEQ ID NO: 427044 - DNA, 75 bp, synthetic construct
  source 1..75: mol_type = other DNA
gcacggtgcactggcatatgatggtttttgcgcatccggatgaaatagacaccattgtgtcccacgtccgcgata

SEQ ID NO: 427045 - DNA, 75 bp, synthetic construct
  source 1..75: mol_type = other DNA
atgaaaacattatccgacacacatgtacgggaggcatcgcgctgcccgtctcccgtcaccatctggcagatactg

SEQ ID NO: 427046 - DNA, 75 bp, synthetic construct
  source 1..75: mol_type = other DNA
ctgtcccgactgctggaccagcattacggcctcacactgaatgacacaccgtttgccgatgaacgtgtgattgag

SEQ ID NO: 427047 - DNA, 75 bp, synthetic construct
  source 1..75: mol_type = other DNA
tcctatctgcgcgatccgcttattcgccacctctccttcctgcacaaaaaacaggaagccgatcgccggaaaggc

SEQ ID NO: 427048 - DNA, 75 bp, synthetic construct
  source 1..75: mol_type = other DNA
gccgaccgcgccggtatcagggggcagtttagcgacgcggatgcgtgtcatctggaccaggcctttccgctgctg

SEQ ID NO: 427049 - DNA, 75 bp, synthetic construct
  source 1..75: mol_type = other DNA
cagcatattgaggcaggcatttcactgtgtgatgcggtgaactttctcgttgagaaatacgcgctggtacgtacc

SEQ ID NO: 427050 - DNA, 75 bp, synthetic construct
  source 1..75: mol_type = other DNA
acggcctcacgctgaatgacacaccgttcgctgatgaacgtgtgattgagcagcatattgaggcagggatttcac

SEQ ID NO: 427051 - DNA, 75 bp, synthetic construct
  source 1..75: mol_type = other DNA
ccggacgcgaacgcctggacgatttgctttacctgccgcagctcaacaaacaccagatacagacgctggccacca

SEQ ID NO: 427052 - DNA, 75 bp, synthetic construct
  source 1..75: mol_type = other DNA
gcacagcgcgagaaaacacgcgatttcctgaaaagtttcatgctggaaaacgaagacgggttcacgattgatctc

SEQ ID NO: 427053 - DNA, 75 bp, synthetic construct
  source 1..75: mol_type = other DNA
tttaaggcggagtacgtcgacggctcaaaaggcacaccgaccagctacatcgccacctacatcgggaaaaacctg

SEQ ID NO: 427054 - DNA, 75 bp, synthetic construct
  source 1..75: mol_type = other DNA
ggcatcccttgaggaagccggacagcgtgaaaatctggcacaaagcatcatcagcaagcgtcaggcaacagaaca

SEQ ID NO: 427055 - DNA, 75 bp, synthetic construct
  source 1..75: mol_type = other DNA
atgacgacagagtacatcagggactggcaacaaccgcgccacacagtaggacgtgaaggaacggagatccccgca

SEQ ID NO: 427056 - DNA, 75 bp, synthetic construct
  source 1..75: mol_type = other DNA
tcgctgccgctgatgccgggtgttttgccacctacattgagaaacagggtggcgtacttgttccacgcaaagact

SEQ ID NO: 427057 - DNA, 75 bp, synthetic construct
  source 1..75: mol_type = other DNA
gagcgagtctgcgccgtgctgcgggagctgaacaagtgccgggatattctccgggatattaccgccaccagagaa

SEQ ID NO: 427058 - DNA, 75 bp, synthetic construct
  source 1..75: mol_type = other DNA
agataagttaacggaaattgagggaagaactatttcaccccaggcggtttctaaagctttgaaaagtgtagatag

SEQ ID NO: 427059 - DNA, 75 bp, synthetic construct
  source 1..75: mol_type = other DNA
attccctatacgaatattgctcactctcccttaccacgttcaaatgataaatttaccagtactgaaagcgtccct

SEQ ID NO: 427060 - DNA, 75 bp, synthetic construct
  source 1..75: mol_type = other DNA
ctacctgctcaaacatgattcaaactacggaccgttcccctggagcgttgattttacggaagattcacttatcgg

SEQ ID NO: 427061 - DNA, 75 bp, synthetic construct
  source 1..75: mol_type = other DNA
acggaaaatgatggtaaagcctttcctcagccagcaggtgttgcgttaccagtacaggaagcagcaacacaggaa

SEQ ID NO: 427062 - DNA, 75 bp, synthetic construct
  source 1..75: mol_type = other DNA
gctgcaaatggcaaaccgcgaactgcgccgggcgaaaagttatgtccagaagtgggagcgagtctgcgccgcgct

SEQ ID NO: 427063 - DNA, 75 bp, synthetic construct
  source 1..75: mol_type = other DNA
gcatcggtaacggaaaatgatggtaaagcctttcctcagccagccggcgttgcgttaccagtacaggaagctgca

SEQ ID NO: 427064 - DNA, 75 bp, synthetic construct
  source 1..75: mol_type = other DNA
ggcgaaaagtgatgttcagaagtgggagcgagtctgcgccgcgctgcgggaggtgaacaagcaccgggatattgt

SEQ ID NO: 427065 - DNA, 75 bp, synthetic construct
  source 1..75: mol_type = other DNA
ggtcggtaccggttcgtcagtctttcacccggaatcttcccgcgtggcgcgtatggcctccggtgggcgtcatgg

SEQ ID NO: 427066 - DNA, 75 bp, synthetic construct
  source 1..75: mol_type = other DNA
ggcaaaaggtcaggttcagaagtgggagcgagtctgcgccgcgctgcgggagctgaacaagtgccgggatattct

SEQ ID NO: 427067 - DNA, 75 bp, synthetic construct
  source 1..75: mol_type = other DNA
atggataaaacacaatcactgatttcctctgccggtacaccggaaaaatcccccgctaaatgctcccgccgccgt

SEQ ID NO: 427068 - DNA, 75 bp, synthetic construct
  source 1..75: mol_type = other DNA
taactgcgacgattgaacaacgtggcccacaaacggcggatgaactggctacgtttttcggcatcacatcacgca

SEQ ID NO: 427069 - DNA, 75 bp, synthetic construct
  source 1..75: mol_type = other DNA
aacacaggaagatattaaaacagaaactgtggcggacattgtgcagtcgctgccatcgtttactgcaacgcgaga

SEQ ID NO: 427070 - DNA, 75 bp, synthetic construct
  source 1..75: mol_type = other DNA
gcgggagctgaacaagcaccgggatattgtccgacagattgttgattcctccagtcgtattgtgtcggaaaagtg

SEQ ID NO: 427071 - DNA, 75 bp, synthetic construct
  source 1..75: mol_type = other DNA
tgcgccgcgctgcgggagctgaataagcaccgggatattgttcgacagattgttgattcctccagtcgtattgtg

SEQ ID NO: 427072 - DNA, 75 bp, synthetic construct
  source 1..75: mol_type = other DNA
agtacaggaggctgcaacacaggaagatattaaaacagaaactgtggcggacattgtgcagtcgttgccaccgtt

SEQ ID NO: 427073 - DNA, 75 bp, synthetic construct
  source 1..75: mol_type = other DNA
ggcggtagtaaccgcaacggggcggctggcacgcgtaaaccagaacggtaaatttcgctactgcataccgggcga

SEQ ID NO: 427074 - DNA, 75 bp, synthetic construct
  source 1..75: mol_type = other DNA
aagtaatgggaaaagccacgtcggtggaactggccgcgcgacttgatatcagtcgtgaagaagtgctgaacgagc

SEQ ID NO: 427075 - DNA, 75 bp, synthetic construct
  source 1..75: mol_type = other DNA
tgatttaccggcagagccggaagctgcatccgtagccgtagcggaaaccgatggcaaagcctttcctcagccagc

SEQ ID NO: 427076 - DNA, 75 bp, synthetic construct
  source 1..75: mol_type = other DNA
gtcgctaaaatttcggagagcgatttaactgcgacgattgaacaacgtggcccacaaacggcggatgaactggct

SEQ ID NO: 427077 - DNA, 75 bp, synthetic construct
  source 1..75: mol_type = other DNA
agcagagccgaaagttaaatcgatagcggaaacccatggtaaagcctttcctcaaccagcaggtgttgcgttacc

SEQ ID NO: 427078 - DNA, 75 bp, synthetic construct
  source 1..75: mol_type = other DNA
ggagcgagtctgcgccgcgctgcgggagctgaacaagcaccgggatatggttgccgggatttgtcggaagtccgg

SEQ ID NO: 427079 - DNA, 75 bp, synthetic construct
  source 1..75: mol_type = other DNA
acattgtgcagtcgttgccatcgtttaccgaaacgcgtgcgaatgacctgattttaccatcactgcatctggcaa

SEQ ID NO: 427080 - DNA, 75 bp, synthetic construct
  source 1..75: mol_type = other DNA
accacaaacggcggatgagttggctacatggttcggtaccacatcacgcaaagtggctttaacgctggcaatggc

SEQ ID NO: 427081 - DNA, 75 bp, synthetic construct
  source 1..75: mol_type = other DNA
cgctgccatcgtttactgaaacgcaagcggatgacctagttttaccatcgctgcatatggcaaaccgcgaactgc

SEQ ID NO: 427082 - DNA, 75 bp, synthetic construct
  source 1..75: mol_type = other DNA
cataccagcatcgagttagtttataaaatctgtgctttcctgccgcttctgggaatgttgaccatattcttacct

SEQ ID NO: 427083 - DNA, 75 bp, synthetic construct
  source 1..75: mol_type = other DNA
atgcgtgatattcagatggttcttgagcgttggggggcgtgggcggctaataatcatgaagatgtgacctggtcg

SEQ ID NO: 427084 - DNA, 75 bp, synthetic construct
  source 1..75: mol_type = other DNA
atgatcatttgtgaatgtatggctcgcctgaaaaaaacaacagcgatttacatgatttattggtggactattatg

SEQ ID NO: 427085 - DNA, 75 bp, synthetic construct
  source 1..75: mol_type = other DNA
tacgcatattggaaagcgtttgcaaaaagctgaaggagtggttgatggtatgttgatgatgctagatgttcgcct

SEQ ID NO: 427086 - DNA, 75 bp, synthetic construct
  source 1..75: mol_type = other DNA
gtgaatgtatggctcgcctgaaaaaaaacaacagcgatttacatgatttattggtgaactattatgtcggcggca

SEQ ID NO: 427087 - DNA, 75 bp, synthetic construct
  source 1..75: mol_type = other DNA
aggaacaacagcgatctgcatgacttgctggttgattattacgtgttgggggagacgttcatggcgctggcacgg

SEQ ID NO: 427088 - DNA, 75 bp, synthetic construct
  source 1..75: mol_type = other DNA
atggtgcgtgatattcagcaggttatggagcggtggggggcgtgggctgcaaacaatcacgaagatgtgtcctgg

SEQ ID NO: 427089 - DNA, 75 bp, synthetic construct
  source 1..75: mol_type = other DNA
taaccatgaggatgttacatggtcgcccattgctgccggatttaagaggctgatccccgaaaaagtaaaatcacg

SEQ ID NO: 427090 - DNA, 75 bp, synthetic construct
  source 1..75: mol_type = other DNA
atgcgtgatatccggcaggttcttgagcgctggggtgcatgggcggcaaataactatgaggatgttacatggtcg

SEQ ID NO: 427091 - DNA, 75 bp, synthetic construct
  source 1..75: mol_type = other DNA
cgaagcacgcgcccggctgccgcacgcacatctgatttttgtcgcccgtatccgtcaggaggcatcacatggata

SEQ ID NO: 427092 - DNA, 75 bp, synthetic construct
  source 1..75: mol_type = other DNA
aacgttggggggcatgggtcgcaaataatcatgaagacgtggaatggtcaggcattgccgccggatttaaggggc

SEQ ID NO: 427093 - DNA, 75 bp, synthetic construct
  source 1..75: mol_type = other DNA
ttgctgccggatttaagggactgatccccgaaaaagtaaaatcacgtccacagtgttgtgacgatgacgcgatga

SEQ ID NO: 427094 - DNA, 75 bp, synthetic construct
  source 1..75: mol_type = other DNA
atgcgtgatattcagatagttcttgagcgttggggagcgtgggcggctaataatcatgaagatgtgacctggtcg

SEQ ID NO: 427095 - DNA, 75 bp, synthetic construct
  source 1..75: mol_type = other DNA
aaacagaaactgtggcggacatggtgcagtcgttaccatcgctcaccgaaacgcaaggggatgacctgattttac

SEQ ID NO: 427096 - DNA, 75 bp, synthetic construct
  source 1..75: mol_type = other DNA
ccccgctaaatgctcccgccgccgtcgctatctgaagtctgtcgccggtgtggtggcgggcataatcgtgctgaa

SEQ ID NO: 427097 - DNA, 75 bp, synthetic construct
  source 1..75: mol_type = other DNA
cttctgtagatactcctgaaaacactccgcgccgacgctcaaaacgtcgcaaccgatgcctgaagcctgtcgcct

SEQ ID NO: 427098 - DNA, 75 bp, synthetic construct
  source 1..75: mol_type = other DNA
agcggttctggggcttctcgctgaccataccagcatcgagttagtttataaaatctgtgctttcctgccgcttct

SEQ ID NO: 427099 - DNA, 75 bp, synthetic construct
  source 1..75: mol_type = other DNA
gttgcggcaggtacggtgatcggcgggcctgtagggggtaaaattgggcggaaatatgtgatttggggctctatc

SEQ ID NO: 427100 - DNA, 75 bp, synthetic construct
  source 1..75: mol_type = other DNA
atggcaatgagtgaacaaacccagccagtggctggcgctgctgcgtcaacgaccaaggcccgaacatcgtttggt

SEQ ID NO: 427101 - DNA, 75 bp, synthetic construct
  source 1..75: mol_type = other DNA
tgcacctgaaaaccctttagctatagtcacccccgttgttaaaggcaaattacaatatgatattcagttatcaat

SEQ ID NO: 427102 - DNA, 75 bp, synthetic construct
  source 1..75: mol_type = other DNA
aagctgcatccgtagcggaaaccgatggtaaagcctttcctcagccagcaggtgttgcgttaccagtacaggaag

SEQ ID NO: 427103 - DNA, 75 bp, synthetic construct
  source 1..75: mol_type = other DNA
cccgcaatgttgtgacgatgacgcgatgatcatttgcaggtgcatggcccgtctgaaaaagaacaacagcgattt

SEQ ID NO: 427104 - DNA, 75 bp, synthetic construct
  source 1..75: mol_type = other DNA
ccgggcgaattcatcactggcgatggctgtcagcaaaggtcgtctgattcgcgtaaatcaggacggtaaatatcg

SEQ ID NO: 427105 - DNA, 75 bp, synthetic construct
  source 1..75: mol_type = other DNA
accatcgctcaccgaaacgcaaggggatgacctgattttaccatcgctgcatatagcaaaccgcgaattgcgtcg

SEQ ID NO: 427106 - DNA, 75 bp, synthetic construct
  source 1..75: mol_type = other DNA
tttgctttagtcctgatggagttcatatcacacatgccggaatagtacctcacgaacatgatggcgatgatgcgc

SEQ ID NO: 427107 - DNA, 75 bp, synthetic construct
  source 1..75: mol_type = other DNA
gcggacagcagccaggtggggtatttcagccgtgtcgatgacgcaacccactaccagttgaacgtgggaaccagt

SEQ ID NO: 427108 - DNA, 75 bp, synthetic construct
  source 1..75: mol_type = other DNA
ttaaagctgacctgagtcagtcagcgttagtcatttcattaccccaggcttaccttgaatataccgacaccgact

SEQ ID NO: 427109 - DNA, 75 bp, synthetic construct
  source 1..75: mol_type = other DNA
ggtggcagtgtcagtactgacgatcaaatgttgcctcccaatctgcgcggctacgcgccagacatttccggcgtg

SEQ ID NO: 427110 - DNA, 75 bp, synthetic construct
  source 1..75: mol_type = other DNA
agtttgactctcgttttctggaattaaaagacgacacgaaaatcgatctgaagcgattttccagccagggatatg

SEQ ID NO: 427111 - DNA, 75 bp, synthetic construct
  source 1..75: mol_type = other DNA
gtctacctcgcgggcgtcaaacctggcgagcatatgatcgtttcatggggcggtgtggcccactgcgatattcat

SEQ ID NO: 427112 - DNA, 75 bp, synthetic construct
  source 1..75: mol_type = other DNA
tgtttggtaaagccgtcgtttctgacgtcaataactattaccgcaatcaggcgtatatcgacctcaacaaactgc

SEQ ID NO: 427113 - DNA, 75 bp, synthetic construct
  source 1..75: mol_type = other DNA
gccgaaattgatgaaaaccgcaagctggatctggtatttgataccgatccggccagtgataaaggaggcagcagt

SEQ ID NO: 427114 - DNA, 75 bp, synthetic construct
  source 1..75: mol_type = other DNA
gtcggccatagtgaaggcgatgtatgcagcgacgattgaaagtgaactggataccgaaaaggcctttgaatatat

SEQ ID NO: 427115 - DNA, 75 bp, synthetic construct
  source 1..75: mol_type = other DNA
cgaacagttgtcccgtgattactcgaaggtcagttattcaagtgccagggcctctgccaatgagtcgtggcgcta

SEQ ID NO: 427116 - DNA, 75 bp, synthetic construct
  source 1..75: mol_type = other DNA
acggtgtcagtaactggacacggattgcggcgacgctgccctccgggcggccgggaatgatccatgtgtttcagc

SEQ ID NO: 427117 - DNA, 75 bp, synthetic construct
  source 1..75: mol_type = other DNA
taacgatctcggcgagccagagtggttattttcgcgcgcgctgggtgctgagagatcccctcataatttccccaa

SEQ ID NO: 427118 - DNA, 75 bp, synthetic construct
  source 1..75: mol_type = other DNA
gcgaagaaatcggaatggtgaagtcggatcgcccaatcctaaccttgaaacttttcgtaatgctcagttgcgtgc

SEQ ID NO: 427119 - DNA, 75 bp, synthetic construct
  source 1..75: mol_type = other DNA
gacgatgttatcaacggtgatgacacgcaaaaaaactgggagtggagccgctactacgcctggcgggccttaccg

SEQ ID NO: 427120 - DNA, 75 bp, synthetic construct
  source 1..75: mol_type = other DNA
gttcagcaggcggtggaccactgtccaaatctgttggcatttcacttcacgctctattcggcagaaggaatctat

SEQ ID NO: 427121 - DNA, 75 bp, synthetic construct
  source 1..75: mol_type = other DNA
gaacaacatgaaggagcaacaatgcgatgcctgttgctgctcagccagacgagcatttgccatccgcgggccagt

SEQ ID NO: 427122 - DNA, 75 bp, synthetic construct
  source 1..75: mol_type = other DNA
atggaggagcaacaatacgatgcctgttgctgttcagccaggagcttttctgccatccgcgagccagtgtgacag

SEQ ID NO: 427123 - DNA, 75 bp, synthetic construct
  source 1..75: mol_type = other DNA
gtgaggcgaaaggggctgaggcgctggctgaaaaactggcggcgtttcccggaatgactgtggagtctgcccgag

SEQ ID NO: 427124 - DNA, 75 bp, synthetic construct
  source 1..75: mol_type = other DNA
gccagtgtcacagttgatgaagaatgttcgcaagtggtggatttactgcaacagacctggcgggtgataagccca

SEQ ID NO: 427125 - DNA, 75 bp, synthetic construct
  source 1..75: mol_type = other DNA
agttgatgaacaatgttcgcaagtggtggatttactgcaacagagctggcaggtgataagcgctggcggacaatg

SEQ ID NO: 427126 - DNA, 75 bp, synthetic construct
  source 1..75: mol_type = other DNA
tcaggtgcgctataagatcatgatgggtcgtccgcaagagtgggggcatcatgttgaaggcgaatttttctctgg

SEQ ID NO: 427127 - DNA, 75 bp, synthetic construct
  source 1..75: mol_type = other DNA
agtggagtcgctattatgcctggcgggcgttaccgtcattaaaagccaaactggcgctgggcgaagattacctca

SEQ ID NO: 427128 - DNA, 75 bp, synthetic construct
  source 1..75: mol_type = other DNA
tggcagatgaacactatcagtcggcggcgcttggcgtcggtcgcgacctgtctgtgtttggtgcggtggcctttg

SEQ ID NO: 427129 - DNA, 75 bp, synthetic construct
  source 1..75: mol_type = other DNA
gttttctgcgggccggggtggaggtcgatcgatatgggcgtgccgttgcgtaccatatctgtgaggatgattttc

SEQ ID NO: 427130 - DNA, 75 bp, synthetic construct
  source 1..75: mol_type = other DNA
accatgccaaatgggaagtgcataattttagcatgggctaccaacggcaggtgaccggagatacggtgatgctgc

SEQ ID NO: 427131 - DNA, 75 bp, synthetic construct
  source 1..75: mol_type = other DNA
atcgccggcgcgccacaggagcagaaggataatccgcttattaatattctggagaagttctccagctggtatgac

SEQ ID NO: 427132 - DNA, 75 bp, synthetic construct
  source 1..75: mol_type = other DNA
cgccggcgcgccacaggagcagaaggataatccgcttattaatattctggagaagttttccagctggtatgacac

SEQ ID NO: 427133 - DNA, 75 bp, synthetic construct
  source 1..75: mol_type = other DNA
tgcattgcgtatttttggaggaataccgttcttttattggtgtcatttcttctttgatatgggctttaatttcct

SEQ ID NO: 427134 - DNA, 75 bp, synthetic construct
  source 1..75: mol_type = other DNA
gcagcgacgattgaaagtgaacttgataccgaaaaggcctttgaatatatcgcgggggcaccgcagggtcagcag

SEQ ID NO: 427135 - DNA, 75 bp, synthetic construct
  source 1..75: mol_type = other DNA
cagcctgcgcgagcaattcagcagattgatacagaaatatctaacctgcagaagcttggtaaggttgctgataac

SEQ ID NO: 427136 - DNA, 75 bp, synthetic construct
  source 1..75: mol_type = other DNA
tcgagccggtggaggacgggcagacccgtggggccaatcagttttacagcgtcatggaacggctgaagatgctag

SEQ ID NO: 427137 - DNA, 75 bp, synthetic construct
  source 1..75: mol_type = other DNA
tcgagccggtggaggacgggcagacccgtggggcaaatcagttttacagcgtcatggaacggctgaagatgctcg

SEQ ID NO: 427138 - DNA, 75 bp, synthetic construct
  source 1..75: mol_type = other DNA
agcggctaatgcggtggccctgcataaggatcacattgtcgggcatatgtttctgatcagctaccgtccgaactg

SEQ ID NO: 427139 - DNA, 75 bp, synthetic construct
  source 1..75: mol_type = other DNA
gaagggaaacgcacgtttacggaatttatccgtgaaggtgtgggagttcatgcgtttaacggcgaaatctttgtg

SEQ ID NO: 427140 - DNA, 75 bp, synthetic construct
  source 1..75: mol_type = other DNA
gaagggaaacgcacgtttaccgaatttatacgtgaaggtgtgggcgttcatgcgtttaacggcgaaatctttgtg

SEQ ID NO: 427141 - DNA, 75 bp, synthetic construct
  source 1..75: mol_type = other DNA
gaagggaaacgcacgtttactgaatttatccgtgaaggtgtgggtgttcatgcgtttaacggcgaaatctttgtg

SEQ ID NO: 427142 - DNA, 75 bp, synthetic construct
  source 1..75: mol_type = other DNA
ctacaggtcagcaaaccattccgttcattatcggatatgggacagcaatgaaccctgcgacaactggcgctgcag

SEQ ID NO: 427143 - DNA, 75 bp, synthetic construct
  source 1..75: mol_type = other DNA
tcgcaatgctggccctgatggtccggtaaatctggatttgaagcaattaagcgatctgcgcagccagttcagaat

SEQ ID NO: 427144 - DNA, 75 bp, synthetic construct
  source 1..75: mol_type = other DNA
agccgtgagtccgaaacgggtggacacgccaggacagggtatcgggaaccgttttctgcgggccggtgtggaggt

SEQ ID NO: 427145 - DNA, 75 bp, synthetic construct
  source 1..75: mol_type = other DNA
cgaacagttgtcccgggattactcgaaggtcagttattcaagtgccagcgcctccgccaatgagtcgtggcgcta

SEQ ID NO: 427146 - DNA, 75 bp, synthetic construct
  source 1..75: mol_type = other DNA
atctggtgcgcaataacggaatagcggccaatgcggtggccctgcataaggatcatattgtcgggcatatgtttc

SEQ ID NO: 427147 - DNA, 75 bp, synthetic construct
  source 1..75: mol_type = other DNA
tttgatttttatcaggcgcgatcagcctggtcacgggctgagtggattggagccggaagaatggccattgacggg

SEQ ID NO: 427148 - DNA, 75 bp, synthetic construct
  source 1..75: mol_type = other DNA
gcataaggatcatattgtcgggcatatgtttctgatcagctaccgtccgaactggcgctggctggggatgcggga

SEQ ID NO: 427149 - DNA, 75 bp, synthetic construct
  source 1..75: mol_type = other DNA
cgcgttcagcctggtcgcgggctgagtggattggtgccggaagaatggccattgacgggctcaaggaggttcagg

SEQ ID NO: 427150 - DNA, 75 bp, synthetic construct
  source 1..75: mol_type = other DNA
ggcagaaggataatccgcttattaatattctggagaagttctccacctggtatgacacgaataacgtgacgctgg

SEQ ID NO: 427151 - DNA, 75 bp, synthetic construct
  source 1..75: mol_type = other DNA
tcttcgggggattattcgtccgccacgggcacgttttgatttttatcaggcgcgttcagcctggtcacgggctga

SEQ ID NO: 427152 - DNA, 75 bp, synthetic construct
  source 1..75: mol_type = other DNA
aacatcgaatgaaataaaagttgcttatcctaattatggttctttgacagaatttgattatatgtatccagctca

SEQ ID NO: 427153 - DNA, 75 bp, synthetic construct
  source 1..75: mol_type = other DNA
aaaattccgcaccttttttcctggcgatgcgctgaacctgcagacagcgcaggattcagacaatggattttcggc

SEQ ID NO: 427154 - DNA, 75 bp, synthetic construct
  source 1..75: mol_type = other DNA
atatcgcgctacaggccgcgcagccgctggtgcacggcgtatcgttaaccctgcaacgtgggcgtgtgctggcgt

SEQ ID NO: 427155 - DNA, 75 bp, synthetic construct
  source 1..75: mol_type = other DNA
attgcgatggcggtgttgtgtgaatcgccgtttatcatcgccgatgaaccgaccaccgatctcgacgtggtagca

SEQ ID NO: 427156 - DNA, 75 bp, synthetic construct
  source 1..75: mol_type = other DNA
acgggcaacctttgcggcagagtatgggatattccggcagcggctccggattcggagggcaactggctgaatggt

SEQ ID NO: 427157 - DNA, 75 bp, synthetic construct
  source 1..75: mol_type = other DNA
agggctcgaagaagaagagtcccccggtggtcgttattacttccgtttcgagtaccgtggcaccgctgttgaaat

SEQ ID NO: 427158 - DNA, 75 bp, synthetic construct
  source 1..75: mol_type = other DNA
tcccgtcaccatctggcagacactgctgtcccggttgctggaccagcactatggcctcacactgaatgacacacc

SEQ ID NO: 427159 - DNA, 75 bp, synthetic construct
  source 1..75: mol_type = other DNA
cgatattctccgggcccgccgggcaacaggcctgatgacacgtaataactacagaatggtaaataacattaccct

SEQ ID NO: 427160 - DNA, 75 bp, synthetic construct
  source 1..75: mol_type = other DNA
agcagaaattccgtggaaatcatggactggttacattcttggcgaaaagatacccaccagctatgaagtaaatgc

SEQ ID NO: 427161 - DNA, 75 bp, synthetic construct
  source 1..75: mol_type = other DNA
acggcctcacactgaatgacacaccgttggctgatgaacgtgtgattgagcagcatattgaagcagggatttcac

SEQ ID NO: 427162 - DNA, 75 bp, synthetic construct
  source 1..75: mol_type = other DNA
atgaaaacattacctgtattacccgggcaggcggccagctcacgcccgtctccggttgaaatctggcagacactg

SEQ ID NO: 427163 - DNA, 75 bp, synthetic construct
  source 1..75: mol_type = other DNA
agaaagaccgctcaccagaagaagagatcattttggctgaaatgaagctcgaaatgggagaacgcttgttagtcc

SEQ ID NO: 427164 - DNA, 75 bp, synthetic construct
  source 1..75: mol_type = other DNA
aaatgcttttattatagctgcattttattcacttacatgtcttcattatccactctacaacgatgttgatttaat

SEQ ID NO: 427165 - DNA, 75 bp, synthetic construct
  source 1..75: mol_type = other DNA
tgtgtgacgcggtgaactttctcgttaaaaaatccgcgctggtgcgtaccgaccagccccggttcagcacttgtc

SEQ ID NO: 427166 - DNA, 75 bp, synthetic construct
  source 1..75: mol_type = other DNA
ctcacccgactgctggaccagcattacggccttacgctgaatgacacaccgtttgccgatgaacgtgtgattgag

SEQ ID NO: 427167 - DNA, 75 bp, synthetic construct
  source 1..75: mol_type = other DNA
aacagtccccatatctgcgggcagtcgatattctgcgggcgcggcaggcaactggtttattgaaaagaaatcgta

SEQ ID NO: 427168 - DNA, 75 bp, synthetic construct
  source 1..75: mol_type = other DNA
tgaaaaatacgcactggtgcgtaccgaccagccgggattcagtgcctgtagtcgttctcagttaataaacagtat

SEQ ID NO: 427169 - DNA, 75 bp, synthetic construct
  source 1..75: mol_type = other DNA
atacgcgctggtgcgtaccgaccagccgggattcagcgcctgtacccgatctcagttaataaacagaattgatat

SEQ ID NO: 427170 - DNA, 75 bp, synthetic construct
  source 1..75: mol_type = other DNA
aatacgcgctggtacgaactgaccagccgggattcagcgcaggagtcccgtcgcagttaatcaacagcatcgata

SEQ ID NO: 427171 - DNA, 75 bp, synthetic construct
  source 1..75: mol_type = other DNA
cagcatattgaggcgggtatttcactgtgcgatgcagtgaactttctcgttgaaaaatacacactggtgcgtacc

SEQ ID NO: 427172 - DNA, 75 bp, synthetic construct
  source 1..75: mol_type = other DNA
cctccgggctcgcggggcgactggcctgatgaccagcgacaattacagaacggtaaataacattaccctgggtaa

SEQ ID NO: 427173 - DNA, 75 bp, synthetic construct
  source 1..75: mol_type = other DNA
tagtgaaagatatcgacggtgaagtgaccacgctggagaagtacgccggtaatgtgctgttgattgtcaatgtcg

SEQ ID NO: 427174 - DNA, 75 bp, synthetic construct
  source 1..75: mol_type = other DNA
cctccgggctcgccgggcgaccggcctgatgacccgcgacaattacagaatggtaaatgacattagccaggggaa

SEQ ID NO: 427175 - DNA, 75 bp, synthetic construct
  source 1..75: mol_type = other DNA
cctgatgacccgcgacaattacagaacggtaaatgacattaccctgggcaggcatccggaggaggcgaaacaatg

SEQ ID NO: 427176 - DNA, 75 bp, synthetic construct
  source 1..75: mol_type = other DNA
atacgcgctggtgcgtaccgaccagccgggattcagcgcctgtacccgctctcagttaataaacagcattgatat

SEQ ID NO: 427177 - DNA, 75 bp, synthetic construct
  source 1..75: mol_type = other DNA
atacgcgctggtgcgtaccgaccagccgggattcagcgcctgtacccgttctcagttaataaacaggatagatat

SEQ ID NO: 427178 - DNA, 75 bp, synthetic construct
  source 1..75: mol_type = other DNA
atacgcgctggtgcgtaccgaccagccgggattcagcgcctgtacccgttctcagttaataaacagaatggatat

SEQ ID NO: 427179 - DNA, 75 bp, synthetic construct
  source 1..75: mol_type = other DNA
cctccgggctcgccgggctactggcctgatgatcagcgacaattacagaacggtaaataacattaccctgggtaa

SEQ ID NO: 427180 - DNA, 75 bp, synthetic construct
  source 1..75: mol_type = other DNA
cctccgggctcgcagggcaactggcctgatgagcagcgacaattacagaacggtaaataacattaccctgggtaa

SEQ ID NO: 427181 - DNA, 75 bp, synthetic construct
  source 1..75: mol_type = other DNA
atacgcgctggtgcgtaccgaccagccgggattcagcgcctgtacccggtctcagttaataaacaggattgatat

SEQ ID NO: 427182 - DNA, 75 bp, synthetic construct
  source 1..75: mol_type = other DNA
attagttactggtgaattatctaaaaaagaaataatacttttaaatgagatttctaaaattgacgtaatggatta

SEQ ID NO: 427183 - DNA, 75 bp, synthetic construct
  source 1..75: mol_type = other DNA
tgcggtggcgattaccaacacagatcatgtgctggcctatgttggcgtgggcgaacataactatcagaatggcga

SEQ ID NO: 427184 - DNA, 75 bp, synthetic construct
  source 1..75: mol_type = other DNA
agcatcattgcgccgcagggatatgaaattgtatgtaaaccggatacccgaccggacagccgaatcacgcaactc

SEQ ID NO: 427185 - DNA, 75 bp, synthetic construct
  source 1..75: mol_type = other DNA
cacaactcaaccgtgatcaaattcagcgccttgccacactaacggcggcggcattttccaccgaactggaacgca

SEQ ID NO: 427186 - DNA, 75 bp, synthetic construct
  source 1..75: mol_type = other DNA
cactgacccccacagagagaaaacaactcaccaggcagctgaaagatgcgccatctgacacaaaaaccgtgaaaa

SEQ ID NO: 427187 - DNA, 75 bp, synthetic construct
  source 1..75: mol_type = other DNA
cgttggtggagaacgccattgtccacggtatccagccttgcaaaggtaaaggcgttgtcaccatcagcgttgcag

SEQ ID NO: 427188 - DNA, 75 bp, synthetic construct
  source 1..75: mol_type = other DNA
aagcacagcgctggcgcgtcggtattctcggtggcatgttatgtgaaacgttgacgatgattctggtgattgtct

SEQ ID NO: 427189 - DNA, 75 bp, synthetic construct
  source 1..75: mol_type = other DNA
catgcgactgaccgggatgctgtaccggaatccggatcttgctgagcgggaagacctcgtgcagggggaactgcc

SEQ ID NO: 427190 - DNA, 75 bp, synthetic construct
  source 1..75: mol_type = other DNA
ttattcgtgaaggtgtgggagtgcatgcctttaacggcgaaatctttgtgcagccggtctgggatgcggaaagta

SEQ ID NO: 427191 - DNA, 75 bp, synthetic construct
  source 1..75: mol_type = other DNA
agcagaaccggtctctgcatccacaaccgccctgtttgaacggttcatggcgaaccattcaccggcagcggtgta

SEQ ID NO: 427192 - DNA, 75 bp, synthetic construct
  source 1..75: mol_type = other DNA
gcatacgaaactgccgaagaggccaacgactacggcgaattcccgcaacgtatttacggcgtccgcgccccgtca

SEQ ID NO: 427193 - DNA, 75 bp, synthetic construct
  source 1..75: mol_type = other DNA
aatcgacccggcaaaaggcacaccgacaagctatatcgcgacctatatcggtaagaacctggacgccagcgcctt

SEQ ID NO: 427194 - DNA, 75 bp, synthetic construct
  source 1..75: mol_type = other DNA
aatccggatcttgctgagcgggaagacctcgtgcagggggaactgccgttttctgtgtccgtgctgatttacgat

SEQ ID NO: 427195 - DNA, 75 bp, synthetic construct
  source 1..75: mol_type = other DNA
ccaccacgacggtacaccgcactggcacatgctggtattcaccagccaggaaaacgaagcccgtatcactgaaat

SEQ ID NO: 427196 - DNA, 75 bp, synthetic construct
  source 1..75: mol_type = other DNA
accggcctgatgacccgcgacaattacagaacggtaaataacattacccaagggaagcatccggaggcgaaacaa

SEQ ID NO: 427197 - DNA, 75 bp, synthetic construct
  source 1..75: mol_type = other DNA
atgaaccacgaccagccattgatccggccagatttacggagcacaggcaggaaactgaaaccgacctacaacgcg

SEQ ID NO: 427198 - DNA, 75 bp, synthetic construct
  source 1..75: mol_type = other DNA
aaattgtacgcaaaccggatacccgcccggacagccgaatcacgcagctctggcagcgcctgagccgtaatcatg

SEQ ID NO: 427199 - DNA, 75 bp, synthetic construct
  source 1..75: mol_type = other DNA
tactgttgaagaatttaatatgataagagatctggcagatgcctctgtcagtgttgatgaaattacaaatagtat

SEQ ID NO: 427200 - DNA, 75 bp, synthetic construct
  source 1..75: mol_type = other DNA
aaagcattatgcaaaaacaagcgccgggaatgctgctggttacccatgatatgggcgtggtagcgcgtctggcag

SEQ ID NO: 427201 - DNA, 75 bp, synthetic construct
  source 1..75: mol_type = other DNA
gctggtgcacggcgtatcgttaaccctgcaacgcgggcgcgtgctggcgttagtcggcggtagcggcagcgggaa

SEQ ID NO: 427202 - DNA, 75 bp, synthetic construct
  source 1..75: mol_type = other DNA
tttctccgcgcttcaagtgcgaaaaaatcgacccggcaaaaggcacaccggcaagctacatcgcaacctatatcg

SEQ ID NO: 427203 - DNA, 75 bp, synthetic construct
  source 1..75: mol_type = other DNA
acaatgaagaacgcatcattgaaatcatgcgtgacgcagcaatcaaatcagatcgcgcagaactggggaatgata

SEQ ID NO: 427204 - DNA, 75 bp, synthetic construct
  source 1..75: mol_type = other DNA
ggttatcgatcctgaaacgttcggcagggcacagccaaccgcattacgccaggccattcagagctacatcaacga

SEQ ID NO: 427205 - DNA, 75 bp, synthetic construct
  source 1..75: mol_type = other DNA
cgcattatgacgcactgacaacagacaaagaccggaggcacgaaccggacacagaactgctgccgggcgcaatcc

SEQ ID NO: 427206 - DNA, 75 bp, synthetic construct
  source 1..75: mol_type = other DNA
ttgccattcaggaagatcgtcacgagctgggcgatgatattactccgcgctttaaggcggagtatgtcgacggct

SEQ ID NO: 427207 - DNA, 75 bp, synthetic construct
  source 1..75: mol_type = other DNA
acaccacaccggcatctgacacccctgtaagggtggggattgtcgtgcctgcggataccgcgacggacacgcaaa

SEQ ID NO: 427208 - DNA, 75 bp, synthetic construct
  source 1..75: mol_type = other DNA
actggctgacaggcctgtgcagtgcagggttctggttcctgctgttgcttctgttcaggcaatacacctcttacc

SEQ ID NO: 427209 - DNA, 75 bp, synthetic construct
  source 1..75: mol_type = other DNA
agtcaatgtacagttttttcttgacgcagaaaccagggcgcagctcaaagaattatcgagggtcagaagactcag

SEQ ID NO: 427210 - DNA, 75 bp, synthetic construct
  source 1..75: mol_type = other DNA
taacgaacttaatcaggactggagagagcgccgggctgattcttgcctgatgcagaacatgcgtgaaaagcgtaa

SEQ ID NO: 427211 - DNA, 75 bp, synthetic construct
  source 1..75: mol_type = other DNA
gatgaagatcagaccatcaacctcggtgaagtggctaataaagtattaaacaatggacaaaaatctttacctgtt

SEQ ID NO: 427212 - DNA, 75 bp, synthetic construct
  source 1..75: mol_type = other DNA
ttgttgcaactgcactattatcaggcgttgcttttaatgtactggcagacgaccctaatcagggttccggtaaaa

SEQ ID NO: 427213 - DNA, 75 bp, synthetic construct
  source 1..75: mol_type = other DNA
accttttacgacaatatccacagcttggcattgatggcgcgctggtggtggcgaccgataagggcgcaccagacg

SEQ ID NO: 427214 - DNA, 75 bp, synthetic construct
  source 1..75: mol_type = other DNA
gctttcaggcaataaacgccgcagtgtactgaaccttgacggtcagttagtcgattacagccagggccgtaacta

SEQ ID NO: 427215 - DNA, 75 bp, synthetic construct
  source 1..75: mol_type = other DNA
aggtggtgaagcagtatatggcaaaacgctggagcgaaaaattccacggccagcgcgatatccaggcacaactga

SEQ ID NO: 427216 - DNA, 75 bp, synthetic construct
  source 1..75: mol_type = other DNA
ggcccaatcgccgggattggcgatgcgattttctggtttactttgttgccgattatggcgggaatttgctcataa

SEQ ID NO: 427217 - DNA, 75 bp, synthetic construct
  source 1..75: mol_type = other DNA
agtaaaccacttaatagacaactacttagatgatgcggtgaaagatctaataagcaaagaagaacttaagaaaaa

SEQ ID NO: 427218 - DNA, 75 bp, synthetic construct
  source 1..75: mol_type = other DNA
atcggcgctgaaagccgtgcagttacggcttgatcagaacagcagcgatccgatattcgccacccgccagatggc

SEQ ID NO: 427219 - DNA, 75 bp, synthetic construct
  source 1..75: mol_type = other DNA
cgctgaccgtcctgcgtgacaacacacagccaggcgtcttttctgaaaaactctctgccaaagaacgggaggaag

SEQ ID NO: 427220 - DNA, 75 bp, synthetic construct
  source 1..75: mol_type = other DNA
cagctaaccgatgtgctggcggagtttgagcaagaagctgaacagtttgccgcactgaatatcaacgccaacgat

SEQ ID NO: 427221 - DNA, 75 bp, synthetic construct
  source 1..75: mol_type = other DNA
tgacgggtgggctgattatgggcgtcgctttttctgctatggcgcatccggaattaaaaagctcggttccgcagg

SEQ ID NO: 427222 - DNA, 75 bp, synthetic construct
  source 1..75: mol_type = other DNA
caatgtcacggcaatattgcttaacctgcaacatccgacccagagcggactttggttatttgactgcggtgaagg

SEQ ID NO: 427223 - DNA, 75 bp, synthetic construct
  source 1..75: mol_type = other DNA
gtatccgtgaatttgtggaaaccgcgctgcggattagcggctcatggaccgattatccgctggaaattgtcgaaa

SEQ ID NO: 427224 - DNA, 75 bp, synthetic construct
  source 1..75: mol_type = other DNA
gatgtcaccattcacttgcaggattgtattttatctgacggcactaacactgttgataaagtcaaaatcaccttt

SEQ ID NO: 427225 - DNA, 75 bp, synthetic construct
  source 1..75: mol_type = other DNA
atgaaatacaagccggatcaatacatcatctctgatagttacggagtttattacgtcaggatctcaattcctata

SEQ ID NO: 427226 - DNA, 75 bp, synthetic construct
  source 1..75: mol_type = other DNA
ggtgttatgtttcgatgtattggaaggaaagacagctaacgcttccaggctaatcccatgccatagtgcgattaa

SEQ ID NO: 427227 - DNA, 75 bp, synthetic construct
  source 1..75: mol_type = other DNA
accagatcgcccggaaagtgaatgccggtggtgccggtcatgaccgggtgcagattgtggccgccctgatggcaa

SEQ ID NO: 427228 - DNA, 75 bp, synthetic construct
  source 1..75: mol_type = other DNA
ccgcgtgcaggtcgtcgccgcgctgatggccatagatgccggactcgagcggctgcggcatgctgtgctggaaaa

SEQ ID NO: 427229 - DNA, 75 bp, synthetic construct
  source 1..75: mol_type = other DNA
tcctgttcgaaaatctggtggatgtcgatgatcgcagcatccagcgcctgttgcaggaagtggattcagaatcgc

SEQ ID NO: 427230 - DNA, 75 bp, synthetic construct
  source 1..75: mol_type = other DNA
gctcatggaccgattatccgctggaaattgtcgaaattggcgctggcgaaattttcgatgatggcctgcgcaaag

SEQ ID NO: 427231 - DNA, 75 bp, synthetic construct
  source 1..75: mol_type = other DNA
agccagtatacactccgctagcgctacgtgactggttcagggctgcgccccgaaacctgctaaaaccactgacgc

SEQ ID NO: 427232 - DNA, 75 bp, synthetic construct
  source 1..75: mol_type = other DNA
gtggttctgtttgagaagaatacccgaattggggagatctggaacccctggagtggtggcgctggcactgttgca

SEQ ID NO: 427233 - DNA, 75 bp, synthetic construct
  source 1..75: mol_type = other DNA
ctcatttcccttttttctttgttggaattttcctatcccatattagcaattaatttttttaacagctatcaggga

SEQ ID NO: 427234 - DNA, 75 bp, synthetic construct
  source 1..75: mol_type = other DNA
gtcatttagcgcatggcagcgcgtttgatctgctggcgttaggtgtcgctggctggatgcgttatgtcggtggcg

SEQ ID NO: 427235 - DNA, 75 bp, synthetic construct
  source 1..75: mol_type = other DNA
aagcgacactccctgtttatgatcgtaataacctggctccaagaattgttcatttaggctttggtgcatttcacc

SEQ ID NO: 427236 - DNA, 75 bp, synthetic construct
  source 1..75: mol_type = other DNA
gcgtgacgttgtcacttcatatgccagggctgtagatgtaaaactggcgcaatggatagaagaaaacgtgacttt

SEQ ID NO: 427237 - DNA, 75 bp, synthetic construct
  source 1..75: mol_type = other DNA
aacagtctcgccattccacctgcagatgccatcgatcgtcaggagcgtctggtgctcattcagtatcggcccaaa

SEQ ID NO: 427238 - DNA, 75 bp, synthetic construct
  source 1..75: mol_type = other DNA
accttcgagagctataaagtcttttgtgcctggtcgattttttcgctatgggcatttttcggctggtacacctta

SEQ ID NO: 427239 - DNA, 75 bp, synthetic construct
  source 1..75: mol_type = other DNA
ttcttcgccgccgctgggtgcgcctgcgcttatatcgttttcctggttctgttttgaccgattaccgaatactga

SEQ ID NO: 427240 - DNA, 75 bp, synthetic construct
  source 1..75: mol_type = other DNA
tatcatggtaatgagttgtaaaggtcttgatattaacagcggcgcgctggactctaacgaagcggaagctgaaat

SEQ ID NO: 427241 - DNA, 75 bp, synthetic construct
  source 1..75: mol_type = other DNA
tttcgcgttatggtctgacttttcagggaaatatcctttcagtaaactgtcagtgctggatgttcacccgtgtcc

SEQ ID NO: 427242 - DNA, 75 bp, synthetic construct
  source 1..75: mol_type = other DNA
tggaaatatcctttcagtaaactgtcagtgccggatgctcacccgtgtccggcgcacgcactccacctcacccgt

SEQ ID NO: 427243 - DNA, 75 bp, synthetic construct
  source 1..75: mol_type = other DNA
acgtgactttcccatcaacaatggtggaccgtattgtgcccgcagtgacagaggatacgctggcgaaaatcgaac

SEQ ID NO: 427244 - DNA, 75 bp, synthetic construct
  source 1..75: mol_type = other DNA
aagcgacactccctgtttatgatcgtaataacctggcgcccaaaattgtccatttagggtttggcgcatttcatc

SEQ ID NO: 427245 - DNA, 75 bp, synthetic construct
  source 1..75: mol_type = other DNA
ttgaagataactttgttgccggacgcccggaatgggaaaaagcgggagccgaactggttagtgatgtactgccat

SEQ ID NO: 427246 - DNA, 75 bp, synthetic construct
  source 1..75: mol_type = other DNA
tggaaagatctccttatttacggcggactggctgttgccagttgcgtactgactgttcttccctgggggctggca

SEQ ID NO: 427247 - DNA, 75 bp, synthetic construct
  source 1..75: mol_type = other DNA
tatcgcttacataaaaaaaaacagagaaaatctgaacatcacactttcagattttgaacttgaacaaataatttc

SEQ ID NO: 427248 - DNA, 75 bp, synthetic construct
  source 1..75: mol_type = other DNA
cctggatcgcgggcagtgaacgtgcatgcttattttcctggtatctgttgatgcagtttatccagaataacagga

SEQ ID NO: 427249 - DNA, 75 bp, synthetic construct
  source 1..75: mol_type = other DNA
gaatcgcaaaagtgctacatacgtgaagttatgacgcataaagaatacgatttctttaccgccgttcatcgtact

SEQ ID NO: 427250 - DNA, 75 bp, synthetic construct
  source 1..75: mol_type = other DNA
gataacgtccgctttggactggagtttgagaaatccgcctttggtaagtacaacgttgataatgcagtcaacgct

SEQ ID NO: 427251 - DNA, 75 bp, synthetic construct
  source 1..75: mol_type = other DNA
gtaacatcctcctgaaatccagttttgacaatggtgctggcggtcttgtctttaatgataaaaagacatatcaga

SEQ ID NO: 427252 - DNA, 75 bp, synthetic construct
  source 1..75: mol_type = other DNA
cagtttcaataaggccaaggcacagcgcaagtacaaaaaaatgcaggaagataaagtcaatgtacagttttttct

SEQ ID NO: 427253 - DNA, 75 bp, synthetic construct
  source 1..75: mol_type = other DNA
tcgatccatttattgcattctggctggtggcagggatgtgcagcttctggctggcaatgcaggcacaaacgagga

SEQ ID NO: 427254 - DNA, 75 bp, synthetic construct
  source 1..75: mol_type = other DNA
aatagcctcgccattccgcccgcagatgtcatcgatcgtcaggagcgtctggtgctaattcagtatcggcccaaa

SEQ ID NO: 427255 - DNA, 75 bp, synthetic construct
  source 1..75: mol_type = other DNA
accaatgggcacgcctgtctggcagactttcgaaatctataaggtcttttgttcctggtcgattttttcgctgtg

SEQ ID NO: 427256 - DNA, 75 bp, synthetic construct
  source 1..75: mol_type = other DNA
cagaagagattaaattccggattcaatatcttcaggatgaagaacaaaagagagttttaagtgagctggtaaatg

SEQ ID NO: 427257 - DNA, 75 bp, synthetic construct
  source 1..75: mol_type = other DNA
tggagcagattacccgtgaatacgaacgaagaatacaaaactgtccaccgttcaggagcgagaaggaagcggaat

SEQ ID NO: 427258 - DNA, 75 bp, synthetic construct
  source 1..75: mol_type = other DNA
aatggctgatgccgcagcaaatggagaccttcaactttacatcgacttaaggaaagtattaaggcgaatggtcag

SEQ ID NO: 427259 - DNA, 75 bp, synthetic construct
  source 1..75: mol_type = other DNA
tgcgtgaggtggcagaggccgcgaagggggatacgacgtggcagagcctacaggcttttcgtgctgcggctacgc

SEQ ID NO: 427260 - DNA, 75 bp, synthetic construct
  source 1..75: mol_type = other DNA
tgcgtgaggtggcagaggccgcgaagggggatacgacgtggcagaacctacaggcttttcatgctgcggctacgc

SEQ ID NO: 427261 - DNA, 75 bp, synthetic construct
  source 1..75: mol_type = other DNA
atccgccagtcgaaaccggagcatggaaagacgcggttgactgggtactcaacgaggcttgccaggctgtaaata

SEQ ID NO: 427262 - DNA, 75 bp, synthetic construct
  source 1..75: mol_type = other DNA
cgcgctggattcgtgggtactgaacctgacgcaaagcgtcgcctacagcgaggccgaccgtgaagagatccagcg

SEQ ID NO: 427263 - DNA, 75 bp, synthetic construct
  source 1..75: mol_type = other DNA
ccggctttgccgcgctgttccattcactggataaaaaagaccgcgatgcgatcctcggcgtcacgtttacccgcc

SEQ ID NO: 427264 - DNA, 75 bp, synthetic construct
  source 1..75: mol_type = other DNA
gctggcggatcaggcctggcatgtagtgatggtggaagccgttcgttacatggaagtggactggcgcgacaatgt

SEQ ID NO: 427265 - DNA, 75 bp, synthetic construct
  source 1..75: mol_type = other DNA
ttcgccaacaaaattaaagatagcgggtataactatcgcggcattgtcgagttcattccatttatggtgacccgc

SEQ ID NO: 427266 - DNA, 75 bp, synthetic construct
  source 1..75: mol_type = other DNA
cacatcatggccacgtcgtatacaaaaatataagcgttaccccaaacgagaggggcggtttgttgttatccgcag

SEQ ID NO: 427267 - DNA, 75 bp, synthetic construct
  source 1..75: mol_type = other DNA
gcgtatggtcagccagacgtggctgaccatcgtcctggtgtctacactgctgacagcatcgggcgcaagcattct

SEQ ID NO: 427268 - DNA, 75 bp, synthetic construct
  source 1..75: mol_type = other DNA
gctggctgcaggatattatggggccaccaaccgctatggcacgatttcactggcctgtgctgccagccaggccgg

SEQ ID NO: 427269 - DNA, 75 bp, synthetic construct
  source 1..75: mol_type = other DNA
tactcggtaatgttgcgcatggctaatggtcctgaatttatctcgctgacactggccgactgggcggagacatat

SEQ ID NO: 427270 - DNA, 75 bp, synthetic construct
  source 1..75: mol_type = other DNA
ttgacggcagcgatgcgttaatggggccgaaggttcaggccaatgatattaagcaggccgcggaacagtttgagg

SEQ ID NO: 427271 - DNA, 75 bp, synthetic construct
  source 1..75: mol_type = other DNA
ggtaaactggacgataaggcgagagaagcggcgataaatgagctggattaccgcctgctatcccggctgggacat

SEQ ID NO: 427272 - DNA, 75 bp, synthetic construct
  source 1..75: mol_type = other DNA
cggctctggtacgcgtacaacacgaaaactgatggcgttctggcctacacttttggcccctggactgatggaacc

SEQ ID NO: 427273 - DNA, 75 bp, synthetic construct
  source 1..75: mol_type = other DNA
aaacgctctgtttttcacgttctgttgagctccatgaaaaagtcatcggggcattcatcgaaaaacacatgttct

SEQ ID NO: 427274 - DNA, 75 bp, synthetic construct
  source 1..75: mol_type = other DNA
ggaatgatgagtcctgtcgggaactgttagccctgttgactccgttctgtatcggcatggtggccagcgatgact

SEQ ID NO: 427275 - DNA, 75 bp, synthetic construct
  source 1..75: mol_type = other DNA
gtgaagctaaaaagattagttcttcagtgatacctgatgcagacaaaacacttgatatgatatttggagaaataa

SEQ ID NO: 427276 - DNA, 75 bp, synthetic construct
  source 1..75: mol_type = other DNA
gttcagcggtggtgagccctccatcaccgcccccggtatgtgcgccgtgactggcgctgttcttcaactgtggtg

SEQ ID NO: 427277 - DNA, 75 bp, synthetic construct
  source 1..75: mol_type = other DNA
agcagtggagcttcgttggtagcaaggcgcaacaacactggctttggtacgcgtataacacaaaaacgtgtggcg

SEQ ID NO: 427278 - DNA, 75 bp, synthetic construct
  source 1..75: mol_type = other DNA
ttagaggcaacgccgtttttaacgctcaccggctacgggcggcaactggtggattttgccgataagcaggtaaca

SEQ ID NO: 427279 - DNA, 75 bp, synthetic construct
  source 1..75: mol_type = other DNA
gtttactgaaggtgaagggccagcagcatatacctttaaatctgaaggtaaagcctggctgttcggtactaactt

SEQ ID NO: 427280 - DNA, 75 bp, synthetic construct
  source 1..75: mol_type = other DNA
gaatggataacctcaacttccgtgactatgaggccatgtcggccttgaccgacgcgctggagcatattatcagcg

SEQ ID NO: 427281 - DNA, 75 bp, synthetic construct
  source 1..75: mol_type = other DNA
aaacggctggcccgcaaaatgctctgtttttcacgttctgttgagctccatgaaaaagtcatcggggcattcatc

SEQ ID NO: 427282 - DNA, 75 bp, synthetic construct
  source 1..75: mol_type = other DNA
aaaacaatctgcttctcacgctcagttgagatccacgaaaaagtgatcggagcgtttatcgaaaaacatatgttc

SEQ ID NO: 427283 - DNA, 75 bp, synthetic construct
  source 1..75: mol_type = other DNA
cagtcgtgaaattgccaagcttcgcgtgcagattgcagcgttgcccaaagagtcggtcgtaatcaaggaagccac

SEQ ID NO: 427284 - DNA, 75 bp, synthetic construct
  source 1..75: mol_type = other DNA
gaccgcttgagtcggttatttatcacgaacagcagataagggatgaacaggaaaggctggcacgcctggaacggg

SEQ ID NO: 427285 - DNA, 75 bp, synthetic construct
  source 1..75: mol_type = other DNA
tgcacgcagggtgagcgctatctggagctggccgagaaacgcgaggctaacgaatcgtttgtttatggctggctg

SEQ ID NO: 427286 - DNA, 75 bp, synthetic construct
  source 1..75: mol_type = other DNA
atccgtggcgtcaaaaatgcttcagcgctggctgaatgtgttcaatctgtgcgggaggatgtacccggatatgga

SEQ ID NO: 427287 - DNA, 75 bp, synthetic construct
  source 1..75: mol_type = other DNA
tatatgcagcccttttttgaaggaaaaaggacgtttgtcagaagtctacacacaagtaatcttcgtgttgcacgt

SEQ ID NO: 427288 - DNA, 75 bp, synthetic construct
  source 1..75: mol_type = other DNA
ttcaggaagctcgaagagtctgtagacaaggcattgagcttaaacaggcagaaaatcagagacgctatcagcgaa

SEQ ID NO: 427289 - DNA, 75 bp, synthetic construct
  source 1..75: mol_type = other DNA
tgaaaaatcgtggcagggatggcgaactggtcttactaaccgcgctgaactgtacgcagggtgaccgttatctgg

SEQ ID NO: 427290 - DNA, 75 bp, synthetic construct
  source 1..75: mol_type = other DNA
atgaaatcctcggaaaagagggtggctacgtcaatcatccggacgataaaggcggggcgacaaaatggggtatta

SEQ ID NO: 427291 - DNA, 75 bp, synthetic construct
  source 1..75: mol_type = other DNA
tgtacacagggtgaacgctatctggagctggcggaaaaacgcgaagccaacgaatcgtttgtctacggctggata

SEQ ID NO: 427292 - DNA, 75 bp, synthetic construct
  source 1..75: mol_type = other DNA
cgctggctgaacgcattcaatcagggcgggaaactgtatcccgatatggacacggacggacgcactggcccacgc

SEQ ID NO: 427293 - DNA, 75 bp, synthetic construct
  source 1..75: mol_type = other DNA
gcttaaaaactatattgagcttctacgctaccctgaaatagagaaaggcttatcaataaataaaaaatcaaattt

SEQ ID NO: 427294 - DNA, 75 bp, synthetic construct
  source 1..75: mol_type = other DNA
ctgtgcgatacgggcgtcaacatggggccgactgtggctacgaagatgcttcaacgttggctgaatgttttcaac

SEQ ID NO: 427295 - DNA, 75 bp, synthetic construct
  source 1..75: mol_type = other DNA
cgctggctgaacgttttcaacctgcgcgggaaactctatccggatatggatgctgatggacgcatcgggccgcgt

SEQ ID NO: 427296 - DNA, 75 bp, synthetic construct
  source 1..75: mol_type = other DNA
accattaatgcgttacgcgcctatctgtcaaaacgtggtagagatggcgaactggtgatgctgaccgcgctgaac

SEQ ID NO: 427297 - DNA, 75 bp, synthetic construct
  source 1..75: mol_type = other DNA
tgatacaggcgaacctggaagatatcaggaagcaggaagagacattgcagaaactgaacgcgaagacatggggcg

SEQ ID NO: 427298 - DNA, 75 bp, synthetic construct
  source 1..75: mol_type = other DNA
accgtactgaaaatgagcgtgaaacgctggctgtggctgattatcgtctcagtgctgatgtttgccacgaccggg

SEQ ID NO: 427299 - DNA, 75 bp, synthetic construct
  source 1..75: mol_type = other DNA
acaggcgattgctgagagcgttacacgggggcttgatgtgctttaccgtgccggagagataaaagaccgtcagga

SEQ ID NO: 427300 - DNA, 75 bp, synthetic construct
  source 1..75: mol_type = other DNA
agaaggatgcgctggagaagctgaacgcgcggacgtggggcgtgaggtatcaggaagacaaccaggggcgttttc

SEQ ID NO: 427301 - DNA, 75 bp, synthetic construct
  source 1..75: mol_type = other DNA
ttacagacgggcgcggagttcgagaaaaagctgaaagagagagccgaatctacagagaaaatgctgaacgacgag

SEQ ID NO: 427302 - DNA, 75 bp, synthetic construct
  source 1..75: mol_type = other DNA
acatgagttatccctggagcgtgagcgtcagccggaaatacaggaacgcacactggatggtccttcactgggatg

SEQ ID NO: 427303 - DNA, 75 bp, synthetic construct
  source 1..75: mol_type = other DNA
acatgcgttatccctggcgcgtgagcgccagccggaaatacaggaacggacactggatggcccttcgctgggatg

SEQ ID NO: 427304 - DNA, 75 bp, synthetic construct
  source 1..75: mol_type = other DNA
tcgacctgcggcgagcagagacgccgctgcgtgaaggtgaacccggaagcgggacggttcggagaggattcgagc

SEQ ID NO: 427305 - DNA, 75 bp, synthetic construct
  source 1..75: mol_type = other DNA
cccgggcagcgggagcagatcatggccagctttgagcgggttctgatgcccgggcttgataaagaccagtacagc

SEQ ID NO: 427306 - DNA, 75 bp, synthetic construct
  source 1..75: mol_type = other DNA
ggcgcggcggcggcgccggtccggtggattatcttctggggaaagatcggcagcgcgacggcgccagcgtcctgc

SEQ ID NO: 427307 - DNA, 75 bp, synthetic construct
  source 1..75: mol_type = other DNA
cctggcagaccatcgtgaacggcaggctggggctgcacgacccgaacgcgccggagaaccggcgtgctctggtca

SEQ ID NO: 427308 - DNA, 75 bp, synthetic construct
  source 1..75: mol_type = other DNA
taccggcgagatgctgaaagccgcattcagcgagcacgagcagtctgtcggagcggaactgagcgcaagcgcgag

SEQ ID NO: 427309 - DNA, 75 bp, synthetic construct
  source 1..75: mol_type = other DNA
accatcgtcctggtctccgtgctgctgatcgcctcgggcgcgggcattctgtggtggcaggggcagcagatactc

SEQ ID NO: 427310 - DNA, 75 bp, synthetic construct
  source 1..75: mol_type = other DNA
tctccacctgggtacgtgcttactacgatactgatgatgccaccaccaaagcgttcctcgacgaggtggaccagt

SEQ ID NO: 427311 - DNA, 75 bp, synthetic construct
  source 1..75: mol_type = other DNA
agtctgattaccgttcgccgggcaattaccgatgatatcgccagcctttctgcggtatcgcaggtggattatgac

SEQ ID NO: 427312 - DNA, 75 bp, synthetic construct
  source 1..75: mol_type = other DNA
tccggcagcgatgccaaaacctggctgctggcacaggctgattttctggtgaaacttgccggacggaaattgtgg

SEQ ID NO: 427313 - DNA, 75 bp, synthetic construct
  source 1..75: mol_type = other DNA
tttttgtcataaaaggcagggatgcaggaagcctgatgatggatgtgcgcatagagcctgaaattcgaaaagaag

SEQ ID NO: 427314 - DNA, 75 bp, synthetic construct
  source 1..75: mol_type = other DNA
accaagttacaaaccgcgagaactataaatggggtgtcgtttgacggttctaaaaacattgagctaactccaagg

SEQ ID NO: 427315 - DNA, 75 bp, synthetic construct
  source 1..75: mol_type = other DNA
ttagagcaagcaaatcgtcagcaagaaacgctggccaaaaagctggatgaagttcaacaaaaggtcgccactatt

SEQ ID NO: 427316 - DNA, 75 bp, synthetic construct
  source 1..75: mol_type = other DNA
gtcgataacgactgggtggaagtgtttaacgccaatggcgcgctgactgcccgcgcggtggtcagccagcgtgta

SEQ ID NO: 427317 - DNA, 75 bp, synthetic construct
  source 1..75: mol_type = other DNA
tcctgacgccgcaccagaaatggggcattcactcaacctacagtgaaaacctgctaatgctgacgctctctcgcg

SEQ ID NO: 427318 - DNA, 75 bp, synthetic construct
  source 1..75: mol_type = other DNA
tgtcaggacgccagcaactctatcaggatcatccgtggatgcgtgcttttggtgaaagtctggtggcttatcgcc

SEQ ID NO: 427319 - DNA, 75 bp, synthetic construct
  source 1..75: mol_type = other DNA
tgttttgcaacagttcctgatcgaagccgtactggtttgcctggtcggtggcgcgttgggaataacactgtcact

SEQ ID NO: 427320 - DNA, 75 bp, synthetic construct
  source 1..75: mol_type = other DNA
gccgtcagctttttccgcataaagcggatgtggttggcgaggtgattcttgtcggtaatatgccagcgagggtca

SEQ ID NO: 427321 - DNA, 75 bp, synthetic construct
  source 1..75: mol_type = other DNA
acagacactgtttcccagactgatttaacgtcagtcggtcgcgatatcctggctaaaacaagcacactggctgtt

SEQ ID NO: 427322 - DNA, 75 bp, synthetic construct
  source 1..75: mol_type = other DNA
gtatatgtagaaaataatagctatccaattgaatgggatagtaacaaagagagatttgtagtctacattccccag

SEQ ID NO: 427323 - DNA, 75 bp, synthetic construct
  source 1..75: mol_type = other DNA
cagcggggaatggaggcccggctgaagcaggcgcgcttgccgtgggtgaaaacgctggagcagttcgacttcagc

SEQ ID NO: 427324 - DNA, 75 bp, synthetic construct
  source 1..75: mol_type = other DNA
accacgctgaatatcaaaggagagagttaccggttaaaagagaaacgtaaagctggagtgctggccaaaaacaca

SEQ ID NO: 427325 - DNA, 75 bp, synthetic construct
  source 1..75: mol_type = other DNA
gctaccggttgaaagagaaacgcaaggccggggtgctggcaaaaagcgcaacgccaatcagtgatgttgaaatgg

SEQ ID NO: 427326 - DNA, 75 bp, synthetic construct
  source 1..75: mol_type = other DNA
cctgatgaaaatgtggcgtgaagcgaaggcgctgcatagcgatccggttgaggcatgggcttctatcattgaaga

SEQ ID NO: 427327 - DNA, 75 bp, synthetic construct
  source 1..75: mol_type = other DNA
acaggaaaaccggctggagcgtcagctacagcaactgagttatgcccgggtgttgatcctggatgaaataggcta

SEQ ID NO: 427328 - DNA, 75 bp, synthetic construct
  source 1..75: mol_type = other DNA
cagcgcggtatggagtcccggctgaagcaggctcgtctgccgtcggtcaaaacgctggaacagttcgactttacc

SEQ ID NO: 427329 - DNA, 75 bp, synthetic construct
  source 1..75: mol_type = other DNA
gttttacgcgcaaatggctcaggaagaagggcgctttgattttaatgatatctgcgccgcgattagcgataagct

SEQ ID NO: 427330 - DNA, 75 bp, synthetic construct
  source 1..75: mol_type = other DNA
tctcgcttttaattgaaagcatccagttaatcggtcaggaaacggaaaacaataaagtctttgagtatgcactga

SEQ ID NO: 427331 - DNA, 75 bp, synthetic construct
  source 1..75: mol_type = other DNA
agccaattttatagttcggatgcgccaacatctgtaattgaaaactaccgcactatcttaacatttctgcgcctg

SEQ ID NO: 427332 - DNA, 75 bp, synthetic construct
  source 1..75: mol_type = other DNA
ttgcgcctttgtcggcagcgattaatgcgcaaattacgtgcaaataagccagcgtcatcagacgaaccggagcaa

SEQ ID NO: 427333 - DNA, 75 bp, synthetic construct
  source 1..75: mol_type = other DNA
agcaggctcgtctgccgcgggtcaaaacgctggagcagttcgactttaccttccagccaggcatcgatcgtaagg

SEQ ID NO: 427334 - DNA, 75 bp, synthetic construct
  source 1..75: mol_type = other DNA
aacgttcatacccgggttattccgatgatcagcgcctttgcaccggaagaacgctggtcagtgcagatggtcatt

SEQ ID NO: 427335 - DNA, 75 bp, synthetic construct
  source 1..75: mol_type = other DNA
attctggcactggcaccggaaaccaacggccatgttgcagtcaaagcgtggcaagcgctgggcgagatcaccgga

SEQ ID NO: 427336 - DNA, 75 bp, synthetic construct
  source 1..75: mol_type = other DNA
gatctcaccgctatatcggttgaggttgtcacttttttgttgaagaagtcggtgcttgccggtttaccgacagcc

SEQ ID NO: 427337 - DNA, 75 bp, synthetic construct
  source 1..75: mol_type = other DNA
gatctcactgccatgtcggttgaggttgtcacttttttgttgaagaagtcggtgcttgcaggtttaccgacagcc

SEQ ID NO: 427338 - DNA, 75 bp, synthetic construct
  source 1..75: mol_type = other DNA
gatctcaccgcgctgtcggttgaggtggtcacttttttgttgaagaaatcggtgcttgccggtttgccgacagcc

SEQ ID NO: 427339 - DNA, 75 bp, synthetic construct
  source 1..75: mol_type = other DNA
gctgggagccggaggcgctggcgtttatctctggtcactacgaaaccggcgaaccgctgccgaaggaactactgg

SEQ ID NO: 427340 - DNA, 75 bp, synthetic construct
  source 1..75: mol_type = other DNA
gcgatgatgaccgtgatcccccgcatctccagcccggcactgactgcacaggaaattgcagagatggacccggca

SEQ ID NO: 427341 - DNA, 75 bp, synthetic construct
  source 1..75: mol_type = other DNA
ccattcaactggatacccccatcaagcgcggtaaaacagaaatcaccgaaattgtgctgcgtaaaccgcagtccg

SEQ ID NO: 427342 - DNA, 75 bp, synthetic construct
  source 1..75: mol_type = other DNA
gtggaatccatggttgatattgaacaggttcaggagctgagtcgggtaaatggtgacttaggccgacttggggga

SEQ ID NO: 427343 - DNA, 75 bp, synthetic construct
  source 1..75: mol_type = other DNA
gtaaacatggcaagcacattcgtgtgccagttctgccagaagaagaagcgatcattaagcgcaacgcagatgccg

SEQ ID NO: 427344 - DNA, 75 bp, synthetic construct
  source 1..75: mol_type = other DNA
cttaccgataataattataccgccgggttgttaggtcttggtctgaatacttcagtcggtgcattttctttcgat

SEQ ID NO: 427345 - DNA, 75 bp, synthetic construct
  source 1..75: mol_type = other DNA
tcatctggtatccttctggaggaaatgtaggtcatgcttcattacaaattggttctgtatattcccatgaaaact

SEQ ID NO: 427346 - DNA, 75 bp, synthetic construct
  source 1..75: mol_type = other DNA
agctgttgcgggaaagaattgatgagacactttctgaggaaattgtacagaaatgcagaaatattaacggtgaat

SEQ ID NO: 427347 - DNA, 75 bp, synthetic construct
  source 1..75: mol_type = other DNA
cttacacccttgaagaaacctacgaagtgctggacgccatcgcccgtgaagattttgacgatcttcgcggtgaac

SEQ ID NO: 427348 - DNA, 75 bp, synthetic construct
  source 1..75: mol_type = other DNA
ggggcgtttcccacatgctttcagccacatttttgccggaggttatgcagcaggttactacagctacctgtgggc

SEQ ID NO: 427349 - DNA, 75 bp, synthetic construct
  source 1..75: mol_type = other DNA
ggaaatggcagaactggaccccgccgatctcaccgcgttgtcagtagaggtggtgacttttttgttgaagaagtc

SEQ ID NO: 427350 - DNA, 75 bp, synthetic construct
  source 1..75: mol_type = other DNA
gcgcggtaaaacagaaattaccgaaattgtgttgcgtaaacctcagtctggtgcgctgcgcggcacacgcctgca

SEQ ID NO: 427351 - DNA, 75 bp, synthetic construct
  source 1..75: mol_type = other DNA
gtgaaaaatagcccggagctgcgcgaagcctacgaacaaacgctgccgctgctgtcagaatacagcacctgggta

SEQ ID NO: 427352 - DNA, 75 bp, synthetic construct
  source 1..75: mol_type = other DNA
gattgatttcaacgttcgcgccgaacgtatgggctggctaccttctgcgccgcagttggggcgtaatccgctcgg

SEQ ID NO: 427353 - DNA, 75 bp, synthetic construct
  source 1..75: mol_type = other DNA
atgctgagattacttgaagaaaaaattgccacgccactgggacctctgtgggtgatttgcgatgaacaatttcgt

SEQ ID NO: 427354 - DNA, 75 bp, synthetic construct
  source 1..75: mol_type = other DNA
attattgatacgcttcccactgctacggggggacgccatttcagcgcgaagtctggaaaacactacgcactatcc

SEQ ID NO: 427355 - DNA, 75 bp, synthetic construct
  source 1..75: mol_type = other DNA
gaaccgctgccgaaggagttgctggataaaatgctggcggcgaagaactaccaggcggcgctgtttattctgcgc

SEQ ID NO: 427356 - DNA, 75 bp, synthetic construct
  source 1..75: mol_type = other DNA
ggttcagaagagccgatggatctgttcaaacgcttccgtggtcgtgaaccgcaactggatgcgatgctggagcat

SEQ ID NO: 427357 - DNA, 75 bp, synthetic construct
  source 1..75: mol_type = other DNA
tcaaccgtgaaaccggactgtcattcctcgacaatattctgagccgtggcggttcagaagagccgatggagctgt

SEQ ID NO: 427358 - DNA, 75 bp, synthetic construct
  source 1..75: mol_type = other DNA
ggttcagaagagccgatggatctgttcaaacgcttccgtggtcgtgaaccacagctggatgcgatgctggagcat

SEQ ID NO: 427359 - DNA, 75 bp, synthetic construct
  source 1..75: mol_type = other DNA
aggtctgccgaaagagaaacagcagcgttacggcgaaattgcgacccgtctttctgaactgggcaaccagtacag

SEQ ID NO: 427360 - DNA, 75 bp, synthetic construct
  source 1..75: mol_type = other DNA
gggccgtttcccgcacgctttcagccatattttcgccggtggttatgccgcaggttactacagctacctgtgggc

SEQ ID NO: 427361 - DNA, 75 bp, synthetic construct
  source 1..75: mol_type = other DNA
attcttggtggataacaattcattaatattgattctggataagttaatattcgtaatatctgtaactgttccaat

SEQ ID NO: 427362 - DNA, 75 bp, synthetic construct
  source 1..75: mol_type = other DNA
caaaaaagaacccgccaccagtttctggaagcgggttatggtcagactggcgtcgatattgcccgtggaatggtt

SEQ ID NO: 427363 - DNA, 75 bp, synthetic construct
  source 1..75: mol_type = other DNA
ggaagaaattcttctcaaaaaagaacccgcaaccagtttctggaagcgggttttggtcagactggcgtcaatatt

SEQ ID NO: 427364 - DNA, 75 bp, synthetic construct
  source 1..75: mol_type = other DNA
cggtgctgtggatgcgttaaaggaagaattaactcggcgcatcagtaagcgttatgacgatgtagaagtgatcgt

SEQ ID NO: 427365 - DNA, 75 bp, synthetic construct
  source 1..75: mol_type = other DNA
gccgagagttgtgattctttcttttatcacattgattggtgtttgttttctctacccaaatgtgaaaaaaataat

SEQ ID NO: 427366 - DNA, 75 bp, synthetic construct
  source 1..75: mol_type = other DNA
gaatccgcgcaagagtttgtacaagaaacacttcaaaatgtctgggaaacagcggacgactggtttattcactga

SEQ ID NO: 427367 - DNA, 75 bp, synthetic construct
  source 1..75: mol_type = other DNA
aagagaaaatgactaaaatgccaaacggtgctgtggatgcgttaaaggaagaattaacccgacgcatcagtaagc

SEQ ID NO: 427368 - DNA, 75 bp, synthetic construct
  source 1..75: mol_type = other DNA
actattttaagagccacagataaagagtccgcgcacgaatttgtacaggaaacacttcaggaagccagggaaaca

SEQ ID NO: 427369 - DNA, 75 bp, synthetic construct
  source 1..75: mol_type = other DNA
ggtgaaactccccggtcttgaggcccgccgttcggcggatgaatggttatgtcgctacgatttgccgaaagtctg

SEQ ID NO: 427370 - DNA, 75 bp, synthetic construct
  source 1..75: mol_type = other DNA
cgaaagactccttacccaacaaggcgatgaatgatttaccccggctagcaagtgcggtgttgccactgtgttcgc

SEQ ID NO: 427371 - DNA, 75 bp, synthetic construct
  source 1..75: mol_type = other DNA
tgcgtatcgccacctttggcggcgtgcagccagccgcgctggcggaactgaccgaagtactgaatggcttgctcg

SEQ ID NO: 427372 - DNA, 75 bp, synthetic construct
  source 1..75: mol_type = other DNA
cgccgccgatctgattcgcgatgagcatccgcaaattatcgccaccattctggtgcatctgaagcgcgcccaggc

SEQ ID NO: 427373 - DNA, 75 bp, synthetic construct
  source 1..75: mol_type = other DNA
gcatcgcggtgcgaagcatgctaaaggtgaatatttcggcccgtttccgaatggttatgccgtacgtgaaacgct

SEQ ID NO: 427374 - DNA, 75 bp, synthetic construct
  source 1..75: mol_type = other DNA
ggcttaccgcattaacgactgggcaagcatctacggtgtagtgggtgtgggttatggtaaattccagaccactga

SEQ ID NO: 427375 - DNA, 75 bp, synthetic construct
  source 1..75: mol_type = other DNA
atgccagttagctgttacctctgcattttcttaaacgttggtttgggagaagccagattctctggtcgtttgtta

SEQ ID NO: 427376 - DNA, 75 bp, synthetic construct
  source 1..75: mol_type = other DNA
ctgtcacaatgacagaggcaaaaaacaccatgaccatcggcgccgatggcgaggtgatgcacagcctgcacgccg

SEQ ID NO: 427377 - DNA, 75 bp, synthetic construct
  source 1..75: mol_type = other DNA
agggaatccgggaagcgaagggcctcactggttaataaaacaaggtgcgattcttgtgacggaaccggaagaaat

SEQ ID NO: 427378 - DNA, 75 bp, synthetic construct
  source 1..75: mol_type = other DNA
tgccagaggtagttactcaactactcgaactggagttagcaggatggatcgcagctgtacccggcggctatgtcc

SEQ ID NO: 427379 - DNA, 75 bp, synthetic construct
  source 1..75: mol_type = other DNA
aatatggattgcactggttgcaagatgctcctgaaaattcattttattcaccagatcacgaagatgtggcattgc

SEQ ID NO: 427380 - DNA, 75 bp, synthetic construct
  source 1..75: mol_type = other DNA
ccgtaaaaaacgggcgaaggtcaaaaataccagctccctggaaaccattgaaggcgtcgggccaaaacgtcggca

SEQ ID NO: 427381 - DNA, 75 bp, synthetic construct
  source 1..75: mol_type = other DNA
gtgctcggcagccgcagctatttcccgaaagtgcctggcggtacggaactgagcgaggtggtggaaaccttcgta

SEQ ID NO: 427382 - DNA, 75 bp, synthetic construct
  source 1..75: mol_type = other DNA
cagaactggcagggcgcaagattaacgttcagactaaaccgcgtggcgatcgggcacgttatctgaagctggcgc

SEQ ID NO: 427383 - DNA, 75 bp, synthetic construct
  source 1..75: mol_type = other DNA
aacaaaaagctctcgctgatgtacaacgcacagagcctgtcctcggcgacgtggggcaataacgtcatcgtcatt

SEQ ID NO: 427384 - DNA, 75 bp, synthetic construct
  source 1..75: mol_type = other DNA
atgttgactcttatttttatggggttatattttcaaaatgatgatatattgccgagagttgtgattctttctttt

SEQ ID NO: 427385 - DNA, 75 bp, synthetic construct
  source 1..75: mol_type = other DNA
gctcgcgtccgtgtctgcaatatcagatagggcgctgtctgggaccgtgcgttgaaggactggtgagtgaagaag

SEQ ID NO: 427386 - DNA, 75 bp, synthetic construct
  source 1..75: mol_type = other DNA
agcaaatccttctaccagacgggaaccaatatccaggtcgcaggatatcgctattctacgcaaggtttttataac

SEQ ID NO: 427387 - DNA, 75 bp, synthetic construct
  source 1..75: mol_type = other DNA
tggcagatggttccgttcgacacgtacaaacttatgctgggccaattgagatttacggtgacaggttaatgttat

SEQ ID NO: 427388 - DNA, 75 bp, synthetic construct
  source 1..75: mol_type = other DNA
cgttggggaggcgaagagtttgtcttattgctaccaagaaccccactggataccgcgctttcgctggctgaaact

SEQ ID NO: 427389 - DNA, 75 bp, synthetic construct
  source 1..75: mol_type = other DNA
ttaatttatgccaatagtgctgcgcgactgttgatgcaagaacgcacttttagtcagctacgtaccgggctctat

SEQ ID NO: 427390 - DNA, 75 bp, synthetic construct
  source 1..75: mol_type = other DNA
gcagaaatgccggccttaatcatggcggaagtgacacctgaacgcgtgcgtcaggtacgtgcacaactccccgtc

SEQ ID NO: 427391 - DNA, 75 bp, synthetic construct
  source 1..75: mol_type = other DNA
atggaatatgttggtggcattgcaggcaggaaaaatcgtcgcccattatgccaagcttcatctttatgatgcgtt

SEQ ID NO: 427392 - DNA, 75 bp, synthetic construct
  source 1..75: mol_type = other DNA
gatgctggtaatgaaatcgctccgttactcgaggtggaggggatgaaggtcggtctgatgacctgttatgactta

SEQ ID NO: 427393 - DNA, 75 bp, synthetic construct
  source 1..75: mol_type = other DNA
gaaaaactcatctggccatagctcctggcgtgaaagcggtggatgcgggacatcgggtactgtttatgccactgg

SEQ ID NO: 427394 - DNA, 75 bp, synthetic construct
  source 1..75: mol_type = other DNA
tcaaaggagagagttaccggttaaaagagaaacgtaaagctggagtgctgaccaaaaacacaacgccaatcagtg

SEQ ID NO: 427395 - DNA, 75 bp, synthetic construct
  source 1..75: mol_type = other DNA
ccagccgatgctcaataccgcaattgatgcggcagagatgatcctgacactggcaccggaaaccaatggtcaggt

SEQ ID NO: 427396 - DNA, 75 bp, synthetic construct
  source 1..75: mol_type = other DNA
caaagagatgagtgagacgggaaaagtaattatcttcgaaggaatggaaactccagcaacactggggttaaaagc

SEQ ID NO: 427397 - DNA, 75 bp, synthetic construct
  source 1..75: mol_type = other DNA
gctgaagcaggctcgtctgccgtgggtcaaaacgctggagcagttcgactttaccttccagccgggcatcgaccg

SEQ ID NO: 427398 - DNA, 75 bp, synthetic construct
  source 1..75: mol_type = other DNA
atgctgaccagagaggacttttacatgataaagcaaatgcgccagcagggcgcgtaccgggagttcctgtgcatg

SEQ ID NO: 427399 - DNA, 75 bp, synthetic construct
  source 1..75: mol_type = other DNA
gttcgtagagcgcagcgaaaacgtgatcctgctgggtccaccgggcgtgggcaaaacgcatctggcggtggcgct

SEQ ID NO: 427400 - DNA, 75 bp, synthetic construct
  source 1..75: mol_type = other DNA
tccgacagtgcctacagtcgaatgagtggttacaccgttaagcctcctaccggagacagcaatgagcagacacaa

SEQ ID NO: 427401 - DNA, 75 bp, synthetic construct
  source 1..75: mol_type = other DNA
gatggcatcacctttggacagccgctgggcgacacaatggttctggttaaggctcctggtgctgataatgtcaaa

SEQ ID NO: 427402 - DNA, 75 bp, synthetic construct
  source 1..75: mol_type = other DNA
gtgccgtttagtgatattacgacttcgctgaattacagctattccaataatatatggcaaaacgatcgggatcat

SEQ ID NO: 427403 - DNA, 75 bp, synthetic construct
  source 1..75: mol_type = other DNA
aaaactcaaactgtattgtcgattacaagcttcctgtagtctctcctggaaccttgctgaaccagcagacagcaa

SEQ ID NO: 427404 - DNA, 75 bp, synthetic construct
  source 1..75: mol_type = other DNA
atgggggaatatcgtagtggaaataacctgcaaagctcccccaagttcgtacaagcaagcttgatgcatggtctg

SEQ ID NO: 427405 - DNA, 75 bp, synthetic construct
  source 1..75: mol_type = other DNA
taacgacttcgctgaattacagctattccaataatatatggcaaaacgatcgggatcatttactcgcttttacgc

SEQ ID NO: 427406 - DNA, 75 bp, synthetic construct
  source 1..75: mol_type = other DNA
gcacaaatcggcgggaaagtattaatgacgttgaagtacggtaataagagcgttccattcggtgcaattgtcact

SEQ ID NO: 427407 - DNA, 75 bp, synthetic construct
  source 1..75: mol_type = other DNA
gtggtggatgcgggacatcgggtactgtttatgccactggacagactgatcgcgacactgatgaaagcgaaacag

SEQ ID NO: 427408 - DNA, 75 bp, synthetic construct
  source 1..75: mol_type = other DNA
cctggacaggttgctgcatcactcaacgacgctgaatatcaagggggagagctaccggctaagagagaaacggaa

SEQ ID NO: 427409 - DNA, 75 bp, synthetic construct
  source 1..75: mol_type = other DNA
tcaaacgatttgaaaggcggcatgaccaatctatcgggagtttatggcactctgctgccggataataacctgaat

SEQ ID NO: 427410 - DNA, 75 bp, synthetic construct
  source 1..75: mol_type = other DNA
gtatgggctttagcgcgggcgcggcatacacctcctcagaccgcaccaatgaccaggttaaccatactgcggcgg

SEQ ID NO: 427411 - DNA, 75 bp, synthetic construct
  source 1..75: mol_type = other DNA
gtatgggctttagcgcgggcgcggcatacacctcctcagaccgcaccaatgatcaggtcaaccatactgcggcag

SEQ ID NO: 427412 - DNA, 75 bp, synthetic construct
  source 1..75: mol_type = other DNA
ggctcaggtacttggatcgatgaacaacatattcttacagcttcacatttatggcttgatgcaagcaaggattat

SEQ ID NO: 427413 - DNA, 75 bp, synthetic construct
  source 1..75: mol_type = other DNA
caattgctactccagaatgagttacaaatatgtcaaatatcaaaatccgtaggattccgtagcacatcatatttt

SEQ ID NO: 427414 - DNA, 75 bp, synthetic construct
  source 1..75: mol_type = other DNA
attcgctatgacgcggtaatcagctggcagcgtttcccgtatcgcctgtgtccgccgcagttgctcatgtcgctg

SEQ ID NO: 427415 - DNA, 75 bp, synthetic construct
  source 1..75: mol_type = other DNA
tcacgttcagtatatttgcttcggcacaatagccgcgtaaggaataccgtgctggagcaaaatctgaccgttgaa

SEQ ID NO: 427416 - DNA, 75 bp, synthetic construct
  source 1..75: mol_type = other DNA
atggataattacgggggattcaagccaacaatttcgcttgatgattttcctcgtggtttaagcgaaagagaagca

SEQ ID NO: 427417 - DNA, 75 bp, synthetic construct
  source 1..75: mol_type = other DNA
tattgatgatcctaagaaccgggacctcgctcttttaaaagtagaaaaaaatactattgtcaaagccccacctaa

SEQ ID NO: 427418 - DNA, 75 bp, synthetic construct
  source 1..75: mol_type = other DNA
catcagcccggaagctgagaacgcagcagttatctccaaaatgctgcgcgtgatgatgctggctccgttcctcat

SEQ ID NO: 427419 - DNA, 75 bp, synthetic construct
  source 1..75: mol_type = other DNA
agccggggcgaaacctctgctgatggcactggtgctgtttgcctggttgattgttggtggtgctgtgattaacca

SEQ ID NO: 427420 - DNA, 75 bp, synthetic construct
  source 1..75: mol_type = other DNA
atcgctatcttcctctatccggcgatatatccgctgatgacccaatggttcggcccggaaacattcggtatctac

SEQ ID NO: 427421 - DNA, 75 bp, synthetic construct
  source 1..75: mol_type = other DNA
cctaatcaaaaagaagctacaggatgaaaacacctgctttagtaaaatattactggcctcgcgaatgtcgatggc

SEQ ID NO: 427422 - DNA, 75 bp, synthetic construct
  source 1..75: mol_type = other DNA
aagacgattctaatttatttgataagctaaacgtcagcttaaatatggctggcgagtctatgtctaattatccga

SEQ ID NO: 427423 - DNA, 75 bp, synthetic construct
  source 1..75: mol_type = other DNA
tgatgatgctggctccgttcctcatcctgctggcggcacgtgttaaacagctgtctcctgcgaatggcggcgaga

SEQ ID NO: 427424 - DNA, 75 bp, synthetic construct
  source 1..75: mol_type = other DNA
gcgtggtttaagcgaaagagaagcaatgcttaaattagcagaatggctacagagattaagtattgctattgaaga

SEQ ID NO: 427425 - DNA, 75 bp, synthetic construct
  source 1..75: mol_type = other DNA
tgccgccgcgctggcacataaccagaccggacgcccgatctccacgcatacgtcgttcagcacgatggggctgga

SEQ ID NO: 427426 - DNA, 75 bp, synthetic construct
  source 1..75: mol_type = other DNA
tgaatgacgcggaagatcaggcgcagcgcttcctggatcaggttgccgcgaaagacgcaggcgacgacgaagcga

SEQ ID NO: 427427 - DNA, 75 bp, synthetic construct
  source 1..75: mol_type = other DNA
tatcgaccgaatgattatgctgtttacaaacagtcatactattcgcgacgttattctcttcccggcgatgcgccc

SEQ ID NO: 427428 - DNA, 75 bp, synthetic construct
  source 1..75: mol_type = other DNA
gaattttttaatatgattatgtatcaatacattatattacccgatgtgttactgaattatcgactattactttaa

SEQ ID NO: 427429 - DNA, 75 bp, synthetic construct
  source 1..75: mol_type = other DNA
ctccggtgttatctgcaccggaggaccgggaacattaagcggtatagcgacaacaaagaattcgaaatcaaaagg

SEQ ID NO: 427430 - DNA, 75 bp, synthetic construct
  source 1..75: mol_type = other DNA
cgccgctggaagagaaggtgtttattgccgccgcgctggcacataaccagaccggacgtccgatctccacgcata

SEQ ID NO: 427431 - DNA, 75 bp, synthetic construct
  source 1..75: mol_type = other DNA
atggaaatcaaaccagaagatgagttaagtaatattgttttatttccggcaaaagaggatgacccacgtaatcag

SEQ ID NO: 427432 - DNA, 75 bp, synthetic construct
  source 1..75: mol_type = other DNA
gtgagcgggattgactatcaggtactgcgtgttgctggcatttacatcaaaggggggggtaatgtggaaataaaa

SEQ ID NO: 427433 - DNA, 75 bp, synthetic construct
  source 1..75: mol_type = other DNA
agatgcaggtattaacgttctatgggttaattatgaaaatgcatcttctaatgaagataaaacaatgggcggtgt

SEQ ID NO: 427434 - DNA, 75 bp, synthetic construct
  source 1..75: mol_type = other DNA
cagttgtggagccgtttgactggatgctctcagtggcgaaaagagaaaccagactggcggatgatgtaaggctct

SEQ ID NO: 427435 - DNA, 75 bp, synthetic construct
  source 1..75: mol_type = other DNA
atagaaaagctaattcagattgagcgtaacgcaaaagcgcggatacgcagagcgacaaaatccagaactgaataa

SEQ ID NO: 427436 - DNA, 75 bp, synthetic construct
  source 1..75: mol_type = other DNA
ggcatggaggcactgacctgtcaggttaaattttatggcatagatacggatatgctggccagcttcggttttgtc

SEQ ID NO: 427437 - DNA, 75 bp, synthetic construct
  source 1..75: mol_type = other DNA
ccaaaatacttgaataaaaaccatgataggtgggtgttgtataaaagagatacgcaggaattagtatattcaaaa

SEQ ID NO: 427438 - DNA, 75 bp, synthetic construct
  source 1..75: mol_type = other DNA
catcgcctggctgaggtattgcaatgttcaccaacttggatactgtttggtgacgaggataaaacaccagctcca

SEQ ID NO: 427439 - DNA, 75 bp, synthetic construct
  source 1..75: mol_type = other DNA
cagagatgcgtgccagagttgagaatttcaacaaactttttgaagaactactcaaagctcgcaaaagaagcacaa

SEQ ID NO: 427440 - DNA, 75 bp, synthetic construct
  source 1..75: mol_type = other DNA
ccgagatgcgcgcccgagtaaataatttcaacaaactctttgaagagttattaaaagcacgtcaacgaacaaaca

SEQ ID NO: 427441 - DNA, 75 bp, synthetic construct
  source 1..75: mol_type = other DNA
atgtccggtggtgcttttgccgttacgcaccacgccttcagtagcggagcaggaaggacatctgatggaaatgga

SEQ ID NO: 427442 - DNA, 75 bp, synthetic construct
  source 1..75: mol_type = other DNA
cgtgcccgcgttgagaattttaatcgcctattcaccgagctactagaagctcgcaaacgtaacaaacatcaataa

SEQ ID NO: 427443 - DNA, 75 bp, synthetic construct
  source 1..75: mol_type = other DNA
aaatcagagcagcaagcacagatcagcgaactccgtgcccgcgttgagaattttaatcgcctattcaccgagcta

SEQ ID NO: 427444 - DNA, 75 bp, synthetic construct
  source 1..75: mol_type = other DNA
tccataccgaagaggtgatgctggacaaaattaccggaaaaaacgccggtggcggcctatgtttccccggttgtt

SEQ ID NO: 427445 - DNA, 75 bp, synthetic construct
  source 1..75: mol_type = other DNA
gcacaaccgcgcgtgattaccattgaggccagcagcgaacaggaagcacgccagcaatccccggctggctgcgtg

SEQ ID NO: 427446 - DNA, 75 bp, synthetic construct
  source 1..75: mol_type = other DNA
tccggactttaataaaatggatgatggtgaggtgagaaatggttattccattaccatgtttatggatataatcgg

SEQ ID NO: 427447 - DNA, 75 bp, synthetic construct
  source 1..75: mol_type = other DNA
cgctttcaacgctggtgaccagtgggcataacgcgaacttcgcggcctttatttacgccgttggcgaacgttcgc

SEQ ID NO: 427448 - DNA, 75 bp, synthetic construct
  source 1..75: mol_type = other DNA
tatgcagcgatttactacaccgtatttcgggtactgatccgcaagttgaatctgaaaacaccgggacgtgaggat

SEQ ID NO: 427449 - DNA, 75 bp, synthetic construct
  source 1..75: mol_type = other DNA
ggcctgattttcgccaaccttcctttgctgttttgtgtcggtattgtgattggcctgacaggtgatggttcttct

SEQ ID NO: 427450 - DNA, 75 bp, synthetic construct
  source 1..75: mol_type = other DNA
aataagaaaaaaattcggtctacgctcagccgaaattgtaaaagaaagattcagcaaagaaattgttatagataa

SEQ ID NO: 427451 - DNA, 75 bp, synthetic construct
  source 1..75: mol_type = other DNA
ggccagaaatccaacggcaacccggaaaaagcgctcaacttcctgacgccgcaccagaagtggggtatccactcc

SEQ ID NO: 427452 - DNA, 75 bp, synthetic construct
  source 1..75: mol_type = other DNA
actttggtggcgacggcactgaacacttcaacaaagtggaactggaaaacattctgctgcacaagctgccggtga

SEQ ID NO: 427453 - DNA, 75 bp, synthetic construct
  source 1..75: mol_type = other DNA
gaagggcaaatggaatcttgagcagcgcgacggcaaaactggcgaagaaaccgagctgcaactgagcctgctggg

SEQ ID NO: 427454 - DNA, 75 bp, synthetic construct
  source 1..75: mol_type = other DNA
cgtccggcgcgtcacatgaacagcacttcttatttctataaccactccagccagtggcgttatgaaaccgtgact

SEQ ID NO: 427455 - DNA, 75 bp, synthetic construct
  source 1..75: mol_type = other DNA
tggaaccttgagcaacgcgacggtaaaactggtgaagaaaccgagctgcaactgagtcttctcggtagccaggac

SEQ ID NO: 427456 - DNA, 75 bp, synthetic construct
  source 1..75: mol_type = other DNA
tttattcacccgctgtctgcggcggtcgatccggcctgggaagcgaaaagcgactgggaaatctacaaagccatc

SEQ ID NO: 427457 - DNA, 75 bp, synthetic construct
  source 1..75: mol_type = other DNA
aattctcgtttacgtggtaacttcactatcgattttctaatggttcccccacctggcactacggcaactattgga

SEQ ID NO: 427458 - DNA, 75 bp, synthetic construct
  source 1..75: mol_type = other DNA
attgaaggagccggggtagacaggtttcgctttagttatcagccagaaccaactcagaataatttctcggtatta

SEQ ID NO: 427459 - DNA, 75 bp, synthetic construct
  source 1..75: mol_type = other DNA
cccaagccagtatttcaccgactatgtgcgtcgctacaccgacatgccgatgctggtgatgctggaagaacgcga

SEQ ID NO: 427460 - DNA, 75 bp, synthetic construct
  source 1..75: mol_type = other DNA
gggggcgggtgtgtgctccggtaggacatacaaaacaattgagtaacactttcaatgaattaaggtttagtttac

SEQ ID NO: 427461 - DNA, 75 bp, synthetic construct
  source 1..75: mol_type = other DNA
cagcaagtgactcaaaccatgaatgcgggcgtcgtttccagtggtgaagttacgtcgacggagccggtgcagtaa

SEQ ID NO: 427462 - DNA, 75 bp, synthetic construct
  source 1..75: mol_type = other DNA
atttgcgctatgctggacgtgattttttcgtcaaatgtgatgaaagggacctgctttccggttttaccgccgaag

SEQ ID NO: 427463 - DNA, 75 bp, synthetic construct
  source 1..75: mol_type = other DNA
attcagcagcgtctcgcctcgcatcaaccgcagccttctctgttgcacggcgatttatggtccggcaactgtgcg

SEQ ID NO: 427464 - DNA, 75 bp, synthetic construct
  source 1..75: mol_type = other DNA
cagcagaaaaagggatcgccttcggcaatatcgactccatcgtcgagcatattaagcaacgcctgagctctcatc

SEQ ID NO: 427465 - DNA, 75 bp, synthetic construct
  source 1..75: mol_type = other DNA
taaaggcgatatcatcattgatggtggtaataccttcttccaggacaccattcgccgtaaccgcgagctttctgc

SEQ ID NO: 427466 - DNA, 75 bp, synthetic construct
  source 1..75: mol_type = other DNA
tcaatcataatattgaacctgaactatctaaaaaacttgcaccattattagatggcatgtcctttgccatcatta

SEQ ID NO: 427467 - DNA, 75 bp, synthetic construct
  source 1..75: mol_type = other DNA
cggcagaaaaagggatcgccttcggcaatatcgacgccatcgtcgagcatattcagcagcgtctgagttcacatc

SEQ ID NO: 427468 - DNA, 75 bp, synthetic construct
  source 1..75: mol_type = other DNA
ggagaatctgaataatctctttgaacagtcgcgcgagttagaagtgcaaataaaaatgcagatggcagatatcaa

SEQ ID NO: 427469 - DNA, 75 bp, synthetic construct
  source 1..75: mol_type = other DNA
gtttctttgccgggataccgaaaatcaaagccaaagccagggacaaaatggagatttaccagttgttcctgcaac

SEQ ID NO: 427470 - DNA, 75 bp, synthetic construct
  source 1..75: mol_type = other DNA
gaagccgcaccattttattcgttacttgtataaccgacaaaacgcagcagactttgccagaacttttgacgacac

SEQ ID NO: 427471 - DNA, 75 bp, synthetic construct
  source 1..75: mol_type = other DNA
atttacccggtattcgtttttgccttttcttttgtgctggctataaatctccaacgtttagctttatttcttcgt

SEQ ID NO: 427472 - DNA, 75 bp, synthetic construct
  source 1..75: mol_type = other DNA
gttttgttcaccggatacgcgacggctggatatcgatgagctgacagtttgccattacttacaaaatattcgtca

SEQ ID NO: 427473 - DNA, 75 bp, synthetic construct
  source 1..75: mol_type = other DNA
ggaaaatctggagagtttgtttaaccagtcgcgcgagctggaagcggagattaaaaagcagatgtcgaggctaga

SEQ ID NO: 427474 - DNA, 75 bp, synthetic construct
  source 1..75: mol_type = other DNA
ccgatcaactggaattactgtctcgcagtaaaaccgtcacggtgccaaaagtctgggccgttggcgctgaccgcg

SEQ ID NO: 427475 - DNA, 75 bp, synthetic construct
  source 1..75: mol_type = other DNA
atgtccaagcaacagattggcgtagtcggtatggcagtgatggggcgcaatcttgcgcttaacatcgaaagccgt

SEQ ID NO: 427476 - DNA, 75 bp, synthetic construct
  source 1..75: mol_type = other DNA
ttcgtcgtaaccgcgagctttctgccgaaggctttaacttcattggtaccggtgtttccggtggtgaagaaggtg

SEQ ID NO: 427477 - DNA, 75 bp, synthetic construct
  source 1..75: mol_type = other DNA
agccatctggcgacaaaggtgagttcatcgagaaagttcgtcgtgcgctgtatctgggtaaaatcgtttcttacg

SEQ ID NO: 427478 - DNA, 75 bp, synthetic construct
  source 1..75: mol_type = other DNA
tatcgccattacctgtcgtgctgatgtggcattgtgtgatgtgcggacagcttttttatgggaagaagttctgtg

SEQ ID NO: 427479 - DNA, 75 bp, synthetic construct
  source 1..75: mol_type = other DNA
gtcatattatcactattgaaggccacagctttaagtctaatgagtctggcatgtggaatcttacagaaatatgga

SEQ ID NO: 427480 - DNA, 75 bp, synthetic construct
  source 1..75: mol_type = other DNA
tcaaactcacttaggtgcaacgaattctgctggcgcgcatacccactcagtatcaggtactgcagcaagtgctgg

SEQ ID NO: 427481 - DNA, 75 bp, synthetic construct
  source 1..75: mol_type = other DNA
cgcctggccggaacgtttcatcctggtcgccgaagaactatcagcgacaactcttgcggagctgccgcaggagcg

SEQ ID NO: 427482 - DNA, 75 bp, synthetic construct
  source 1..75: mol_type = other DNA
taccgtgatgggcgcggatattcagccttcggtgctgcatcgtcggacgctgatcgtcgatggctatcgcggtga

SEQ ID NO: 427483 - DNA, 75 bp, synthetic construct
  source 1..75: mol_type = other DNA
cctggtgacgcttgccacccagatggcagctattctttctcagtcgcagttgactgccttgtttgggcaatatcg

SEQ ID NO: 427484 - DNA, 75 bp, synthetic construct
  source 1..75: mol_type = other DNA
ccgtacttaacggtaatctgacgaaatttcaagggttatccatgatttctcgcagcagtgtctggtacgcccgaa

SEQ ID NO: 427485 - DNA, 75 bp, synthetic construct
  source 1..75: mol_type = other DNA
tatcgagaaagttcgtcgtgcgctgtatctgggcaaaatcgtttcttacgctcagggcttctctcagctgcgtgc

SEQ ID NO: 427486 - DNA, 75 bp, synthetic construct
  source 1..75: mol_type = other DNA
ccaactattacaggcagcgaagcaggaacataaacctgtaatagagctggaaggagcagaaagccagattgcgct

SEQ ID NO: 427487 - DNA, 75 bp, synthetic construct
  source 1..75: mol_type = other DNA
aaccaccaaatttgacgcgcacttcaccggtaccgccgctcacgcaggcgcaaaaccagaagacggtcacaatgc

SEQ ID NO: 427488 - DNA, 75 bp, synthetic construct
  source 1..75: mol_type = other DNA
gcgcatgtgattgcaggcgcgggtcactgggtacacgcagaaaaaccggatgcggtgttgcgcgccatccgtcgc

SEQ ID NO: 427489 - DNA, 75 bp, synthetic construct
  source 1..75: mol_type = other DNA
cgattatcacgttcgtcgtcatgatgagattttcgcagccatcaacgccgtcagtaaatccaacgcgcaaacgcg

SEQ ID NO: 427490 - DNA, 75 bp, synthetic construct
  source 1..75: mol_type = other DNA
attcttagcctttcagtggttattcttgaagtcagtctgatctcagccttaatggcgaccggcgatgccgcgccg

SEQ ID NO: 427491 - DNA, 75 bp, synthetic construct
  source 1..75: mol_type = other DNA
atccctggcggcaattctccgtatgttagcgagcagtaccgtgatgatttactggcacaatttccacaggcacgg

SEQ ID NO: 427492 - DNA, 75 bp, synthetic construct
  source 1..75: mol_type = other DNA
ctggcccccgatcgcatcgataaactggtggcgattgatatcgcgccggtcgactatcacgtacgccgtcatgat

SEQ ID NO: 427493 - DNA, 75 bp, synthetic construct
  source 1..75: mol_type = other DNA
gatgcacagcagatcgataaggcaacatttattggacactcaatgggcggtaaagcggtgatggcactgactgca

SEQ ID NO: 427494 - DNA, 75 bp, synthetic construct
  source 1..75: mol_type = other DNA
ggcggtcgtaagtttgccacccaatatatgaatctgtttggtatcaagcagtatttaattgcgctgttccccctg

SEQ ID NO: 427495 - DNA, 75 bp, synthetic construct
  source 1..75: mol_type = other DNA
atatgaatctgtttggtatcaagcagtatttaattgcgctgttccccctggcgataatcgtactggtatttccaa

SEQ ID NO: 427496 - DNA, 75 bp, synthetic construct
  source 1..75: mol_type = other DNA
gatgtcgcaccgaagaatgtgcgcaaagcagctggtgggcagttcggatggtgtatgcagatgctggcacaattt

SEQ ID NO: 427497 - DNA, 75 bp, synthetic construct
  source 1..75: mol_type = other DNA
aaccccgccacaaggagacttcgcttattttcccggttctggcgctggtagtgctgttcctgtggggaagcagcc

SEQ ID NO: 427498 - DNA, 75 bp, synthetic construct
  source 1..75: mol_type = other DNA
caaccttcttgcgcttattggtattttaagcagtgcctttagtgttgttcgtcatgctgacgtattagcgcatcg

SEQ ID NO: 427499 - DNA, 75 bp, synthetic construct
  source 1..75: mol_type = other DNA
tttggtatcaagcagtatttaattgcgctgttccccctggcgataatcgtactggtatttccaatggctctgcct

SEQ ID NO: 427500 - DNA, 75 bp, synthetic construct
  source 1..75: mol_type = other DNA
attgatattgcgccggtcgattatcacgttcgccgtcatgatgagattttcgcggccatcaacgcagtcagtgaa

SEQ ID NO: 427501 - DNA, 75 bp, synthetic construct
  source 1..75: mol_type = other DNA
ccacccacaaactgctgaatgcgctgtcacaggcctcttatattcatgtacgtgaaggtcgtggggcgattaact

SEQ ID NO: 427502 - DNA, 75 bp, synthetic construct
  source 1..75: mol_type = other DNA
acagtgtggagacagcgccacgttttttgacgggcttccggcatttattgatgcgcaggaactgcctgccgtggc

SEQ ID NO: 427503 - DNA, 75 bp, synthetic construct
  source 1..75: mol_type = other DNA
agcaaaccagaattcatcaaaccggaagatgtttccgctgaagtggtagagaaagaataccaggttcagctggat

SEQ ID NO: 427504 - DNA, 75 bp, synthetic construct
  source 1..75: mol_type = other DNA
tattgccgtcgaaacgctggcgcgcaccgcgctcaatttccctggacgcgaggtatctgatgcaggaaatctatc

SEQ ID NO: 427505 - DNA, 75 bp, synthetic construct
  source 1..75: mol_type = other DNA
cgagtccggactacatggcgtcatcaaactgatttttcagcctgcagaggaaggtacgcgtggcgcgcgggcgat

SEQ ID NO: 427506 - DNA, 75 bp, synthetic construct
  source 1..75: mol_type = other DNA
gcactgccacccttgttgcggaagaattgcagcagctcggctattcactggcgctgggccgcgaagtagttaatg

SEQ ID NO: 427507 - DNA, 75 bp, synthetic construct
  source 1..75: mol_type = other DNA
accggaaaaatggtggatgaggctgactggcaggcggttctgcatgtcgcggtctttatccgggcgcaggcaccg

SEQ ID NO: 427508 - DNA, 75 bp, synthetic construct
  source 1..75: mol_type = other DNA
cttcatcccaggtctgaccgaactggtcgagacgttcaccccgcagggttatgactatcagcgggatgatgaaat

SEQ ID NO: 427509 - DNA, 75 bp, synthetic construct
  source 1..75: mol_type = other DNA
tatgatattgttaatacgcttaaaaaacatataggcaaagatgagtataatcagtatgaatcacttcgtcagcgt

SEQ ID NO: 427510 - DNA, 75 bp, synthetic construct
  source 1..75: mol_type = other DNA
tcgaagtgggtgaaggcatcgagaaagttgagactgattttgcagcagaagttgctgcaatgtccaagcagtctt

SEQ ID NO: 427511 - DNA, 75 bp, synthetic construct
  source 1..75: mol_type = other DNA
gctgaagtgactggcttcatccgcttcgaagtgggtgaaggcatcgagaaagttgagactgactttgcggcagaa

SEQ ID NO: 427512 - DNA, 75 bp, synthetic construct
  source 1..75: mol_type = other DNA
aaagtgctgctaaatatggcaagctgactgacgactacgatacctatcgacacgataaacatggcacgtttggtg

SEQ ID NO: 427513 - DNA, 75 bp, synthetic construct
  source 1..75: mol_type = other DNA
tcaccctgtaccacaatggtttcacctgcgaagccgatacccttggcagttgcggctatgtatacatcgccgttt

SEQ ID NO: 427514 - DNA, 75 bp, synthetic construct
  source 1..75: mol_type = other DNA
agcgggatatcacgccgcgcctgggagcacgtctggtgcaggagggcaaccggctgcactatctggctgaccggg

SEQ ID NO: 427515 - DNA, 75 bp, synthetic construct
  source 1..75: mol_type = other DNA
gggcttatccatgaagtctggcgacatgcgctgaacaaaatcagccaggacaaactaaacagtaattatattatc

SEQ ID NO: 427516 - DNA, 75 bp, synthetic construct
  source 1..75: mol_type = other DNA
gttaccctgtaccacaacggttttacctgcgaagccgacacccttggcagttgcggctacgtatacatcgccatt

SEQ ID NO: 427517 - DNA, 75 bp, synthetic construct
  source 1..75: mol_type = other DNA
ttcaagggacaaccttccaaaccgttcgttggcgttctgagtgcaggcattaacgctgccagcccgaacaaagaa

SEQ ID NO: 427518 - DNA, 75 bp, synthetic construct
  source 1..75: mol_type = other DNA
gcgtcacgctgtatgcgaaaggattaacctgtgaagccgatacgctcggctcttgtggctacgtctatatcgcca

SEQ ID NO: 427519 - DNA, 75 bp, synthetic construct
  source 1..75: mol_type = other DNA
tctaaaaatattgagttaacggcggaagatttaaatcttgagcaaaccgtagaattagcctcaggagcattacag

SEQ ID NO: 427520 - DNA, 75 bp, synthetic construct
  source 1..75: mol_type = other DNA
tcgccgcaacaccaaaagcggtaaaagcagcatatgaccttgctaacgggaaatatacagcacaggacgccacca

SEQ ID NO: 427521 - DNA, 75 bp, synthetic construct
  source 1..75: mol_type = other DNA
tcagattacggaaattttgattcccgctatgtgaaagatgttcgcctgggtacgcgtgttgttcagaccatgcaa

SEQ ID NO: 427522 - DNA, 75 bp, synthetic construct
  source 1..75: mol_type = other DNA
cttatggtctccgttcaagaggtgagattacatcactcagtgctaatggtctgcgcattgcttatggcaattatg

SEQ ID NO: 427523 - DNA, 75 bp, synthetic construct
  source 1..75: mol_type = other DNA
cggctcaaactctgccgataacattggtggcgtatattacagaccgattcagaaatacattaacgggatatggta

SEQ ID NO: 427524 - DNA, 75 bp, synthetic construct
  source 1..75: mol_type = other DNA
agcgcaggagggcatgctcacaatgtatatatcggtgcccataaccacactatcggcattggtgctcatgcccat

SEQ ID NO: 427525 - DNA, 75 bp, synthetic construct
  source 1..75: mol_type = other DNA
tggcaaaggtggccttctcgatcagttcactaacaatgatatgccgcgcattgccatcagcgtggatatgctaga

SEQ ID NO: 427526 - DNA, 75 bp, synthetic construct
  source 1..75: mol_type = other DNA
cgtgccgccttatctctgcaattttcaggttatgaagattcagaccaaattccagatggaaggcatcagcaaacg

SEQ ID NO: 427527 - DNA, 75 bp, synthetic construct
  source 1..75: mol_type = other DNA
gcccgggccggaaggcgaaccacagccaggaaacacccccgtatccttcccgccgcagggcagcgttgctgttcc

SEQ ID NO: 427528 - DNA, 75 bp, synthetic construct
  source 1..75: mol_type = other DNA
gcatcgtatgcacgcaataattgatacagatcattatgttgaaggcaacatgtcaactgatttgcagttaattga

SEQ ID NO: 427529 - DNA, 75 bp, synthetic construct
  source 1..75: mol_type = other DNA
ggggcgcagccgtcgcggggatgtctggtgccaccaaagtcatcaccaaaagcccgcacgaagcctggggaatcc

SEQ ID NO: 427530 - DNA, 75 bp, synthetic construct
  source 1..75: mol_type = other DNA
ggttgaagaagaatccgcaccagttaccaactttgaaacactgcgcaataactttatggctaaattcaaaaccac

SEQ ID NO: 427531 - DNA, 75 bp, synthetic construct
  source 1..75: mol_type = other DNA
acagtcagcatgtggggggaagacgttccgtggaaatgggcgttgctaattcaggccagtcactgccggggcgct

SEQ ID NO: 427532 - DNA, 75 bp, synthetic construct
  source 1..75: mol_type = other DNA
gatcccctcttttcttttggcaggtcagcagactcctgccttcgggcgccgtgtaacaggcatcatcgaggttgc

SEQ ID NO: 427533 - DNA, 75 bp, synthetic construct
  source 1..75: mol_type = other DNA
aacatacgctcaatactcaaccggttggagatacttcgttatcgacaccagctgccccgatggtggattcgttaa

SEQ ID NO: 427534 - DNA, 75 bp, synthetic construct
  source 1..75: mol_type = other DNA
tacaaatattatctgactctgttctggttggcgacgaggaaaaaacaaaagacgagaaaaaatatggggaaggga

SEQ ID NO: 427535 - DNA, 75 bp, synthetic construct
  source 1..75: mol_type = other DNA
ttaattttccagttaagccaataaaatatagtaatcaagctaaagaggtttcacttctagacccaagcgcaaatg

SEQ ID NO: 427536 - DNA, 75 bp, synthetic construct
  source 1..75: mol_type = other DNA
ctttaccaaaccgaatattgtgatcaaacccaatgccaatagccgcccgaccggggataccactggctatctggc

SEQ ID NO: 427537 - DNA, 75 bp, synthetic construct
  source 1..75: mol_type = other DNA
tgtggacgggaagtaaaatttacccttgaggtgctccggggagactctgttgagagcgcttcacgcgtatggtca

SEQ ID NO: 427538 - DNA, 75 bp, synthetic construct
  source 1..75: mol_type = other DNA
ttgttatcgtgatagttgctcgcttaatcctgaaaggatatcgtgcagaacccgtgctttttattgccgggcttg

SEQ ID NO: 427539 - DNA, 75 bp, synthetic construct
  source 1..75: mol_type = other DNA
ggcacacatctgctggaaaacatccacaacatctgggtgaacggggtaggcacgaatagtgcgccgttctggcgg

SEQ ID NO: 427540 - DNA, 75 bp, synthetic construct
  source 1..75: mol_type = other DNA
gagaagaaaattcaatgctttttgtattgttatatccttttgctggcaataacaggaagaaggccattacaatta

SEQ ID NO: 427541 - DNA, 75 bp, synthetic construct
  source 1..75: mol_type = other DNA
tggagaaaataaaaatcattccaaaccaaacaggagatgcagttaaaagacgagatccaaataaaggacctttaa

SEQ ID NO: 427542 - DNA, 75 bp, synthetic construct
  source 1..75: mol_type = other DNA
catggaacttacaaaatagatagcgccgcacactggaaaaaatacgggcgagcggatgttttgatctttcatcgg

SEQ ID NO: 427543 - DNA, 75 bp, synthetic construct
  source 1..75: mol_type = other DNA
cgtttcttttccgccagttctttatgaccctaccggatgaactggtggaagccgcgcggatcgacggcgcgtcgc

SEQ ID NO: 427544 - DNA, 75 bp, synthetic construct
  source 1..75: mol_type = other DNA
cgccgcgccgatgacgctcatccccggcacgcatctgctggaaaacatccacaacatctgggtgaacggagtcgg

SEQ ID NO: 427545 - DNA, 75 bp, synthetic construct
  source 1..75: mol_type = other DNA
agccacgcaagcaccttaaaatcaccatcatacactaaatcagtaagttggcagcattacctggaagaggtggtg

SEQ ID NO: 427546 - DNA, 75 bp, synthetic construct
  source 1..75: mol_type = other DNA
gtttggtttctttctctggttgctcagaaacggcccagactttgcgacgtcaatcatcgactcgttgagaatgat

SEQ ID NO: 427547 - DNA, 75 bp, synthetic construct
  source 1..75: mol_type = other DNA
ttctaagggaatctggttatcggattaactcatcgaaggctaatgagaataacaaatttattattgaaattagct

SEQ ID NO: 427548 - DNA, 75 bp, synthetic construct
  source 1..75: mol_type = other DNA
cgaccggctacgcagtctcccagactgccgtgccttgctagagccgctggatcatcagggcttgttggccggagg

SEQ ID NO: 427549 - DNA, 75 bp, synthetic construct
  source 1..75: mol_type = other DNA
caacacggcgaagatcgtgagatcttcgagcgcctctatgcagtgcggctcgaccggctacgcagtctcccagac

SEQ ID NO: 427550 - DNA, 75 bp, synthetic construct
  source 1..75: mol_type = other DNA
ggctgtagcacgtatcaaggatggtagcatcattgggtatgtctatgaccccatgtctgcgaagctggtgaaggc

SEQ ID NO: 427551 - DNA, 75 bp, synthetic construct
  source 1..75: mol_type = other DNA
ctcaagccatacgccgtatggcagctaaagagagatatttcagctttggaattattcagggccttctcagcattg

SEQ ID NO: 427552 - DNA, 75 bp, synthetic construct
  source 1..75: mol_type = other DNA
cccctgtgtggtgccgatgaaaaagttcaggagcgaatgaacggtttcctgaatcaggagttcccgtcgaagact

SEQ ID NO: 427553 - DNA, 75 bp, synthetic construct
  source 1..75: mol_type = other DNA
aatcgaaagcggtaaatgggtgctgactgctgaactggccgcgcagcttgtcgcgcaggtggccgcccgtaccac

SEQ ID NO: 427554 - DNA, 75 bp, synthetic construct
  source 1..75: mol_type = other DNA
tgttcaatgatgggcactgatccagaggatatcgcccgttatgcaggaaacgactattacgcaggagatgagtaa

SEQ ID NO: 427555 - DNA, 75 bp, synthetic construct
  source 1..75: mol_type = other DNA
cggtggacgttaacgccatcgaccagtttgtgaaacaaggcatgagcattcctgaggcaatcaaggccgtgatgc

SEQ ID NO: 427556 - DNA, 75 bp, synthetic construct
  source 1..75: mol_type = other DNA
agtacggtggctccgttgtcattgcaacgcagtccatcaacgacctctatgagaacgcagtgggccgcgccatcg

SEQ ID NO: 427557 - DNA, 75 bp, synthetic construct
  source 1..75: mol_type = other DNA
cctacgggccgatgctcaaattcgtgccggtgctggcggacaaaaaggagagcttcgacactctctatgagtcca

SEQ ID NO: 427558 - DNA, 75 bp, synthetic construct
  source 1..75: mol_type = other DNA
gcgtgcacctgacatctgaaaagcctgactggatgaatggcttcaagggatcgtctaacgcggcgaagcgcgcca

SEQ ID NO: 427559 - DNA, 75 bp, synthetic construct
  source 1..75: mol_type = other DNA
gaggaagtgttacttgctgccgcctccctgatggccgcgcatttaaccacagagggtcagaccgaaatggatgaa

SEQ ID NO: 427560 - DNA, 75 bp, synthetic construct
  source 1..75: mol_type = other DNA
aacacagtgatattgcgtagaatacccgtgcaatccgactgggctaatgaagcacttaatcaacgtgtctcacca

SEQ ID NO: 427561 - DNA, 75 bp, synthetic construct
  source 1..75: mol_type = other DNA
acgcgatcaattggaagggcagttgcgcggctacatccttgaccgcctgaatatcgccatgtcagagcctggcga

SEQ ID NO: 427562 - DNA, 75 bp, synthetic construct
  source 1..75: mol_type = other DNA
aggcgttggcaacggttggctttcgagtcacagaaatgactgaccgaaaatggctcgcggcattaagtgcgcagc

SEQ ID NO: 427563 - DNA, 75 bp, synthetic construct
  source 1..75: mol_type = other DNA
tacgcaggcgtttatgaagatgggcactgtaccaggaacagtagctggggaggcaatacgtttcgctggtcagta

SEQ ID NO: 427564 - DNA, 75 bp, synthetic construct
  source 1..75: mol_type = other DNA
ggtaaagcaagcaaacaagacaaatcctttgaagtagtatccggtaagactctgaccgaaatgcgtcagaatgct

SEQ ID NO: 427565 - DNA, 75 bp, synthetic construct
  source 1..75: mol_type = other DNA
gtgggagaagaaaatatgtcagcattgtaatggtaagggagaagtcagcacggcgtgtcgagggtgtaagggtaa

SEQ ID NO: 427566 - DNA, 75 bp, synthetic construct
  source 1..75: mol_type = other DNA
gtcattgataaactggttacaaagtgctggcaggaagaagcatatgctgaagcgcaattgagaaaagtgacaaga

SEQ ID NO: 427567 - DNA, 75 bp, synthetic construct
  source 1..75: mol_type = other DNA
cctgaaagccgataacatcgcgcctacggcatgggttccgaacatgcactttgttgcaccgattaacgaccaatt

SEQ ID NO: 427568 - DNA, 75 bp, synthetic construct
  source 1..75: mol_type = other DNA
tctgactgcttgtcaaaataactatgtaagggatgttcagggaggaacgattgctccatcatcatcctcgaaact

SEQ ID NO: 427569 - DNA, 75 bp, synthetic construct
  source 1..75: mol_type = other DNA
ataagatttgtgggcgttgcaatggaaaacggtttagtcgtttaccaaccacactggcgcggcatcatgtccaga

SEQ ID NO: 427570 - DNA, 75 bp, synthetic construct
  source 1..75: mol_type = other DNA
tagaaaatgtccgtagttctaaaatagcatatgcgacagctatatcgttagacaaaaaattaaatagtaataaat

SEQ ID NO: 427571 - DNA, 75 bp, synthetic construct
  source 1..75: mol_type = other DNA
ggagtttaaacattttgacattgaatcttatcaaaaaaatgctttgtcgatgttttatgaaaaatgccttcatta

SEQ ID NO: 427572 - DNA, 75 bp, synthetic construct
  source 1..75: mol_type = other DNA
caacacgtactggtaacacgattactgtgactggtgcgggcgaggcgaggaactggacactgtgcttgcgcaata

SEQ ID NO: 427573 - DNA, 75 bp, synthetic construct
  source 1..75: mol_type = other DNA
gctgattattccaggtctgcggcaagtaaggctcgctgtgagccttgtgctggtactggatttcataatgtattg

SEQ ID NO: 427574 - DNA, 75 bp, synthetic construct
  source 1..75: mol_type = other DNA
atgaatcttgaggccttaccaaaatattactccccaaaatctccaaaattgagcgatgacgcaccggcgacagac

SEQ ID NO: 427575 - DNA, 75 bp, synthetic construct
  source 1..75: mol_type = other DNA
actaaaaccaaactcaaatcacattatatttacaatggatcgcagtcaagcacctggtgacaacacaataaccaa

SEQ ID NO: 427576 - DNA, 75 bp, synthetic construct
  source 1..75: mol_type = other DNA
cccgactttttctgcgggtgcggtttatattgacccggatgtgaatatcagcggaacgtctccgtctggtcgtag

SEQ ID NO: 427577 - DNA, 75 bp, synthetic construct
  source 1..75: mol_type = other DNA
catccattgttcggccctgatcctgttaaggaaggtgcgaataagtggggaaattcttctcggctgactcagtca

SEQ ID NO: 427578 - DNA, 75 bp, synthetic construct
  source 1..75: mol_type = other DNA
atggcaagtaaagatctgcatttaaacctgaaaggagaatacttttacgccatccgggcgggaaagaaggtggaa

SEQ ID NO: 427579 - DNA, 75 bp, synthetic construct
  source 1..75: mol_type = other DNA
atgtcagaagataaaaaagttgttaatttgttgagtgaacttagtgctgctctggataacattaaccctcccagg

SEQ ID NO: 427580 - DNA, 75 bp, synthetic construct
  source 1..75: mol_type = other DNA
gtaagaagttctatttcattgaaaaaagatgtaggtggaactgatgttcaaagttatcaggtgaaagatattgtt

SEQ ID NO: 427581 - DNA, 75 bp, synthetic construct
  source 1..75: mol_type = other DNA
ctatcctgcgtgagaaagtcggcaacgaggccttattctgggggggcgtggtgagtattattggatttatctact

SEQ ID NO: 427582 - DNA, 75 bp, synthetic construct
  source 1..75: mol_type = other DNA
ctgcagggactcggcctgggtagctggatcacgcagcagtttgttctctgggccagaggccttccgccagcaacc

SEQ ID NO: 427583 - DNA, 75 bp, synthetic construct
  source 1..75: mol_type = other DNA
gcggaacttctccgtctggtcgtagcctcgacgcggataacatcgcacctacagcatgggttccgaacgcacact

SEQ ID NO: 427584 - DNA, 75 bp, synthetic construct
  source 1..75: mol_type = other DNA
ctaccgccaacggtatcgacagtaataccaaaatcgctcatctgaacggtaaccagtggggctttggctggaacg

SEQ ID NO: 427585 - DNA, 75 bp, synthetic construct
  source 1..75: mol_type = other DNA
ctggctgagcgcaggtactacttacgcatttaataaagatgcttctgtagatgtcggcgtctcttatatgcacgg

SEQ ID NO: 427586 - DNA, 75 bp, synthetic construct
  source 1..75: mol_type = other DNA
gcaaccatacctttttatgctgtcacttatatatttatttacactaagctatactttaaaagtgtttttatgtaa

SEQ ID NO: 427587 - DNA, 75 bp, synthetic construct
  source 1..75: mol_type = other DNA
atgaataaaactgtttatacatatgatgtatgggatactattttaaaacgtcattgtttaccatcatatacgtta

SEQ ID NO: 427588 - DNA, 75 bp, synthetic construct
  source 1..75: mol_type = other DNA
ggttcgggaccatcgaatcggtcacttatgatattgccgagggttcggttgtcagtctggcggccggagggatca

SEQ ID NO: 427589 - DNA, 75 bp, synthetic construct
  source 1..75: mol_type = other DNA
ggcctacgatgatgagtcctgtgatgtggtgcgcttcttcacgcaactgaaatgccgcatgatgccgtatctgta

SEQ ID NO: 427590 - DNA, 75 bp, synthetic construct
  source 1..75: mol_type = other DNA
ttaccccgcaacaagccacagaaatcaccgcgttcgccaataaaattaaagatagcggttacaactatcgcggca

SEQ ID NO: 427591 - DNA, 75 bp, synthetic construct
  source 1..75: mol_type = other DNA
gatggttggataagctgtagtgagcgaatgcccgctcaagatgattggattttaatttattcaaagcacggcgag

SEQ ID NO: 427592 - DNA, 75 bp, synthetic construct
  source 1..75: mol_type = other DNA
tgcctactgttcaggctggcaactatccggtaactccggatggttggataagctgtagtgagcgaatgcccgctc

SEQ ID NO: 427593 - DNA, 75 bp, synthetic construct
  source 1..75: mol_type = other DNA
atgccagaaagggtcctgaatttcagggccctttttttacatggattgtataaaatggataaaccaaaggcgtac

SEQ ID NO: 427594 - DNA, 75 bp, synthetic construct
  source 1..75: mol_type = other DNA
atggataaaccaaaggcgtactgccgcctgcttctcccctgctttcttttactttcggcctgtaccgttgatatc

SEQ ID NO: 427595 - DNA, 75 bp, synthetic construct
  source 1..75: mol_type = other DNA
gatagcggttataactatcgcggcattgtcgagttcattccctttatggtgacccgccagatgtgctcactgaat

SEQ ID NO: 427596 - DNA, 75 bp, synthetic construct
  source 1..75: mol_type = other DNA
atgaaatcagatgttcaactcaacctaagagctaaagagtctcagagagcactcatcgatgccgctgcagagatc

SEQ ID NO: 427597 - DNA, 75 bp, synthetic construct
  source 1..75: mol_type = other DNA
gatgggcggttttccggaagacgaatcgaaagcgttcgctattatctcctggggcgcggcggtagcaggcatgtc

SEQ ID NO: 427598 - DNA, 75 bp, synthetic construct
  source 1..75: mol_type = other DNA
cgccaaccgacattccagatggttgtagatgacatcaatgctgtatcccacagtaaattaataggaagaccataa

SEQ ID NO: 427599 - DNA, 75 bp, synthetic construct
  source 1..75: mol_type = other DNA
atgcttgatgctccggttgcagatgatcctgccatcgaaaaattgctggcaaggaaacctcaatgggatgtgtaa

SEQ ID NO: 427600 - DNA, 75 bp, synthetic construct
  source 1..75: mol_type = other DNA
gtgtttaattttaatgacaggcaatatgaagagttcatcgaaatgcttgatgctccggttgcagatgagcctgcc

SEQ ID NO: 427601 - DNA, 75 bp, synthetic construct
  source 1..75: mol_type = other DNA
tcagagcaagagaatctcagcggatactcattgacaccgctgcagaaattcttcataagtcgcgtacagacttca

SEQ ID NO: 427602 - DNA, 75 bp, synthetic construct
  source 1..75: mol_type = other DNA
atgccgaggcaaaaacatgggctgtcaaattccagcatcaaagctctttcaccgaacaatcaaaaagaaataacg

SEQ ID NO: 427603 - DNA, 75 bp, synthetic construct
  source 1..75: mol_type = other DNA
caatcgctgggatgatggcaccgaatatccggatccgcactcagttacgcactggcgtgaaatgccagcagcgcc

SEQ ID NO: 427604 - DNA, 75 bp, synthetic construct
  source 1..75: mol_type = other DNA
aaaaagatggtcttgaatgggctgcgcagcttgcagaagcaaatcacccacaaactggcgactggatttacgatg

SEQ ID NO: 427605 - DNA, 75 bp, synthetic construct
  source 1..75: mol_type = other DNA
gcaggatgcgccagttgaaggcagcagcaaagcggctgcatacgctacaggctggaacgcctgccgcgcagccat

SEQ ID NO: 427606 - DNA, 75 bp, synthetic construct
  source 1..75: mol_type = other DNA
tgttcagtggtttgacggttccgatccgcagaaaatgcataaccattatgcgtacatctacaacgaactggtgtg

SEQ ID NO: 427607 - DNA, 75 bp, synthetic construct
  source 1..75: mol_type = other DNA
ccgcagaaaatgcataaccattatgcgtacatctacaacgaactggtgtggaaagtgctcaaggaaaccgttggc

SEQ ID NO: 427608 - DNA, 75 bp, synthetic construct
  source 1..75: mol_type = other DNA
ttattaaactaataaagaataatggcggggaaattttaaatccaaaaattgatgggttagatgttgaattcaagg

SEQ ID NO: 427609 - DNA, 75 bp, synthetic construct
  source 1..75: mol_type = other DNA
aacagcgtgtggcgattggtcgggcattgctgacggcaccggaattactgttgctggatgaaccactggcttcgt

SEQ ID NO: 427610 - DNA, 75 bp, synthetic construct
  source 1..75: mol_type = other DNA
ttgtcgagttcattccgtttatggtgacccgccagatgtgctcactaaatcctttctccgaagattttcgccaac

SEQ ID NO: 427611 - DNA, 75 bp, synthetic construct
  source 1..75: mol_type = other DNA
attttcgccaacagtgcgtcagcggcctggcgaaagcgcagttaagcagtgtgggcgaaggagacaaaaagtcgt

SEQ ID NO: 427612 - DNA, 75 bp, synthetic construct
  source 1..75: mol_type = other DNA
agccgcagagaagcgcatagcagaactggaagccgaacctgtaagccaaacttacaggttgaacgagctatctgg

SEQ ID NO: 427613 - DNA, 75 bp, synthetic construct
  source 1..75: mol_type = other DNA
aaggggaatacgtggagttgagcgacggcactttatcgtggttagggaacgtcttgttctggatgccgctaccag

SEQ ID NO: 427614 - DNA, 75 bp, synthetic construct
  source 1..75: mol_type = other DNA
taatcctcttagcatgtacgcggttgatgctgttgccgctattgcagaggtgagaggctggaacgcctgccgcgc

SEQ ID NO: 427615 - DNA, 75 bp, synthetic construct
  source 1..75: mol_type = other DNA
atgccctgaaaaacatcaacctggatatcgctaaaaaccaggtaacggcgtttatcgggccgtccggctgcggta

SEQ ID NO: 427616 - DNA, 75 bp, synthetic construct
  source 1..75: mol_type = other DNA
ggcgatgaacttcgttccggcaaactcgacgttttctacgatctttacaatctggcgcaaaaacgccgcttcgaa

SEQ ID NO: 427617 - DNA, 75 bp, synthetic construct
  source 1..75: mol_type = other DNA
aattcgacctcgatcaggcgttctcggccaaaatctttgaccgctacctgaatctgcttgattacagccacaacg

SEQ ID NO: 427618 - DNA, 75 bp, synthetic construct
  source 1..75: mol_type = other DNA
tcccgattcactgtttggcgtacagggttgctctaccgatccaacttttccctttaacctgccgctggcacagtg

SEQ ID NO: 427619 - DNA, 75 bp, synthetic construct
  source 1..75: mol_type = other DNA
aaggctactgaattaaaaaataaaaagcatgtggcgcagtggcgttccacgctggaaacctatgcttacccggtt

SEQ ID NO: 427620 - DNA, 75 bp, synthetic construct
  source 1..75: mol_type = other DNA
gcagtcctaaaacaaatgggatacaccaatttaacgcagcatgggttcagatcgacattccgttattgggctggt

SEQ ID NO: 427621 - DNA, 75 bp, synthetic construct
  source 1..75: mol_type = other DNA
taccgaacagttcaacactgaaatgagtttgtcgctggaaggtattggcgcagtgctgcaaatggatgatgacta

SEQ ID NO: 427622 - DNA, 75 bp, synthetic construct
  source 1..75: mol_type = other DNA
gagccagatccgtatctggatgaaacagtaaacatcgcgcttgatttagcgcgtctggaaaaagccagacctgcg

SEQ ID NO: 427623 - DNA, 75 bp, synthetic construct
  source 1..75: mol_type = other DNA
aggccagaccttcgctgtagaagatatcacgcgtgctgatcaaattccggtattaaaggaagagacgcagcatgc

SEQ ID NO: 427624 - DNA, 75 bp, synthetic construct
  source 1..75: mol_type = other DNA
accgctacctgaatctgctcgattacagccacaacgtgctgctggcaagcgatgttgaacagttcgcgaaaaaga

SEQ ID NO: 427625 - DNA, 75 bp, synthetic construct
  source 1..75: mol_type = other DNA
tgctggatattccgggcttctatgttggcttgacggacgatgtcaaagttcaactgcagaaactggaaaaacaaa

SEQ ID NO: 427626 - DNA, 75 bp, synthetic construct
  source 1..75: mol_type = other DNA
agttcgatctcgatcaggcgttctcggccaaaatctttgaccgctacctgaacttgcttgattacagccacaatg

SEQ ID NO: 427627 - DNA, 75 bp, synthetic construct
  source 1..75: mol_type = other DNA
gcgtgatggcattttacggcagcattttgggactgaagttttcgctcaaactgaacgatatccaccatgcagtac

SEQ ID NO: 427628 - DNA, 75 bp, synthetic construct
  source 1..75: mol_type = other DNA
gtgctctgcgtcacctccgatattaacgtgccacgcattccttcgatgaaagccattctcggcgcggcgaaaaag

SEQ ID NO: 427629 - DNA, 75 bp, synthetic construct
  source 1..75: mol_type = other DNA
gtgctatcccgcgggccgcacagcctgtatttggtgcaggatgcgcaacttgaacatgcactgcctctcgatacc

SEQ ID NO: 427630 - DNA, 75 bp, synthetic construct
  source 1..75: mol_type = other DNA
tgcaggatgcccagcttgagcatgctctcccccttgatacggctaaggcactggccgcggcggcagaaaagatcg

SEQ ID NO: 427631 - DNA, 75 bp, synthetic construct
  source 1..75: mol_type = other DNA
acgcttttgtcgtcagtagcgtgccgctcaatttggcggccttaatggacgcactgtccaaaaacttgcctgcct

SEQ ID NO: 427632 - DNA, 75 bp, synthetic construct
  source 1..75: mol_type = other DNA
taaaggggtggcgacggaacatgcagcgctgctaaaccgaattgtctggatgcagaacgcttatcctatcagttc

SEQ ID NO: 427633 - DNA, 75 bp, synthetic construct
  source 1..75: mol_type = other DNA
ttacctccggtactaccgggcagcccaaaggcgtccgactcagccaacgtaatctggtcaacttaaccgcatcct

SEQ ID NO: 427634 - DNA, 75 bp, synthetic construct
  source 1..75: mol_type = other DNA
atcaacgtgggacattatggcctaagcggatggcgttgatggatgagtggacggggttttgtcttgccaatgttt

SEQ ID NO: 427635 - DNA, 75 bp, synthetic construct
  source 1..75: mol_type = other DNA
atcaacgtgggacgttatggcctaagcgggtagcactgatggatgagtggtcggggttttgtcttgccaatgttt

SEQ ID NO: 427636 - DNA, 75 bp, synthetic construct
  source 1..75: mol_type = other DNA
gcgtatcaacgtgggacgttatggcctaaacgggtggcgttgatggatgagtggtcggggtattgtgtttcttag

SEQ ID NO: 427637 - DNA, 75 bp, synthetic construct
  source 1..75: mol_type = other DNA
atgagatagccgcgctgaccgttggcggctcattgttgcagaactcgaaagtgcgcaaagacgtgctatcccgcg

SEQ ID NO: 427638 - DNA, 75 bp, synthetic construct
  source 1..75: mol_type = other DNA
atgaccactattaccaaagaacgtgcggagattaaatcattcatcacaggcttcctgagcgacccggcgcacgat

SEQ ID NO: 427639 - DNA, 75 bp, synthetic construct
  source 1..75: mol_type = other DNA
tgcgcttctatgaacaggttaagcgtgaaaatccgccagtcgaaaccggagcatggaaagacgctgttgactggg

SEQ ID NO: 427640 - DNA, 75 bp, synthetic construct
  source 1..75: mol_type = other DNA
cggttgcattggtggggggaagaaattcattacctcttccaaaaaatgtgatagccgcgcagtggctaattgaaa

SEQ ID NO: 427641 - DNA, 75 bp, synthetic construct
  source 1..75: mol_type = other DNA
atcaacgtgatgtgggccgggatgggcgttgcgctgctgggggttctcttcatgctggtgctggaacgcaatgaa

SEQ ID NO: 427642 - DNA, 75 bp, synthetic construct
  source 1..75: mol_type = other DNA
accggtgtcgctacgctgattgtttactgggtgccgatgatatgggggaataactatgtcgcctttatgctggcg

SEQ ID NO: 427643 - DNA, 75 bp, synthetic construct
  source 1..75: mol_type = other DNA
gtttggttgcgtgtacagcctgaaggccagcctttctggtgtgccggatacattccggtatcatctgtctcaccg

SEQ ID NO: 427644 - DNA, 75 bp, synthetic construct
  source 1..75: mol_type = other DNA
gagtacgtgaagagcatagcttgcaacaagttgaacttcccctaatgctttatttggggactgctcgcttatggt

SEQ ID NO: 427645 - DNA, 75 bp, synthetic construct
  source 1..75: mol_type = other DNA
ttaactttcgttgcttcaaacagctcgatatcacttttgatgagcacattacgattctggttgcaccgaatggcg

SEQ ID NO: 427646 - DNA, 75 bp, synthetic construct
  source 1..75: mol_type = other DNA
gtggcgataccagatcaggcagagtatgagccggagcggaaactgctgggataacagcccaatggaacgcttctt

SEQ ID NO: 427647 - DNA, 75 bp, synthetic construct
  source 1..75: mol_type = other DNA
agactaagacagaacggaatgccggtagtgacaacgaatgtggaggtgcacgataacctgacgggaacaacccgc

SEQ ID NO: 427648 - DNA, 75 bp, synthetic construct
  source 1..75: mol_type = other DNA
aagcgccccgtgaacggctgaagcatgcgctggaggcggggttgctggtgactgcactggacggcctgttctggt

SEQ ID NO: 427649 - DNA, 75 bp, synthetic construct
  source 1..75: mol_type = other DNA
tcagcaggttgcccgggaagtgaaagcgccccgtgaacggctgaagtatgcgctggaggcggggttactggtgac

SEQ ID NO: 427650 - DNA, 75 bp, synthetic construct
  source 1..75: mol_type = other DNA
gtggtgaccacgaccgtggaggtgcacgataacctgacaggaacaacccgcaaaataccggcataccatctctga

SEQ ID NO: 427651 - DNA, 75 bp, synthetic construct
  source 1..75: mol_type = other DNA
agactaagacagagcggaatgccggtggtgacaacgtccgtggaagtgagcgataacctgacgggaacaacccgc

SEQ ID NO: 427652 - DNA, 75 bp, synthetic construct
  source 1..75: mol_type = other DNA
agattgcccgggaagtgaaagcgccccgtgaacggctgaagtatgcgctggaggcggggttactggtgactgcac

SEQ ID NO: 427653 - DNA, 75 bp, synthetic construct
  source 1..75: mol_type = other DNA
ttaagccgctggacggtatgggcggcgcgtcgatttttccgcgtgaaagaaggcgatccaaacctcggcgtgatt

SEQ ID NO: 427654 - DNA, 75 bp, synthetic construct
  source 1..75: mol_type = other DNA
ggtattgccaaagcgaacgaagagaatgcttcccgtgaagcggtcgcagagtccgatcgtcagaaatatgccgcg

SEQ ID NO: 427655 - DNA, 75 bp, synthetic construct
  source 1..75: mol_type = other DNA
attaccgctttgggtttggtggcaaccgcagggctggcctggggagctaagtatctcgaaattacggcaaccaaa

SEQ ID NO: 427656 - DNA, 75 bp, synthetic construct
  source 1..75: mol_type = other DNA
actctattactattttatcggcttctttgggatacttgcagcaatagcgataacgcttgtctggcaaaggcatac

SEQ ID NO: 427657 - DNA, 75 bp, synthetic construct
  source 1..75: mol_type = other DNA
ttctttattaaatcgggaaacattgcgaatcggaacatcaacggcgggatgtgatccatctggtgattacactca

SEQ ID NO: 427658 - DNA, 75 bp, synthetic construct
  source 1..75: mol_type = other DNA
atgtttcagatagttctctcttgcatgggtatagtgtgcatcttgaaaatccatcatctccaaaatatggaatat

SEQ ID NO: 427659 - DNA, 75 bp, synthetic construct
  source 1..75: mol_type = other DNA
acggataaagaatgtgcttgcttaaaaaatattgagatagaacaagaaataaaaaatatcattcctcgaagaagg

SEQ ID NO: 427660 - DNA, 75 bp, synthetic construct
  source 1..75: mol_type = other DNA
gtatggcataagtaaagatatcaacaagataaatgccgccatcgcgggcgtaatgtatttgtttttactctcttt

SEQ ID NO: 427661 - DNA, 75 bp, synthetic construct
  source 1..75: mol_type = other DNA
ccatagggttattattagtttgtatgtatggcttaagtaaggatatcaacaagataaatgccgtcatcgcaggcg

SEQ ID NO: 427662 - DNA, 75 bp, synthetic construct
  source 1..75: mol_type = other DNA
cggaagttatgaggcatttagtgtcaaaatacctaaacttgaacgagagaaagttggggtattctatgacacaga

SEQ ID NO: 427663 - DNA, 75 bp, synthetic construct
  source 1..75: mol_type = other DNA
aagataaatgccgtcatcgcaggcgtaatatatctatttttactctctttggtggcgattgtcgttgctagttta

SEQ ID NO: 427664 - DNA, 75 bp, synthetic construct
  source 1..75: mol_type = other DNA
gtatctcgaaattacggcaacaaaatatgattcaccgcaaatgtatgtcgccataggattattattactttgtat

SEQ ID NO: 427665 - DNA, 75 bp, synthetic construct
  source 1..75: mol_type = other DNA
atctcgcatggacgaaataagctccttgaattggcggggaaatgccatagtgaagagggtgatgctgccaactta

SEQ ID NO: 427666 - DNA, 75 bp, synthetic construct
  source 1..75: mol_type = other DNA
gcttcacctggggcggcgtggaactgcacttcgacgttgaaaaaggccatatcacccgcgcccaggtgtttaccg

SEQ ID NO: 427667 - DNA, 75 bp, synthetic construct
  source 1..75: mol_type = other DNA
gtccggacgtaacgatctggtggtgaaaaccgccgaaggcgaccgcaaagtctcaggatcggcctatcgcgaaac

SEQ ID NO: 427668 - DNA, 75 bp, synthetic construct
  source 1..75: mol_type = other DNA
gcgatcctcgatcagttaacggatgaaagccgtatcctcgacgcgggtgtgtatgacgaacaaggcgatcttatc

SEQ ID NO: 427669 - DNA, 75 bp, synthetic construct
  source 1..75: mol_type = other DNA
ttaatgaactcgcttaactccaccagtagctatctgacacagcagttcgacacctcaaatagcaactcgaaataa

SEQ ID NO: 427670 - DNA, 75 bp, synthetic construct
  source 1..75: mol_type = other DNA
cgcgctataaagcccagttcacccaattagatgtgttaatgaactcgcttaactccaccagtagctatctgacac

SEQ ID NO: 427671 - DNA, 75 bp, synthetic construct
  source 1..75: mol_type = other DNA
tattgagttcacccttgatattgaaggtttcggcatctggtccaaagaaataagtgttttctcacctaaatacga

SEQ ID NO: 427672 - DNA, 75 bp, synthetic construct
  source 1..75: mol_type = other DNA
cggtaaccccggtgtgcatcgtttttgattattcccgcacactcgcgcagaaggagttccccgtcgggctacggt

SEQ ID NO: 427673 - DNA, 75 bp, synthetic construct
  source 1..75: mol_type = other DNA
ggcgattgcccatcaggccggctgccatattccaaccgttgacgactggatccgcatcaacaagcgggtgccccg

SEQ ID NO: 427674 - DNA, 75 bp, synthetic construct
  source 1..75: mol_type = other DNA
ggagatagccagagcctccgcgaaggcggcgttgaacttatgtaaacaaggcatcaccacccgggaaatactcac

SEQ ID NO: 427675 - DNA, 75 bp, synthetic construct
  source 1..75: mol_type = other DNA
aaccaaagatcgcggcttccatcacggcaccttgctactcaatgctgaccttagccgtctggcaaactatctcaa

SEQ ID NO: 427676 - DNA, 75 bp, synthetic construct
  source 1..75: mol_type = other DNA
gcgacttcgcgatatggggtgtgcaagactcttgtgacgtgggcctgtatactaaccatgtaggttggacaggga

SEQ ID NO: 427677 - DNA, 75 bp, synthetic construct
  source 1..75: mol_type = other DNA
ctcgcgacatgatgaagaacggcgcagaagaacacctgcggttagcaattcaaatggcgcaagagcgcgcacttc

SEQ ID NO: 427678 - DNA, 75 bp, synthetic construct
  source 1..75: mol_type = other DNA
ctattgtgaaagatccggcgcatgtcgagacagaagaacagttgtgggataaatttgtgctgatgcaccacgcgg

SEQ ID NO: 427679 - DNA, 75 bp, synthetic construct
  source 1..75: mol_type = other DNA
ttttcgcatgatgcgctattccattgcggcgatgcaaaaccatcttgatgcaggctataaagagcttccattggt

SEQ ID NO: 427680 - DNA, 75 bp, synthetic construct
  source 1..75: mol_type = other DNA
tggcattaaaacgcgcaaactggaatgggtgggtatcgccattgggcttgccggaatcatcatgctcaatagcgg

SEQ ID NO: 427681 - DNA, 75 bp, synthetic construct
  source 1..75: mol_type = other DNA
atacccatgttggccatgacggctcagggcgcttccgtcagggcgtctttgagttgcatggctgccgtattacct

SEQ ID NO: 427682 - DNA, 75 bp, synthetic construct
  source 1..75: mol_type = other DNA
atctgtataccggtcatgaccacaggggatatttccgtcagggcgttttcgaactgcacggctgtcgcgtcgtgt

SEQ ID NO: 427683 - DNA, 75 bp, synthetic construct
  source 1..75: mol_type = other DNA
ctattgtgaaagatccgcaacatgtcgagacagaagaacagttgtgggataaatttgtgctgatgcaccacgcgg

SEQ ID NO: 427684 - DNA, 75 bp, synthetic construct
  source 1..75: mol_type = other DNA
ggactcccacaatggcttgcacaacgccgggctgaagtagcgaaaatcgttgataggcttgggatgggggattac

SEQ ID NO: 427685 - DNA, 75 bp, synthetic construct
  source 1..75: mol_type = other DNA
tggcgcaagaacgcgcacttcagtaccaaagcattgttgatcaggaggccgaacgcctacaggcggagatagacg

SEQ ID NO: 427686 - DNA, 75 bp, synthetic construct
  source 1..75: mol_type = other DNA
aaaagaatctgtcaggagatcatggcgcaaaaaaatggcaaaaatgacccccgccgaagataaatgcgcttcaaa

SEQ ID NO: 427687 - DNA, 75 bp, synthetic construct
  source 1..75: mol_type = other DNA
ggctgggcggcgaaacgttgtcgaagattgaatggctggcgctgggcgtgattgtcttcgcagtggtgctggtca

SEQ ID NO: 427688 - DNA, 75 bp, synthetic construct
  source 1..75: mol_type = other DNA
aatacattccatgtggaagtggagcctgtgcgcaatgtaacgctgctaaacaattacattaccagggcgtttcgg

SEQ ID NO: 427689 - DNA, 75 bp, synthetic construct
  source 1..75: mol_type = other DNA
tctgcacggattttgtctgatgccatcaaaagaggggagcactggtgggaggattgtagtggtcaagtaatattg

SEQ ID NO: 427690 - DNA, 75 bp, synthetic construct
  source 1..75: mol_type = other DNA
ggatatccagatgaaagcggccgcggaggtcatcaaagcgaaccgtgccctgccctatgccgtgtatgtttccga

SEQ ID NO: 427691 - DNA, 75 bp, synthetic construct
  source 1..75: mol_type = other DNA
ccgaaattgttcggattctggataagtttactgcacttaccgctgagcttaccgctgagcttaccgctgagctta

SEQ ID NO: 427692 - DNA, 75 bp, synthetic construct
  source 1..75: mol_type = other DNA
aattgctggatggggttgaggttgagtggaaaacccttgaggatatttctataaaggtatcatctggaggaaccc

SEQ ID NO: 427693 - DNA, 75 bp, synthetic construct
  source 1..75: mol_type = other DNA
agtgcagtcactgccagcatcaacagcagcagccagagccggaacgtgacgtttgtcgccgatgtcaggacggcg

SEQ ID NO: 427694 - DNA, 75 bp, synthetic construct
  source 1..75: mol_type = other DNA
tggtgataccgaggaaggtgatacaggcggtggtaacccaagtagcggttctggcggtggtaatggctcaagtat

SEQ ID NO: 427695 - DNA, 75 bp, synthetic construct
  source 1..75: mol_type = other DNA
ccccgtgttgacactgtattaacctaccgctcgaagctgtctgagttggggtttattacagctcatcatcgagta

SEQ ID NO: 427696 - DNA, 75 bp, synthetic construct
  source 1..75: mol_type = other DNA
gtttctctgctcgacggtcaccgggattttatttggctggttacccgcacgaaatgcggcacgactggatccagt

SEQ ID NO: 427697 - DNA, 75 bp, synthetic construct
  source 1..75: mol_type = other DNA
tatggctatgtgtggcttaacatggaaacggcgcatcaactggagttgttgtcaaatctgatttgccgggccttg

SEQ ID NO: 427698 - DNA, 75 bp, synthetic construct
  source 1..75: mol_type = other DNA
atgcaggtactggctgatgaatatcagcagcgtctgcgcgtcaactgtattaacccaggcggtacgcgcaccgca

SEQ ID NO: 427699 - DNA, 75 bp, synthetic construct
  source 1..75: mol_type = other DNA
ttccaactcgacaatatgcctctggcgagcccgacactaaacggtgtcaacgttacaccattattgttggatacc

SEQ ID NO: 427700 - DNA, 75 bp, synthetic construct
  source 1..75: mol_type = other DNA
ggcacgtcgccttctggcagcgactacgttattttgccgcctttatctgcaaagtagtcaggaattacatcgtct

SEQ ID NO: 427701 - DNA, 75 bp, synthetic construct
  source 1..75: mol_type = other DNA
ggctctttactggcaatgttgtttaccggcatctggccgcaacgtgcttttatccactggcgcattcaactggcg

SEQ ID NO: 427702 - DNA, 75 bp, synthetic construct
  source 1..75: mol_type = other DNA
tttcgttctggggtaacgttgtccctcgtgcgtttgaacgtattggcggtacggtgtttggctcgattttaggtc

SEQ ID NO: 427703 - DNA, 75 bp, synthetic construct
  source 1..75: mol_type = other DNA
cctctattcttatttcttctttttcatatgctgattcatgggaaagcattactaaatctacttttcaaagctctg

SEQ ID NO: 427704 - DNA, 75 bp, synthetic construct
  source 1..75: mol_type = other DNA
aaagccgaaacagaaacgcccccgcctgccaatagtcaacctgccgcaccagctcctgaagctcccgttgcaaaa

SEQ ID NO: 427705 - DNA, 75 bp, synthetic construct
  source 1..75: mol_type = other DNA
atgacagtaaaaactaaaagggcacgcctactggcacttacccgtgaaggcgaatcgtgccaatgtttcacagta

SEQ ID NO: 427706 - DNA, 75 bp, synthetic construct
  source 1..75: mol_type = other DNA
atgacaaaaactaaacgtgtgaggcttacagctttgagtgaagaaggtaaagcggggaattgcttcacagtaggt

SEQ ID NO: 427707 - DNA, 75 bp, synthetic construct
  source 1..75: mol_type = other DNA
ctggttgagatagagggatgccgggcgaatcccagcattaccatgttatgccgcctggctgccgcgatgggagtt

SEQ ID NO: 427708 - DNA, 75 bp, synthetic construct
  source 1..75: mol_type = other DNA
cggcgattcaggaaattaatgataagcgccagcttgcggaactgaaaaatattgaagaaagagaagggaaaacat

SEQ ID NO: 427709 - DNA, 75 bp, synthetic construct
  source 1..75: mol_type = other DNA
agaaagtatctgaactggaaacgctggtggcacaggccaaagaagcggataaaggcggcatgaaattttccttta

SEQ ID NO: 427710 - DNA, 75 bp, synthetic construct
  source 1..75: mol_type = other DNA
atggaagagggtaaggagatcttgcaaaagttaacaattgcagcagatgactactatatctgtttgattgatctt

SEQ ID NO: 427711 - DNA, 75 bp, synthetic construct
  source 1..75: mol_type = other DNA
tacgccaccggtacaggaaccagctccggctccaaaggacagcgctcctaaacagaacccggcaggtaaagcacc

SEQ ID NO: 427712 - DNA, 75 bp, synthetic construct
  source 1..75: mol_type = other DNA
tccacgactacgttttccagagtttcgagatgatgatgggtgggaatctgacttacttggaaatattttcgatac

SEQ ID NO: 427713 - DNA, 75 bp, synthetic construct
  source 1..75: mol_type = other DNA
aaccgatgataacggtaacgaacaaacaattgttttagatggtaattgtgtatttggtgaatgggaactaacaaa

SEQ ID NO: 427714 - DNA, 75 bp, synthetic construct
  source 1..75: mol_type = other DNA
tggcgctggctgggcgatggtgtgctggaactgacgccattaacgccaccgcaaggcgcactggtgatttcagcg

SEQ ID NO: 427715 - DNA, 75 bp, synthetic construct
  source 1..75: mol_type = other DNA
gttacttttagcgggcgcgcggatcttgctggaattgcagcactagctagtcacacatcaaataagctaaaatcg

SEQ ID NO: 427716 - DNA, 75 bp, synthetic construct
  source 1..75: mol_type = other DNA
aaaactttcacccttaccgcctttaatttcagccgctccggaaagcagattgtcttcagtgtggcggctcctgag

SEQ ID NO: 427717 - DNA, 75 bp, synthetic construct
  source 1..75: mol_type = other DNA
cggtatgtgacgatatcacccggtcagtttcgctacagtcagaacggaaagcaccttgtattcagcgtgacctct

SEQ ID NO: 427718 - DNA, 75 bp, synthetic construct
  source 1..75: mol_type = other DNA
ttcattattaatgccgatggtaaagcagcagatacggtgacggtaaaccaggcgttgacaggggcgaataacaca

SEQ ID NO: 427719 - DNA, 75 bp, synthetic construct
  source 1..75: mol_type = other DNA
ctggaaatggcaagacacctacctgacccagaccgagacagaaggaacctgcggggagtatatgaaggactccgc

SEQ ID NO: 427720 - DNA, 75 bp, synthetic construct
  source 1..75: mol_type = other DNA
gcgggaacggcagctgtaccggtacgctggataacgtcatctttaaccagttcgtcgggggcagttctcgtttca

SEQ ID NO: 427721 - DNA, 75 bp, synthetic construct
  source 1..75: mol_type = other DNA
ggtggataacatcatctttaaccagctagtcgggggtagtactcgtttcatgctgacgctggtgatgcaggtgaa

SEQ ID NO: 427722 - DNA, 75 bp, synthetic construct
  source 1..75: mol_type = other DNA
gcccagatacaacagccacgattgctaatatctggcacggccatttcaccggtaatctaaatatcaataatgagg

SEQ ID NO: 427723 - DNA, 75 bp, synthetic construct
  source 1..75: mol_type = other DNA
cgacctgccaaacgaataccgtcacgagccggaactgggcctggcatctggcaccgacggcctgaaactgacgcg

SEQ ID NO: 427724 - DNA, 75 bp, synthetic construct
  source 1..75: mol_type = other DNA
tgttagcgccagagcgttgcataaggcgctgggtgtgaagcgtgatttcacaacttggattaaaggacgcattga

SEQ ID NO: 427725 - DNA, 75 bp, synthetic construct
  source 1..75: mol_type = other DNA
tcaggggagtataacccagcaaaatggtcggctatttatgcaaggacatccggttgttcacgccgtcagcagtca

SEQ ID NO: 427726 - DNA, 75 bp, synthetic construct
  source 1..75: mol_type = other DNA
gaacctatcaaaatgctgaccgtttccctgtgttctatcgagtaggtacgggaactcaatatgtaaaagatacta

SEQ ID NO: 427727 - DNA, 75 bp, synthetic construct
  source 1..75: mol_type = other DNA
ctcaacctacggtactcccggtgacagcggctctcctctttttgcctgggatgcagaccaaaataaatgggtttt

SEQ ID NO: 427728 - DNA, 75 bp, synthetic construct
  source 1..75: mol_type = other DNA
gtaaaaaagtcctcggcgtctgcctcgagaaaaagcgcggctactgccagtttgattcaaaactggcccgtattg

SEQ ID NO: 427729 - DNA, 75 bp, synthetic construct
  source 1..75: mol_type = other DNA
ttggctggacgtgaaggtccggttcgtgtgttggtagtgggtggttctcagggcgcacgcattcttaaccagaca

SEQ ID NO: 427730 - DNA, 75 bp, synthetic construct
  source 1..75: mol_type = other DNA
cctggccgggtggtcgcgagaaaccttattaaccatggcagaacgcgcccgcgctgcatccattccggatgccac

SEQ ID NO: 427731 - DNA, 75 bp, synthetic construct
  source 1..75: mol_type = other DNA
gatgatatggcggcggcgtatgcgtgggcggatgtcgtcgtttgccgctccggtgcgttaacggtgagtgaaatc

SEQ ID NO: 427732 - DNA, 75 bp, synthetic construct
  source 1..75: mol_type = other DNA
tcgtggccgcgccgctgggaagctatctgggggctacggtcggatggcgaggcgctttcttgtgcctggtgccca

SEQ ID NO: 427733 - DNA, 75 bp, synthetic construct
  source 1..75: mol_type = other DNA
cggtgttgaaattggtattcgccgtctggaagcgcgcccgacagccgatctgtgcatcgacttcaaaacgctggc

SEQ ID NO: 427734 - DNA, 75 bp, synthetic construct
  source 1..75: mol_type = other DNA
tgagcgaacactgggggccaatgcactggggacatgccaccagcgacgatatgatccactggcagcatgagccta

SEQ ID NO: 427735 - DNA, 75 bp, synthetic construct
  source 1..75: mol_type = other DNA
aaattgttttttttaagaagcatatcgatatgtatctacttgaaaataactatgaaaacactgtggcttttatac

SEQ ID NO: 427736 - DNA, 75 bp, synthetic construct
  source 1..75: mol_type = other DNA
tggggaaaacggctctgattaacggaatcacatacgacgttatctctgctgagttgcttgaagagatggggccgt

SEQ ID NO: 427737 - DNA, 75 bp, synthetic construct
  source 1..75: mol_type = other DNA
gtgaaattccggaagaccaggcgttgctgaaaaaagcgcaggacatcatcgccgaaaaaatgaaggagaacgccc

SEQ ID NO: 427738 - DNA, 75 bp, synthetic construct
  source 1..75: mol_type = other DNA
tttattgaaaaacataggtcccctaataattttcaaacaaacatattctattttacgcaaaaagaatattaaggt

SEQ ID NO: 427739 - DNA, 75 bp, synthetic construct
  source 1..75: mol_type = other DNA
aagactaagaaatataattgcttccagttaaataaatacgatgaggcttacagtattatagaggaggaattatca

SEQ ID NO: 427740 - DNA, 75 bp, synthetic construct
  source 1..75: mol_type = other DNA
ccttgagcagagcaatatcacgctgattgagttgggtatgacttaccagcagcgaaaagccgaattaatccgcct

SEQ ID NO: 427741 - DNA, 75 bp, synthetic construct
  source 1..75: mol_type = other DNA
gcccgtccgaaaatgcaatctacaacgcagcgctatatgaaagttatatcaagggggggacatggccgcaggatg

SEQ ID NO: 427742 - DNA, 75 bp, synthetic construct
  source 1..75: mol_type = other DNA
gggaggtgtatgaactggtgcgcagaggcaagattggtcagcctcagatgataaagatcacctcacgtgatccag

SEQ ID NO: 427743 - DNA, 75 bp, synthetic construct
  source 1..75: mol_type = other DNA
gcgagcgcactggctgcagccgcccagaaagcaggctttgatttgatcctctgtggcgatggttcttccgacctt

SEQ ID NO: 427744 - DNA, 75 bp, synthetic construct
  source 1..75: mol_type = other DNA
atgaaggcgcagtgctaactaacagtggatcgctggcttcggtgaatctggattttaacaaggcagatgccacga

SEQ ID NO: 427745 - DNA, 75 bp, synthetic construct
  source 1..75: mol_type = other DNA
ttggttatggagatgacacgaattatacgttgataagtcgaaataactaccagggggggttagactttcatttgc

SEQ ID NO: 427746 - DNA, 75 bp, synthetic construct
  source 1..75: mol_type = other DNA
cactaacagtaatagtcatggcacaggctggtccggtcagacgaaatcagtcggtattggtctctacgcgtccac

SEQ ID NO: 427747 - DNA, 75 bp, synthetic construct
  source 1..75: mol_type = other DNA
tagcagctggtagtctgctttatcttcctgccagccatgctgaagatccctgcaaagttattatgtgcatggcgg

SEQ ID NO: 427748 - DNA, 75 bp, synthetic construct
  source 1..75: mol_type = other DNA
tcgcaaacagcaagagccagtgcttttggcatctggcaagggagtgaggaagatggtgtcgtcacaccctatgaa

SEQ ID NO: 427749 - DNA, 75 bp, synthetic construct
  source 1..75: mol_type = other DNA
aagtactcgaaagcctacgatccaaacagggtattatttctgaatacctccttgataaactactggacgaatcgc

SEQ ID NO: 427750 - DNA, 75 bp, synthetic construct
  source 1..75: mol_type = other DNA
acgaaacggggaaaggaccaactgatgggcgtcaccgtgatgttcagttgcgcaggtgttgatgtggcacgcttt

SEQ ID NO: 427751 - DNA, 75 bp, synthetic construct
  source 1..75: mol_type = other DNA
gtaacacgatacaggagaaggaccacggcggggtggcgcagaacctgcgctaccagggacagtacctcgacaggg

SEQ ID NO: 427752 - DNA, 75 bp, synthetic construct
  source 1..75: mol_type = other DNA
tagccgcaggtagcctgctttatcagcctgcaagccatgctgaagatccctgcaaagttattatgtgcatggcgg

SEQ ID NO: 427753 - DNA, 75 bp, synthetic construct
  source 1..75: mol_type = other DNA
ggcctgaccattgagaaatcagcatttggtaggtacaacgtcgataatgcgatcaatgctaatatccgctataca

SEQ ID NO: 427754 - DNA, 75 bp, synthetic construct
  source 1..75: mol_type = other DNA
ccgtagcacattgcgccaggcagtggccattcggagcatcacgcttgctcaagggtttgttgatctgctatgcca

SEQ ID NO: 427755 - DNA, 75 bp, synthetic construct
  source 1..75: mol_type = other DNA
gatgccggtactgccaacggaacttatcaaaatcaagaccgttttccgatcttttatcgtgttggtactggtacg

SEQ ID NO: 427756 - DNA, 75 bp, synthetic construct
  source 1..75: mol_type = other DNA
tccgccgatgctttcaaaggtaaaacgaagtctgtgggtgctggactctatgcttccgccatgtttaattccggt

SEQ ID NO: 427757 - DNA, 75 bp, synthetic construct
  source 1..75: mol_type = other DNA
gaatcaaatatgctggcgcgtatcgtgctgggcggcatgacggcgaaacaatgggcgcaggagaacggcatcaaa

SEQ ID NO: 427758 - DNA, 75 bp, synthetic construct
  source 1..75: mol_type = other DNA
agaattatgcagcccaacgcatttggtcttccgtcgtcactggatcgcaccatcgaggaggggcgtaagaaaatt

SEQ ID NO: 427759 - DNA, 75 bp, synthetic construct
  source 1..75: mol_type = other DNA
atttgaacgactttgagaatatcgtttgcatctgctccaacgcagcgacacctcctgtcggcagtggattgaata

SEQ ID NO: 427760 - DNA, 75 bp, synthetic construct
  source 1..75: mol_type = other DNA
caatgcaaacattgggacttggtaaggcagacgatactgctcactcatggtatttaggcgcagaaacgggttggc

SEQ ID NO: 427761 - DNA, 75 bp, synthetic construct
  source 1..75: mol_type = other DNA
gcctcaacagatgggttttcactcaatggctcctgatgttgaggtggtaaatactgacggtgccacacagtggcg

SEQ ID NO: 427762 - DNA, 75 bp, synthetic construct
  source 1..75: mol_type = other DNA
gttgtgctcggttcaggggctaccctctctttgttgaatgagcaatcgacgatgccagcgttttattcagcggca

SEQ ID NO: 427763 - DNA, 75 bp, synthetic construct
  source 1..75: mol_type = other DNA
gatttcaacaaatcggataccacgacggcagttgccaatatctggcatggtcacttcagcggcaatattgatatc

SEQ ID NO: 427764 - DNA, 75 bp, synthetic construct
  source 1..75: mol_type = other DNA
taataagtggagtttggttggtgtattaactgcggggaatggtgcgggcggaaatggaaataactgggctgtcat

SEQ ID NO: 427765 - DNA, 75 bp, synthetic construct
  source 1..75: mol_type = other DNA
tggatgatcagacatggaaaggcggtggcattattgttaattcaggaaatactgtaaactggcaggttaacggca

SEQ ID NO: 427766 - DNA, 75 bp, synthetic construct
  source 1..75: mol_type = other DNA
ggtgcatgtggcgcttcgcccggaaaaaatcatgctttgcgaggaaccgcccgccaatggttgtaacttcgcggt

SEQ ID NO: 427767 - DNA, 75 bp, synthetic construct
  source 1..75: mol_type = other DNA
ctattactgctcgatgagccgatgggcgcgctggataaaaagctgcgtgaccggatgcagcttgaagtggtggat

SEQ ID NO: 427768 - DNA, 75 bp, synthetic construct
  source 1..75: mol_type = other DNA
atgggcgcgctggataaaaagctgcgtgaccggatgcagcttgaagtggtggatattctggagcgcgtcggtgtg

SEQ ID NO: 427769 - DNA, 75 bp, synthetic construct
  source 1..75: mol_type = other DNA
ttatcaagtgctttcatcaaaaaatgaaactgttaacgccatggataagtttcttatcagtttcagccttaaaga

SEQ ID NO: 427770 - DNA, 75 bp, synthetic construct
  source 1..75: mol_type = other DNA
ttgaactccaaataccaggaggtggaattaaagaatgcgatggatggtatatttacgaaaaaataggtaatgctg

SEQ ID NO: 427771 - DNA, 75 bp, synthetic construct
  source 1..75: mol_type = other DNA
ggtggagatcagtgtcaccagccagacggcgggcaccagtacagtcaccgccagcatcaacaacagcagccagag

SEQ ID NO: 427772 - DNA, 75 bp, synthetic construct
  source 1..75: mol_type = other DNA
ccacgctgctgcgtatgctggcaggtttcgaacaaccttctgccggacagataatgcttgatggcgtcgatttgt

SEQ ID NO: 427773 - DNA, 75 bp, synthetic construct
  source 1..75: mol_type = other DNA
atcaggaagaggcgatgaccatggcggggcgtattgccattatgaatcgtgggaaatttgtccagattggcgagc

SEQ ID NO: 427774 - DNA, 75 bp, synthetic construct
  source 1..75: mol_type = other DNA
atacattccggtatcatctgtctcaccgtattcgtcgcgtggttgggaatgaaaacacatcatcgccatatcagc

SEQ ID NO: 427775 - DNA, 75 bp, synthetic construct
  source 1..75: mol_type = other DNA
gggggaggtggtgcacattgcctatcttggcgatctttcggtgtatcacgttcgtctgaagagcggacagatgat

SEQ ID NO: 427776 - DNA, 75 bp, synthetic construct
  source 1..75: mol_type = other DNA
tgcgtgaccggatgcagcttgaagtggtggatattctggagcgcgtcggtgtgacttgtgtgatggttacccacg

SEQ ID NO: 427777 - DNA, 75 bp, synthetic construct
  source 1..75: mol_type = other DNA
cgctatcgtaaaggattacccacctggggcgatgaagtgcgcttgtgctgggaagtggacagttgtgtggtgctg

SEQ ID NO: 427778 - DNA, 75 bp, synthetic construct
  source 1..75: mol_type = other DNA
ctatggcgaacagttgctggagtggctgaataaacacaccttccctgccgagcgccggtatgaagatttagaata

SEQ ID NO: 427779 - DNA, 75 bp, synthetic construct
  source 1..75: mol_type = other DNA
gtgtcaccagccagacggcgggcaccagtgcggtcaccgccagcatcaacaacagcagcctgagccagagcgtga

SEQ ID NO: 427780 - DNA, 75 bp, synthetic construct
  source 1..75: mol_type = other DNA
atgcatacacgaattgactatctggcggataaatactgttttacagaacggaacgaatcgccctgtcttcgccag

SEQ ID NO: 427781 - DNA, 75 bp, synthetic construct
  source 1..75: mol_type = other DNA
tgccggatacataccggtatcatctgtctcatcgtattcgccggttgcttgggaatgaaaagacatcatcgccat

SEQ ID NO: 427782 - DNA, 75 bp, synthetic construct
  source 1..75: mol_type = other DNA
cccgtgaacggctgaagtatgcactggaggcgggtttactggtgactgcactggacggcctgttctggtttggca

SEQ ID NO: 427783 - DNA, 75 bp, synthetic construct
  source 1..75: mol_type = other DNA
aaagagcggaatgccggtggtgacaacgaccgcggaggtgcatgataatctgacgggaacaacccgcaaagtacc

SEQ ID NO: 427784 - DNA, 75 bp, synthetic construct
  source 1..75: mol_type = other DNA
atgcgtacacgaattgattatctggcggataaatactgctttacagaactgaatgagtccacccgtcttcgtcag

SEQ ID NO: 427785 - DNA, 75 bp, synthetic construct
  source 1..75: mol_type = other DNA
cggataaatactgttttacagagctgaatgaatccccccgtcttcgccggcagtggcaggatgttctggaggagt

SEQ ID NO: 427786 - DNA, 75 bp, synthetic construct
  source 1..75: mol_type = other DNA
catgggttgccgaggaaaatctggttgccagtctgaaattaaaaacatgggcaacggagattaagtcctcgttat

SEQ ID NO: 427787 - DNA, 75 bp, synthetic construct
  source 1..75: mol_type = other DNA
tatctgctcgacactgccgaaagcagctatcaccaaagcaaagaactgatcgaacgctggcacaaaaatggtcgt

SEQ ID NO: 427788 - DNA, 75 bp, synthetic construct
  source 1..75: mol_type = other DNA
tgccggatacataccggtatcatctgtctcatcgtattcgccggatgtttgggagtgaaaagacatcatcgccat

SEQ ID NO: 427789 - DNA, 75 bp, synthetic construct
  source 1..75: mol_type = other DNA
tgccggatacataccggtatcatctgtctcatcgtattcgccggatgattgggattgaaaagacatcatcgccat

SEQ ID NO: 427790 - DNA, 75 bp, synthetic construct
  source 1..75: mol_type = other DNA
ctggcgacactataaccgtcgccgtgacgctgaaagacgcgcacggtaacctggttgaagggggcgagtccttac

SEQ ID NO: 427791 - DNA, 75 bp, synthetic construct
  source 1..75: mol_type = other DNA
aggttgcccgggaagtgaaagcgccccgtgaacggctgaagtatgcactggaggcggggttactggtgactgcac

SEQ ID NO: 427792 - DNA, 75 bp, synthetic construct
  source 1..75: mol_type = other DNA
tgaactgaaaaatattgaacaaagagaagggaaaacattccactattattctctggcagttatgattttagcgaa

SEQ ID NO: 427793 - DNA, 75 bp, synthetic construct
  source 1..75: mol_type = other DNA
atgaataataacgcagcagaagaccgccctgatttttcattcagggacatggacaatcagagagcagatgaaata

SEQ ID NO: 427794 - DNA, 75 bp, synthetic construct
  source 1..75: mol_type = other DNA
gggaatgttcgccgtgtttatgccaggagaaccgcataaaccaggatgcgttgtcggcgaacctggtgagattaa

SEQ ID NO: 427795 - DNA, 75 bp, synthetic construct
  source 1..75: mol_type = other DNA
acaacgtagtctgtcgcgttacgctgattggttaaaagattttaaacaggggccgacaggtaaagagagcattgt

SEQ ID NO: 427796 - DNA, 75 bp, synthetic construct
  source 1..75: mol_type = other DNA
ctgccaatagtcaacctgccgcaccagctcctgaagcgaaacctactgaagctcccgttgcaaaagcagaagtta

SEQ ID NO: 427797 - DNA, 75 bp, synthetic construct
  source 1..75: mol_type = other DNA
tgaactggaaacgctggtggcgcaggccaaagaagcggataaaggcggcatgaatttctcgtttattaattcggc

SEQ ID NO: 427798 - DNA, 75 bp, synthetic construct
  source 1..75: mol_type = other DNA
acggtatttgaatgcgaaggtttccgttttggtgcatctgcaacgaaacttatcagccctggctggacagcgctc

SEQ ID NO: 427799 - DNA, 75 bp, synthetic construct
  source 1..75: mol_type = other DNA
atcaatatgatgaagcacccgcaaccttagaggctttaaagaaatatattagcggcgggatacttgaatccgtta

SEQ ID NO: 427800 - DNA, 75 bp, synthetic construct
  source 1..75: mol_type = other DNA
ctaacacctaaagtctatgcttgtcagaatgaaggttgtgctttcaaaatctggcgtaaaattgctgaaaaagaa

SEQ ID NO: 427801 - DNA, 75 bp, synthetic construct
  source 1..75: mol_type = other DNA
aataagatcagagaattggtatctgagttcaaaaagaataaattaataaactatgttaatattttcaaaaagaat

SEQ ID NO: 427802 - DNA, 75 bp, synthetic construct
  source 1..75: mol_type = other DNA
aaaaccggcggtgacttcaaggaaattgacctgctcggacgccagattgaacgactggcacgggtcaaccgttac

SEQ ID NO: 427803 - DNA, 75 bp, synthetic construct
  source 1..75: mol_type = other DNA
ttattcggtggatccgaagaaacggagttattttttcggctgaaatctcttgggtttagagtatgttttcaacct

SEQ ID NO: 427804 - DNA, 75 bp, synthetic construct
  source 1..75: mol_type = other DNA
ggatgaagcgtgttgaggcattaacaccggcgcttgaacctattgatggtgttgcgttggactatattaatgctg

SEQ ID NO: 427805 - DNA, 75 bp, synthetic construct
  source 1..75: mol_type = other DNA
gcatttatgacgctgataatcagcttacttcctgttttcgcgtggcggaggatggcagttttagcgacggtcagg

SEQ ID NO: 427806 - DNA, 75 bp, synthetic construct
  source 1..75: mol_type = other DNA
attataaagacgatgcgtttgcgaaagggaaaacattccactactactctctggcagtcatgatttcagcgaaac

SEQ ID NO: 427807 - DNA, 75 bp, synthetic construct
  source 1..75: mol_type = other DNA
aaaattgcccgtatccgcgtcatcactattggacaggttatttcgctggtaggtatggcggcactgctatttgca

SEQ ID NO: 427808 - DNA, 75 bp, synthetic construct
  source 1..75: mol_type = other DNA
agactgagaaaggccggaatgccggtggtgactacgaccgtggaggtgaatgataacctgacgggaacaatccgc

SEQ ID NO: 427809 - DNA, 75 bp, synthetic construct
  source 1..75: mol_type = other DNA
atgtgtacacgaattgactatctggcggataaatactgttttaccgaactgaatgaatccccccgtcttcgccgg

SEQ ID NO: 427810 - DNA, 75 bp, synthetic construct
  source 1..75: mol_type = other DNA
acgctgctgcgtaccttcaataaaatgtttgaactgtacccggagcagcgtgcggaaggtgaaattctgctcgat

SEQ ID NO: 427811 - DNA, 75 bp, synthetic construct
  source 1..75: mol_type = other DNA
cggcgattgcctgtgtggcctttaacttcggtggcaccattaccgtcttcccgtcactggttagtgagttcttcg

SEQ ID NO: 427812 - DNA, 75 bp, synthetic construct
  source 1..75: mol_type = other DNA
tttctattgctaacctgtctggtcgtctggtgctgggtattctgtcagacaagatcgctcgtatccgcgttatca

SEQ ID NO: 427813 - DNA, 75 bp, synthetic construct
  source 1..75: mol_type = other DNA
atgacaccttcaaattatcagcgtacccgctggctgacactcatcggtacaatcattacccagtttgcgctgggg

SEQ ID NO: 427814 - DNA, 75 bp, synthetic construct
  source 1..75: mol_type = other DNA
ctttgtgatttggggagcgattgcgctggtgatgattgttttcggcgcaacattaatgaaagacgcaccaaaaca

SEQ ID NO: 427815 - DNA, 75 bp, synthetic construct
  source 1..75: mol_type = other DNA
aaaatcgcccgtatccgtgttatcaccattggtcaggtgatttcgctggtgggtatggcggccctgctgtttgca

SEQ ID NO: 427816 - DNA, 75 bp, synthetic construct
  source 1..75: mol_type = other DNA
ctcgctggctgacactcatcggtactatcattacccagtttgccctggggtcggtttatacctggagtctgttta

SEQ ID NO: 427817 - DNA, 75 bp, synthetic construct
  source 1..75: mol_type = other DNA
gttgcagttctaccgtaacctgctggtacatctgggcgccgacaatcaaaagctggtgcaggcggtgttccagaa

SEQ ID NO: 427818 - DNA, 75 bp, synthetic construct
  source 1..75: mol_type = other DNA
gccgtttggtagcgccgcaggcaccaacattacccgtacctttgttcacccgaccagcaacaaacaattgtgctt

SEQ ID NO: 427819 - DNA, 75 bp, synthetic construct
  source 1..75: mol_type = other DNA
tgtcgtcgattactgtcgatatcttcctgcaggaggcatcaaccgaagacattattgaacacctgaaagtgctta

SEQ ID NO: 427820 - DNA, 75 bp, synthetic construct
  source 1..75: mol_type = other DNA
ctgaaagagacatcccttaataatctttcacgtattactgccgatattcatctggaagaagcatcaaccgaagag

SEQ ID NO: 427821 - DNA, 75 bp, synthetic construct
  source 1..75: mol_type = other DNA
gacggatgcgagctatctgaaatcgcttgaagattacatgatggaaaacaaccacttgaaagactcccctgttga

SEQ ID NO: 427822 - DNA, 75 bp, synthetic construct
  source 1..75: mol_type = other DNA
atatggattcgctggactggtacaacggcgcgcacggtaagtcgcgcgatgacttcggcgatatgtacgaagggc

SEQ ID NO: 427823 - DNA, 75 bp, synthetic construct
  source 1..75: mol_type = other DNA
cattgttgatccacttcgataaacacggtcaggtcgagttcacggaaaaagtacccgccgatgcgatggtatgca

SEQ ID NO: 427824 - DNA, 75 bp, synthetic construct
  source 1..75: mol_type = other DNA
aaatgggaatggcggatatgtcggagaacttccgtgccagaggcggagaaatctacctgcgtaaggaggaagcgt

SEQ ID NO: 427825 - DNA, 75 bp, synthetic construct
  source 1..75: mol_type = other DNA
gatccgccgcaatatgaccgaggagttagagcactgccacgaagcaccgttctataccctcgggccgctaactac

SEQ ID NO: 427826 - DNA, 75 bp, synthetic construct
  source 1..75: mol_type = other DNA
gaaaaattattgaatatcgtcttatcccgatgatggacctgatcttctggggagaagataacggcattaaaatcc

SEQ ID NO: 427827 - DNA, 75 bp, synthetic construct
  source 1..75: mol_type = other DNA
cattagcttcattgggagcagtgacaaaacacgtgaataataattgcccgaagcgtattaatagattaggatacg

SEQ ID NO: 427828 - DNA, 75 bp, synthetic construct
  source 1..75: mol_type = other DNA
ttgaacggttcaaattttatctggagcaacacggctggatcgttgcccgtaaagaacaactggtggaacggttga

SEQ ID NO: 427829 - DNA, 75 bp, synthetic construct
  source 1..75: mol_type = other DNA
cccggtgagtggatggcgctggtcggtctgaatgccgatgattttccgccagccaatgaaccggtaattgcgaag

SEQ ID NO: 427830 - DNA, 75 bp, synthetic construct
  source 1..75: mol_type = other DNA
tacatggacagtacctgttgcatttttctttttagtattgctggctggtatagtattcaatattggcaggaaaag

SEQ ID NO: 427831 - DNA, 75 bp, synthetic construct
  source 1..75: mol_type = other DNA
aggctaaacagtgcgaattgttctttgagattgacggcgaggcgatacatgttgcgagggagtacgaaagtttac

SEQ ID NO: 427832 - DNA, 75 bp, synthetic construct
  source 1..75: mol_type = other DNA
acagcttaatattaccgcatggaaagatctcagtaagtacaaagacgtatcaatcacctttctcggagctaattt

SEQ ID NO: 427833 - DNA, 75 bp, synthetic construct
  source 1..75: mol_type = other DNA
acgccagcaccagccgtgaatatcatccccaacaccggagacacaatcgacagcctgacactgttaaagatggtc

SEQ ID NO: 427834 - DNA, 75 bp, synthetic construct
  source 1..75: mol_type = other DNA
aacaacagctggtggccgcagcccctaaagtcgattttgccgaccgggtatcagcggctaatggaatcctgatcg

SEQ ID NO: 427835 - DNA, 75 bp, synthetic construct
  source 1..75: mol_type = other DNA
tccgcaataacgattttctcaatagaattaaggatgaacttgatggggaattttacgaaactttcgtaaaatccc

SEQ ID NO: 427836 - DNA, 75 bp, synthetic construct
  source 1..75: mol_type = other DNA
tttgtctgcagtgatctatttccctccaaaatttgatgaaacccgtcagtatcaggcaattgtggtatctcaccc

SEQ ID NO: 427837 - DNA, 75 bp, synthetic construct
  source 1..75: mol_type = other DNA
gtggaatgacccttctccagttcatggcttggaagcaacaagatgctgtccggagccggtttaaagctgcgaagg

SEQ ID NO: 427838 - DNA, 75 bp, synthetic construct
  source 1..75: mol_type = other DNA
cccagtgagtggatttcgcaggcctgcctcaatgcagatgattttccgccagccaatgaaccggtaattgcgaag

SEQ ID NO: 427839 - DNA, 75 bp, synthetic construct
  source 1..75: mol_type = other DNA
gtttattacttctcaaaaaatcacaagctatcaaagacctggaaaactaacaaccctgataaagtacaaagaata

SEQ ID NO: 427840 - DNA, 75 bp, synthetic construct
  source 1..75: mol_type = other DNA
aaattgcgtattcctccaactaaagatgcatcattttttgggtattatgacagaacatgttggcataaagatggt

SEQ ID NO: 427841 - DNA, 75 bp, synthetic construct
  source 1..75: mol_type = other DNA
gaaacgggccgctatgatttccatcaggaaccggcgcatattctgatgaaagtcgaaactcacaaccacccgacg

SEQ ID NO: 427842 - DNA, 75 bp, synthetic construct
  source 1..75: mol_type = other DNA
taagattgccgcccacgctgccgacctggcaaaagggcatccgggcgcgcaaattcgcgataacgccatgtcgaa

SEQ ID NO: 427843 - DNA, 75 bp, synthetic construct
  source 1..75: mol_type = other DNA
ggatatcaccatcgtctggaccagcagtacacacgtgcagatttacattgtggtacgcccctacgagagcgcaaa

SEQ ID NO: 427844 - DNA, 75 bp, synthetic construct
  source 1..75: mol_type = other DNA
tgccaacagtgatctggacgagctactgggaacgaaagccaccccgctgaagaacttccttcagtccgcactgac

SEQ ID NO: 427845 - DNA, 75 bp, synthetic construct
  source 1..75: mol_type = other DNA
gcgtgacaaactgccggttgacgggacgggagccgaaattgatctgtccgtgttgcagtccctgcaggtgaaccg

SEQ ID NO: 427846 - DNA, 75 bp, synthetic construct
  source 1..75: mol_type = other DNA
accagcgtcaaacctggcgaccatgtgatcccgctttacaccgcagagtgcggcgagtgtgagttctgtcgttcc

SEQ ID NO: 427847 - DNA, 75 bp, synthetic construct
  source 1..75: mol_type = other DNA
gcccgtcactttaactgcgtgacgcaacaccacgctttacgccctgccgaaacccgaggttgtcctgcgctggcg

SEQ ID NO: 427848 - DNA, 75 bp, synthetic construct
  source 1..75: mol_type = other DNA
gggtaacgatgagatcccgcaggacggcaagaaacagccccttgagctggccacgctgcgctcgctggaaggcaa

SEQ ID NO: 427849 - DNA, 75 bp, synthetic construct
  source 1..75: mol_type = other DNA
ccgctcagttccctaacgggcgttggtgcagcgcttagtaacaagctggcgaaaatcaacctgcataccgtgcag

SEQ ID NO: 427850 - DNA, 75 bp, synthetic construct
  source 1..75: mol_type = other DNA
caagcttgatcaagcgggcgtcagcgagctggcaacgaatcaaaaattgattctggtgtgcggtcgctacgaagg

SEQ ID NO: 427851 - DNA, 75 bp, synthetic construct
  source 1..75: mol_type = other DNA
cggaagttcagcgcctggcacgccatattcacgaacgttacccacagcaggcaaaagccctgatagaacgctgga

SEQ ID NO: 427852 - DNA, 75 bp, synthetic construct
  source 1..75: mol_type = other DNA
gcgtacagggcgatctcagcacgccggagttgcaggagacgctcacgccagtttatccaaccaccgaaggcgtaa

SEQ ID NO: 427853 - DNA, 75 bp, synthetic construct
  source 1..75: mol_type = other DNA
ggcggtcgccggatgatgacctgtcagattagcgacggttccggcattctcaccatgcgctttttcaactttaac

SEQ ID NO: 427854 - DNA, 75 bp, synthetic construct
  source 1..75: mol_type = other DNA
ggcgcggtacacaacaccgcaaaagtccagtcaggggattccgttgccgtgtttgggcttggcgcaattggtctg

SEQ ID NO: 427855 - DNA, 75 bp, synthetic construct
  source 1..75: mol_type = other DNA
gatcaggcatgggaggtattcgaaaaactggaagattgttatttcagccagaaacagccaccagcaacacaaaac

SEQ ID NO: 427856 - DNA, 75 bp, synthetic construct
  source 1..75: mol_type = other DNA
ctagcgtttttacagcatatctaccgtaacttaaaaccgggtggccgtgcagctgtggtgctacccgacaacgtc

SEQ ID NO: 427857 - DNA, 75 bp, synthetic construct
  source 1..75: mol_type = other DNA
cgcgccagaaacgttcctcatcgacggcaacggcatcattcgctatcgccatgcgggtgatctcaatccccgcgt

SEQ ID NO: 427858 - DNA, 75 bp, synthetic construct
  source 1..75: mol_type = other DNA
gaatttgtccgtgatgaagtcgctgccggacgcgccattatcccggccaacattaatcatcctgaatcagagccg

SEQ ID NO: 427859 - DNA, 75 bp, synthetic construct
  source 1..75: mol_type = other DNA
gcgaacaacgcgcccaggcccaacattttatcgacaccctggaaggcaccgcctttcccaactcaaaacgcattt

SEQ ID NO: 427860 - DNA, 75 bp, synthetic construct
  source 1..75: mol_type = other DNA
gctggcaaaactacgccagccgtggatcgatgcgcgcggcgataccgaagaacttaccgtgcgcagttccgatta

SEQ ID NO: 427861 - DNA, 75 bp, synthetic construct
  source 1..75: mol_type = other DNA
caatcgtccgttgatccgtgcccaacatacagcatcaatggaagaggcacatgttacggggcaaattctggcgcg

SEQ ID NO: 427862 - DNA, 75 bp, synthetic construct
  source 1..75: mol_type = other DNA
cggcgagtgcgaattctgtcgctctggcaaaaccaacctctgcgtcgcggttcgcgaaacccagggcaaaggcct

SEQ ID NO: 427863 - DNA, 75 bp, synthetic construct
  source 1..75: mol_type = other DNA
cggcgagtgtgagttctgtcgttccggcaaaaccaacctctgtgttgcggttcgcgaaacccagggtaaaggcct

SEQ ID NO: 427864 - DNA, 75 bp, synthetic construct
  source 1..75: mol_type = other DNA
taggactggatctcggtgtctatggcgcgccagaaacgttcctcatcgacggcaacggcatcattcgctatcgcc

SEQ ID NO: 427865 - DNA, 75 bp, synthetic construct
  source 1..75: mol_type = other DNA
gaatcactggacaatccggggcagttttatcaggcggatgtgctgactcagggcaaaccagtgctgcttaacgtc

SEQ ID NO: 427866 - DNA, 75 bp, synthetic construct
  source 1..75: mol_type = other DNA
gcagagatcaacatgttgataaatgccggtatcgtggatgaatacgcagaaaagatggttaagtttgccggtatc

SEQ ID NO: 427867 - DNA, 75 bp, synthetic construct
  source 1..75: mol_type = other DNA
cctgatgcggtctcgccggctggcgctcaggggctggcccagtttatgcccgccaccgccgactggataagccag

SEQ ID NO: 427868 - DNA, 75 bp, synthetic construct
  source 1..75: mol_type = other DNA
ggcgctcagggactggcgcagttcatgcctgccactgccgactggataagccagatcgtgcccgccctgcgtagc

SEQ ID NO: 427869 - DNA, 75 bp, synthetic construct
  source 1..75: mol_type = other DNA
ttatccgcaacgcatcctgcgtgagctggcaccgcgatatctcacatggggaggcagcagttgtgtggcatctgg

SEQ ID NO: 427870 - DNA, 75 bp, synthetic construct
  source 1..75: mol_type = other DNA
gccaactggctgaacaattgggccgccccggtgcggcgcgtgccgtaggtgcggcaaacggatcgaatcccatca

SEQ ID NO: 427871 - DNA, 75 bp, synthetic construct
  source 1..75: mol_type = other DNA
ggcttcttcagtcaggcccgcgcagcgcaggctgcgctgcagtatcgcgatgatgtgatccgtaatgcccggctt

SEQ ID NO: 427872 - DNA, 75 bp, synthetic construct
  source 1..75: mol_type = other DNA
tggctgtggcagcgcgtcagcgccgccagtgactgcgagcgtatggccatgacactgtcgggctataacggtggt

SEQ ID NO: 427873 - DNA, 75 bp, synthetic construct
  source 1..75: mol_type = other DNA
gcgcagcgccacgaactggcgagaaaatcgtcgctatccgaagatgatcctctatcaacatgccgcccgctacct

SEQ ID NO: 427874 - DNA, 75 bp, synthetic construct
  source 1..75: mol_type = other DNA
cgatgctaacaatatttacctggcaaccatgtattcagaaacgcgtaatatgaccccgtttggcgacagcgatta

SEQ ID NO: 427875 - DNA, 75 bp, synthetic construct
  source 1..75: mol_type = other DNA
tctgctttcacagttgccaggcgtgccggtgctgatgttgttgggcgcgctcgtgggactgctgaccggctcagt

SEQ ID NO: 427876 - DNA, 75 bp, synthetic construct
  source 1..75: mol_type = other DNA
ccctcatcatcctgctcgcctttggtctgggcgtaaccgccatcaagcatggcgagccacgcaacgataaataca

SEQ ID NO: 427877 - DNA, 75 bp, synthetic construct
  source 1..75: mol_type = other DNA
aggccaatgccgccgaaccgcccgcttccgccaaaccttaccgcgccgaactggtgcgtaatgcccgcgcggtat

SEQ ID NO: 427878 - DNA, 75 bp, synthetic construct
  source 1..75: mol_type = other DNA
aatcgtcgctatccaaagatgattctctatcaacacgctgcccgctatttactctggggacaggcaagctgtctt

SEQ ID NO: 427879 - DNA, 75 bp, synthetic construct
  source 1..75: mol_type = other DNA
gccgcacgaaggcgcggcaggtacgctggagcagcatttacagcgggttattggtcatctgaacaccatgcacac

SEQ ID NO: 427880 - DNA, 75 bp, synthetic construct
  source 1..75: mol_type = other DNA
tacttcagtcggtgcattttctttcgatgtgactcactccaatgttcgtataccggatgataaaacatatcaggg

SEQ ID NO: 427881 - DNA, 75 bp, synthetic construct
  source 1..75: mol_type = other DNA
aaggcgcccgtatcaactacggtaatagcactgtagatcgctggggctatggcgtaaccagcgccctgtcgccat

SEQ ID NO: 427882 - DNA, 75 bp, synthetic construct
  source 1..75: mol_type = other DNA
ctggttcagtttccgcaagtagcgataacagccgtcaattttctctcaatactgacggtggttttgtactacatc

SEQ ID NO: 427883 - DNA, 75 bp, synthetic construct
  source 1..75: mol_type = other DNA
tatgaatcaccgtggggaaccctggcaggttcagtttctgcaaatagcgataacagtctggatttgcccctatat

SEQ ID NO: 427884 - DNA, 75 bp, synthetic construct
  source 1..75: mol_type = other DNA
gcaaacccgtaagttgccttgcgcattatcaacaaagttcagaggcagaaaaattagcccaatctattattctga

SEQ ID NO: 427885 - DNA, 75 bp, synthetic construct
  source 1..75: mol_type = other DNA
cttatcatgaaaaccgtatcgcgctggatatcaacgatcttgagaacgatgttgaattaaaaagtaccagtgcag

SEQ ID NO: 427886 - DNA, 75 bp, synthetic construct
  source 1..75: mol_type = other DNA
ctgatattgcgcaaaaactacggctgggcgacggtcggttttaccattaccgctgtatataccctgcaactgtta

SEQ ID NO: 427887 - DNA, 75 bp, synthetic construct
  source 1..75: mol_type = other DNA
ctgaaggttacaccctgacgctgatgcttttcaccacgctcgccagttacctgatattgcgcaaaaactacggct

SEQ ID NO: 427888 - DNA, 75 bp, synthetic construct
  source 1..75: mol_type = other DNA
aagcgctggacttacaggagcatatttcggtcagtttgcatcaacctgaagaggtgcaaaagctggtcgagcgta

SEQ ID NO: 427889 - DNA, 75 bp, synthetic construct
  source 1..75: mol_type = other DNA
caggtggtttaagtgacaagcttcgtgaatattttgccggtaatcttagcattattgatacgcttcccactgcca

SEQ ID NO: 427890 - DNA, 75 bp, synthetic construct
  source 1..75: mol_type = other DNA
atgtggcgcagactgatttatcatcccgatatcaactatgcactacgacaaacgctggtgctatgtttgcccgtg

SEQ ID NO: 427891 - DNA, 75 bp, synthetic construct
  source 1..75: mol_type = other DNA
atgtggcgcagactgatttatcatcccgacatcaactacgcactacgacaaacactggtgctatgtttgcccgtg

SEQ ID NO: 427892 - DNA, 75 bp, synthetic construct
  source 1..75: mol_type = other DNA
aagataacggattttcaaggttgtccaaaagttggcatattacaaaacctcgtgatatcgcatcgcaacttaata

SEQ ID NO: 427893 - DNA, 75 bp, synthetic construct
  source 1..75: mol_type = other DNA
cgctgccggtgccaatggccgggaatgattcaggtatgtttcagtttccgccagaagggacgctggttgaggttg

SEQ ID NO: 427894 - DNA, 75 bp, synthetic construct
  source 1..75: mol_type = other DNA
aattttgccgatccattccggccacgttatgccgtggacgttcagctgcttgacgcagacggaaacccggacaat

SEQ ID NO: 427895 - DNA, 75 bp, synthetic construct
  source 1..75: mol_type = other DNA
tctgggcagggcgttcagtatcctggattacatttggtaccagttgcctgatggttcgctttacgtcggcggcgc

SEQ ID NO: 427896 - DNA, 75 bp, synthetic construct
  source 1..75: mol_type = other DNA
gaactgatccccgcactctgcttcgcggtcatctttatctttgcccgtttccgttctcaaacggcaactaactga

SEQ ID NO: 427897 - DNA, 75 bp, synthetic construct
  source 1..75: mol_type = other DNA
acctttcaacggatgaagttcacctggctgatgccagcctggtgctggagctgaacagctgcggccggggattta

SEQ ID NO: 427898 - DNA, 75 bp, synthetic construct
  source 1..75: mol_type = other DNA
gtaccgggtaccagctgctgaataatctgggcagggcattcagtatcccggattacatttggtatcagatgccgg

SEQ ID NO: 427899 - DNA, 75 bp, synthetic construct
  source 1..75: mol_type = other DNA
gcacgggctacgaactgctggccagtctggggcgtattttctccgtaccggattacatctggcatccgttaccgg

SEQ ID NO: 427900 - DNA, 75 bp, synthetic construct
  source 1..75: mol_type = other DNA
tgggtaacgacaccattcagctggtcagctgttccgtcatgcttgagctgaacgcgtgcggacgcggatttatca

SEQ ID NO: 427901 - DNA, 75 bp, synthetic construct
  source 1..75: mol_type = other DNA
aagatggctaccagatacggttgacgcctcaattaacgggtaaaggccagcagtggttgacgcgtaaactgctcg

SEQ ID NO: 427902 - DNA, 75 bp, synthetic construct
  source 1..75: mol_type = other DNA
gcagcccgcagaaaacggttttcagcgtctgttcattcgtgaactggtaggtgtgtttgaaaggatgtggccatg

SEQ ID NO: 427903 - DNA, 75 bp, synthetic construct
  source 1..75: mol_type = other DNA
ccgtcgccaggctgaaaaggtcttccctgagctggcatcagggcttcacctgcccaaactggcacgtgttgaggc

SEQ ID NO: 427904 - DNA, 75 bp, synthetic construct
  source 1..75: mol_type = other DNA
ctgcgaccgggtgtggaggtgaacggtcagcgcctgacgatggtcatgctggaagatgacaacatgaccatcacg

SEQ ID NO: 427905 - DNA, 75 bp, synthetic construct
  source 1..75: mol_type = other DNA
atggctctgaaggtgataaaggtgattcctggactcgtcttgcttttgccggtctgaaatttggtgaattgggtt

SEQ ID NO: 427906 - DNA, 75 bp, synthetic construct
  source 1..75: mol_type = other DNA
cctgaatgcctacatggataaagaaggctacagtaagaaagcgaaagttagcgccactggtgacgatgcgcgtga

SEQ ID NO: 427907 - DNA, 75 bp, synthetic construct
  source 1..75: mol_type = other DNA
agtgatcatgaccgttctgcacgcaggcggtaaattcgacgataactcctataaagtgtccggcggtctgcacgg

SEQ ID NO: 427908 - DNA, 75 bp, synthetic construct
  source 1..75: mol_type = other DNA
acgatggcttccaggaaaacatctactgttttaccaacaatattccgcagcgtgacggcggtactcacctggcgg

SEQ ID NO: 427909 - DNA, 75 bp, synthetic construct
  source 1..75: mol_type = other DNA
ttggttttaagggtgaaacgcaaatcacggatcaactggttgggtatggccagtgggaatataacgtgcaggcta

SEQ ID NO: 427910 - DNA, 75 bp, synthetic construct
  source 1..75: mol_type = other DNA
aacaaagacggtaataaactggatgtctatggcaaagttaaagccatgcattatatgagtgataacgacagtaaa

SEQ ID NO: 427911 - DNA, 75 bp, synthetic construct
  source 1..75: mol_type = other DNA
tgctgttgacctttttctatcgtcagatgccggaaatcgttgaacgcggtcacgtctacatcgctcagccgccgc

SEQ ID NO: 427912 - DNA, 75 bp, synthetic construct
  source 1..75: mol_type = other DNA
aaagtaacggaagcgtacttgtctttattagcgcatggcgcgaaagcgaccgtggcgaaatattccgtgaagtaa

SEQ ID NO: 427913 - DNA, 75 bp, synthetic construct
  source 1..75: mol_type = other DNA
atgaacattatcgtcatgcagcgtatgccttaatgttgcaggaacaagcgccgacgctgaaagtgcagggcgttg

SEQ ID NO: 427914 - DNA, 75 bp, synthetic construct
  source 1..75: mol_type = other DNA
gatgctaacaatatctacctggcgaccatgtattctgaaacgcgtaacatgacaccttacggtgattcaacaaat

SEQ ID NO: 427915 - DNA, 75 bp, synthetic construct
  source 1..75: mol_type = other DNA
ttgcgtagatttatgcagcggactgcctttctcccaaagtgataaaccggacagtatcatggaccggttttcccg

SEQ ID NO: 427916 - DNA, 75 bp, synthetic construct
  source 1..75: mol_type = other DNA
ctggtgaaagagtcccgtcgcggcctctccatccagcgttataaaggtctgggtgagatgaacccggaacagctg

SEQ ID NO: 427917 - DNA, 75 bp, synthetic construct
  source 1..75: mol_type = other DNA
aaagtgccggacccgaaattctcctcccagaccaaagacaaactggtttcttctgaggtgaaatcggcggtagaa

SEQ ID NO: 427918 - DNA, 75 bp, synthetic construct
  source 1..75: mol_type = other DNA
gaattggtggagattggcggcgcgtttcgtattcccgatgttatgcgtcaggcaggctgcaccctacacgaagta

SEQ ID NO: 427919 - DNA, 75 bp, synthetic construct
  source 1..75: mol_type = other DNA
acagattggtagtggttctctgccggttgatcgtctgccgagcgcagcgttaaccttcaccccccatgatggacg

SEQ ID NO: 427920 - DNA, 75 bp, synthetic construct
  source 1..75: mol_type = other DNA
gcggataaaatgaccctcgcggcgctggaagcgacgctgcgtctttatttgcaccccgaagcactgagcgaaaaa

SEQ ID NO: 427921 - DNA, 75 bp, synthetic construct
  source 1..75: mol_type = other DNA
aacgtcgcaaaggatcagtaaaatggtatacggaaaatgaaagcggcagctactaccacgcaacgcaaccacgcc

SEQ ID NO: 427922 - DNA, 75 bp, synthetic construct
  source 1..75: mol_type = other DNA
ccgctggcgtgaattgccagtgccggtgattggtcgtatttatgacggacgattgtggctggatttacgctgcct

SEQ ID NO: 427923 - DNA, 75 bp, synthetic construct
  source 1..75: mol_type = other DNA
gaaagaggttgtggtttctcgcggtgaactggtggagattggcggtgcgtttcgtattcccgatgttatgcgcca

SEQ ID NO: 427924 - DNA, 75 bp, synthetic construct
  source 1..75: mol_type = other DNA
ctggttatggcgtagggcgtggtgaagcgttcagctatatttactcgaaagattgcaaccgcgacgtagagattt

SEQ ID NO: 427925 - DNA, 75 bp, synthetic construct
  source 1..75: mol_type = other DNA
ttgtgaatgcactggctgtgcggcgtgaattacatgcacgcagggaacaggaatatcatgcccgggggcggactg

SEQ ID NO: 427926 - DNA, 75 bp, synthetic construct
  source 1..75: mol_type = other DNA
atcaggggcagagctatcgggtgacctggaacaaactcatcgaatcgacagatacatcaatcaacctggccgcct

SEQ ID NO: 427927 - DNA, 75 bp, synthetic construct
  source 1..75: mol_type = other DNA
cgggcgtcagtctggtgagtttctccggcgacaagttgttaggcgggccgcaggcaggaattattgttggtaaaa

SEQ ID NO: 427928 - DNA, 75 bp, synthetic construct
  source 1..75: mol_type = other DNA
atagtcagcttcccgctattgatcgcttattgcgtgatagttccttcctttctttacgtgatacttatggccaca

SEQ ID NO: 427929 - DNA, 75 bp, synthetic construct
  source 1..75: mol_type = other DNA
taacgtttacaccccatgatggacgcggtagccaccttgagtcattagccgccgctggcgtgaattgccagtgcc

SEQ ID NO: 427930 - DNA, 75 bp, synthetic construct
  source 1..75: mol_type = other DNA
gtatcaggaaaatgaaagcggcaactacttccacgcaacgcagccgcgccagctttgggagatcccgttagataa

SEQ ID NO: 427931 - DNA, 75 bp, synthetic construct
  source 1..75: mol_type = other DNA
attccacattagaacacggaaaagaatattctgaacaggaactaagaaaaatgattaaggagggtaaagtaatca

SEQ ID NO: 427932 - DNA, 75 bp, synthetic construct
  source 1..75: mol_type = other DNA
ggttacgtattgattcagaccgacaactacaatattgaaaccagcgtcactggcctggcgattattttgattctg

SEQ ID NO: 427933 - DNA, 75 bp, synthetic construct
  source 1..75: mol_type = other DNA
ttccgcgcggcgctgaaacaacgcccggacgcttatgattatgcatggcttgccgacgtgctggacagactgcac

SEQ ID NO: 427934 - DNA, 75 bp, synthetic construct
  source 1..75: mol_type = other DNA
tatctccgcactgcagtgaccagtaaatttggtcgcatgaagctggccgcggatggcacgcgttttgcgccgggg

SEQ ID NO: 427935 - DNA, 75 bp, synthetic construct
  source 1..75: mol_type = other DNA
tgggtgatgacgggacggtgatgattgaaaacctgattaccacctaccagaaaaacagctatggcgacgaagacg

SEQ ID NO: 427936 - DNA, 75 bp, synthetic construct
  source 1..75: mol_type = other DNA
gctggcaaacctgcaggatcggacattcgatttcatcatcaacccttacgacgatacaacctcgttgaatgtgat

SEQ ID NO: 427937 - DNA, 75 bp, synthetic construct
  source 1..75: mol_type = other DNA
taacggtagcgaaggcttgcgtaactggtggaaaaaccaaagccggaaaacgcgtcatcaggtagcgttgcaggt

SEQ ID NO: 427938 - DNA, 75 bp, synthetic construct
  source 1..75: mol_type = other DNA
tgccgatgcgctggacagactgcacaagccggaagaagccgctgcaatgcgccgcgacggtttgatgctgacgtt

SEQ ID NO: 427939 - DNA, 75 bp, synthetic construct
  source 1..75: mol_type = other DNA
aacagtcggacggaatcctaacgggccgctatgaagggcggcagtgcgtcttgacggagaaggctcgcttggtcc

SEQ ID NO: 427940 - DNA, 75 bp, synthetic construct
  source 1..75: mol_type = other DNA
acccggaacagctggaaaaagtgctgcgccaacagatcaaaaacgtgggcgatcgcccgttgttgtggagcacac

SEQ ID NO: 427941 - DNA, 75 bp, synthetic construct
  source 1..75: mol_type = other DNA
aaattatcatcgatggcctgaagcgtcagtatgatgatcgcctgctgctgccaatcccgcgcctgaaaaccaata

SEQ ID NO: 427942 - DNA, 75 bp, synthetic construct
  source 1..75: mol_type = other DNA
atccggaacagctggaaaaagtgctgcgccagcagatcaaaaacgtcggcgatcgcccgctgttgtggagcacac

SEQ ID NO: 427943 - DNA, 75 bp, synthetic construct
  source 1..75: mol_type = other DNA
gtagcaaacgcacctttacccagccattctcctcagtcgtgcagatgcaacgtccaggcgttggccgttgggata

SEQ ID NO: 427944 - DNA, 75 bp, synthetic construct
  source 1..75: mol_type = other DNA
ttccgatgacagctactgaagaaagtggcaaccggtccctgttgttggataacgtactgtgtacggtatctgtga

SEQ ID NO: 427945 - DNA, 75 bp, synthetic construct
  source 1..75: mol_type = other DNA
aaccgccagtactccgttaatacagatggtggatttgtgttgcacagcggaggactgacgttcagcaacgacagt

SEQ ID NO: 427946 - DNA, 75 bp, synthetic construct
  source 1..75: mol_type = other DNA
tcggtcggctacagtaacagcgcttcatggggaagctacagtatcagcgctcaacgatcctgggatgagtacagc

SEQ ID NO: 427947 - DNA, 75 bp, synthetic construct
  source 1..75: mol_type = other DNA
tcgcgtaacctggaacaaacttttccaggataccggaacatcatttaacctcgcggcgtaccgctattccaccca

SEQ ID NO: 427948 - DNA, 75 bp, synthetic construct
  source 1..75: mol_type = other DNA
ggtagctggacggactactgggcggcgaacaatagcaggactgaatataacgtcggttacagtaaaagcgtttcg

SEQ ID NO: 427949 - DNA, 75 bp, synthetic construct
  source 1..75: mol_type = other DNA
ttgtaccagtttactcatcaaaaaagccgtatcccgaaaaaaacgctacttgcggcctgttgtgccctgttttat

SEQ ID NO: 427950 - DNA, 75 bp, synthetic construct
  source 1..75: mol_type = other DNA
accattccgcatctgtggcagatttgtgaggacatgacggaagtgtgccccgacgccaccatgctgaactacgtt

SEQ ID NO: 427951 - DNA, 75 bp, synthetic construct
  source 1..75: mol_type = other DNA
ggcattgacgaaatatatgctcttgttgacgacctgattgccgcccacggcgactggctgcctgactggttgcaa

SEQ ID NO: 427952 - DNA, 75 bp, synthetic construct
  source 1..75: mol_type = other DNA
ttacaggatgccgattttgtcgtggtggcatttcagattggcggttatgaaccttgcacggtgactgatttcgag

SEQ ID NO: 427953 - DNA, 75 bp, synthetic construct
  source 1..75: mol_type = other DNA
gctatcaggttccggcatccgctgctgaccagcgcggcaaccagaccctgtcactggataacgtactctgtacgg

SEQ ID NO: 427954 - DNA, 75 bp, synthetic construct
  source 1..75: mol_type = other DNA
acctcggcacgccgcagctgaaagcatctacgtcgataaacgtcccggacccgacgccgtttgtaacttatttct

SEQ ID NO: 427955 - DNA, 75 bp, synthetic construct
  source 1..75: mol_type = other DNA
gaaagccgcatgctgccaccgacgctcgcctcttacgcgccggtgatccgtggggtcgcgaactccaacgccaaa

SEQ ID NO: 427956 - DNA, 75 bp, synthetic construct
  source 1..75: mol_type = other DNA
ttagtcctcattgacgacgccaaacatttgtctgccgatgaagacaaaaacaccatgcagacgtactcacgtatg

SEQ ID NO: 427957 - DNA, 75 bp, synthetic construct
  source 1..75: mol_type = other DNA
aacattggaaaacgatgtcgaactgaaaagtactagtgccaccactgtacctcgtagtggttccattattcttgc

SEQ ID NO: 427958 - DNA, 75 bp, synthetic construct
  source 1..75: mol_type = other DNA
ggcagctggacaaactactgggctggtaacaataaccgaactgaatacaatgttggttacagtaaaagtgtctcc

SEQ ID NO: 427959 - DNA, 75 bp, synthetic construct
  source 1..75: mol_type = other DNA
catgcccgtaccgaaattcctgacgataaaacatatcaggggcaaagttatcgtataacctggaacaaattaatc

SEQ ID NO: 427960 - DNA, 75 bp, synthetic construct
  source 1..75: mol_type = other DNA
gctagatgtcactgtaccccaggcttttgtgttaaagggttaccagggttatgtcgatccctcgctgtgggaatc

SEQ ID NO: 427961 - DNA, 75 bp, synthetic construct
  source 1..75: mol_type = other DNA
cagattaccgataataactatactgccgggctgcttggtcttggtctgaataccacatacggtgcgttttcagtc

SEQ ID NO: 427962 - DNA, 75 bp, synthetic construct
  source 1..75: mol_type = other DNA
caccatgcgtacctattcacgcatgaaaaaccaatttaccgttagtgtaaatcagccattgaattttgcttatga

SEQ ID NO: 427963 - DNA, 75 bp, synthetic construct
  source 1..75: mol_type = other DNA
aagcggatggttccaaacgcacctttacgcaacccttctcgtcggttgtgcaaatgcaacgtcctggtgtaggtc

SEQ ID NO: 427964 - DNA, 75 bp, synthetic construct
  source 1..75: mol_type = other DNA
ggcccagccacaaacgctgggaagtaccaacaccttattacttaataatcttacctgtcaggtagcaaatcacta

SEQ ID NO: 427965 - DNA, 75 bp, synthetic construct
  source 1..75: mol_type = other DNA
ctaacaatagccgcactgaatataatgttggttacagtaagagcgtttcctggggcagcttcagcgtcaacctgc

SEQ ID NO: 427966 - DNA, 75 bp, synthetic construct
  source 1..75: mol_type = other DNA
ttgttgatataggggaaaacagcgccgcggcctgtataacacttaagaatctggcacaactgcatattaagaagc

SEQ ID NO: 427967 - DNA, 75 bp, synthetic construct
  source 1..75: mol_type = other DNA
agtagtgctttaagcgccgagcacgttgagtatgacaataccttcctgatgggtcgtgatgcttcaaatattgat

SEQ ID NO: 427968 - DNA, 75 bp, synthetic construct
  source 1..75: mol_type = other DNA
ccagcagtactccatctctaccgatggcggctttgtgttacacagtggtggtttaacgttcactaacaacagttt

SEQ ID NO: 427969 - DNA, 75 bp, synthetic construct
  source 1..75: mol_type = other DNA
gcagtttatccagggcttcgcggtggcctgcttctttatgccgctgaccaccattacgctgtctggtttgccacc

SEQ ID NO: 427970 - DNA, 75 bp, synthetic construct
  source 1..75: mol_type = other DNA
gcgcaacttcaccatcggctgcttgtgtatcagcctcgcgtatatgctctacttcggcgcgattgttctgctgcc

SEQ ID NO: 427971 - DNA, 75 bp, synthetic construct
  source 1..75: mol_type = other DNA
ctgctggaggccggtcgattgtggaaagagcaacgttatactgacatcggcagcgcgttgttaaaacgcattgcg

SEQ ID NO: 427972 - DNA, 75 bp, synthetic construct
  source 1..75: mol_type = other DNA
cagccgggatattcctcgtcctgctggggctggtgtggtttgccaggccgccatttggcgcaggtggcggcggag

SEQ ID NO: 427973 - DNA, 75 bp, synthetic construct
  source 1..75: mol_type = other DNA
cgttttgcgcataaactggatatgcgtcggctggtaaccttcagctttattatgtatgccgtttgcttttactgg

SEQ ID NO: 427974 - DNA, 75 bp, synthetic construct
  source 1..75: mol_type = other DNA
ggaacgactggcggcggcatcgagagcctctccaactttacgcgaacgctggcggggtctatcggcacgtcgata

SEQ ID NO: 427975 - DNA, 75 bp, synthetic construct
  source 1..75: mol_type = other DNA
gagaaaaacggttatccgccggaaaaagtggatgtggctacggggaaagcgcagggtaaaggaccggtcggtttt

SEQ ID NO: 427976 - DNA, 75 bp, synthetic construct
  source 1..75: mol_type = other DNA
tggcgctttaacccgagttatctgccaccgacgctggcacactacttcacccgcttcggcgcgccgtggaccacg

SEQ ID NO: 427977 - DNA, 75 bp, synthetic construct
  source 1..75: mol_type = other DNA
agcaacgctataccgacattggcagtgcgttgctaaaacgcatcgcgcaagaagaggttgtgacggttcctgggc

SEQ ID NO: 427978 - DNA, 75 bp, synthetic construct
  source 1..75: mol_type = other DNA
tagtgttcaggcagcctgcaactggcctgcctgggagcagttcaaaaaggattacatcagtcaggaagggcgcgt

SEQ ID NO: 427979 - DNA, 75 bp, synthetic construct
  source 1..75: mol_type = other DNA
gaggaagtggtgacggtgcctgggctgggttccatgttgttgccgggcaaagtgggatttgcagaggataacagc

SEQ ID NO: 427980 - DNA, 75 bp, synthetic construct
  source 1..75: mol_type = other DNA
aagtggatgtggctacggggaaagcgcagggtaaaggaccggtcggtttttctgccgccatgctgccctttttac

SEQ ID NO: 427981 - DNA, 75 bp, synthetic construct
  source 1..75: mol_type = other DNA
taaccttcagctttattatgtatgccgtctgcttctactggcgtgcctatacctttgaaccgggtatggattttg

SEQ ID NO: 427982 - DNA, 75 bp, synthetic construct
  source 1..75: mol_type = other DNA
acaacagtgccactaccacttacacgcgtaaaaacggcaaggtctacatcaacggacaaaaaacctttattaccg

SEQ ID NO: 427983 - DNA, 75 bp, synthetic construct
  source 1..75: mol_type = other DNA
cctgatcaacgccgcgcgcagcaccggctttgccgagtgtgcctttgaagatgccgcccgctatgccaaccaacg

SEQ ID NO: 427984 - DNA, 75 bp, synthetic construct
  source 1..75: mol_type = other DNA
atggatttttctttaactgaagaacaagaactgctgctggccagtattcgcgaactgattacgactaactttccg

SEQ ID NO: 427985 - DNA, 75 bp, synthetic construct
  source 1..75: mol_type = other DNA
gatttggtgtttcgttggggaggcgaagagtttgtcttattgctaccaagaaccccactggataccgcgctttcg

SEQ ID NO: 427986 - DNA, 75 bp, synthetic construct
  source 1..75: mol_type = other DNA
cgtaccgcaatggaagtcattgatgatgcgattcaaatcatgggcggtctgggctataccgatgaggcgcgcgtc

SEQ ID NO: 427987 - DNA, 75 bp, synthetic construct
  source 1..75: mol_type = other DNA
acagcgccaccaccacttacacgcgtaaaaacggcaaggtttacatcaacggacagaaaacctttattaccggtg

SEQ ID NO: 427988 - DNA, 75 bp, synthetic construct
  source 1..75: mol_type = other DNA
gcggtttaatacaggtggcaggtactatgaatctgtatactacatcacgctaatttataattacggtcaatcttc

SEQ ID NO: 427989 - DNA, 75 bp, synthetic construct
  source 1..75: mol_type = other DNA
ttccagctcgttaccgggcgcgtatggaaaggttctgctttcggcggagtgaaaggccgtacgcaacttccggcc

SEQ ID NO: 427990 - DNA, 75 bp, synthetic construct
  source 1..75: mol_type = other DNA
ctggcgcgtcgcttcggtgccaccgactgcattaacccgaatgactacgacaaaccgattaaagatgttctgctg

SEQ ID NO: 427991 - DNA, 75 bp, synthetic construct
  source 1..75: mol_type = other DNA
aaaaatccaataccagcgtttttggttgtatggatttgcacgggtttgatgaatttttacctatcctatcaggcg

SEQ ID NO: 427992 - DNA, 75 bp, synthetic construct
  source 1..75: mol_type = other DNA
ttttggtactatggatttgcatggatttgatgagttcctgcctgttttatctggcgataaatatggcgtacaagc

SEQ ID NO: 427993 - DNA, 75 bp, synthetic construct
  source 1..75: mol_type = other DNA
taagcagtcgatgcgattaccaatgatgatgttgggtgcgcaatacttcgttcttagggaaggtgagtttactgg

SEQ ID NO: 427994 - DNA, 75 bp, synthetic construct
  source 1..75: mol_type = other DNA
ccgccaggctatcactctgcttaaagacggcttacgtggcaaaggcgatttcccttgccctgtacagcgcatcag

SEQ ID NO: 427995 - DNA, 75 bp, synthetic construct
  source 1..75: mol_type = other DNA
aaatcgacctctgggaagtcagtctggtgacgttcccgtctaacgacgaggcacggatcagcgacgtcaagaacg

SEQ ID NO: 427996 - DNA, 75 bp, synthetic construct
  source 1..75: mol_type = other DNA
taattctgggcaaacgcgaagaagccctgcgtattgctcaggagatgctggatagaggtttagaccgagagttag

SEQ ID NO: 427997 - DNA, 75 bp, synthetic construct
  source 1..75: mol_type = other DNA
attagtcgaccaaattgtttcgctgctagttacagggaacactaatgacagacagctaaaagccctgtttaatta

SEQ ID NO: 427998 - DNA, 75 bp, synthetic construct
  source 1..75: mol_type = other DNA
ttaccctgtgcttcagccgcctgtttggcattaaaacgcgcaaactggaatgggtgggtatcgccattgggcttg

SEQ ID NO: 427999 - DNA, 75 bp, synthetic construct
  source 1..75: mol_type = other DNA
tgcctttaccacaacactccagaaatggagcgaaaaaaaggcgctgcctgcgttgctctggcagcaccgcatgga

SEQ ID NO: 428000 - DNA, 75 bp, synthetic construct
  source 1..75: mol_type = other DNA
cggatgcgttcggtaatgcacttgccgggcagacggtcagcgtgacggcaggcaatggcgcaactgtcgctccga

SEQ ID NO: 428001 - DNA, 75 bp, synthetic construct
  source 1..75: mol_type = other DNA
aaaatgaatgggaaggaatggtcatctacggcgcggtacgtcaggttgatgatctggaagagctggacatcggca

SEQ ID NO: 428002 - DNA, 75 bp, synthetic construct
  source 1..75: mol_type = other DNA
atgactactaaagctactcgcggtcgccctacccgttttaatcgtgaacagatggctgatattgcctacgcttac

SEQ ID NO: 428003 - DNA, 75 bp, synthetic construct
  source 1..75: mol_type = other DNA
ttggacggatgaagctggcagatgacgacgcgaatattccggcaggggctgcgatagccacacctgcgattattc

SEQ ID NO: 428004 - DNA, 75 bp, synthetic construct
  source 1..75: mol_type = other DNA
ggcaaaacagtactaattactctattggttatagcaatagtgcgtcctggggcagttacagtatcagtgctcaac

SEQ ID NO: 428005 - DNA, 75 bp, synthetic construct
  source 1..75: mol_type = other DNA
aataccagtacatcattaaatatcgcggcctatcgctactccacccagcacactatctgggcctcaatgatgcgc

SEQ ID NO: 428006 - DNA, 75 bp, synthetic construct
  source 1..75: mol_type = other DNA
ttctgttcgtcgcgcactggtcgatgctgaactggcgcgtctggcagtacaaaatgaatgggaagggctggtcat

SEQ ID NO: 428007 - DNA, 75 bp, synthetic construct
  source 1..75: mol_type = other DNA
aaatcgacctctgggaagtcagtctggtgacattcccgtctaacgacgaggcgcggatcagcgacgtcaagaacg

SEQ ID NO: 428008 - DNA, 75 bp, synthetic construct
  source 1..75: mol_type = other DNA
gggggaatatgtggtttatccggcgacgttagcagggacggaagcccgcagcgcaacattcaacgcgagtttgta

SEQ ID NO: 428009 - DNA, 75 bp, synthetic construct
  source 1..75: mol_type = other DNA
ccggtctgaaattgccgtcgtggctgaacaaaggcgaccccgccaggctggtgcgggcctgcgtgaagttctggt

SEQ ID NO: 428010 - DNA, 75 bp, synthetic construct
  source 1..75: mol_type = other DNA
ccagtatggtcgtacctgcaggcgctatttctttcaggtaatcaatacaaccactgcccggctgacagccggcac

SEQ ID NO: 428011 - DNA, 75 bp, synthetic construct
  source 1..75: mol_type = other DNA
gaaacgatcctctttttgctggcttggcagcgtgacgtcacccgcttaaacgcggagccgctggatctgttccgc

SEQ ID NO: 428012 - DNA, 75 bp, synthetic construct
  source 1..75: mol_type = other DNA
tgctgatccagatactggcagagctggcgcagcaatgtgcgagtcattcgcaccccagtgttggtacgccaacca

SEQ ID NO: 428013 - DNA, 75 bp, synthetic construct
  source 1..75: mol_type = other DNA
ggccggatttgaacgcatcttcagacgactggggatcggagaaataaaaacactggagcgtcagttacagtatga

SEQ ID NO: 428014 - DNA, 75 bp, synthetic construct
  source 1..75: mol_type = other DNA
catcattaatgagccacgtgcctgactggctgcaatggttaagctatttgctgtggcctgtcgcggttctctccg

SEQ ID NO: 428015 - DNA, 75 bp, synthetic construct
  source 1..75: mol_type = other DNA
atttgcgtggtatttgccacgcgccatcgtattgctgatcctctacttcatcccgggcatcgggcaaaccgtcgc

SEQ ID NO: 428016 - DNA, 75 bp, synthetic construct
  source 1..75: mol_type = other DNA
gggtgctggaatacctcaaccaggtacagggtaagctgcctgcgggagtcagcgccgagctggggccagatgcca

SEQ ID NO: 428017 - DNA, 75 bp, synthetic construct
  source 1..75: mol_type = other DNA
gatggtgcaaaattcacgttgttactaacccataatatgaaaaatacggattataattggacggctgggatttat

SEQ ID NO: 428018 - DNA, 75 bp, synthetic construct
  source 1..75: mol_type = other DNA
ttgtggcctctggctgtcatctctgtgctgttagtgtttggctatttcttctcaacgattgctaactggattgcc

SEQ ID NO: 428019 - DNA, 75 bp, synthetic construct
  source 1..75: mol_type = other DNA
cgctacgccgccggataccggaatttttggcatcatgaaagatgtgccgcgaattatgaaacgcgaatggcaaaa

SEQ ID NO: 428020 - DNA, 75 bp, synthetic construct
  source 1..75: mol_type = other DNA
caggttgaggccggatcgttatgtccgataaccatgacttttgccgccaccccattgttattgcagatgttacct

SEQ ID NO: 428021 - DNA, 75 bp, synthetic construct
  source 1..75: mol_type = other DNA
gtacagggaccgtagacagcgcaagtggtggattgattatctatactcgtaatagaaaatgtaatgaaatgatga

SEQ ID NO: 428022 - DNA, 75 bp, synthetic construct
  source 1..75: mol_type = other DNA
gagaaaggaagctgctatctgcagggataccgctatgcacctccactacccgctgaacagtttattgctgagtgg

SEQ ID NO: 428023 - DNA, 75 bp, synthetic construct
  source 1..75: mol_type = other DNA
ctgctgacatttttctggaaaaaagcagagctagtaaatgacagccagatcagagttaatttcgcactcggctac

SEQ ID NO: 428024 - DNA, 75 bp, synthetic construct
  source 1..75: mol_type = other DNA
tcgggaagcacagtcctatcagtaagcggaaaaaatgtctctttgcatccggacgacagcggcatacaaaaagaa

SEQ ID NO: 428025 - DNA, 75 bp, synthetic construct
  source 1..75: mol_type = other DNA
gattgcccaaaaaaccccttggttttttatagtcagcaccttcatactgtaagtaagctggattatcaagttgtg

SEQ ID NO: 428026 - DNA, 75 bp, synthetic construct
  source 1..75: mol_type = other DNA
gtttggctgatattgataatgatatttttcttcagcgtattaatgcttctattactcgtgttagatttgcacttc

SEQ ID NO: 428027 - DNA, 75 bp, synthetic construct
  source 1..75: mol_type = other DNA
cctccactacccgctgaacagtttattgctgagtgggtatacaacagcagaaaggcaaaaaccagagataacaca

SEQ ID NO: 428028 - DNA, 75 bp, synthetic construct
  source 1..75: mol_type = other DNA
tggcctggtatttctgttcattgttctgctgacatttttctggaaaaaagcagagctggtgaatgacagccagat

SEQ ID NO: 428029 - DNA, 75 bp, synthetic construct
  source 1..75: mol_type = other DNA
agtacagaagctgctgccggtggagatggcggccagcaaagggattgagctggtatacgtgaataccaaagggat

SEQ ID NO: 428030 - DNA, 75 bp, synthetic construct
  source 1..75: mol_type = other DNA
tagcctgatatttctattcattattctgctgacatttttctggaaaaaagcagagctagtaaatgacagccagat

SEQ ID NO: 428031 - DNA, 75 bp, synthetic construct
  source 1..75: mol_type = other DNA
tatccaccttcccgaaagggaaagtgaaactggttctggaactgacagaacgaaaccagctatccgtcacagcag

SEQ ID NO: 428032 - DNA, 75 bp, synthetic construct
  source 1..75: mol_type = other DNA
gcggaaaaagtgtcactctgcccccgaacgacagcaacatacaaaaagaaagtcattcaaaaaaatatccgttct

SEQ ID NO: 428033 - DNA, 75 bp, synthetic construct
  source 1..75: mol_type = other DNA
tctgcagggataccgctatgcacctccactacccgctgaacagtttattgctgagtgggtatacaacagcagaaa

SEQ ID NO: 428034 - DNA, 75 bp, synthetic construct
  source 1..75: mol_type = other DNA
aagaaataacagcacataatggatatggtgatacaataactataggtggagacaattatccgggttctttaggac

SEQ ID NO: 428035 - DNA, 75 bp, synthetic construct
  source 1..75: mol_type = other DNA
gttaatggctatataaatatccgttatgataaattatcaaccttatccaatgctgccggaacaggaaccgatccg

SEQ ID NO: 428036 - DNA, 75 bp, synthetic construct
  source 1..75: mol_type = other DNA
agcaatggagttggtgatgtttataaatcattaaatcttggacaacacctcctttgtgttttttcaggagatcaa

SEQ ID NO: 428037 - DNA, 75 bp, synthetic construct
  source 1..75: mol_type = other DNA
agcactaaagacaacgggtaatgcgtctgttgcatcagatctgagtgtgggtggaacctctacccttaatggtcc

SEQ ID NO: 428038 - DNA, 75 bp, synthetic construct
  source 1..75: mol_type = other DNA
cgcaaaaagcatcctacaagattgtgttaaaacgttcaggaacaacgcctgattacgtcattaatggccttataa

SEQ ID NO: 428039 - DNA, 75 bp, synthetic construct
  source 1..75: mol_type = other DNA
gacgttaattaatgaaggtctgttgcctgtaggctatacaggaactaacgcgcaaaaagcatcctacaagattgt

SEQ ID NO: 428040 - DNA, 75 bp, synthetic construct
  source 1..75: mol_type = other DNA
gtaacagctacggactttacccgcccgctgccttttgggccgtggctcgctttgagcggagtgtgccattttttg

SEQ ID NO: 428041 - DNA, 75 bp, synthetic construct
  source 1..75: mol_type = other DNA
ttgcaattggagcaaccggtgcctgagtcgatgcatccttttaacctgatcctacctcgctcatgttgtccacat

SEQ ID NO: 428042 - DNA, 75 bp, synthetic construct
  source 1..75: mol_type = other DNA
tcaaaagcgttatttgcgaaattacatcaacagggagtattgtttgcactggatgattttggtactggctatgca

SEQ ID NO: 428043 - DNA, 75 bp, synthetic construct
  source 1..75: mol_type = other DNA
cacataatggttatggtgataccattacgcttggaggagatgccgctggaaatgattatgaaatacgtttaggaa

SEQ ID NO: 428044 - DNA, 75 bp, synthetic construct
  source 1..75: mol_type = other DNA
gacattgattaacgaaggtttattaccttcagccttcacaggcactaatgctaatagatcctcgtataaaatcat

SEQ ID NO: 428045 - DNA, 75 bp, synthetic construct
  source 1..75: mol_type = other DNA
gtgacagccacggactttacccgaccgctgccttttggtccgtggctcgccttgagcggagtgagccattttttg

SEQ ID NO: 428046 - DNA, 75 bp, synthetic construct
  source 1..75: mol_type = other DNA
gccattgccgattttgccgaaaaaggcaaaaccgatccgctgtttaaagagctggcgcggctggttgaggaaacg

SEQ ID NO: 428047 - DNA, 75 bp, synthetic construct
  source 1..75: mol_type = other DNA
tccccgcccacgtttctgaaaccgtttgtgactggtgtctgtgcggcattgctggcggtcagcgtggccattccg

SEQ ID NO: 428048 - DNA, 75 bp, synthetic construct
  source 1..75: mol_type = other DNA
ccgggccatgccaccggatgagcgtgacaacctgcccctgctgtatcagacagaaacatgcctgaaaacgctgag

SEQ ID NO: 428049 - DNA, 75 bp, synthetic construct
  source 1..75: mol_type = other DNA
ctgaaaccgtttgtggctggtgtctgtgcggcattgctggcggtctgcgtggccattccgggatggcagtttctg

SEQ ID NO: 428050 - DNA, 75 bp, synthetic construct
  source 1..75: mol_type = other DNA
cagcccctgccgcactcccgtctggtgtatgttgtttctgaaacaaaagcagagcccacatcctcccttcagaaa

SEQ ID NO: 428051 - DNA, 75 bp, synthetic construct
  source 1..75: mol_type = other DNA
accggcagagcagcaactcagggggctgctgacaccgccaccggatgtgctttcagcagaccatctggcacagct

SEQ ID NO: 428052 - DNA, 75 bp, synthetic construct
  source 1..75: mol_type = other DNA
cagcagcaaaaacaggctgaaatgacactgaatcagttgattaatcgttatcaggtggaacacgcaggcaaaccg

SEQ ID NO: 428053 - DNA, 75 bp, synthetic construct
  source 1..75: mol_type = other DNA
gctgacattttccccgacgggtggctggaaaatatgacccgtcgggctgaacgtgtttttacgagtgcgaaacgt

SEQ ID NO: 428054 - DNA, 75 bp, synthetic construct
  source 1..75: mol_type = other DNA
gctcatacgcactctgttgcgattggttcacatggacataccatcaccgttaatgctgctggtaacgcggaaaac

SEQ ID NO: 428055 - DNA, 75 bp, synthetic construct
  source 1..75: mol_type = other DNA
taaaccaacgaataacacaggtgcacatacccacaatgtatctggtactgcaaatagtgctggcgcacatactca

SEQ ID NO: 428056 - DNA, 75 bp, synthetic construct
  source 1..75: mol_type = other DNA
gaaagtgaatgtggctctcagacatttataatctttacagatgatgtcatatgggcaaaggaaaaattctcaaaa

SEQ ID NO: 428057 - DNA, 75 bp, synthetic construct
  source 1..75: mol_type = other DNA
gcctacaaagggctaacgtgcgggtttgtaggtagcgtagcgcatcaggcaatattgcgtaccagcattagcaat

SEQ ID NO: 428058 - DNA, 75 bp, synthetic construct
  source 1..75: mol_type = other DNA
atcattcagggagccaccctgacgtttcagtttatgcagaacgctgtgcacaaggaatgtcgctttcaccggtcc

SEQ ID NO: 428059 - DNA, 75 bp, synthetic construct
  source 1..75: mol_type = other DNA
tctccgcaacgtcagcagcagattcagcaggctgagcagcacctgcgggctcaagtctatatgctggcgcaggaa

SEQ ID NO: 428060 - DNA, 75 bp, synthetic construct
  source 1..75: mol_type = other DNA
ttgctgatcgggatggggaaatctgggggcatgagtattcatggaacttggcaagatccagtttgcaagacctgg

SEQ ID NO: 428061 - DNA, 75 bp, synthetic construct
  source 1..75: mol_type = other DNA
gacgtaaattatcgatcatagaagccgcgagcagcgaaaaatcacttttcgcgccgccgggaaataattatgaac

SEQ ID NO: 428062 - DNA, 75 bp, synthetic construct
  source 1..75: mol_type = other DNA
aaaagagaaagcggaagcagaattgcagaagctgaaaatgatgtctccaatgtcggcagaagcgaccgtggtgcg

SEQ ID NO: 428063 - DNA, 75 bp, synthetic construct
  source 1..75: mol_type = other DNA
ggatattcagcaggctacagctacgaatattttggcggtaacgccacctatatgattattcccgaaatcgccatt

SEQ ID NO: 428064 - DNA, 75 bp, synthetic construct
  source 1..75: mol_type = other DNA
acgaatatttcggcggtaatgccacctatatgattattcccgaaatcgccattaacctgggctgtgtattaccgt

SEQ ID NO: 428065 - DNA, 75 bp, synthetic construct
  source 1..75: mol_type = other DNA
atgaaaaccaaagttgctgctatttatggcaagcgggatgtccgtctgcgcgaatttgaactgcccgaaattacc

SEQ ID NO: 428066 - DNA, 75 bp, synthetic construct
  source 1..75: mol_type = other DNA
acggccaggcgcgcgtgtttgttctctgggagcgtatccgcaatgaccaggacgggacaatcgttaatattgaca

SEQ ID NO: 428067 - DNA, 75 bp, synthetic construct
  source 1..75: mol_type = other DNA
cgatggctgcaccctggaacgcgccgaagtggcgttcctggacgaggacggccccagtcccgacctaccccaccg

SEQ ID NO: 428068 - DNA, 75 bp, synthetic construct
  source 1..75: mol_type = other DNA
agagagcggaacagaaaacacacattcccttcagaaatccccgctcacgtttctgaaaccgtttgtggctggtgt

SEQ ID NO: 428069 - DNA, 75 bp, synthetic construct
  source 1..75: mol_type = other DNA
ccgtcaaaaacaacgaagaagaacaaaccctgtctcttcaaaattatccttctgtctttcttttttttttttttt

SEQ ID NO: 428070 - DNA, 75 bp, synthetic construct
  source 1..75: mol_type = other DNA
tcaaaaaagacctgcgccaggcgcaggaaatccttgataccgaccattatggtctggagcgcgtgaaagatcgca

SEQ ID NO: 428071 - DNA, 75 bp, synthetic construct
  source 1..75: mol_type = other DNA
gaatcggaaatcgatctgctacaggttgagaaacgcattcgcaaccgcgttaaaaagcagatggagaaatcccag

SEQ ID NO: 428072 - DNA, 75 bp, synthetic construct
  source 1..75: mol_type = other DNA
ggaagctaataaaaaaagattatctcttgagccagcctgtcgagaatatcttgatttaaaaagagaaatagaggt

SEQ ID NO: 428073 - DNA, 75 bp, synthetic construct
  source 1..75: mol_type = other DNA
acgcctgacggatgaactgtgtgctcagggttaccattttaccggtaagcgtcaacggagcaccgcattgacgct

SEQ ID NO: 428074 - DNA, 75 bp, synthetic construct
  source 1..75: mol_type = other DNA
aaaacagtatccgaggcacttataaccatgctcagtattttgataaacgcagagttatgatgcagtggtatgctg

SEQ ID NO: 428075 - DNA, 75 bp, synthetic construct
  source 1..75: mol_type = other DNA
agactggagatctcaaatttatcactttgataactttgacgaaaaagaatgggatcctaatttgtatgaacaata

SEQ ID NO: 428076 - DNA, 75 bp, synthetic construct
  source 1..75: mol_type = other DNA
tatgttgccatgaagtcatctccactgcctaatcctggtgtggctgatgcctatctggtggctaaggtggtttaa

SEQ ID NO: 428077 - DNA, 75 bp, synthetic construct
  source 1..75: mol_type = other DNA
tgggtgaagacaatgttgctgcttttgaagctctggaaaaggagaatgcagaattaagaagtttaagaggttcgt

SEQ ID NO: 428078 - DNA, 75 bp, synthetic construct
  source 1..75: mol_type = other DNA
ggatatcagctcgctggatgatttcctgcgccattacgaaacctttgtggagccgcccggtacgccgccgtttga

SEQ ID NO: 428079 - DNA, 75 bp, synthetic construct
  source 1..75: mol_type = other DNA
acacatcccggcgactggagcgacagcgtgctgcgcaccatgctgattaacgccccggctatctatgttgcctgg

SEQ ID NO: 428080 - DNA, 75 bp, synthetic construct
  source 1..75: mol_type = other DNA
atctcattattgacaactgggaaacggtcgggccggttgtgaaaaaagtctggcaggaggttgatcaggttgtca

SEQ ID NO: 428081 - DNA, 75 bp, synthetic construct
  source 1..75: mol_type = other DNA
tcacacttgctgaagctcgttcccgtcgtgatgaggcccgaaaaatagtggctgagggaaaaaaccctagtgagg

SEQ ID NO: 428082 - DNA, 75 bp, synthetic construct
  source 1..75: mol_type = other DNA
tcactcttgctgaagctcgcgcccgccgtgatgaggccagaaaaatagtggccgagggaaaaaatcctagtgagg

SEQ ID NO: 428083 - DNA, 75 bp, synthetic construct
  source 1..75: mol_type = other DNA
agccgcccggtacgccgccgtttgaggcacatattcatctgaaaggtacaggtgaaaccatgaatcccaacgaag

SEQ ID NO: 428084 - DNA, 75 bp, synthetic construct
  source 1..75: mol_type = other DNA
aaagtatcggggcattgaaatcagtggggtagtgtcatcagtcgaaataagcaaagttgaatcaagggcaacatt

SEQ ID NO: 428085 - DNA, 75 bp, synthetic construct
  source 1..75: mol_type = other DNA
ttgtgacgaagagcttaaacttttgctgtatggtatcgaagagagatattacacaactcgatttggtaatgaaaa

SEQ ID NO: 428086 - DNA, 75 bp, synthetic construct
  source 1..75: mol_type = other DNA
gttcattggttccgtatgcaccggatcataatcttgatgaagattcctggtttagtctcagtgaatttagtaaac

SEQ ID NO: 428087 - DNA, 75 bp, synthetic construct
  source 1..75: mol_type = other DNA
taacggaagatgggcgtcaggttgaagaagtgcatgttctggggaatatgtatcgcctggaattttacccgcgca

SEQ ID NO: 428088 - DNA, 75 bp, synthetic construct
  source 1..75: mol_type = other DNA
gatcgaccctctggctgcggcgctaagaaatcttgaacaacagcaggatgaacttaatgctgcgtttgcatccgg

SEQ ID NO: 428089 - DNA, 75 bp, synthetic construct
  source 1..75: mol_type = other DNA
atgccctgctgtggattaactttcgtttttaccttgcgccactgttctggctaattgtaggcggtatctggggac

SEQ ID NO: 428090 - DNA, 75 bp, synthetic construct
  source 1..75: mol_type = other DNA
tcaaggtaatgatttttactttcaaaaaatcactccaagcctattcgtaaaacgcaaaacgcttgtttttggtga

SEQ ID NO: 428091 - DNA, 75 bp, synthetic construct
  source 1..75: mol_type = other DNA
cgtattcatgggattgggttattggtatgctacgccgaaagcgaatcgtccggttgcggacaaatttaatcaaac

SEQ ID NO: 428092 - DNA, 75 bp, synthetic construct
  source 1..75: mol_type = other DNA
gaagcggattgtgaatttacgctctcagatgacgatggcgctgaaaaaatatcgcccacaggccgacgatacctg

SEQ ID NO: 428093 - DNA, 75 bp, synthetic construct
  source 1..75: mol_type = other DNA
ctcacacttgataaaataagcgtaaccgcccagaaatttttagattatcgagactggagatcacaaattcatcac

SEQ ID NO: 428094 - DNA, 75 bp, synthetic construct
  source 1..75: mol_type = other DNA
cgtgttgttgcggaagtgatgcgccgtgaaggcactgaactgaacgggcaggactgcttggttatccgtaccagg

SEQ ID NO: 428095 - DNA, 75 bp, synthetic construct
  source 1..75: mol_type = other DNA
aaactgacggttatggcgcggaaacatggaagggacgacgaatgattggacaggaagaggattactatataccag

SEQ ID NO: 428096 - DNA, 75 bp, synthetic construct
  source 1..75: mol_type = other DNA
tccgagtgatgaggattactttaatcctgacatgattagtgatgaagagctagcgatgataaataaaacagtatc

SEQ ID NO: 428097 - DNA, 75 bp, synthetic construct
  source 1..75: mol_type = other DNA
aggctatggggggatgggaaacgatccttaaagcaatcgccatttttatggcgacaaagtgggtcaccgatgtca

SEQ ID NO: 428098 - DNA, 75 bp, synthetic construct
  source 1..75: mol_type = other DNA
aacctatgacttcgaacgtctgatggacggcgctaagctgctgaaatgttcagagtttggtgaggcgatcatcga

SEQ ID NO: 428099 - DNA, 75 bp, synthetic construct
  source 1..75: mol_type = other DNA
aacctatgacttcgaacgtctgatggatggcgctaatctgctgaaatgttcagagtttggtgaagcgatcatcga

SEQ ID NO: 428100 - DNA, 75 bp, synthetic construct
  source 1..75: mol_type = other DNA
aacctatgacttcgaacgtctgatggaaggcgctaatctgctgaaatgttcagagtttggtgatgcgatcatcga

SEQ ID NO: 428101 - DNA, 75 bp, synthetic construct
  source 1..75: mol_type = other DNA
tcaacgcgaaaaccgtaacctatgacttcgagcgtctgatggatggcgctaaactgctgaaatgttcagagtttg

SEQ ID NO: 428102 - DNA, 75 bp, synthetic construct
  source 1..75: mol_type = other DNA
aacctatgacttcgaacgtctgatggagggcgctaagctgctgaaatgttcagagtttggtgacgcgatcatcga

SEQ ID NO: 428103 - DNA, 75 bp, synthetic construct
  source 1..75: mol_type = other DNA
aacctatgacttcgaacgtctgatggagggcgctaacctgctgaaatgttcagagtttggtgaggcgatcatcga

SEQ ID NO: 428104 - DNA, 75 bp, synthetic construct
  source 1..75: mol_type = other DNA
cttcgagcgtctgatggaaggcgctaaactgctgaaatgttcagaatttggtgatgcgatcatcaagaatatgta

SEQ ID NO: 428105 - DNA, 75 bp, synthetic construct
  source 1..75: mol_type = other DNA
gtgtggatcactattgcaccgttcgtgacaacaacaacaaccggagcacttaagacaacgggtaatgcgtctgtt

SEQ ID NO: 428106 - DNA, 75 bp, synthetic construct
  source 1..75: mol_type = other DNA
cgctatcaacaacaggtctggcgaagtttggtagtcgtattgcgacgaatggacttaatccaaacgatctgcctg

SEQ ID NO: 428107 - DNA, 75 bp, synthetic construct
  source 1..75: mol_type = other DNA
ccgctgagatgatgctgcgccagatgggttggacggaagcggctgacctgattgttaaaggtatggaaggcgcaa

SEQ ID NO: 428108 - DNA, 75 bp, synthetic construct
  source 1..75: mol_type = other DNA
ccgctgagatgatgctgcgccacatgggttggacggaagcggctgactttattgttaaaggtatggaaggcgcaa

SEQ ID NO: 428109 - DNA, 75 bp, synthetic construct
  source 1..75: mol_type = other DNA
ccgctgagatgatgctgcgccaaatgggttggacggaagcggctgacgtaattgttaaaggtatggaaggcgcaa

SEQ ID NO: 428110 - DNA, 75 bp, synthetic construct
  source 1..75: mol_type = other DNA
tgtttgaagccacccacggtactgcgccgaaatatgccggtcaggacaaagtaaatccaggctctatcatcctct

SEQ ID NO: 428111 - DNA, 75 bp, synthetic construct
  source 1..75: mol_type = other DNA
ttgccggaatgggggtggaatcagaaattgcggcgacggggataaagaattttatgttgtcgctgacagcggggg

SEQ ID NO: 428112 - DNA, 75 bp, synthetic construct
  source 1..75: mol_type = other DNA
ctacgacatggacccagaaagaaaattttgtaaattcacttgagcgttacagaataggccttctcaataatcagc

SEQ ID NO: 428113 - DNA, 75 bp, synthetic construct
  source 1..75: mol_type = other DNA
tagatagtaatgaaaagtcgttgtcgctggaagaagcacatttaaggcgtgagcgattcatggagcctgtaacct

SEQ ID NO: 428114 - DNA, 75 bp, synthetic construct
  source 1..75: mol_type = other DNA
gcatgtactggattctctggcgaaagtgccgaaagaaaaacaggctgctgtgcttaatgcgctgttcgggaagga

SEQ ID NO: 428115 - DNA, 75 bp, synthetic construct
  source 1..75: mol_type = other DNA
gcagcgaacttaaggtgacgtttgacaacgcgccgccaggaatgcgcgtcatcgatttgccgaaaacaggcgatc

SEQ ID NO: 428116 - DNA, 75 bp, synthetic construct
  source 1..75: mol_type = other DNA
cggtctggccttactgacggtgggagccgctgcaggctctttgtccagaattatgaaagttctcggcggtgtgat

SEQ ID NO: 428117 - DNA, 75 bp, synthetic construct
  source 1..75: mol_type = other DNA
cttcgaacgtctgatggaaggcgctaagctgctcaaatgttcagagtttggtgacgcgatcatcgaaaacatgta

SEQ ID NO: 428118 - DNA, 75 bp, synthetic construct
  source 1..75: mol_type = other DNA
attgttaaaggtatggaaggcgcaatcaacgcgaagaccgtaacttatgacttcgaacgtctgatggaaggcgct

SEQ ID NO: 428119 - DNA, 75 bp, synthetic construct
  source 1..75: mol_type = other DNA
gcagtggttcgaagccgcagacctgattgtcaaaggcatggaaggcgcaatcgctgccaagaccgtgacctatga

SEQ ID NO: 428120 - DNA, 75 bp, synthetic construct
  source 1..75: mol_type = other DNA
attccgggatctacattcgtcagggaaaaaccggcgttaagcaaatcaaagcctggtcgcctcgtctgcagaaag

SEQ ID NO: 428121 - DNA, 75 bp, synthetic construct
  source 1..75: mol_type = other DNA
cagataactggatgccgcctcgtgtttaccagggcaaagcggcctacgaattcaggaataaagataacaaagcga

SEQ ID NO: 428122 - DNA, 75 bp, synthetic construct
  source 1..75: mol_type = other DNA
cttcgaacgtctgatggacggcgctaagctgctgaaatgttcagagtttggtgacgcaatcatcgaaaacatgta

SEQ ID NO: 428123 - DNA, 75 bp, synthetic construct
  source 1..75: mol_type = other DNA
tggcgcggggaacacagcaccactgaaaatctgtacgaaagcaatagcggtttatccccgctggcgcggggaaca

SEQ ID NO: 428124 - DNA, 75 bp, synthetic construct
  source 1..75: mol_type = other DNA
cccgctggcgcggggaacacattttcctgatcgagttttgagaattttgtcgcggtttatccccgctggcgcggg

SEQ ID NO: 428125 - DNA, 75 bp, synthetic construct
  source 1..75: mol_type = other DNA
tttatccccgctggcgcggggaacacggaccaaatacccgtccctcaatccacgccgtcggtttatccccgctgg

SEQ ID NO: 428126 - DNA, 75 bp, synthetic construct
  source 1..75: mol_type = other DNA
gcggtttatccccgctggcgcggggaacacaacgtcaggttgtcgccgctctgcgtggtcgccggtttatccccg

SEQ ID NO: 428127 - DNA, 75 bp, synthetic construct
  source 1..75: mol_type = other DNA
gtttatccccgctggcgcggggaactcggcgcatggggccgacggtcgcagtgctggaccggtttatccccgctg

SEQ ID NO: 428128 - DNA, 75 bp, synthetic construct
  source 1..75: mol_type = other DNA
agatatagccggatcggtttatccccgctggcgcggggaacactggcaaaacaaacatcggggtacgcgtggtgc

SEQ ID NO: 428129 - DNA, 75 bp, synthetic construct
  source 1..75: mol_type = other DNA
tgggaacatctgactgaactttatcgctacttgaaattatctccgttcagtcggtcactgcaaaaagactgtatc

SEQ ID NO: 428130 - DNA, 75 bp, synthetic construct
  source 1..75: mol_type = other DNA
tcgccctttgccgatttggtttatggcatgcttcctcatccgaaaattacagagatactggaagaagtggacagc

SEQ ID NO: 428131 - DNA, 75 bp, synthetic construct
  source 1..75: mol_type = other DNA
ctgacggtattaatctgggactgacaaaaatggcggagtcctgccccggggtaacaaaatcgtccctcgaaggta

SEQ ID NO: 428132 - DNA, 75 bp, synthetic construct
  source 1..75: mol_type = other DNA
ctgacgcggggaacacacatgaatgtcggttcagaccgtgtttttacccggtttatccccgctggcgcggggaac

SEQ ID NO: 428133 - DNA, 75 bp, synthetic construct
  source 1..75: mol_type = other DNA
aacaccagttgtctgatgtgtcgctggcctggcggcacggtttatccccgctggcgcggggaacacccgttcata

SEQ ID NO: 428134 - DNA, 75 bp, synthetic construct
  source 1..75: mol_type = other DNA
aacggtttgcatcattatctggccgataaaccgacggtgatggcagcgatgaagcagaaaaccgggttgaagtaa

SEQ ID NO: 428135 - DNA, 75 bp, synthetic construct
  source 1..75: mol_type = other DNA
agagtgattcattaaagcggtccattaatgtgcgggcactatgtgccagcaccaggctggggcgggattctggcg

SEQ ID NO: 428136 - DNA, 75 bp, synthetic construct
  source 1..75: mol_type = other DNA
gggaactcaacatcggaaacggcttcgcggcggcggcgtccggtttatccccgctggcgcggggaactcgacaga

SEQ ID NO: 428137 - DNA, 75 bp, synthetic construct
  source 1..75: mol_type = other DNA
tcggtttatccccgctggcgcggggaacactggctctgcaacagcagcacccatgaccacgtcggtttatccccg

SEQ ID NO: 428138 - DNA, 75 bp, synthetic construct
  source 1..75: mol_type = other DNA
gaactcagcgtgttcggcatcacctttggcttcggctgcggtttatccccgctggcgcggggaactctgcgtgag

SEQ ID NO: 428139 - DNA, 75 bp, synthetic construct
  source 1..75: mol_type = other DNA
gcgcggggaacacccgaacggctcggcgctctcatacccccaaatcggtttatccccgctggcgcggggaacact

SEQ ID NO: 428140 - DNA, 75 bp, synthetic construct
  source 1..75: mol_type = other DNA
tgggcggtttatccccgctggcgcggggaactctgggcggcttgccttgcagccagctccagcagcggtttatcc

SEQ ID NO: 428141 - DNA, 75 bp, synthetic construct
  source 1..75: mol_type = other DNA
ggaacacgccacgcgcccacatttttaaattttctgaatcggtttatccccgctggcgcggggaacacaacatca

SEQ ID NO: 428142 - DNA, 75 bp, synthetic construct
  source 1..75: mol_type = other DNA
gcgcggggaactctacagcagcggcgatcaacatgcggcaggcaacggtttatccccgctggcgcggggaactct

SEQ ID NO: 428143 - DNA, 75 bp, synthetic construct
  source 1..75: mol_type = other DNA
atggtggtttatccccgctggcgcggggagctcggcatagccaggctgatccggcgacggccttacggtttatcc

SEQ ID NO: 428144 - DNA, 75 bp, synthetic construct
  source 1..75: mol_type = other DNA
cgcggggaactcatatgcctggcttaaatcgtttaaatatgttgcggtttatccccgcaggcgcggggaactcaa

SEQ ID NO: 428145 - DNA, 75 bp, synthetic construct
  source 1..75: mol_type = other DNA
cgctggcgcggggaacaccgtccggatcggtttcgagaatctctacgctccggtttatccccgctggcgcgggga

SEQ ID NO: 428146 - DNA, 75 bp, synthetic construct
  source 1..75: mol_type = other DNA
gcgatgcgtgagaaagggggtcgatacggtttatccccgctggcgcggggaacacagttcgctgagtagcctttt

SEQ ID NO: 428147 - DNA, 75 bp, synthetic construct
  source 1..75: mol_type = other DNA
ccgctggcgcggggaacacacgatggcgatgcgtgagaaagggggtcgatacggtttatccccgctggcgcgggg

SEQ ID NO: 428148 - DNA, 75 bp, synthetic construct
  source 1..75: mol_type = other DNA
ggctgcattctggggcgacggtacaacatcgtcgtcagacgggcaaaactttcgggtaggcagtcacgggcgtta

SEQ ID NO: 428149 - DNA, 75 bp, synthetic construct
  source 1..75: mol_type = other DNA
atctgacaggcgattatatctggaaaagcaaccggataccggcttccggtaagtttcgtcggctgcggccagcta

SEQ ID NO: 428150 - DNA, 75 bp, synthetic construct
  source 1..75: mol_type = other DNA
ggaaatcagggagcattacaccgatacagctggtttcaccgatcatgtctttgccctgatgcatctgctggggtt

SEQ ID NO: 428151 - DNA, 75 bp, synthetic construct
  source 1..75: mol_type = other DNA
ggcgttacgttccggggatatctgggttaaaggctcacgacgttacaaaaatttcgacgattaccttattccaga

SEQ ID NO: 428152 - DNA, 75 bp, synthetic construct
  source 1..75: mol_type = other DNA
aaaatgtcggctttgccccggataaaaaaatcccaccctctgatgcgctgctgaagcatatcgccagcaggctaa

SEQ ID NO: 428153 - DNA, 75 bp, synthetic construct
  source 1..75: mol_type = other DNA
ttatgctcgactggttccgcgatccggcacttcgtcggcgggtacaggcgggactgaataaaggagaagcccgta

SEQ ID NO: 428154 - DNA, 75 bp, synthetic construct
  source 1..75: mol_type = other DNA
gcaccggctgggagaaatcagggacagaaagcctgaaaatcagagctatcgcgccagtggactgacgcttctgac

SEQ ID NO: 428155 - DNA, 75 bp, synthetic construct
  source 1..75: mol_type = other DNA
catcaacagcgaattattattcctggtattgatgttgtggaacgtacctgtgctgaagcaatgacactgggtgat

SEQ ID NO: 428156 - DNA, 75 bp, synthetic construct
  source 1..75: mol_type = other DNA
tgaaaaactgctgaatgaaaatgttaatgttaagctgacacttgtaggagatggtgaactaaaagaacagttaga

SEQ ID NO: 428157 - DNA, 75 bp, synthetic construct
  source 1..75: mol_type = other DNA
aaaatcatgtcatatgttggtaagccagaactgattgcacagcaatctaccaatgcacgatcatttattctgaaa

SEQ ID NO: 428158 - DNA, 75 bp, synthetic construct
  source 1..75: mol_type = other DNA
cgattgatgtcgtggagcggacctgtgcggaggccatggctggcggagataaaatcgtatttcagaccctgaatg

SEQ ID NO: 428159 - DNA, 75 bp, synthetic construct
  source 1..75: mol_type = other DNA
ttgaacagtctgttcaacaaggccaaaaaaacacaggctgaacgtcttcaacaaacaggaaggttaatccagtta

SEQ ID NO: 428160 - DNA, 75 bp, synthetic construct
  source 1..75: mol_type = other DNA
ctgtcgcaggggagcttcctgatgtggatatttcagataaaggtgtaaagatcaccccactggataacagcgttc

SEQ ID NO: 428161 - DNA, 75 bp, synthetic construct
  source 1..75: mol_type = other DNA
ctgaacagccttttcagcaaagccaaaagaacacaggctgagcgccttcagcagaccggaaagctgatccagtca

SEQ ID NO: 428162 - DNA, 75 bp, synthetic construct
  source 1..75: mol_type = other DNA
cgagctgccggacgccatcatcaccgagtcaggcttgaagatcacgccgctcgacgcggcggtacccgacaccgc

SEQ ID NO: 428163 - DNA, 75 bp, synthetic construct
  source 1..75: mol_type = other DNA
tgctgatggacgtggacgactggacgggcttcagccgccacttcacccacttgaaggacggggccgaggccaaag

SEQ ID NO: 428164 - DNA, 75 bp, synthetic construct
  source 1..75: mol_type = other DNA
catccagagcaagttgaagcaatattttactgtcggtcaggcactactgcatgccagagaatccggtgaagatcc

SEQ ID NO: 428165 - DNA, 75 bp, synthetic construct
  source 1..75: mol_type = other DNA
cccattttataccaaagtgatcagccgggtcagggactctacccatgtgctggatgggttgctctatcacgaaag

SEQ ID NO: 428166 - DNA, 75 bp, synthetic construct
  source 1..75: mol_type = other DNA
acgtcatcctccgacggccagaattttcgagtcggaagtcatggccgctatgccggacaggtgaatttaaagtac

SEQ ID NO: 428167 - DNA, 75 bp, synthetic construct
  source 1..75: mol_type = other DNA
acgcctcttgataacagcgttccttcgattgtatcaccgtttgccgacctggtttacggcatgctgccgcaccca

SEQ ID NO: 428168 - DNA, 75 bp, synthetic construct
  source 1..75: mol_type = other DNA
gcgctggccggtgatttacccgatgttgatatatcggataaaggcgtgaaaattaccccgctggataacagtgtc

SEQ ID NO: 428169 - DNA, 75 bp, synthetic construct
  source 1..75: mol_type = other DNA
agggaaattggtcgcatcgagaggtcattgtttatgctggactggttccgggatccttcgctgcgtcggcgcgta

SEQ ID NO: 428170 - DNA, 75 bp, synthetic construct
  source 1..75: mol_type = other DNA
gcagaccggaaagctgatccagtcaaaactgaggcagtatatcgatgtcggtcaggcgctgtctgatgcccgtga

SEQ ID NO: 428171 - DNA, 75 bp, synthetic construct
  source 1..75: mol_type = other DNA
ctgatggtattgcactttccgttcaccagaacaggttgcttaaactggcgcgtgagggccggaaaatgagcagca

SEQ ID NO: 428172 - DNA, 75 bp, synthetic construct
  source 1..75: mol_type = other DNA
tccggtgatatctgggtaaaaggatcgcgccgctacaaaaattttgatgattatctcatcccgactgctgagttt

SEQ ID NO: 428173 - DNA, 75 bp, synthetic construct
  source 1..75: mol_type = other DNA
gaaattgaaacccactggcatgaggtgctgcgtctggcaagttctataaagcagggaacggtaacagcatcactg

SEQ ID NO: 428174 - DNA, 75 bp, synthetic construct
  source 1..75: mol_type = other DNA
gcacgctcagtggtgattgccgctccggcggatgtttctccgctcctgcgaatgcagggtgccgcctatgccacg

SEQ ID NO: 428175 - DNA, 75 bp, synthetic construct
  source 1..75: mol_type = other DNA
aattaccgctcggtccggcgttgttaggtcgcgttctggacggtagcggtaaaccactcgacggccagccctctc

SEQ ID NO: 428176 - DNA, 75 bp, synthetic construct
  source 1..75: mol_type = other DNA
cggattacaattgccgctcggcgcaacctgtgtgattgagcgccagaacgggtcggaaacgcatgaagtagaaag

SEQ ID NO: 428177 - DNA, 75 bp, synthetic construct
  source 1..75: mol_type = other DNA
acgtcaccagcatattctgctaataagccggaagggttaacggacggtacagtttattcactctatacgccatca

SEQ ID NO: 428178 - DNA, 75 bp, synthetic construct
  source 1..75: mol_type = other DNA
ttacaaattttgcctgggttaatacatctggtgatacttacgatatttacgttgcaatcggaaattatgcgactg

SEQ ID NO: 428179 - DNA, 75 bp, synthetic construct
  source 1..75: mol_type = other DNA
atccggacaggttatcgaccatcaggctgtacaggcctgggcggacagcctcagtactgacaatccgttaccggt

SEQ ID NO: 428180 - DNA, 75 bp, synthetic construct
  source 1..75: mol_type = other DNA
tgattgccgctccagcggatgtttctccgctcctgcgaatgcaaggtgccgcctatgccacgcgcattgccgaag

SEQ ID NO: 428181 - DNA, 75 bp, synthetic construct
  source 1..75: mol_type = other DNA
gctttctgcatggcttgcccaggaggaggagcgtaatcgcctgacgctggaagccctggacgatgtgacatccgg

SEQ ID NO: 428182 - DNA, 75 bp, synthetic construct
  source 1..75: mol_type = other DNA
atgtctcaaatcatgctttataagccgggatcgatgatcacctgcggcccccactcgctggattacatcatcgtt

SEQ ID NO: 428183 - DNA, 75 bp, synthetic construct
  source 1..75: mol_type = other DNA
aagtggaaggtgtcctgcccggcgcgcgggtttatgccaaaaacatttcggctgaagggctgcaaagcggcaagc

SEQ ID NO: 428184 - DNA, 75 bp, synthetic construct
  source 1..75: mol_type = other DNA
cggattacaattgccgctcggcgcaacctgtgtgattgagcgccagaacggcagcgaaacgcacgaagtagaaag

SEQ ID NO: 428185 - DNA, 75 bp, synthetic construct
  source 1..75: mol_type = other DNA
aagtggaaggcgtactacctggcgcacgtgtttatgccaaaaatatctccggcgacggcctgcaaagcggcaagc

SEQ ID NO: 428186 - DNA, 75 bp, synthetic construct
  source 1..75: mol_type = other DNA
ttatccaaaacctcggtttgcaggaaacggtaaatcaggcttctggcgcattacagaaaaaacagaacggtgcag

SEQ ID NO: 428187 - DNA, 75 bp, synthetic construct
  source 1..75: mol_type = other DNA
aggtgagttattcattggctggagtggcacgagcggtgcccatgcgcccgtacatatccgttcgcggcgggatac

SEQ ID NO: 428188 - DNA, 75 bp, synthetic construct
  source 1..75: mol_type = other DNA
cgcatcgacattaatcctccacttcaatatgaatgcgggggagttgccctgctgtacagttccgcgtgaattata

SEQ ID NO: 428189 - DNA, 75 bp, synthetic construct
  source 1..75: mol_type = other DNA
ggaacatggaatagtttaagaccgcttaccattaacaacgctaacggggctgtttcaatcggtaatggtttaact

SEQ ID NO: 428190 - DNA, 75 bp, synthetic construct
  source 1..75: mol_type = other DNA
aagatgttcgcctgggtacgcgtgttgttcaattgatggcgcgtggtggtcgttatgaaaaagccggacacgcaa

SEQ ID NO: 428191 - DNA, 75 bp, synthetic construct
  source 1..75: mol_type = other DNA
gaacctataccgattcatatcagttaggagatggagagctgcttgtttgtacggtgaatattcctgctggtgtat

SEQ ID NO: 428192 - DNA, 75 bp, synthetic construct
  source 1..75: mol_type = other DNA
gggggttaaatgttaaaaaggatgtcctctgctcaagagtaaagtttgagagctttcagtaccttaaaaacaagt

SEQ ID NO: 428193 - DNA, 75 bp, synthetic construct
  source 1..75: mol_type = other DNA
aaattgctaacagcgcgtaccattaatggggtttcatttgacggttctgcgaatatttcactgtcaccagcaaat

SEQ ID NO: 428194 - DNA, 75 bp, synthetic construct
  source 1..75: mol_type = other DNA
atttgctttagggcaaacaggaagcagggttgcaaatgataaagctgttggctggaactggaatagcggcgttta

SEQ ID NO: 428195 - DNA, 75 bp, synthetic construct
  source 1..75: mol_type = other DNA
gttaacggaaaccgtgatgaattaattgatacaactcaggcaaggccaattcagtattgcattaatggaacgtgg

SEQ ID NO: 428196 - DNA, 75 bp, synthetic construct
  source 1..75: mol_type = other DNA
tatttaataatagcagtagcacgagttattttaccattcgtataacaacggcaacgacgacaagtgtatctggcg

SEQ ID NO: 428197 - DNA, 75 bp, synthetic construct
  source 1..75: mol_type = other DNA
atgaggcgtacaacaacggctatccttctgcttacgggaatgtgcttcatcttaagggcgcaacggcagttggtg

SEQ ID NO: 428198 - DNA, 75 bp, synthetic construct
  source 1..75: mol_type = other DNA
accattaacggtggcagacagtcaattcatgacgggggtatttccacaggtacgacaatcgagagtggcaatcag

SEQ ID NO: 428199 - DNA, 75 bp, synthetic construct
  source 1..75: mol_type = other DNA
cttcgaacgtctgatggaaggcgctaaactgctgaaatgttcagagtttggtgatgcgatcatcaagaatatgta

SEQ ID NO: 428200 - DNA, 75 bp, synthetic construct
  source 1..75: mol_type = other DNA
tttttcgtattaatcatggcatatacgatctaccgatggttggggctgaatctttagatgttatgcacgagtttg

SEQ ID NO: 428201 - DNA, 75 bp, synthetic construct
  source 1..75: mol_type = other DNA
ttttgaaaagtggattgttgaaaatactaacgaaggtgcggtaattagaactcctgccggtgatgaattctatac

SEQ ID NO: 428202 - DNA, 75 bp, synthetic construct
  source 1..75: mol_type = other DNA
acgaactggctacggaaaagcctggatctatcgtctgatcaacgatggcaagtttcctgctcctgtcaaaattgg

SEQ ID NO: 428203 - DNA, 75 bp, synthetic construct
  source 1..75: mol_type = other DNA
gtcattaaagatgtgattgctgatgcattcctgcaacagatcctgctgcgtccggctgaatatgatgttatcgcc

SEQ ID NO: 428204 - DNA, 75 bp, synthetic construct
  source 1..75: mol_type = other DNA
ggacacaagaagccctcaaagcagaaatgctggataggggtttaaaattaagctcccgcttactggatgaatatt

SEQ ID NO: 428205 - DNA, 75 bp, synthetic construct
  source 1..75: mol_type = other DNA
gatgatagatcacggggttaacctaagccctcgacatctcgataaatatttctcggcagcgaataaatcttttaa

SEQ ID NO: 428206 - DNA, 75 bp, synthetic construct
  source 1..75: mol_type = other DNA
ctcgagagcgaggggagattccggcagggcgtgcacggtttatccccgctggcgcggggaactcgcgggtatgct

SEQ ID NO: 428207 - DNA, 75 bp, synthetic construct
  source 1..75: mol_type = other DNA
gaactcgccgcgttattttccctgaaaacaataaagctcggtttatccccgctggcgcggggaactctaatatcc

SEQ ID NO: 428208 - DNA, 75 bp, synthetic construct
  source 1..75: mol_type = other DNA
cggggaacacacattcgctggcgcggctgaatcaactatcgccggtttatccccgctggcgcggggaacacagtg

SEQ ID NO: 428209 - DNA, 75 bp, synthetic construct
  source 1..75: mol_type = other DNA
aacgaactgaaagccgcgaaaaagcgtgagctgctgccgttctatgcgccgtgggtcgccggtgtgctggctgat

SEQ ID NO: 428210 - DNA, 75 bp, synthetic construct
  source 1..75: mol_type = other DNA
aggtatcgctggagagcttgagagcggaacgctggggcatttcaaaccaatgactgtctctcttaaatggcgaac

SEQ ID NO: 428211 - DNA, 75 bp, synthetic construct
  source 1..75: mol_type = other DNA
gcggggaacactatttctgtaatgctcaaagatatagccggatcggtttatccccgctggcgcggggaacactgg

SEQ ID NO: 428212 - DNA, 75 bp, synthetic construct
  source 1..75: mol_type = other DNA
ccgggattatcgtcagcggtgcgaaagtggttgccaccaactcggcgctgactcactacaacatgattggcttcg

SEQ ID NO: 428213 - DNA, 75 bp, synthetic construct
  source 1..75: mol_type = other DNA
acattgcggcatcggtattaagccgtgttctgaagaaggcaccaaacgtctggttcgtgcagcgatcgaatacgc

SEQ ID NO: 428214 - DNA, 75 bp, synthetic construct
  source 1..75: mol_type = other DNA
gaagccgatgcactgtatctgattgaacaactgggtaaacgcggcattgcttatctgcatatgtcagaaccagat

SEQ ID NO: 428215 - DNA, 75 bp, synthetic construct
  source 1..75: mol_type = other DNA
accgatcagtacggcggcagcgtggaaaatcgcgcgcgtctggtgctggaagtggtcgatgccgggattgaagaa

SEQ ID NO: 428216 - DNA, 75 bp, synthetic construct
  source 1..75: mol_type = other DNA
acccgcagtatatatcgtgaactgggtgcaacgctgagttacaacatgcgcctggggaacggtatggaaatgaac

SEQ ID NO: 428217 - DNA, 75 bp, synthetic construct
  source 1..75: mol_type = other DNA
acggcggcccgtggatgaaagttaaaaacccgaataccggcaaagagatcgtcattaaagacgtgattgctgacg

SEQ ID NO: 428218 - DNA, 75 bp, synthetic construct
  source 1..75: mol_type = other DNA
actgaagccgcagacctgattgttaaaggtatggaaggcgcaatcaacgccaagactgtaacctatgacttcgaa

SEQ ID NO: 428219 - DNA, 75 bp, synthetic construct
  source 1..75: mol_type = other DNA
agtgatgggcagatcatgttcctctctgaaaacgggcgatttgttatttcaggacaaatctacgacctgtggagc

SEQ ID NO: 428220 - DNA, 75 bp, synthetic construct
  source 1..75: mol_type = other DNA
tggtacgagcagcaatcgaatacgcaattgccaacgaccgtgactcagtgaccctggtgcacaaaggcaatatca

SEQ ID NO: 428221 - DNA, 75 bp, synthetic construct
  source 1..75: mol_type = other DNA
tgggaaaacgtgctgatctaccgcgatttcgatcgctgccgtcgctggacgatggaaggcggttttgcccgtatg

SEQ ID NO: 428222 - DNA, 75 bp, synthetic construct
  source 1..75: mol_type = other DNA
atgtcatctgaaaaactgtattccccactgaaagtgggcgcgatcacggcggcaaatcgtatttttatggcaccg

SEQ ID NO: 428223 - DNA, 75 bp, synthetic construct
  source 1..75: mol_type = other DNA
ccacttcaagagcatgggcatggatgtggacacgctgaacaccgtttcgatggggcgtggtgacaaagaggtggt

SEQ ID NO: 428224 - DNA, 75 bp, synthetic construct
  source 1..75: mol_type = other DNA
gcccacttcattgggattgaaggcgttccgttcgtagttgctccggatggccgcgtcagcaaagggcgtccgaag

SEQ ID NO: 428225 - DNA, 75 bp, synthetic construct
  source 1..75: mol_type = other DNA
ctgacgcttttcggacaggtacaaagcgacattatccatcgttccgctttctggcagttaccgttatggctgagt

SEQ ID NO: 428226 - DNA, 75 bp, synthetic construct
  source 1..75: mol_type = other DNA
atccgggaggcggaagaaacaaaaaacagcctgatgcaggtagccagcgagcatattgcgccgcttcaggatgct

SEQ ID NO: 428227 - DNA, 75 bp, synthetic construct
  source 1..75: mol_type = other DNA
gggacggcacatcctgggagaaggatgaggaaacagaaaaattgtttcaggtacgggaagcggaagaaacaaaaa

SEQ ID NO: 428228 - DNA, 75 bp, synthetic construct
  source 1..75: mol_type = other DNA
gcaacggaggaagaaatctcgttgctggaagcatggaaaaagtatcgggtattgctgaaccgtgttgatacatca

SEQ ID NO: 428229 - DNA, 75 bp, synthetic construct
  source 1..75: mol_type = other DNA
atctcgttgctggaagcatggaaaaagtatcgggtattgctgaaccgtgttgatacgtcaactgcacaggatatt

SEQ ID NO: 428230 - DNA, 75 bp, synthetic construct
  source 1..75: mol_type = other DNA
gaagagtaccgtcgctggcgcaatgagtcctggcgatacgacgggagcgataaatacccgtggccccagcccgtg

SEQ ID NO: 428231 - DNA, 75 bp, synthetic construct
  source 1..75: mol_type = other DNA
gccgggaagcttgcctcccgcctcggcatggatgccggaactgacctgatgaacactctgaaaaatacagcattt

SEQ ID NO: 428232 - DNA, 75 bp, synthetic construct
  source 1..75: mol_type = other DNA
gaaaaaactgtatcctgaaaaattcaatgatatcgatatgcataaaatagccaatgactggtatagaaagtttta

SEQ ID NO: 428233 - DNA, 75 bp, synthetic construct
  source 1..75: mol_type = other DNA
acgttgaatcttttagtgcagatgaatgcaactgataaaatcgttggtgttatgtcaaactggaaacaacagctt

SEQ ID NO: 428234 - DNA, 75 bp, synthetic construct
  source 1..75: mol_type = other DNA
gggacatgttctccgtttatctctccggcccgccgcagacgcagcatgtgttttgtgtatccccggcggcccggg

SEQ ID NO: 428235 - DNA, 75 bp, synthetic construct
  source 1..75: mol_type = other DNA
aatactgggtacatggcgtatcagttcttcatgtgtcagcggacggtcacggcgtatctggtttgcagcataacc

SEQ ID NO: 428236 - DNA, 75 bp, synthetic construct
  source 1..75: mol_type = other DNA
caaaccttgagcagctcattgttgagttcctgaagcgcgacagacatacgacaaaagcagctttcgcagaattgt

SEQ ID NO: 428237 - DNA, 75 bp, synthetic construct
  source 1..75: mol_type = other DNA
ggtgaaggtgatgcatacattccacctcatacaggtctgccagcaaacagtaccgatattgccccgccagatatt

SEQ ID NO: 428238 - DNA, 75 bp, synthetic construct
  source 1..75: mol_type = other DNA
ggcggcaactggctgcaccaaagcattcttcggggccaacaccaattgagttgctgaaacaggaatatgagcggc

SEQ ID NO: 428239 - DNA, 75 bp, synthetic construct
  source 1..75: mol_type = other DNA
agggatgcctgtttttgaatgctcaaaacaaacaaactgtttgggatatagtaaaaccccttcgtgagctaggta

SEQ ID NO: 428240 - DNA, 75 bp, synthetic construct
  source 1..75: mol_type = other DNA
atgtaaaaacagaacgtgatacgaataacaggccgacgtcactctgtgacgtttatgcaagtattctccagtatc

SEQ ID NO: 428241 - DNA, 75 bp, synthetic construct
  source 1..75: mol_type = other DNA
cgttgaagaccatcggggtaaaacggtttatgacgtggcatcaggggatgcattatttatttctgaacccggtcc

SEQ ID NO: 428242 - DNA, 75 bp, synthetic construct
  source 1..75: mol_type = other DNA
acagtgaaaatgaatcgtggaatattgttgaagaccatcgtggtaaaacggtctatgacgtggcatcgggggacg

SEQ ID NO: 428243 - DNA, 75 bp, synthetic construct
  source 1..75: mol_type = other DNA
gagcaaataaaactaccagacgaaagggttatagattttgtagggggaatttttacttcagaacctatcaacaca

SEQ ID NO: 428244 - DNA, 75 bp, synthetic construct
  source 1..75: mol_type = other DNA
ccggcgacccgcacgggctggcctcggcgctcgccaagatcgagcgggtgagccgctcctggcgcgcctggctgc

SEQ ID NO: 428245 - DNA, 75 bp, synthetic construct
  source 1..75: mol_type = other DNA
acgagtgaataaagaggctaatatttatgatataaatcataaaattctagatgaagccataattattgcatatga

SEQ ID NO: 428246 - DNA, 75 bp, synthetic construct
  source 1..75: mol_type = other DNA
ggcgcgcggtttttaacggtttgatcaatgtcgcgccgcacgccattaaaactgacggtcagatgaccaacaata

SEQ ID NO: 428247 - DNA, 75 bp, synthetic construct
  source 1..75: mol_type = other DNA
gccttagcgttaacgttagacgctgtgcggctggtgtttgtcgatggacgttacgtgtcagcactgagcgatgca

SEQ ID NO: 428248 - DNA, 75 bp, synthetic construct
  source 1..75: mol_type = other DNA
atggctggcttaccgaacagcagtaacgcgctgcaacagtggcatcacttgtttgaggccaaaggggcgaaacga

SEQ ID NO: 428249 - DNA, 75 bp, synthetic construct
  source 1..75: mol_type = other DNA
agtgcaaagttaacttcgcggttaatacactggggttctcccgtcgtttccatgtcttcgccgctccaaagcagg

SEQ ID NO: 428250 - DNA, 75 bp, synthetic construct
  source 1..75: mol_type = other DNA
gcatttagccacagtttcctgctgggtggcgcagtgttacgacacaacaccagtacgcaactcaatggcgaaaac

SEQ ID NO: 428251 - DNA, 75 bp, synthetic construct
  source 1..75: mol_type = other DNA
actgaaggcagcgggtatgaagtgagcattaacgacgaccgtcaggggttacccgacgctattcaggcggaagtg

SEQ ID NO: 428252 - DNA, 75 bp, synthetic construct
  source 1..75: mol_type = other DNA
acgcactatttatctctgaaccaggcccattagcggaaaatgtcacctggttgtcgccggaaggggaatatcaga

SEQ ID NO: 428253 - DNA, 75 bp, synthetic construct
  source 1..75: mol_type = other DNA
tcggctggaattgttgcacgacacccgctcgcgctcgctattcgaaacgcttaaacgcgatatcgccagaaacag

SEQ ID NO: 428254 - DNA, 75 bp, synthetic construct
  source 1..75: mol_type = other DNA
agtgcgtttttcagcgacgatttatctggtctgtttctgcttctttaagcaactggcgatgatttttatgtctgt

SEQ ID NO: 428255 - DNA, 75 bp, synthetic construct
  source 1..75: mol_type = other DNA
ttaaatatattaccagccagtttgaagtgcgtttttcagcgacgatttatctggtctgtttctgcttctttaagc

SEQ ID NO: 428256 - DNA, 75 bp, synthetic construct
  source 1..75: mol_type = other DNA
tacaacattttagtagggtcgattgttggtggtatttatcttggcttttgttttaacgccggtgcgccagcagta

SEQ ID NO: 428257 - DNA, 75 bp, synthetic construct
  source 1..75: mol_type = other DNA
atgttcaccatcaataatcagtttgttttctggctgggttctggctgtgcactcatcctcgccgttttactcttt

SEQ ID NO: 428258 - DNA, 75 bp, synthetic construct
  source 1..75: mol_type = other DNA
aataattgggaaaggctgctgagagctttggctccagtgctcagtcagcgaatcaaagataaagctgatcatggc

SEQ ID NO: 428259 - DNA, 75 bp, synthetic construct
  source 1..75: mol_type = other DNA
ctatctataccgttaattctgttaataagctgcggcaaataccactccgtttaacaacggaatttaaaatggata

SEQ ID NO: 428260 - DNA, 75 bp, synthetic construct
  source 1..75: mol_type = other DNA
attatatcgccgatggttatcccgagcatgtcgccgaaaagaatatggtcaagatgtacgtctggtttgactgca

SEQ ID NO: 428261 - DNA, 75 bp, synthetic construct
  source 1..75: mol_type = other DNA
accctaataaattcgtcaccatgtatttagttgatgcaatggacggtttccagttcgaagatttccttgtggaaa

SEQ ID NO: 428262 - DNA, 75 bp, synthetic construct
  source 1..75: mol_type = other DNA
tctcatcagtagaattcaatgaaaaagcggagaccacacctggtgtccctttggttttatttgatgaagttaaaa

SEQ ID NO: 428263 - DNA, 75 bp, synthetic construct
  source 1..75: mol_type = other DNA
ttgatgaagttaaaaaatacttagctgtgtgcgaacatatttattttgatattctggttgatagattagctacac

SEQ ID NO: 428264 - DNA, 75 bp, synthetic construct
  source 1..75: mol_type = other DNA
gggaccgttgccgtgggccacttacagcttcctctccgtcgccttcgcttacttcttctttgtccgcaaaatgga

SEQ ID NO: 428265 - DNA, 75 bp, synthetic construct
  source 1..75: mol_type = other DNA
ctgccgtactgttctggggatcgattgagatctactactacatctccaccccgccgtttggcttagaaccgaact

SEQ ID NO: 428266 - DNA, 75 bp, synthetic construct
  source 1..75: mol_type = other DNA
cgccgctggtgaccgagtgtatgcaatggttgtttggcattccgcataccctgcaactggacgctatcatcatta

SEQ ID NO: 428267 - DNA, 75 bp, synthetic construct
  source 1..75: mol_type = other DNA
agcgccgatctgcagatcactgatatggctatcgctcctgtttccggtgatgtaggaaaatcagcggctgaaact

SEQ ID NO: 428268 - DNA, 75 bp, synthetic construct
  source 1..75: mol_type = other DNA
actgaagtaatgatcaccgcaaaggcaactattcgctcaacgtctacccgcgaaacggaagatggaatgcagcat

SEQ ID NO: 428269 - DNA, 75 bp, synthetic construct
  source 1..75: mol_type = other DNA
aagttcggtatgccatgattcatgacgagtcacggtgcaatggctgtaatatttgcgcccgcgcatgccgtaaaa

SEQ ID NO: 428270 - DNA, 75 bp, synthetic construct
  source 1..75: mol_type = other DNA
aacggacgatcgcctttcgcgcctcgactggagccgcgagcagcgtctggcactggtgaatgcgattgttgaaac

SEQ ID NO: 428271 - DNA, 75 bp, synthetic construct
  source 1..75: mol_type = other DNA
attaacgtcgctgagatgcgtctttattactacccgccagacagtaatactgtggaagtctttcctattggtatc

SEQ ID NO: 428272 - DNA, 75 bp, synthetic construct
  source 1..75: mol_type = other DNA
gcgaaaatagaaatcataacaacgcaagcattgttgttccactcagagcaaaagaataaacagcttgaggaacaa

SEQ ID NO: 428273 - DNA, 75 bp, synthetic construct
  source 1..75: mol_type = other DNA
taaacctacagagtgggttaaatattggtgcgtggcgtttacgcgacaataccacggctttgttgaataaatcga

SEQ ID NO: 428274 - DNA, 75 bp, synthetic construct
  source 1..75: mol_type = other DNA
ttgatgtgaatcgcgcaaatgctgcgttgcaacgtcgatcgggaatgcctgtgaatatcaaccgtaacggatttt

SEQ ID NO: 428275 - DNA, 75 bp, synthetic construct
  source 1..75: mol_type = other DNA
ttgatgcgaatcgcgcaaatgccacgttacaacgtcgctcaggtatgccagtacaaattaattccgaatcaggga

SEQ ID NO: 428276 - DNA, 75 bp, synthetic construct
  source 1..75: mol_type = other DNA
atatctgtttgataatgttcctgtaggtactcgtgaaccgccccggaaatcctggagactaaacttcctgagaaa

SEQ ID NO: 428277 - DNA, 75 bp, synthetic construct
  source 1..75: mol_type = other DNA
gatctgcgcttaatgctggcgcaggcgctgcatatgggcgatgagtgccataaccgcaataacgccgggacgacg

SEQ ID NO: 428278 - DNA, 75 bp, synthetic construct
  source 1..75: mol_type = other DNA
tctgcggcggtagccttactggagcgacgcagtcaggcgattcatgccccggcgctggatcgcggcgcggctctt

SEQ ID NO: 428279 - DNA, 75 bp, synthetic construct
  source 1..75: mol_type = other DNA
gagatgtggagcgaaacggcggaagacccggcggcagaagtggcgaaagcgcgcgattgggtgaaagcgcgcatg

SEQ ID NO: 428280 - DNA, 75 bp, synthetic construct
  source 1..75: mol_type = other DNA
accagcgaaacacacaatgcttgcatattcgtaagcatcatttggctggtttttttgtccggctctttgttgcct

SEQ ID NO: 428281 - DNA, 75 bp, synthetic construct
  source 1..75: mol_type = other DNA
gatcgatgtactggacttcaaagaagttcgcgatcatatgggggctccggtcattttaatgatggcgggggtgat

SEQ ID NO: 428282 - DNA, 75 bp, synthetic construct
  source 1..75: mol_type = other DNA
gggatttgccaccaaccacccgcttcttcctatcaatctcgcgcttctctttggcgttacggcgaccgtactcga

SEQ ID NO: 428283 - DNA, 75 bp, synthetic construct
  source 1..75: mol_type = other DNA
gttgctgatgtatctgccgcgcatgttgttctataccgatcccacttcccgcagggctggaccgtgttctactgg

SEQ ID NO: 428284 - DNA, 75 bp, synthetic construct
  source 1..75: mol_type = other DNA
agaccacagatgacttccgcttctgttttaagtttccggcgaccatttcgcatcaggcagcattacggcattgcg

SEQ ID NO: 428285 - DNA, 75 bp, synthetic construct
  source 1..75: mol_type = other DNA
atgactgggaccaccgcaccggctgcccgttttaactttgaggggaattctatgagcacagcactttctacaatg

SEQ ID NO: 428286 - DNA, 75 bp, synthetic construct
  source 1..75: mol_type = other DNA
tatatcagccgtgcagaaggtattccctataaccgtgaacaggctatctattggtacaccaaatcagcagaacag

SEQ ID NO: 428287 - DNA, 75 bp, synthetic construct
  source 1..75: mol_type = other DNA
cggttttattatgtgcggcgtgctgttctgtctggtttcttttattgtgaagaaagcgggaaccggctggctgga

SEQ ID NO: 428288 - DNA, 75 bp, synthetic construct
  source 1..75: mol_type = other DNA
catcaaattcctgttcgagaaagtaccggtcggtacccgcgtacagtttattgatgagccggtaaaagcgaccac

SEQ ID NO: 428289 - DNA, 75 bp, synthetic construct
  source 1..75: mol_type = other DNA
cgcccatcaaaatgggccgcagctcccgatggctgaaaagcgaagtggaagcctggctgcaggcgcgtattgcac

SEQ ID NO: 428290 - DNA, 75 bp, synthetic construct
  source 1..75: mol_type = other DNA
cccccgccgatctcgattatctccggcagttcgacagggagtgtatcgaacgaaatctcagtccaggcggcagtg

SEQ ID NO: 428291 - DNA, 75 bp, synthetic construct
  source 1..75: mol_type = other DNA
atgtcgatgcctgcaacgtcaactaaaaccacaaagcttgcgacgtcattaatcgatgagtacgccctcttgggc

SEQ ID NO: 428292 - DNA, 75 bp, synthetic construct
  source 1..75: mol_type = other DNA
ctggctaccacgtttcattgaatttggtgcttgtagtgcagaaatggcaccagaatcggtactcagcggattacg

SEQ ID NO: 428293 - DNA, 75 bp, synthetic construct
  source 1..75: mol_type = other DNA
accaaagaagtgaaagtggaaatcgacgtgctgtcagataaacccaatcagactcactatcgtgcattgttagtc

SEQ ID NO: 428294 - DNA, 75 bp, synthetic construct
  source 1..75: mol_type = other DNA
taaacacgcataaaggcagcattttttctttagggctactgtgtgcggcaattggccgtttgcttcaactcaacc

SEQ ID NO: 428295 - DNA, 75 bp, synthetic construct
  source 1..75: mol_type = other DNA
aaaccacaaagcttgctgcgtcattaatcgatgattacgccctgctcggctggcgcgccatgctgactgaagtca

SEQ ID NO: 428296 - DNA, 75 bp, synthetic construct
  source 1..75: mol_type = other DNA
gctgaaacagcagtacccggaagggattgatgctggcgttgattttaaagatcgcactcaggcggcgtttatagt

SEQ ID NO: 428297 - DNA, 75 bp, synthetic construct
  source 1..75: mol_type = other DNA
atcagctactccccggtttattgtgcacagaaaacccccagctaggctgggggttccggaaagctttcagctttg

SEQ ID NO: 428298 - DNA, 75 bp, synthetic construct
  source 1..75: mol_type = other DNA
atggcttcctggcggagaagaaattacgctgttactcgggctaaccgggatggcaacactactggctgcaaccac

SEQ ID NO: 428299 - DNA, 75 bp, synthetic construct
  source 1..75: mol_type = other DNA
tctgccgtagtggcattgcttattagcaatcttcttaatcacagcaatgctttgctctacagcgtgcaactctcc

SEQ ID NO: 428300 - DNA, 75 bp, synthetic construct
  source 1..75: mol_type = other DNA
tgctcttataccctggcgatgtccacttgccgcgaagtacgcgatggcgaagagccaccgctgctggtgcgtatc

SEQ ID NO: 428301 - DNA, 75 bp, synthetic construct
  source 1..75: mol_type = other DNA
caaactcggccgcagctcccgatggctgaaaagtgaagtggcagcctggttgcaggcgcgtattgcacaatcccg

SEQ ID NO: 428302 - DNA, 75 bp, synthetic construct
  source 1..75: mol_type = other DNA
gcttatcgcaacagtcgtcggtattctcgcggcctttgccgttgccgggtttcgtcatgcgatgctgctactgga

SEQ ID NO: 428303 - DNA, 75 bp, synthetic construct
  source 1..75: mol_type = other DNA
cgccactgttcgtaaagggattgtggttaacgtcgctgagatgcgtctttattactacccaccagacagtaatac

SEQ ID NO: 428304 - DNA, 75 bp, synthetic construct
  source 1..75: mol_type = other DNA
atgtaaatcgcgcaaatgctgcgttgcaacgtcgatcgggaatgcctgtgcaaattagttctggttcaagacaga

SEQ ID NO: 428305 - DNA, 75 bp, synthetic construct
  source 1..75: mol_type = other DNA
atggaagacagcatcatgacagaacaaatttctttgcttgatgaccaactggtggatatgcgcttcatcacaaag

SEQ ID NO: 428306 - DNA, 75 bp, synthetic construct
  source 1..75: mol_type = other DNA
tggcgtcgcctgctaactccggcacttggcggactggcagcaggtctattgctgatgggatggcagaaattcacg

SEQ ID NO: 428307 - DNA, 75 bp, synthetic construct
  source 1..75: mol_type = other DNA
gcccggtgattatttccgccgtcgtggcgttgctggttagcaatcttattaatcattgcgacgcgttactctaca

SEQ ID NO: 428308 - DNA, 75 bp, synthetic construct
  source 1..75: mol_type = other DNA
gtttattgattgcctgcgtaattgcgtcggtaatttcgcggacgttacaccgtgactctatctaccgccagcaca

SEQ ID NO: 428309 - DNA, 75 bp, synthetic construct
  source 1..75: mol_type = other DNA
accgtcagcagcattatgacgtcgcgccacgatattgagcatatcgatctcaacgcgccggaagaagaaatccgc

SEQ ID NO: 428310 - DNA, 75 bp, synthetic construct
  source 1..75: mol_type = other DNA
ggagcaggtttacacgactggatttagacctcagccggctgatataaacgcaccaaccgctgccgacggatggtt

SEQ ID NO: 428311 - DNA, 75 bp, synthetic construct
  source 1..75: mol_type = other DNA
ctttaaccgccgcgcatgttgccgctttcgcaagaagagcaacagggtcatatgctgatgctgatggcggcgtgc

SEQ ID NO: 428312 - DNA, 75 bp, synthetic construct
  source 1..75: mol_type = other DNA
tttgatctggtagagcttcactccgctcacggttatttactgcatcagttcctgtcgccttcttcaaaccatcgt

SEQ ID NO: 428313 - DNA, 75 bp, synthetic construct
  source 1..75: mol_type = other DNA
ggaaaaaaatcaccgctggtgttcatgctgaaaatggtcatatcgccgtacagctttggcatacagggcgcattt

SEQ ID NO: 428314 - DNA, 75 bp, synthetic construct
  source 1..75: mol_type = other DNA
ggcaaaaagaagatgcggaactggacgccgaaaccgcgtccatgctggtggatcatggtaaccagcagatcttta

SEQ ID NO: 428315 - DNA, 75 bp, synthetic construct
  source 1..75: mol_type = other DNA
tcatctgccagtgccgcgtcaacaagtgccgggcaggcctcagccagtgccaccgccgccggaaaatcggcagaa

SEQ ID NO: 428316 - DNA, 75 bp, synthetic construct
  source 1..75: mol_type = other DNA
cgaccagtacggtggctggaacggtcttcgaccatttgctgtagataacgcaacaggtgaagttacgatcaatac

SEQ ID NO: 428317 - DNA, 75 bp, synthetic construct
  source 1..75: mol_type = other DNA
ccaggtatcaatacagtttggcgttcaacgtcttcaaggcgctataaaaaggatattgaaacattacaagatcga

SEQ ID NO: 428318 - DNA, 75 bp, synthetic construct
  source 1..75: mol_type = other DNA
ttaatgtttacagcaaaggtgaagtggataagaaaaaggggatgcgaaaatacactttctctgctcctgcaaatg

SEQ ID NO: 428319 - DNA, 75 bp, synthetic construct
  source 1..75: mol_type = other DNA
tgttaagtttgatggttcaggcgatatcaatattaatacattggtatctcgtggccgagttacggcgttaagcgg

SEQ ID NO: 428320 - DNA, 75 bp, synthetic construct
  source 1..75: mol_type = other DNA
tggtttcgacggttctgccaatattaatcttccaggtgtaaacactacgggtaatcagaacaccactggtaatgc

SEQ ID NO: 428321 - DNA, 75 bp, synthetic construct
  source 1..75: mol_type = other DNA
ctgaaacgctgatcggcaaagggttaattgatgcggtggcatttggtcgtgactggattgcgaacccggatctgg

SEQ ID NO: 428322 - DNA, 75 bp, synthetic construct
  source 1..75: mol_type = other DNA
ctgcaagtttttggggctgaatatgcgatgcgcatctggcttgatccagccaaactggcctcatactcgctgatg

SEQ ID NO: 428323 - DNA, 75 bp, synthetic construct
  source 1..75: mol_type = other DNA
tgtgacgtttgaacaaggcactgaccctgataccgcgcaggtgcaggtacaaaataaaatacagcaggcggagtc

SEQ ID NO: 428324 - DNA, 75 bp, synthetic construct
  source 1..75: mol_type = other DNA
cagccgcatcgccattggtacgggcattattggcggcacgctgaccgctacattactggccattttcttcgttcc

SEQ ID NO: 428325 - DNA, 75 bp, synthetic construct
  source 1..75: mol_type = other DNA
aaaaataagtatgcgtcttatctatgtgcattctctaatttacagcaaacctgtaccagcagctctaacatgtcc

SEQ ID NO: 428326 - DNA, 75 bp, synthetic construct
  source 1..75: mol_type = other DNA
atgttctcgaccccaaccatatcgacgtgttcttcccggagttcgcccacgccacgggtgcagttagacttgcat

SEQ ID NO: 428327 - DNA, 75 bp, synthetic construct
  source 1..75: mol_type = other DNA
ccacgggtacaactggatttgcacccaacaggcagcgtgaatgccagtaattatgcccaggatctgacaacgttg

SEQ ID NO: 428328 - DNA, 75 bp, synthetic construct
  source 1..75: mol_type = other DNA
ttacccgcttgcagcgcaaagccggacttaacccacagcgtgctgaaagcttctatggcggtggtgcggaaggct

SEQ ID NO: 428329 - DNA, 75 bp, synthetic construct
  source 1..75: mol_type = other DNA
ccgtgttgaaacatccatgccgcgtgcgcttgaactggaagagattccgggtatcgtcaatgatttccgtcaggc

SEQ ID NO: 428330 - DNA, 75 bp, synthetic construct
  source 1..75: mol_type = other DNA
tgcgcgatgaaaatggtcaggcgatccgcgtcgaaaccaccatgccgcgtgcgctggagctggaagaaatcccgg

SEQ ID NO: 428331 - DNA, 75 bp, synthetic construct
  source 1..75: mol_type = other DNA
tgtgacctttgaacaaggtactgatcccgatactgcacaggttcaggtacaaaataaaattcagcaggcagagtc

SEQ ID NO: 428332 - DNA, 75 bp, synthetic construct
  source 1..75: mol_type = other DNA
caacgacgtttacttccaggtagcgctattaaccactatcggcttgtcgtcgaaaaacgccattctgattgtgga

SEQ ID NO: 428333 - DNA, 75 bp, synthetic construct
  source 1..75: mol_type = other DNA
agaataaaattcagcaggcggagtcgcgcctacccagcgaagtgcagcaaacgggtgttacggtggagaaatcac

SEQ ID NO: 428334 - DNA, 75 bp, synthetic construct
  source 1..75: mol_type = other DNA
tgcgagtgctgctggtgagggcgagttgcttattggctggagtggtacgagcggtgcacatgcgccagttttcat

SEQ ID NO: 428335 - DNA, 75 bp, synthetic construct
  source 1..75: mol_type = other DNA
aaatagccgcatggcgtgattcattgcaggcttcgattgataatcgtcagcaggaatatgatattcagattgttg

SEQ ID NO: 428336 - DNA, 75 bp, synthetic construct
  source 1..75: mol_type = other DNA
tcctgtcggaacagcttttaaccgcctgacagagcagcaaaagcaactcagcgaagcaaaagccaaggggatgct

SEQ ID NO: 428337 - DNA, 75 bp, synthetic construct
  source 1..75: mol_type = other DNA
ctcaatgattcaacgttccagccagatgaaagaaaatcttggttatcttgaggctgcatggaaagcagtttctaa

SEQ ID NO: 428338 - DNA, 75 bp, synthetic construct
  source 1..75: mol_type = other DNA
gcggaccactgttgttaacgttaatgaacgcctgtcatcgtggatttgtgagtctcaaacttgcgccgccctggc

SEQ ID NO: 428339 - DNA, 75 bp, synthetic construct
  source 1..75: mol_type = other DNA
cagcagagagctagggaaggtgcgaataagcggggaaatacttctcggctgactcagtcatttcatttcttcatg

SEQ ID NO: 428340 - DNA, 75 bp, synthetic construct
  source 1..75: mol_type = other DNA
gcattagcaacagttcttctggggggattttaggaactatcggaagtgctgttagtaaatttattcctaatgcaa

SEQ ID NO: 428341 - DNA, 75 bp, synthetic construct
  source 1..75: mol_type = other DNA
tctccatcaaattgatgaaatagaaaaaaatacccgacccggagctttcgggttaggtggcattggggatggcgg

SEQ ID NO: 428342 - DNA, 75 bp, synthetic construct
  source 1..75: mol_type = other DNA
agaatgcgttactaagttcacaagctgaattgaccgttaaattaagttcctctgaacaggaactggttaagtggc

SEQ ID NO: 428343 - DNA, 75 bp, synthetic construct
  source 1..75: mol_type = other DNA
tgcaacgtctgattgctcaacttgatcctgtcggaactgcttttaatcgtctggtagaacaacagaaacagctca

SEQ ID NO: 428344 - DNA, 75 bp, synthetic construct
  source 1..75: mol_type = other DNA
ttgcaaaaggggctggtgtttttggtgaggctggaccggaagccattatgccattaacacgaacttccgatggtt

SEQ ID NO: 428345 - DNA, 75 bp, synthetic construct
  source 1..75: mol_type = other DNA
cgccagcaggaattactgcggattgaacgtgaatataacaatcagcgtctgcaacttgaacgtgactatgcagat

SEQ ID NO: 428346 - DNA, 75 bp, synthetic construct
  source 1..75: mol_type = other DNA
gggaagaaataaccgcgttgatggagaaaaatgttgcgattgaaaaaaataacaggctaatcaaggaatccgccg

SEQ ID NO: 428347 - DNA, 75 bp, synthetic construct
  source 1..75: mol_type = other DNA
tttatttatagccgaagtgctgtttggcactatgatgttggcctctctcggcccggtgattatttctgccgtcgt

SEQ ID NO: 428348 - DNA, 75 bp, synthetic construct
  source 1..75: mol_type = other DNA
gcacggtaaccaataagaagactcttgccaaaagttccattaagacgcttgccccagctagggcagacgaaggat

SEQ ID NO: 428349 - DNA, 75 bp, synthetic construct
  source 1..75: mol_type = other DNA
ctctttggtagccaagaagaaatggacaagtttcttgctggcgctcatgcaaagatcggaaatgggaaaatgaga

SEQ ID NO: 428350 - DNA, 75 bp, synthetic construct
  source 1..75: mol_type = other DNA
cgacaaaacccaggctgacgcgtgggatatcaaccagggccatcagtccgcgcgtgccggaacgtatgccacgac

SEQ ID NO: 428351 - DNA, 75 bp, synthetic construct
  source 1..75: mol_type = other DNA
atggcaacgtattgcacatgaaaggtgcgagtgctgctggtgagggcgagttgcttattggctggagtggtacga

SEQ ID NO: 428352 - DNA, 75 bp, synthetic construct
  source 1..75: mol_type = other DNA
tattggaaccaaactgtccgcaagtctgaacggtaatgcattaacagcaacaaagctgcaaacgccaagacgggt

SEQ ID NO: 428353 - DNA, 75 bp, synthetic construct
  source 1..75: mol_type = other DNA
cagaacggcgctgatatacccgataagggacgcttcctgaacaacattaacgcggtcagtaaaacagactttgct

SEQ ID NO: 428354 - DNA, 75 bp, synthetic construct
  source 1..75: mol_type = other DNA
gatcaatttatttgatttcatcaatcattttcatttatatacttccggttatatttatcgttgttgttggctcag

SEQ ID NO: 428355 - DNA, 75 bp, synthetic construct
  source 1..75: mol_type = other DNA
aaaaatggctgaacttggagtagcacctcatgtttcggagaaaattctcgggcataagctcacggggatgctggc

SEQ ID NO: 428356 - DNA, 75 bp, synthetic construct
  source 1..75: mol_type = other DNA
cagtcgtcggtattcttgcggcctttgccgttgccgggtttcgtcatgcgatgctgctactggagtggctgttcc

SEQ ID NO: 428357 - DNA, 75 bp, synthetic construct
  source 1..75: mol_type = other DNA
cttcatccacaaaaaatgaggctcagacagttttatcagaaaggagtctgaaggcagaacagcgtggtatggaaa

SEQ ID NO: 428358 - DNA, 75 bp, synthetic construct
  source 1..75: mol_type = other DNA
tgacggttttgctaaagtgctgacaaagcgttttgcccaacctgttgaacacattcgattacagcgtccacgtgg

SEQ ID NO: 428359 - DNA, 75 bp, synthetic construct
  source 1..75: mol_type = other DNA
gtggagccgcggagctggttcatcgttatgggcgtattatatcggcgactccaattcatttggggaactacgtaa

SEQ ID NO: 428360 - DNA, 75 bp, synthetic construct
  source 1..75: mol_type = other DNA
cgttatttatttctgaactcggaccgctaccggaacatgtcacctggttatccccggaaggggagtttcagaagt

SEQ ID NO: 428361 - DNA, 75 bp, synthetic construct
  source 1..75: mol_type = other DNA
atggcattcagaatgagtgaacaatcacgaaccatcaaaatttataatctgctgaccggaactaatgaatttatt

SEQ ID NO: 428362 - DNA, 75 bp, synthetic construct
  source 1..75: mol_type = other DNA
aaaagcagccagcaagcccgcttctcgtcagtatatgatgatgggcatcggtattctggtgctgctgctgttgat

SEQ ID NO: 428363 - DNA, 75 bp, synthetic construct
  source 1..75: mol_type = other DNA
aaaatcagcaacagctgaacaatgtggcggtcaactccacgctgccaaccgaacccgcaactgtagcgccagttc

SEQ ID NO: 428364 - DNA, 75 bp, synthetic construct
  source 1..75: mol_type = other DNA
gggcaaaaatgctgcgatggcacccagcatggcaaaaaaggcattcctttttatcgcgatatccagttgctgttg

SEQ ID NO: 428365 - DNA, 75 bp, synthetic construct
  source 1..75: mol_type = other DNA
taccgcgctggttaacttctggtaccagcgaaagaaataccgctatctcgtctcgatggggattgataagggggt

SEQ ID NO: 428366 - DNA, 75 bp, synthetic construct
  source 1..75: mol_type = other DNA
ctgcatggaagacataccgggtattgttgaatcgtgttaatacagcggtagcagcggatgttgagtggccagtcg

SEQ ID NO: 428367 - DNA, 75 bp, synthetic construct
  source 1..75: mol_type = other DNA
ccgaccaccacgcgtccagcacgtcagcaggcggtgattgaaccgaaaaaaccacaagcaactgtgaaaacggaa

SEQ ID NO: 428368 - DNA, 75 bp, synthetic construct
  source 1..75: mol_type = other DNA
atctttgcggagattaaggcaatgggttatacgggcggacgttccatgctgcgttactacatccagcccaaacgt

SEQ ID NO: 428369 - DNA, 75 bp, synthetic construct
  source 1..75: mol_type = other DNA
ccggaacagcgcttcgcgctggagcaggaacatctgcagccgttaccggatacggacttcgataccagttacttc

SEQ ID NO: 428370 - DNA, 75 bp, synthetic construct
  source 1..75: mol_type = other DNA
tctacagtaatgagcagcagatggcatcgcaccgtctctgttcggctgcatccggctggcagaccgtgccggagc

SEQ ID NO: 428371 - DNA, 75 bp, synthetic construct
  source 1..75: mol_type = other DNA
cagcgaacgcccacttgcagcatatcaagctggcgtttgaaaacccgctcagtcaccactttgctcataacgatt

SEQ ID NO: 428372 - DNA, 75 bp, synthetic construct
  source 1..75: mol_type = other DNA
catgtctttgccgcaccaaaacaggatgctgagcatacctacgaatcactggttcgcgccttccgctacttcggt

SEQ ID NO: 428373 - DNA, 75 bp, synthetic construct
  source 1..75: mol_type = other DNA
ggttgtgtgaaaacggtgctggttaataaccagaaggctgcggtgctgaagaataacaacgggaaagtcgtgttc

SEQ ID NO: 428374 - DNA, 75 bp, synthetic construct
  source 1..75: mol_type = other DNA
ttactacatccagcccaaacgtaaaatgcgtccgtcaaaaagaacagttcgcttcgaaactcagcctggatacca

SEQ ID NO: 428375 - DNA, 75 bp, synthetic construct
  source 1..75: mol_type = other DNA
tccggtaccgccggttcgacagcttcgcccatgttaatcagctactggagcagtggatggctgacgttgccgaca

SEQ ID NO: 428376 - DNA, 75 bp, synthetic construct
  source 1..75: mol_type = other DNA
agcgtactgaaccagctgcccctgtggcgagcacgaaggcaccggctgcgacttctacgccagcaccaaaagaga

SEQ ID NO: 428377 - DNA, 75 bp, synthetic construct
  source 1..75: mol_type = other DNA
cttcgatatccgtcatgtctcctgggatggctatatcgaggttggcggaaaccgttacagcgtgccggaaagcct

SEQ ID NO: 428378 - DNA, 75 bp, synthetic construct
  source 1..75: mol_type = other DNA
gcgttactacatccagcccaaacgtaaaatgcgtctgtcaaaaagaacagctcgcttcgaaactcagcctggata

SEQ ID NO: 428379 - DNA, 75 bp, synthetic construct
  source 1..75: mol_type = other DNA
tgagacatctgaaaccataaaaaaagctaacaaatggggaactaaaatccataagatgtactgcgacttcattct

SEQ ID NO: 428380 - DNA, 75 bp, synthetic construct
  source 1..75: mol_type = other DNA
ccggcagagcagtggcagtatgatgagcacgggtggttaaccaccctcagccataccagtgaaggccaccgcgtg

SEQ ID NO: 428381 - DNA, 75 bp, synthetic construct
  source 1..75: mol_type = other DNA
tgtgatgggctttaacaccggggcgtggagcggcgtactggtggcgatggtactgtttggtcaggatctgacagc

SEQ ID NO: 428382 - DNA, 75 bp, synthetic construct
  source 1..75: mol_type = other DNA
tcattcctgagtttacgattaactctggtttacgctggcaggcaacagattccctgtcaatgcaatcaacattaa

SEQ ID NO: 428383 - DNA, 75 bp, synthetic construct
  source 1..75: mol_type = other DNA
aaaactcaaaggatttaaaacagccattgtaagtagcgatgaagcgccgccaggatgcaaggggggcaaagggct

SEQ ID NO: 428384 - DNA, 75 bp, synthetic construct
  source 1..75: mol_type = other DNA
gaacggtgggtgtctacatcatgacggacggtgacgacgaggacaacgccgggggctttcctgacggcacggacg

SEQ ID NO: 428385 - DNA, 75 bp, synthetic construct
  source 1..75: mol_type = other DNA
cgtgtcggggatcaccagggcatggatacggcgccgggggatggggccgggtaccgtggtgatttacatcatgtg

SEQ ID NO: 428386 - DNA, 75 bp, synthetic construct
  source 1..75: mol_type = other DNA
atgatttacgtctctcgccgattaattatcacctgtctgctgttgctaatagcttgtgtgatggcaggcgtgtgg

SEQ ID NO: 428387 - DNA, 75 bp, synthetic construct
  source 1..75: mol_type = other DNA
aataccttgctgaggcaaagcccttaacgctctatcttgaacaggcggagatgaaaaaactaccgattggcggcg

SEQ ID NO: 428388 - DNA, 75 bp, synthetic construct
  source 1..75: mol_type = other DNA
tatatcgtcagggaggcacgtctactgacgcagcggaacgtatcgactatcgcgtcaaaatgtctaacccggaga

SEQ ID NO: 428389 - DNA, 75 bp, synthetic construct
  source 1..75: mol_type = other DNA
gatattaccctgaataccctcgaccccaatcatatagacgtcttctttcctgagtttgcgcatgccacgccgcgt

SEQ ID NO: 428390 - DNA, 75 bp, synthetic construct
  source 1..75: mol_type = other DNA
ttggcctgtgaaactgacgggctatatgaacgcagaagtctgggatgaagggccatgcaagggatggagcaagca

SEQ ID NO: 428391 - DNA, 75 bp, synthetic construct
  source 1..75: mol_type = other DNA
cgcgcaagatctgaccatgttggacatgtgtctgtacgatggctttaacggtaatgctatcagttatgaaatcat

SEQ ID NO: 428392 - DNA, 75 bp, synthetic construct
  source 1..75: mol_type = other DNA
ttttatgtctatttggcatggttgcaggtgttcaggcagcgcccaatgtaacagctgaaattacttatgatttgg

SEQ ID NO: 428393 - DNA, 75 bp, synthetic construct
  source 1..75: mol_type = other DNA
agacctcaaccgtgcgataggggacgtttcaggcacggctggttttattctggtctccccatctgcaaatattga

SEQ ID NO: 428394 - DNA, 75 bp, synthetic construct
  source 1..75: mol_type = other DNA
atgaaaaagattctcgtatcatttgttgccattatggctgccgcttcatctgccatggctgccgcttcatctgcc

SEQ ID NO: 428395 - DNA, 75 bp, synthetic construct
  source 1..75: mol_type = other DNA
atgcattgctgtggattaactttcgtttttatcttgcaccgctgttctggctgattgtgggggaacctggggacc

SEQ ID NO: 428396 - DNA, 75 bp, synthetic construct
  source 1..75: mol_type = other DNA
atgggcgtgacttttatactattgcgcgcgttgcaggggatattgttcaacgttccgacgctgctggtatggttg

SEQ ID NO: 428397 - DNA, 75 bp, synthetic construct
  source 1..75: mol_type = other DNA
ttaaacccagacacgcacggggctgacctgcgccatgagtttgagaaaaccgaatatcgcgtcatgttagtcgcc

SEQ ID NO: 428398 - DNA, 75 bp, synthetic construct
  source 1..75: mol_type = other DNA
ggagcaaatgagcattgaggacattcttactaaggtgcaagaagcgcgcgccatgcccaagaacgtttcgcactt

SEQ ID NO: 428399 - DNA, 75 bp, synthetic construct
  source 1..75: mol_type = other DNA
ttgcccaaaaagataattggctacgcattttctacagctttgtgtatgtcgaaaccaaagaggttgccgatagca

SEQ ID NO: 428400 - DNA, 75 bp, synthetic construct
  source 1..75: mol_type = other DNA
ctatcaaccaacgaaccagatcaaatcaataaaatattagaaataaacaacaaccgagaaatgcttggtatgttt

SEQ ID NO: 428401 - DNA, 75 bp, synthetic construct
  source 1..75: mol_type = other DNA
gctaatttaatggaaaatggttatctattaaagaatgagataattagatccttgtcttccagacctacagatttt

SEQ ID NO: 428402 - DNA, 75 bp, synthetic construct
  source 1..75: mol_type = other DNA
ttcgtgtactcaacaggatcgcgtcaaaccgtggctatccggtcatgctacgtatggataatggtccggaattta

SEQ ID NO: 428403 - DNA, 75 bp, synthetic construct
  source 1..75: mol_type = other DNA
ctcactggcgcgtgaaccgcatgtcgataaggttgagacgccgaaggcagcggtttcaatggcgaagaaaacctc

SEQ ID NO: 428404 - DNA, 75 bp, synthetic construct
  source 1..75: mol_type = other DNA
ctgattgtggggggaacctggggacccgttacgctgatggggtatgcgtttttgcgtgcatggcaatactggctg

SEQ ID NO: 428405 - DNA, 75 bp, synthetic construct
  source 1..75: mol_type = other DNA
ctgattggtttgctgtgtattggcgcaggtaaagttcgtcttcattatcatgcttatctgacagctgcttcacgt

SEQ ID NO: 428406 - DNA, 75 bp, synthetic construct
  source 1..75: mol_type = other DNA
tgcctgcgccgcagattgtcgatgtgccggactttgagacgctgcttgtcgaacgcaaggccgaatttgtggtgc

SEQ ID NO: 428407 - DNA, 75 bp, synthetic construct
  source 1..75: mol_type = other DNA
gccggactttgaaacgctgtttgcagaacgtaaggcagaatttgtggcgctccatccgaaagatgagcgggaagc

SEQ ID NO: 428408 - DNA, 75 bp, synthetic construct
  source 1..75: mol_type = other DNA
tctttgccgccctgcatgttgagggtgtgcagcgtgtggagctggcttctcctctggctgatgtggtcctgaaca

SEQ ID NO: 428409 - DNA, 75 bp, synthetic construct
  source 1..75: mol_type = other DNA
ggcgcacgagcagaagggcgtgagggctgtctacaacaaggctgagtaccgcgagcagcgggcggcgatgttgca

SEQ ID NO: 428410 - DNA, 75 bp, synthetic construct
  source 1..75: mol_type = other DNA
aggtgtgagggcgatatataacaaagccgagtatcgtgatcagcgtacatctatgttgcaggactgggctgatat

SEQ ID NO: 428411 - DNA, 75 bp, synthetic construct
  source 1..75: mol_type = other DNA
cattggccaatcaactcaacgaactgcaagcctgccttggccgagccaacgggcggtctggcaaagacgttatcg

SEQ ID NO: 428412 - DNA, 75 bp, synthetic construct
  source 1..75: mol_type = other DNA
gtggctgaccgtctgacggttcgcagcgcagaaatcatcccgtaccgagtggaagccaccatttttctttatccg

SEQ ID NO: 428413 - DNA, 75 bp, synthetic construct
  source 1..75: mol_type = other DNA
ccgctggcggacgtggtcctgaacaaaacgcaggcggcatcatgtacgcagtggagcgtgaccaacgggggaacg

SEQ ID NO: 428414 - DNA, 75 bp, synthetic construct
  source 1..75: mol_type = other DNA
ggttcaacgtgtggagctggcttcaccgctggcggatgtggtcctgaacaaaacacaggccgcatcatgtacgca

SEQ ID NO: 428415 - DNA, 75 bp, synthetic construct
  source 1..75: mol_type = other DNA
ccgctggaggatgtggtgctggataagacgcaggcggcatcctgtactgaatggatcgtcaccaacgggggcacg

SEQ ID NO: 428416 - DNA, 75 bp, synthetic construct
  source 1..75: mol_type = other DNA
aggggcgctgaataattcgatgtcgattgaaaagatggttacaggtcagcgatcaccacgcaatacgattattat

SEQ ID NO: 428417 - DNA, 75 bp, synthetic construct
  source 1..75: mol_type = other DNA
gtgaccgtgcagtctgccgccatcgttgaataccagataaacgccacgctttacctttaccctggtcccgaaagc

SEQ ID NO: 428418 - DNA, 75 bp, synthetic construct
  source 1..75: mol_type = other DNA
cgaaactcccggattgcgtcattttggatggagggtacatttcttacctgtttgtatgttctggtgtcgattcat

SEQ ID NO: 428419 - DNA, 75 bp, synthetic construct
  source 1..75: mol_type = other DNA
tagcggacataagtctatgcctcactaccacgttactgaaaagggatacaatctcgtgaaaagtgagaataaata

SEQ ID NO: 428420 - DNA, 75 bp, synthetic construct
  source 1..75: mol_type = other DNA
catggctgaaagtttgcctgcatcttgccggattgttgccgtttctctggctggcctgggcgatcaatcacggtg

SEQ ID NO: 428421 - DNA, 75 bp, synthetic construct
  source 1..75: mol_type = other DNA
aggaagcaaaaagctggctgtcggcagcgttagcccaggcagactcactggaagtcggccacggaattggtccgg

SEQ ID NO: 428422 - DNA, 75 bp, synthetic construct
  source 1..75: mol_type = other DNA
cgaaacagggctgacactgatgatgaacgggctgctgatcaataacgcccaggggcagccgattaccgtgccgtt

SEQ ID NO: 428423 - DNA, 75 bp, synthetic construct
  source 1..75: mol_type = other DNA
gcagggaaaacgacttacttacatcaacatgcagcgcggaatgtcggcgtctgatgcagcaaaacaggcgtatca

SEQ ID NO: 428424 - DNA, 75 bp, synthetic construct
  source 1..75: mol_type = other DNA
aagagatttcagaactcaaaaaagaattaatttggcacaaagttgctatctccgcattaattcgtcaggtagttt

SEQ ID NO: 428425 - DNA, 75 bp, synthetic construct
  source 1..75: mol_type = other DNA
cacgcgcgcaacgaacaggaaatgctggcgcagggacgtgaattattggcgatgggctgtggcgcggtgctgatg

SEQ ID NO: 428426 - DNA, 75 bp, synthetic construct
  source 1..75: mol_type = other DNA
gatgggctgtggcgcagtgctaatgaaaggtggtcatctggatgatgagcaaagcccggactggctgtttacccg

SEQ ID NO: 428427 - DNA, 75 bp, synthetic construct
  source 1..75: mol_type = other DNA
gtattgccatcagtgctattgatagcccgggcagcagtgaattgcgcacccgaccggtggatggtgaactgcttt

SEQ ID NO: 428428 - DNA, 75 bp, synthetic construct
  source 1..75: mol_type = other DNA
tgacggcgaacaacgctttgctgcgccgcgtattatgaccaaaaacacccacggcaccggttgtacgctctctgc

SEQ ID NO: 428429 - DNA, 75 bp, synthetic construct
  source 1..75: mol_type = other DNA
ttcaccttcggcggtagccacgctacgtagtcgattattgccacaggtttcattaattacaccgaacttgccgga

SEQ ID NO: 428430 - DNA, 75 bp, synthetic construct
  source 1..75: mol_type = other DNA
aaaggtggtcatctggatgatgagcaaagcccggactggttgtttacccgcgacggcgaacaacggtttaccgca

SEQ ID NO: 428431 - DNA, 75 bp, synthetic construct
  source 1..75: mol_type = other DNA
ggtggtgctgacagtccttagccgcgaaggcgacggaacagcagaaaaagacctgctggatgtggtggaaaaagc

SEQ ID NO: 428432 - DNA, 75 bp, synthetic construct
  source 1..75: mol_type = other DNA
cttcacgccactcatcagggttgaaaccgccaccggtgagcaggcgaaaacgcagcgccgcagcctggcggatac

SEQ ID NO: 428433 - DNA, 75 bp, synthetic construct
  source 1..75: mol_type = other DNA
tcagcaccgcatgttcctggtgctggccctcttttagtccaggttgtttatagttttttccagagtccaaacatg

SEQ ID NO: 428434 - DNA, 75 bp, synthetic construct
  source 1..75: mol_type = other DNA
catcaccatcaactaacttaccaagttatggcaatggtgcattttctctttcagcaccacatgtgcctggtgctg

SEQ ID NO: 428435 - DNA, 75 bp, synthetic construct
  source 1..75: mol_type = other DNA
tgttcaacgtgtggagctggcttcaccgctggctgatgtggtcctgaacaaaacacaggccgcatcatgtacgca

SEQ ID NO: 428436 - DNA, 75 bp, synthetic construct
  source 1..75: mol_type = other DNA
tgtgcagcgtgtggaactggcttcgccgctggcggatgtggtcctgaacaaaacgcaggcggcatcatgtacgca

SEQ ID NO: 428437 - DNA, 75 bp, synthetic construct
  source 1..75: mol_type = other DNA
gttcttttaccccggcccggaatccgaacctattctggctgcggcggaatcgtcgttcaggaagtggctggctga

SEQ ID NO: 428438 - DNA, 75 bp, synthetic construct
  source 1..75: mol_type = other DNA
aaggcgattacaaaacagccctatgtcaacgcataaatgatgaactcaagggaaaaaaacatttaccattgatgg

SEQ ID NO: 428439 - DNA, 75 bp, synthetic construct
  source 1..75: mol_type = other DNA
ctggtagagcgcttaagtattttctgcagcatgattcatacactactctggagctacccagttatgtcgattttt

SEQ ID NO: 428440 - DNA, 75 bp, synthetic construct
  source 1..75: mol_type = other DNA
tgaataaaaccagctttaagattttcgactgtgtcgatatctacagcacgctggagagcgtcgacaccatgcgtc

SEQ ID NO: 428441 - DNA, 75 bp, synthetic construct
  source 1..75: mol_type = other DNA
cgtcgacctgctgacgaccggcgtcgatattccgtcgatctgtaatatcgtgttcctgcgtaaagtacgcagccg

SEQ ID NO: 428442 - DNA, 75 bp, synthetic construct
  source 1..75: mol_type = other DNA
attctggcacactgtagatatatacaatggaaataagataacgttctctgttcttctttcattttatatgactga

SEQ ID NO: 428443 - DNA, 75 bp, synthetic construct
  source 1..75: mol_type = other DNA
tctgaacagtgagagcgtccgcccggtggctgaccgtctgacggttcgcagcgcagaaatcatcccgtatcgcgt

SEQ ID NO: 428444 - DNA, 75 bp, synthetic construct
  source 1..75: mol_type = other DNA
tcccaccaccggagattatcgcgacgctggattatgaaaccattctgagtgaagtgaaagtggtgatcattgctg

SEQ ID NO: 428445 - DNA, 75 bp, synthetic construct
  source 1..75: mol_type = other DNA
tttacgcggcgctgcatgttgagggggtgcagcgtgtcgaactggcatcaccgcaggccgacattgtgctgagta

SEQ ID NO: 428446 - DNA, 75 bp, synthetic construct
  source 1..75: mol_type = other DNA
ctgatgtcaatagtgaagtaaataatggtcgtggtcccgttgactacaaaatatcgagaggttcgaaagataaaa

SEQ ID NO: 428447 - DNA, 75 bp, synthetic construct
  source 1..75: mol_type = other DNA
gtgcaaccagtccggctcctgcagaggtggtgcttacggtcctgagccgtgaaggcgacggaacagcagaaaaag

SEQ ID NO: 428448 - DNA, 75 bp, synthetic construct
  source 1..75: mol_type = other DNA
tctgcgccagcgcattaatgaagccgcgcaggcggtaatggtggcttacgcgatgggcggcgatcttgaccagat

SEQ ID NO: 428449 - DNA, 75 bp, synthetic construct
  source 1..75: mol_type = other DNA
actgatgaaaatcatcagacggttaaagttaaaatcgtcaagggaaaaacaacccaacaagaaattcttgctgcc

SEQ ID NO: 428450 - DNA, 75 bp, synthetic construct
  source 1..75: mol_type = other DNA
gaacgcaaggccgaatttgttgcgcttcatccgaaaaatgagcaggaagcagtgatccgcacgctggaactggaa

SEQ ID NO: 428451 - DNA, 75 bp, synthetic construct
  source 1..75: mol_type = other DNA
ctgacggtgacacctgctgataatgacgctgtgccgcccgttgcagcagtgatggaaagcgatgaagcgttacgc

SEQ ID NO: 428452 - DNA, 75 bp, synthetic construct
  source 1..75: mol_type = other DNA
cctgaacagtgagaatgtccgcccggtggctgaccgtctgacggttcgcagcgcagaaatcatcccgtaccgtgt

SEQ ID NO: 428453 - DNA, 75 bp, synthetic construct
  source 1..75: mol_type = other DNA
gcgcaggcggtgatggtggcttacgcaatgggcggagatcttgaccagctcgccgctaattacaatgtgaaacgc

SEQ ID NO: 428454 - DNA, 75 bp, synthetic construct
  source 1..75: mol_type = other DNA
tatccgggttataaatgtcggtgttggtatctatccagaacctaaaccaggtctccttatgcggattgctaagaa

SEQ ID NO: 428455 - DNA, 75 bp, synthetic construct
  source 1..75: mol_type = other DNA
cgatggatcaactacgcgacattctattcaaagatattccgacgattcggatcagcgacacattcgaacggcctg

SEQ ID NO: 428456 - DNA, 75 bp, synthetic construct
  source 1..75: mol_type = other DNA
tgatccctgctccggaaagatatggctcaacaccagcgaaggccggcaaaatcttcgcgatatcagactggaggc

SEQ ID NO: 428457 - DNA, 75 bp, synthetic construct
  source 1..75: mol_type = other DNA
gcaaataagtttaagtttaacgatccggttgttaatgaagctctgaaagtatctggtctggatacagagctcggt

SEQ ID NO: 428458 - DNA, 75 bp, synthetic construct
  source 1..75: mol_type = other DNA
gcactcaggcgtccgtggagcgggtgtttgcactgatcgacacccgttcacagatggaggacgggacggagtcga

SEQ ID NO: 428459 - DNA, 75 bp, synthetic construct
  source 1..75: mol_type = other DNA
tcaaaagtgtggctatagccaatgctaggaacctgtgtcgtactgcattggcagagctgcaagaaaacaccacgg

SEQ ID NO: 428460 - DNA, 75 bp, synthetic construct
  source 1..75: mol_type = other DNA
cagattgccaacatgaaccacatcgttgtgaacaactacaccaacgcaggcctgagtattctgttcctgattgtg

SEQ ID NO: 428461 - DNA, 75 bp, synthetic construct
  source 1..75: mol_type = other DNA
gcacggcaacatcagaatcggtgtgcaaatgctcgatgatgcctcgctcactgagtatcgtcgccagattgggct

SEQ ID NO: 428462 - DNA, 75 bp, synthetic construct
  source 1..75: mol_type = other DNA
ggcaatgagcggcgaagcggcgttttatggcttgcaacccgtagatagcgatctgcacgcgtttgctgcacatca

SEQ ID NO: 428463 - DNA, 75 bp, synthetic construct
  source 1..75: mol_type = other DNA
agataaaacccgtattattgcgcgctttccgtacgactaaagtgattttcatgacgcaaacatttatccccggca

SEQ ID NO: 428464 - DNA, 75 bp, synthetic construct
  source 1..75: mol_type = other DNA
ctgcgcgcattttacgacccggaaaatgaattgaccggcagtatgctgattgatctgcaatccggtaatgacgat

SEQ ID NO: 428465 - DNA, 75 bp, synthetic construct
  source 1..75: mol_type = other DNA
atgtttatcacgaataacgctatttatgttaccaatatcatttcgagtgcgcacactatccatctgttttttaag

SEQ ID NO: 428466 - DNA, 75 bp, synthetic construct
  source 1..75: mol_type = other DNA
ctcgatcatcgccatcactgccctctcggtaatgatgtccgttgattttatggtgccggactcgcatacgctgct

SEQ ID NO: 428467 - DNA, 75 bp, synthetic construct
  source 1..75: mol_type = other DNA
cactagcctggttgatgctcttgagatcagtgactcggggaaaatcagccaaatgctatcggaaggacgtaaact

SEQ ID NO: 428468 - DNA, 75 bp, synthetic construct
  source 1..75: mol_type = other DNA
cgcggatgtcgccaggaccacgcttaacgagagtgaactggcagccttgtacgcctgtgtggaagcggcaaaatg

SEQ ID NO: 428469 - DNA, 75 bp, synthetic construct
  source 1..75: mol_type = other DNA
aaataaaaaatgcagtaaaaaagatagaacaagatcataaaaataagtcagatgacctttataagtatatttcta

SEQ ID NO: 428470 - DNA, 75 bp, synthetic construct
  source 1..75: mol_type = other DNA
gcgacgtgcaccgtacggttcaggaaaaacttaaaatcattcagaagtgcctgacaggaacggacagggtgataa

SEQ ID NO: 428471 - DNA, 75 bp, synthetic construct
  source 1..75: mol_type = other DNA
tttttatgcaggctccctgaataaccagggaaatagaataatgtttgtgcccacgccagcaccggatgacacctt

SEQ ID NO: 428472 - DNA, 75 bp, synthetic construct
  source 1..75: mol_type = other DNA
atgtcaaatatgatatacttatcaattaaagggaaaatacaaggtttgatctctgagggttgtggttcgtatgca

SEQ ID NO: 428473 - DNA, 75 bp, synthetic construct
  source 1..75: mol_type = other DNA
aaaatagatgatgcttttaattatatttcaggtgctttttttaaacacaaatatgatttggttaaaaatcacacc

SEQ ID NO: 428474 - DNA, 75 bp, synthetic construct
  source 1..75: mol_type = other DNA
agttttcaacatagtgaagatgggattatatcccaaattaaaacattactaaaaacattagcaatcccaaatgat

SEQ ID NO: 428475 - DNA, 75 bp, synthetic construct
  source 1..75: mol_type = other DNA
tatcgaagaagtgatccttactgatatctgtccctactctttaggcgttgaagttaaccgccagggcgtttccgg

SEQ ID NO: 428476 - DNA, 75 bp, synthetic construct
  source 1..75: mol_type = other DNA
ctttagttatgatatcaacggcttgcttgaagttgacgtgcttctggaagacggcagcgttaagtccagagtcat

SEQ ID NO: 428477 - DNA, 75 bp, synthetic construct
  source 1..75: mol_type = other DNA
ttcgatgttccgctgaagaaaaccggggcttatcagtctatcgatattcgctttagctatgacatcaacgggttg

SEQ ID NO: 428478 - DNA, 75 bp, synthetic construct
  source 1..75: mol_type = other DNA
tagccgggagaggactgccgaatgtatttcgccgcgcgttgctcgacaggctgccggcagagttctgccttatca

SEQ ID NO: 428479 - DNA, 75 bp, synthetic construct
  source 1..75: mol_type = other DNA
ccgttattgatacgcactcgccgcctgttaggcttatggtgctttgcctgggcgacactgcatttaaccagttac

SEQ ID NO: 428480 - DNA, 75 bp, synthetic construct
  source 1..75: mol_type = other DNA
atgtgtatccaccttaacttaatgatttttaccaaaatcattaggggattcatcagtgccgcgcaattaattcca

SEQ ID NO: 428481 - DNA, 75 bp, synthetic construct
  source 1..75: mol_type = other DNA
aatgcgtttgttcgcatgtacggcgcagatgccgtggaagccgccagtgcggcaatgagcggcgaagcggcgttt

SEQ ID NO: 428482 - DNA, 75 bp, synthetic construct
  source 1..75: mol_type = other DNA
aaaattcttggagtgttttttaagaacagagtttatatgatcgcaaagttaacacctgtcaataaaaaacgcttt

SEQ ID NO: 428483 - DNA, 75 bp, synthetic construct
  source 1..75: mol_type = other DNA
cagatggtatggtcgttggtgctgggagtgttgttacaaaagtatttcaacctgattcaattattgcgggtattc

SEQ ID NO: 428484 - DNA, 75 bp, synthetic construct
  source 1..75: mol_type = other DNA
tagatgccaaaagtgcacatatgttcacatatcagataattaatgactttggtggctggagtaatccagtttcaa

SEQ ID NO: 428485 - DNA, 75 bp, synthetic construct
  source 1..75: mol_type = other DNA
gcggcagatcaaggtctggtagatattcatgaccgccgcccgctggttctgtcgccagaagctgcacgggaatgg

SEQ ID NO: 428486 - DNA, 75 bp, synthetic construct
  source 1..75: mol_type = other DNA
aagcatcagaaattgctaccaatggctgtgtgccagctaaccagttcacctggcacccggtatcgcgcgcggtgg

SEQ ID NO: 428487 - DNA, 75 bp, synthetic construct
  source 1..75: mol_type = other DNA
ctggcgcagccgctgaccttctcaacgctaatatcatcgcccgtgatttgggcctcaaagagcagtcgcaagttg

SEQ ID NO: 428488 - DNA, 75 bp, synthetic construct
  source 1..75: mol_type = other DNA
cgtgaccatcaaaaaatcgctaaggaatacaaacaagagcttgcacagattagtagcttcaatgactttttgagt

SEQ ID NO: 428489 - DNA, 75 bp, synthetic construct
  source 1..75: mol_type = other DNA
tgattgttgagaacagaccaagtgcacttgatattcacgaattaagtttgcgtgaatcttttgatagagcttggc

SEQ ID NO: 428490 - DNA, 75 bp, synthetic construct
  source 1..75: mol_type = other DNA
ccccggaggggcgaaagccccttctgccgtccacttcttcggggtttctccccgcagtggacctttccgatgggg

SEQ ID NO: 428491 - DNA, 75 bp, synthetic construct
  source 1..75: mol_type = other DNA
tgaaagtttccattgagtcagcgctgactgatttgggtgccaatttcacgcttctgtatgacaaagatggtcgcc

SEQ ID NO: 428492 - DNA, 75 bp, synthetic construct
  source 1..75: mol_type = other DNA
caagacgcttctgttccgcgtgacaagctggagcgtctgaccgacaccaaaacgtttggggcagcctacgtgctg

SEQ ID NO: 428493 - DNA, 75 bp, synthetic construct
  source 1..75: mol_type = other DNA
ctcaaaaagctatgaatcgtgtttacgaaaaacttcagtccaaacttgaaaatgaaattgacgaaatggctattt

SEQ ID NO: 428494 - DNA, 75 bp, synthetic construct
  source 1..75: mol_type = other DNA
tgccgcatgtgatttatttgcactcttcgctcactcagcatttacatggcggttcgcgtcaacaacgttattccg

SEQ ID NO: 428495 - DNA, 75 bp, synthetic construct
  source 1..75: mol_type = other DNA
accttactggcgatcctcgccgggctggatgacggtagtagtggtgaagtgaatctggtggggcaaccgctacat

SEQ ID NO: 428496 - DNA, 75 bp, synthetic construct
  source 1..75: mol_type = other DNA
gaacagcaacgagtggcgctggcacgagcctttaacggtcgacctgatgtgctgtttgccgacgaacccaccggc

SEQ ID NO: 428497 - DNA, 75 bp, synthetic construct
  source 1..75: mol_type = other DNA
gcgtttcgcattctctacggtaaatacctgcaggtggatccgggagagctgatgctgaacgtcgccatatgcgtc

SEQ ID NO: 428498 - DNA, 75 bp, synthetic construct
  source 1..75: mol_type = other DNA
ggagatcccgagcgaagtgctggcacgctatccagcggtagttgaagccatcgaaacactggaagcggaaggttt

SEQ ID NO: 428499 - DNA, 75 bp, synthetic construct
  source 1..75: mol_type = other DNA
atgaactgactggcagtatgttgattgatctgcaatccggtaacgaagagcgcggcatttgcggcctgccattca

SEQ ID NO: 428500 - DNA, 75 bp, synthetic construct
  source 1..75: mol_type = other DNA
ttcatcatcttaataagtccgtcggtcagggggagcatgaactctccatcctcaccggagttgagctggttgtca

SEQ ID NO: 428501 - DNA, 75 bp, synthetic construct
  source 1..75: mol_type = other DNA
tgcgctatccgctggcgctaacttcggcgctgaccaggtgacgatggaagcacgtaactatgggctggcgcgtca

SEQ ID NO: 428502 - DNA, 75 bp, synthetic construct
  source 1..75: mol_type = other DNA
agcgcgtaaaacagattggctgggttattgtggtgctggttgtagcgctgaatatctggttgttagtggggacgg

SEQ ID NO: 428503 - DNA, 75 bp, synthetic construct
  source 1..75: mol_type = other DNA
gggtcacgccagcaacgttattcagccaccaaatgggatgtcgcgattgccatgactattgctggttttgtcaat

SEQ ID NO: 428504 - DNA, 75 bp, synthetic construct
  source 1..75: mol_type = other DNA
atgccaatgcaattatctgtctgatgctggcactacggttgatgttttttcaaaaaacaggccgctatcgttttt

SEQ ID NO: 428505 - DNA, 75 bp, synthetic construct
  source 1..75: mol_type = other DNA
gctttccgtattcttctcggccattacagcaacgttgacccgggtgagttgttcctcaacctggctatctgcatt

SEQ ID NO: 428506 - DNA, 75 bp, synthetic construct
  source 1..75: mol_type = other DNA
gccgaactcgttctggtttggcattccggcgacgcgcggtgagcagggatttatcggttcgcaatgtctgggaag

SEQ ID NO: 428507 - DNA, 75 bp, synthetic construct
  source 1..75: mol_type = other DNA
cttcgtgaaattttaactaaaactggagtttgtgtagttgaaaataaaactatactgcaacctagcattggtaat

SEQ ID NO: 428508 - DNA, 75 bp, synthetic construct
  source 1..75: mol_type = other DNA
gggtcaagaaaggatttgcatgctcgtaaccaagccatgttaaaggcattcgcaggtatatattttaatgatgag

SEQ ID NO: 428509 - DNA, 75 bp, synthetic construct
  source 1..75: mol_type = other DNA
ctggcatggcacctttttccgtggtcaacacgttttcttgatgttttttatcgaaaaagcagaacaccctttcta

SEQ ID NO: 428510 - DNA, 75 bp, synthetic construct
  source 1..75: mol_type = other DNA
ggagagcagccaggagctggacgcttttgtcgatgtcacgccagataacctgctgcataacattcagtctgacat

SEQ ID NO: 428511 - DNA, 75 bp, synthetic construct
  source 1..75: mol_type = other DNA
ttgaggagtggctgccggtttgtcgcgatatgctcaacgccttcttcctgccggatgcggaaaccgaagcggcga

SEQ ID NO: 428512 - DNA, 75 bp, synthetic construct
  source 1..75: mol_type = other DNA
taaatctattcctgttcttaaagtacgaactgataagtgttttcatttgttagaggctttttttaaacatattga

SEQ ID NO: 428513 - DNA, 75 bp, synthetic construct
  source 1..75: mol_type = other DNA
cagcttcagatgaaagcagaggttgaggcgctgacagagctgaaggcgatccgcagttatgtcgtcggatggcct

SEQ ID NO: 428514 - DNA, 75 bp, synthetic construct
  source 1..75: mol_type = other DNA
agccagcgcgaagggatgctgatctggcctgactttactggctgggacacggtgctgaatgccgaagcaacggca

SEQ ID NO: 428515 - DNA, 75 bp, synthetic construct
  source 1..75: mol_type = other DNA
ggcccgactttactggctgggacacggtgctgaatgccgaagcaacggcatataccgaaattccaggagctgcgc

SEQ ID NO: 428516 - DNA, 75 bp, synthetic construct
  source 1..75: mol_type = other DNA
tggctgcgtggttggcggagaatggtcgccagacagaatgcgaagaattgctggcatggcacctttttccgtggt

SEQ ID NO: 428517 - DNA, 75 bp, synthetic construct
  source 1..75: mol_type = other DNA
tccgaggtgaaagcctaccgccagaatttcagccagcgtgagctgatggtcatctggccggatttcctcgcatgg

SEQ ID NO: 428518 - DNA, 75 bp, synthetic construct
  source 1..75: mol_type = other DNA
gaggaaaaccgcaaggcagacagctcagggcgctggaagtttgacggagagcgaatagtcgacactctgacagcg

SEQ ID NO: 428519 - DNA, 75 bp, synthetic construct
  source 1..75: mol_type = other DNA
cagccagccaggcaggcaaggctcattctgaatttgtccagcctttaccgtttaccttgccagaaaccgtgccgc

SEQ ID NO: 428520 - DNA, 75 bp, synthetic construct
  source 1..75: mol_type = other DNA
atggggattaatccgcaggatgaatggagaaattacagcttcagtgatgcaggcgacgatttagcgctaccgtga

SEQ ID NO: 428521 - DNA, 75 bp, synthetic construct
  source 1..75: mol_type = other DNA
aacttgaagaacgcggattatggcgacgagcagctacccgatggggtgacgtccttcttcacgcagaaacggaca

SEQ ID NO: 428522 - DNA, 75 bp, synthetic construct
  source 1..75: mol_type = other DNA
ggttgccggtttgtcgcgatatgctcaacgccttcttcctgccggatgcggaaaccgaagcggcgatgacgctga

SEQ ID NO: 428523 - DNA, 75 bp, synthetic construct
  source 1..75: mol_type = other DNA
ttttgttattagcgtttttaaaagattaaaagtgacaaaggaatttgcttatagtcaacagggtaaggttgaaat

SEQ ID NO: 428524 - DNA, 75 bp, synthetic construct
  source 1..75: mol_type = other DNA
aggtagtcagttatgcaaagcaattaggtaaaataatacccgatctttttttcttttgtgacatgtcaagcacaa

SEQ ID NO: 428525 - DNA, 75 bp, synthetic construct
  source 1..75: mol_type = other DNA
actcactgctgatgaatctgctgaaccagttacaggaagacgggcacgatgtatcgggcgcggcggcggagctga

SEQ ID NO: 428526 - DNA, 75 bp, synthetic construct
  source 1..75: mol_type = other DNA
gctctggcggcaattaacgccggagacaatggacgccatagtagaacaatcgcagcgttacctgctaccgctgtt

SEQ ID NO: 428527 - DNA, 75 bp, synthetic construct
  source 1..75: mol_type = other DNA
cggccagccaggctggtaaagcacattctgaatttgttcagccgctgccgtttaccttaccggaaaccgtgccgc

SEQ ID NO: 428528 - DNA, 75 bp, synthetic construct
  source 1..75: mol_type = other DNA
cagcttgctgacagagtcattgcctgtcgacagccgggacaaagtatggaaattgatctcgactgctacggcgtg

SEQ ID NO: 428529 - DNA, 75 bp, synthetic construct
  source 1..75: mol_type = other DNA
cgagccatttattctggagggacttagccgttatcagatcaaccagcagctattaaatgcattggtcgagcagga

SEQ ID NO: 428530 - DNA, 75 bp, synthetic construct
  source 1..75: mol_type = other DNA
ccgaagacagcgaaatccccgacaccgaaccttttattcttgaagggcttagtcgttatcaaatcaaccagcagt

SEQ ID NO: 428531 - DNA, 75 bp, synthetic construct
  source 1..75: mol_type = other DNA
ctatttcgcgatagcgaaaatgccgggcagttgtttaacagcgacggcgaacaggatattggcaaccctctgctg

SEQ ID NO: 428532 - DNA, 75 bp, synthetic construct
  source 1..75: mol_type = other DNA
cctcgcatgggatacggtcgccagtaccaccgccaccgcgtatgccaccgcccgtgcgctgggcctgcgcgctaa

SEQ ID NO: 428533 - DNA, 75 bp, synthetic construct
  source 1..75: mol_type = other DNA
tgtcgtgagtattttacaagtaatcaaaaatgttgcccgaagtgccatgaggggatttggtgtattcctgcccag

SEQ ID NO: 428534 - DNA, 75 bp, synthetic construct
  source 1..75: mol_type = other DNA
aggtgctggagattaacgagggcacccgcgtcatttccactgtatccacggccattgtcggcatggtctgcacgg

SEQ ID NO: 428535 - DNA, 75 bp, synthetic construct
  source 1..75: mol_type = other DNA
atgagtgactatcatcatggcgtgcaggtgctggagattaacgacggcacccgcgtcatttccaccgtatccacg

SEQ ID NO: 428536 - DNA, 75 bp, synthetic construct
  source 1..75: mol_type = other DNA
ggaatatgcttctggcttttgagatgagactcaagaaactttacgatttctacgagaaatacgccagcaccccac

SEQ ID NO: 428537 - DNA, 75 bp, synthetic construct
  source 1..75: mol_type = other DNA
agatccgtttacctgcggagctgaaagcgcagttagaaaaagcagctctggaaaataagcggtctatgaatgcgg

SEQ ID NO: 428538 - DNA, 75 bp, synthetic construct
  source 1..75: mol_type = other DNA
ctggtttgacgaagaggccaacagcaaagaaaccctcaaggccgggaagctgtatatcgattacgactatacgcc

SEQ ID NO: 428539 - DNA, 75 bp, synthetic construct
  source 1..75: mol_type = other DNA
tcagcgcatggggttgtaaaaccatttccgagtcgatggcctatcgcgagaatttcagccagcgcgagctgatgg

SEQ ID NO: 428540 - DNA, 75 bp, synthetic construct
  source 1..75: mol_type = other DNA
ttgataagcccatcaccgcaacgctgattcgcgacatcattgacggcatcaatgccaaattccgcgaactgaaaa

SEQ ID NO: 428541 - DNA, 75 bp, synthetic construct
  source 1..75: mol_type = other DNA
cccaatataggtgaggatatttttaaagatcttatatcatcagtaggcttggtagatagtaaagccagattacgg

SEQ ID NO: 428542 - DNA, 75 bp, synthetic construct
  source 1..75: mol_type = other DNA
cccgtgcgctgggtctgcgcgctaaaatcgaccaggagcagggctggcataaaacgctgtccaatgtcggggtaa

SEQ ID NO: 428543 - DNA, 75 bp, synthetic construct
  source 1..75: mol_type = other DNA
aggccggtaaaaaaggcacgctggcggcgtcgttgcaggccatagctgaccagtcaaaaccggtcaccgttgttg

SEQ ID NO: 428544 - DNA, 75 bp, synthetic construct
  source 1..75: mol_type = other DNA
atttttttcgaggtagatgcatatgaaaatttattagactatatgactgagcaatctgctgttagaggtggtgaa

SEQ ID NO: 428545 - DNA, 75 bp, synthetic construct
  source 1..75: mol_type = other DNA
attaatatgtttaacgccacggtgatcgagcgactcgacgagcagcgcgtacgcgccaacgttgaaggccgcgaa

SEQ ID NO: 428546 - DNA, 75 bp, synthetic construct
  source 1..75: mol_type = other DNA
cggtaaaaaaggcacgctggcggcatcgttgcaggccatcgctgaccagtcaaaaccggtcaccgttgtcgtgcg

SEQ ID NO: 428547 - DNA, 75 bp, synthetic construct
  source 1..75: mol_type = other DNA
aatacctggcaaatctggtcacctcggttaacagcaattataaggagcctgaccgatggcaatgccgcgcaaact

SEQ ID NO: 428548 - DNA, 75 bp, synthetic construct
  source 1..75: mol_type = other DNA
tctaacgtcggcgtgcagggtgtcaccggcatcagtgcctcagtgttttgggatttgcaggcatccggcaccgat

SEQ ID NO: 428549 - DNA, 75 bp, synthetic construct
  source 1..75: mol_type = other DNA
ccccgtcaataaaccggtgctgatcaccaatgtgcagagcgcgattgcaaaggccggtaaaaaaggcacgctggc

SEQ ID NO: 428550 - DNA, 75 bp, synthetic construct
  source 1..75: mol_type = other DNA
tgacaatgacaccggctggcacaaaaccctgtcaaacgtcggcgtcaatgaggtcaccggtatcagcgcatccgt

SEQ ID NO: 428551 - DNA, 75 bp, synthetic construct
  source 1..75: mol_type = other DNA
cgtgagaatttcagcgcacgtgaactcatgattatctggcctgaattcctcggatgggataccgcgaccagcgcc

SEQ ID NO: 428552 - DNA, 75 bp, synthetic construct
  source 1..75: mol_type = other DNA
accaatgtgcagagcgcgattgcaaaggccggtaaaaaaggcacgctggcggcatcgttgcaggctatcgccgac

SEQ ID NO: 428553 - DNA, 75 bp, synthetic construct
  source 1..75: mol_type = other DNA
tgcgcgccaaaatcgacgaacagaccggttggcataaaaccctgtccaacgtgggtgtgaatggcgtcaccggta

SEQ ID NO: 428554 - DNA, 75 bp, synthetic construct
  source 1..75: mol_type = other DNA
ttcgtctttgtcactcacgatcaggaagaagcgctcaccatgtcagacaggattgtggtgatgcgcgagggtcgt

SEQ ID NO: 428555 - DNA, 75 bp, synthetic construct
  source 1..75: mol_type = other DNA
aagccggtaaaaaaggcacgctggccgcatccctgcaggctatcgccgaccagtcaaaacccgtcaccgttgtcg

SEQ ID NO: 428556 - DNA, 75 bp, synthetic construct
  source 1..75: mol_type = other DNA
accactggaaagcctgaccctgcgccagcgtatcaccgataaatatctggtgaatctgtccgaatcggtcaacag

SEQ ID NO: 428557 - DNA, 75 bp, synthetic construct
  source 1..75: mol_type = other DNA
ttctcggtgtgccgggactggataccaaagaggtggctgttgcactagcatccgtctgtcagaagctgcgcgctt

SEQ ID NO: 428558 - DNA, 75 bp, synthetic construct
  source 1..75: mol_type = other DNA
agaaggcttcctgatagttacagctgcggccgacaaaggactggtagatattcacgacaggcggccactggtact

SEQ ID NO: 428559 - DNA, 75 bp, synthetic construct
  source 1..75: mol_type = other DNA
tgagtctggttgccagaggctgtgcggtcgcagcaccttgcaggactaaagttgcagagcagttgctggaaatcg

SEQ ID NO: 428560 - DNA, 75 bp, synthetic construct
  source 1..75: mol_type = other DNA
atgaactgaccggcagtatgctgattgatctgcaatccggtaatgaagatcgcggtatatgtggcctgccgttta

SEQ ID NO: 428561 - DNA, 75 bp, synthetic construct
  source 1..75: mol_type = other DNA
gtgggaggccgcatatggattaaagtacacctctggtaatccatgtataattagataccagaggagctttgaacc

SEQ ID NO: 428562 - DNA, 75 bp, synthetic construct
  source 1..75: mol_type = other DNA
gtcgttttaacgtcgcgccaggcacaaaagttctgctactcagcgaacgtgatgagcagttgcatcttgatccag

SEQ ID NO: 428563 - DNA, 75 bp, synthetic construct
  source 1..75: mol_type = other DNA
tacagtgcccgccgacaagtttatctggcaccctgttacgcgcgccgtgggcaatgtgaagaatcagggctcgga

SEQ ID NO: 428564 - DNA, 75 bp, synthetic construct
  source 1..75: mol_type = other DNA
gcgcgttcaggggttgtccgaagttttcgaacgctacgtgaaaaaccgcattattgctgaaagcatcagcttgcc

SEQ ID NO: 428565 - DNA, 75 bp, synthetic construct
  source 1..75: mol_type = other DNA
tacagggctaaatattcttgatattgccgctaactatgctgatttcgtggcagaagctgttttaagaaaaacaac

SEQ ID NO: 428566 - DNA, 75 bp, synthetic construct
  source 1..75: mol_type = other DNA
atgcacaataaaaccacaccggacgcagcagccgccgcgctcactacgctgatgcacgcacttattgatattgaa

SEQ ID NO: 428567 - DNA, 75 bp, synthetic construct
  source 1..75: mol_type = other DNA
ggtacactctgcgtatcggtgaattaaaagcaatgctggcactggctggcggcgatatggaacaagcactgatct

SEQ ID NO: 428568 - DNA, 75 bp, synthetic construct
  source 1..75: mol_type = other DNA
gcgcatcctgattttggcgttgcactggaacgtaccgtgaccgagctgctgcaaggtcgtggcctgaaagatttg

SEQ ID NO: 428569 - DNA, 75 bp, synthetic construct
  source 1..75: mol_type = other DNA
taacctcgaaacgcactttatcgattccagcggtttgatctcctgggatcttttcaaacaagatgccgattatcc

SEQ ID NO: 428570 - DNA, 75 bp, synthetic construct
  source 1..75: mol_type = other DNA
gcagatgaattagtgatgcgttgtggtgaactatgctacccagtaagtacaagggtttttggggtcatcggtgat

SEQ ID NO: 428571 - DNA, 75 bp, synthetic construct
  source 1..75: mol_type = other DNA
tatccgtacatgttattccgcgtccgcacggcgatctggaagaggtcttcccgatcggcctgaaaggcgatagca

SEQ ID NO: 428572 - DNA, 75 bp, synthetic construct
  source 1..75: mol_type = other DNA
gttatcccgcgtccgcacggcgacctggaagaagtcttcccgatcggcctgaaaggcgatagcagcaacctgtaa

SEQ ID NO: 428573 - DNA, 75 bp, synthetic construct
  source 1..75: mol_type = other DNA
gatggcaattttgataaccaagctaaaataaaaaactgtcatgaatatatattactatatgcaaaaaaagaagtt

SEQ ID NO: 428574 - DNA, 75 bp, synthetic construct
  source 1..75: mol_type = other DNA
ttgagtcaccccggattgaagcaaacaagctccgtggtatgcctgattgttacaagatggggtttgagggccaat

SEQ ID NO: 428575 - DNA, 75 bp, synthetic construct
  source 1..75: mol_type = other DNA
acgatacgcgtgaagcggaagatgtgctggatgtggcggtggctattgcggaggcagacggcgaaattgagccgg

SEQ ID NO: 428576 - DNA, 75 bp, synthetic construct
  source 1..75: mol_type = other DNA
gatcgtccaccagcttggaacaactgacctcacttctgctgccggtaagcttctattgtcgatgttggcagcggt

SEQ ID NO: 428577 - DNA, 75 bp, synthetic construct
  source 1..75: mol_type = other DNA
tgatgaagcgcgtaaccgctggccgctggggcgcgtcacggtaattcaccgcattggtgaattatggccgggcga

SEQ ID NO: 428578 - DNA, 75 bp, synthetic construct
  source 1..75: mol_type = other DNA
accctcgaacactatccggggatgacggaaaaagcactggcggaaatcgtggatgaggcgcgtaaccgctggtcg

SEQ ID NO: 428579 - DNA, 75 bp, synthetic construct
  source 1..75: mol_type = other DNA
atataaatcgttatactattatcagcgaaattggtgagggggggatgcaaaaggtttaccttgcgaatgataaga

SEQ ID NO: 428580 - DNA, 75 bp, synthetic construct
  source 1..75: mol_type = other DNA
ctctggtcggtaacgtcggtgatggtcaaacgtgcaaagtcgctaaccaaattattgttgcactgaatattgaag

SEQ ID NO: 428581 - DNA, 75 bp, synthetic construct
  source 1..75: mol_type = other DNA
cattatgtgcccgaagcgttgttgccagcccctgcctgtagcatggactggtcccggtagccggtactcgctgct

SEQ ID NO: 428582 - DNA, 75 bp, synthetic construct
  source 1..75: mol_type = other DNA
tgctaaaaacggctgcgtttgttgttcctgctgctggtgtcgtaggaggagctgcgaaggcatacgaaagccctg

SEQ ID NO: 428583 - DNA, 75 bp, synthetic construct
  source 1..75: mol_type = other DNA
gattgatgcgctgattgatatttctgttatcgcggacagggcgcataagcacgctaccagtgaaacagaatatgc

SEQ ID NO: 428584 - DNA, 75 bp, synthetic construct
  source 1..75: mol_type = other DNA
ggacaaagtccatgtgagatagtcgagaaaaatgagaatttcacgactgtaaaaattaatgggtatttaatagga

SEQ ID NO: 428585 - DNA, 75 bp, synthetic construct
  source 1..75: mol_type = other DNA
agccgaacagatatagcaatagctgggcgagaattatctatgctggtggagatgggtaaacaggtaatgccccgc

SEQ ID NO: 428586 - DNA, 75 bp, synthetic construct
  source 1..75: mol_type = other DNA
atgaacgcaaaagaagaaggtattatcagagcactgaaagaaatttcaaagatggaaagcgaagtggcgaaaaaa

SEQ ID NO: 428587 - DNA, 75 bp, synthetic construct
  source 1..75: mol_type = other DNA
tggttctggagtcgtttgatgtgcctttgggaaagaatagagtgtttctggaaaaaggctcatctgtacttgttg

SEQ ID NO: 428588 - DNA, 75 bp, synthetic construct
  source 1..75: mol_type = other DNA
agagggcatcatttaaagataagggtagtgccagactgacagtaagaaggacaaaatccggcgcgtcaggtcttt

SEQ ID NO: 428589 - DNA, 75 bp, synthetic construct
  source 1..75: mol_type = other DNA
tactggctggcgaaagcatcgacgcttccccccgcgcccgtcttgccgctggcctgcgacccgccacgctacgtg

SEQ ID NO: 428590 - DNA, 75 bp, synthetic construct
  source 1..75: mol_type = other DNA
aaaaatctcaactcagtcgttctgcatttttccgaaaactgattcttgaaagatcatcctctgtcgtaattaaag

SEQ ID NO: 428591 - DNA, 75 bp, synthetic construct
  source 1..75: mol_type = other DNA
aatcaataacctgacgttgatggcgttaactatcgccaccggattcgtggtcgatgacgccatcgtggtgatcga

SEQ ID NO: 428592 - DNA, 75 bp, synthetic construct
  source 1..75: mol_type = other DNA
cttatcacctgactcgcgaccaaaagcgactgttgtttattgtggtgggaagacttcgctatgcttctaaggatg

SEQ ID NO: 428593 - DNA, 75 bp, synthetic construct
  source 1..75: mol_type = other DNA
ggaagtgcaactggtgcgtgctaatgcgctggccgaagaccagcagaaagcgattgagtcaattaagcaggctga

SEQ ID NO: 428594 - DNA, 75 bp, synthetic construct
  source 1..75: mol_type = other DNA
ggggacgcccctttgaaaccccgtcaggggacggacgacctggcggtggcattgttaattatttacaggaggtat

SEQ ID NO: 428595 - DNA, 75 bp, synthetic construct
  source 1..75: mol_type = other DNA
atccttatatgtaaaagtattaaattgtcttgttgatattagggagttattaatgacaggagttaataataatgc

SEQ ID NO: 428596 - DNA, 75 bp, synthetic construct
  source 1..75: mol_type = other DNA
aaagtgtaggggctaaagttaaagcgattattcatacggatatgtctgcaccctggcgtcttaaagatatatctt

SEQ ID NO: 428597 - DNA, 75 bp, synthetic construct
  source 1..75: mol_type = other DNA
ttgttaaatactctgatctttacggatttgaggaatacaaggattttattgttgatggtgatgatgtgtatatca

SEQ ID NO: 428598 - DNA, 75 bp, synthetic construct
  source 1..75: mol_type = other DNA
ggcaagccctgggatacgccgcagttagccgctgagctggaacgctggaagctggatggtcgcgacgtcagtcta

SEQ ID NO: 428599 - DNA, 75 bp, synthetic construct
  source 1..75: mol_type = other DNA
ttctggctactgcaatcacaatcccgaaacttctgtgctggcgcattacaggttggcggggacgtgcggaacagc

SEQ ID NO: 428600 - DNA, 75 bp, synthetic construct
  source 1..75: mol_type = other DNA
tgtatctggcacgctggccgctcagggcgaggatgaaaactattatcactgtagattccagggattcaagggtgt

SEQ ID NO: 428601 - DNA, 75 bp, synthetic construct
  source 1..75: mol_type = other DNA
gtggcaaattgtttacctgctttacccgtcaaatccctgcctcttctgttgaggcactaaccaaggggatcattg

SEQ ID NO: 428602 - DNA, 75 bp, synthetic construct
  source 1..75: mol_type = other DNA
gcctacgcacagcttaccgctgatatggcgctgaatgaggcaggcaaaattcttaccgcagatattcaggaggcg

SEQ ID NO: 428603 - DNA, 75 bp, synthetic construct
  source 1..75: mol_type = other DNA
tgtgctgatgactttattctgacggtagaaacaggtccgattggcggaattacttcacagggtatcgcctttggc

SEQ ID NO: 428604 - DNA, 75 bp, synthetic construct
  source 1..75: mol_type = other DNA
ttattatgcatgtaccggtaactaaaaatattatcggtgactccacacacagcattactcattggggaatgccgg

SEQ ID NO: 428605 - DNA, 75 bp, synthetic construct
  source 1..75: mol_type = other DNA
tgttgctaatattgtatggcaaaaaaaatactcaccacaaaatgatgcaacatattttagtgatatgcatgatca

SEQ ID NO: 428606 - DNA, 75 bp, synthetic construct
  source 1..75: mol_type = other DNA
ccctggctactgcaatcacgatccggaaacgtctgtgctggcgcattaccgactggcgggaacgtgcggaacagc

SEQ ID NO: 428607 - DNA, 75 bp, synthetic construct
  source 1..75: mol_type = other DNA
gtaaatctcgtgacgatttgcaggcagtgatggcgatggtgcgtggtggcgatctcggccagccattccagttca

SEQ ID NO: 428608 - DNA, 75 bp, synthetic construct
  source 1..75: mol_type = other DNA
aaaaacggattacgagcacgactcattgttgttgatgcacgctgagggagttttcagaacactggctatctggcg

SEQ ID NO: 428609 - DNA, 75 bp, synthetic construct
  source 1..75: mol_type = other DNA
tgcctgcgctgctggaagtcggggttttagtcgccctttctggcgtcgtgcttggtggtttactggattatctgg

SEQ ID NO: 428610 - DNA, 75 bp, synthetic construct
  source 1..75: mol_type = other DNA
cttattttgcttcttatcgtgctgtataagctgggcgacgcattcgccatgagcctgacaaccacgtttttgatt

SEQ ID NO: 428611 - DNA, 75 bp, synthetic construct
  source 1..75: mol_type = other DNA
attgtcttcgatgcgtggaaaaccgatgtgctcccggcagaagaacgtggtgcgggcgcggcaatcagcgtgctg

SEQ ID NO: 428612 - DNA, 75 bp, synthetic construct
  source 1..75: mol_type = other DNA
aagccgttgttgcgcctctgcgtgatttctttggtcgcaataacgcctggttgattctgcttttaatcgtactgt

SEQ ID NO: 428613 - DNA, 75 bp, synthetic construct
  source 1..75: mol_type = other DNA
gctattgctgttaacgatggatgccctggatttgacccacttctccttcctgtctgctctactggaagtcggcgt

SEQ ID NO: 428614 - DNA, 75 bp, synthetic construct
  source 1..75: mol_type = other DNA
aagcggttgttgcacctctgcgagatttctttggccgaaataatgcgtggctgattctgctgttaatcgttctgt

SEQ ID NO: 428615 - DNA, 75 bp, synthetic construct
  source 1..75: mol_type = other DNA
ccccggagccactacgctgacccggttgatttcagaggtaagggaaaaggcgacgttgcgcctgtggaacaaact

SEQ ID NO: 428616 - DNA, 75 bp, synthetic construct
  source 1..75: mol_type = other DNA
agagggatcacctggtacaactttgtgtccgatcagtattccggctttcatggcatcgttataccggggacgctg

SEQ ID NO: 428617 - DNA, 75 bp, synthetic construct
  source 1..75: mol_type = other DNA
ctggcccgatgggcattggcgctatcgattacgccattaacggcggcatacaaccggcgcgggtggtggtagtcg

SEQ ID NO: 428618 - DNA, 75 bp, synthetic construct
  source 1..75: mol_type = other DNA
atgtccagtcaatatttacgtattttccaacagcctcgttcagctattttgttgattctgggttttgcttccggg

SEQ ID NO: 428619 - DNA, 75 bp, synthetic construct
  source 1..75: mol_type = other DNA
cttacccgtcttttatatacccggagctggataagcaacgaacgacctggcctgcttttcgatctggcgacaggg

SEQ ID NO: 428620 - DNA, 75 bp, synthetic construct
  source 1..75: mol_type = other DNA
tggcgaatggaccatgatgccgactatggcgtgctgaatgatattgccagagggcaatcagatccccgaaaaata

SEQ ID NO: 428621 - DNA, 75 bp, synthetic construct
  source 1..75: mol_type = other DNA
atggaatactttgatatgcgtaaaatgtcggtgaatctgtggcgaaacgctgccggtgaaacgcgcgaaatttgc

SEQ ID NO: 428622 - DNA, 75 bp, synthetic construct
  source 1..75: mol_type = other DNA
tatttactctactaattttgcattttcctcttacaggttattgtgccaaagaaccctcgcttgatgatcttatcc

SEQ ID NO: 428623 - DNA, 75 bp, synthetic construct
  source 1..75: mol_type = other DNA
aaacaccgcgagaaaatcagattaacatccgggcaacggatgaggaacgagccgttattgattatgccgctagcc

SEQ ID NO: 428624 - DNA, 75 bp, synthetic construct
  source 1..75: mol_type = other DNA
atgtctacagctgcaagcgtccgtaaaacaccgcgagaaaaccagattaacatccgggcaactgatgaggaacga

SEQ ID NO: 428625 - DNA, 75 bp, synthetic construct
  source 1..75: mol_type = other DNA
atatgattaaagcggaaattgagaaggaaatgcatattgccagccttcgaaaaatgcgacgtacatcaatcaact

SEQ ID NO: 428626 - DNA, 75 bp, synthetic construct
  source 1..75: mol_type = other DNA
tcgacggcagaacccgagccacttcaattggtgcatttaatgaagaatttgagcgagtcgaccacaacgaactac

SEQ ID NO: 428627 - DNA, 75 bp, synthetic construct
  source 1..75: mol_type = other DNA
tccttcgcgatctggaaaaccaggtctgtgatgccgtcgtggatcgggtgaatgaccatcttccggggaatatcg

SEQ ID NO: 428628 - DNA, 75 bp, synthetic construct
  source 1..75: mol_type = other DNA
actttcccaccggcaaaacgtgatttttactggcgtgccagcattgcatccatcgcggcgaatggggagttttct

SEQ ID NO: 428629 - DNA, 75 bp, synthetic construct
  source 1..75: mol_type = other DNA
actaccgaccagggcgcgtgctggttcgatggcaggcacaccctgcggcttttacaaccgcaaggtaaactgttg

SEQ ID NO: 428630 - DNA, 75 bp, synthetic construct
  source 1..75: mol_type = other DNA
tgacgttgctggaaggcggcgagatgtttcttgaaagcacagaccgctttaaccatactttaaaaccgttacaac

SEQ ID NO: 428631 - DNA, 75 bp, synthetic construct
  source 1..75: mol_type = other DNA
gggatccgttgtaccatgtgttttgacatgcgttttgagcggacagcgttgtacgctgctgaaaatggtttcagt

SEQ ID NO: 428632 - DNA, 75 bp, synthetic construct
  source 1..75: mol_type = other DNA
ccgtttatcgatgctgattacgacactgacaactggtttgatcgagccaaaggaatggaatgggagcccgaacgt

SEQ ID NO: 428633 - DNA, 75 bp, synthetic construct
  source 1..75: mol_type = other DNA
cagacaactggtttgaacgtgccaaaggaatggaatgggagcccgagagggggatccgttgtaccatgtgttttg

SEQ ID NO: 428634 - DNA, 75 bp, synthetic construct
  source 1..75: mol_type = other DNA
tggtgtatgtgaataccaaagggatgagcgatccggtacagaagctgcgggcgctgacaggagatgtcgggttcg

SEQ ID NO: 428635 - DNA, 75 bp, synthetic construct
  source 1..75: mol_type = other DNA
ttcctctgaattgagctcatctttagccgaaaaggacacggccctgacgctcgtgcggtcggagctgtcaacagc

SEQ ID NO: 428636 - DNA, 75 bp, synthetic construct
  source 1..75: mol_type = other DNA
gattttggccagatttccaaagctcatctggaggctaatggtatttcggtgaaaaaggatctggatattaaactg

SEQ ID NO: 428637 - DNA, 75 bp, synthetic construct
  source 1..75: mol_type = other DNA
gatattgaattagttaattgtgacattacggcctttaaaaataatgctaaaactgggagcgttaagttagctttt

SEQ ID NO: 428638 - DNA, 75 bp, synthetic construct
  source 1..75: mol_type = other DNA
gaaaccccgaagaagtggacggcagaaggggctttcgcccctccgggggagcaaccggtcggcccggcgacctga

SEQ ID NO: 428639 - DNA, 75 bp, synthetic construct
  source 1..75: mol_type = other DNA
ccgaagaagtggacggcagaaggggctttcgcccctccgggggagcaaccggtcggcccggcgacctgattcagc

SEQ ID NO: 428640 - DNA, 75 bp, synthetic construct
  source 1..75: mol_type = other DNA
acaatcaagcagcttaccgaagctatgaccggcgcagttgccatcaaacctaaatcctctggggcatcaaaaccg

SEQ ID NO: 428641 - DNA, 75 bp, synthetic construct
  source 1..75: mol_type = other DNA
agcgcttgggtcaaaaaagctaccaatggtacactgcgtgaaggtgatttctccgctgttgctaactttaacctg

SEQ ID NO: 428642 - DNA, 75 bp, synthetic construct
  source 1..75: mol_type = other DNA
ctcttccggagcctcaccgcattcacggctttgtctgggatgcaaacaatgtgcggctactggcttacgccctcc

SEQ ID NO: 428643 - DNA, 75 bp, synthetic construct
  source 1..75: mol_type = other DNA
tggattatcttgacgcactggaaatggtcgatacttccggcgctccggatattcagtggccggaagaaccagaca

SEQ ID NO: 428644 - DNA, 75 bp, synthetic construct
  source 1..75: mol_type = other DNA
agataccagcggggggacaggtactgcgattgtagttcaggctgcaggtaaaaacgtttctttcgatggcacaga

SEQ ID NO: 428645 - DNA, 75 bp, synthetic construct
  source 1..75: mol_type = other DNA
taaattcgtccgtcgcttgctgcgtcgtattacgctgattgccgcccaaaatgaagaagatggtgcacgttttgt

SEQ ID NO: 428646 - DNA, 75 bp, synthetic construct
  source 1..75: mol_type = other DNA
ctgttgcaattgctttctgttcagtggcaaatgcggcggatcagggacaaggtaaagttaattttaaaggaaccg

SEQ ID NO: 428647 - DNA, 75 bp, synthetic construct
  source 1..75: mol_type = other DNA
ctgatttccggaggcggggacaccttcggctcccggctgcctggcggcatccggtcgtcaggcccgactccgaca

SEQ ID NO: 428648 - DNA, 75 bp, synthetic construct
  source 1..75: mol_type = other DNA
aactaccgcgaatcctacggcatgtacgcctgtaacggtattctcttcaaccatgaatccccgcgccgcggcgaa

SEQ ID NO: 428649 - DNA, 75 bp, synthetic construct
  source 1..75: mol_type = other DNA
gtacgctgcgtctgctggaggcgatccgcttcctcggtctggaaaagaaaacccgtttctatcaggcttccacct

SEQ ID NO: 428650 - DNA, 75 bp, synthetic construct
  source 1..75: mol_type = other DNA
ccgaccaaagcgcacgaaaaactgggctggaaaccggaaatcaccctcagagagatggtgtctgaaatggtggct

SEQ ID NO: 428651 - DNA, 75 bp, synthetic construct
  source 1..75: mol_type = other DNA
ggtagagaagctgctgccggtggaactggcggccagtaaaggcattgagctggtgtatgtgaataccaaagggat

SEQ ID NO: 428652 - DNA, 75 bp, synthetic construct
  source 1..75: mol_type = other DNA
acaacctgggcgcgatgagccacgtggccgtttcgtttgaatctccggaatacaccgccgacgtggatgccatgg

SEQ ID NO: 428653 - DNA, 75 bp, synthetic construct
  source 1..75: mol_type = other DNA
tacgtcagttcgtggaaatggcggcggcacagctgggcatcaaactgcgctttgaaggcacgggtgttgaagaga

SEQ ID NO: 428654 - DNA, 75 bp, synthetic construct
  source 1..75: mol_type = other DNA
atccgctggactgccccggcgaatgttagagagcagtatgtcgaacgtataaagaaattccgttgtcctcaaacc

SEQ ID NO: 428655 - DNA, 75 bp, synthetic construct
  source 1..75: mol_type = other DNA
gttgctctggaagaacaggctgttgaagctgtactggcgaaagcgaaagtgactgaaaaagaaaccactttcaac

SEQ ID NO: 428656 - DNA, 75 bp, synthetic construct
  source 1..75: mol_type = other DNA
ggtgtgattatgacaatccggatcattggctcatcactcgctaccaatgcgacagaagtcgttatattaaaaatg

SEQ ID NO: 428657 - DNA, 75 bp, synthetic construct
  source 1..75: mol_type = other DNA
tgcagaggcttaaattttcaagaaccgggggtgagagtaagttgattgattttttacatgaaattgtagattcca

SEQ ID NO: 428658 - DNA, 75 bp, synthetic construct
  source 1..75: mol_type = other DNA
tcatcactggcgcagtcttgtcggcctctgtaccggtactcgtgagtcatacggaggaatataaggatactccac

SEQ ID NO: 428659 - DNA, 75 bp, synthetic construct
  source 1..75: mol_type = other DNA
cattatttatggccattacaatggacaaatgttgaaactccattaaatgatgagttaaacgaaaaattattcatt

SEQ ID NO: 428660 - DNA, 75 bp, synthetic construct
  source 1..75: mol_type = other DNA
atgaatccgccaccctgtttcgtcgcaagtattaccagaatggcgcccacgcgggttacatcatgtacgtcaccg

SEQ ID NO: 428661 - DNA, 75 bp, synthetic construct
  source 1..75: mol_type = other DNA
tattaaaaaggtgagcgccgctgacctgctcgatgcgcaccgcgtgccgttccagttgatggggggcaagcctga

SEQ ID NO: 428662 - DNA, 75 bp, synthetic construct
  source 1..75: mol_type = other DNA
cggcgagatcgagccggaagaacaaaaggtactggaagaggttgggcgtcgtctgggcctgcgcgttgaggatta

SEQ ID NO: 428663 - DNA, 75 bp, synthetic construct
  source 1..75: mol_type = other DNA
cgatccgtcgtggcgcaccaggcgggctgattttccagagtatctgcggcagcgaaaaagggctgaaagagtttg

SEQ ID NO: 428664 - DNA, 75 bp, synthetic construct
  source 1..75: mol_type = other DNA
gctgattttccagagtatctgcggcagcgaaaaagggctgaaagaatttggcgtggagctggcgatgctcgatga

SEQ ID NO: 428665 - DNA, 75 bp, synthetic construct
  source 1..75: mol_type = other DNA
aacgaaaacctgatgatcctgctcgccaccgcaggctgcaactacatcatggggatgccgctgggcgatgacatc

SEQ ID NO: 428666 - DNA, 75 bp, synthetic construct
  source 1..75: mol_type = other DNA
tcgttccacgcccggatctcgacccgcgtctgaaccatctgcaccgggtcaccacccgccgccgcgaatggccgg

SEQ ID NO: 428667 - DNA, 75 bp, synthetic construct
  source 1..75: mol_type = other DNA
tgaagagtgcctgcgggagaacaaacccctgcaccgccatacccgcttcagacgccaggaactggcaccggatga

SEQ ID NO: 428668 - DNA, 75 bp, synthetic construct
  source 1..75: mol_type = other DNA
ttgtcctaccggcagtgggtggaacaacaggcggcgcaaggcgacagagctgcagtgtcacagctccgaggctgg

SEQ ID NO: 428669 - DNA, 75 bp, synthetic construct
  source 1..75: mol_type = other DNA
acccgacgctattcaggcggaagtgtttctgcatttgacggaaagcctggcgcatagcgtgacgcatatcgccgt

SEQ ID NO: 428670 - DNA, 75 bp, synthetic construct
  source 1..75: mol_type = other DNA
atagccagtttgtcagcattgcgggagatatatccccacagcagcgagatgccttagcgttaacgttagacgccg

SEQ ID NO: 428671 - DNA, 75 bp, synthetic construct
  source 1..75: mol_type = other DNA
aacaattgctgcgcaccggactgccgacacgtaaacatgaaaactggaaatatacgccgctggaagggctgacca

SEQ ID NO: 428672 - DNA, 75 bp, synthetic construct
  source 1..75: mol_type = other DNA
tgactgctgttacaccaaccacgctgacgctgaccagaacctcaacgaaaacctgatgatcctgctcgccaccgc

SEQ ID NO: 428673 - DNA, 75 bp, synthetic construct
  source 1..75: mol_type = other DNA
tatttggcaacgcctttctcgaagagcgtcgcggtctgactggcaagccgctaaagctggagacctcaccggcca

SEQ ID NO: 428674 - DNA, 75 bp, synthetic construct
  source 1..75: mol_type = other DNA
gaggcattcacctttggcgagccgacgccggtactcgatcgccgcgacattctcgattatgtggagtgcatcgac

SEQ ID NO: 428675 - DNA, 75 bp, synthetic construct
  source 1..75: mol_type = other DNA
tcccattatcagaggtggcggctaaagatgagtttctgaatatcaagaacgtgagccgcgatgacatgatggcag

SEQ ID NO: 428676 - DNA, 75 bp, synthetic construct
  source 1..75: mol_type = other DNA
ttttagaagcattgagctgtggacttccatgtatagtcactaatattccaggtaataatagcttaatagaagatg

SEQ ID NO: 428677 - DNA, 75 bp, synthetic construct
  source 1..75: mol_type = other DNA
ggcgaccctgttccgtcgcaagtattaccagaacggcgcgcatgcgggttacatcatgtatgtgaccgacgcagc

SEQ ID NO: 428678 - DNA, 75 bp, synthetic construct
  source 1..75: mol_type = other DNA
agcgacactgtttcgtcgcaagtattaccagaacggcgcgcacgcagggtacatcatgtatgtgaccgatgccgc

SEQ ID NO: 428679 - DNA, 75 bp, synthetic construct
  source 1..75: mol_type = other DNA
tttgtggatgaaaaaatctgactggatagaaatatcacccggagaaaaactctcatacacagtaaatttgaatga

SEQ ID NO: 428680 - DNA, 75 bp, synthetic construct
  source 1..75: mol_type = other DNA
tgacgacgtgcaaagtatcgctgcgcaaatctacgaagggctttccttcggggtgggcgatgcggtgatcggcgt

SEQ ID NO: 428681 - DNA, 75 bp, synthetic construct
  source 1..75: mol_type = other DNA
tctacttcgaaaccggacaaggctcggcgctatccgctggcgctaacttcggcgcagaccaggtgacgatggaag

SEQ ID NO: 428682 - DNA, 75 bp, synthetic construct
  source 1..75: mol_type = other DNA
accctactcccgatccaacgccgacacccgttccggagaaacgcattacgccttctacggcagccgtactcaata

SEQ ID NO: 428683 - DNA, 75 bp, synthetic construct
  source 1..75: mol_type = other DNA
atgggaaagagtaagaagagccgcactgcgtcgacgacccagattcagcataaaagccagacttcagccgaaaca

SEQ ID NO: 428684 - DNA, 75 bp, synthetic construct
  source 1..75: mol_type = other DNA
gcgagccggtgccggtactcgataagcgcgacattctggattacgtcgagtgcatcagtaacggcaaatggtacg

SEQ ID NO: 428685 - DNA, 75 bp, synthetic construct
  source 1..75: mol_type = other DNA
agccgcaggcagggccatttgagattgcaggtgcagatatatttgaacgggtgaagcctgaatgtcgctacaatc

SEQ ID NO: 428686 - DNA, 75 bp, synthetic construct
  source 1..75: mol_type = other DNA
caccgcgcatcgggtcgtatatgtccggggccagtcaggatgagcaggataaactcatggaggcgctggtcagca

SEQ ID NO: 428687 - DNA, 75 bp, synthetic construct
  source 1..75: mol_type = other DNA
aaactacagcgtgcgcgatctcgctgagttccttgaaatctacggactgccgccgcgtatcgggtcgtatatgtc

SEQ ID NO: 428688 - DNA, 75 bp, synthetic construct
  source 1..75: mol_type = other DNA
cagttgctggcgcagcaggccgtgcatcataagcctgcccgactgcggcttgactgggatgatgaagacgggatt

SEQ ID NO: 428689 - DNA, 75 bp, synthetic construct
  source 1..75: mol_type = other DNA
gtgattacgaatggtatcgcatgaggatgggcacaggtccgcagggggctataaagcgtgaactgttttctgata

SEQ ID NO: 428690 - DNA, 75 bp, synthetic construct
  source 1..75: mol_type = other DNA
gttaatgacgctggattatatgcaggatctggatggtggatggcagcctgtaccgaaggatatttttactcaggt

SEQ ID NO: 428691 - DNA, 75 bp, synthetic construct
  source 1..75: mol_type = other DNA
gacgtgacggaaggtcttcctttgaagacctgattgcgtacacgtctgtgcgggatgatgtgcaggatgatgaac

SEQ ID NO: 428692 - DNA, 75 bp, synthetic construct
  source 1..75: mol_type = other DNA
gctttgcaccgctgctggcgctggatgtggacgcccgcgccgtcgccacggtggtggcggactggaccggcatcc

SEQ ID NO: 428693 - DNA, 75 bp, synthetic construct
  source 1..75: mol_type = other DNA
cggagataaccattgaacactggctgctgaaactgctggagcagggagaaggcgatatcacggtgattgcccgcc

SEQ ID NO: 428694 - DNA, 75 bp, synthetic construct
  source 1..75: mol_type = other DNA
gatctggatggtggatggcagcctgtaccgaaggatatttttactcaggttatacccggagaacgattccgggga

SEQ ID NO: 428695 - DNA, 75 bp, synthetic construct
  source 1..75: mol_type = other DNA
cgtggagcgaatacaaacagtattttgagcgcgacgccgcgctggagcgccgcttccagatggtgaaagtggacg

SEQ ID NO: 428696 - DNA, 75 bp, synthetic construct
  source 1..75: mol_type = other DNA
atttaccgcccgctgggacaggaggcgatgcgcaccattgtggaaatgaaactggcgcaggtggtccgccgtctt

SEQ ID NO: 428697 - DNA, 75 bp, synthetic construct
  source 1..75: mol_type = other DNA
cagcctgaaaacggtgcatatccgcacgctggacctcggtctgttacaggctggcgcgggcgttaaaggcgaatt

SEQ ID NO: 428698 - DNA, 75 bp, synthetic construct
  source 1..75: mol_type = other DNA
acgcagtgagcagtattaccgggaatatatcagacagcagacccgtttatcggagagccatgatgataattatac

SEQ ID NO: 428699 - DNA, 75 bp, synthetic construct
  source 1..75: mol_type = other DNA
ggtgctgacggcacctgcacatccatacacccgattattgctggattccctccccgccattgataaaccgctgga

SEQ ID NO: 428700 - DNA, 75 bp, synthetic construct
  source 1..75: mol_type = other DNA
catgaaagcccgcgtccggaacagatttatgacagtgtacgccataccctgaaatccctcgggctgggtgaacat

SEQ ID NO: 428701 - DNA, 75 bp, synthetic construct
  source 1..75: mol_type = other DNA
ctttgctgaaatggtggcatggcacaatgtgacgggattctctgaacatggaaattacgttattactcgaccgga

SEQ ID NO: 428702 - DNA, 75 bp, synthetic construct
  source 1..75: mol_type = other DNA
tgacacatcttatactccagttcaggataatgagtggacgccaccatcacctggaatgtagggatgaggggggat

SEQ ID NO: 428703 - DNA, 75 bp, synthetic construct
  source 1..75: mol_type = other DNA
gtgaagcctgaatgtcgttacaatccggaacttgctgccagtgatgaagtggagcccggcttccggcgcgatcct

SEQ ID NO: 428704 - DNA, 75 bp, synthetic construct
  source 1..75: mol_type = other DNA
atcaagatgtaggaaggcataacaattatgtggggcagtctaataataccaccattaacgggggcagacagtcaa

SEQ ID NO: 428705 - DNA, 75 bp, synthetic construct
  source 1..75: mol_type = other DNA
gcgtggccggagctgccggatgaaacgttgcggcagttgctgacgcaggcattctttgtggcggatatctggggg

SEQ ID NO: 428706 - DNA, 75 bp, synthetic construct
  source 1..75: mol_type = other DNA
cgtctccctgtgcaggcgggcctcagccagctgcgtgagcggatgaatgttgccgcactcagtcagcaggacaac

SEQ ID NO: 428707 - DNA, 75 bp, synthetic construct
  source 1..75: mol_type = other DNA
agcggatgtgaagtccggcaatcattagcaataagggaggacggacgtgagctccggtgctggcgggcgctgtag

SEQ ID NO: 428708 - DNA, 75 bp, synthetic construct
  source 1..75: mol_type = other DNA
catcagtatgtctctgccgtgcataccgatacagataatctgcacgtccatgtggctgttaaccgggtacatcct

SEQ ID NO: 428709 - DNA, 75 bp, synthetic construct
  source 1..75: mol_type = other DNA
cgcactaagagcatttaaatatttaatccaaaaaaacagcaatgttatttttgatgttgtaggggatggtgaatt

SEQ ID NO: 428710 - DNA, 75 bp, synthetic construct
  source 1..75: mol_type = other DNA
cctgaaatctctcgggctgggtgaacatcagtatgtctctgccgtgcataccgatactgataacctgcatgttca

SEQ ID NO: 428711 - DNA, 75 bp, synthetic construct
  source 1..75: mol_type = other DNA
ttgctggcaaatggagaaactgttttacaggatgcttctggtaaaaaacacttcaaaggtgaaaaagacagcagg

SEQ ID NO: 428712 - DNA, 75 bp, synthetic construct
  source 1..75: mol_type = other DNA
acaactaacggtatctacaacacactgacaaccaatgaactttccggcagcggtaacttctacctgcataccaac

SEQ ID NO: 428713 - DNA, 75 bp, synthetic construct
  source 1..75: mol_type = other DNA
tatgcatcaggtctctttgagtctggagcttattttgacctgattggtaaatatctccatcatgataatcggtat

SEQ ID NO: 428714 - DNA, 75 bp, synthetic construct
  source 1..75: mol_type = other DNA
aatacggatacagccacacagtgggtgctgactggatatcagtctgtcgctgatgccagagcctcgaaaatcgca

SEQ ID NO: 428715 - DNA, 75 bp, synthetic construct
  source 1..75: mol_type = other DNA
ccccagagctcagtgaatatgaacaatgctctgtggcactctgatagaaattcggaactcaaagagctgaaagcc

SEQ ID NO: 428716 - DNA, 75 bp, synthetic construct
  source 1..75: mol_type = other DNA
atgtaaatatacatccactctctggtaaggatgtgctgactcttgatggttctgttaatctgcctgaaggggtga

SEQ ID NO: 428717 - DNA, 75 bp, synthetic construct
  source 1..75: mol_type = other DNA
gtaaaatcatttatgatttctatgcagaagcagagaagggggcaagacttgttctcgcagggatacagggatcgt

SEQ ID NO: 428718 - DNA, 75 bp, synthetic construct
  source 1..75: mol_type = other DNA
atgattagaggcagaataacagggctgaataacgcaacaacctatcttaatactacaggtcaacgtcttggacgt

SEQ ID NO: 428719 - DNA, 75 bp, synthetic construct
  source 1..75: mol_type = other DNA
gagtattatctatgaaagtacaggcagatatgaacaatgccgtagacaaaggtgcattacctttcactcaacgat

SEQ ID NO: 428720 - DNA, 75 bp, synthetic construct
  source 1..75: mol_type = other DNA
tggctaacggcgaaaccgtattgcgggatgcatctggtgaaaaacgcatcaaaggtgaaaaggacagccgtatgc

SEQ ID NO: 428721 - DNA, 75 bp, synthetic construct
  source 1..75: mol_type = other DNA
gcttctgacatcgctcaacaaatggcgttaagccagatcgaaccagaaaaaacagaaagcccatttgccagtttg

SEQ ID NO: 428722 - DNA, 75 bp, synthetic construct
  source 1..75: mol_type = other DNA
gcggatctgagagatttgactgatatgtttgtcattgcagcgtacaataaagatgtagacacgtttgacaatatg

SEQ ID NO: 428723 - DNA, 75 bp, synthetic construct
  source 1..75: mol_type = other DNA
ctttacgacaaaatactcaaagctgaacaggcccttgaccggaatattgcccgtatcgagtcaattgaacgctca

SEQ ID NO: 428724 - DNA, 75 bp, synthetic construct
  source 1..75: mol_type = other DNA
tggagtcaccctgcataataatggtgttaatggccaaaaaaacaactggttgttattacctgaagattatattaa

SEQ ID NO: 428725 - DNA, 75 bp, synthetic construct
  source 1..75: mol_type = other DNA
atgcgtaaaaaacagtacaactactatcgcgaccagttgttgagttttaaagagggtgaggttgagtggaagact

SEQ ID NO: 428726 - DNA, 75 bp, synthetic construct
  source 1..75: mol_type = other DNA
atgattactaacctttccggaatgggtgtttccgttccgaatggtttcgccacaaccgccgacgcgtttaaccag

SEQ ID NO: 428727 - DNA, 75 bp, synthetic construct
  source 1..75: mol_type = other DNA
aggtcaacaacctgaataaacgtatgggtgacctgcgtgacatcaatggtgaagctggcgcatgggcacgtatca

SEQ ID NO: 428728 - DNA, 75 bp, synthetic construct
  source 1..75: mol_type = other DNA
tgaaggcgttagatatgaacgccatctttcaggggggacacgggacagccggagatttgtataaaacaacttttt

SEQ ID NO: 428729 - DNA, 75 bp, synthetic construct
  source 1..75: mol_type = other DNA
ttggggctggtactgtaatccttgaacaaaaagcgaaaaacaacgattcaacggctttttcttccattaacatca

SEQ ID NO: 428730 - DNA, 75 bp, synthetic construct
  source 1..75: mol_type = other DNA
cgcaacgatgccgtgaaagcactgttgtcgatggcgatccgtgccgcgaagaaacagggcaaatacgtcgggatt

SEQ ID NO: 428731 - DNA, 75 bp, synthetic construct
  source 1..75: mol_type = other DNA
aaccgcagttgcaaaacgaaatccgcgagatgatgaaaggttttgattctccgcgtgaattttacgttggtcgtc

SEQ ID NO: 428732 - DNA, 75 bp, synthetic construct
  source 1..75: mol_type = other DNA
acgcggtcaggtcatggagcgttatacgctgcattcacagggtaagattatcgccgaaggccgtgctatcggtca

SEQ ID NO: 428733 - DNA, 75 bp, synthetic construct
  source 1..75: mol_type = other DNA
ggaatttagcgtgaaaagctccagcgtggaaaccatgccggatctgccgctgaaagtgatgatgaacgtcggtaa

SEQ ID NO: 428734 - DNA, 75 bp, synthetic construct
  source 1..75: mol_type = other DNA
agagggaatcgatagcttgtctctgaacccggataccgtggtacaaacctggctgagtctggctgaattgaagaa

SEQ ID NO: 428735 - DNA, 75 bp, synthetic construct
  source 1..75: mol_type = other DNA
aagactttgccgcatggttgatggaagaggggatcgatagcctgtctctgaacccggataccgtggtgcaaacct

SEQ ID NO: 428736 - DNA, 75 bp, synthetic construct
  source 1..75: mol_type = other DNA
gtactcttcgtctactagaggcaattcgttttttggggcttgagaaaaaaacccgtttctatcaggcatctacct

SEQ ID NO: 428737 - DNA, 75 bp, synthetic construct
  source 1..75: mol_type = other DNA
gatcggtggtactggaatacagtatccaacggggccgaagtacggcggtcagagaaaactggcagtggaaacccg

SEQ ID NO: 428738 - DNA, 75 bp, synthetic construct
  source 1..75: mol_type = other DNA
ctgagtttacgtgagctggttggcgcggttaacctttcggaaaggatcggtgatccagatattttccaacgggcc

SEQ ID NO: 428739 - DNA, 75 bp, synthetic construct
  source 1..75: mol_type = other DNA
cagggacgaattggcggtcgccgtcccaaactttcatcagaacaatgggcgcaggccgggcgactaattgcatca

SEQ ID NO: 428740 - DNA, 75 bp, synthetic construct
  source 1..75: mol_type = other DNA
gtgtaaccggacaagatggatcatacttggcagagtttctgctggaaaaaggttatgaagttcatggtattaagc

SEQ ID NO: 428741 - DNA, 75 bp, synthetic construct
  source 1..75: mol_type = other DNA
aaccacgaatctccacgtcgtggcgaaacatttgttacacgtaaaattactcgtgcaattgctaatgtttcgcaa

SEQ ID NO: 428742 - DNA, 75 bp, synthetic construct
  source 1..75: mol_type = other DNA
tcagcttcctcgcaagctttcgatcaatcaaaagctccaacagaaccacccatcgatctaaaaaaactacatgca

SEQ ID NO: 428743 - DNA, 75 bp, synthetic construct
  source 1..75: mol_type = other DNA
gcgcaacccgtgtgcgagcacaaaaataccttgcagtctattttccgttcctgacattctgcaccgaggcctcct

SEQ ID NO: 428744 - DNA, 75 bp, synthetic construct
  source 1..75: mol_type = other DNA
gcatcgggttcaggaaaatcgaccctgttgatgctactggcgcgtttttatgatccctgctccggaaagatatgg

SEQ ID NO: 428745 - DNA, 75 bp, synthetic construct
  source 1..75: mol_type = other DNA
cgatctgattgccgttattgataaggggttacttgcggaatacggaacccacgaacagctgttatctgcgggcgg

SEQ ID NO: 428746 - DNA, 75 bp, synthetic construct
  source 1..75: mol_type = other DNA
gattgtggatcgcgttactgatggtgggcgtaactgcctggtgtttggttgggaaagttaccgtgcacatatcgg

SEQ ID NO: 428747 - DNA, 75 bp, synthetic construct
  source 1..75: mol_type = other DNA
ggaggttaatcctgacgcagccagaaatcttgcggcctgtcgccgctatgcggagaactggccagatatgctgga

SEQ ID NO: 428748 - DNA, 75 bp, synthetic construct
  source 1..75: mol_type = other DNA
atcccaagtaagtaagcatctggggctggctaatggacagcttgctgaattagtggtcaggatggctaataatga

SEQ ID NO: 428749 - DNA, 75 bp, synthetic construct
  source 1..75: mol_type = other DNA
cttggcagagtttctgctggaaaaaggttatgaagttcatggtattaagcgtcgtgcatcgtcgtttaatactga

SEQ ID NO: 428750 - DNA, 75 bp, synthetic construct
  source 1..75: mol_type = other DNA
aacgtgatccgcgtggacatgccgccgaaggcacgccagcagtatcgtgaaatggaaaaggaaatgtttctcgaa

SEQ ID NO: 428751 - DNA, 75 bp, synthetic construct
  source 1..75: mol_type = other DNA
acactatggatgaaatggtgatggagcggcgcaactcaaaacgaacagtgcaggacatcctgctcgatgccatga

SEQ ID NO: 428752 - DNA, 75 bp, synthetic construct
  source 1..75: mol_type = other DNA
cgccgctgcgcgtggctgccagcacatggccggatgaagcactgaagtggggacatttgcgcaatatcgaggtgc

SEQ ID NO: 428753 - DNA, 75 bp, synthetic construct
  source 1..75: mol_type = other DNA
ggtgacgtaattgtagctgttgatccgcggtatttccgtcctgctgaagtggaaaccttacttggagacccttcg

SEQ ID NO: 428754 - DNA, 75 bp, synthetic construct
  source 1..75: mol_type = other DNA
agagctgggcggccgctggccgttcggtaccgttatccccgacgaaagcacccggctgaaatccttccggctgcg

SEQ ID NO: 428755 - DNA, 75 bp, synthetic construct
  source 1..75: mol_type = other DNA
gctggaagatctttttatggcaggggcagaaacacgccccgcactggtcctcgcgccgctacgtgttgcagcaaa

SEQ ID NO: 428756 - DNA, 75 bp, synthetic construct
  source 1..75: mol_type = other DNA
taccctcgttcgccttatgctgttgcgaagatgtatgcatactggattactgtaaactatcgtgaatcctatgga

SEQ ID NO: 428757 - DNA, 75 bp, synthetic construct
  source 1..75: mol_type = other DNA
ctggtgttaccggtcaagatggttcttacttggcagaatttcttcttgaaaagggttatgaagtgcacggtataa

SEQ ID NO: 428758 - DNA, 75 bp, synthetic construct
  source 1..75: mol_type = other DNA
aacagatatctgtgcgtgaatttgtccgtatggctgctaaagaagtcggacttgaacttgaattctctggtgagg

SEQ ID NO: 428759 - DNA, 75 bp, synthetic construct
  source 1..75: mol_type = other DNA
acaatcccatgtcgcagtgtcattcgagtcaccagaatatacagcagatgtagatgcaatagggacattacgttt

SEQ ID NO: 428760 - DNA, 75 bp, synthetic construct
  source 1..75: mol_type = other DNA
gtgtgcagaaatggtggctagtgatttagaaaaagctaaacagcatgcacttcttaaaagccatggttttgacgt

SEQ ID NO: 428761 - DNA, 75 bp, synthetic construct
  source 1..75: mol_type = other DNA
ttgctatcggcgatattgtcggtcagccgatgctggcacacaaaggtgttcacgaaggtcacgtcgccgctgaag

SEQ ID NO: 428762 - DNA, 75 bp, synthetic construct
  source 1..75: mol_type = other DNA
cattgcagcgggttctcgcccgatccaactgccgtttattccgcatgaagatccgcgtatctgggactccactga

SEQ ID NO: 428763 - DNA, 75 bp, synthetic construct
  source 1..75: mol_type = other DNA
agcgcttgctgaacacggtatcgtcttcggcgaaccgaaaaccgatattgacaagattcgtacctggaaagagaa

SEQ ID NO: 428764 - DNA, 75 bp, synthetic construct
  source 1..75: mol_type = other DNA
aggtcatcccggcagctgataaagacatcgttaaagtctttaccaagcgtatcagcaagaaattcaacctgatgc

SEQ ID NO: 428765 - DNA, 75 bp, synthetic construct
  source 1..75: mol_type = other DNA
gcctataccgaaccagaagttgcatgggtgggtctgaccgagaaagaagcgaaagagaaaggcatcagctatgaa

SEQ ID NO: 428766 - DNA, 75 bp, synthetic construct
  source 1..75: mol_type = other DNA
ccacgcgcacccgactctgcacgagtctgtgggcctggcggcagaagtgttcgaaggtagcattaccgacctgcc

SEQ ID NO: 428767 - DNA, 75 bp, synthetic construct
  source 1..75: mol_type = other DNA
agtctgggctgctacgaagggctgaaatgtgctgcgctaccgcctgctgaagacggacattatcgcttcgaataa

SEQ ID NO: 428768 - DNA, 75 bp, synthetic construct
  source 1..75: mol_type = other DNA
gcgggcaaactcagcaatggccgggagagtctgacggtcagtctgggttgctacgaagggcagaaatgtgctgcg

SEQ ID NO: 428769 - DNA, 75 bp, synthetic construct
  source 1..75: mol_type = other DNA
caacaatccgcacgacatttctcggaatgtatggagtggactcacctctgccgacgtcctggctggatgatattg

SEQ ID NO: 428770 - DNA, 75 bp, synthetic construct
  source 1..75: mol_type = other DNA
gctgatttaggtctggaaaccgtaatcgtagaacgttacaacacccttggcggtgtttgcctgaacgtcggctgt

SEQ ID NO: 428771 - DNA, 75 bp, synthetic construct
  source 1..75: mol_type = other DNA
ttgccggatctacggggcgaatttattcgcggctgggatgacgggcgggggattgactctggccgtaatttatta

SEQ ID NO: 428772 - DNA, 75 bp, synthetic construct
  source 1..75: mol_type = other DNA
ctggttgcccggtgggggcctccataccgatttgctggtgctgctgcgcgtttatctcggctaccgcagtgacgt

SEQ ID NO: 428773 - DNA, 75 bp, synthetic construct
  source 1..75: mol_type = other DNA
accttcccgtgggctgcttctggtcgtgctatcgcttccgactgcgcagacggtatgaccaagctgattttcgac

SEQ ID NO: 428774 - DNA, 75 bp, synthetic construct
  source 1..75: mol_type = other DNA
ctacgatctgcaaccggaaatgagctccgcagagctgaccgaaaaactggttgcggcaatcaagagcggcaaata

SEQ ID NO: 428775 - DNA, 75 bp, synthetic construct
  source 1..75: mol_type = other DNA
ggtagtatcgctacagcaacattgcaccgtgcgtcaggttgctatccctgatttgcaaaacacgctgaaacagca

SEQ ID NO: 428776 - DNA, 75 bp, synthetic construct
  source 1..75: mol_type = other DNA
ccgcagctggagggctatttgcaacaaggcatttttgaacgcgcggactgggaagcgtctctccaggggctggag

SEQ ID NO: 428777 - DNA, 75 bp, synthetic construct
  source 1..75: mol_type = other DNA
cctatcagtccaggcatacttatgcctgttgggcattatcggcaggagcgaatccaagcttcatagcaaaccaaa

SEQ ID NO: 428778 - DNA, 75 bp, synthetic construct
  source 1..75: mol_type = other DNA
ctgaaaacaataatgcacaggtagctttgttaaatacacagttaagcgagtttgccccaaccatgccccataacg

SEQ ID NO: 428779 - DNA, 75 bp, synthetic construct
  source 1..75: mol_type = other DNA
taaataattacatgacaaatctttacgccgtgttccagtttggtgttgataacggttacctggcagataatccgt

SEQ ID NO: 428780 - DNA, 75 bp, synthetic construct
  source 1..75: mol_type = other DNA
aatacgacgactggcgaaccagatatttgccccgcgtggcaaggctggctgaccttggtgagaacaacagcctga

SEQ ID NO: 428781 - DNA, 75 bp, synthetic construct
  source 1..75: mol_type = other DNA
tttgccccgcgtggcaaggctggctgaccttggtgagaacaacagcctgatgaatgcacagcttgcccgggtggg

SEQ ID NO: 428782 - DNA, 75 bp, synthetic construct
  source 1..75: mol_type = other DNA
ttatcgccggtaaaaaacattacttcgatccgaaagttatcccgtccatcgcctataccgaaccagaagttgcat

SEQ ID NO: 428783 - DNA, 75 bp, synthetic construct
  source 1..75: mol_type = other DNA
tgattgccgctccggcggatgtttctccgctcctgcgaatgcagggtgccgcctatgccacgcgcattgccgaag

SEQ ID NO: 428784 - DNA, 75 bp, synthetic construct
  source 1..75: mol_type = other DNA
tcgatgcgtgcagaaatcagcaagcaaaaaatttatggtgtgtttctgtttatactggcgttcgccctggtgagc

SEQ ID NO: 428785 - DNA, 75 bp, synthetic construct
  source 1..75: mol_type = other DNA
ctgggtttgcgtaatgctctggcaattgctggcgcgaaaaatggtatccgtgaagcagagcaggatcgccagatg

SEQ ID NO: 428786 - DNA, 75 bp, synthetic construct
  source 1..75: mol_type = other DNA
tctgggtttttctctggtggtgctctgcgacgtggcagggcaggagaatccgacgcaattcgatcttggaacgct

SEQ ID NO: 428787 - DNA, 75 bp, synthetic construct
  source 1..75: mol_type = other DNA
tctgcgccttttacaacgcgcccgcacgctgggcgaacggctactggtcggcgtatcgtccgacgccctgaacat

SEQ ID NO: 428788 - DNA, 75 bp, synthetic construct
  source 1..75: mol_type = other DNA
gcgtgtcgtcagacgccctgaacatcgccaaaaagggcagagcgccggtttaccatcaggatgaacgcatggcga

SEQ ID NO: 428789 - DNA, 75 bp, synthetic construct
  source 1..75: mol_type = other DNA
atgaaaacggtcatcaccttcggcaccttcgatgtgtttcatgtcggtcatctgcgccttttacaacgcgcccgc

SEQ ID NO: 428790 - DNA, 75 bp, synthetic construct
  source 1..75: mol_type = other DNA
gtgacgatgatttcactcccatcaggtacccgtatctggctcgttgccggcgttactgatatgcgtaaatccttc

SEQ ID NO: 428791 - DNA, 75 bp, synthetic construct
  source 1..75: mol_type = other DNA
caatggtggcacgcaaaccgttcagaattatggtaaggcaatcaataccgatatcgtctctggcctacaacaaat

SEQ ID NO: 428792 - DNA, 75 bp, synthetic construct
  source 1..75: mol_type = other DNA
tggatgagaaccccttctccggtcacttgtttatctttcgcggccgacggggtgacacgattaaaatcctgtggg

SEQ ID NO: 428793 - DNA, 75 bp, synthetic construct
  source 1..75: mol_type = other DNA
cgaagcactacgctgcggagccttcgactatgttatcaaaccgtttgatctcgatgagttgaatttaatcgttca

SEQ ID NO: 428794 - DNA, 75 bp, synthetic construct
  source 1..75: mol_type = other DNA
tggtagtaaacaaaaagctgtcaggtaaggacaatattctgctggttgatttccttcagaaaccaacgcctgaaa

SEQ ID NO: 428795 - DNA, 75 bp, synthetic construct
  source 1..75: mol_type = other DNA
tttctgaacacaccctccggagaaaaactggatatcgaactggtgagtgcaacggggaacagcagtaaagttgtc

SEQ ID NO: 428796 - DNA, 75 bp, synthetic construct
  source 1..75: mol_type = other DNA
tggtgtatttcccccgcacgccgtcggtatcgacgacggagatcattgaggtgattaggtgtaaatcagccacct

SEQ ID NO: 428797 - DNA, 75 bp, synthetic construct
  source 1..75: mol_type = other DNA
ggttacgaggtgcatggtattaagcgtcgtgcatcgtcattcaacaccgagcgcgtggatcatatttatcaggat

SEQ ID NO: 428798 - DNA, 75 bp, synthetic construct
  source 1..75: mol_type = other DNA
cctcggcaatatggattccctgcgtgactggggccacgccaaagactacgtaaaaatgcagtggatgatgctgca

SEQ ID NO: 428799 - DNA, 75 bp, synthetic construct
  source 1..75: mol_type = other DNA
ctggggggcgacgtataacacccgtaataatgtcaccactgaaccgccccgggtttcctggagagtgttttatct

SEQ ID NO: 428800 - DNA, 75 bp, synthetic construct
  source 1..75: mol_type = other DNA
cgatatcactctggtgccggttggtccgttgtcaaatatcgcggtggcaatgcgtatgcaacccgcaatcctgcc

SEQ ID NO: 428801 - DNA, 75 bp, synthetic construct
  source 1..75: mol_type = other DNA
attgtgatccgggtcatgatgatgctattgccataatgatggccgcgaaacatccggcgattgatttattaggta

SEQ ID NO: 428802 - DNA, 75 bp, synthetic construct
  source 1..75: mol_type = other DNA
atggaaaagagaaaaattattctggattgtgatccgggtcatgatgatgctattgctataatgatggcagcgaaa

SEQ ID NO: 428803 - DNA, 75 bp, synthetic construct
  source 1..75: mol_type = other DNA
cagcagcgcctgccacaactaacggtatctacaatacgctgacaaccaatgaactttccggtagcggtaatttct

SEQ ID NO: 428804 - DNA, 75 bp, synthetic construct
  source 1..75: mol_type = other DNA
ccgctttcaaacatcgccgtggcgatgcgtatgcaaccggcgatcctgccaaaaatccgtgaaattgtgctgatg

SEQ ID NO: 428805 - DNA, 75 bp, synthetic construct
  source 1..75: mol_type = other DNA
agcacccatgcggtgaaatacatcattgataccctgatggcaagcgaaggcgatatcactctggtgccggtgggg

SEQ ID NO: 428806 - DNA, 75 bp, synthetic construct
  source 1..75: mol_type = other DNA
gatatctgccttgatatatgccccgcccgggatggctgccttcactactaatgttattggtgtggtaaacgatga

SEQ ID NO: 428807 - DNA, 75 bp, synthetic construct
  source 1..75: mol_type = other DNA
cctgtttatcttccgtggccgacggggtgacaccgtcaaaattctttgggctgatggtctgtgcctgttcaccaa

SEQ ID NO: 428808 - DNA, 75 bp, synthetic construct
  source 1..75: mol_type = other DNA
atgatctcactcccgtcaggtacccgcatctggctggtcgccggcgttaccgatatgcgtaaatccttcaacggt

SEQ ID NO: 428809 - DNA, 75 bp, synthetic construct
  source 1..75: mol_type = other DNA
attacccgctcgcaactggcaatgctcctcgataagctggactggcgtcagccaaaaactgtagtggcacactga

SEQ ID NO: 428810 - DNA, 75 bp, synthetic construct
  source 1..75: mol_type = other DNA
gctggcaatgctcctcgataaactggactggcatcagcccaaaacatcccaccttaatgcactgacaatgttgta

SEQ ID NO: 428811 - DNA, 75 bp, synthetic construct
  source 1..75: mol_type = other DNA
atgatctcactcccatcaggtatccgcatctggctcgttgccggcgttaccgatatgcgtaaatccttcaacggt

SEQ ID NO: 428812 - DNA, 75 bp, synthetic construct
  source 1..75: mol_type = other DNA
gctggaagcagagcctgttctgtatcagtcctgcactcgccccacctggaatagcggtgttccgtggacggaatg

SEQ ID NO: 428813 - DNA, 75 bp, synthetic construct
  source 1..75: mol_type = other DNA
atgaccgctattaatcgcatccttattgttgatgatgaagataatgttcgccgtatgctgagcaccgcttttgca

SEQ ID NO: 428814 - DNA, 75 bp, synthetic construct
  source 1..75: mol_type = other DNA
cctatgtacaggtgagctgggaacaagcattaaaactgattcatgaacaacacgatcgtattcgtaaagctaacg

SEQ ID NO: 428815 - DNA, 75 bp, synthetic construct
  source 1..75: mol_type = other DNA
cggcaaatgatgtggagctgaagccctacaacgtcagcgcccagcggcgggatgtgctgatggatctcaatgaag

SEQ ID NO: 428816 - DNA, 75 bp, synthetic construct
  source 1..75: mol_type = other DNA
atgagttttcaattttgcaggcggaagttgttcttcctcctggtgctggccttaccaggctacgccgccgtccac

SEQ ID NO: 428817 - DNA, 75 bp, synthetic construct
  source 1..75: mol_type = other DNA
gatgaccgtattgaggctgttaaggctgttttgcgtagactggcaggcaactctccggtaactccggatggttgg

SEQ ID NO: 428818 - DNA, 75 bp, synthetic construct
  source 1..75: mol_type = other DNA
atagctggtggttataataaggttttacagccagaaacgtatgagcaggttatctatccggccatacaaattctt

SEQ ID NO: 428819 - DNA, 75 bp, synthetic construct
  source 1..75: mol_type = other DNA
aatggagggctatgaccataagtatttaagcattttggcaatcttcagaccttacaggagccttaatgcatttgc

SEQ ID NO: 428820 - DNA, 75 bp, synthetic construct
  source 1..75: mol_type = other DNA
acagacagggattatcatgaaagatctaatacattagctgggatagaaagtgatagtgcttacgtaagtgataca

SEQ ID NO: 428821 - DNA, 75 bp, synthetic construct
  source 1..75: mol_type = other DNA
cgcggtctgttgattggcatgggtatgacggaaaagcagggcggctctgatgtgatgagtaataccactcgcgcg

SEQ ID NO: 428822 - DNA, 75 bp, synthetic construct
  source 1..75: mol_type = other DNA
gcgcggtggcgtgcggttgtcagagcagatccagaatgatttattgctgcgggcgacaggcggcgtgtgtttgta

SEQ ID NO: 428823 - DNA, 75 bp, synthetic construct
  source 1..75: mol_type = other DNA
cgataaccatgacctttgccgccacgccattgctgttacagatgttacccgcgccgtttcaggactggaccacgc

SEQ ID NO: 428824 - DNA, 75 bp, synthetic construct
  source 1..75: mol_type = other DNA
gtttgatgggcttaataataaagttcatcacgattactgggttgtccctgatggagacagtgcgccagttgcgtc

SEQ ID NO: 428825 - DNA, 75 bp, synthetic construct
  source 1..75: mol_type = other DNA
cttgacccggtgaccgctttcccgcccattcgcgtttttggtacggtggggttcattgtcgcgatgtgggcagta

SEQ ID NO: 428826 - DNA, 75 bp, synthetic construct
  source 1..75: mol_type = other DNA
ggcagtggattacttctcggtagatggcgtaaaagactggcaaactatctggctgatgtttgcaggatattctct

SEQ ID NO: 428827 - DNA, 75 bp, synthetic construct
  source 1..75: mol_type = other DNA
gtctgcagctgtatatcgcgtccggtgcgtcattgctgctgtcggcttatgcgctgactttgccgaagattccgg

SEQ ID NO: 428828 - DNA, 75 bp, synthetic construct
  source 1..75: mol_type = other DNA
ggtattaaaaccgtcatgctgatgagtatggtggcgtggacgctgcgctttggcttctttgcctatggcgatcca

SEQ ID NO: 428829 - DNA, 75 bp, synthetic construct
  source 1..75: mol_type = other DNA
caagctgggtctggatgccttcgtgctgtttaaaaatccacgcatggctatctttttcctctttgccatgatgct

SEQ ID NO: 428830 - DNA, 75 bp, synthetic construct
  source 1..75: mol_type = other DNA
tgctgtttaaaaatccacgcatggccatctttttcctctttgccatgatgctgggtgcggtactgcaaattacca

SEQ ID NO: 428831 - DNA, 75 bp, synthetic construct
  source 1..75: mol_type = other DNA
atttttaaaagatttcatgataacaactaaaattgttgatatcttaattgagcatatgatgtatttaactggaga

SEQ ID NO: 428832 - DNA, 75 bp, synthetic construct
  source 1..75: mol_type = other DNA
tgattaaagaaatcaaagaacgaatcggcagcttagacgtgcgagacaatgttgagcgccgtgcttatgaaattg

SEQ ID NO: 428833 - DNA, 75 bp, synthetic construct
  source 1..75: mol_type = other DNA
tgattaaagaaatcaaagagcgcataggaagcctggatgtgagagacaatattgaacgccgcgcttatgaaatcg

SEQ ID NO: 428834 - DNA, 75 bp, synthetic construct
  source 1..75: mol_type = other DNA
atttcaccggcgctaatgttggcatggtttacagttccaaagggatcgccgcgattattatgcctggtataatgg

SEQ ID NO: 428835 - DNA, 75 bp, synthetic construct
  source 1..75: mol_type = other DNA
gtatggaaatgattactcaacatatgatggttctggtatacgtgattatatccatgtcgtggatcttgcagaagc

SEQ ID NO: 428836 - DNA, 75 bp, synthetic construct
  source 1..75: mol_type = other DNA
gtggttatataggtgtccacacaatttatacgttaatttctcagggctacgatgttattgtactggataacctga

SEQ ID NO: 428837 - DNA, 75 bp, synthetic construct
  source 1..75: mol_type = other DNA
tggtataaagccaaaggaatgacatcagtaattgttcatagtgaaatggatcaaaacgacctttctgatgctcta

SEQ ID NO: 428838 - DNA, 75 bp, synthetic construct
  source 1..75: mol_type = other DNA
tatcgttctgctaagtgacgcgcgtaaggtcacagtacagcaggtactggtgaaaggcgaaccgattgacgcaca

SEQ ID NO: 428839 - DNA, 75 bp, synthetic construct
  source 1..75: mol_type = other DNA
cctcgaacagatgctcacctggcgggatcatccgcaggttaccggtctggccgagatgatggactatccaggcgt

SEQ ID NO: 428840 - DNA, 75 bp, synthetic construct
  source 1..75: mol_type = other DNA
gatcaatggcggagaaatttccggcccgatagtgattaaagggcgttacattgccggtgttggcgcagaatacgc

SEQ ID NO: 428841 - DNA, 75 bp, synthetic construct
  source 1..75: mol_type = other DNA
tacaaagccgtaaactgtcaaaaattcgtccagggcagtggattgctatctacggtcttggcggtctgggtaacc

SEQ ID NO: 428842 - DNA, 75 bp, synthetic construct
  source 1..75: mol_type = other DNA
gattacgcggtaaaagtgccagatggtctggactcggcggcggccagcagcattacctgtgcgggggtcaccacc

SEQ ID NO: 428843 - DNA, 75 bp, synthetic construct
  source 1..75: mol_type = other DNA
ccaattgtgattaaaggacgttacattgccggtgttggcgcagaatatgctgacgctccggctttgcagcggatt

SEQ ID NO: 428844 - DNA, 75 bp, synthetic construct
  source 1..75: mol_type = other DNA
gaataacgttgtcagtggaagtatgaggttttcagctcctgctattgtctgtgagtttcttgctaacgagtggat

SEQ ID NO: 428845 - DNA, 75 bp, synthetic construct
  source 1..75: mol_type = other DNA
gcatgcgagactgggttgtgttcataaaagttgctgaagttggcaatctttccaaagctgcgcaggagttaaata

SEQ ID NO: 428846 - DNA, 75 bp, synthetic construct
  source 1..75: mol_type = other DNA
atgtttaaacagaacgaaaaggctatttcacagattgcggaatatatcccgcgcgcctgccggggtatgcagctg

SEQ ID NO: 428847 - DNA, 75 bp, synthetic construct
  source 1..75: mol_type = other DNA
ccagtgatccccgcgctgaaactaaccagtcaggggctgtttgatggcgagaagtttgccttcactacgctggaa

SEQ ID NO: 428848 - DNA, 75 bp, synthetic construct
  source 1..75: mol_type = other DNA
caatttacgcccggaaaacgctatcgggtcattgacgtcatccataacgaattgattacgcactcccactccagc

SEQ ID NO: 428849 - DNA, 75 bp, synthetic construct
  source 1..75: mol_type = other DNA
aattagcgggcagaatgcgctgctcgataaactggatgcatttcgccacctgacgctggacggtcactgcccggg

SEQ ID NO: 428850 - DNA, 75 bp, synthetic construct
  source 1..75: mol_type = other DNA
cggcacaacacctgatttgttcaacaaaagtgacattatttgctctggtggatggtctgcaatatgagcggtatt

SEQ ID NO: 428851 - DNA, 75 bp, synthetic construct
  source 1..75: mol_type = other DNA
ctgccgcagcagaacaaaaaattcccggtaactgttatccggtagataaagctactcacactaataataacgaaa

SEQ ID NO: 428852 - DNA, 75 bp, synthetic construct
  source 1..75: mol_type = other DNA
gccgggcgcaattaacataaataaggacagaaaaacaggcgaagccagtagtacggattatgggttgatgcaaat

SEQ ID NO: 428853 - DNA, 75 bp, synthetic construct
  source 1..75: mol_type = other DNA
catgatgctaatgataatgactactttttagtaatgaatccagatgtatttattgaatgtgatgaattattgaaa

SEQ ID NO: 428854 - DNA, 75 bp, synthetic construct
  source 1..75: mol_type = other DNA
cctccgttccatgatgtaaacgtgacacagcttattgttattgattattattatcatgctgtggttatgttgtca

SEQ ID NO: 428855 - DNA, 75 bp, synthetic construct
  source 1..75: mol_type = other DNA
atgagtgttacagtaccggataaagattggactctgagttcattatctgaaacttttgatgatggaactcaaaca

SEQ ID NO: 428856 - DNA, 75 bp, synthetic construct
  source 1..75: mol_type = other DNA
gacagacatgaaacaagagagcaatatgctaataaagtatggagaatttatcgtgacatgaaagggatatgcctt

SEQ ID NO: 428857 - DNA, 75 bp, synthetic construct
  source 1..75: mol_type = other DNA
tcccgctcaccttgagcattggcatcagctacgacgagggtaaaaaccgcgattacttgctctccactgctcaca

SEQ ID NO: 428858 - DNA, 75 bp, synthetic construct
  source 1..75: mol_type = other DNA
gctcgcttgggtgaacctttccatgatgccatcctacaaatgctggattttgaagaacgcggtgttgctagcgcg

SEQ ID NO: 428859 - DNA, 75 bp, synthetic construct
  source 1..75: mol_type = other DNA
ttgtgctgggattacctcttcgctgtcgtccagtattgaactcgaaccttaccagttggccgtcgcgcgtcgggt

SEQ ID NO: 428860 - DNA, 75 bp, synthetic construct
  source 1..75: mol_type = other DNA
ctgttataaacgaggtggcgacttagtgcgtgggctgagttgctattattccggcaatccagaaacaggagtaaa

SEQ ID NO: 428861 - DNA, 75 bp, synthetic construct
  source 1..75: mol_type = other DNA
cgcttgctttgcaatgcgcggccagcgttcatcccgatactgcgcacgaagttgcaagggttgaatctggtttta

SEQ ID NO: 428862 - DNA, 75 bp, synthetic construct
  source 1..75: mol_type = other DNA
caaaattgataaaagttttgtcgatcgttgtctgaccgaaaaacgcatccttgccttactcgaagccattaccag

SEQ ID NO: 428863 - DNA, 75 bp, synthetic construct
  source 1..75: mol_type = other DNA
atgcaaattcgtgactacatgacaaagttgtttgaagcatttggtgatgtagaagaagtcacccgagaaatgctt

SEQ ID NO: 428864 - DNA, 75 bp, synthetic construct
  source 1..75: mol_type = other DNA
caacatcctttcacatggatggtgctgtaattttgacaatgcctctggttgccagatacctacctccggttgaac

SEQ ID NO: 428865 - DNA, 75 bp, synthetic construct
  source 1..75: mol_type = other DNA
cacggcatgatggccgagatcggattgaaacatcaggttgatgcctggtatgcagatatggacgaaacacggctc

SEQ ID NO: 428866 - DNA, 75 bp, synthetic construct
  source 1..75: mol_type = other DNA
ccttccgcagccgcctactgccgtcttctgtcatagcgatgtgatggcgctcggcgcactttcacaggccaaacg

SEQ ID NO: 428867 - DNA, 75 bp, synthetic construct
  source 1..75: mol_type = other DNA
atggatgtagtacgcctgacgtgccaggcgaggagtgagtgtgaaagcgaagaagcaggaaactgccgcgaccat

SEQ ID NO: 428868 - DNA, 75 bp, synthetic construct
  source 1..75: mol_type = other DNA
tatgaaattggtcgggaggctatgctgttattgcttgatcaaatgcaaggacaaatagtcggcagtggatcacgt

SEQ ID NO: 428869 - DNA, 75 bp, synthetic construct
  source 1..75: mol_type = other DNA
tgacctgctggttgcccgaatcaaaggtcagccggatttaccggtgacggcagaagttcgcgcagacagcgggga

SEQ ID NO: 428870 - DNA, 75 bp, synthetic construct
  source 1..75: mol_type = other DNA
tatagctacgttgacgaaaacggcgaaactaaaacctggactggccaaggccgtactccagctgtaatcaaaaaa

SEQ ID NO: 428871 - DNA, 75 bp, synthetic construct
  source 1..75: mol_type = other DNA
tggatgtggaaaccatctacaccctgtcatacctgcgttattccctgcgcacctttatcacgcagcgtttcccgc

SEQ ID NO: 428872 - DNA, 75 bp, synthetic construct
  source 1..75: mol_type = other DNA
ggaggaagtcacccgagaaatgcttctggagcaggcggagctcattcatacgatcagcgataagtgtcagagcac

SEQ ID NO: 428873 - DNA, 75 bp, synthetic construct
  source 1..75: mol_type = other DNA
ctgcgttagttgctggtatacccttaatgttgttattgttcacggcttttttcgctgttctgacaggcttccccg

SEQ ID NO: 428874 - DNA, 75 bp, synthetic construct
  source 1..75: mol_type = other DNA
ttcagtgcttatgcaggtcaggtagcagataacgccagcggactcaagggaagtatgggaattaatgcccgtttt

SEQ ID NO: 428875 - DNA, 75 bp, synthetic construct
  source 1..75: mol_type = other DNA
aacaagttgtttataaaaccataaaaagaggctcggttgataagataataaaattcttggatgctcatctttcac

SEQ ID NO: 428876 - DNA, 75 bp, synthetic construct
  source 1..75: mol_type = other DNA
gttatctcggatggaagtaagcgcatagcagagttgcagacaaaatctgcaccagattcgtttggcatcatcggt

SEQ ID NO: 428877 - DNA, 75 bp, synthetic construct
  source 1..75: mol_type = other DNA
tattgaaacggggcataatcatcacccctggctggtacatgcgccaacaatgcgtgttccgctgacaattgacgg

SEQ ID NO: 428878 - DNA, 75 bp, synthetic construct
  source 1..75: mol_type = other DNA
tagtgtcaggaagtctcatcgctgtagtaagtaccagtgtatttgctacagataccggagtggttaactttaacg

SEQ ID NO: 428879 - DNA, 75 bp, synthetic construct
  source 1..75: mol_type = other DNA
aggtgattttcgaagtatgagtttagaagagatggagcgacgagcgatattatatgcggttgatagcatcaaatc

SEQ ID NO: 428880 - DNA, 75 bp, synthetic construct
  source 1..75: mol_type = other DNA
catcggcgaaagagccttgggtgttagccagcaatttaccaccagaatctcggagcccaaagcagctggtaaacc

SEQ ID NO: 428881 - DNA, 75 bp, synthetic construct
  source 1..75: mol_type = other DNA
tgcccgaaggccctttctcatgcgaacaggctgttgccgtcaaaacagcttaccgcaatgtgtttactgaagatg

SEQ ID NO: 428882 - DNA, 75 bp, synthetic construct
  source 1..75: mol_type = other DNA
accagggtactcatttccggcgggttatccgcaacgcagagactgacgccggaaggttcgccagtgacggtcttc

SEQ ID NO: 428883 - DNA, 75 bp, synthetic construct
  source 1..75: mol_type = other DNA
aacaagttgtttataaaaccataaaaagaggagcggttgataagataataaagtttttggatgctcatctttcac

SEQ ID NO: 428884 - DNA, 75 bp, synthetic construct
  source 1..75: mol_type = other DNA
tagtgtcaggaagtttcatagcagcagtaagtacaagtgtatttgctgcagatactggagtggttaactttaacg

SEQ ID NO: 428885 - DNA, 75 bp, synthetic construct
  source 1..75: mol_type = other DNA
ggcaataaccctcttatatggagtgtaaatgttacaggtacgcttgcttttgccaaaagaatgacaaaagttaca

SEQ ID NO: 428886 - DNA, 75 bp, synthetic construct
  source 1..75: mol_type = other DNA
taacaagtacattactaaccatgtcaccactgttaatgcttaatggagcagttaaaacaggtagcatagtaagaa

SEQ ID NO: 428887 - DNA, 75 bp, synthetic construct
  source 1..75: mol_type = other DNA
tgatttacgggtgaactattatgacggtgaaactacaccggccggtcttacgctggagctcgtcgcgccaacaca

SEQ ID NO: 428888 - DNA, 75 bp, synthetic construct
  source 1..75: mol_type = other DNA
tgcgtgaggcggcagaagcaataaaagtcgtggcaacgccgcaaaaattgcttgcgtttcgtatgaaggtcacac

SEQ ID NO: 428889 - DNA, 75 bp, synthetic construct
  source 1..75: mol_type = other DNA
gggcggttacagtgacaaacaggctgtggccgtgggggctggctaccgcttcaacgacaccgtggccgccaaagc

SEQ ID NO: 428890 - DNA, 75 bp, synthetic construct
  source 1..75: mol_type = other DNA
aagcctgttgttgttgatatgaggtacttaaaaagcgcttttatgacaagctcgcgcctaatttctttgcgggcg

SEQ ID NO: 428891 - DNA, 75 bp, synthetic construct
  source 1..75: mol_type = other DNA
cccacccaaagttgtgctggctctactggatgaaattaagcgcctggaggacacaaatattgatgctatgtgtcg

SEQ ID NO: 428892 - DNA, 75 bp, synthetic construct
  source 1..75: mol_type = other DNA
agatgaatgggtagcatatattttgccggggcaaaacggcacttatcctgcgcatacgtctgagggtaggcattg

SEQ ID NO: 428893 - DNA, 75 bp, synthetic construct
  source 1..75: mol_type = other DNA
caacccaaaggttgcactggcgctacttggtgaaattaagcgcctggaggacacaaatattgatgctatgtgccg

SEQ ID NO: 428894 - DNA, 75 bp, synthetic construct
  source 1..75: mol_type = other DNA
aggcgagcttatcggctggcgcaatgtctttaatgcggcggcagtgatgggcgttctgtgtattttctggattat

SEQ ID NO: 428895 - DNA, 75 bp, synthetic construct
  source 1..75: mol_type = other DNA
gggttggctcgattctgagcggtatggcagtggattacttctcggtggatggcgtaaaagattggcataccattt

SEQ ID NO: 428896 - DNA, 75 bp, synthetic construct
  source 1..75: mol_type = other DNA
gtttgcaggatatgctctttttctcgcagtgatatttttctttgggtttaaatataatcatgaccctgaaaagat

SEQ ID NO: 428897 - DNA, 75 bp, synthetic construct
  source 1..75: mol_type = other DNA
cctgctgaatgtgattggctccaacaccattgctatctataccacccatcgcattctggtagaaatattcagctt

SEQ ID NO: 428898 - DNA, 75 bp, synthetic construct
  source 1..75: mol_type = other DNA
tgagtgcgttggtgctgacgttgtggggaagcgataaaatcgttgcgaccggcgtggcgattatctgggggctga

SEQ ID NO: 428899 - DNA, 75 bp, synthetic construct
  source 1..75: mol_type = other DNA
gtctgacttcgccgctgatgttgtccggcacattgatgttgctgactgcattgttggtgactgcaaaggtgaaaa

SEQ ID NO: 428900 - DNA, 75 bp, synthetic construct
  source 1..75: mol_type = other DNA
tccaaaccccagctaccgacgctttcctggctgaagtacgtgcggaagcacgcaacgaggggattaactataccg

SEQ ID NO: 428901 - DNA, 75 bp, synthetic construct
  source 1..75: mol_type = other DNA
gaccgcgccgctggagcaggtgcagatagaccatacggtcatcgacctgatcgtggtcgatgaccgcgaccggca

SEQ ID NO: 428902 - DNA, 75 bp, synthetic construct
  source 1..75: mol_type = other DNA
tcgcatccatttattttcctaacaaggttcgcgggtcggtcgtgggaatatttgtgttgggggtgccgctggcgt

SEQ ID NO: 428903 - DNA, 75 bp, synthetic construct
  source 1..75: mol_type = other DNA
atcacgtttacagatgacactcaacttgccatctcaacaggttcaaacgttgtaaacataacgtcgttaattggg

SEQ ID NO: 428904 - DNA, 75 bp, synthetic construct
  source 1..75: mol_type = other DNA
acgagcctcgtaagcctaaacccggtttaacgcgcattaagcgtaatctctatcgccgtggcatacttagccgca

SEQ ID NO: 428905 - DNA, 75 bp, synthetic construct
  source 1..75: mol_type = other DNA
tccgattgtcgcgttagaccgcgccctcgatcgtgaacacttcaccagtgtcgtaggtgctgaccaggacgatgc

SEQ ID NO: 428906 - DNA, 75 bp, synthetic construct
  source 1..75: mol_type = other DNA
tcgccatcgacgtgttcacccgctgcgtgctcggcatggtcgtcacgctggaagcgccgtctgccccgatttatt

SEQ ID NO: 428907 - DNA, 75 bp, synthetic construct
  source 1..75: mol_type = other DNA
atggcgcttaaaaatggcggtaatggcggtgctatcgtcaacgtctcttcagtggcctcacggctgggatctccg

SEQ ID NO: 428908 - DNA, 75 bp, synthetic construct
  source 1..75: mol_type = other DNA
gcggcgctatcgtcaatgtctcttcggtggcctcacggttgggttcgccaggggaatatgttgattacgcggcat

SEQ ID NO: 428909 - DNA, 75 bp, synthetic construct
  source 1..75: mol_type = other DNA
atggaatttaaaggtactgaaggtaagtgggaaataatgatggatggcgatgagattaaaatcatccaggcagac

SEQ ID NO: 428910 - DNA, 75 bp, synthetic construct
  source 1..75: mol_type = other DNA
agcgtggtggacaggcagaagaggtcgcgcaggccattgtctggctactaagtgataaagcctcttacgtcacgg

SEQ ID NO: 428911 - DNA, 75 bp, synthetic construct
  source 1..75: mol_type = other DNA
ccaccaatgtgacgggatattttctctgctgccgcgaggcggtaaaacgcatggcgcttaaaaacggcggtagcg

SEQ ID NO: 428912 - DNA, 75 bp, synthetic construct
  source 1..75: mol_type = other DNA
gctggaagtcgccgcgcaggggatccgcgttaactgcgtgcggccagggtttatttataccgaaatgcacgccag

SEQ ID NO: 428913 - DNA, 75 bp, synthetic construct
  source 1..75: mol_type = other DNA
gaatgctcccccttcttagggcgaataatatccaatctgaaattttacttgagccgattgtctatgttgatgaag

SEQ ID NO: 428914 - DNA, 75 bp, synthetic construct
  source 1..75: mol_type = other DNA
tagcgaggaagagaagccgtttgaattgccgcagggatgggagtgggtgcgattgggggatattgcagaaattat

SEQ ID NO: 428915 - DNA, 75 bp, synthetic construct
  source 1..75: mol_type = other DNA
ttaagtcaaagtaaattatggaataaaggtactctttgtattacgattgctgcaaatattgcagactctggtatt

SEQ ID NO: 428916 - DNA, 75 bp, synthetic construct
  source 1..75: mol_type = other DNA
ccagtctggacgcacatcagcaactggttgaaaccctgttgggaacgctgactgacagccaaaacgccgaggaac

SEQ ID NO: 428917 - DNA, 75 bp, synthetic construct
  source 1..75: mol_type = other DNA
gaatgacgaaccagcctctgaactgctcaaacgaattgcgcaggaaaaagctcaactggtgaaagaagggacaat

SEQ ID NO: 428918 - DNA, 75 bp, synthetic construct
  source 1..75: mol_type = other DNA
atgtctagtggttcggagtcacttgttggaaaggccgctcaattttttgagaatggaaattacacattcggtgct

SEQ ID NO: 428919 - DNA, 75 bp, synthetic construct
  source 1..75: mol_type = other DNA
cccaacctatcagcaaatagtgtaatgttgtattcattcccatgcccaccattaactgaacaatatagaatattt

SEQ ID NO: 428920 - DNA, 75 bp, synthetic construct
  source 1..75: mol_type = other DNA
acatctggaacaatgccgaaaattagcaaaaaaattgtcgaagaaataccaattattgttccagaaatttctatt

SEQ ID NO: 428921 - DNA, 75 bp, synthetic construct
  source 1..75: mol_type = other DNA
gttttgtaaagcgagatgatcaatacctccaagaacacgatatagtcatgtctatggcaaatagtcgtgaattgg

SEQ ID NO: 428922 - DNA, 75 bp, synthetic construct
  source 1..75: mol_type = other DNA
atcagtaagggtagggattttacagtactgtgaaaaatctcataatttttatgaaatctccgtactcactatggg

SEQ ID NO: 428923 - DNA, 75 bp, synthetic construct
  source 1..75: mol_type = other DNA
taaagtattaaatagctgcttatttgcattaccccccattgcagaacaagagcgaatagttgaaaaagttagctc

SEQ ID NO: 428924 - DNA, 75 bp, synthetic construct
  source 1..75: mol_type = other DNA
agatgcagaacgaattcctttatcttcggacgagcgaatgaatagaaagggagatttcgattattatggtgcatc

SEQ ID NO: 428925 - DNA, 75 bp, synthetic construct
  source 1..75: mol_type = other DNA
ccggcaaaacctccgttaaagagatgacggcggcaattttaagccagtgcggcaacacactttatacggcaggca

SEQ ID NO: 428926 - DNA, 75 bp, synthetic construct
  source 1..75: mol_type = other DNA
cagtatgtctggtcgtctgttgcgccggtgggggaaagagaagaagccacagctactttcacgcattgagcaact

SEQ ID NO: 428927 - DNA, 75 bp, synthetic construct
  source 1..75: mol_type = other DNA
actccctgcatcctaaaatgagattattacagagtagaattaataaacgtatctttaaggaattggttgtttttc

SEQ ID NO: 428928 - DNA, 75 bp, synthetic construct
  source 1..75: mol_type = other DNA
aaatagctggagatgcccagctttctactccctgtactgacagcatcataaacagtattgcatcaggcgttttca

SEQ ID NO: 428929 - DNA, 75 bp, synthetic construct
  source 1..75: mol_type = other DNA
ggctggtatttgccacgtatgcgttagccctggcggtgatctttgctctgtttttccgttatcagcatgaacctg

SEQ ID NO: 428930 - DNA, 75 bp, synthetic construct
  source 1..75: mol_type = other DNA
catgaggatttattttgctgctgctgtcgatgattgtttatggctgtgcattcgatttcttcaatatttctggtt

SEQ ID NO: 428931 - DNA, 75 bp, synthetic construct
  source 1..75: mol_type = other DNA
ctcgcgtacttgagaaagtcggttttaccgtcgatgtggtaacccagaaagcatacggttaccgccgtggggaac

SEQ ID NO: 428932 - DNA, 75 bp, synthetic construct
  source 1..75: mol_type = other DNA
catgattttgccgaccaggcgaaagctggaggggcgggcgcgctgctggttagccgtccgctggatatcgacctg

SEQ ID NO: 428933 - DNA, 75 bp, synthetic construct
  source 1..75: mol_type = other DNA
cgaatgcattggctgctgcggcgctctccatgtccgtgggcgcaacgcttgatgccatcaaagcggggctggcaa

SEQ ID NO: 428934 - DNA, 75 bp, synthetic construct
  source 1..75: mol_type = other DNA
tgccgccaacagcgatttcaccgccaccaatatccatgtgacttcgcacggtacggaatttaccctacaaacccc

SEQ ID NO: 428935 - DNA, 75 bp, synthetic construct
  source 1..75: mol_type = other DNA
gccaccgatgcttttctggctgaagtacgtgcgcagggcgtggatatggctcgtaacgcgatgattgattttgtt

SEQ ID NO: 428936 - DNA, 75 bp, synthetic construct
  source 1..75: mol_type = other DNA
atgtatggggctacaataggcaaaacatcaatactgaactctcgttcaacaactaatcaagccgtctgcgcttgt

SEQ ID NO: 428937 - DNA, 75 bp, synthetic construct
  source 1..75: mol_type = other DNA
catatgactaaagaaaaaatggaacaacagataatcgctttaccgcctataaatgaacaacaacaaattgtcaga

SEQ ID NO: 428938 - DNA, 75 bp, synthetic construct
  source 1..75: mol_type = other DNA
cttagaacatatctttcatttgggccaaaaaatggactttctcctgttgaatccaaaaaagaaacacaattaaaa

SEQ ID NO: 428939 - DNA, 75 bp, synthetic construct
  source 1..75: mol_type = other DNA
ttgatgatagagaacaatgcagggtctacgaactggaggaacgcgttaaggaactggatgctcgggaaatatcgc

SEQ ID NO: 428940 - DNA, 75 bp, synthetic construct
  source 1..75: mol_type = other DNA
ctcaggttgtgctggcactgctggatgaacaggaaagaaaccagcaatacattaaacagcgcgaccaggagaacg

SEQ ID NO: 428941 - DNA, 75 bp, synthetic construct
  source 1..75: mol_type = other DNA
ccctgcttggcggacgcttaaaacaacgcgaggctccgtggcattcgttgtttgacgccctgctgcaactggcgg

SEQ ID NO: 428942 - DNA, 75 bp, synthetic construct
  source 1..75: mol_type = other DNA
aattataataatatttgaaaatatttttgcaaatactttaaaaataggaacaaaaaaatatgattttgaaacgga

SEQ ID NO: 428943 - DNA, 75 bp, synthetic construct
  source 1..75: mol_type = other DNA
cccggtatctaaggcgtacctgttctctgccttatatggcaccaacgacatcttctcccgtaacacagccaaatc

SEQ ID NO: 428944 - DNA, 75 bp, synthetic construct
  source 1..75: mol_type = other DNA
aaggacggtgacggtgagttttcatgtgagcgttacgatcatgattttggcggttgggtagaaagcgaatgtctt

SEQ ID NO: 428945 - DNA, 75 bp, synthetic construct
  source 1..75: mol_type = other DNA
aaacgccgtgaccaggagaacgaggatattgctcttacggttgggaagctgagagttgagcttgaggaagtaaaa

SEQ ID NO: 428946 - DNA, 75 bp, synthetic construct
  source 1..75: mol_type = other DNA
agggaactgcccgattatctaccgctgtatctggagtatttaagcgtacttccggacgatcaggcgaaagaagga

SEQ ID NO: 428947 - DNA, 75 bp, synthetic construct
  source 1..75: mol_type = other DNA
cgatgcttacggattttacccgcaacctgcttaacgcgccgctgctggataaacaggccgaatggtgcgaagtgt

SEQ ID NO: 428948 - DNA, 75 bp, synthetic construct
  source 1..75: mol_type = other DNA
tgttgatggagtatccggacgagctgctatgggagaacaaagacgacgcgctggcgctgattcgccacgacgcgc

SEQ ID NO: 428949 - DNA, 75 bp, synthetic construct
  source 1..75: mol_type = other DNA
aaaagtcggtctgcaactggattgtcgggagctacctgattatctgccgctgtatctggagtatttaagcgtact

SEQ ID NO: 428950 - DNA, 75 bp, synthetic construct
  source 1..75: mol_type = other DNA
tggaagaagcactacgcgacaagcaggcgttacttgaagcctcagaaaagcgcatagcagaacaaagctcgattg

SEQ ID NO: 428951 - DNA, 75 bp, synthetic construct
  source 1..75: mol_type = other DNA
acaagttccggtaactccggatggttggataagctgtagtgagcaaatgcccgctcaagatgattggattttaat

SEQ ID NO: 428952 - DNA, 75 bp, synthetic construct
  source 1..75: mol_type = other DNA
atgcctttaaaagtgaagatttcaataaatcggctggaacgaaatgtataaaaataaccaatgtgggtgtacacg

SEQ ID NO: 428953 - DNA, 75 bp, synthetic construct
  source 1..75: mol_type = other DNA
tagcgaggaagagaagctatttgaattgccggagggatgggagtgggtgcgatttggtaatatctatgaaatgga

SEQ ID NO: 428954 - DNA, 75 bp, synthetic construct
  source 1..75: mol_type = other DNA
ggtgtcgtattgatgacttaacgtttgtttctggaggaatacaaaaacaaccgaaaagacgacctgttaaaaacc

SEQ ID NO: 428955 - DNA, 75 bp, synthetic construct
  source 1..75: mol_type = other DNA
gatgccccatcgcgagcgagaaaaattgttcagcaagggactatcatatactctactgttcgcccgtatttgtta

SEQ ID NO: 428956 - DNA, 75 bp, synthetic construct
  source 1..75: mol_type = other DNA
ttattttgtcttagaggttctctaggaaaatcagcaattgtacaaaacctatcaggagcaattgcttcatcacta

SEQ ID NO: 428957 - DNA, 75 bp, synthetic construct
  source 1..75: mol_type = other DNA
ctctgtgaccaactggaacaacaatccctgaccagtctggacgcacatcagcaactggttgaaaccctgttggga

SEQ ID NO: 428958 - DNA, 75 bp, synthetic construct
  source 1..75: mol_type = other DNA
tggcgtaacagccatttccacaacgggaatgattcgctgacgtttgtacaaggtgtgatgcggcacgatgcgtta

SEQ ID NO: 428959 - DNA, 75 bp, synthetic construct
  source 1..75: mol_type = other DNA
aatgaaacatttaaatactatacgacagcgacatttatcgcttcagtcgtcgctctggcgggcacattcctgctg

SEQ ID NO: 428960 - DNA, 75 bp, synthetic construct
  source 1..75: mol_type = other DNA
gaaaggtgactggcgaatgaaatgggcgacttacatcccgggtcatcctgacgctaatgatgggtggataattcc

SEQ ID NO: 428961 - DNA, 75 bp, synthetic construct
  source 1..75: mol_type = other DNA
ccaaggccacaactagaagtaaaagcaggagatattcttataacaagagctggtcctaaaaatcgggttggtatt

SEQ ID NO: 428962 - DNA, 75 bp, synthetic construct
  source 1..75: mol_type = other DNA
tttttttgaaaataatcctattcccttccctccattgcaagaacaagagcgcattattattaggtttactcagtt

SEQ ID NO: 428963 - DNA, 75 bp, synthetic construct
  source 1..75: mol_type = other DNA
cttatgcgtatgctgaaaaaattgctactggtatagctcaaaaaactgtacctttaaccggtcttcgcctaatgc

SEQ ID NO: 428964 - DNA, 75 bp, synthetic construct
  source 1..75: mol_type = other DNA
gttaaatgaaaatctgctggattccgaactgtttggtcacgaagctggcgcgtttaccggtgcgcaaaaacgtca

SEQ ID NO: 428965 - DNA, 75 bp, synthetic construct
  source 1..75: mol_type = other DNA
gtacttttcgcgctgacctgctcgaccgcctggctttcgatgtagtgcaactgccgcccctgcgcgagcgcgaaa

SEQ ID NO: 428966 - DNA, 75 bp, synthetic construct
  source 1..75: mol_type = other DNA
aaccagaaacgcgcggctgaattgctggggttaacctatcatcagttccgcgcgttgctgaaaaagcatcaaatt

SEQ ID NO: 428967 - DNA, 75 bp, synthetic construct
  source 1..75: mol_type = other DNA
atggcagaatacaaagataacttactcggtgaggcgaacagctttcttgaagtgctggaacaggtttcgcatctc

SEQ ID NO: 428968 - DNA, 75 bp, synthetic construct
  source 1..75: mol_type = other DNA
aaccagaagcgcgcagctgaattgctggggttaacctatcatcagttccgcgcgttgttgaaaaagcaccagatt

SEQ ID NO: 428969 - DNA, 75 bp, synthetic construct
  source 1..75: mol_type = other DNA
ctgccaccactgcgcgagcgcgaaagcgacattatgttgatggcagaacactttgccatccagatgtgtcgggaa

SEQ ID NO: 428970 - DNA, 75 bp, synthetic construct
  source 1..75: mol_type = other DNA
ttggaaagagaaattattgatagatgctttagatctagcattgatgatgttcttgaaaaatataaacttagccca

SEQ ID NO: 428971 - DNA, 75 bp, synthetic construct
  source 1..75: mol_type = other DNA
tgctcgtgatgtcaccgttactctgccggactaccctggttcagtgccaattcctcttaccgtttattgtgcgaa

SEQ ID NO: 428972 - DNA, 75 bp, synthetic construct
  source 1..75: mol_type = other DNA
aatgtattggcaggatgcgccagttgaaggcagcagcaaagcggctgcatacgctacaggctggagcgattgccg

SEQ ID NO: 428973 - DNA, 75 bp, synthetic construct
  source 1..75: mol_type = other DNA
gctgactttaaaaacaactacccaccaagcatccccaacactcaggtcggcgtatatggcgactggtttaatgat

SEQ ID NO: 428974 - DNA, 75 bp, synthetic construct
  source 1..75: mol_type = other DNA
tctcaagcagaagttagtggaatgcaatcgctataactactgcgcagatgcagttaaaggcgtagaggatgcctg

SEQ ID NO: 428975 - DNA, 75 bp, synthetic construct
  source 1..75: mol_type = other DNA
gtatcctgacgctaatgatggttggataattcctggtgcgtcgtggaaaccgtcacactggatgccgctaccaga

SEQ ID NO: 428976 - DNA, 75 bp, synthetic construct
  source 1..75: mol_type = other DNA
atggcagaatacaaagataacttacttggcgaagcaaaccgctttctcgaggtgttagaacaggtttcgcatctc

SEQ ID NO: 428977 - DNA, 75 bp, synthetic construct
  source 1..75: mol_type = other DNA
atctaaaaaggcaagataaccgcatcaagaatatccgcctgatgccgaaagagcagcatcgccggattcacagaa

SEQ ID NO: 428978 - DNA, 75 bp, synthetic construct
  source 1..75: mol_type = other DNA
tgagttaccagaaagcggcctatgtttattgctacggagcctatgatgaaacgatgttcgatgttcatcatatca

SEQ ID NO: 428979 - DNA, 75 bp, synthetic construct
  source 1..75: mol_type = other DNA
ttgacgataagccattcccgctcaccttgagcattggcatcagctacgacgtgggtaaaaaccgcgattacctgc

SEQ ID NO: 428980 - DNA, 75 bp, synthetic construct
  source 1..75: mol_type = other DNA
gcggctttcgcaccagctcttaactgtcatacgcgggaatcttttttttcgtgcatcgcagcgcagatccacaaa

SEQ ID NO: 428981 - DNA, 75 bp, synthetic construct
  source 1..75: mol_type = other DNA
taaaaaataatgagcttgaaatcatacttcctgaatggagggttccagacctccccatttatcttgtatggcgtc

SEQ ID NO: 428982 - DNA, 75 bp, synthetic construct
  source 1..75: mol_type = other DNA
tgagttaccagaaagcggcctatgtttactgttacggtgcttatgatgaaaccctgttcgatgttcatcatatca

SEQ ID NO: 428983 - DNA, 75 bp, synthetic construct
  source 1..75: mol_type = other DNA
ccaataattttcgggaaatcgcggaaacgtcaaccaactctccggtaattccggatggtttatccacggtatgcg

SEQ ID NO: 428984 - DNA, 75 bp, synthetic construct
  source 1..75: mol_type = other DNA
tgattaaagaaatcaaagagcgcatcggcagcctggacgttcgagacaatattgagcgccgtgcttatgaaattg

SEQ ID NO: 428985 - DNA, 75 bp, synthetic construct
  source 1..75: mol_type = other DNA
ttaccgagcgcgccagagaaacgttgctgaactatcgctggccgggaaatatccgtgaattgaaaaacgtggtgg

SEQ ID NO: 428986 - DNA, 75 bp, synthetic construct
  source 1..75: mol_type = other DNA
atgagtttagttatcgctgataagatctcttattcggttgatgatttattaaaaataaaatcattaatttggctg

SEQ ID NO: 428987 - DNA, 75 bp, synthetic construct
  source 1..75: mol_type = other DNA
atgaaaaaacctctcgtcacccgtaatgaaattgccgaagcgttcgctttgcatacaacctgtatgccgacacgg

SEQ ID NO: 428988 - DNA, 75 bp, synthetic construct
  source 1..75: mol_type = other DNA
tagattttgccgaccgggtatcagtggctaatggaatcctgatcgggaactttgcaaaggtcgttggacttaagc

SEQ ID NO: 428989 - DNA, 75 bp, synthetic construct
  source 1..75: mol_type = other DNA
agttccggtaattccggatggttggataagctgtagtgagcgaatgccgaacgacgcgcagtggtgcgtagtgaa

SEQ ID NO: 428990 - DNA, 75 bp, synthetic construct
  source 1..75: mol_type = other DNA
tgtgcataacagcggtcactggacacaaaacggtgccagcatcagccagtttgagctgcatctgcgggcgattac

SEQ ID NO: 428991 - DNA, 75 bp, synthetic construct
  source 1..75: mol_type = other DNA
ccagcgaacgcgtaatgaatgacgtgacgctgacttcccgcaacatggacaacaccgtggcgcacgcgggtaagt

SEQ ID NO: 428992 - DNA, 75 bp, synthetic construct
  source 1..75: mol_type = other DNA
ccattctgatggcggcgatgctgtccggttgtctgcaggccgggacactggatgatatccgtgcactggaagccg

SEQ ID NO: 428993 - DNA, 75 bp, synthetic construct
  source 1..75: mol_type = other DNA
ccgccacgctgggccgtatccgttacatcatcaaaaaccgtttctcgaaccgttatccgcgccacaagctggcgg

SEQ ID NO: 428994 - DNA, 75 bp, synthetic construct
  source 1..75: mol_type = other DNA
gccaaaaacgagcgtctaaaaaattcgaaccggaggctatcgagctgcctgactggttgccggaaacactctggc

SEQ ID NO: 428995 - DNA, 75 bp, synthetic construct
  source 1..75: mol_type = other DNA
cgggccaaaacgcagctatcgccgtgacgccgtggacgactaccgcagcgaaatggccgggctgatcaagcggta

SEQ ID NO: 428996 - DNA, 75 bp, synthetic construct
  source 1..75: mol_type = other DNA
gcggcacaccctgattttcagtcacgcgtcagcacacagattgcccggcaggtggcgcttgaccgcatcatgatc

SEQ ID NO: 428997 - DNA, 75 bp, synthetic construct
  source 1..75: mol_type = other DNA
ccaatgcggaattactcgccgggcagctcatcctgtcatcgcgcaccattggcgggctgggcgtgttccttgcgc

SEQ ID NO: 428998 - DNA, 75 bp, synthetic construct
  source 1..75: mol_type = other DNA
tgcatctttagtattagctgtctatgcgttaacgctgccgaaaataccggtggcggaacataaaacaagtacaac

SEQ ID NO: 428999 - DNA, 75 bp, synthetic construct
  source 1..75: mol_type = other DNA
gctcatcctgtcatcgcgcaccattggcgggctggatgtattccttgcgccgttcttcccggatgcaacgatgct

SEQ ID NO: 429000 - DNA, 75 bp, synthetic construct
  source 1..75: mol_type = other DNA
gatttaccgtagaaccctcggtgcagcagcgttttgaaaacgcagtaaaggagagcactgaatttacaaaaaaaa

SEQ ID NO: 429001 - DNA, 75 bp, synthetic construct
  source 1..75: mol_type = other DNA
gaaagcaccgaatttacaaaaagaattaacgtgatcggcgtgaccgaccagaaaggcgaaaaaatcctcctggac

SEQ ID NO: 429002 - DNA, 75 bp, synthetic construct
  source 1..75: mol_type = other DNA
cgcaatgactggctgattagctgtatcggcaccaacctgtcaccgcacccggcgtggatgtgggccgcgtcatac

SEQ ID NO: 429003 - DNA, 75 bp, synthetic construct
  source 1..75: mol_type = other DNA
gggagattatctaatcagtgccggaattagaaaaaacagccctgacggcagcattcacccggatggcctgacaaa

SEQ ID NO: 429004 - DNA, 75 bp, synthetic construct
  source 1..75: mol_type = other DNA
atggcttcaaactggataaagctcgaagttattacgccggataaaccggaaatattcaggattgctgagattctt

SEQ ID NO: 429005 - DNA, 75 bp, synthetic construct
  source 1..75: mol_type = other DNA
aaacgagcaggtggtgctgcaccagattgttgatcgccggacagcgtcgatgcgcagcgtggggatgctgacaaa

SEQ ID NO: 429006 - DNA, 75 bp, synthetic construct
  source 1..75: mol_type = other DNA
ggtatcggtgattgtctggatgaggctgagcaagagcttatcgttaccattaacaaatatgccagtcagttggca

SEQ ID NO: 429007 - DNA, 75 bp, synthetic construct
  source 1..75: mol_type = other DNA
taatcctcttagcatgtacgcggttgatgctgttgccgctattgcagaggtgagaggctggaatgcccgccgcgc

SEQ ID NO: 429008 - DNA, 75 bp, synthetic construct
  source 1..75: mol_type = other DNA
tacgtgcaatgctggtctgaaggtcaagggtggcttggtgatgatatcagcatccctgaatgcgatgtaatcaat

SEQ ID NO: 429009 - DNA, 75 bp, synthetic construct
  source 1..75: mol_type = other DNA
gattcgaacggagcagggcgctaacggggcgatacgggaactggaaaaattccgtcagcagggttttacacctga

SEQ ID NO: 429010 - DNA, 75 bp, synthetic construct
  source 1..75: mol_type = other DNA
acacggaaacctgggcaatgccggttgccgcgcctgaaggcgctgccgcaaaagccacgctgaccgtgctgggga

SEQ ID NO: 429011 - DNA, 75 bp, synthetic construct
  source 1..75: mol_type = other DNA
cctgaactttatctgccacccgaatctggtgaaccagctgcgtgtgctggcaggcctgattcagttcaaacttta

SEQ ID NO: 429012 - DNA, 75 bp, synthetic construct
  source 1..75: mol_type = other DNA
aaaaattccgccagcagggttttacacccgagcaggtgattcgacacagtatcgccaatgaataccagggcctgt

SEQ ID NO: 429013 - DNA, 75 bp, synthetic construct
  source 1..75: mol_type = other DNA
aagcgttaccagaggaagaggaagaggaagaggaagatataaatactgatctccccctaaatccccctcgccaaa

SEQ ID NO: 429014 - DNA, 75 bp, synthetic construct
  source 1..75: mol_type = other DNA
aagcgttaccagaggaagaggaagatataaatactgatctccccctaaatccccctcgccaaaaacgagcgtcta

SEQ ID NO: 429015 - DNA, 75 bp, synthetic construct
  source 1..75: mol_type = other DNA
gtaatgacacattacacacaatcaacacaaaaagcaaagccccgcactgtaggagcagtaacggggcttctaacc

SEQ ID NO: 429016 - DNA, 75 bp, synthetic construct
  source 1..75: mol_type = other DNA
gcagcaataaaaccgtgcccgttgagtataaaaacgcgacggtgattacgttgcagccgctggaaacgctggtgt

SEQ ID NO: 429017 - DNA, 75 bp, synthetic construct
  source 1..75: mol_type = other DNA
caggtctggagctacttcgcgaccggcacccagctgcaggagctgtatattaccccgtccatgctgaacaaggtg

SEQ ID NO: 429018 - DNA, 75 bp, synthetic construct
  source 1..75: mol_type = other DNA
aatataacttccagggtaacaactctgaaggcgctgacgctcaaactggtaacaaaacgcgtctgggcattcgcg

SEQ ID NO: 429019 - DNA, 75 bp, synthetic construct
  source 1..75: mol_type = other DNA
actggtaacaaaacgcgtctggcattcgcgggtcttaaatacgctgacgttggttctttcgattacggccgtaac

SEQ ID NO: 429020 - DNA, 75 bp, synthetic construct
  source 1..75: mol_type = other DNA
ggcgttgatctacaatctgacaaccaaattcaggggcagagtagtcttatgtcatggagctttctgttttttaaa

SEQ ID NO: 429021 - DNA, 75 bp, synthetic construct
  source 1..75: mol_type = other DNA
ttcataatggtttcacataatttgaattctctaaaagattactgcgatatggcttttgttttttatgatgagaat

SEQ ID NO: 429022 - DNA, 75 bp, synthetic construct
  source 1..75: mol_type = other DNA
ggttgtatatattaaaaaacataatgagataaaatattacaactcagtaaatgatgctttgtttgaatatgttga

SEQ ID NO: 429023 - DNA, 75 bp, synthetic construct
  source 1..75: mol_type = other DNA
tttttaatggtttcacatagtttgaattcattgaaagagttttgtgatgtggcgattgtgtttaaggatgataat

SEQ ID NO: 429024 - DNA, 75 bp, synthetic construct
  source 1..75: mol_type = other DNA
tcttcaggcatgcgttcacggcttggttttggcttaagtatggcttttaaatttgattactatcttgttgacgaa

SEQ ID NO: 429025 - DNA, 75 bp, synthetic construct
  source 1..75: mol_type = other DNA
gacgcgagaacgtaaaatttgttgcgcggttatatgcgaaaagtaatgaactacatgaaaagattgcatttgttg

SEQ ID NO: 429026 - DNA, 75 bp, synthetic construct
  source 1..75: mol_type = other DNA
gcttgcattccttaaaagagttttgtgatgttgctatatatttaggtagaaacaacatggtttactattttgatg

SEQ ID NO: 429027 - DNA, 75 bp, synthetic construct
  source 1..75: mol_type = other DNA
atgccacaattgatctttcagacgcatggggtgtgctgaaaaatatcattcatctggctatctgggttccctatt

SEQ ID NO: 429028 - DNA, 75 bp, synthetic construct
  source 1..75: mol_type = other DNA
aggcagcggtattctggctgtttatctgtgcggttttctgctgggtaatcggccgattcgcaaccgctacggcat

SEQ ID NO: 429029 - DNA, 75 bp, synthetic construct
  source 1..75: mol_type = other DNA
cggcaagggacttaacgaacgtgttggctcaacgctggagatagaatccggcagcaatgatccgatggccgtctt

SEQ ID NO: 429030 - DNA, 75 bp, synthetic construct
  source 1..75: mol_type = other DNA
aagtgcagcgtctcaatacccagctcgatcaatacaccgatctttcggatgagcagaaggcgcagatcacccaga

SEQ ID NO: 429031 - DNA, 75 bp, synthetic construct
  source 1..75: mol_type = other DNA
ccttcgcctacatggtaagtaacctggcgctggcgattattttgctcgacggcgggatgcgcactcaggccagtt

SEQ ID NO: 429032 - DNA, 75 bp, synthetic construct
  source 1..75: mol_type = other DNA
attgtccagcagttgttaggcgcggcaccggttgtcggtgaccaggtagagtttgccgggatgatctggacggtg

SEQ ID NO: 429033 - DNA, 75 bp, synthetic construct
  source 1..75: mol_type = other DNA
acccggaaaacccgtgggagcagtttgtttatcagttaagtgccgataaatggtgcgtgggtgcggcactgcgcg

SEQ ID NO: 429034 - DNA, 75 bp, synthetic construct
  source 1..75: mol_type = other DNA
atgttcagagacttaaaactcagctcgatcagtataccgatctatctgaagagcaaagacaacagatcgaaagga

SEQ ID NO: 429035 - DNA, 75 bp, synthetic construct
  source 1..75: mol_type = other DNA
attacaatacgcgtttcaagaccaatcaccgcataagtgaatttgactcttactatcaggacgtacaaaagcgta

SEQ ID NO: 429036 - DNA, 75 bp, synthetic construct
  source 1..75: mol_type = other DNA
gtctaccagttcgccagtgaagataacaaaaagattacccagctagaaattttcgccgacaaattcttagccaag

SEQ ID NO: 429037 - DNA, 75 bp, synthetic construct
  source 1..75: mol_type = other DNA
gcatcaacgatgccatcgagtacttcgaactgttcgcggagattcaaaaacaaaagaccgagcaagactcggagt

SEQ ID NO: 429038 - DNA, 75 bp, synthetic construct
  source 1..75: mol_type = other DNA
tcgtagattgcatccatcagaattgcggaaacggctacatctggcacaccacgggttcaggcaagacgctgacct

SEQ ID NO: 429039 - DNA, 75 bp, synthetic construct
  source 1..75: mol_type = other DNA
agctctctgagatcgccgccagacatgaccttgcaccagatgccctgcaagtttttgttgatgaaattctacgtc

SEQ ID NO: 429040 - DNA, 75 bp, synthetic construct
  source 1..75: mol_type = other DNA
taaagaaaggcataaagagtctagttttttaatggtttcacatagtttgaattcattgaaagagttttgtgatgt

SEQ ID NO: 429041 - DNA, 75 bp, synthetic construct
  source 1..75: mol_type = other DNA
atgcgtcagaaaacgataaaaataaaacttacgcctgcctgtcgccagagctggtggcgcagcttggttttaaag

SEQ ID NO: 429042 - DNA, 75 bp, synthetic construct
  source 1..75: mol_type = other DNA
tgccggtgtttctgtttacctgaactatacgcgccacacctactgggatcgtgatgaacagaccaactacaacgt

SEQ ID NO: 429043 - DNA, 75 bp, synthetic construct
  source 1..75: mol_type = other DNA
ttcggtgcgatggcctttgatatcacccactcgcatacccgacttgacgattcgaccgcttacggaaaaagcacg

SEQ ID NO: 429044 - DNA, 75 bp, synthetic construct
  source 1..75: mol_type = other DNA
gattggctaccgtcactttgccgtgatcagcgggcagaaagcgatggcggtactgcgcctgagcgacggcagcca

SEQ ID NO: 429045 - DNA, 75 bp, synthetic construct
  source 1..75: mol_type = other DNA
gctcgtcgatacacaatcggcgcagcgaagccacgtgtctctgtcatgagtaaacttgcgttggctcttggagta

SEQ ID NO: 429046 - DNA, 75 bp, synthetic construct
  source 1..75: mol_type = other DNA
ggacatggtgcgctccggcaacgataaagagatgtacacggttacctacaaccagaacttccgggatgccgcggt

SEQ ID NO: 429047 - DNA, 75 bp, synthetic construct
  source 1..75: mol_type = other DNA
atggacgttgagtacggtcagtacagcgtcgccctgctggttgaaggttttccgccttcacatgccgggaccatc

SEQ ID NO: 429048 - DNA, 75 bp, synthetic construct
  source 1..75: mol_type = other DNA
gcgccaacgtaggaatggttcagccacaaattgcctcagatggagaaaggttcattgtgggtgtgagagctaaat

SEQ ID NO: 429049 - DNA, 75 bp, synthetic construct
  source 1..75: mol_type = other DNA
gatagcatttgctcattatttattgttaatagtaatgtggcatcaatctccttggggaatgaatccttttcaaca

SEQ ID NO: 429050 - DNA, 75 bp, synthetic construct
  source 1..75: mol_type = other DNA
ctggccggggtaaaagcgggtgagcgtatgagtgtctcatggaatggggcgtcccactgtgagatcgccctgcca

SEQ ID NO: 429051 - DNA, 75 bp, synthetic construct
  source 1..75: mol_type = other DNA
gtacgctgcatgtgcgcattgaagagctgaacggccaggtgcaggagtatgacatcagcaccgcttccatgccgt

SEQ ID NO: 429052 - DNA, 75 bp, synthetic construct
  source 1..75: mol_type = other DNA
ccggtggaaatcaaaccggtgattcaggaacagacgcaacaggtcacgccgggtacaccgccagtcgctatctcc

SEQ ID NO: 429053 - DNA, 75 bp, synthetic construct
  source 1..75: mol_type = other DNA
tcatccctccggggaggccgactgcccggcagcacgaagagcatactaccggcgtgagcagatggttctgcgtct

SEQ ID NO: 429054 - DNA, 75 bp, synthetic construct
  source 1..75: mol_type = other DNA
tggtcgctctacggcggtgcgttagccgatgaaaactaccagtcggcggcgctgggcctcggtcgtgacctggcg

SEQ ID NO: 429055 - DNA, 75 bp, synthetic construct
  source 1..75: mol_type = other DNA
ccaggtgcccgcagggccattccgcattcaggatattggcgactccgtctctggcacgctgcatgtccgcattga

SEQ ID NO: 429056 - DNA, 75 bp, synthetic construct
  source 1..75: mol_type = other DNA
gaggggcaatacacatctgcgggggtctccttacagggcggtgtaacactgactgctcacggcggggcgttgcat

SEQ ID NO: 429057 - DNA, 75 bp, synthetic construct
  source 1..75: mol_type = other DNA
agctatatatcttaaagcatatgatgagataaaatattatgactctgtaatagatgctcttgatgaatattcttt

SEQ ID NO: 429058 - DNA, 75 bp, synthetic construct
  source 1..75: mol_type = other DNA
atgccagaacattcttttctccgtttacgggggctttcgtggtggattgctctggcaatttccgggagtccattt

SEQ ID NO: 429059 - DNA, 75 bp, synthetic construct
  source 1..75: mol_type = other DNA
tcactcactctcgtgttcaactcgacgataacagcgtgtatggcaacaaaacgctggacggcaactcttatcgcg

SEQ ID NO: 429060 - DNA, 75 bp, synthetic construct
  source 1..75: mol_type = other DNA
tttttgatggtttcacatagtttgaattcattgaaagagttttgtgatgtggcgctgttaataataaaccgcatt

SEQ ID NO: 429061 - DNA, 75 bp, synthetic construct
  source 1..75: mol_type = other DNA
ggcgattgtatttaaggatgataatgtggttagttttcatgaggatgttcaggaggggatagaggagtataaaaa

SEQ ID NO: 429062 - DNA, 75 bp, synthetic construct
  source 1..75: mol_type = other DNA
cacataacagtttataaagatgtaaagcatgcgatcgaaaattacatttttgatgaaagcattaataccatagtt

SEQ ID NO: 429063 - DNA, 75 bp, synthetic construct
  source 1..75: mol_type = other DNA
atcatatgcctgcttatcgccagagctggttgcccagtttggtctgaaggaagatattgcgaaaaatgtgcaatg

SEQ ID NO: 429064 - DNA, 75 bp, synthetic construct
  source 1..75: mol_type = other DNA
tttttaatggtttcacatagtttaaattcattgaataagttttgtgatatcgcatttgtaatttcagaaaatgga

SEQ ID NO: 429065 - DNA, 75 bp, synthetic construct
  source 1..75: mol_type = other DNA
ggcgattgtgtttaaggatgacaatgcggttagttttcatgaggatgttcaggagggtgttgctgagtatataac

SEQ ID NO: 429066 - DNA, 75 bp, synthetic construct
  source 1..75: mol_type = other DNA
gcggctttttctccggcggagaagcgtcatggggggtggcagatggctggtcgctctacggtggtgcgctggcag

SEQ ID NO: 429067 - DNA, 75 bp, synthetic construct
  source 1..75: mol_type = other DNA
cccgattctttagcgccggaaattaagcccgttattcaggaccagactcggcaggtcacgccatctgaagcgccg

SEQ ID NO: 429068 - DNA, 75 bp, synthetic construct
  source 1..75: mol_type = other DNA
cgtcgtgacggtaccgaataactttacgctccccgaaaacagtgagggcgtcattctgacagaaatttcaggtgg

SEQ ID NO: 429069 - DNA, 75 bp, synthetic construct
  source 1..75: mol_type = other DNA
cattcctcacgcgccaggggcaggtgcgttacaaagtgatgatggggcgtccggaagactggaaccacaagaccg

SEQ ID NO: 429070 - DNA, 75 bp, synthetic construct
  source 1..75: mol_type = other DNA
tgaccatgagcgagtatctggacgcgaaccagtcggacatggcgcggaccggtaacgacaaagagatgtatacga

SEQ ID NO: 429071 - DNA, 75 bp, synthetic construct
  source 1..75: mol_type = other DNA
ctcactcgcacgtcaacctggatcatgacagcgcatacggcaaaggaaaactggacggcaactcctttcgcgtga

SEQ ID NO: 429072 - DNA, 75 bp, synthetic construct
  source 1..75: mol_type = other DNA
atatgctgagagatatgtctatgaaagactcgatgtcaaataacgcaattatagagagtgctatccttaggttat

SEQ ID NO: 429073 - DNA, 75 bp, synthetic construct
  source 1..75: mol_type = other DNA
tcaccacagcgtgagggtggatgccatacgcaggtgtattgacaactggcctttcattttatacacaccatcaaa

SEQ ID NO: 429074 - DNA, 75 bp, synthetic construct
  source 1..75: mol_type = other DNA
atttattcaggggtttcaggaggtattacatatactatacaatatgttcgagatattgatattgttagagtgtcc

SEQ ID NO: 429075 - DNA, 75 bp, synthetic construct
  source 1..75: mol_type = other DNA
atggttaaggttgtggaagatgaaagaagcagaatacgatatcttgaaaggcgcttaaatgaaaatgggttttat

SEQ ID NO: 429076 - DNA, 75 bp, synthetic construct
  source 1..75: mol_type = other DNA
tgaacttttttctcaggcttataagttaaaaaataaggaaatgaatgcgcaactcgactatttaaatcgttatgc

SEQ ID NO: 429077 - DNA, 75 bp, synthetic construct
  source 1..75: mol_type = other DNA
ttaatgactggcctttatttttcaccacacaaaatgatttcatcaaagacagaggcattgaatgggctaaccttc

SEQ ID NO: 429078 - DNA, 75 bp, synthetic construct
  source 1..75: mol_type = other DNA
cgtgcagcaggcgtaccagacgctggaaacgatgaagctcatcactccgcagccgcgttcggggtattttgtcgc

SEQ ID NO: 429079 - DNA, 75 bp, synthetic construct
  source 1..75: mol_type = other DNA
aacaaatgtttctcgatttgttgttctgagagaggtaggaccaagagtgtctttggatactcttcgcaaattgcc

SEQ ID NO: 429080 - DNA, 75 bp, synthetic construct
  source 1..75: mol_type = other DNA
gtcgatttttttaaacgttacaacgacacttacgggcatcctgctggggatcgttgtctaatacaagttgccgac

SEQ ID NO: 429081 - DNA, 75 bp, synthetic construct
  source 1..75: mol_type = other DNA
acagatcaatattcattttgctgttgtatggtgtattttttcactggcgctatatggtgggcgactcattttgtt

SEQ ID NO: 429082 - DNA, 75 bp, synthetic construct
  source 1..75: mol_type = other DNA
ggaacggctgaatcccttgaactggggcggctggcgaatgtaaacccgcctgaactgctgcgctacgatgcccag

SEQ ID NO: 429083 - DNA, 75 bp, synthetic construct
  source 1..75: mol_type = other DNA
tgcgaagtggagtttcaggatgccattggctggttgttggggcaggaaggggaaggaattcgtctgatcctgaaa

SEQ ID NO: 429084 - DNA, 75 bp, synthetic construct
  source 1..75: mol_type = other DNA
actggcgatggtcgaacgcactgaacagggccgcgcaattcgccagtacttcatcaaatgtgaagaagagctaca

SEQ ID NO: 429085 - DNA, 75 bp, synthetic construct
  source 1..75: mol_type = other DNA
gctggagttcttcgcgtgcaacggtgataagctgcccgatttcctccgctgccttgatgccgatttgttcgacat

SEQ ID NO: 429086 - DNA, 75 bp, synthetic construct
  source 1..75: mol_type = other DNA
gtcaaccggtctgcagggcggcacctcctttatggaggactacacctatcacttcgagaaaggtaatgacctggt

SEQ ID NO: 429087 - DNA, 75 bp, synthetic construct
  source 1..75: mol_type = other DNA
gtggcggcaggctcgattttctcagcttccggcaaataccgtaattgtctgcgcatcaactgcgctttgccgctc

SEQ ID NO: 429088 - DNA, 75 bp, synthetic construct
  source 1..75: mol_type = other DNA
ggctggatcaaatgaacgaagatgaaatgagggtttataaggcaattgtggcacagtatcttgtgcagtttatgc

SEQ ID NO: 429089 - DNA, 75 bp, synthetic construct
  source 1..75: mol_type = other DNA
gaaaaagtgttggagataacgcaaaaattaagggaggaatacagggctatcacttataaccgttcggattgccgt

SEQ ID NO: 429090 - DNA, 75 bp, synthetic construct
  source 1..75: mol_type = other DNA
gtatgattttatagctgatggatttgagtcaatcatagaccgccttagtccttccgttttacctgttgttgttga

SEQ ID NO: 429091 - DNA, 75 bp, synthetic construct
  source 1..75: mol_type = other DNA
gatgaaatggatatcaagcgcattctaaaaacaaaggaagcacttgataacatcaggaattttattgataaatag

SEQ ID NO: 429092 - DNA, 75 bp, synthetic construct
  source 1..75: mol_type = other DNA
agagacagggaaacgggagggaagtctatgatgacgctggcgcagtggtttgaagagaaagggattgagaagggg

SEQ ID NO: 429093 - DNA, 75 bp, synthetic construct
  source 1..75: mol_type = other DNA
gggaaacgggaggggagtctatgatgacgctggcgcagtggtttgaagagaggggaagacaggaggaaaggcaag

SEQ ID NO: 429094 - DNA, 75 bp, synthetic construct
  source 1..75: mol_type = other DNA
gccgatactgttttatcagggcgaggccacaccttatccgctctcaatgtgctggtttgatatgttttactcgcc

SEQ ID NO: 429095 - DNA, 75 bp, synthetic construct
  source 1..75: mol_type = other DNA
tcctcaaaacaataaaatttattttgggacttgttataaaggaccttttattagccgtaagtctatcggtgaggt

SEQ ID NO: 429096 - DNA, 75 bp, synthetic construct
  source 1..75: mol_type = other DNA
catcaaagcaagccagataagaaaatggcttttcgcatgatgcgttattctattgccgccatgcaccggcatctg

SEQ ID NO: 429097 - DNA, 75 bp, synthetic construct
  source 1..75: mol_type = other DNA
tcaatgtgctggtttgatatgttttactcaccggagctggcgcgacgcgtttacaacaaccctttcccgctggtg

SEQ ID NO: 429098 - DNA, 75 bp, synthetic construct
  source 1..75: mol_type = other DNA
tcacagattttaaaggttattattggtataactttatggagtatattgaaaacattaatgcgtgtgatgatgttt

SEQ ID NO: 429099 - DNA, 75 bp, synthetic construct
  source 1..75: mol_type = other DNA
acaacgtaaagcccagccgccagtaccgccgatgacgcgtccggtgcagcgcccggtggaaattacccagtggga

SEQ ID NO: 429100 - DNA, 75 bp, synthetic construct
  source 1..75: mol_type = other DNA
cggcaaagggcttaacgaacgtgttggctcgacgctggagatagagtccggcagcaatgatccgatggcggtctt

SEQ ID NO: 429101 - DNA, 75 bp, synthetic construct
  source 1..75: mol_type = other DNA
gctggtttgatatgttttactcaccggagctggcgcgacgtgtctataacaaccctttcccgctggtggatatca

SEQ ID NO: 429102 - DNA, 75 bp, synthetic construct
  source 1..75: mol_type = other DNA
gcgaactggcaacggagtatccgcgcccgcggaccattcattcatgggatatcgacgggcgagtgctgttgtgca

SEQ ID NO: 429103 - DNA, 75 bp, synthetic construct
  source 1..75: mol_type = other DNA
atcgacgggcgagtgctgttgtgcagctcgttcagtaaaagcattgcacctggcctgcgcgtgggctgggtcgca

SEQ ID NO: 429104 - DNA, 75 bp, synthetic construct
  source 1..75: mol_type = other DNA
gatgctaagaaacgcgtcgtacaaagcccggatgtgatcccggcagattccgaagcgggacgtgcagctctcgct

SEQ ID NO: 429105 - DNA, 75 bp, synthetic construct
  source 1..75: mol_type = other DNA
gccaaaattagcgtggcagaattaaccggtgcggaatttatgctctacaccacggttggggggcacgagttagtg

SEQ ID NO: 429106 - DNA, 75 bp, synthetic construct
  source 1..75: mol_type = other DNA
gagtacctgaaacgcaagccgggggcgctttccggcgggcaacgccagcgtgtggcgctcggacgggcgattgtg

SEQ ID NO: 429107 - DNA, 75 bp, synthetic construct
  source 1..75: mol_type = other DNA
aatgaatgacgttccagccaaagcacgcaatatagcgatggtgttccagaactacgcgttgtatccgcatatgac

SEQ ID NO: 429108 - DNA, 75 bp, synthetic construct
  source 1..75: mol_type = other DNA
tgatgcgaaacaggagcttcttgagcgtcttttgtccggaaaaagaatgaccgggcgggatgaaatggatatcaa

SEQ ID NO: 429109 - DNA, 75 bp, synthetic construct
  source 1..75: mol_type = other DNA
ataaaatcgtacttatcctgaataaacatgaacaggcatgcagacgcctgaagcctgtatatactgtattggaac

SEQ ID NO: 429110 - DNA, 75 bp, synthetic construct
  source 1..75: mol_type = other DNA
agagtctgcttaacctcatggatgcaaccaaagactcaccagatgtaaagcaggagctgcttaaccgcctttttt

SEQ ID NO: 429111 - DNA, 75 bp, synthetic construct
  source 1..75: mol_type = other DNA
cgacgcgggacgtgcagccctggctgccggtggcgaagctgcgaagaaagttgaaatcccaggcgttgccactac

SEQ ID NO: 429112 - DNA, 75 bp, synthetic construct
  source 1..75: mol_type = other DNA
gattgagccgtttgacactgtcaccgtccagggcttctaccgtagccaaccggaagtgaatgacgccatcaccaa

SEQ ID NO: 429113 - DNA, 75 bp, synthetic construct
  source 1..75: mol_type = other DNA
gtgccgcgaagaaaggtgctaagtattaccacatcacccgccagtggcaggaacgtggtaataacctgaccgtca

SEQ ID NO: 429114 - DNA, 75 bp, synthetic construct
  source 1..75: mol_type = other DNA
ttacggcggttctttattggcagccacaccacagaaatgctgtcagaaagccatcagcccctgctgatgctgcga

SEQ ID NO: 429115 - DNA, 75 bp, synthetic construct
  source 1..75: mol_type = other DNA
gtgacgcgggtatagaaaacagcacgacgcctcttaccggacaatcagtcggggatgcgcttattcgttacgcag

SEQ ID NO: 429116 - DNA, 75 bp, synthetic construct
  source 1..75: mol_type = other DNA
tactggaaagttgtgctgaactgcttcaaaaacagggaagcccggatgtgcttttgatgcaaaaacacggtacac

SEQ ID NO: 429117 - DNA, 75 bp, synthetic construct
  source 1..75: mol_type = other DNA
gcgaacggatcagttatgacgggaaaagcatcccggaatcagaaatctggagtgaacatcctgagcgaaacaaac

SEQ ID NO: 429118 - DNA, 75 bp, synthetic construct
  source 1..75: mol_type = other DNA
actattaagtgataacgagcaatatgaaggaggtaaagccctctggcagcatatagcgcgtcgttcaacgaatct

SEQ ID NO: 429119 - DNA, 75 bp, synthetic construct
  source 1..75: mol_type = other DNA
agcgaccttatgggcatggattgaatggatttgggactatggcgatgatacttattgcatcatcattagtatatg

SEQ ID NO: 429120 - DNA, 75 bp, synthetic construct
  source 1..75: mol_type = other DNA
caacagcatgacccttcatttccaccaggacgctatcttaaaatcagcaagcatagtaaatgctgagtgggatga

SEQ ID NO: 429121 - DNA, 75 bp, synthetic construct
  source 1..75: mol_type = other DNA
aaggaatggagaaagggattgagcgggggattgagaaaggaatggtgaaaggaatagagataggaattgagaagg

SEQ ID NO: 429122 - DNA, 75 bp, synthetic construct
  source 1..75: mol_type = other DNA
ttgtcgttaaacaatggttatgaggagagcaataccggtgataaccgggtggtttataacggtaatctggtctct

SEQ ID NO: 429123 - DNA, 75 bp, synthetic construct
  source 1..75: mol_type = other DNA
gttattcagagcgtgaaaaatgttttgacgatgcactgaaaattattgatgaactgcgtaaggcaggagcagaga

SEQ ID NO: 429124 - DNA, 75 bp, synthetic construct
  source 1..75: mol_type = other DNA
tagtagaagcctggaaacgtggtgagatcaaccgctttaaagtaaggatgtatagaaacaccgctcgccgttgtg

SEQ ID NO: 429125 - DNA, 75 bp, synthetic construct
  source 1..75: mol_type = other DNA
cgtgatgaactggtgatgaaagcactgctggagcgcgttggcgacagcaaagtccaggttgtcatgtccgatatg

SEQ ID NO: 429126 - DNA, 75 bp, synthetic construct
  source 1..75: mol_type = other DNA
atgaaatattttactccacaggatgtagttgaagcctggaaacgtggtgagattaatcgttttaaagtaaggatg

SEQ ID NO: 429127 - DNA, 75 bp, synthetic construct
  source 1..75: mol_type = other DNA
gttatccagagcgtgaaaaatgctttgacgatgcactaaaaattattgatgaactgcgtaaggcaggagcagaga

SEQ ID NO: 429128 - DNA, 75 bp, synthetic construct
  source 1..75: mol_type = other DNA
atgaaatggtttacatcggaacgcgtcgtagaggcatttaaaaaaggtgagctaacacgacatcaaatagtaatg

SEQ ID NO: 429129 - DNA, 75 bp, synthetic construct
  source 1..75: mol_type = other DNA
aaaacagtgatttcggtaaggtcgcagcctatagcagcatggttcagaacatgcagggtgatgctatgtgtagtg

SEQ ID NO: 429130 - DNA, 75 bp, synthetic construct
  source 1..75: mol_type = other DNA
catgtgctgttataattccatgttgtcacgcgttattatgcaacaagcttatccgcaattaggaatagaccctgt

SEQ ID NO: 429131 - DNA, 75 bp, synthetic construct
  source 1..75: mol_type = other DNA
ttccgtctttgaaggaaaacctgaatggtgtggtcgttcagtaggctttgtaaatggcctggcaaagacggactg

SEQ ID NO: 429132 - DNA, 75 bp, synthetic construct
  source 1..75: mol_type = other DNA
aggttgaatcttctacaaatgcctgtgttggcatgatcccatgttcaggtggaacatgcgaaactgggccaaagg

SEQ ID NO: 429133 - DNA, 75 bp, synthetic construct
  source 1..75: mol_type = other DNA
acagcactgacgtgctctattccgtgcaaatgcagggtaatacgggctatctacatgttgtgattgaacaccaaa

SEQ ID NO: 429134 - DNA, 75 bp, synthetic construct
  source 1..75: mol_type = other DNA
ttgttttatggtgtgctgagagacagggaaacgggagggaagtctatgatgacgctggcgcagtggtttgaagag

SEQ ID NO: 429135 - DNA, 75 bp, synthetic construct
  source 1..75: mol_type = other DNA
caacttccatcagaacgtaccaaggaagcaatgggcggtgaagaaaatatgataaaggccagacaagaaaatgct

SEQ ID NO: 429136 - DNA, 75 bp, synthetic construct
  source 1..75: mol_type = other DNA
attcaatgggcggtagtgtcaatatgacaaaagcaagagaggagaatgtacaggcacttaaagcagagaatgttg

SEQ ID NO: 429137 - DNA, 75 bp, synthetic construct
  source 1..75: mol_type = other DNA
ttcacaaaaaccaaggtgcatgtttcgttattgatacagatcgttgtgttaaatatctcaacgttggtttcacta

SEQ ID NO: 429138 - DNA, 75 bp, synthetic construct
  source 1..75: mol_type = other DNA
atcgacagtgacaaactttatgctggcactgaacgtaatcggatggatatatacagcatatcaaataactaaaat

SEQ ID NO: 429139 - DNA, 75 bp, synthetic construct
  source 1..75: mol_type = other DNA
ccttgaaggctatttttgtgatccattggctaaagacaagatttgctcttatgacgctagtgggaaaattatgaa

SEQ ID NO: 429140 - DNA, 75 bp, synthetic construct
  source 1..75: mol_type = other DNA
aatgctggccgggtcgatgatccgaaacacgaactggacccgagtgaatgctcaactggtaaactggactggagg

SEQ ID NO: 429141 - DNA, 75 bp, synthetic construct
  source 1..75: mol_type = other DNA
aggttggttcgatgaaggcacaaatacttgctacatgtatgagcagaaatatacatgtgacagagggaaagacgt

SEQ ID NO: 429142 - DNA, 75 bp, synthetic construct
  source 1..75: mol_type = other DNA
catacgaagcatcttcattccaaaaacttcagtacgtttcaatgtcaaactggagtatttgaacgaagcaactat

SEQ ID NO: 429143 - DNA, 75 bp, synthetic construct
  source 1..75: mol_type = other DNA
gggataaatacttttgttgccgcctgtgatcaggtggcgattttatggctgggtgcaagccttgtgatcgataat

SEQ ID NO: 429144 - DNA, 75 bp, synthetic construct
  source 1..75: mol_type = other DNA
cgtgaatgttgccataaaaaacatgaatatcaccagggtaattattgcacacagagaaacaacgttgagaactgt

SEQ ID NO: 429145 - DNA, 75 bp, synthetic construct
  source 1..75: mol_type = other DNA
gaaggctctagcccccccccaatcttttttgtgacaccctgtttcactgaacatgaagacactcaccttgtccct

SEQ ID NO: 429146 - DNA, 75 bp, synthetic construct
  source 1..75: mol_type = other DNA
cggcgcggtaccaattattctggccgtattcccgatgatggcgggtctggagaatgcgcgtctgttctttaatgt

SEQ ID NO: 429147 - DNA, 75 bp, synthetic construct
  source 1..75: mol_type = other DNA
tgtttatcagttgagtgccgataaatggtgtgtaggtgcggcactgcgcgatctgcatatgccaaaagagacgcg

SEQ ID NO: 429148 - DNA, 75 bp, synthetic construct
  source 1..75: mol_type = other DNA
gcacactggcttaatatgaaaatagatgcgataaattcgggtattaagctaaccaggatggatttgctcttcgga

SEQ ID NO: 429149 - DNA, 75 bp, synthetic construct
  source 1..75: mol_type = other DNA
atggcatatatgaaataatcagaaatcactatataaaaaactttccttatacggttcagtttgaagctcttaatg

SEQ ID NO: 429150 - DNA, 75 bp, synthetic construct
  source 1..75: mol_type = other DNA
gccgaccatcgccgcgcagagctggcatcgggacgcatctgggataagatcccgccgcatgtctggcagtatgta

SEQ ID NO: 429151 - DNA, 75 bp, synthetic construct
  source 1..75: mol_type = other DNA
ggaggcgtttttaccttctccgttttcggcgcagtcgtaacccggacacactggaaaaaatgtacgaatccatgc

SEQ ID NO: 429152 - DNA, 75 bp, synthetic construct
  source 1..75: mol_type = other DNA
tggactgctccaggcctgaaccaggcagaaggatacaaagccatctcagatctgtcgcatcactattttcgtgca

SEQ ID NO: 429153 - DNA, 75 bp, synthetic construct
  source 1..75: mol_type = other DNA
ctgtggattatattgaaacctatgcggacttcgctagttttgctccactaccgggagcggaaaaaaatctcattt

SEQ ID NO: 429154 - DNA, 75 bp, synthetic construct
  source 1..75: mol_type = other DNA
caaagataaacagcgtgatcaaggttatgaagatgagttgcgcagtttagaaatccagaagcaaaaactggcact

SEQ ID NO: 429155 - DNA, 75 bp, synthetic construct
  source 1..75: mol_type = other DNA
cagttgcttcaccccagcggcagcactcgtctgcgcgaaggcgacgtcttgtgtgtgattggtcgggagcgcgat

SEQ ID NO: 429156 - DNA, 75 bp, synthetic construct
  source 1..75: mol_type = other DNA
tggtgccaccatcaataacacgactcagacgttgtggtttggtaacaccgtaaatagtgcggtcacggcgataga

SEQ ID NO: 429157 - DNA, 75 bp, synthetic construct
  source 1..75: mol_type = other DNA
ggatggaaaaagggaaagaagaaggggaacagcgcctcctccgattgttgttgcagaatggggcagatcctgaat

SEQ ID NO: 429158 - DNA, 75 bp, synthetic construct
  source 1..75: mol_type = other DNA
attgttgttgcagaatggggcagatcctgaatggatacaaaagattaccggactttcggcagagcaaatgcaggc

SEQ ID NO: 429159 - DNA, 75 bp, synthetic construct
  source 1..75: mol_type = other DNA
gtgaaatctataacgcatatcatgggataactactatttctccgatcttatcagatgaggtgcgtaaattaatta

SEQ ID NO: 429160 - DNA, 75 bp, synthetic construct
  source 1..75: mol_type = other DNA
tttcacgcatcggaccgtagcggcagcccgaaaccgcgccagcgggttcggcggagactggcgggtgcgcaagca

SEQ ID NO: 429161 - DNA, 75 bp, synthetic construct
  source 1..75: mol_type = other DNA
tcagcgtgcatttatcaccgattctaaagcggcagaagtgttagtggtcgatacccgtaatggcaatattctggc

SEQ ID NO: 429162 - DNA, 75 bp, synthetic construct
  source 1..75: mol_type = other DNA
gttacagggtgtgctaatgacagccagataactgcgctgttaaattacattttactgactggcgatgaagcgcgt

SEQ ID NO: 429163 - DNA, 75 bp, synthetic construct
  source 1..75: mol_type = other DNA
gacaactacgtcgagcatatgaagaccaaccatcccgacaagccgtacatgagctatgaagaattcttccgcgaa

SEQ ID NO: 429164 - DNA, 75 bp, synthetic construct
  source 1..75: mol_type = other DNA
agcaattattaggcgcggcgccggttgtcggcgaccaggtagagtttgccgggatggtctggacggtagccgaaa

SEQ ID NO: 429165 - DNA, 75 bp, synthetic construct
  source 1..75: mol_type = other DNA
ccatggtgccagacgacgagattgtgcagcatcgcagagttgccttactggagttgatccaaaaacatattcgcc

SEQ ID NO: 429166 - DNA, 75 bp, synthetic construct
  source 1..75: mol_type = other DNA
tataccgccgcgttcccgctggtggatatcactgtcgtgccagacgacgagattgtgcagcatcgcagggtaatg

SEQ ID NO: 429167 - DNA, 75 bp, synthetic construct
  source 1..75: mol_type = other DNA
atgataaacgccggccgctaccgctggtcatcccgatgctgttttatcacggtagccgtagtccttatccctggt

SEQ ID NO: 429168 - DNA, 75 bp, synthetic construct
  source 1..75: mol_type = other DNA
caaatcgccgtgctgatatttcgggtaaatggatgttcaaagctggcgtagtgataaagcgaacttatacagggg

SEQ ID NO: 429169 - DNA, 75 bp, synthetic construct
  source 1..75: mol_type = other DNA
ataccagctaacgaaacaatttaacatcaaatggctttattcagatgatggaaaaaactggtatgaggaacaaaa

SEQ ID NO: 429170 - DNA, 75 bp, synthetic construct
  source 1..75: mol_type = other DNA
cctgatacgttgaaaatggtctatgaccacaacaacgttattatttgtattgaaaaggatgtttcagcaattaat

SEQ ID NO: 429171 - DNA, 75 bp, synthetic construct
  source 1..75: mol_type = other DNA
gtggtaaagcgaacttataccgaggaggagcaaaggcaacaagcggaaaatgaaaagcagagcctgctgcagctc

SEQ ID NO: 429172 - DNA, 75 bp, synthetic construct
  source 1..75: mol_type = other DNA
atgatgcacttaaaaaatattactgctggcaatcctaaaacagtggagcaataccagctaacaaagcgatttaac

SEQ ID NO: 429173 - DNA, 75 bp, synthetic construct
  source 1..75: mol_type = other DNA
attgcatatgatgaaaataatgttatatgcgacgtgcaaaaggatgtgactgcaatttgcccggagggaaaaagt

SEQ ID NO: 429174 - DNA, 75 bp, synthetic construct
  source 1..75: mol_type = other DNA
attaactggatgttatacatgcagcaggttgatgtcacagatacctctgttcttcctgtaacattcccggaacaa

SEQ ID NO: 429175 - DNA, 75 bp, synthetic construct
  source 1..75: mol_type = other DNA
atggcctatgaccataacggcgttattatttgtattgaaaaggatgtttcagcaattaatccggaaggcgcaagc

SEQ ID NO: 429176 - DNA, 75 bp, synthetic construct
  source 1..75: mol_type = other DNA
gtcgttgaggttcctgatattacagcaaatcgccgggctgatatttcgggtaaatggatgttcaaagatgactta

SEQ ID NO: 429177 - DNA, 75 bp, synthetic construct
  source 1..75: mol_type = other DNA
ataccagctaacaaagcaatttaacatcaaatggctttattcagatgatggaaaaaactggtatgaggaacaaaa

SEQ ID NO: 429178 - DNA, 75 bp, synthetic construct
  source 1..75: mol_type = other DNA
taaatggatgttcaaagatggcgtagtgataaagcgaacttacaccgaggaagaacagaggcagcaggcagagaa

SEQ ID NO: 429179 - DNA, 75 bp, synthetic construct
  source 1..75: mol_type = other DNA
ctgtttgtccaggcggcacagcaagaaaaagactgggcggattatctgttccgcgatggctcgatgattggtctg

SEQ ID NO: 429180 - DNA, 75 bp, synthetic construct
  source 1..75: mol_type = other DNA
gtgctgcgagagctgatattcatcggattgttttcaatgcagatgtagtggcatcagcttgtcatgctgttgttg

SEQ ID NO: 429181 - DNA, 75 bp, synthetic construct
  source 1..75: mol_type = other DNA
gtgtcagggctggatagctcattactccatctattcacaattacgcaaatttttaaggaatatttaattatagct

SEQ ID NO: 429182 - DNA, 75 bp, synthetic construct
  source 1..75: mol_type = other DNA
tcagtgagatctgggaactgtcagaatccaatattggtgaactgagcttgagtatcaggcaaaattccctggcga

SEQ ID NO: 429183 - DNA, 75 bp, synthetic construct
  source 1..75: mol_type = other DNA
tatcaggctgaattaaatgcaggtcaagttccgggtacctttgaaactgcagcagcttactctgttgtttacgag

SEQ ID NO: 429184 - DNA, 75 bp, synthetic construct
  source 1..75: mol_type = other DNA
gccacaaattgcctcagatggagaaaggttcattgtgggtgtgagagctaaatctgatttatcagtaaatgcaat

SEQ ID NO: 429185 - DNA, 75 bp, synthetic construct
  source 1..75: mol_type = other DNA
cgcagcggaagtgactgcagagccctatgtgaatatagtgccgccgctgcctgatgtgtggataccgtttaacga

SEQ ID NO: 429186 - DNA, 75 bp, synthetic construct
  source 1..75: mol_type = other DNA
atcaccgtgtatgaggattctaagccggggacattgaatgattttctgggcgctgcaacagaagatgatgttcgt

SEQ ID NO: 429187 - DNA, 75 bp, synthetic construct
  source 1..75: mol_type = other DNA
cggcatgaccaccattctgcttaacctgcacaacgtgggttattttgctctggacggtattatccttgccatggg

SEQ ID NO: 429188 - DNA, 75 bp, synthetic construct
  source 1..75: mol_type = other DNA
aaaaaggcaacactttcggcttaactgccttcacttcttacggctctttttggctgacgctggttgcgattctgc

SEQ ID NO: 429189 - DNA, 75 bp, synthetic construct
  source 1..75: mol_type = other DNA
gctgaaaggcgcacgcgttctgcaattcgttttctttagcctgaccgtgctgtttgccctgctggcgatcggtaa

SEQ ID NO: 429190 - DNA, 75 bp, synthetic construct
  source 1..75: mol_type = other DNA
caggaaatcccaaaactatcgaacagtatcaacttacaaaagaatttgatgttgtctggttatggtcggaagaag

SEQ ID NO: 429191 - DNA, 75 bp, synthetic construct
  source 1..75: mol_type = other DNA
tgaaaggcgcacgcgttctgcaattcgttttctttagcctgaccgtgctgtttgccctgctggcgatcggtaaca

SEQ ID NO: 429192 - DNA, 75 bp, synthetic construct
  source 1..75: mol_type = other DNA
cgcctttacctcctacggctctttctggctgacgctggttgctattttgttgatgccaaaaatgggtctgaccga

SEQ ID NO: 429193 - DNA, 75 bp, synthetic construct
  source 1..75: mol_type = other DNA
atttccaatatgaatatggaaaactgtatcttctccaatgtcaacttcgaacatacttattttgatgacgtcaat

SEQ ID NO: 429194 - DNA, 75 bp, synthetic construct
  source 1..75: mol_type = other DNA
acggcggcaatattaccaaatgggtactgatgggcggtgcgattggcggtctgtgtggattgctggggtttgtgg

SEQ ID NO: 429195 - DNA, 75 bp, synthetic construct
  source 1..75: mol_type = other DNA
ttatgacgtcaacacccgtacagcatatgcggcgggacgttatgcgcagatgatgaacacggcggacctgtatcc

SEQ ID NO: 429196 - DNA, 75 bp, synthetic construct
  source 1..75: mol_type = other DNA
gtactggcagtacgttgccgttatggatggcagaacacgcccggaacatgcgcggctgcacaatatggttttccg

SEQ ID NO: 429197 - DNA, 75 bp, synthetic construct
  source 1..75: mol_type = other DNA
accgtgcagataggcggcaatatcgggcggatggtactcgatgttttccgcctgaaaggtgacgaagctcgtcat

SEQ ID NO: 429198 - DNA, 75 bp, synthetic construct
  source 1..75: mol_type = other DNA
accgctatactcggcaattcttgcccgtacgctggcaaaacaggaagtggaacagttggcgcgcaacaaggctgc

SEQ ID NO: 429199 - DNA, 75 bp, synthetic construct
  source 1..75: mol_type = other DNA
ttgaagcaggaacgtttgcggttgccggaatgggggcgctactggcggcatctgtccgcgcaccgttgaccggca

SEQ ID NO: 429200 - DNA, 75 bp, synthetic construct
  source 1..75: mol_type = other DNA
gcaaataagaaagctcgtcaggataaactggacgccgaagcctctgcggacaaaaaaacgcgatcaaagttatga

SEQ ID NO: 429201 - DNA, 75 bp, synthetic construct
  source 1..75: mol_type = other DNA
tattgcggcgctttcacttatttgcgcctttttttctttacgcctttcccgacaattgcaacacatgaaaaagga

SEQ ID NO: 429202 - DNA, 75 bp, synthetic construct
  source 1..75: mol_type = other DNA
atttaaaaaacatattcaatcgcgcaatgaatcgtgaaggaaaaataagcaggaaaaagtataatgaaattttta

SEQ ID NO: 429203 - DNA, 75 bp, synthetic construct
  source 1..75: mol_type = other DNA
cagatggcaccagaaccatgacaccggatgtgggctggtcatataaccccggctcggcagcgttcggcacagacc

SEQ ID NO: 429204 - DNA, 75 bp, synthetic construct
  source 1..75: mol_type = other DNA
tttcgcaccacttccactacgtttgataatggacgagtgaaaatgacgccgggtgtgggctggtcatataacccc

SEQ ID NO: 429205 - DNA, 75 bp, synthetic construct
  source 1..75: mol_type = other DNA
actgagggcggtcgcgatctgatgaaaagcgtgggcaaagcagaagagaacaaatcggacagctggtttaattaa

SEQ ID NO: 429206 - DNA, 75 bp, synthetic construct
  source 1..75: mol_type = other DNA
caccacactgctctgcttttcttctggtgcaccgggcggtattttcgccccgatgctggcgcttggtacggtttt

SEQ ID NO: 429207 - DNA, 75 bp, synthetic construct
  source 1..75: mol_type = other DNA
ttactatcgacaccgccgacaacaaaattctgagccgtaaaaagctgctggatgatggcaaagaacacttcttta

SEQ ID NO: 429208 - DNA, 75 bp, synthetic construct
  source 1..75: mol_type = other DNA
cagcctggcgctttctgccgatggcaaaacgctgtatgtcagcgtgaagcaaaaatcgactaaacagcaagaagc

SEQ ID NO: 429209 - DNA, 75 bp, synthetic construct
  source 1..75: mol_type = other DNA
ttataattcagcgttaactccagatcccaactttaatatagatgcaacgtcagatttagactcatatttaaagct

SEQ ID NO: 429210 - DNA, 75 bp, synthetic construct
  source 1..75: mol_type = other DNA
aaaacgcagttctggcaaacacagcttactttggggattatcactgattcagacagacagcaactgatgaactgg

SEQ ID NO: 429211 - DNA, 75 bp, synthetic construct
  source 1..75: mol_type = other DNA
caaaaccattaaggataattttgatgatatttttcggcaacagtcagaatatatgagtaattattatgagttcgt

SEQ ID NO: 429212 - DNA, 75 bp, synthetic construct
  source 1..75: mol_type = other DNA
gaactttcagcctgatacgttgaaaatggtctatgaccacaacaacgttattatttgtattgaaaaggatgtttc

SEQ ID NO: 429213 - DNA, 75 bp, synthetic construct
  source 1..75: mol_type = other DNA
cggctattttctggtacgtaaatacgcgccggaagctggcggttcgggtatcccagaaattgaaggggcgctgga

SEQ ID NO: 429214 - DNA, 75 bp, synthetic construct
  source 1..75: mol_type = other DNA
gttgcgtttgacaaaggtgttgcctggttgcagaaccaacgtatgggggcgttggtacatgctgctgataattat

SEQ ID NO: 429215 - DNA, 75 bp, synthetic construct
  source 1..75: mol_type = other DNA
taacctgattcctatcgctacggcggggaatttcagcatgggaatgctgatatttatttttgtcgcgcgagtgat

SEQ ID NO: 429216 - DNA, 75 bp, synthetic construct
  source 1..75: mol_type = other DNA
tatgcgacgtgcaaacggatgtaactgcaatttgcccggaaggaaaaagtgttgtcgagttgcctaatattacag

SEQ ID NO: 429217 - DNA, 75 bp, synthetic construct
  source 1..75: mol_type = other DNA
aggatttcgggcgtttaccggcaatgctggcaatgccaaaagcgttactgtgggataaacgtcacaacaatctga

SEQ ID NO: 429218 - DNA, 75 bp, synthetic construct
  source 1..75: mol_type = other DNA
tggcgatgagcggtaaaaatgtgctccatgcggacagcatgaaacatcagaatgacggtatcgccctgacgccgg

SEQ ID NO: 429219 - DNA, 75 bp, synthetic construct
  source 1..75: mol_type = other DNA
aatgcctggaaagaggagagcgacaacgcagtatgtctgcatttgcgctcctctcagcggcatttgaacaaccgc

SEQ ID NO: 429220 - DNA, 75 bp, synthetic construct
  source 1..75: mol_type = other DNA
cgtatacccggacacaaagcagtgagatccatcagcagtttccgcgtctgccgaacccggacatggtgatgtatg

SEQ ID NO: 429221 - DNA, 75 bp, synthetic construct
  source 1..75: mol_type = other DNA
atgagaatgatgaaatgtgtgatgaaaagcagagtgctgtgcgcactggtgttgttgctggccggctgtgccacc

SEQ ID NO: 429222 - DNA, 75 bp, synthetic construct
  source 1..75: mol_type = other DNA
agaaatggcaaagtattactacgcaacaggtgaagagttaagggtttactataaggagaatgtttggagtgatac

SEQ ID NO: 429223 - DNA, 75 bp, synthetic construct
  source 1..75: mol_type = other DNA
tgcgtcaaaatgcgcagggaattattgaattacagggcgacagcgatgcggccattgtaaaagggcttattgcgg

SEQ ID NO: 429224 - DNA, 75 bp, synthetic construct
  source 1..75: mol_type = other DNA
atgaatcggaaaataaaatattccttaattgctctttcattgttatctggtacaagtcatgcagtgatgagtgat

SEQ ID NO: 429225 - DNA, 75 bp, synthetic construct
  source 1..75: mol_type = other DNA
cagcggagatctacttgcgtgcctgtctggattctgtcctggctcaaagctatccccattgggaactctgtattg

SEQ ID NO: 429226 - DNA, 75 bp, synthetic construct
  source 1..75: mol_type = other DNA
tttatgaaaagcaaatggggtaaacatctcgaactcgatcccttctatagtcctaacctgacaaaaagcagagaa

SEQ ID NO: 429227 - DNA, 75 bp, synthetic construct
  source 1..75: mol_type = other DNA
tctattgtgatgcctgtttataatccagcagagatttacttgcgtgcctgtctggattcagtcctggcgcaaagc

SEQ ID NO: 429228 - DNA, 75 bp, synthetic construct
  source 1..75: mol_type = other DNA
gcagacgatgctggaaatctggcaggggcaggcgggcggcggaagcgcccgttctgctgcggcagcccgtgacac

SEQ ID NO: 429229 - DNA, 75 bp, synthetic construct
  source 1..75: mol_type = other DNA
cggttgcgccgcccgccggatggtccggtggcaaaacctgaggcgaacaccattcgcagccagtttccgcgcctt

SEQ ID NO: 429230 - DNA, 75 bp, synthetic construct
  source 1..75: mol_type = other DNA
atggtgcagggataaaggccattacgggcggtgacaaggtggcaattgacccgaaacacaaagcgccatactcaa

SEQ ID NO: 429231 - DNA, 75 bp, synthetic construct
  source 1..75: mol_type = other DNA
ctctactaatgagcttgtttctataagcacttgcagttcgcatagttattgtatgggtccgcgagtaaataatta

SEQ ID NO: 429232 - DNA, 75 bp, synthetic construct
  source 1..75: mol_type = other DNA
ttatctggcaatagcatttaaaaaatggggcgtcccctgggaggccgttggtgcatacaatgctggattcaggaa

SEQ ID NO: 429233 - DNA, 75 bp, synthetic construct
  source 1..75: mol_type = other DNA
cgaagccgccgattgttttgatcttgcaggccgggattacaaaatagacccggatttactgagagcgatatcatg

SEQ ID NO: 429234 - DNA, 75 bp, synthetic construct
  source 1..75: mol_type = other DNA
tgcgatgggcacaccggagcggacattcgccgcggtcaccgatacaccgacaaagagtgcgacaacatgctgaag

SEQ ID NO: 429235 - DNA, 75 bp, synthetic construct
  source 1..75: mol_type = other DNA
ctttttccttaaagagagaaatacagagaaatgcctagatttcatagaaatatgcttccagatactagtgagcca

SEQ ID NO: 429236 - DNA, 75 bp, synthetic construct
  source 1..75: mol_type = other DNA
ttatctggcaatagcctttaaaaaatggggcgtctcctgggaggccgttggtgcatacaatgccggattcaggaa

SEQ ID NO: 429237 - DNA, 75 bp, synthetic construct
  source 1..75: mol_type = other DNA
ttatctggcaatagcttttaaaaaatggggcgtcccctgggaggccgttggtgcatacaatgcaggattcaggaa

SEQ ID NO: 429238 - DNA, 75 bp, synthetic construct
  source 1..75: mol_type = other DNA
caagaaccagaacctgagtctgaacctgaatccccccaagagtctgatacaggttcagatgggccagtagttagt

SEQ ID NO: 429239 - DNA, 75 bp, synthetic construct
  source 1..75: mol_type = other DNA
cagtttttctgtattggtgttaaacgagggagtgaagtaccttctattaatagaatatgtaaggttgatgtatat

SEQ ID NO: 429240 - DNA, 75 bp, synthetic construct
  source 1..75: mol_type = other DNA
ctcttgttcttgcttcgttatccagcgtttgttatgcaggcatgggcgattacaataattatgtaagtgatgtgc

SEQ ID NO: 429241 - DNA, 75 bp, synthetic construct
  source 1..75: mol_type = other DNA
tgcaacgctggacgtatgccggtggcaagcagtggaagggactgataacccggcgcgagattgagcgcgaagttt

SEQ ID NO: 429242 - DNA, 75 bp, synthetic construct
  source 1..75: mol_type = other DNA
agacttattacaagcttttgctgcatgctatcattttgaccaatttacggccattgtacgagaagaattaactgc

SEQ ID NO: 429243 - DNA, 75 bp, synthetic construct
  source 1..75: mol_type = other DNA
ctaacgtcgcttatccacttggagatggggagaacctttttataatggatatctataacgcgcttcagaatcaat

SEQ ID NO: 429244 - DNA, 75 bp, synthetic construct
  source 1..75: mol_type = other DNA
agaaacgggagaactggcgcgaatatctggaacgtgagcggggagagctggcggaaaagaaaaaggtagttgaac

SEQ ID NO: 429245 - DNA, 75 bp, synthetic construct
  source 1..75: mol_type = other DNA
cctgttcgatccacgatcttaccgctgcaatggagtacgccacccgtctgcaggcgctgcgtaatcagtaccagt

SEQ ID NO: 429246 - DNA, 75 bp, synthetic construct
  source 1..75: mol_type = other DNA
ggcgcacgtactaccgaaagtcagatccaccgcgaaatggcttcggcactctcctgtccggtaggttttaaaaat

SEQ ID NO: 429247 - DNA, 75 bp, synthetic construct
  source 1..75: mol_type = other DNA
agctgggcgtgcccaccgcgactgagtttctcgatatggtgaccggtcagtttattgccgatctaattagctggg

SEQ ID NO: 429248 - DNA, 75 bp, synthetic construct
  source 1..75: mol_type = other DNA
gcatggcggcgctggagaacccaagggaaagggcgctggtagtgggctattcgctgattatcatgccggatatga

SEQ ID NO: 429249 - DNA, 75 bp, synthetic construct
  source 1..75: mol_type = other DNA
caatataagacgttatatggacttccatcattaattcctaatgaccctcatgattttttattacggttctttata

SEQ ID NO: 429250 - DNA, 75 bp, synthetic construct
  source 1..75: mol_type = other DNA
tgcaatggaatacgccacccgtctgcagtcgctgcgcaaccagtaccagtcacggctggaaatcgtaatgcgcac

SEQ ID NO: 429251 - DNA, 75 bp, synthetic construct
  source 1..75: mol_type = other DNA
gtattatgcgacgagttattcgggggatatggcaccgggcgcagctattgccggctcatcactgtctgcatgttg

SEQ ID NO: 429252 - DNA, 75 bp, synthetic construct
  source 1..75: mol_type = other DNA
acgctggttcactattagcctgttgtcatggggagttattactatggcgctggcgtggaccgaaaaaatgtcaac

SEQ ID NO: 429253 - DNA, 75 bp, synthetic construct
  source 1..75: mol_type = other DNA
ggttgttgaagaaattatggctcgactggcaaaggaagttcgtcaggctttttctggagtacgcgatcgccgtcg

SEQ ID NO: 429254 - DNA, 75 bp, synthetic construct
  source 1..75: mol_type = other DNA
agacacagaggtgattattttcgcgggtagtgatgcgtgggcacatgcaaaacagtggcaggagcaggacggccc

SEQ ID NO: 429255 - DNA, 75 bp, synthetic construct
  source 1..75: mol_type = other DNA
gatgcaaatttttaccctgatggtatgcacggtcagaaggtggagaactggcgcgaatatctggcccgtgagcgc

SEQ ID NO: 429256 - DNA, 75 bp, synthetic construct
  source 1..75: mol_type = other DNA
atcggcggtcgataccatgaagttaagtttgcccgtaatggggaataccgcccgtaacctgattggattcagtaa

SEQ ID NO: 429257 - DNA, 75 bp, synthetic construct
  source 1..75: mol_type = other DNA
cgaatatccgcattattgacgagaaacgccgttttgcgcgtgtctatatcgcgggggagatagagccaatccaga

SEQ ID NO: 429258 - DNA, 75 bp, synthetic construct
  source 1..75: mol_type = other DNA
gtgcgcagtattcttgagaagagtacctataccaatttcgagattcttattctggataacggcagcgtcgaagcc

SEQ ID NO: 429259 - DNA, 75 bp, synthetic construct
  source 1..75: mol_type = other DNA
ccctcccacgcgacaaaatggaggaggccatcatctttgccggaacaggagcatggaaagcagctcaggattacc

SEQ ID NO: 429260 - DNA, 75 bp, synthetic construct
  source 1..75: mol_type = other DNA
tacgagaggctggactaagcgaaatagattttcaattatagattcattggaaataggcggttcactttcatatga

SEQ ID NO: 429261 - DNA, 75 bp, synthetic construct
  source 1..75: mol_type = other DNA
ccttgtcggcctaaaagctgaagcggagcatggggaaagtctggtgattgaactgccagtgaagaaggcagagcg

SEQ ID NO: 429262 - DNA, 75 bp, synthetic construct
  source 1..75: mol_type = other DNA
ctgagaatgaccgcaaggcagatcgcgtactggcggcattattcatggtgctggcgaaccggtacgactggcagt

SEQ ID NO: 429263 - DNA, 75 bp, synthetic construct
  source 1..75: mol_type = other DNA
ggggaaacgctggcaacacatgcgccgaatttctggaagtggttacgctgctcggtggcagagaatgaccgcaag

SEQ ID NO: 429264 - DNA, 75 bp, synthetic construct
  source 1..75: mol_type = other DNA
tgcgatcaaacgtgatactgatggatgagtctgaggactggctgccgtcatgtgcaccagtgaaaaatgagggtg

SEQ ID NO: 429265 - DNA, 75 bp, synthetic construct
  source 1..75: mol_type = other DNA
aaaggccattacgggcggtgacaaggtggcaattgacccgaaacacaaagcgccatactcaacgcgtattccggc

SEQ ID NO: 429266 - DNA, 75 bp, synthetic construct
  source 1..75: mol_type = other DNA
gccagtacaggataaagagttacagcgggctatggcgcagatttttattgatgcggagatcagttattcgcagaa

SEQ ID NO: 429267 - DNA, 75 bp, synthetic construct
  source 1..75: mol_type = other DNA
cggggtatttgataccagaacaggtaattttcgggagcataacaaaaacgactggttgttaattgccagtgaatt

SEQ ID NO: 429268 - DNA, 75 bp, synthetic construct
  source 1..75: mol_type = other DNA
ctgggtacggaacaactggaaaacctggatgatatgcaaattatcgatgaaggccgtcattatgtgcgtgtttat

SEQ ID NO: 429269 - DNA, 75 bp, synthetic construct
  source 1..75: mol_type = other DNA
gtgagcttgctgtagtgattcgccatttgcttacgcgcttttctgaccaggacgaagccagactcctgttacatg

SEQ ID NO: 429270 - DNA, 75 bp, synthetic construct
  source 1..75: mol_type = other DNA
cagtcgccgctaactggttccagcttaaaagcaaaagcgttacccctgattacgcgaaagacatttggcgttcac

SEQ ID NO: 429271 - DNA, 75 bp, synthetic construct
  source 1..75: mol_type = other DNA
ctgacaatcttgcccagagatttagtaagccgaagaaacagaacatgccagccctgcccccaaccgaactccccc

SEQ ID NO: 429272 - DNA, 75 bp, synthetic construct
  source 1..75: mol_type = other DNA
agaaaaacgaggtgtccttgaaacacttcgccgcatcatatcccgcctgaatgaaattttccgctatgcagcaac

SEQ ID NO: 429273 - DNA, 75 bp, synthetic construct
  source 1..75: mol_type = other DNA
attttgacgggaaaactattgctttgccgcaggtacgtaaaaattacccttatgagggatttgtggagtggcatc

SEQ ID NO: 429274 - DNA, 75 bp, synthetic construct
  source 1..75: mol_type = other DNA
agaccaatcagtggtcatagagagtgggttttcccaagcattaaggccccgcttaaccacatgcatgagcaaaca

SEQ ID NO: 429275 - DNA, 75 bp, synthetic construct
  source 1..75: mol_type = other DNA
tgaagttgcagaggaagagcagcaaattgctctggacagtattttttctactgttgccgctaactggttccaact

SEQ ID NO: 429276 - DNA, 75 bp, synthetic construct
  source 1..75: mol_type = other DNA
ggttttactggtcgatcaaagcggatcgatggttgattcagtgatccactcagcagtgatggcggcctgtttatg

SEQ ID NO: 429277 - DNA, 75 bp, synthetic construct
  source 1..75: mol_type = other DNA
gtgattgagcggctggaaagcgatgccgtactgcgctacggcattgaagatgtggtgacgaatctcgacgtgctg

SEQ ID NO: 429278 - DNA, 75 bp, synthetic construct
  source 1..75: mol_type = other DNA
gaaagtgaaaatatcaccgaacgcttttttgtcgtcggtgaaaagcgcgtcagcgccgaggtggtcgcggcacag

SEQ ID NO: 429279 - DNA, 75 bp, synthetic construct
  source 1..75: mol_type = other DNA
tgcttaaacagcatttagaacccatagaaaaacgaggtgtccttgaaacacttcgccgcatcatatcccgcctga

SEQ ID NO: 429280 - DNA, 75 bp, synthetic construct
  source 1..75: mol_type = other DNA
tcttaaaacaacaccttgatcctattgagcaacgaggcgtattggaaactctacgccgtatcatttcacgtctga

SEQ ID NO: 429281 - DNA, 75 bp, synthetic construct
  source 1..75: mol_type = other DNA
tctggtggcgtttgacacaagcgtggttgatctcacggcagacgttgccgatccggtagagttattaatgaaagt

SEQ ID NO: 429282 - DNA, 75 bp, synthetic construct
  source 1..75: mol_type = other DNA
ggcaataaaaaactcatcaatactctggcgcaacagatactcgaagcgcacttcaccgagagtattcaggaagaa

SEQ ID NO: 429283 - DNA, 75 bp, synthetic construct
  source 1..75: mol_type = other DNA
cctgctacaaatcgacactatcaatatcgttgcccgcagcccttatctggtactttttagtcgccttggtaatta

SEQ ID NO: 429284 - DNA, 75 bp, synthetic construct
  source 1..75: mol_type = other DNA
ggcacatttgcgcaccgtttcagtaactgggtattccgcgaggttatcccttcaatccgcaaaacgggggggtta

SEQ ID NO: 429285 - DNA, 75 bp, synthetic construct
  source 1..75: mol_type = other DNA
gttcgatctgacggacagtgctgacgttcatctgaaggatgcagcgggagaacatcagattaatggcagaaaaga

SEQ ID NO: 429286 - DNA, 75 bp, synthetic construct
  source 1..75: mol_type = other DNA
tggctggtcgattactatcgcctgaagcgcccggcgttggggaattggcgcgatatgcgggctgaacagcggcaa

SEQ ID NO: 429287 - DNA, 75 bp, synthetic construct
  source 1..75: mol_type = other DNA
tctatgatttaacccatcgcgtcatgccgcattgggatgacgaacgtgatctcatttcgcaagcggaagctgaaa

SEQ ID NO: 429288 - DNA, 75 bp, synthetic construct
  source 1..75: mol_type = other DNA
caacgcgggtgacattaggacgctgcccgcaaggtctctttactgattgccgcactggctgggaaatagaccccg

SEQ ID NO: 429289 - DNA, 75 bp, synthetic construct
  source 1..75: mol_type = other DNA
gtcaggcgattcgtgggattaaagcgatgttccgtgccgacggtttactacccgccagcagcaaacatattcacg

SEQ ID NO: 429290 - DNA, 75 bp, synthetic construct
  source 1..75: mol_type = other DNA
gtcaggcgatacgcgggattaaagcgatgttccgcgcagacggtttactgcccgccagcagtaaacatattcacg

SEQ ID NO: 429291 - DNA, 75 bp, synthetic construct
  source 1..75: mol_type = other DNA
cccgttatttcgcaaaaatgtattacgcgcttataactaccgtcgcgttggaagcggcgcatataaaatggaaac

SEQ ID NO: 429292 - DNA, 75 bp, synthetic construct
  source 1..75: mol_type = other DNA
aagtaccggattgtgccactactggcgaccatcaagccccgcagcgtcgatgaatatgaaccgccccgattttcc

SEQ ID NO: 429293 - DNA, 75 bp, synthetic construct
  source 1..75: mol_type = other DNA
atgacctggcttatgccgatatcgtctacgatggctggaaagcgccgtcaattatgcaggttccgggcgcacgcg

SEQ ID NO: 429294 - DNA, 75 bp, synthetic construct
  source 1..75: mol_type = other DNA
ctggtgcctaatccaagctacccgattcatatttacggcgcggtgattgccggggcgcaggtacgctcagtgccg

SEQ ID NO: 429295 - DNA, 75 bp, synthetic construct
  source 1..75: mol_type = other DNA
acagaagatggtcaggcgatcggcaatggatcattcgtttgccccaagaggatatgtgtcaggctttaggtgttt

SEQ ID NO: 429296 - DNA, 75 bp, synthetic construct
  source 1..75: mol_type = other DNA
atgaaaaagtggatgttagccatctgcctgatgtttataaatggaatctgcgaagctgccgattgctttgatctt

SEQ ID NO: 429297 - DNA, 75 bp, synthetic construct
  source 1..75: mol_type = other DNA
atggcgttaacacaccgcgaactctgtcagattgcctacaggttccttaagcgcaacgggttcaaggtttgcttt

SEQ ID NO: 429298 - DNA, 75 bp, synthetic construct
  source 1..75: mol_type = other DNA
ggttataagccggaagattcggggctggatatcggcgacagcgccatcactgaaacctacggtattggcggattt

SEQ ID NO: 429299 - DNA, 75 bp, synthetic construct
  source 1..75: mol_type = other DNA
acacacaaaaatatcatatgagtgataatgctgactggccgaagccccgcaaagcgggaccccatcttatatata

SEQ ID NO: 429300 - DNA, 75 bp, synthetic construct
  source 1..75: mol_type = other DNA
gaaagaatcccgttaccgggttaattccatcggtattaatccggtaacgggatatggctccggactgatgcaggt

SEQ ID NO: 429301 - DNA, 75 bp, synthetic construct
  source 1..75: mol_type = other DNA
cgatgactaccggaagctggcgaaagaagctggcagcacctccgggaactgggaaacatcaacggttgagattgc

SEQ ID NO: 429302 - DNA, 75 bp, synthetic construct
  source 1..75: mol_type = other DNA
gcaggtcgggattacaaaatagacccggatttactgagagcgatatcatggaaagaatcccgttaccgggttaat

SEQ ID NO: 429303 - DNA, 75 bp, synthetic construct
  source 1..75: mol_type = other DNA
tactcactcttacctgtccggtcattgctcaggactgttttgaaatggctggcagagattaccgaatcgagccgg

SEQ ID NO: 429304 - DNA, 75 bp, synthetic construct
  source 1..75: mol_type = other DNA
acgccataaatagtgaaaacatgcataagattatcgccattatcctcataatgtttgcaggaaacacatattcct

SEQ ID NO: 429305 - DNA, 75 bp, synthetic construct
  source 1..75: mol_type = other DNA
gggcgtcggcatgattggcgcgggcattgtgcatccaccttttgcctgcttcgagaaagccattcttggctggtg

SEQ ID NO: 429306 - DNA, 75 bp, synthetic construct
  source 1..75: mol_type = other DNA
ccggcccgacgtggatggcgatgtgtaaagcggcgatggatgcggcgcacggcatcgaatacagcaccgtggtga

SEQ ID NO: 429307 - DNA, 75 bp, synthetic construct
  source 1..75: mol_type = other DNA
cggatttactgagagcgatatcatggaaagaatcccgttaccgggttaatgccatcggtattaatccggtaacgg

SEQ ID NO: 429308 - DNA, 75 bp, synthetic construct
  source 1..75: mol_type = other DNA
aatagccaactcgtgccaaacgattacaatcccaataatgtggcaccgccagagaagaagctattaaaaaaatcc

SEQ ID NO: 429309 - DNA, 75 bp, synthetic construct
  source 1..75: mol_type = other DNA
ctgattatcaaaaattacaccggcgatattcttaactttgaaacagcaacagaattactgcacgatagcggcgta

SEQ ID NO: 429310 - DNA, 75 bp, synthetic construct
  source 1..75: mol_type = other DNA
ctgacactgcatcaggatccggtgtatgtcacccgagctgatgcccccgttgcaggtaaagtcgccctgctgtcg

SEQ ID NO: 429311 - DNA, 75 bp, synthetic construct
  source 1..75: mol_type = other DNA
tgactatcgagcgtaatttaattggcgcgtactgcacctcactggatatgtccggcttttctatcaccttactga

SEQ ID NO: 429312 - DNA, 75 bp, synthetic construct
  source 1..75: mol_type = other DNA
aaagattacttcgcgttgtaattacgcagagcgttacgccccaacacaatccccgcgccaaccatgccgcccaga

SEQ ID NO: 429313 - DNA, 75 bp, synthetic construct
  source 1..75: mol_type = other DNA
ctgaaggttgatgacgaaacgttggcgttatgggatgccccagtccacaccccggcgctgaactggggtaaataa

SEQ ID NO: 429314 - DNA, 75 bp, synthetic construct
  source 1..75: mol_type = other DNA
gtcgccctgctgtcgggtggcggcagcggacacgagccgatgcactgtggttatatcggtcaggggatgctttcg

SEQ ID NO: 429315 - DNA, 75 bp, synthetic construct
  source 1..75: mol_type = other DNA
gcgtttccgtaaaaatccctcacttggcatgggcgactggcgattctttattagtgagccggaaattatttccag

SEQ ID NO: 429316 - DNA, 75 bp, synthetic construct
  source 1..75: mol_type = other DNA
tcgtccgtgaacttagccagttgggatgggacgataataaaattggcaaagctaggaatggacagcgacgaagtg

SEQ ID NO: 429317 - DNA, 75 bp, synthetic construct
  source 1..75: mol_type = other DNA
taacgcaggatttaactcaatttctcgccagtctggcggaagaagatcgcattaaggcgatcaatgagatcagaa

SEQ ID NO: 429318 - DNA, 75 bp, synthetic construct
  source 1..75: mol_type = other DNA
tgagcgtgacaaagcgcagttttttatgacgcagataattttctggatgatggccgcaacagatggccacgctaa

SEQ ID NO: 429319 - DNA, 75 bp, synthetic construct
  source 1..75: mol_type = other DNA
ggacgcgatctgctgcagttggtggccgaaggtgacgggtatgatggcgcagatctgcggcagggagaatttgcc

SEQ ID NO: 429320 - DNA, 75 bp, synthetic construct
  source 1..75: mol_type = other DNA
actggctgctgaaatgggtgagtataacggcgcagatttacgtcagggagagtttgctcgtaagggcagtgtgta

SEQ ID NO: 429321 - DNA, 75 bp, synthetic construct
  source 1..75: mol_type = other DNA
agaccttcataaacttaatgcgggtgatttggttaaaccgttaaaccatcttgtaaaaatagttaaaggtgaatg

SEQ ID NO: 429322 - DNA, 75 bp, synthetic construct
  source 1..75: mol_type = other DNA
tgcccagtttggcgctcttgattcgctgacgacggtgaataacgcgcaacgcgaggcttacggttatcaggttca

SEQ ID NO: 429323 - DNA, 75 bp, synthetic construct
  source 1..75: mol_type = other DNA
ttgcagtcacagtggcatcaactgccgcatcaatgtacagccaaaatcagcaggcaaaatacacttctgcggtag

SEQ ID NO: 429324 - DNA, 75 bp, synthetic construct
  source 1..75: mol_type = other DNA
atgaaagttactgcatatgatggaacagaaatatgctatcaaggtttggcatttaaaggtactcccgttcaaatt

SEQ ID NO: 429325 - DNA, 75 bp, synthetic construct
  source 1..75: mol_type = other DNA
ttggaaatatcatctctgaaacttaaaggttttagaaattttaaagatgcatacatcaattttaattcgaacact

SEQ ID NO: 429326 - DNA, 75 bp, synthetic construct
  source 1..75: mol_type = other DNA
catactgtagctgctagcgaaggatgttcaagatatattacagatggttgggaaggaatgagctaccgaatgagt

SEQ ID NO: 429327 - DNA, 75 bp, synthetic construct
  source 1..75: mol_type = other DNA
ggaaaactaaatacgcatcaaaaatcgaagagatttctggtggcaaatatcaagcaagcgaaatgcttgaaataa

SEQ ID NO: 429328 - DNA, 75 bp, synthetic construct
  source 1..75: mol_type = other DNA
tcataaaaaaagacccgggcatcagtatcagtcacctgaacaacagagaaaaaacaaagatcgctgatgccctga

SEQ ID NO: 429329 - DNA, 75 bp, synthetic construct
  source 1..75: mol_type = other DNA
cagggaccgtggaatatccagctgacagtaaaggacgatttatcagcaaccgtgccgtgcgtgatgagtatgaca

SEQ ID NO: 429330 - DNA, 75 bp, synthetic construct
  source 1..75: mol_type = other DNA
caggccggaattgggcatatcgtcgcggtgcatgtgaaagacaccaaaccaggcgtcttcaaaaacgtgccgttt

SEQ ID NO: 429331 - DNA, 75 bp, synthetic construct
  source 1..75: mol_type = other DNA
tccgtgacggcctgaaagagagcgttgagatggcaagccgcgcgcaggtgacgctggcaatggagatcatggatt

SEQ ID NO: 429332 - DNA, 75 bp, synthetic construct
  source 1..75: mol_type = other DNA
aaagacaccaaaccgggcgtcttcaaaaacgtaccgtttggcgaaggtgtagtggatttcgaacgttgcttcgaa

SEQ ID NO: 429333 - DNA, 75 bp, synthetic construct
  source 1..75: mol_type = other DNA
tgagtaaagaaaactatgaagctctaatatcaaaccttaacacacagacaaaatacactttcaaatctactagtt

SEQ ID NO: 429334 - DNA, 75 bp, synthetic construct
  source 1..75: mol_type = other DNA
acccgcatcagctgcagcagctcatccgcctgccggggcagcagtatgatgaggagtccggcctgtattacaacc

SEQ ID NO: 429335 - DNA, 75 bp, synthetic construct
  source 1..75: mol_type = other DNA
tggttgggtgagaaagaagatcggcggcgtttgtcagaagtgattgagcaatggcattcactctacgggcagaca

SEQ ID NO: 429336 - DNA, 75 bp, synthetic construct
  source 1..75: mol_type = other DNA
gggccatcagttatcaaaataccgaatcacctacaccaagaccaaaggcaagaaaaaccgtaccgtaccgatatc

SEQ ID NO: 429337 - DNA, 75 bp, synthetic construct
  source 1..75: mol_type = other DNA
gttaaattatggatattacgtcgaatgtttattactgtcggcctttatatcctcccattaatatgtctttggatt

SEQ ID NO: 429338 - DNA, 75 bp, synthetic construct
  source 1..75: mol_type = other DNA
tctcaatttatcctcgtttggtatgctatattgagtgcggtactttcaattgtaacgttgcgatttccaaaagtt

SEQ ID NO: 429339 - DNA, 75 bp, synthetic construct
  source 1..75: mol_type = other DNA
cccatgcagggttggaaattacatgtaaaaggacgttcttctaacgaggataaggattatttagttgaggaaata

SEQ ID NO: 429340 - DNA, 75 bp, synthetic construct
  source 1..75: mol_type = other DNA
tcctggacaccttacgccgtttccatatcgaagatgaaaacgctagcggcccaatggcgcaagtgatcggacgta

SEQ ID NO: 429341 - DNA, 75 bp, synthetic construct
  source 1..75: mol_type = other DNA
cggcgctcagctcgaagaataataaaaagcgtactaaagaaagaatatctacctggagtggcgctgacaatgaca

SEQ ID NO: 429342 - DNA, 75 bp, synthetic construct
  source 1..75: mol_type = other DNA
cttaagaaggcctactcaaaaaacttactgagtaaagaaaactatgaagctctaatatcaaaccttaacacatag

SEQ ID NO: 429343 - DNA, 75 bp, synthetic construct
  source 1..75: mol_type = other DNA
tctaggcgaccccatcgcctcagaactgacagccggtgactttacgaaataccgcgaagcacggttaaaaggtga

SEQ ID NO: 429344 - DNA, 75 bp, synthetic construct
  source 1..75: mol_type = other DNA
aagaaggcctgattgaactggcgcaccagggaaccttatttctcgatgaaattggtgagctgccgctacctattc

SEQ ID NO: 429345 - DNA, 75 bp, synthetic construct
  source 1..75: mol_type = other DNA
gaggcgcaacgggaatagccctgcaaattgttgacggcaagggcacaaaacagattccgaaagtcgctggtggaa

SEQ ID NO: 429346 - DNA, 75 bp, synthetic construct
  source 1..75: mol_type = other DNA
cgaaggctttttcggcagactgaaaacggaaatgtattatgggcgtaaatggtcgggcatcacgccagaaaagtt

SEQ ID NO: 429347 - DNA, 75 bp, synthetic construct
  source 1..75: mol_type = other DNA
caacagcagggatagatgatttgggtgaaattttagctaaaatgaaacagagaacatcgagaggaataagaaaat

SEQ ID NO: 429348 - DNA, 75 bp, synthetic construct
  source 1..75: mol_type = other DNA
cgcggcctgccgctggcccttatcagtaaggaaggggcaacagaatggtgcgcagaatacgatgagtggggcaac

SEQ ID NO: 429349 - DNA, 75 bp, synthetic construct
  source 1..75: mol_type = other DNA
gggcgtcggcatgattggcgcgggcattgtgcatccaccattcccctgcttcgaaaaagccattcttggctggtg

SEQ ID NO: 429350 - DNA, 75 bp, synthetic construct
  source 1..75: mol_type = other DNA
caagtgacctggtacggctgggacggcgaccggctgaccacaatacagaacgacagaacccgcatccagacgatt

SEQ ID NO: 429351 - DNA, 75 bp, synthetic construct
  source 1..75: mol_type = other DNA
atttttatcagtatccgttgaatccagttacgaatacagatcctctggggttagaagtttttcctagaccattcc

SEQ ID NO: 429352 - DNA, 75 bp, synthetic construct
  source 1..75: mol_type = other DNA
ctattatgacccgctgcaggggcggtatatcactcaggatccgattgggcttaaggggggatggaatttttatca

SEQ ID NO: 429353 - DNA, 75 bp, synthetic construct
  source 1..75: mol_type = other DNA
cgaagagttactcaatcacacacagcgtattgaattgcagcaaggtcgcgtccgtaaagccgaacgctgggggcc

SEQ ID NO: 429354 - DNA, 75 bp, synthetic construct
  source 1..75: mol_type = other DNA
cggagctggtgtttcctgatggaacagcattaggaaatttattaaaaataaataaatttcatgaattaaacaaat

SEQ ID NO: 429355 - DNA, 75 bp, synthetic construct
  source 1..75: mol_type = other DNA
cagaccgcgtttatgtcaagagaggtcggaaagccccttatgtgaagaacatggatagcttacgggagatctatg

SEQ ID NO: 429356 - DNA, 75 bp, synthetic construct
  source 1..75: mol_type = other DNA
aaatgtgcggcgcgatgaaaggcgcggtcaccggggcgctggtgttcgaaggactggcgaaagatctcgacgagg

SEQ ID NO: 429357 - DNA, 75 bp, synthetic construct
  source 1..75: mol_type = other DNA
aagtgcgttagtgtatattacattaactaaatatccacgatatatcgattggaaaactggtctttggtgtagttc

SEQ ID NO: 429358 - DNA, 75 bp, synthetic construct
  source 1..75: mol_type = other DNA
ttgtggccgctgtttgagatcgcgccggaactcgtgtttcctgatggtgaaacgttgcaagcaagactcactact

SEQ ID NO: 429359 - DNA, 75 bp, synthetic construct
  source 1..75: mol_type = other DNA
aagggagaatccagtcgttggcggttcatggattgttctgctcattaacaacgaccaaaaccccatatcttactt

SEQ ID NO: 429360 - DNA, 75 bp, synthetic construct
  source 1..75: mol_type = other DNA
accgatgccctgaactgggcgtcagccaattttgaacagttgggctataactgtaaaaccaacaaggaaaggctg

SEQ ID NO: 429361 - DNA, 75 bp, synthetic construct
  source 1..75: mol_type = other DNA
tcaggcggcgctaattcggatatcacgatccgcacatttgaagcggtgcgtaaatctaaggaagcgttagacctg

SEQ ID NO: 429362 - DNA, 75 bp, synthetic construct
  source 1..75: mol_type = other DNA
gatatcacgatccgcacattcgaagcggtgcgtaaatcgaaggaagcgttagacctgttcactaccggagcataa

SEQ ID NO: 429363 - DNA, 75 bp, synthetic construct
  source 1..75: mol_type = other DNA
gagcaacctaatcagaaatggctgacagatatcacggagttccagctccctgcaggtaaagtctggctgtcaccg

SEQ ID NO: 429364 - DNA, 75 bp, synthetic construct
  source 1..75: mol_type = other DNA
taaaaatggatacagtgctaacagcaccaacgaaccttaattcaaataaggatctaatggctataacaacaaaag

SEQ ID NO: 429365 - DNA, 75 bp, synthetic construct
  source 1..75: mol_type = other DNA
accttggtaattggataacatatgggccatctgggcccccatttctaatatgcaaggtacgccagaaaaacccag

SEQ ID NO: 429366 - DNA, 75 bp, synthetic construct
  source 1..75: mol_type = other DNA
attgccactgaggccaatacacgcctagctgagcaaagaacccggcagattctagctatcagtgacaggatcgca

SEQ ID NO: 429367 - DNA, 75 bp, synthetic construct
  source 1..75: mol_type = other DNA
aagaaagtttctattgcagaaaatgtgtttctgttatggaaaaaagctggaactttgatagtaaacatcttgact

SEQ ID NO: 429368 - DNA, 75 bp, synthetic construct
  source 1..75: mol_type = other DNA
tacattatgcgcactgacgttgtagtagctaaattgagatgccgcgtcctgataatcccacctcagacggcactc

SEQ ID NO: 429369 - DNA, 75 bp, synthetic construct
  source 1..75: mol_type = other DNA
gagctttgttatcgtgaccaacgagtttggtgtggtacaaggtctggtcacgccgctggatgtgctggaagccat

SEQ ID NO: 429370 - DNA, 75 bp, synthetic construct
  source 1..75: mol_type = other DNA
gtgccagaaggggcgtttgcggaggaagaacgttatatgattaacggtgtgctgaccctggcatcgcgttctctg

SEQ ID NO: 429371 - DNA, 75 bp, synthetic construct
  source 1..75: mol_type = other DNA
tagtttattcattgggtgcagatgtaacagaagaacttataagagatgaaaataaagtgaatgaatatatatata

SEQ ID NO: 429372 - DNA, 75 bp, synthetic construct
  source 1..75: mol_type = other DNA
gtgcacgtgcaaacctggcgaaaacgatgctgtacgcaatcaacggcggcgttgacgaaaaactgaaaatgcagg

SEQ ID NO: 429373 - DNA, 75 bp, synthetic construct
  source 1..75: mol_type = other DNA
gaaaggtgctgtagcgtctctgacttccgttgctaaactaccgtttgcttacgctaaagatggtatctcctacac

SEQ ID NO: 429374 - DNA, 75 bp, synthetic construct
  source 1..75: mol_type = other DNA
ggttcgcttcctgcgtactccggagtacgatgaactgttctctggcgacccgatctgggcaaccgaatctatcgg

SEQ ID NO: 429375 - DNA, 75 bp, synthetic construct
  source 1..75: mol_type = other DNA
actgaactggatatcgaaaaagcccacaaattcgcgctggagaaattcatcaacgaattgctgccggtgattgat

SEQ ID NO: 429376 - DNA, 75 bp, synthetic construct
  source 1..75: mol_type = other DNA
ctgaggggcaagccccggaagaaattaacatggatcagcacgaagagattgaggcagttgagccagacgtttctg

SEQ ID NO: 429377 - DNA, 75 bp, synthetic construct
  source 1..75: mol_type = other DNA
tccggaaccgaacatgaccattctgtggtctgaaaaactgccgctaaacttcaagaaattcgccgctaaagtgtc

SEQ ID NO: 429378 - DNA, 75 bp, synthetic construct
  source 1..75: mol_type = other DNA
gcgggtttctccatcaccctgctgaaagcggatgatgacacgctggcgttatgggacgccccggtccatacccca

SEQ ID NO: 429379 - DNA, 75 bp, synthetic construct
  source 1..75: mol_type = other DNA
ctgacgctgcaccaggacccggtctatgtcacccgcgctgatgcaccggtcgccggcaaagtggcgctgctctcc

SEQ ID NO: 429380 - DNA, 75 bp, synthetic construct
  source 1..75: mol_type = other DNA
cgtacctgaatcgcgaggatattgcggaatttaaattcagtccgctgtttaccacgctgtttttcccgaacgtgg

SEQ ID NO: 429381 - DNA, 75 bp, synthetic construct
  source 1..75: mol_type = other DNA
aacaccctgtacaccatgggtccgtctccggaaccgaacatgaccattctgtggtctgaaaaactgccgctgaac

SEQ ID NO: 429382 - DNA, 75 bp, synthetic construct
  source 1..75: mol_type = other DNA
gtccggacttcaacaacgatgactacgctattgcttgctgcgtaagcccgatgatcgttggtaaacaaatgcagt

SEQ ID NO: 429383 - DNA, 75 bp, synthetic construct
  source 1..75: mol_type = other DNA
acatcctgaattttgagaccgccaccgagctgctgcacgaaagtggcgttaaggttaccaccgtcgtggtggatg

SEQ ID NO: 429384 - DNA, 75 bp, synthetic construct
  source 1..75: mol_type = other DNA
atgtcacccgagctgatgcccccgttgcagggaaagtcgccctgctgtcgggtggcggcagcggacacgagccga

SEQ ID NO: 429385 - DNA, 75 bp, synthetic construct
  source 1..75: mol_type = other DNA
atgcctaacttcgatttatccccactgatgcgtcaatggatcggttttgacaaactggccaacgcactgcaaaac

SEQ ID NO: 429386 - DNA, 75 bp, synthetic construct
  source 1..75: mol_type = other DNA
gaaaatatggaagtctctggcgcaaccttcgtaaacggtttactgcatattgatttaattcgtaatgagcctgaa

SEQ ID NO: 429387 - DNA, 75 bp, synthetic construct
  source 1..75: mol_type = other DNA
atgggtaaaactgaaattattgccgaaaccggtgccggtcagcatggcgtggcgtcggcccttgccagcgccctg

SEQ ID NO: 429388 - DNA, 75 bp, synthetic construct
  source 1..75: mol_type = other DNA
ccccccgtgagctacaacgctggcgattaattcttggcgaagcggcagaaacgacgctttgtgggctggatgaca

SEQ ID NO: 429389 - DNA, 75 bp, synthetic construct
  source 1..75: mol_type = other DNA
tccccccgatttaacagccgcattaaacgccaaagcgaacaatggcaactggtcttactggttgatcaaagcggc

SEQ ID NO: 429390 - DNA, 75 bp, synthetic construct
  source 1..75: mol_type = other DNA
tccccccgctttaacagccgcattaaacgccatagcgaacaatggcaactggtcctactggttgatcaaagcgga

SEQ ID NO: 429391 - DNA, 75 bp, synthetic construct
  source 1..75: mol_type = other DNA
tggcggtttttccgagtcactgctaccggagtatctgggggatgaggctccggcctggctgaaacgaggtggtgt

SEQ ID NO: 429392 - DNA, 75 bp, synthetic construct
  source 1..75: mol_type = other DNA
ccgaactctatgatctctttaacgatctcgagcatcggatccatttttttgataaggaaattgaaacagtattca

SEQ ID NO: 429393 - DNA, 75 bp, synthetic construct
  source 1..75: mol_type = other DNA
aaaccttcttttaccctggcggataatgagatggagtttggcgtcggcattcatggtgagccaggtattgaccgc

SEQ ID NO: 429394 - DNA, 75 bp, synthetic construct
  source 1..75: mol_type = other DNA
aaaatcaggtggaacaagtacaaactctctctggtttaaaattaaatatagaattaagttgacgatgattatttt

SEQ ID NO: 429395 - DNA, 75 bp, synthetic construct
  source 1..75: mol_type = other DNA
tccccccgctttaacagccgtattaaacgccacagtgaacaatggcaactggtcttactggttgatcaaagcgga

SEQ ID NO: 429396 - DNA, 75 bp, synthetic construct
  source 1..75: mol_type = other DNA
cgatatcccggctgatgctgaactggatacacatcgggaatggatgttaatcaggctgaccagtgactgggaggt

SEQ ID NO: 429397 - DNA, 75 bp, synthetic construct
  source 1..75: mol_type = other DNA
aagaaacacacgatccaatctatgacatcgagctttatgctgatcagggcaattgccccgcaaacgtcatgatta

SEQ ID NO: 429398 - DNA, 75 bp, synthetic construct
  source 1..75: mol_type = other DNA
taccactgaatgatgcgcttcttcagtgggagcatgaatcagaagaaaataaatgcgatgatccatttattggat

SEQ ID NO: 429399 - DNA, 75 bp, synthetic construct
  source 1..75: mol_type = other DNA
gtgggaacaagagcagacagaaggcgcctcagatccatttgccggactggaaaacgcgcttttaatagtgtctca

SEQ ID NO: 429400 - DNA, 75 bp, synthetic construct
  source 1..75: mol_type = other DNA
aggcaaaacggaccagtgccacagtgatagtgcataccgtggcctcctgtgaacccggtgatgccggtcgctaca

SEQ ID NO: 429401 - DNA, 75 bp, synthetic construct
  source 1..75: mol_type = other DNA
cgggtttaatggggaaacttgcaaaaagtcagcgccggtgacggagaagattaacacagacaactggaacaggcc

SEQ ID NO: 429402 - DNA, 75 bp, synthetic construct
  source 1..75: mol_type = other DNA
atgatgctggcgctcaggatggggcgcacattgtcagagttacgccgggaaatgtctgcatcggaaatcatgatg

SEQ ID NO: 429403 - DNA, 75 bp, synthetic construct
  source 1..75: mol_type = other DNA
gcgctggggtggtgatgagcaatcagaaccgaaggacccgtttgcagggcttgaggcggcacttacagctgcgac

SEQ ID NO: 429404 - DNA, 75 bp, synthetic construct
  source 1..75: mol_type = other DNA
ggcattgcaatcccgcacggtacgtcggcgtatatggggccgattgcggtgctggtcgatgccattatcgagaaa

SEQ ID NO: 429405 - DNA, 75 bp, synthetic construct
  source 1..75: mol_type = other DNA
ttcaggttttctccccgcagaatatccccggtttcattattatcggtgctatttatctcaccggtatttttatga

SEQ ID NO: 429406 - DNA, 75 bp, synthetic construct
  source 1..75: mol_type = other DNA
gtgggttttgtgatggggctgattatcggcatcctcgcgggttacgatgtcaaaggtgtattgcagctggcggta

SEQ ID NO: 429407 - DNA, 75 bp, synthetic construct
  source 1..75: mol_type = other DNA
ggcgatggcggttgccgtgcatcgtggaaatctgttccgcaccttaatctcgggtgtcatcattatgagcatcac

SEQ ID NO: 429408 - DNA, 75 bp, synthetic construct
  source 1..75: mol_type = other DNA
atgttttcagaagtcatgcgttatattctcgacctcggccctacggtgatgctgccggttgtcatcattattttt

SEQ ID NO: 429409 - DNA, 75 bp, synthetic construct
  source 1..75: mol_type = other DNA
ttacaggcgaagttcggcggtcaggagttcctgattggccttgatccggcgttgctgctgggacatacggcggtg

SEQ ID NO: 429410 - DNA, 75 bp, synthetic construct
  source 1..75: mol_type = other DNA
atgaaacccgttatttccctcatcgaagcactgaacgccgttaaaaataatctggcctccctgaatgagcagaaa

SEQ ID NO: 429411 - DNA, 75 bp, synthetic construct
  source 1..75: mol_type = other DNA
tgcggtcacgaccggaaaaaacatcattgagggcgaaggaataaatagatacgaaatcgactggaaaatcccgac

SEQ ID NO: 429412 - DNA, 75 bp, synthetic construct
  source 1..75: mol_type = other DNA
attgagtacgtgcagacacacagcgcaccgcagccggttccggcagatattcgcaaatttgttaccgtcaaaatt

SEQ ID NO: 429413 - DNA, 75 bp, synthetic construct
  source 1..75: mol_type = other DNA
gcgagcgttagtaagacaagcgcaggcaattcgtgcgcgtattgagtggcttgctgttcaggcggttacaacggg

SEQ ID NO: 429414 - DNA, 75 bp, synthetic construct
  source 1..75: mol_type = other DNA
acgcagctttaaaaaattccgcgaactgtacgacctttcccgtggttcagaatccgccagcagaactggcctgta

SEQ ID NO: 429415 - DNA, 75 bp, synthetic construct
  source 1..75: mol_type = other DNA
aatcgatccaacgaaaaccatcatgcgcatggctggagaagatccggcacagcttaacgaccctacctaccgccg

SEQ ID NO: 429416 - DNA, 75 bp, synthetic construct
  source 1..75: mol_type = other DNA
ctgtacgatctttcccgtggttcagaatccgccgcagagctggcctgtaaaaacctgggcgaagtggtgagcttt

SEQ ID NO: 429417 - DNA, 75 bp, synthetic construct
  source 1..75: mol_type = other DNA
ctacggcaatccattcaggaagggttgaatgcacaaagcgatcagaaagaatacggacaaaaaatcatcaaactt

SEQ ID NO: 429418 - DNA, 75 bp, synthetic construct
  source 1..75: mol_type = other DNA
agttgggcgttgtggaagctgctgcccgtaatggcgaagaggaagattttgctaacctacgggctgaaatggcaa

SEQ ID NO: 429419 - DNA, 75 bp, synthetic construct
  source 1..75: mol_type = other DNA
ctttgcgacgctgaccgagcaggtcagttcttcacagatacttgccgccagacgttggctggaagccggatgcgt

SEQ ID NO: 429420 - DNA, 75 bp, synthetic construct
  source 1..75: mol_type = other DNA
tgttaatacaggttgttaatgccgaagatattcaatggcagattaattctttatttataaacctgttttttaagc

SEQ ID NO: 429421 - DNA, 75 bp, synthetic construct
  source 1..75: mol_type = other DNA
acacacaccagcttttcgcgtacctgaatcgcgaggatattgcggaatttaaatttagtccgctgtttaccgcgc

SEQ ID NO: 429422 - DNA, 75 bp, synthetic construct
  source 1..75: mol_type = other DNA
cgcatggctggagaagatccggcacagcttaacgaccctacctatcgccgtatgcgcctgattactggcaacatg

SEQ ID NO: 429423 - DNA, 75 bp, synthetic construct
  source 1..75: mol_type = other DNA
ctttactgtggcaaagatgacgcagcttgatttgctggcggacgttcgccagctcgtggaggacgcactggagag

SEQ ID NO: 429424 - DNA, 75 bp, synthetic construct
  source 1..75: mol_type = other DNA
aagaagatgacgataccttcatctgccgcacctgtaacgcagaactctcaaggtataacttgcttgatgaggaga

SEQ ID NO: 429425 - DNA, 75 bp, synthetic construct
  source 1..75: mol_type = other DNA
gtgagtgggttaaatggctggcggctaaccagcaggaggctaaacaggcggtgcgtgacgcgcaaacgcgctggc

SEQ ID NO: 429426 - DNA, 75 bp, synthetic construct
  source 1..75: mol_type = other DNA
attcctctatgtcagcgatacacctttttccggtgaactattttcggtgaatggaattgacaagctgggattgaa

SEQ ID NO: 429427 - DNA, 75 bp, synthetic construct
  source 1..75: mol_type = other DNA
ggtgttccgtttaaaattattggtgtccgattaaactcaaaaacggattttcttgacagccttggattgaaagca

SEQ ID NO: 429428 - DNA, 75 bp, synthetic construct
  source 1..75: mol_type = other DNA
atgaagaatttgtagctaagctttcaaaacttgttagcaaagatgaagccgctatcggcgtgatatgtatgtatg

SEQ ID NO: 429429 - DNA, 75 bp, synthetic construct
  source 1..75: mol_type = other DNA
cggagagctacggcgagcaggtccaccgcgtgggggagcgtttcgccatactggaggccgcactagtgctttccg

SEQ ID NO: 429430 - DNA, 75 bp, synthetic construct
  source 1..75: mol_type = other DNA
acattcctcaaaacggaggggataaaagtcaaagcggggcagcttgtccgcctgcttaacgtgccgatggaaaaa

SEQ ID NO: 429431 - DNA, 75 bp, synthetic construct
  source 1..75: mol_type = other DNA
tggtaatccgtccatgatgctgggtgtggcggtatcgttatcagcaccattaatcggactggtgggtgctgacgg

SEQ ID NO: 429432 - DNA, 75 bp, synthetic construct
  source 1..75: mol_type = other DNA
ttgcggcttacctggtacggtactgcgcttggcatagcaaacgaagcggaggcgcataacgacagcctgttaccg

SEQ ID NO: 429433 - DNA, 75 bp, synthetic construct
  source 1..75: mol_type = other DNA
atgttggtatggaagatgcgatatcgggcagcgccataaaagatgacgatgcatttagcgattcacaggcggatc

SEQ ID NO: 429434 - DNA, 75 bp, synthetic construct
  source 1..75: mol_type = other DNA
agagccggacgcgcaacggctgacctggtacggaacggcgttaggtatcgccaacgaggccgaagcacacaacga

SEQ ID NO: 429435 - DNA, 75 bp, synthetic construct
  source 1..75: mol_type = other DNA
ctctgttgctctgggggctgatcctgcgacgattctcggcgcggtgacgccagtgccggatacgttgtcggaata

SEQ ID NO: 429436 - DNA, 75 bp, synthetic construct
  source 1..75: mol_type = other DNA
ctgagtacagcgaagtctatgagcttccgccaggtcatgttcggtttaacgaattcatcgggaagtatggtaagt

SEQ ID NO: 429437 - DNA, 75 bp, synthetic construct
  source 1..75: mol_type = other DNA
ttcaggagaatatctatgactgggtgattattgatgaggcggcgcgctcgatttcaagtgagctggccattgcaa

SEQ ID NO: 429438 - DNA, 75 bp, synthetic construct
  source 1..75: mol_type = other DNA
actggtcagccagtcacacgaggctgtgaatacagcggccgagcgtatcagaaagcattgttcccggcttggtac

SEQ ID NO: 429439 - DNA, 75 bp, synthetic construct
  source 1..75: mol_type = other DNA
ttttcttaaatttgctgatcgcaacacattcaacaactacttcagaccccatccaggctcccaggttctaaacaa

SEQ ID NO: 429440 - DNA, 75 bp, synthetic construct
  source 1..75: mol_type = other DNA
taccggcaacggaatgttcccctggaaaggttatgcaggttttcgttttgttgaggcaaaaaaagaaggtgaatt

SEQ ID NO: 429441 - DNA, 75 bp, synthetic construct
  source 1..75: mol_type = other DNA
aagcctgttcgtggaggttctattggcgagcagctacaaagatatggttataccggcaacggaatgttcccctgg

SEQ ID NO: 429442 - DNA, 75 bp, synthetic construct
  source 1..75: mol_type = other DNA
tggcgttgaacgaagtgttcgtgccgattctgcaaaaacagttcccggaaattgtcgatttttacctgccgccgg

SEQ ID NO: 429443 - DNA, 75 bp, synthetic construct
  source 1..75: mol_type = other DNA
gattctgcaaaagcagttcccggaaatcgtcgatttttatctgccgccggaaggctgctcgtaccgcctggccgt

SEQ ID NO: 429444 - DNA, 75 bp, synthetic construct
  source 1..75: mol_type = other DNA
ctggttgtcgcatcgcggcggcgcgctggattatcaggagtggtgtgcggcgcatccgggcgaacgtttcccggt

SEQ ID NO: 429445 - DNA, 75 bp, synthetic construct
  source 1..75: mol_type = other DNA
cctttgtctaaaaagaaacaaatttttattaatggtgttccatttaaaattattggggtgattttaaaatcaaaa

SEQ ID NO: 429446 - DNA, 75 bp, synthetic construct
  source 1..75: mol_type = other DNA
caatgccggtgctgtgcaacttgttcggtacgccaaagcgcgtagcgatgggtatgggccaggaagatgtttcag

SEQ ID NO: 429447 - DNA, 75 bp, synthetic construct
  source 1..75: mol_type = other DNA
cgtggtgcgccctgccaacaaaaaatcgtctctggcgatgacgtcgatctcaatcgtattcccattatgacctgc

SEQ ID NO: 429448 - DNA, 75 bp, synthetic construct
  source 1..75: mol_type = other DNA
caagcagattattgaacaggctgaggcgtttcttgcggcctatgggatgagcaggtttgcccctgtcaattatga

SEQ ID NO: 429449 - DNA, 75 bp, synthetic construct
  source 1..75: mol_type = other DNA
gaatcaggttaagccacaactgcctatccttagcgcagtggtagtgaaagaaacttgtacagctggttgtattta

SEQ ID NO: 429450 - DNA, 75 bp, synthetic construct
  source 1..75: mol_type = other DNA
tagcgatgaaaaaaaggaattaatatctaaggcattgccagccctcagattcggacttaagactgtactcaaagc

SEQ ID NO: 429451 - DNA, 75 bp, synthetic construct
  source 1..75: mol_type = other DNA
gtttattaaagatatgcgtgatccccgggatatcaataacgaacaaaataaacgggcactggctgctatattctt

SEQ ID NO: 429452 - DNA, 75 bp, synthetic construct
  source 1..75: mol_type = other DNA
cgaagctggaatgctgaaacgaccagagagcgggagaggatggaaaatcaagaccccacgccttaagaaccttaa

SEQ ID NO: 429453 - DNA, 75 bp, synthetic construct
  source 1..75: mol_type = other DNA
cattggtaacgagcattaccgcgtgatgcgctggacagattcgacaacaaatcggcttgtcactatggccgtgcc

SEQ ID NO: 429454 - DNA, 75 bp, synthetic construct
  source 1..75: mol_type = other DNA
agcagccggaggactggacaccgcgcatggctggactgaaggatgatgcggaacgcggcaacagcctggtgatca

SEQ ID NO: 429455 - DNA, 75 bp, synthetic construct
  source 1..75: mol_type = other DNA
tgatttcagtaattgagaaggtgagcgtggatgataaatattttattagcgcaaacgccgctgagggtatattgc

SEQ ID NO: 429456 - DNA, 75 bp, synthetic construct
  source 1..75: mol_type = other DNA
gtgattgacccgttcttcgccgattctaccctgattatccgttgcgacatccttgaacctggcaccctgcaaggc

SEQ ID NO: 429457 - DNA, 75 bp, synthetic construct
  source 1..75: mol_type = other DNA
cacaggttgcaggctctctggaagaagcactgaacgaactggatctggaccgcgagttcctgaaagccggtggcg

SEQ ID NO: 429458 - DNA, 75 bp, synthetic construct
  source 1..75: mol_type = other DNA
gagctgattaaagcaatgaaccatttccgtacagtggtgagtttatttccaaatcggctagccatgccgaattaa

SEQ ID NO: 429459 - DNA, 75 bp, synthetic construct
  source 1..75: mol_type = other DNA
aaattagcggcattgattgaaaaaaatgaatctgggcataaagtagtatatattgatgcatttactgaagatcat

SEQ ID NO: 429460 - DNA, 75 bp, synthetic construct
  source 1..75: mol_type = other DNA
tgtagcatattgccttgctgctacatctggtagacatacaggaactgactggagtagaacttatatatcctatga

SEQ ID NO: 429461 - DNA, 75 bp, synthetic construct
  source 1..75: mol_type = other DNA
tgcaccataacgagcggcagaactggcgtaactatctggagactgagcgcaaaaacatttctgacgggctggtta

SEQ ID NO: 429462 - DNA, 75 bp, synthetic construct
  source 1..75: mol_type = other DNA
aagtcatcacaatggcggttccgtgcggtggcattggcgaccgtgacggctggcggctgctgaaagaccacggac

SEQ ID NO: 429463 - DNA, 75 bp, synthetic construct
  source 1..75: mol_type = other DNA
tcatcggcagggaaaaccaccacgcagaacatcgcatcaagtttatggggagagccggacgcacaacggctgacc

SEQ ID NO: 429464 - DNA, 75 bp, synthetic construct
  source 1..75: mol_type = other DNA
gaaacgaagatgacgagttccgtttttacacgttcccgcatgtatttgagggtgagatagcacagggatttaatc

SEQ ID NO: 429465 - DNA, 75 bp, synthetic construct
  source 1..75: mol_type = other DNA
cgacaaaagaaaacgccaccggaagtcatggcgatgatgaattaaagccccgcgtagaaagccgcgccgatggtg

SEQ ID NO: 429466 - DNA, 75 bp, synthetic construct
  source 1..75: mol_type = other DNA
aggtgtccacgtcagcctatacgctgtttaacggttccgggaaattacagggggcgaaggacggcggcaacaggg

SEQ ID NO: 429467 - DNA, 75 bp, synthetic construct
  source 1..75: mol_type = other DNA
gcattttggcgcgtacatcatgccggacggttcaatcattggtgattctgaaaaaccgatcctgtttaccggaaa

SEQ ID NO: 429468 - DNA, 75 bp, synthetic construct
  source 1..75: mol_type = other DNA
gtggcaggaacggcggagggttggcgcgataccgtggcgcggctggctggtggtaatccgtccatgatgctgggt

SEQ ID NO: 429469 - DNA, 75 bp, synthetic construct
  source 1..75: mol_type = other DNA
ggagtatcagaaacgaagatgacgagttccgcttttacacgttcccacatgtatttgagaaggagatagcccacg

SEQ ID NO: 429470 - DNA, 75 bp, synthetic construct
  source 1..75: mol_type = other DNA
taatcgggctggtgggcgctgacggcttcggggtacatcttttcgaacaatcatcggcagggaaaaccaccacac

SEQ ID NO: 429471 - DNA, 75 bp, synthetic construct
  source 1..75: mol_type = other DNA
aacggctgctgttaatggctattccgtggcaggaacggcggagggctggcgcgataccgttgcgcggctggctgg

SEQ ID NO: 429472 - DNA, 75 bp, synthetic construct
  source 1..75: mol_type = other DNA
tactggaggactggacaccgcagcttgcccggctgaaagacgaatacgagcgcggggaaagtctggtgttgccct

SEQ ID NO: 429473 - DNA, 75 bp, synthetic construct
  source 1..75: mol_type = other DNA
ccggaaaggcgcacgcagacgcgttaaaggatgcctggacagaaaatcacggggcggcgggtcgagagtgggtta

SEQ ID NO: 429474 - DNA, 75 bp, synthetic construct
  source 1..75: mol_type = other DNA
atctgtgggtgaaacgtccaaacttattcaactggcatatgacacaacctgatgaaagcattctggtttctgacg

SEQ ID NO: 429475 - DNA, 75 bp, synthetic construct
  source 1..75: mol_type = other DNA
aagccgttgtgcaattgcatcaggtgttgttgaaggaattcgcactggaagttaacccgtgtgaagaaggctatt

SEQ ID NO: 429476 - DNA, 75 bp, synthetic construct
  source 1..75: mol_type = other DNA
gtgaggcaggcgttattgataaggacatctgcaaaggcatgctgcaggtcgtcaacgtactggaaacgaaatacc

SEQ ID NO: 429477 - DNA, 75 bp, synthetic construct
  source 1..75: mol_type = other DNA
caaccagaaggcatcgcgcccacctggaccgtttcttcgttgcacgaactggagcagctcctgtgtaaacactga

SEQ ID NO: 429478 - DNA, 75 bp, synthetic construct
  source 1..75: mol_type = other DNA
aaatcccagcaaaacggtgctgtggatgcagcgaaatttaccttcaccccgccgcaaggcgtaacggtagatgac

SEQ ID NO: 429479 - DNA, 75 bp, synthetic construct
  source 1..75: mol_type = other DNA
gtaaaacactgtggttctataacccgttcgttgagcaagctacggcaacctggctgaaagatgccaccggtaata

SEQ ID NO: 429480 - DNA, 75 bp, synthetic construct
  source 1..75: mol_type = other DNA
tgtccgtcagcgaaagcaatcatctacgagataacttttttaaactgaatcgcgaactgcacgataaatcgctgc

SEQ ID NO: 429481 - DNA, 75 bp, synthetic construct
  source 1..75: mol_type = other DNA
aaatcagcccccaaggatgcaaagccaatccaaaaagaaatccccggattcggtgtcgttctcaacatgccgact

SEQ ID NO: 429482 - DNA, 75 bp, synthetic construct
  source 1..75: mol_type = other DNA
atgaaaaatttagctcatattgctctgataacggtgatacagctcatagcctgttatctggctgattgggggggc

SEQ ID NO: 429483 - DNA, 75 bp, synthetic construct
  source 1..75: mol_type = other DNA
aacgatggcgatgacacatatggcgagtgcactgatgcgcagtcgccgtggtgaagaaatagagccgctggataa

SEQ ID NO: 429484 - DNA, 75 bp, synthetic construct
  source 1..75: mol_type = other DNA
gtgggcttgttatcaagcttccggcagaagagcaaaagctgcaaaggaagaccaggcatcacgagcaaaatgttc

SEQ ID NO: 429485 - DNA, 75 bp, synthetic construct
  source 1..75: mol_type = other DNA
atgttcgttgacagacagcgaagcgatctacttaaccggttgatcgatgcaagagttgacctcgccgcatatgtg

SEQ ID NO: 429486 - DNA, 75 bp, synthetic construct
  source 1..75: mol_type = other DNA
ttccgaagaagttggcgttgctaaaccgaataagaaaatattcgattatgcgctggaacaggcgggcaatcctga

SEQ ID NO: 429487 - DNA, 75 bp, synthetic construct
  source 1..75: mol_type = other DNA
atcctgccgcgattgcgttcttagtccgtggctattgcaccaccatcacgcgaaagggacagctaagcgcggcgg

SEQ ID NO: 429488 - DNA, 75 bp, synthetic construct
  source 1..75: mol_type = other DNA
gaagtggatattatctccgggctgttggatgagctggacgaaaaacagcaatacattaaatcccgcgaccaggag

SEQ ID NO: 429489 - DNA, 75 bp, synthetic construct
  source 1..75: mol_type = other DNA
ggctaaatttaaccagaaaaaagccgctgaattactgggtctgacttatcatcagctacgtgccttactgaagaa

SEQ ID NO: 429490 - DNA, 75 bp, synthetic construct
  source 1..75: mol_type = other DNA
tcctgggagatttgaacgtgccgacggcggtacgctatttcttgatgaactcgctacggcaccgatgatggtgca

SEQ ID NO: 429491 - DNA, 75 bp, synthetic construct
  source 1..75: mol_type = other DNA
ggcggtacgctatttcttgatgaactcgctacggcaccgatgatggtgcaggaaaaattattgcgtgtgattgag

SEQ ID NO: 429492 - DNA, 75 bp, synthetic construct
  source 1..75: mol_type = other DNA
gatcctttagtgagcgatgttctgcgcgcattaaccgtcagccccgaccaggtgctgcaactgacgccagaaaaa

SEQ ID NO: 429493 - DNA, 75 bp, synthetic construct
  source 1..75: mol_type = other DNA
atgttcgtctattccaccgccatcaccaacgatagtgcttcctatctgcataccttcggcgtgacggaagggttg

SEQ ID NO: 429494 - DNA, 75 bp, synthetic construct
  source 1..75: mol_type = other DNA
cctttaccggcgcgcagaaacgtcacccaggtcggttcgagcgcgccgatggcggcacactgtttcttgatgaac

SEQ ID NO: 429495 - DNA, 75 bp, synthetic construct
  source 1..75: mol_type = other DNA
ttccgaagaagttggtgtcgccaagccgaataagaaaattttcgattatgccctggaacaggcgggcaatcctga

SEQ ID NO: 429496 - DNA, 75 bp, synthetic construct
  source 1..75: mol_type = other DNA
cgaagcggtaaaagcctacgagcagaatatttccgcgctggcgattgccgcacagtttattagcggtgacggcgc

SEQ ID NO: 429497 - DNA, 75 bp, synthetic construct
  source 1..75: mol_type = other DNA
aacgcaagggatcgtaactggactatcctgcgtcgcaagatgcctgccgagaagattaacgaaaatctcgttcag

SEQ ID NO: 429498 - DNA, 75 bp, synthetic construct
  source 1..75: mol_type = other DNA
tttgccgtaatgaccgcgttttttggcgtctatttaggcttccgtgaagcaacgcaagggatcgtaatgaacatc

SEQ ID NO: 429499 - DNA, 75 bp, synthetic construct
  source 1..75: mol_type = other DNA
agtttaaattcagtaaagccgtttggtatataacgatgccagtatcttccttactttcccctctattaagcctga

SEQ ID NO: 429500 - DNA, 75 bp, synthetic construct
  source 1..75: mol_type = other DNA
gctgcacacaggtcaggtatacctctaacaatttttaattatcctttgtgtcatcttcctgaaagagcttgggag

SEQ ID NO: 429501 - DNA, 75 bp, synthetic construct
  source 1..75: mol_type = other DNA
attctaccatgctttgattactctgttattagcactgaattatttgagtcaattgaagatggagatattgggata

SEQ ID NO: 429502 - DNA, 75 bp, synthetic construct
  source 1..75: mol_type = other DNA
atggtgtagtaggagtgagtgggggagaacctctactgtatggcgaagatttcttgcaatttctggacttcataa

SEQ ID NO: 429503 - DNA, 75 bp, synthetic construct
  source 1..75: mol_type = other DNA
atgcgacatagcgtactttttgcgacagcgtttgccacgcttatctctacacaaacttttgctgccgatctgccg

SEQ ID NO: 429504 - DNA, 75 bp, synthetic construct
  source 1..75: mol_type = other DNA
tcagaataaataataatggtgtcatcccttatatcatcattggtaataaagatcataggaagttaccaattaaaa

SEQ ID NO: 429505 - DNA, 75 bp, synthetic construct
  source 1..75: mol_type = other DNA
ttatctcaatgattcattatgcgcgattgatgaagataataaagatgccaccgtataccagtctggtctttataa

SEQ ID NO: 429506 - DNA, 75 bp, synthetic construct
  source 1..75: mol_type = other DNA
ctttaaaagaagtgctggaaatcccgacggtgaagctgtggcgcgccattctggatactgaaacagaatcatatc

SEQ ID NO: 429507 - DNA, 75 bp, synthetic construct
  source 1..75: mol_type = other DNA
aacacggaaacaagatcagtctgaatgaacagcaaagaaaggcgtttaacatattggttaataatggacctctct

SEQ ID NO: 429508 - DNA, 75 bp, synthetic construct
  source 1..75: mol_type = other DNA
cggtttaaaaaagcggtagacagttatgaccaagcgtcaacacaagatctgatagagattacagcaggaaacgcc

SEQ ID NO: 429509 - DNA, 75 bp, synthetic construct
  source 1..75: mol_type = other DNA
aatattattgcagatgaagtttcactggataacaaaaaagcccgcgacgcatttattcgccgcaggctgggactt

SEQ ID NO: 429510 - DNA, 75 bp, synthetic construct
  source 1..75: mol_type = other DNA
attgctgccattttatgctgcattgctagtagcgttgatgatgatcacttacattccgcaaatatccttgttcat

SEQ ID NO: 429511 - DNA, 75 bp, synthetic construct
  source 1..75: mol_type = other DNA
tgctagtagcgttgatgatgattacctatatcccgcaaatttctttgttggttccgcagttgctagggttaatgt

SEQ ID NO: 429512 - DNA, 75 bp, synthetic construct
  source 1..75: mol_type = other DNA
tgccgggagataaaaacgccgacaccaaactgccgaatggcgcgaattatggcttcccggtaagtaccatacata

SEQ ID NO: 429513 - DNA, 75 bp, synthetic construct
  source 1..75: mol_type = other DNA
gtgcagctgatggagtctgcccgagcaagcgccgaaccgccaacagatccggttattaataataatccggaaccg

SEQ ID NO: 429514 - DNA, 75 bp, synthetic construct
  source 1..75: mol_type = other DNA
cgacttacagttattagcgactatatatcatggatttatgattcgttttatagaggttctgtgtatgaaacaaat

SEQ ID NO: 429515 - DNA, 75 bp, synthetic construct
  source 1..75: mol_type = other DNA
tcatttccttttttatatcgatatcaatcccttgggtagaattatcttttgggttattcaagaatgaagagaata

SEQ ID NO: 429516 - DNA, 75 bp, synthetic construct
  source 1..75: mol_type = other DNA
acaccctggtagttaaagggaagttaaacgtcacggacagcgtatcggtcgtcgtagcgactggaaaaaagctta

SEQ ID NO: 429517 - DNA, 75 bp, synthetic construct
  source 1..75: mol_type = other DNA
tcatagtactatggcagggactgtttatctggttgttctctcaaatacgaaaaaaacggaatgtgtcggatgagt

SEQ ID NO: 429518 - DNA, 75 bp, synthetic construct
  source 1..75: mol_type = other DNA
atgagcaaaaacttttttcaatccggggcatttttggggaatgaattgtcccgtttcgctttgaacgctgatccg

SEQ ID NO: 429519 - DNA, 75 bp, synthetic construct
  source 1..75: mol_type = other DNA
tgcagagccggtttcgtccgtgttttcccgtcgggtcgcacttacgcttgccgtacgacgggagccagcttctta

SEQ ID NO: 429520 - DNA, 75 bp, synthetic construct
  source 1..75: mol_type = other DNA
actgtgcgtctgtatgagtccggtgccacggttcagggctgctcagcctttaaggcagggcaggtcgccaccctg

SEQ ID NO: 429521 - DNA, 75 bp, synthetic construct
  source 1..75: mol_type = other DNA
cgacaccatcagtcgctacaaagagggcaaaccggtgttttactacacctggacgccgtactgggtgagtaatga

SEQ ID NO: 429522 - DNA, 75 bp, synthetic construct
  source 1..75: mol_type = other DNA
ccagcgaagttttagcaaaatggatttgggatcaagttaaacccgttgtaccactattaagcgctgtgatggtga

SEQ ID NO: 429523 - DNA, 75 bp, synthetic construct
  source 1..75: mol_type = other DNA
tggctgctgttttcgctctttctgctctttctcccgcagcaatggcagcgaaaggggacccgcacgtattgttga

SEQ ID NO: 429524 - DNA, 75 bp, synthetic construct
  source 1..75: mol_type = other DNA
ttcagtgctgacgtggtggcttcggcctgtcatgtggtggtggatgcggacagcaccggcaacagtgggcggctg

SEQ ID NO: 429525 - DNA, 75 bp, synthetic construct
  source 1..75: mol_type = other DNA
ccaccaagacgaaaaattgaaactgcagaaagtgtagtaattagttataatgaagatgaccgtccagaaataaga

SEQ ID NO: 429526 - DNA, 75 bp, synthetic construct
  source 1..75: mol_type = other DNA
cacctatatcaaaactatttttgacctgaataaatcatttggtattaacaagtttatcatcattgttccgactct

SEQ ID NO: 429527 - DNA, 75 bp, synthetic construct
  source 1..75: mol_type = other DNA
aacttttcaatgatgaaatcattgatgacaatgataatttcaaagattcagatgcatatagccgcttaaaatcaa

SEQ ID NO: 429528 - DNA, 75 bp, synthetic construct
  source 1..75: mol_type = other DNA
aaaaccagcccggagctggccgagcttttgcgacagcagcatagcgatgttcgtcccagtcggcatctgaacaaa

SEQ ID NO: 429529 - DNA, 75 bp, synthetic construct
  source 1..75: mol_type = other DNA
cagcagggattgtattaacagcagagttgttgagtgatgataaaaatgatgtccagcatcatttggacgaaaaga

SEQ ID NO: 429530 - DNA, 75 bp, synthetic construct
  source 1..75: mol_type = other DNA
tattgaccagcatttttgggccgttagatgaaaaatcaccaattctcaacacattcaaaactcaaacaaaaaatg

SEQ ID NO: 429531 - DNA, 75 bp, synthetic construct
  source 1..75: mol_type = other DNA
cgttgattcggtaatgaatgtctttgtatccgccatacctcatcagacggatcatgttgcaattcgcctgttagc

SEQ ID NO: 429532 - DNA, 75 bp, synthetic construct
  source 1..75: mol_type = other DNA
taatgccaacctcaagttcgtcaaatctgacggaaaagaagctacatttgaactgaacgaaaatagcaataaaaa

SEQ ID NO: 429533 - DNA, 75 bp, synthetic construct
  source 1..75: mol_type = other DNA
agcgatcgctgacaaaaaactgctggataacgcagcagcagacctagcagcaatctccggtcaaaaaccgctgat

SEQ ID NO: 429534 - DNA, 75 bp, synthetic construct
  source 1..75: mol_type = other DNA
aactgaatgaaaatagcaataaaaaaacgttcaagttagctaaaggtgaatcactatctaagacacatggtgcta

SEQ ID NO: 429535 - DNA, 75 bp, synthetic construct
  source 1..75: mol_type = other DNA
ttcaataagaaatatatacacgttcttgtgatcaattcaggaatgatcaattctaagtctttaactgacagttat

SEQ ID NO: 429536 - DNA, 75 bp, synthetic construct
  source 1..75: mol_type = other DNA
atgtcgaaaagcattctcagtgttgatgaggataattttcccaaaataaacacaatgagctatcgtgaattcctt

SEQ ID NO: 429537 - DNA, 75 bp, synthetic construct
  source 1..75: mol_type = other DNA
ttaacagcgaaaggttgcgaaaatccgtcggtgtagaacgcacgatggcggaagatattcatcactggtctgaat

SEQ ID NO: 429538 - DNA, 75 bp, synthetic construct
  source 1..75: mol_type = other DNA
caactagccgtctcacatatgacattattagtcaactccatttgccacaaaatggctatttcatggaacgcagta

SEQ ID NO: 429539 - DNA, 75 bp, synthetic construct
  source 1..75: mol_type = other DNA
gtaatggctgctggcatgggcatactgggtacgatgatgcatatcggtatccactcaccgtcggcgcagtatttt

SEQ ID NO: 429540 - DNA, 75 bp, synthetic construct
  source 1..75: mol_type = other DNA
aaaatcttcgaactggcgggttataccaatactaccgagcaaatgtgggggacagtgatcgttggtctgaccaac

SEQ ID NO: 429541 - DNA, 75 bp, synthetic construct
  source 1..75: mol_type = other DNA
atgcttattggctatgttttcgtatcaacaaatgaccagaaaatcgatctacaacgtaatgcgttgaactgtgca

SEQ ID NO: 429542 - DNA, 75 bp, synthetic construct
  source 1..75: mol_type = other DNA
gctcacggataaaaaattcaaagaaatcgtggttgaaattgataatcgtaaaaaaatgcagcagcaattaatcag

SEQ ID NO: 429543 - DNA, 75 bp, synthetic construct
  source 1..75: mol_type = other DNA
caaacacatgatcgaagaagctgcagcaatgactaaccagtcaatttcgcagttcatggtcagtaccgcctcaga

SEQ ID NO: 429544 - DNA, 75 bp, synthetic construct
  source 1..75: mol_type = other DNA
tatgccgacagggatggcgctcaaattatgcccgcatctcaccttgcttccagggcgctttgacgcctacaaaga

SEQ ID NO: 429545 - DNA, 75 bp, synthetic construct
  source 1..75: mol_type = other DNA
ggcgatgaaaaagtgaaatacagggaaatttctaaagaatcactttacaaactttcagaagagatagacgcgaaa

SEQ ID NO: 429546 - DNA, 75 bp, synthetic construct
  source 1..75: mol_type = other DNA
tctattatattgataaataaattgataaaagaattcttatttcaccagtgtgctgatagtacatacgttattaaa

SEQ ID NO: 429547 - DNA, 75 bp, synthetic construct
  source 1..75: mol_type = other DNA
aggtaatgcagcaattcaccgggatgaacgtcatcatgtattatgcgccgaaaatcttcgaactggcgggttata

SEQ ID NO: 429548 - DNA, 75 bp, synthetic construct
  source 1..75: mol_type = other DNA
gtcggcgcaacgttcctgaccatgctcaacacgctgggcaacgccaacaccttctgggtgtatgcggctctgaac

SEQ ID NO: 429549 - DNA, 75 bp, synthetic construct
  source 1..75: mol_type = other DNA
acggtcagtttgtgattacgccggctgaggttccggcatttctgcaaaccttaccgctggcaaaaattcccggcg

SEQ ID NO: 429550 - DNA, 75 bp, synthetic construct
  source 1..75: mol_type = other DNA
atcactgaatacctgaacattcaaacaatcagaaagattaaatctggttttagcaagtatttgttgaacaattcg

SEQ ID NO: 429551 - DNA, 75 bp, synthetic construct
  source 1..75: mol_type = other DNA
ctggggtgagaatgcggtgagcgaggatgaagtgggttacctgaccgttcattttcaggctgcgatggagcggca

SEQ ID NO: 429552 - DNA, 75 bp, synthetic construct
  source 1..75: mol_type = other DNA
ttgcctacagtcactatgccggtcgcttatgttaccgcttttttaatgatgccgatattaagcgggtcactgaaa

SEQ ID NO: 429553 - DNA, 75 bp, synthetic construct
  source 1..75: mol_type = other DNA
gtgtattcactaaagcagttggttatctcaggccgtaaaaggcgatggatcctgatggacttggaaacctctctg

SEQ ID NO: 429554 - DNA, 75 bp, synthetic construct
  source 1..75: mol_type = other DNA
gattgatgacattatgagtgtgcagtatcctgaatataaaacagatgaatattatgatgccattgaaagcatctc

SEQ ID NO: 429555 - DNA, 75 bp, synthetic construct
  source 1..75: mol_type = other DNA
aagcaacatccaccactgtcataccatgctgtttatgaaatatttacccggattgatgatattatgagtgtgcaa

SEQ ID NO: 429556 - DNA, 75 bp, synthetic construct
  source 1..75: mol_type = other DNA
gcgtgtcagtgaattactgcttttggagtgtcattcgattaaaaccaatctcagaggagatcagttcagcctgat

SEQ ID NO: 429557 - DNA, 75 bp, synthetic construct
  source 1..75: mol_type = other DNA
tgaccaaatgccagaacattacagccggcactaacaccacgctgtatctgaagcgtgaagatttactgcacggtg

SEQ ID NO: 429558 - DNA, 75 bp, synthetic construct
  source 1..75: mol_type = other DNA
agcaggcaacgcgggtgacattaggacgctgcccgcaaggcctctttactgattgccgcaccggctgggaaatag

SEQ ID NO: 429559 - DNA, 75 bp, synthetic construct
  source 1..75: mol_type = other DNA
tttattgccgctgctggaacgcgcgctcgcaggaaatctcattgcaacgcacagcgtggtgttgtccccttttga

SEQ ID NO: 429560 - DNA, 75 bp, synthetic construct
  source 1..75: mol_type = other DNA
tcggcccacaacacgcgtatcttaacagcactggacgcgctgattatgtgtcaattaccgatgatgaagcactgg

SEQ ID NO: 429561 - DNA, 75 bp, synthetic construct
  source 1..75: mol_type = other DNA
tgaccaaatgccagaacataacggctggcacgaacaccacgctgtatctgaagcgtgaagatttgctgcacggcg

SEQ ID NO: 429562 - DNA, 75 bp, synthetic construct
  source 1..75: mol_type = other DNA
tctattaccgatgatgaagcccttgaagccttcaaaacgctgtgcctgcacgaagggattatcccggcgctggaa

SEQ ID NO: 429563 - DNA, 75 bp, synthetic construct
  source 1..75: mol_type = other DNA
aagttgaaccgaatcctaagtgctttaagtgaaggggtgaatgttggaaagaagaacataatcgaagcgatattt

SEQ ID NO: 429564 - DNA, 75 bp, synthetic construct
  source 1..75: mol_type = other DNA
taaatctgttaaagtcgagttcagaacacaattttctacagacagaatagctgaaatgattaaacaagttggatg

SEQ ID NO: 429565 - DNA, 75 bp, synthetic construct
  source 1..75: mol_type = other DNA
aagctattagtccatcagacgctacaactaactgcactaattctagtggcaacaacacagtaacttattttatga

SEQ ID NO: 429566 - DNA, 75 bp, synthetic construct
  source 1..75: mol_type = other DNA
tgttttactaccagtctgcgtctgattccaataagtcacagaatgctatttcagaagtaatgagcgcaacgtctg

SEQ ID NO: 429567 - DNA, 75 bp, synthetic construct
  source 1..75: mol_type = other DNA
agtgaaaccaagcaaaatcaaaaaagccactgatggaaaaagacgcactaaaatgcgtgttggtaagttcagtga

SEQ ID NO: 429568 - DNA, 75 bp, synthetic construct
  source 1..75: mol_type = other DNA
attttacggaaaaggattttgtcgattcgcttgtcaaagaggtcaacgatagctccttcaaagaaacggttccaa

SEQ ID NO: 429569 - DNA, 75 bp, synthetic construct
  source 1..75: mol_type = other DNA
atcatgttgcaattcgcctgttagctaatccagaactgaatctatctgaacaacaatactacaacaacataaaaa

SEQ ID NO: 429570 - DNA, 75 bp, synthetic construct
  source 1..75: mol_type = other DNA
ctgtccccgtgattgactggttctttaaacaagcaaccgaggcgttgcatcacgaactatggataccggcctgta

SEQ ID NO: 429571 - DNA, 75 bp, synthetic construct
  source 1..75: mol_type = other DNA
atgttgcatttttatgatgacactaaaggggggaagtcttacaagtctgtagcagtacgcctcgatctggatggt

SEQ ID NO: 429572 - DNA, 75 bp, synthetic construct
  source 1..75: mol_type = other DNA
ttagtgaaggagttaatgttggaaagaagaacataatcgaagcggtattcaatatatctatcggtaatgatgatt

SEQ ID NO: 429573 - DNA, 75 bp, synthetic construct
  source 1..75: mol_type = other DNA
tctatatattgggcaaaatagttatagtggattgactgcaagtattcttaaaaattcctctgcgatacctgagaa

SEQ ID NO: 429574 - DNA, 75 bp, synthetic construct
  source 1..75: mol_type = other DNA
attggcatcgagatccctaatagggtaaccagctttaatggtactttgagcagtaacagcgggaaaaagaccgct

SEQ ID NO: 429575 - DNA, 75 bp, synthetic construct
  source 1..75: mol_type = other DNA
acacaatcagctatttctgaagtaatgagtgcaacttcagcaattaatggcctatatattgggcaaagtgattat

SEQ ID NO: 429576 - DNA, 75 bp, synthetic construct
  source 1..75: mol_type = other DNA
caacaagcgcgagcaattctactttgttccgcgtctggcacttgaccagctggcggccgcatatgccaaaggcaa

SEQ ID NO: 429577 - DNA, 75 bp, synthetic construct
  source 1..75: mol_type = other DNA
cgaatagagatccgcacgcttgaagatggcagccaggtgctgttcgcgcctttctctgctgtgaaggggtgttca

SEQ ID NO: 429578 - DNA, 75 bp, synthetic construct
  source 1..75: mol_type = other DNA
gtgtcatctaaccgaatcgagatccgcacgcttgaagatggcagccaggtgctgtatgcgcccttctctgctgtg

SEQ ID NO: 429579 - DNA, 75 bp, synthetic construct
  source 1..75: mol_type = other DNA
aaaagtaggtgcgttcgcatcgattgagtctggcagtctgccagcgacagatccggaacgactgcgcgaccaggc

SEQ ID NO: 429580 - DNA, 75 bp, synthetic construct
  source 1..75: mol_type = other DNA
agaggtactgtagaggttcacaaacacgcaaaactggattgctcagacggtaagcgtagaagctacagcgaggct

SEQ ID NO: 429581 - DNA, 75 bp, synthetic construct
  source 1..75: mol_type = other DNA
tacagcgtggtttatccgcaccctaccccattctacgaccagattaacgtccgggcgatgaaagtggcgagcgca

SEQ ID NO: 429582 - DNA, 75 bp, synthetic construct
  source 1..75: mol_type = other DNA
ctggatagacgttgagctggaagatggcactacacagcgcattcaccgtgcggaacattttaaatgcgaagacgg

SEQ ID NO: 429583 - DNA, 75 bp, synthetic construct
  source 1..75: mol_type = other DNA
gtggcagccgggcaacggcattgtttaacaacaaaaacaagccatccgatttggtcggcaggaaggagtatcttc

SEQ ID NO: 429584 - DNA, 75 bp, synthetic construct
  source 1..75: mol_type = other DNA
ggatgcggatttggacttcagccaggcacgtcgccatgaagtgatcgagtatctgaatgaacgctacggcgaaga

SEQ ID NO: 429585 - DNA, 75 bp, synthetic construct
  source 1..75: mol_type = other DNA
cataaccaacgtcgaccctatccgtcacggtcttctgtttgaacgtttcatcaaccctgagcgtctcgacttgcc

SEQ ID NO: 429586 - DNA, 75 bp, synthetic construct
  source 1..75: mol_type = other DNA
gcacgcttgaagatggcagccaggtgctgtatgcgcccttctctgctgtgaaggggtgttctgagaatggctgcc

SEQ ID NO: 429587 - DNA, 75 bp, synthetic construct
  source 1..75: mol_type = other DNA
catgcggcagggatgatcgtagcaggtgttcctctgacagaacgtacaccggttgaacgccgtggtgacgcgcgt

SEQ ID NO: 429588 - DNA, 75 bp, synthetic construct
  source 1..75: mol_type = other DNA
cgcaagctgcttaaagatttaggtggtggaattgagccaatgagctttaaaacggtcgtcgctacgactgcgctc

SEQ ID NO: 429589 - DNA, 75 bp, synthetic construct
  source 1..75: mol_type = other DNA
ggtgagtattgtcgaaaatccctacattgccgtattactgattagtattggcgcgttctcgcatcaatgtctttc

SEQ ID NO: 429590 - DNA, 75 bp, synthetic construct
  source 1..75: mol_type = other DNA
aagcctcgctcaaggtgtccccggaagatcttgacggcgtgttcaatgctgttaatggggctgtggcgcaacttc

SEQ ID NO: 429591 - DNA, 75 bp, synthetic construct
  source 1..75: mol_type = other DNA
atttcagcctaaaagaaattgctatgtttgtatggcttccttttcttatggctgatttaggttgccttgccagtg

SEQ ID NO: 429592 - DNA, 75 bp, synthetic construct
  source 1..75: mol_type = other DNA
ccctggctttctttgacattattggcgccattgcgctgtggatgcttatcaaagttaaagacgaagaaccacaag

SEQ ID NO: 429593 - DNA, 75 bp, synthetic construct
  source 1..75: mol_type = other DNA
ggtgtaaaaaccgcatcaacatggttcccggcaaaagagcgtggcgtggcgacaggtgttttcaatatgggcacc

SEQ ID NO: 429594 - DNA, 75 bp, synthetic construct
  source 1..75: mol_type = other DNA
attattggtgctattgcgttgtggacgcttatcaaagttaaagatgaagaaccgcaagtacagctagctacccat

SEQ ID NO: 429595 - DNA, 75 bp, synthetic construct
  source 1..75: mol_type = other DNA
tgcatatatggacttggaacatgggggatataaaaacaaatatctctgtgatttagctaatgcacgaataaataa

SEQ ID NO: 429596 - DNA, 75 bp, synthetic construct
  source 1..75: mol_type = other DNA
aggcgaggtatcggtgattatctggatgaggctgagcaagagcttatcgttaccattaacaaatatgccagtcag

SEQ ID NO: 429597 - DNA, 75 bp, synthetic construct
  source 1..75: mol_type = other DNA
atcaagcaatctacctgataaggcgatggaatatctgaagcagaacggactggttggtgtggaggatgttttacg

SEQ ID NO: 429598 - DNA, 75 bp, synthetic construct
  source 1..75: mol_type = other DNA
ggcatatgatagttcttgtatgctttattactatcattaactatttggaccgaacagctcttggtgttgctgcgc

SEQ ID NO: 429599 - DNA, 75 bp, synthetic construct
  source 1..75: mol_type = other DNA
caaagaaacttttggggaatcggtatttcccgctttttagctgacccggcatggggaactattaacttctgggtg

SEQ ID NO: 429600 - DNA, 75 bp, synthetic construct
  source 1..75: mol_type = other DNA
caacgcaatcagcagacgttcgcccggaagctgagctgaaccgcgcagaacgcatcaaagcagccttaatagcca

SEQ ID NO: 429601 - DNA, 75 bp, synthetic construct
  source 1..75: mol_type = other DNA
ggtagcgtgttccaacgcaacgattttgcaaaaatcataagctcactgattacagcgggtggaaaagacaacttc

SEQ ID NO: 429602 - DNA, 75 bp, synthetic construct
  source 1..75: mol_type = other DNA
ccaacgataattgcctccgttccggcgcagaaatcagctgctgagcggctcgtcaaagttatcctggcacaaagc

SEQ ID NO: 429603 - DNA, 75 bp, synthetic construct
  source 1..75: mol_type = other DNA
aaggtaaaacctgatttactgattgcccgccagggggtgaaattaaaattcgatgattttcaacaaaccactcag

SEQ ID NO: 429604 - DNA, 75 bp, synthetic construct
  source 1..75: mol_type = other DNA
ttcgttgggatttcgcacctatgcagtcactcgaactggaagcgggctacagccgccaaggtaacctgtatgcgg

SEQ ID NO: 429605 - DNA, 75 bp, synthetic construct
  source 1..75: mol_type = other DNA
atgagtgagttggagaatttcttcctcatttcatcctggtccggtgtctgcgccagcactgaaaaagatagagcg

SEQ ID NO: 429606 - DNA, 75 bp, synthetic construct
  source 1..75: mol_type = other DNA
agcatcaccgctttgcatttcctgcacgtctggtcacggcatcaggcagttatcctgtcgactttaccactctct

SEQ ID NO: 429607 - DNA, 75 bp, synthetic construct
  source 1..75: mol_type = other DNA
gggattacatccagttccacgcggtgatgatcaatgcgtttggctacgcaatgcaggaactactacggcatcgcc

SEQ ID NO: 429608 - DNA, 75 bp, synthetic construct
  source 1..75: mol_type = other DNA
tggtacggtaagcagcagccgaaaaaatacaactacaaaggtcagccagcggttggcccggaaaccaaagaaatc

SEQ ID NO: 429609 - DNA, 75 bp, synthetic construct
  source 1..75: mol_type = other DNA
gatgacttcacgctcaaaatgggcattgcccgtgcttataaagcaccgagcctgtaccagactaacccgaactac

SEQ ID NO: 429610 - DNA, 75 bp, synthetic construct
  source 1..75: mol_type = other DNA
caacaaatgaccagaaaatcgatctacaacgtaatgcgttgaactgtgcaggatgcgagctgatttttgaagaca

SEQ ID NO: 429611 - DNA, 75 bp, synthetic construct
  source 1..75: mol_type = other DNA
gcagaacttgcaggcgcctggcgtttcgaccatcaccgcagatgaaatccgcaaaaacccggttgcccgcgatgt

SEQ ID NO: 429612 - DNA, 75 bp, synthetic construct
  source 1..75: mol_type = other DNA
cgaataccggcggtgctattgatggcgtgagtgcgacagaccgtagcccatattcaaaagcagaaattttctcgc

SEQ ID NO: 429613 - DNA, 75 bp, synthetic construct
  source 1..75: mol_type = other DNA
gggcgatctggcaggagccaactatatcgccggtgccggggcgtatacctataacgagccgggacgtacgtggta

SEQ ID NO: 429614 - DNA, 75 bp, synthetic construct
  source 1..75: mol_type = other DNA
gaattttgggtgttatgagtgtaaaatagaccatagtgcacttaatgaatcaatattgaaaattaataaattaaa

SEQ ID NO: 429615 - DNA, 75 bp, synthetic construct
  source 1..75: mol_type = other DNA
acgtgtctcggcgaacggctttttaagcccttatgcgatggatgcgcccgcactggggatggacgggccgtacta

SEQ ID NO: 429616 - DNA, 75 bp, synthetic construct
  source 1..75: mol_type = other DNA
catattacggcaaccttttacgggtttatttaagttctcctgtctggtggctggtaaattattcactacgtcata

SEQ ID NO: 429617 - DNA, 75 bp, synthetic construct
  source 1..75: mol_type = other DNA
ttttattcggcaaaacgacggtatgtctgggccattttcaggatggtttccgtaacggtaagaaaaatattgtgt

SEQ ID NO: 429618 - DNA, 75 bp, synthetic construct
  source 1..75: mol_type = other DNA
gtaccgcgtctctcgctcgaacagttggtttctacatatgccaaaggcaacatcatcctgcttacttccgacatc

SEQ ID NO: 429619 - DNA, 75 bp, synthetic construct
  source 1..75: mol_type = other DNA
ggaaactttcgggaaaacaagaattcgtcaaccaataattttcgggaaatcgcggaaacgtcaaccaactctccg

SEQ ID NO: 429620 - DNA, 75 bp, synthetic construct
  source 1..75: mol_type = other DNA
ttacggcctggtgctgctggcgcatcagcaaaatattcttgtccagatgcttggggatctgccggtcggatttat

SEQ ID NO: 429621 - DNA, 75 bp, synthetic construct
  source 1..75: mol_type = other DNA
tgatgatcttgccgacgctgaaacgatcagcgtttcccaacataaccagactacgggcacctaccatgacgcata

SEQ ID NO: 429622 - DNA, 75 bp, synthetic construct
  source 1..75: mol_type = other DNA
agcgtggtgattatcgcggtggccatttatattcgtctgcatcttaaagagtcaccgtcattcgccaaacttgaa

SEQ ID NO: 429623 - DNA, 75 bp, synthetic construct
  source 1..75: mol_type = other DNA
gtaggcggcattctcttcggctcattaggtgatcgtctgggacgtaaatttgtcctgctcgcaacggtgttgtta

SEQ ID NO: 429624 - DNA, 75 bp, synthetic construct
  source 1..75: mol_type = other DNA
cataccctgaaagagattattgccaaaccgcgactaaccggcagggaatttcatgatgtgcgaaaaatcatcagc

SEQ ID NO: 429625 - DNA, 75 bp, synthetic construct
  source 1..75: mol_type = other DNA
cagtagttcttcgacctgaatcaggggttacagtaacgattaaaggcattcctaacgatatcacaaacgaagaag

SEQ ID NO: 429626 - DNA, 75 bp, synthetic construct
  source 1..75: mol_type = other DNA
caagatcgccgaggctggtttgaaagtccatcagcaccaacaagcgaacgtaccggactttaacaactacttcta

SEQ ID NO: 429627 - DNA, 75 bp, synthetic construct
  source 1..75: mol_type = other DNA
ttcgttgtcatccgccctggtgcgttcgccaaagttactgacggcgaagaaatcagcatgagcggcaagccgtac

SEQ ID NO: 429628 - DNA, 75 bp, synthetic construct
  source 1..75: mol_type = other DNA
tatcacaatcttaatgaagaagatctgcgtaaaagtctctactggcatcaggataacgacgctgtcagccattta

SEQ ID NO: 429629 - DNA, 75 bp, synthetic construct
  source 1..75: mol_type = other DNA
ttgaagagcaggataacctgcaagaggcgctgattcgttggttatgcgattaccataatctcaacgaagaagatc

SEQ ID NO: 429630 - DNA, 75 bp, synthetic construct
  source 1..75: mol_type = other DNA
ccgcatagtgcactgggttatcgctcgccacgggaatatctacggcagcgggcttgtaatgggttaagtgataac

SEQ ID NO: 429631 - DNA, 75 bp, synthetic construct
  source 1..75: mol_type = other DNA
acaggcaagattgcaggcgacgaccggtcatgcggaagaagctgtggcgagttacaacaaactgttcaacggtgc

SEQ ID NO: 429632 - DNA, 75 bp, synthetic construct
  source 1..75: mol_type = other DNA
gctgcgcaatcgcaactggcagaacagcaaaaacagctggccgatcctgctttccgcgctcgtgcgcaaggttta

SEQ ID NO: 429633 - DNA, 75 bp, synthetic construct
  source 1..75: mol_type = other DNA
tgagcagggcggcgacgcacaagccattatgcaggatctggcatggaaactgactaaccgcctgatccatgcgcc

SEQ ID NO: 429634 - DNA, 75 bp, synthetic construct
  source 1..75: mol_type = other DNA
cgacagtgaaacagtacaggacgtcatgctgggagcggtggaacgccgcttcggcaacgagcttccggcgtctcc

SEQ ID NO: 429635 - DNA, 75 bp, synthetic construct
  source 1..75: mol_type = other DNA
tggaacgccgcttcggcaacgagcttccggcgtctccagtggagtggctgacggataatggttcatgctaccggg

SEQ ID NO: 429636 - DNA, 75 bp, synthetic construct
  source 1..75: mol_type = other DNA
aaccttgcagaggcgttcgagcattataacgaatggcatccgcatagtgcgctgggttatcgctcgccacgggaa

SEQ ID NO: 429637 - DNA, 75 bp, synthetic construct
  source 1..75: mol_type = other DNA
cgttcgagcattataacgaatggcatccgcatagtgctctgggttatcgctcgccacgggaatatctgcggcagc

SEQ ID NO: 429638 - DNA, 75 bp, synthetic construct
  source 1..75: mol_type = other DNA
ttaatcgtgattttttgcgcgcgcgatatttctcgcccgcgatttgttctgataggcattggcgtgtcctggttt

SEQ ID NO: 429639 - DNA, 75 bp, synthetic construct
  source 1..75: mol_type = other DNA
accttgcagaggcgttcgagcattataacgaatggcacccgcatagtgcactgggttatcgctcgccacgggaat

SEQ ID NO: 429640 - DNA, 75 bp, synthetic construct
  source 1..75: mol_type = other DNA
agatggtcgccgcagccgtcactcagatgatacggatgtgcttctccgtatacaccatgttatcggagagctgcc

SEQ ID NO: 429641 - DNA, 75 bp, synthetic construct
  source 1..75: mol_type = other DNA
tgcctctgcgctggcggagcaaaaacagatccgcctacaaacgatggtagtcggcgatggcaatggtcattatgt

SEQ ID NO: 429642 - DNA, 75 bp, synthetic construct
  source 1..75: mol_type = other DNA
gttcatttagtcgtttcaagatgaaagtgggttggatgccgccacacccatcattttatatgaaacgcaaatgtt

SEQ ID NO: 429643 - DNA, 75 bp, synthetic construct
  source 1..75: mol_type = other DNA
cccagcatgtttaattcgcgcgttgaggaagaggaaaggctttttcgcgactgggatgcaatggttgataaccct

SEQ ID NO: 429644 - DNA, 75 bp, synthetic construct
  source 1..75: mol_type = other DNA
cctggagtcagattactgatataccagatggtacgctgacacaaaaagggattgtgaagcttaataacgcgacag

SEQ ID NO: 429645 - DNA, 75 bp, synthetic construct
  source 1..75: mol_type = other DNA
tcaccgacaggggaatggcaaaaattgccaatgctctggcggataaaaaacagcttcatctacaaaaaatggctg

SEQ ID NO: 429646 - DNA, 75 bp, synthetic construct
  source 1..75: mol_type = other DNA
ctagtcatgctcatgcctggaatcagattactggtatccctgacggtacgctgacgcagaaagggatcgttaaac

SEQ ID NO: 429647 - DNA, 75 bp, synthetic construct
  source 1..75: mol_type = other DNA
gggttatcgctcgccacgggaatatctgcggcagcgggcctgtaatgggttaagtgataacagatgtctggaaat

SEQ ID NO: 429648 - DNA, 75 bp, synthetic construct
  source 1..75: mol_type = other DNA
ggtgctctgacgggttcgagttccgctgtgataacggagaaaaactgcgagtcacgttcgcgctggactgctgtg

SEQ ID NO: 429649 - DNA, 75 bp, synthetic construct
  source 1..75: mol_type = other DNA
cagtggagtggctgacggataatggttcatgctgccgggctaatgaaacacgccagttcgcccggatgttgggac

SEQ ID NO: 429650 - DNA, 75 bp, synthetic construct
  source 1..75: mol_type = other DNA
agaatcaacctttgcctgagttaggcgcgttattgaagcaggtaaaccatttactacgccaggccaatctgcccg

SEQ ID NO: 429651 - DNA, 75 bp, synthetic construct
  source 1..75: mol_type = other DNA
taatcagcgatggtgctctgacgggttcgagttccgctgtgataacggagaaaaactgcgagtcacgttcgcgct

SEQ ID NO: 429652 - DNA, 75 bp, synthetic construct
  source 1..75: mol_type = other DNA
ggtggagtggctgacggataacggttcctgctaccgggcgtatgaaacacggcagttcgcccggatcgtgggtct

SEQ ID NO: 429653 - DNA, 75 bp, synthetic construct
  source 1..75: mol_type = other DNA
tttgatgccatcttagacaaagttcaggctgccgcaggtggattggctggacagattgaacgagtgatcgtattc

SEQ ID NO: 429654 - DNA, 75 bp, synthetic construct
  source 1..75: mol_type = other DNA
atgggcgatagtattctttctcaagctgaaattgatgcgctgttgaatggcgacagcgaagtcaaagacgaaccg

SEQ ID NO: 429655 - DNA, 75 bp, synthetic construct
  source 1..75: mol_type = other DNA
caaccgcatgttaaagctggcgcttgaaggctatagcgacgcctggaaggcgattaatccgctggaagttgagta

SEQ ID NO: 429656 - DNA, 75 bp, synthetic construct
  source 1..75: mol_type = other DNA
ccgctgcgggaattgttggttaacccgccactggaaaactcgcgtaatgaagatcagaactggcgcgataatctg

SEQ ID NO: 429657 - DNA, 75 bp, synthetic construct
  source 1..75: mol_type = other DNA
cgcttcaaccagctaccgcctgaaattgccccggagaactggcagctctatttaagtcaggataaaaccgtcatc

SEQ ID NO: 429658 - DNA, 75 bp, synthetic construct
  source 1..75: mol_type = other DNA
aagctatcacgctgaaaatcgacccgtctgtggttctggcaacccgcaaatatgtggatgacaaaatctcagagc

SEQ ID NO: 429659 - DNA, 75 bp, synthetic construct
  source 1..75: mol_type = other DNA
acggtcgcttcccgaccaaagtagaaggccgcgagtttaccgataccgaacaacgcgtcatcaaccgtatgttga

SEQ ID NO: 429660 - DNA, 75 bp, synthetic construct
  source 1..75: mol_type = other DNA
tcagtccggaaatatcagcgtcagcggtgaaggcggaacatcgcactggggcggcggtggacgcgcaggcgctgg

SEQ ID NO: 429661 - DNA, 75 bp, synthetic construct
  source 1..75: mol_type = other DNA
gaaggggcgaatacccataacgagcctggccgggcttattatgccggagttaccgcatcattctgatcgtagtgt

SEQ ID NO: 429662 - DNA, 75 bp, synthetic construct
  source 1..75: mol_type = other DNA
gattaacggcctgaaactggtcattatcatgtctggtatcattggtagcggctggtatgtggctaaggttgtacc

SEQ ID NO: 429663 - DNA, 75 bp, synthetic construct
  source 1..75: mol_type = other DNA
agatcagaactggcgcgataacctggtgcgtcaggtgcagcactcacagctggaactggtcgccaactttgccga

SEQ ID NO: 429664 - DNA, 75 bp, synthetic construct
  source 1..75: mol_type = other DNA
ggggctgttcaacctgctgcgccgtagcccggacattaccgtcggggcgatccgcatacagccgtatcatgaatt

SEQ ID NO: 429665 - DNA, 75 bp, synthetic construct
  source 1..75: mol_type = other DNA
tccgcattcagccgtaccatgaatttgcccgcaacctgccggtgccgaccaacctgaaccttatccatctgaaac

SEQ ID NO: 429666 - DNA, 75 bp, synthetic construct
  source 1..75: mol_type = other DNA
atgaaacttatattccttcggacagtgataaaaaaaactagggggggcgttcagctggagtcctatattacatcc

SEQ ID NO: 429667 - DNA, 75 bp, synthetic construct
  source 1..75: mol_type = other DNA
agtggagtggctgacggataatggttcatgctaccgggctaatgaaacacgccagtttgcccggatggtgggtct

SEQ ID NO: 429668 - DNA, 75 bp, synthetic construct
  source 1..75: mol_type = other DNA
agtggagtggctgacggataatggttcatgctaccgggctaatgaaacacgtcagtttgcccggatgatgggact

SEQ ID NO: 429669 - DNA, 75 bp, synthetic construct
  source 1..75: mol_type = other DNA
agtggagtggctgacggataatggttcatgctaccgggctaatgaaacacgacagtttgcccggatgttgggact

SEQ ID NO: 429670 - DNA, 75 bp, synthetic construct
  source 1..75: mol_type = other DNA
gggcttgaaccgaagagcacggcggtgcggagtccggagagtaacggcatagcagagagcttcgtgaaaacgata

SEQ ID NO: 429671 - DNA, 75 bp, synthetic construct
  source 1..75: mol_type = other DNA
agtggagtggctgacggataatggttcatgctaccgggctaatgaaacacggcagtttgcccggatgctgggtct

SEQ ID NO: 429672 - DNA, 75 bp, synthetic construct
  source 1..75: mol_type = other DNA
aggcgtttattgctggctgtatgatggcaccgacagcgttaggttccattattgcaaaatcgatggttacccaag

SEQ ID NO: 429673 - DNA, 75 bp, synthetic construct
  source 1..75: mol_type = other DNA
gaaagaagccattattgcctttggtgacagtgcgaatgattttgccatgtttgcacaggccggaagtggctatct

SEQ ID NO: 429674 - DNA, 75 bp, synthetic construct
  source 1..75: mol_type = other DNA
gttgtgtttacccgctgtaacccggcggctggcgatccccctggctgttatgacgttgaatttatccccctctgt

SEQ ID NO: 429675 - DNA, 75 bp, synthetic construct
  source 1..75: mol_type = other DNA
ggatcggctgaatattacagctatgcatttagcccagcacgtaacgacgctgtaaacgtagttaccgagaatagc

SEQ ID NO: 429676 - DNA, 75 bp, synthetic construct
  source 1..75: mol_type = other DNA
cattataacgaatggcatccgcatagtgcgctgggttatcgctcgccacgggaatatctgcggcagcgggcttgt

SEQ ID NO: 429677 - DNA, 75 bp, synthetic construct
  source 1..75: mol_type = other DNA
atttaaaacccgcactttctcgatcggtatcgtaggcaatattgcaacccgtctggggaccggttgtgtaccgtt

SEQ ID NO: 429678 - DNA, 75 bp, synthetic construct
  source 1..75: mol_type = other DNA
ggccggatcgtccgctgccgcacaggcgctggcgaacaaccagaccacctccaccgtggaagatggttccatcac

SEQ ID NO: 429679 - DNA, 75 bp, synthetic construct
  source 1..75: mol_type = other DNA
atattgaaggcgcggtaatctccggcagtgccaccggcgactggacgctctcctgcgtgcgcggcagtttaacgt

SEQ ID NO: 429680 - DNA, 75 bp, synthetic construct
  source 1..75: mol_type = other DNA
atgaagctccaggccaatatcctgttgcgtgttctgacgccgctcatcctgttggcgggcagcgtcatgctgttt

SEQ ID NO: 429681 - DNA, 75 bp, synthetic construct
  source 1..75: mol_type = other DNA
atacgaagtcgacgaacgcctgattaccacaatcgacaaacaccgttcggaaaaggatgcacaccacatctacct

SEQ ID NO: 429682 - DNA, 75 bp, synthetic construct
  source 1..75: mol_type = other DNA
gctggcgcgcgggattatcactctgccccgctccgcggttcggtcgttttacgaggcgcggaactcttggactaa

SEQ ID NO: 429683 - DNA, 75 bp, synthetic construct
  source 1..75: mol_type = other DNA
ccggcgtataccagcgcagctcagcagcggcagacacgcattcattcacatattcgagccgctcgaggatgggca

SEQ ID NO: 429684 - DNA, 75 bp, synthetic construct
  source 1..75: mol_type = other DNA
aaacggcacctgtatcgctgcgagaacgtgtatcgttttcgccggataagctcgatcaggctcttgacagcctgc

SEQ ID NO: 429685 - DNA, 75 bp, synthetic construct
  source 1..75: mol_type = other DNA
tgattatcgccaaccgcactcgcgaacgtgcccaaattctggcagatgaggttggcgcggaagtgattgccctga

SEQ ID NO: 429686 - DNA, 75 bp, synthetic construct
  source 1..75: mol_type = other DNA
gtgcagacaccgcaaggggtcagtaacaattgcaaattgccgggtggtgaaacgattgatgaatgggcgttatgg

SEQ ID NO: 429687 - DNA, 75 bp, synthetic construct
  source 1..75: mol_type = other DNA
catgcctgtcaggaccgtaaaaccacaccgtcaaaatcctcagcgcctgcaacgcccctcagccacgacgagctg

SEQ ID NO: 429688 - DNA, 75 bp, synthetic construct
  source 1..75: mol_type = other DNA
cccgccgggcttagggctgacgcccggtgaactgcccgccgatgtacagccggatatccgctggctggagccgct

SEQ ID NO: 429689 - DNA, 75 bp, synthetic construct
  source 1..75: mol_type = other DNA
ctccacctgtggactttgacgatgatatcccctttatggggatcgggtatggcatggaacggcgaattattcatg

SEQ ID NO: 429690 - DNA, 75 bp, synthetic construct
  source 1..75: mol_type = other DNA
aatttgcaggtcttcgtgatgattgcagctatcatcgcaatcatgctgttctttacctggaccaccgatggtgcc

SEQ ID NO: 429691 - DNA, 75 bp, synthetic construct
  source 1..75: mol_type = other DNA
cttatctgttttttactggtaaaggaggcgttggtaaaacctctatttcctgcgccacggcgatccgtctggcag

SEQ ID NO: 429692 - DNA, 75 bp, synthetic construct
  source 1..75: mol_type = other DNA
tttgaagttatcaaaacgtttgatgaaaacgcggaagagaaactttcaaaattctcacttggctgcaagggcaat

SEQ ID NO: 429693 - DNA, 75 bp, synthetic construct
  source 1..75: mol_type = other DNA
attgacgcgcgcggcagggatatggtgtcggtggttaatgacattaaaacggcgatcagtcagaaagtgaaactg

SEQ ID NO: 429694 - DNA, 75 bp, synthetic construct
  source 1..75: mol_type = other DNA
tttcaggagcctgtaccacggaaatcgcggcatttgatgagttcaccggcttattgacagacgcttccctgctga

SEQ ID NO: 429695 - DNA, 75 bp, synthetic construct
  source 1..75: mol_type = other DNA
tactcatgacgaattatcagctattggccttaaaaatcagtatttagtcattaacggtgttctgccagctagcga

SEQ ID NO: 429696 - DNA, 75 bp, synthetic construct
  source 1..75: mol_type = other DNA
agttctgcttgttacgcttcctgaaaccacaccagtgctggaagcggcaaacctgcaggctgaccttgaaagagc

SEQ ID NO: 429697 - DNA, 75 bp, synthetic construct
  source 1..75: mol_type = other DNA
tgattaccgtggcgttcccactcctgttctgctgctgacgttgctgttactcggcggaatgtttatggcaacgcg

SEQ ID NO: 429698 - DNA, 75 bp, synthetic construct
  source 1..75: mol_type = other DNA
gccgtcaggctttgggtttacagtctccggcctctaccgcagtagtcggtcgccaggctttaaccgctatcatcg

SEQ ID NO: 429699 - DNA, 75 bp, synthetic construct
  source 1..75: mol_type = other DNA
aatgggggcatttatcatggcttcactggataacggcatgagtatgatggatgtaccgaccttctggcagtatat

SEQ ID NO: 429700 - DNA, 75 bp, synthetic construct
  source 1..75: mol_type = other DNA
accttgcccggcgtctctccggcagaagctgcagcgctcctgcagacaacagacaagttaatcaaaagcgttcct

SEQ ID NO: 429701 - DNA, 75 bp, synthetic construct
  source 1..75: mol_type = other DNA
gccgagctgaacggccagggcgaagtcgctggcggcgtggtgatcctgcggtcgggtaaaaatgcacgcgacgtt

SEQ ID NO: 429702 - DNA, 75 bp, synthetic construct
  source 1..75: mol_type = other DNA
gcgggttggcgaaatgctgttgattgacgccagtgagaacccggaaccggaaacggaatcaaatccgtgggttga

SEQ ID NO: 429703 - DNA, 75 bp, synthetic construct
  source 1..75: mol_type = other DNA
cttgcctgttaattcttgcgggatgttcaaccacttctcaacccgatgcaccaaaaccgccgcatgttgggatgg

SEQ ID NO: 429704 - DNA, 75 bp, synthetic construct
  source 1..75: mol_type = other DNA
atgtcagatccgggtagggcagaggccattatcggtagagttcaggccagagttgcctacgaagagatcaccgac

SEQ ID NO: 429705 - DNA, 75 bp, synthetic construct
  source 1..75: mol_type = other DNA
catgctgaaacctgacgggttaacagcggtaaagaaccttgcggaggacttcgaacattacaacgaatggcatcc

SEQ ID NO: 429706 - DNA, 75 bp, synthetic construct
  source 1..75: mol_type = other DNA
tttcctttttaacatttaatgtttttgctgatgaagttgacttttcgaaggtagattgtaattcagtggaaacaa

SEQ ID NO: 429707 - DNA, 75 bp, synthetic construct
  source 1..75: mol_type = other DNA
tttctcgcgctgtgtggatttatggtgaacgtgccattgctgcggcgcaaaccaaacttccacctgcgtttgaac

SEQ ID NO: 429708 - DNA, 75 bp, synthetic construct
  source 1..75: mol_type = other DNA
accgtaggggctgcgactggcgagatatctgtatcttctgtcgccgccacgttacgtagattgtatggttctgcg

SEQ ID NO: 429709 - DNA, 75 bp, synthetic construct
  source 1..75: mol_type = other DNA
atttaaatacattaacagttgcgcccaataatcctagctggttaattgcggaacttgtactgcccgaaaatatcg

SEQ ID NO: 429710 - DNA, 75 bp, synthetic construct
  source 1..75: mol_type = other DNA
cggcgtatgacctggcgaatggtaaggcggcgggaaatcattcgcacccctggaatcaaattaccgacgttccgg

SEQ ID NO: 429711 - DNA, 75 bp, synthetic construct
  source 1..75: mol_type = other DNA
tgcgaccaacagcaccagtacgacggaagctgcgacgccgaacgcggttaaggcagcgatggataaggctattgc

SEQ ID NO: 429712 - DNA, 75 bp, synthetic construct
  source 1..75: mol_type = other DNA
ggtgcgcgctgttcacccttatgccagatttttatattggcaattgcctgctgtagcgatttactggaagccatt

SEQ ID NO: 429713 - DNA, 75 bp, synthetic construct
  source 1..75: mol_type = other DNA
atgacgcagccattggtcggaaaacagattctcattgttgaagatgagcaggtatttcgctcgcttctggattcg

SEQ ID NO: 429714 - DNA, 75 bp, synthetic construct
  source 1..75: mol_type = other DNA
tcaccgacagagggatggcaaaaattgccaatgctctggcggataaaaaacagcttcatctacaaaaaatggctg

SEQ ID NO: 429715 - DNA, 75 bp, synthetic construct
  source 1..75: mol_type = other DNA
acttgacgctcgatgacgtggcagcaaaatcgtttgtcagtgcctgctatttgagccgtacctttaagaaaatta

SEQ ID NO: 429716 - DNA, 75 bp, synthetic construct
  source 1..75: mol_type = other DNA
aagaaatcccctgcgtggagcaggttttcgactctgaaaccaactacattctggcgcgctttaaagcctccagtg

SEQ ID NO: 429717 - DNA, 75 bp, synthetic construct
  source 1..75: mol_type = other DNA
atgaagcctatattgaattttgtccgcaggcatcgctggcgggctggctggcggaatatccacatctggctattt

SEQ ID NO: 429718 - DNA, 75 bp, synthetic construct
  source 1..75: mol_type = other DNA
cggacgaaggtattgaactgctgatccgcgctttttgcgaaccgggtaaagacgccatcctctactgcccgccaa

SEQ ID NO: 429719 - DNA, 75 bp, synthetic construct
  source 1..75: mol_type = other DNA
cctaaaccgccgcagattggtatggcaaatccggcgtcggtctattgccagcagaagggcgggacgctcattcca

SEQ ID NO: 429720 - DNA, 75 bp, synthetic construct
  source 1..75: mol_type = other DNA
atggccgtggtgtatgtcggtgtatttctgctcggtaaggtgctggctctgcctgctgagccatttatgacgaaa

SEQ ID NO: 429721 - DNA, 75 bp, synthetic construct
  source 1..75: mol_type = other DNA
cttacggcatgtacagcgtcagcgccgaaaccattggcgtcgagtgccgtaccgtacctacgctggaaaactggc

SEQ ID NO: 429722 - DNA, 75 bp, synthetic construct
  source 1..75: mol_type = other DNA
gaaagaggcagaaacccggctgatgatactgaatgagaagcgtaaacagcggcatggtgagtccgggacagaagt

SEQ ID NO: 429723 - DNA, 75 bp, synthetic construct
  source 1..75: mol_type = other DNA
cttaaagttgagatacctgacgacctgatacaggatatcgccatcagagaactggcgtttggcgcaggtgcatta

SEQ ID NO: 429724 - DNA, 75 bp, synthetic construct
  source 1..75: mol_type = other DNA
cattcagggcaaacgtaagccaggaagcgacattcaagaaacagtgacagacatttacagcgattacatgaataa

SEQ ID NO: 429725 - DNA, 75 bp, synthetic construct
  source 1..75: mol_type = other DNA
gcgattgatgacatggtgagtcaaattatcgaagcggcacaaagccaggcgtcggcagtggagcgaattattgtt

SEQ ID NO: 429726 - DNA, 75 bp, synthetic construct
  source 1..75: mol_type = other DNA
ccggatcagaagcggcggcctgctgctgccggtattgctgcatatggaagctaccgtgctgggcttactgttggg

SEQ ID NO: 429727 - DNA, 75 bp, synthetic construct
  source 1..75: mol_type = other DNA
accttgcagaggcgttcgagcattataacgaatggcatccgcatagtgcgttgggttatcgctcgccacgggaat

SEQ ID NO: 429728 - DNA, 75 bp, synthetic construct
  source 1..75: mol_type = other DNA
ctgtttgagcagaaactcggaacgttaaccgctacgcaaaaagaaacagcggatgcccggattgcgattgtcagc

SEQ ID NO: 429729 - DNA, 75 bp, synthetic construct
  source 1..75: mol_type = other DNA
cgtattaaacattatgctgtgctggcgggtatcgacagcgaaaagctgtcaccgcatgtgttgcgtcacgctttt

SEQ ID NO: 429730 - DNA, 75 bp, synthetic construct
  source 1..75: mol_type = other DNA
tcagaactgattgaggctatccgtgagggggtggagtggtacaacaaccgcccacattctgaattgccgatgaaa

SEQ ID NO: 429731 - DNA, 75 bp, synthetic construct
  source 1..75: mol_type = other DNA
tagggctaccaggtatgccgggaactgcgcaaggggtgcggtattccataaggaaactggcctcatctgagcatt

SEQ ID NO: 429732 - DNA, 75 bp, synthetic construct
  source 1..75: mol_type = other DNA
cctcttatgacaccattcgccgcgcaatgaagaaactgccggaagtggtgaaacaaaaaggccgggtaactggca

SEQ ID NO: 429733 - DNA, 75 bp, synthetic construct
  source 1..75: mol_type = other DNA
cgcgctgtttcacatcaaagaaaccaaacacgtggtgcaggatgctgcgcctgtcacgttgcatattgcactggt

SEQ ID NO: 429734 - DNA, 75 bp, synthetic construct
  source 1..75: mol_type = other DNA
agattggcaaaaacgccgcgcgctatgcgcgcaaagagtcaccttcgccggtgccggtggtgaacgatcagatgg

SEQ ID NO: 429735 - DNA, 75 bp, synthetic construct
  source 1..75: mol_type = other DNA
cgtgtgattcgctgctttaaatcgtccgatgtcgcattcgtagcagtcgaaggagatcgtcttagtggttcaggt

SEQ ID NO: 429736 - DNA, 75 bp, synthetic construct
  source 1..75: mol_type = other DNA
gatgacgcgacagaccttctggcaccgcattaaacattatgctgtgctggcgggtatcgacagcgaaaagctgtc

SEQ ID NO: 429737 - DNA, 75 bp, synthetic construct
  source 1..75: mol_type = other DNA
gggatttacgcttctggtcggagattcgctgtgtgagttcaccgtaaaggaacgtaatattgagtttaaggctgt

SEQ ID NO: 429738 - DNA, 75 bp, synthetic construct
  source 1..75: mol_type = other DNA
gtcagataatcgaagacgtgctggcagaaatgcaaaccagcgataagtccgtttcatttcgcgcaccggtctctt

SEQ ID NO: 429739 - DNA, 75 bp, synthetic construct
  source 1..75: mol_type = other DNA
ggtaagacgctgcgaaatccagtggctgaacaatatttactacgcgccagagctgcgtgatgaacatggccgcaa

SEQ ID NO: 429740 - DNA, 75 bp, synthetic construct
  source 1..75: mol_type = other DNA
atgtggtgacagttcagcctcaggctcctgaggagacgcttgataatgcatacaacgctgagcgtgatgaatatc

SEQ ID NO: 429741 - DNA, 75 bp, synthetic construct
  source 1..75: mol_type = other DNA
gcgcctgaaccggacgctgccgatgcgtatagccaggaggtatcgcacctattttggcaggggtgctgaccggga

SEQ ID NO: 429742 - DNA, 75 bp, synthetic construct
  source 1..75: mol_type = other DNA
ctatgtcagaagcctacgaggattttgtcgcggaatggcagcgtcgccatgctgacgaaccatacatgctggagg

SEQ ID NO: 429743 - DNA, 75 bp, synthetic construct
  source 1..75: mol_type = other DNA
acgcgccggaattgcgtgacgaacacggccgcaaagttcttatcagttatgacattcatgacgcagagcgaatta

SEQ ID NO: 429744 - DNA, 75 bp, synthetic construct
  source 1..75: mol_type = other DNA
gtgacgaaataaaaccggaagaaattagctggctacctgaatttctggcgcagtatcgccaggtgaacggcagac

SEQ ID NO: 429745 - DNA, 75 bp, synthetic construct
  source 1..75: mol_type = other DNA
gcgctggtggtggaagtgctgaagctggaaagcgccggtaacatcgggcgactgaaagccattaactttcttgtt

SEQ ID NO: 429746 - DNA, 75 bp, synthetic construct
  source 1..75: mol_type = other DNA
gcagcctttgctgtcagtgctgaatatcacaaacaacagcagcgtattaaaggaatgcgcaaacgcgctgaggaa

SEQ ID NO: 429747 - DNA, 75 bp, synthetic construct
  source 1..75: mol_type = other DNA
aacaggccgcagttaacgccaatgcaaaacgtggcgctaatcgcaccatcagtcgtgacccgctttatcagtggg

SEQ ID NO: 429748 - DNA, 75 bp, synthetic construct
  source 1..75: mol_type = other DNA
tgcccgtaaggggaaagaacgaaccctgagcgcaattacgctcaaacgttggattgctgcatttaacaaagcaca

SEQ ID NO: 429749 - DNA, 75 bp, synthetic construct
  source 1..75: mol_type = other DNA
agcggactgaaggatgcactgatgccggagctacgcaaacagttcccggcggctttcctggggcgggtgacggtt

SEQ ID NO: 429750 - DNA, 75 bp, synthetic construct
  source 1..75: mol_type = other DNA
acccgtttggcgcagcgtgttaccgggcagatggatgcgttggcgcagattggcgagcgtatccagaccgcgcgg

SEQ ID NO: 429751 - DNA, 75 bp, synthetic construct
  source 1..75: mol_type = other DNA
gaggccgtgcgcgccgccgtacagctttctcatcgttacattccggcccggcaactaccggataaggccatcagc

SEQ ID NO: 429752 - DNA, 75 bp, synthetic construct
  source 1..75: mol_type = other DNA
tcgagttctgctgtgataacggagagagacggcgtgtcacgttcgcgctggactgctgtgatcgtgaggcactgc

SEQ ID NO: 429753 - DNA, 75 bp, synthetic construct
  source 1..75: mol_type = other DNA
gcgttgggatttatctcactacctggtttaatgaattcatcaccaccgggccacatggtgtggtgttggcaatgt

SEQ ID NO: 429754 - DNA, 75 bp, synthetic construct
  source 1..75: mol_type = other DNA
aagaccttgatctcacctggacattggtggcaaacggctatcgtattcggcaggcgaatcgctgcatcgtatacc

SEQ ID NO: 429755 - DNA, 75 bp, synthetic construct
  source 1..75: mol_type = other DNA
gcggagttaaataccgcgatgccgataagatggcccttatcccggttaaaaacgtggcaacagagcgcgaagccc

SEQ ID NO: 429756 - DNA, 75 bp, synthetic construct
  source 1..75: mol_type = other DNA
aatcagcgatggtgctctgacgggttcgagttctgctgtgataacggagagagactgcgagtcacgttcgcgctg

SEQ ID NO: 429757 - DNA, 75 bp, synthetic construct
  source 1..75: mol_type = other DNA
atgaaagagctgataactgaaatggcctttaatgagccaggaatgatgctggcccggatggctcgtttacatgga

SEQ ID NO: 429758 - DNA, 75 bp, synthetic construct
  source 1..75: mol_type = other DNA
ctgcggggattatgatgaataccttcgtaacgcgtggttccgaggttttcgggaaggttatgatatggcgatgaa

SEQ ID NO: 429759 - DNA, 75 bp, synthetic construct
  source 1..75: mol_type = other DNA
tgtttccgcttatctgggtcggcgtagtttgtgttattggtgcttttagcgcctggtttcatcgttgctggttgt

SEQ ID NO: 429760 - DNA, 75 bp, synthetic construct
  source 1..75: mol_type = other DNA
ccacacaggagggatggttgtacctcgctggcatcaaagatgtttatacgtgcgaaattgtcggctacgccatgg

SEQ ID NO: 429761 - DNA, 75 bp, synthetic construct
  source 1..75: mol_type = other DNA
tcggctacgccatgggagagcgcatgacaaaagagctgacaggtaaagccctgtttatggcgctcaggagacagc

SEQ ID NO: 429762 - DNA, 75 bp, synthetic construct
  source 1..75: mol_type = other DNA
tgatggtgggtctgggtgaaaccaatgaagaaattattgaagtgatgcgcgacctgcgtcgccatggtgtgacga

SEQ ID NO: 429763 - DNA, 75 bp, synthetic construct
  source 1..75: mol_type = other DNA
cagcaactcctgggcggcgcaccgtttattatcagcggtgcgtgcgggatgttccgtactgatgtattgcgtaaa

SEQ ID NO: 429764 - DNA, 75 bp, synthetic construct
  source 1..75: mol_type = other DNA
cggaaattgagcacggcgctgacgccgtaggcggcattccctcgacagccttgaaaggagcaggcctgttgccgc

SEQ ID NO: 429765 - DNA, 75 bp, synthetic construct
  source 1..75: mol_type = other DNA
tatgtttgcagccccaacaacccgaccgggcaactgatcaatccgcaggattttcgcaccctgctggagttaacc

SEQ ID NO: 429766 - DNA, 75 bp, synthetic construct
  source 1..75: mol_type = other DNA
gacggataatggttcatgctaccgggcgaatgaaacacgacagttggccgggatgttgggccttgaaccgaagac

SEQ ID NO: 429767 - DNA, 75 bp, synthetic construct
  source 1..75: mol_type = other DNA
gacggataatggttcatgctaccgggcgaatgaaacacgacagttggcccggatgttgggccttgaaccgaagag

SEQ ID NO: 429768 - DNA, 75 bp, synthetic construct
  source 1..75: mol_type = other DNA
gacggataatggttcatgctaccgggccaatgaaacacgacagttggcccggatgttgggccttgaaccgaagac

SEQ ID NO: 429769 - DNA, 75 bp, synthetic construct
  source 1..75: mol_type = other DNA
catagaagcgttacaaaatagtgaatcgtttactgccgcactggtggattttgatttgccggatatcgatggtat

SEQ ID NO: 429770 - DNA, 75 bp, synthetic construct
  source 1..75: mol_type = other DNA
acgatcaacagcaacaactcagccagcaaatcgtcgccgcggccggagaaatcgccaatatcgcgcaatcccaga

SEQ ID NO: 429771 - DNA, 75 bp, synthetic construct
  source 1..75: mol_type = other DNA
cgcagctttgtgcaggagtttgaaaaagagtacggtattaaagtacgtattccagaaggtagtctggatggcaat

SEQ ID NO: 429772 - DNA, 75 bp, synthetic construct
  source 1..75: mol_type = other DNA
ttacgacccgcagcagatgggtgaccgggcgctgccacaaacgctggagcagttgcagagctttatcgacgccaa

SEQ ID NO: 429773 - DNA, 75 bp, synthetic construct
  source 1..75: mol_type = other DNA
atgggagcgaaagcgctggcgaaggtggacgatttgccgggctatggcgacgccattcaccagattcagaacgtt

SEQ ID NO: 429774 - DNA, 75 bp, synthetic construct
  source 1..75: mol_type = other DNA
acagcgcatggcatctatccaaaagggatgcagccgaagctgcaaatggacattttgcgcgacattgccggacgt

SEQ ID NO: 429775 - DNA, 75 bp, synthetic construct
  source 1..75: mol_type = other DNA
gacggataatggttcatgctaccgggctaatgaaacacgacagttggcccggatgttgggccttgaaccgaagat

SEQ ID NO: 429776 - DNA, 75 bp, synthetic construct
  source 1..75: mol_type = other DNA
gacggataatggttcatgctaccgggcaaatgaaacacgacagttggcccggatgttgggccttgaaccgaagaa

SEQ ID NO: 429777 - DNA, 75 bp, synthetic construct
  source 1..75: mol_type = other DNA
gacggataatggttcatgctaccgggcaaatgaaacacgacagttggccaggatgttgggccttgaaccgaagac

SEQ ID NO: 429778 - DNA, 75 bp, synthetic construct
  source 1..75: mol_type = other DNA
gatgccatgctccggaaaaccggtctgggtttcatctgcggagagaccggctccggtaaatccacactggcagcg

SEQ ID NO: 429779 - DNA, 75 bp, synthetic construct
  source 1..75: mol_type = other DNA
attggtctgcttaccgcacgcaataagctagatctttctcccgttataggaagtaaagaacatcgtgttcgtctt

SEQ ID NO: 429780 - DNA, 75 bp, synthetic construct
  source 1..75: mol_type = other DNA
ttacgacagccgcgccaatgtcaagacgaacgttgctgtgcacgtccttaattactttgccagaaactatcagaa

SEQ ID NO: 429781 - DNA, 75 bp, synthetic construct
  source 1..75: mol_type = other DNA
gagagcttcgtgaaaacgataaagcgtgactacatcagtgtcatgcccaaaccagacgggttaacggcagcaaag

SEQ ID NO: 429782 - DNA, 75 bp, synthetic construct
  source 1..75: mol_type = other DNA
aagaggcgttgatgcttgtcaggtcactcttaagttagaagacggcagaaaaatacttgttttcttcgattgggt

SEQ ID NO: 429783 - DNA, 75 bp, synthetic construct
  source 1..75: mol_type = other DNA
catccagactatgttgacaatcagccatcacgccgtgacttttttgcgatatgtcgcaaggcttatcaaaacgac

SEQ ID NO: 429784 - DNA, 75 bp, synthetic construct
  source 1..75: mol_type = other DNA
tgggcggcgttctcacacattcaaatctgactggttccagcatgacccgtgcactgaagaacaggccgaatggct

SEQ ID NO: 429785 - DNA, 75 bp, synthetic construct
  source 1..75: mol_type = other DNA
cgaatggctgattcagtgttatcgcaggcgcggacgcgaggtcaggaaagacctcagtcttgacttacgacactg

SEQ ID NO: 429786 - DNA, 75 bp, synthetic construct
  source 1..75: mol_type = other DNA
gtattattaccttaaataaaaaaggaactacagttattaaagtcatatctggtgataaacagatagcaacgtata

SEQ ID NO: 429787 - DNA, 75 bp, synthetic construct
  source 1..75: mol_type = other DNA
aaatatgactggtatcagcacgatccctgtactgaagaacaggccgaatggctgattcataactaccgcagacgt

SEQ ID NO: 429788 - DNA, 75 bp, synthetic construct
  source 1..75: mol_type = other DNA
atggtgcacaaaaccaaatttcacaattctgataccgaccttgccatccggcatgggcggcgttcacacgcattt

SEQ ID NO: 429789 - DNA, 75 bp, synthetic construct
  source 1..75: mol_type = other DNA
atggcgcacgataccaaattacacaattctgatgattctgccgtttttgccagcaggcacgggctgcgttctcac

SEQ ID NO: 429790 - DNA, 75 bp, synthetic construct
  source 1..75: mol_type = other DNA
ttgcgatcgaaaagatcaagggcggaccggtatccgagcgggttcaagacttttgttatcgcattggctcgattc

SEQ ID NO: 429791 - DNA, 75 bp, synthetic construct
  source 1..75: mol_type = other DNA
aacaaccgactttggtgaatcaaaagccacaattacctgcatatgaacatattttacgtagctgtcccagagaca

SEQ ID NO: 429792 - DNA, 75 bp, synthetic construct
  source 1..75: mol_type = other DNA
tgaatggattgcctaccatcgagtattaggtgttgatgggtttattattgcagataatggcagtcgtgatggtag

SEQ ID NO: 429793 - DNA, 75 bp, synthetic construct
  source 1..75: mol_type = other DNA
agctgaaatggaacgattaagtgtgaagttgactgagttaccagcagttgaacctattcctactggttcttggtt

SEQ ID NO: 429794 - DNA, 75 bp, synthetic construct
  source 1..75: mol_type = other DNA
ttaactatatcctccttaatgtttttgtgactttgactattcatattcttattgaatttatgagtaatcaattcc

SEQ ID NO: 429795 - DNA, 75 bp, synthetic construct
  source 1..75: mol_type = other DNA
ttaactatatcctgctcaatgtttttgtaacgctgactattcatattcttattgaatttatgagtaaccagttcc

SEQ ID NO: 429796 - DNA, 75 bp, synthetic construct
  source 1..75: mol_type = other DNA
ttcggcttgacgacaatagaagcggcaagccttatttccgctgcttttatttctcgatggtttggggggcttgct

SEQ ID NO: 429797 - DNA, 75 bp, synthetic construct
  source 1..75: mol_type = other DNA
gcgttattttttgtaggtattttgcctattatttttgctttttacttgcgtaaaaatctcccggaatctgacgac

SEQ ID NO: 429798 - DNA, 75 bp, synthetic construct
  source 1..75: mol_type = other DNA
cagcggttattttgaagttgagcaacgggctgctgctctgggctttatttataatgttggttcactgggtggagc

SEQ ID NO: 429799 - DNA, 75 bp, synthetic construct
  source 1..75: mol_type = other DNA
ttatcagggaatgggtaagcgatggccaaccggtattatgcttatgctggttgttatgttttgttttctgtatgg

SEQ ID NO: 429800 - DNA, 75 bp, synthetic construct
  source 1..75: mol_type = other DNA
cgtctggggattgtgacggttatcgatcaaccggatgtagtaaatcaaaaaccgcagcttccggcctacgagcgc

SEQ ID NO: 429801 - DNA, 75 bp, synthetic construct
  source 1..75: mol_type = other DNA
cacgccgaactgcgctatggtcgctatatcgatacgctgggcaacgatctggtcttacatccaaaacatggcagc

SEQ ID NO: 429802 - DNA, 75 bp, synthetic construct
  source 1..75: mol_type = other DNA
ttaaaaacgaaatggatgccctgcttgagtggattgcataccacagggtcgtaggggttagcggatttattattg

SEQ ID NO: 429803 - DNA, 75 bp, synthetic construct
  source 1..75: mol_type = other DNA
ctgtcgttagtgcaaaagtcagcgagattaatacagaagttaaggctcctgaggtaaaattcttctcagttctga

SEQ ID NO: 429804 - DNA, 75 bp, synthetic construct
  source 1..75: mol_type = other DNA
ggatgttggggcttgaaccgaagaacacggcggtgcggagtccggagagtaacggaatagcagagagcttcgtga

SEQ ID NO: 429805 - DNA, 75 bp, synthetic construct
  source 1..75: mol_type = other DNA
ggatgttgggccttgaaccgaagagcacggcggtgcggagtccggagagtaacgggatagcagagagcttcgtga

SEQ ID NO: 429806 - DNA, 75 bp, synthetic construct
  source 1..75: mol_type = other DNA
ggatgttgggtcttgaaccgaagatcacggcggtgcggagtccggagagtaacggcatagcagagagcttcgtga

SEQ ID NO: 429807 - DNA, 75 bp, synthetic construct
  source 1..75: mol_type = other DNA
tggatggcagcgtgatttgcgaggcggtatgggacggcaataaacgcgaagccttcccggtcagcgcggaatact

SEQ ID NO: 429808 - DNA, 75 bp, synthetic construct
  source 1..75: mol_type = other DNA
gtaaacgcgcagaggaaaaaatccgtgatgccgaggatgaggttgtcaacgtgctggagcacaagccgcaggagc

SEQ ID NO: 429809 - DNA, 75 bp, synthetic construct
  source 1..75: mol_type = other DNA
gaacgccaaaaagggaaacagccgcgtgttgagtgaaatcacgctgaaacgctggattgcggcctttaacaaggc

SEQ ID NO: 429810 - DNA, 75 bp, synthetic construct
  source 1..75: mol_type = other DNA
atggcacgcaacgtaaaatattacaattctgataattcgcccgttcttgcctgcacgcacgagcggtattctcac

SEQ ID NO: 429811 - DNA, 75 bp, synthetic construct
  source 1..75: mol_type = other DNA
tacgaccccgaacgtgatgaatatctgaatcattcgctggatattctggaacagaacagacgtaaaaaagtcatt

SEQ ID NO: 429812 - DNA, 75 bp, synthetic construct
  source 1..75: mol_type = other DNA
atacggtaaccgtccagcaacaggattatgaagaggattacgacgaagattataaacgcgatttctggctgggtt

SEQ ID NO: 429813 - DNA, 75 bp, synthetic construct
  source 1..75: mol_type = other DNA
taaaactgatgatgtgctgatccagtggggcgatctgtttagtgctgttccgatgactgcaaccatcgacgcatc

SEQ ID NO: 429814 - DNA, 75 bp, synthetic construct
  source 1..75: mol_type = other DNA
attctgataattcagccgtctttgccagcaggcacgggcggcgttctcatgcattcaaatatgactggtaccagc

SEQ ID NO: 429815 - DNA, 75 bp, synthetic construct
  source 1..75: mol_type = other DNA
gcattcaagtctgaatggttccagcaccctccatgcactgaagagcaggctgaatggataattcagtgttaccgc

SEQ ID NO: 429816 - DNA, 75 bp, synthetic construct
  source 1..75: mol_type = other DNA
actgatgacgcaaaaagccgatgaatcaccggctacggcggtgacaaaggccagacgctcacctgctgtggttga

SEQ ID NO: 429817 - DNA, 75 bp, synthetic construct
  source 1..75: mol_type = other DNA
atactattgcaacacctaatagtctgattgttcctaatatgagcaagcgtgtgacctataatgatgctgtgaata

SEQ ID NO: 429818 - DNA, 75 bp, synthetic construct
  source 1..75: mol_type = other DNA
tgccaaagtaacattaacatcgacaactccaggaaaatcactcgttagtgcccgtgttagcgatgtcgccgttga

SEQ ID NO: 429819 - DNA, 75 bp, synthetic construct
  source 1..75: mol_type = other DNA
gttgattataatacagccaataacatttgcaaaaatattaaaggttcgttaccttcttcaattaaagagctgaag

SEQ ID NO: 429820 - DNA, 75 bp, synthetic construct
  source 1..75: mol_type = other DNA
tcgcaactacatatgatatcgtcactaataatatggtgaaaaatgtttcttcaaaaacgcctaacgcttatgcag

SEQ ID NO: 429821 - DNA, 75 bp, synthetic construct
  source 1..75: mol_type = other DNA
tgcctcagttgacactttgaaaaaagtatatagtcaatggggacctgcaagtaaatatgaacattatactcaaag

SEQ ID NO: 429822 - DNA, 75 bp, synthetic construct
  source 1..75: mol_type = other DNA
aattaatgctgatgcagttaacttcttcgctacacttaatattgataagaatgtagagattgttggtacaaaagt

SEQ ID NO: 429823 - DNA, 75 bp, synthetic construct
  source 1..75: mol_type = other DNA
caatgtcagaggcgagttgcctaatatttggctgcaatatggtcagtttaaactgaaagcaagcggtggtgatgg

SEQ ID NO: 429824 - DNA, 75 bp, synthetic construct
  source 1..75: mol_type = other DNA
gctgaagaaaggaacgacaacaattgaagtagtgtcgggcgataaccaaaccgcgacatatacaattaatcaacc

SEQ ID NO: 429825 - DNA, 75 bp, synthetic construct
  source 1..75: mol_type = other DNA
gataatctccgtcaggcttccttactccgaacgcccaccgcgtctgtcccgcacattccagcaacgcatctggag

SEQ ID NO: 429826 - DNA, 75 bp, synthetic construct
  source 1..75: mol_type = other DNA
ttatgaaaaacggtcagcctgtgaagggctatgatgtaacgtttttaacaactgcaggtaatctgagtaaaacaa

SEQ ID NO: 429827 - DNA, 75 bp, synthetic construct
  source 1..75: mol_type = other DNA
gggtaacggactttacggctgataaaacatcggctaaagcggatggcatcgaggctattacttataccgcgattg

SEQ ID NO: 429828 - DNA, 75 bp, synthetic construct
  source 1..75: mol_type = other DNA
aaaccaaggccagtattactgagattaaggctgataaaacaacagcgaaggcagatggttctgatgcgattacct

SEQ ID NO: 429829 - DNA, 75 bp, synthetic construct
  source 1..75: mol_type = other DNA
acgcttgagaaggagaagccaactcctggtttgttcggtaacgctgaaaatatgttcactaagcttacggggcaa

SEQ ID NO: 429830 - DNA, 75 bp, synthetic construct
  source 1..75: mol_type = other DNA
acatgggggcatccggtatcaacaccgttgcagaagcaaagatgtattttcaaggtatgccacaggttgatttct

SEQ ID NO: 429831 - DNA, 75 bp, synthetic construct
  source 1..75: mol_type = other DNA
acagttcaactagcagacggaagaactgtaaccgtaggcgggaaacttcatggtgctggtgctaacgcgttctac

SEQ ID NO: 429832 - DNA, 75 bp, synthetic construct
  source 1..75: mol_type = other DNA
atcctgtattaattaaacagtttttcagcgggtctggtaaagcagatggtattcttaaagttgataagtacatag

SEQ ID NO: 429833 - DNA, 75 bp, synthetic construct
  source 1..75: mol_type = other DNA
ccggacacacaattaaactcgcttaacgagatatcaaatagctgcgcattattatttctacagtcttcagaaaaa

SEQ ID NO: 429834 - DNA, 75 bp, synthetic construct
  source 1..75: mol_type = other DNA
atgaaaaatgaaggcgacaatgttatcaccctggtgcagccaaaatcagaggaggaaggactcctcaacgttgtg

SEQ ID NO: 429835 - DNA, 75 bp, synthetic construct
  source 1..75: mol_type = other DNA
atgaccgcagggttcaactttaataactatgcagcaggtttttgttccgctaccccggcgttaaggggaaatgag

SEQ ID NO: 429836 - DNA, 75 bp, synthetic construct
  source 1..75: mol_type = other DNA
atggaacgttcaccgccatgacgtataccaaaagcaaaacatttaaaactgaaacaggcgcacgtcgctggcttg

SEQ ID NO: 429837 - DNA, 75 bp, synthetic construct
  source 1..75: mol_type = other DNA
gcgatgacgtataccaaaagcaaaacgtttaaaaccgaaactggcgcacgtcgctggttagcaagaaacactgac

SEQ ID NO: 429838 - DNA, 75 bp, synthetic construct
  source 1..75: mol_type = other DNA
taatgacccgcagggcttccagcacttcgcaggtaatctggcactgttttctctcggccatgagaagtacttcga

SEQ ID NO: 429839 - DNA, 75 bp, synthetic construct
  source 1..75: mol_type = other DNA
atgcaaaaaatcgacctcggcaataacgaatccatggtgtgcggcgtgttccctaaccaagatggaacgttcact

SEQ ID NO: 429840 - DNA, 75 bp, synthetic construct
  source 1..75: mol_type = other DNA
ccccaaccaggatggaacgttcactgccatgacgtataccaaaagcaaaacatttaaaaccgaaactggtgcgcg

SEQ ID NO: 429841 - DNA, 75 bp, synthetic construct
  source 1..75: mol_type = other DNA
atgatctggcagcctgagttcacagataaaatactctccaggaaacccggggcggttcacataccgggcacaatc

SEQ ID NO: 429842 - DNA, 75 bp, synthetic construct
  source 1..75: mol_type = other DNA
aaaggtgttgcatggcttaaagaaacaaaagatcgcggctttaagtgggacgaagtgtctagtcgtgttaagggg

SEQ ID NO: 429843 - DNA, 75 bp, synthetic construct
  source 1..75: mol_type = other DNA
tcctttttttgaggccaccagactacgggcgagagctggtgatgagatggaggaaaaacaaaagcaggtaacagc

SEQ ID NO: 429844 - DNA, 75 bp, synthetic construct
  source 1..75: mol_type = other DNA
tgcttttgaaaaatacaaggatgttttaaataagaaattcagcaaagcagaccgtgatgcaattttcaatgcact

SEQ ID NO: 429845 - DNA, 75 bp, synthetic construct
  source 1..75: mol_type = other DNA
gctctcatcgtgctcgaggctcttgaagctgatgctataaaggttcaaggcgagaaaaaactggtttccctgttt

SEQ ID NO: 429846 - DNA, 75 bp, synthetic construct
  source 1..75: mol_type = other DNA
gggttccgtaaaacgattcagggcttcagagattctaatttcactaatatgctcccaggtaagatcgctgatttt

SEQ ID NO: 429847 - DNA, 75 bp, synthetic construct
  source 1..75: mol_type = other DNA
ggtcaacctaccctcccccagaactgaggttagccgcagaatggcagctctatcacggtctggctttgttgaata

SEQ ID NO: 429848 - DNA, 75 bp, synthetic construct
  source 1..75: mol_type = other DNA
aggaaagtgacatttttacttacccttttaatgatgtagggcttgaatctgaaccggatcgcaactatcttaagc

SEQ ID NO: 429849 - DNA, 75 bp, synthetic construct
  source 1..75: mol_type = other DNA
tagttgtaaaaatgaaacggagacagatagttctggtacgggaaccattgaactattgaagtttttccaggatat

SEQ ID NO: 429850 - DNA, 75 bp, synthetic construct
  source 1..75: mol_type = other DNA
atgaatacaaaccagtggggtatcagcgtctggtcgacgagttaactatgcaggtaaagcagttagcctggcaac

SEQ ID NO: 429851 - DNA, 75 bp, synthetic construct
  source 1..75: mol_type = other DNA
atggaaaccgcggtagcgtactataaagatggtgttccttatgatgataaggggcaggtaattattactcttttg

SEQ ID NO: 429852 - DNA, 75 bp, synthetic construct
  source 1..75: mol_type = other DNA
ccttgctcatgccaataatatggcaatgcaggcagaggctgagcgtttgcgccttgcgaaggcagagcaaaaagc

SEQ ID NO: 429853 - DNA, 75 bp, synthetic construct
  source 1..75: mol_type = other DNA
ctgaaaatgttggtggaggcggtggagcatttggtggggccagtgaaagttctgctgcgatacatgcaaccgcta

SEQ ID NO: 429854 - DNA, 75 bp, synthetic construct
  source 1..75: mol_type = other DNA
atggatacgctcaatcttggcaacaacgaatctctggtatgcggcgtgtttcccaaccaggacggtacgttcacc

SEQ ID NO: 429855 - DNA, 75 bp, synthetic construct
  source 1..75: mol_type = other DNA
aggttattaaatctgtttgtgaaagtttgaagctgcaaccaaacaagccaaagctacgaattaagagtaagcgcc

SEQ ID NO: 429856 - DNA, 75 bp, synthetic construct
  source 1..75: mol_type = other DNA
tccaaaccaggacggtacgttcaccgcgatgacgtataccaaaagcaaaacgtttaaaaccgaaaatggtgcccg

SEQ ID NO: 429857 - DNA, 75 bp, synthetic construct
  source 1..75: mol_type = other DNA
atgacgtataccagaagcaaaacgtttaaaactgaagctggcgcgcgtcgctggttaaccagaaacactgactga

SEQ ID NO: 429858 - DNA, 75 bp, synthetic construct
  source 1..75: mol_type = other DNA
acgaatctctggtatacggcgtgttcccaaaccaggacggcacgttcaccgcaatgacgtataccaaaagcaaat

SEQ ID NO: 429859 - DNA, 75 bp, synthetic construct
  source 1..75: mol_type = other DNA
gattccaaagtggtgtatcgaccgtatcccttctgatgctcaaatcataggtgaaacggaattacattatcttgt

SEQ ID NO: 429860 - DNA, 75 bp, synthetic construct
  source 1..75: mol_type = other DNA
atgattgatttgcaacagcgttacgagactattaagtcggcttgtgaaaacttaaagttacaaactaagccagcc

SEQ ID NO: 429861 - DNA, 75 bp, synthetic construct
  source 1..75: mol_type = other DNA
gcaacaacgaatctctggtgtacggcgtgtttcccaaccaggacggcacattcaccgcgatgacgtataccaaaa

SEQ ID NO: 429862 - DNA, 75 bp, synthetic construct
  source 1..75: mol_type = other DNA
cctgctgttctttacggttgggctggtggttctcggctacacccagggcagcgtaatgatggtcgtttctggcgc

SEQ ID NO: 429863 - DNA, 75 bp, synthetic construct
  source 1..75: mol_type = other DNA
atggatatgctcaatcttggcaacaatgaatctctggtgtgcggcgtctttcccaaccaggacggcacgtttacc

SEQ ID NO: 429864 - DNA, 75 bp, synthetic construct
  source 1..75: mol_type = other DNA
atgaccgaacatcgtggcggtgcaggtaatttcgctgaagatcgacaaaaagcttctgacgctggtcgtaaaggc

SEQ ID NO: 429865 - DNA, 75 bp, synthetic construct
  source 1..75: mol_type = other DNA
aaagatatttctctggtgaccaaagacgagcttaacgatctttttgaaggtgcgcaggtcagggtgttggctggt

SEQ ID NO: 429866 - DNA, 75 bp, synthetic construct
  source 1..75: mol_type = other DNA
gtgctgcaggatatctcggaggcgttccagttcttcgattcgcaaaatgcccgggggcgcgatctggctcctcac

SEQ ID NO: 429867 - DNA, 75 bp, synthetic construct
  source 1..75: mol_type = other DNA
atggatacgctcaatcttggcaacaacgaatctctggtatgcggagtattccccaacctggacggcacgtttacc

SEQ ID NO: 429868 - DNA, 75 bp, synthetic construct
  source 1..75: mol_type = other DNA
atggatactatcgatcttggcaacagcgaatctctggtatgtggcgtgttccccaaccaggacggtacgtttacc

SEQ ID NO: 429869 - DNA, 75 bp, synthetic construct
  source 1..75: mol_type = other DNA
acgaatctctggtatgtggcgtgtttccaaaccaggacggcgcgttcaccgcaatgacgtataccaaaagcaaat

SEQ ID NO: 429870 - DNA, 75 bp, synthetic construct
  source 1..75: mol_type = other DNA
actttatttttaattgccgccattgttattcgcccctttgccgggcaatgggtgggtaaatattcgaataaaact

SEQ ID NO: 429871 - DNA, 75 bp, synthetic construct
  source 1..75: mol_type = other DNA
tctctggtgtacggcgtgtttcccaaccaggacggtacgttcaccgcgatgacgtataccaaaagcaaaacgttt

SEQ ID NO: 429872 - DNA, 75 bp, synthetic construct
  source 1..75: mol_type = other DNA
acgttcaccgcgatgacgtataccaaaagcaaaacgtttaaaactgaagctggcgcgcgtcgctggttaaccaga

SEQ ID NO: 429873 - DNA, 75 bp, synthetic construct
  source 1..75: mol_type = other DNA
caggacggcacgttcaccgcaatgacgtataccaaaagcaaaacgtttaaaaccgaaaatggtgcccgtcgctgg

SEQ ID NO: 429874 - DNA, 75 bp, synthetic construct
  source 1..75: mol_type = other DNA
gaaaaaagtgaagcaagttaaagcgggtgaaatgctaaccacacgtctggaagacggctggatagaaagtgaagt

SEQ ID NO: 429875 - DNA, 75 bp, synthetic construct
  source 1..75: mol_type = other DNA
acaacgaatctctggtatacggcgtgtttcccaaccaggacggaacgttcaccgcgatgacgtataccaaaagca

SEQ ID NO: 429876 - DNA, 75 bp, synthetic construct
  source 1..75: mol_type = other DNA
cttggcaacagcgaatctctggtatgtggcgtgttccccaaccaggacggcacgttcaccgcgatgacgtatacc

SEQ ID NO: 429877 - DNA, 75 bp, synthetic construct
  source 1..75: mol_type = other DNA
gctgtgcgatgttccgtaacagcaatcgacgggtgacctttcgcccacagcatgggcaacaggttttagttcgcg

SEQ ID NO: 429878 - DNA, 75 bp, synthetic construct
  source 1..75: mol_type = other DNA
ggcgatacgttgaccacgcggttaggtgatggcgtggtggtcagcgaagtcagttcagttatgaaaacccgcaaa

SEQ ID NO: 429879 - DNA, 75 bp, synthetic construct
  source 1..75: mol_type = other DNA
aacgttttggtaatgcagtaacacacctggaagccgtgagcccgctgtcaacactggcgcgtggatatagcgtaa

SEQ ID NO: 429880 - DNA, 75 bp, synthetic construct
  source 1..75: mol_type = other DNA
atgaataccgcgcattataagagcccggcctttgacagcattatggcggaaacgctgaaagtgactgacgaggcg

SEQ ID NO: 429881 - DNA, 75 bp, synthetic construct
  source 1..75: mol_type = other DNA
cgtatttgtgcacctactattacgaaattaacaaccagaagccgccatttaatgatgtgcgtgtgcgtaccgcac

SEQ ID NO: 429882 - DNA, 75 bp, synthetic construct
  source 1..75: mol_type = other DNA
acaatggttcagaagttcagtcattagatccgcacaaaattgaaggtgttccggagtctaatatcagccgagacc

SEQ ID NO: 429883 - DNA, 75 bp, synthetic construct
  source 1..75: mol_type = other DNA
tctcgatggtcacccggcgccaggcgttgcagaatcctgggataataaggatgctaaagtctggacgttccatct

SEQ ID NO: 429884 - DNA, 75 bp, synthetic construct
  source 1..75: mol_type = other DNA
gcgcggcgcacagctctgtacactaaagcagaacaacagctggataaggattcggccattgttcctgtttattac

SEQ ID NO: 429885 - DNA, 75 bp, synthetic construct
  source 1..75: mol_type = other DNA
ggccattgttcctgtttattactacgtgaatgcgcgtctggtgaaaccgtgggttggtggctataccggcaaaga

SEQ ID NO: 429886 - DNA, 75 bp, synthetic construct
  source 1..75: mol_type = other DNA
aaaccgtggctatccggtcatgctacgtatggataatggtccggaatttatctcactggcactggctgaatgggc

SEQ ID NO: 429887 - DNA, 75 bp, synthetic construct
  source 1..75: mol_type = other DNA
tccctcgccactggctacgccagaagcgctgaaccagagctggtctgtcgattttatgcatgatgcgctggcctg

SEQ ID NO: 429888 - DNA, 75 bp, synthetic construct
  source 1..75: mol_type = other DNA
gtaatgcttcacatggataatggtccggaatttatctcgctggcactggcagaatgggcagagaaacatacagtc

SEQ ID NO: 429889 - DNA, 75 bp, synthetic construct
  source 1..75: mol_type = other DNA
gcaactgaaacactggcagcgctgggccagcaagggcaattttcaactgcagaagtacgtgataagcagcaaaat

SEQ ID NO: 429890 - DNA, 75 bp, synthetic construct
  source 1..75: mol_type = other DNA
tgcgcctcgtttccaccatcagtggttgccggacgagctgcgtgttgaaaagggggttagtccggatacgctcaa

SEQ ID NO: 429891 - DNA, 75 bp, synthetic construct
  source 1..75: mol_type = other DNA
atgaagtgcgggaaatcactgaaagatgggtgtcagaatataactgtgaacgcccgtatgaatcactaaacaata

SEQ ID NO: 429892 - DNA, 75 bp, synthetic construct
  source 1..75: mol_type = other DNA
acagcctgaaatccaacatccagctggtgttcaacaacgccatcctggcgagtgaaatagccaaagaataccagc

SEQ ID NO: 429893 - DNA, 75 bp, synthetic construct
  source 1..75: mol_type = other DNA
tgacctgacgcgagatgttgaaggtttctactgtagtgaaattgtgaaacgaatgtttgaagtttggtgtcattg

SEQ ID NO: 429894 - DNA, 75 bp, synthetic construct
  source 1..75: mol_type = other DNA
gattgaagatcaacttcagcaacaacagcaagaaacctggcaacgttatttcccgcagatcaaacgcacccacaa

SEQ ID NO: 429895 - DNA, 75 bp, synthetic construct
  source 1..75: mol_type = other DNA
tacctcacggcgttgcagcggccaatccacttatccagcatcctgaaataccatcactgagtttgtattctgccg

SEQ ID NO: 429896 - DNA, 75 bp, synthetic construct
  source 1..75: mol_type = other DNA
gaaaattcgcggtgagcacccgaacgagatcgccggggcggcaaccgcgctactggaaaacgccgcgccgttccc

SEQ ID NO: 429897 - DNA, 75 bp, synthetic construct
  source 1..75: mol_type = other DNA
atgcgatgccggttcgccagcaactgaaaacccgcactctgttcaatgtgctggggccattgattaacccggcgc

SEQ ID NO: 429898 - DNA, 75 bp, synthetic construct
  source 1..75: mol_type = other DNA
tattaattaccgcctcttgctccacatttgctgcccctcaacaaatcaacgatattgtgcatcgcacaattaccc

SEQ ID NO: 429899 - DNA, 75 bp, synthetic construct
  source 1..75: mol_type = other DNA
gctgcctgcgtttttctgccgtaccagcccatttgaagtcagtattcgccttgatagtgccacggaaatcgctcg

SEQ ID NO: 429900 - DNA, 75 bp, synthetic construct
  source 1..75: mol_type = other DNA
gatgccggaacacactatcaatgcggcgatcgatcaggcggtagctgaagctgaagcgcagggcgttattggtaa

SEQ ID NO: 429901 - DNA, 75 bp, synthetic construct
  source 1..75: mol_type = other DNA
cgaacccgatcccggaacagtttgcgatgccggaacacactatcaatgcggcgatcgatcaggcggtagctgaag

SEQ ID NO: 429902 - DNA, 75 bp, synthetic construct
  source 1..75: mol_type = other DNA
gtgcaggacgctttaaaaaacaaaaaaccggttgtggcgctggaatcgaccattatttctcacgggatgccgttc

SEQ ID NO: 429903 - DNA, 75 bp, synthetic construct
  source 1..75: mol_type = other DNA
gattattgcagcactggctgggattaaagtttttgcaaccggaggtattggtggtgtgcatcgcggagcggaaca

SEQ ID NO: 429904 - DNA, 75 bp, synthetic construct
  source 1..75: mol_type = other DNA
gcaaaatgctgagacggcaattgaagtagaagacacaattcgtaagcacggtgctgtacctgcaacaatcgccat

SEQ ID NO: 429905 - DNA, 75 bp, synthetic construct
  source 1..75: mol_type = other DNA
ttttcgtcgtaaaggcaagcagcgtctgctggcacgaaatctatcgccacttgctacgcctgaagcgttaaacca

SEQ ID NO: 429906 - DNA, 75 bp, synthetic construct
  source 1..75: mol_type = other DNA
aagatgacgagtggaaagtgaaagtcggtcgttttgaagcttacgatatgttccctctaaatcaggatactttca

SEQ ID NO: 429907 - DNA, 75 bp, synthetic construct
  source 1..75: mol_type = other DNA
atggaaatgttgattgatccaacgaccggcgattataccggcgacagctcagactctttagcgaatgccgtctac

SEQ ID NO: 429908 - DNA, 75 bp, synthetic construct
  source 1..75: mol_type = other DNA
ccatactgcgccaacattttgtggcctgggagcaggaaagcggaaccggtgccagtcaggcacagatcgccatcg

SEQ ID NO: 429909 - DNA, 75 bp, synthetic construct
  source 1..75: mol_type = other DNA
ggaaggattaagccagcagcagtacatgagcatttgtattccgatgctcatgtgtgccgatgccatttacttact

SEQ ID NO: 429910 - DNA, 75 bp, synthetic construct
  source 1..75: mol_type = other DNA
agctatctgtcgctggcggcgtttcgatgggtatcgccggttctattgttgatcacaacttctttgaatcctggc

SEQ ID NO: 429911 - DNA, 75 bp, synthetic construct
  source 1..75: mol_type = other DNA
agaagcttaacctgattgatgcagacgcagacccagaaaaggtcctggacgagttattggctgaatcctcctcgc

SEQ ID NO: 429912 - DNA, 75 bp, synthetic construct
  source 1..75: mol_type = other DNA
cttcgccgctgtatctggacttcactcaacaaagcggatgatgtgatctgtttacatcagttgcagccaacggca

SEQ ID NO: 429913 - DNA, 75 bp, synthetic construct
  source 1..75: mol_type = other DNA
gtggccgacgtttgtggtgtcagccaaagagcaatctataaatggatggataacggaaaattgcctcgcacagaa

SEQ ID NO: 429914 - DNA, 75 bp, synthetic construct
  source 1..75: mol_type = other DNA
cgtaagtggaagacggttatttatgcaaaacgcaaagtgaagaaggagccaattaaaagaaatccagatggtacg

SEQ ID NO: 429915 - DNA, 75 bp, synthetic construct
  source 1..75: mol_type = other DNA
atggcctttgatggcgaaaatgcttttcttggctcttcaccggaacggttatggcggcggcgtgacaaagcgctg

SEQ ID NO: 429916 - DNA, 75 bp, synthetic construct
  source 1..75: mol_type = other DNA
ccaccacgcgtgaacaacactggccggataaatcaggctggacgcaattaatcgaactggccacgaaaaccatcg

SEQ ID NO: 429917 - DNA, 75 bp, synthetic construct
  source 1..75: mol_type = other DNA
ggagcaggcattgtccgaggctcagaccccgagcaggagtggcaggaaatcgacaacaaagcggcagggttgcga

SEQ ID NO: 429918 - DNA, 75 bp, synthetic construct
  source 1..75: mol_type = other DNA
gtccgcaatggtgaggagttcttcgaaacgcagagccgcaatgtaacccactggatgccgctaccagaaccgccg

SEQ ID NO: 429919 - DNA, 75 bp, synthetic construct
  source 1..75: mol_type = other DNA
ctcccaaaaagcagggtgcagtctggatttggttcgttttgttaagcaggaagaaaccatactttcttcgataaa

SEQ ID NO: 429920 - DNA, 75 bp, synthetic construct
  source 1..75: mol_type = other DNA
atgccgtcgctgcggtatttcccgccccacatgcgtaaatggtggcgcagatatctggctcagggcatcgctggt

SEQ ID NO: 429921 - DNA, 75 bp, synthetic construct
  source 1..75: mol_type = other DNA
cgtcgagtagaaatttatcgacgcagcgaaggtactaatggcgaatctgtctggatgcttcatgagtcggtgatg

SEQ ID NO: 429922 - DNA, 75 bp, synthetic construct
  source 1..75: mol_type = other DNA
actgtgaacgccctcatgaatcactgaacaacctgacaccggaggaatatcgtcaacaacattaccagcccggga

SEQ ID NO: 429923 - DNA, 75 bp, synthetic construct
  source 1..75: mol_type = other DNA
tttaatcgcgaggcgttgtctatcgaaatagaccttaatttaccagctcagcgagtggttcgtgtcctcgacagg

SEQ ID NO: 429924 - DNA, 75 bp, synthetic construct
  source 1..75: mol_type = other DNA
ggcttacgagaggatctcaaccgtgctgtttggatacgtatgtcagcattgaatcgtctccctcccaaaattcct

SEQ ID NO: 429925 - DNA, 75 bp, synthetic construct
  source 1..75: mol_type = other DNA
tggtgggcagtaactgacattggagaagaacctgcatcaaaagtaacccactggatgccgctgccagaaccgccg

SEQ ID NO: 429926 - DNA, 75 bp, synthetic construct
  source 1..75: mol_type = other DNA
tatggaagtttactgttaagtcagaaggcagcgaaagagtttgtgagaaatggattaatatatttgatgagcaga

SEQ ID NO: 429927 - DNA, 75 bp, synthetic construct
  source 1..75: mol_type = other DNA
ctcggccttgattcaggtgcactggatgcatcaatggttgttggcggcatggtcgaagagctgattctgaaatgg

SEQ ID NO: 429928 - DNA, 75 bp, synthetic construct
  source 1..75: mol_type = other DNA
gtgatgatttcgggcagaagaaggtggagcagatccgccatattatgccccgtcgagttgaaatttatcgacgca

SEQ ID NO: 429929 - DNA, 75 bp, synthetic construct
  source 1..75: mol_type = other DNA
aaaaaacgcctgtctgtggctacgctacttcctgtgtatgaagaaagcatcaaacaaaatattgggcgcatattt

SEQ ID NO: 429930 - DNA, 75 bp, synthetic construct
  source 1..75: mol_type = other DNA
tgccgttcacgcaaactatcagcccaatgaggagcatattcaggaacagaattacaagcttgaacttgagctgag

SEQ ID NO: 429931 - DNA, 75 bp, synthetic construct
  source 1..75: mol_type = other DNA
tgcagatcggtgaacgcagaatgacgctggtcgatctgcccggcattggtgagacaccgcagcatgatcaggaat

SEQ ID NO: 429932 - DNA, 75 bp, synthetic construct
  source 1..75: mol_type = other DNA
cgtcaccaggaactctcactggcgacagtaacagcccgggtggccaccctgttcccgtcatcatttccggtactc

SEQ ID NO: 429933 - DNA, 75 bp, synthetic construct
  source 1..75: mol_type = other DNA
atgtcattcagccattcttccctctcctctcaagtaaaatcacatctgacgtttcttcctgaagaaattcgccag

SEQ ID NO: 429934 - DNA, 75 bp, synthetic construct
  source 1..75: mol_type = other DNA
ggtgacgccatcgggaaaagttttgacgacgccgttgcccggttcacttttccggtctggatgttacagcttctg

SEQ ID NO: 429935 - DNA, 75 bp, synthetic construct
  source 1..75: mol_type = other DNA
attcgccagaaaatccttgaacatctccacggtgttattcattacgagcccgtgattggcattatgggtaaatcc

SEQ ID NO: 429936 - DNA, 75 bp, synthetic construct
  source 1..75: mol_type = other DNA
ctgttacagtccgggtggccaccctgttcccttcatcatttccggtactccctgtagccgcgcctgcaggctgga

SEQ ID NO: 429937 - DNA, 75 bp, synthetic construct
  source 1..75: mol_type = other DNA
acgacgccgttgcccgtttcagttttccggcctggatgttacagcttctgcgtaaagcccgggaccgcattatcc

SEQ ID NO: 429938 - DNA, 75 bp, synthetic construct
  source 1..75: mol_type = other DNA
gctggggttactgccggaagtggtcgaaaccatcgaagaagaaccacggcagcctggcggctgcaaatcgtggtg

SEQ ID NO: 429939 - DNA, 75 bp, synthetic construct
  source 1..75: mol_type = other DNA
tccacagtatgaaatatacaccggttggcgttgatatcgcaaaacatgtcattcaggtcacttcatcaatgagca

SEQ ID NO: 429940 - DNA, 75 bp, synthetic construct
  source 1..75: mol_type = other DNA
atgtcattcagccattcttccctctcctcacaagtgaaatcatatctgacgtttcttcctgaagaaattcgccag

SEQ ID NO: 429941 - DNA, 75 bp, synthetic construct
  source 1..75: mol_type = other DNA
atgtcattcagccattcttccctctcctcacaagttaaatcaaatctgacgtttcttcctgaagaaattcgccag

SEQ ID NO: 429942 - DNA, 75 bp, synthetic construct
  source 1..75: mol_type = other DNA
tccggactgggtgttacagattctgcgtaaagcccgggaccgcattatccgtctgctggaaacactgtgggatca

SEQ ID NO: 429943 - DNA, 75 bp, synthetic construct
  source 1..75: mol_type = other DNA
aaaagcagcctgtgtaatgccatttttcagtcccgtatctgtgccacgcatcccctgaacggctgcacccgtcag

SEQ ID NO: 429944 - DNA, 75 bp, synthetic construct
  source 1..75: mol_type = other DNA
ggcggtgatggactacacccagttgaactcgaaagccgatgaggaggttcgtaaagagcttaatgccattgctga

SEQ ID NO: 429945 - DNA, 75 bp, synthetic construct
  source 1..75: mol_type = other DNA
ctttgtcgatgggcaaacaccagtgactggggctggaaagagtacagtgtggatgtgagccgcagcgtgatcaat

SEQ ID NO: 429946 - DNA, 75 bp, synthetic construct
  source 1..75: mol_type = other DNA
caccgccgacattctgacaccacgacgccgggaggattacggtaaggacctgtggagtacttatcagaccattca

SEQ ID NO: 429947 - DNA, 75 bp, synthetic construct
  source 1..75: mol_type = other DNA
tttcgtggtacagccctgtatgccacagaaaatattgccggacgcatcaatgcccgcctggaggatgaaggtttc

SEQ ID NO: 429948 - DNA, 75 bp, synthetic construct
  source 1..75: mol_type = other DNA
ctgaacgactatttcagaagcggtaaacgcaaagaacagcaaatgctggaggaagaaaattcagcgcagccccgg

SEQ ID NO: 429949 - DNA, 75 bp, synthetic construct
  source 1..75: mol_type = other DNA
aatctgagcgcgcttatggaggaaagaacggagaccgtcacccgtcgctgtcgacaggatggtgtctggggtacg

SEQ ID NO: 429950 - DNA, 75 bp, synthetic construct
  source 1..75: mol_type = other DNA
gcttacggagcgtcttcaggcattaaatgaaagggttcccgagctgatgactgacagtaaggcgttaagggaaga

SEQ ID NO: 429951 - DNA, 75 bp, synthetic construct
  source 1..75: mol_type = other DNA
gaggacgactggaaagacagcactaaggtaaataaaaaggcagaaaaactctggaatatatctctgatcgaccaa

SEQ ID NO: 429952 - DNA, 75 bp, synthetic construct
  source 1..75: mol_type = other DNA
gattacccgcctcccaaagcaagcccgcagtccacttgtgcctcatctgcagaaccggtatcgcactgataccgt

SEQ ID NO: 429953 - DNA, 75 bp, synthetic construct
  source 1..75: mol_type = other DNA
cccgtcgctgtcggcagagtggtttatggggaaagatttgtggagcgtttggcaccagtgactggggctgggaaa

SEQ ID NO: 429954 - DNA, 75 bp, synthetic construct
  source 1..75: mol_type = other DNA
ttttatgaccttttcttatgctggcgtttcagcctttctggcgctttacgcccgcgaacttaatctgatgtcagc

SEQ ID NO: 429955 - DNA, 75 bp, synthetic construct
  source 1..75: mol_type = other DNA
ggcgctttgattggtatcggatatggctccgtgacgccgatattccagacgcaaatcatcagttccgtagaacca

SEQ ID NO: 429956 - DNA, 75 bp, synthetic construct
  source 1..75: mol_type = other DNA
atgaaaacctatgccgttatcacactcgttaccgctgcatttttgctgagtggctgtaacagcgagccctccgaa

SEQ ID NO: 429957 - DNA, 75 bp, synthetic construct
  source 1..75: mol_type = other DNA
gtgccgatgacggtgatgatcattttcatcctgttgtatctggcgttccgccgggttgatgaagcgttgttgatc

SEQ ID NO: 429958 - DNA, 75 bp, synthetic construct
  source 1..75: mol_type = other DNA
atcggcggcgcaacggtaggggaaacggttgaaggcgtggcccgctacccgattaatattcgctatccacaggat

SEQ ID NO: 429959 - DNA, 75 bp, synthetic construct
  source 1..75: mol_type = other DNA
tgagccgtattgcggcgccgatgattggcgggatgatcactgctccgctgctgtcgctgttcattattcctgccg

SEQ ID NO: 429960 - DNA, 75 bp, synthetic construct
  source 1..75: mol_type = other DNA
accagctatcccggtcaggctccgcagattgtagaaaaccaggtcacttatccgcttaccaccaccatgctgtcc

SEQ ID NO: 429961 - DNA, 75 bp, synthetic construct
  source 1..75: mol_type = other DNA
ccgggtgagcagattgacaacgtcacccgctggaaggtgattaccgacgcctccgtggaagtgggacccgcactg

SEQ ID NO: 429962 - DNA, 75 bp, synthetic construct
  source 1..75: mol_type = other DNA
tgcgggatgttgcccgcgtgcagacagggcctgaaatgcggcgtggtattgccgaactgaacggccagggggaag

SEQ ID NO: 429963 - DNA, 75 bp, synthetic construct
  source 1..75: mol_type = other DNA
catgcacttccagggactgaatgccaatattatgtcgttgggtggcattgcgattgccgtcggggcgatggtcga

SEQ ID NO: 429964 - DNA, 75 bp, synthetic construct
  source 1..75: mol_type = other DNA
tatcaaaggacttctccctgaggaggttgtaaatagtatacgcgaacaactttcgggagcatgtacgacagagat

SEQ ID NO: 429965 - DNA, 75 bp, synthetic construct
  source 1..75: mol_type = other DNA
gttatccgatcctgaaagtccccgcctggttctggttgcacgactgcagaaatcgacgctacaggaagtcgcccg

SEQ ID NO: 429966 - DNA, 75 bp, synthetic construct
  source 1..75: mol_type = other DNA
ggtcatgctgatgtacctgcgtcatgccatcgaagcgcatccggaattgtcccgtaaggagacgttcacaccgga

SEQ ID NO: 429967 - DNA, 75 bp, synthetic construct
  source 1..75: mol_type = other DNA
ggcgatcgtagtgatccctatcctgatggggtactggatccgtggcaaaattccgccggaaagcagtaacccgct

SEQ ID NO: 429968 - DNA, 75 bp, synthetic construct
  source 1..75: mol_type = other DNA
tacaggactggtttctcaaatatgagctgaaaaccatccctgacgttgcggaagtggcgtcggtgggcggtgtgg

SEQ ID NO: 429969 - DNA, 75 bp, synthetic construct
  source 1..75: mol_type = other DNA
ttcctgcagagaccagtaaccctctgaaccggctgctgattaaagcatatcatccgttgctgttgcgggttcttc

SEQ ID NO: 429970 - DNA, 75 bp, synthetic construct
  source 1..75: mol_type = other DNA
tataagtgagttagtaaaagagtccgcaggctcaccacaactaatgcaatatttatgcttaaactcttgttttga

SEQ ID NO: 429971 - DNA, 75 bp, synthetic construct
  source 1..75: mol_type = other DNA
gtgacagggtggtacagttctgatgaaacgaattgcgtttgtttttctactgcacctcatggtacagccgcaggc

SEQ ID NO: 429972 - DNA, 75 bp, synthetic construct
  source 1..75: mol_type = other DNA
accattggtcgtggaagccacgccgctcgaagctgaaacattacgtcgtgagcttggcaattatgatgttatttt

SEQ ID NO: 429973 - DNA, 75 bp, synthetic construct
  source 1..75: mol_type = other DNA
aaatgtaatgtgacggttgttgtcaataacgacaaggccaccgcagctgtcacaatggtcaaaacggatgatggc

SEQ ID NO: 429974 - DNA, 75 bp, synthetic construct
  source 1..75: mol_type = other DNA
cgtgcaatgacgcaacatttgcaggaaatcagcgaatccgtgcgccagatccgccaggaaaatagcgactggttt

SEQ ID NO: 429975 - DNA, 75 bp, synthetic construct
  source 1..75: mol_type = other DNA
tcgtccgcagcgtggcagctacgtcaacaaaatttccatggcccaggtgcgcaacggcagttttatccgtcaggc

SEQ ID NO: 429976 - DNA, 75 bp, synthetic construct
  source 1..75: mol_type = other DNA
gggatcaaaagcccgataggtatcaaagtatccgggactgttctgtccgatatcgatgcaacggcacagagtatc

SEQ ID NO: 429977 - DNA, 75 bp, synthetic construct
  source 1..75: mol_type = other DNA
gggcgatctgctgtatatgccgtcgaccttgcctggcgtctctccggcagaagctgcagcgctcctgcagacaac

SEQ ID NO: 429978 - DNA, 75 bp, synthetic construct
  source 1..75: mol_type = other DNA
tgcggccttgtccattttcacggttatctggccactgagtcaggtgggcggtgaatttctgccgaagattaacga

SEQ ID NO: 429979 - DNA, 75 bp, synthetic construct
  source 1..75: mol_type = other DNA
ctactgcaccccacggcacagcggctggccgtgaaggattagatgcattactcgcaacctccgcattaactgacg

SEQ ID NO: 429980 - DNA, 75 bp, synthetic construct
  source 1..75: mol_type = other DNA
tgtttgaaggcttactggtcagcgatcttgacggtcatccagcacctggcgtcgctgaatcctgggataataaag

SEQ ID NO: 429981 - DNA, 75 bp, synthetic construct
  source 1..75: mol_type = other DNA
ttcctgccgagaccagtaaccccctgaaccggatgctgataaaagcgtatcatccattactattgcgggtcctcc

SEQ ID NO: 429982 - DNA, 75 bp, synthetic construct
  source 1..75: mol_type = other DNA
ccgccgggtcaccttccgcccacagcacgggcaacaggttttagttcgcgccaatattacgctctacgagccgcg

SEQ ID NO: 429983 - DNA, 75 bp, synthetic construct
  source 1..75: mol_type = other DNA
gagatggggcaggtgtggatcagcggcgaaatctctaattttacacaaccagcctccggtcactggtactttacg

SEQ ID NO: 429984 - DNA, 75 bp, synthetic construct
  source 1..75: mol_type = other DNA
tggtgtgatcacctcaaaaaccggtgctgcgctacatgatattttgcatgtgttaaaacgtcgcgatccgtcttt

SEQ ID NO: 429985 - DNA, 75 bp, synthetic construct
  source 1..75: mol_type = other DNA
tgcggacgaaccccgtaggctgaaaccgaaaccgggcgtccggtatcttgccgaactgtcagattttgataagtc

SEQ ID NO: 429986 - DNA, 75 bp, synthetic construct
  source 1..75: mol_type = other DNA
atgatggcgtggtggtaagcgtagtgagcgacgtggcgaaaacccgcaaaccacgcaaaaaaacagctaattcgt

SEQ ID NO: 429987 - DNA, 75 bp, synthetic construct
  source 1..75: mol_type = other DNA
gcgccgtcgggcatgaaaccgatgtgacgattgccgactttgttgctgatctacgtgcgccaacgccgtcagccg

SEQ ID NO: 429988 - DNA, 75 bp, synthetic construct
  source 1..75: mol_type = other DNA
ggctatccggatcagcgatttcagattgtattgtgaaattactgacggaaaaagcattacgtacatgatcgccgg

SEQ ID NO: 429989 - DNA, 75 bp, synthetic construct
  source 1..75: mol_type = other DNA
cgtcacgggattttcgacgacgggcggctctgtggggagtggctctgccggagccggaatttacacctgctgaac

SEQ ID NO: 429990 - DNA, 75 bp, synthetic construct
  source 1..75: mol_type = other DNA
tgctaccggaactgtccgcagaagccaacccgttccgcaatcgtctggccgagtctgaagccagcaacgatcagg

SEQ ID NO: 429991 - DNA, 75 bp, synthetic construct
  source 1..75: mol_type = other DNA
atgttaccttctcaatcccctgcaatttttaccgttagtcgcctgaatcaaacggttcgtctgctgcttgagcat

SEQ ID NO: 429992 - DNA, 75 bp, synthetic construct
  source 1..75: mol_type = other DNA
tgttgatgctgtttatggaaatgaatggcgccgaaacctggatggtgcatatttgcggcatcgttttgcttgctg

SEQ ID NO: 429993 - DNA, 75 bp, synthetic construct
  source 1..75: mol_type = other DNA
tttttattccgttaggttcgcaccatcaaagtttttatgagtttggtgccacgcgcatattgaacgttgggatca

SEQ ID NO: 429994 - DNA, 75 bp, synthetic construct
  source 1..75: mol_type = other DNA
ggttacaggtaaacacgtccgggatggtcaccgaaagacaaataaagacgttatgtaccgtggtcatctgagcct

SEQ ID NO: 429995 - DNA, 75 bp, synthetic construct
  source 1..75: mol_type = other DNA
ctgcccgcctcccgcgtttatccaggctcatcacgtcaggcgtacctggctaaccgtgcgcttcatgagttacgg

SEQ ID NO: 429996 - DNA, 75 bp, synthetic construct
  source 1..75: mol_type = other DNA
ctgccagcctcccgcgtttaccccggctcatcacgccaggcatacctggctaaccgtgcgcttcatgagttacgg

SEQ ID NO: 429997 - DNA, 75 bp, synthetic construct
  source 1..75: mol_type = other DNA
cgtagcattagtgacaggaagtgtcacaccggctatggctgctggtaatagtacagttaaacttcctacgccgga

SEQ ID NO: 429998 - DNA, 75 bp, synthetic construct
  source 1..75: mol_type = other DNA
atctctggtatgcggcgtgtttcccaaccaagacggcacgttcaccgcgatgacgtataccaaaagcaaaacgtt

SEQ ID NO: 429999 - DNA, 75 bp, synthetic construct
  source 1..75: mol_type = other DNA
gttttccggcagtcagccagttacagacccggctcgcggtaaaaacaaatctgagcgcgcttatggaggaaagaa

SEQ ID NO: 430000 - DNA, 75 bp, synthetic construct
  source 1..75: mol_type = other DNA
gcggtaaaaataaatctgagtgcgcttatggaggaaagaacggagaccgtcacccgtcgccgtcggcagagtggc

SEQ ID NO: 430001 - DNA, 75 bp, synthetic construct
  source 1..75: mol_type = other DNA
tggcgaaagtcgcaaaacgcaaaggcctgccttacccccacgtcaatcagcaaggcgagatcgaagctgatgccg

SEQ ID NO: 430002 - DNA, 75 bp, synthetic construct
  source 1..75: mol_type = other DNA
ctatcagaagtgggatacccaggccagcatgcatatcttcaatgatgatggctggtttaccgaacgcgaaattcc

SEQ ID NO: 430003 - DNA, 75 bp, synthetic construct
  source 1..75: mol_type = other DNA
acgcgcgtgcattctctggaaggtgaacttttacatcgtgatgatttacctgcggatgtcgcggagctggtgctg

SEQ ID NO: 430004 - DNA, 75 bp, synthetic construct
  source 1..75: mol_type = other DNA
atctattctcgatttaggattaaccactgagtatttagaaaccttcggtgtgccgttaattggttatcagaccaa

SEQ ID NO: 430005 - DNA, 75 bp, synthetic construct
  source 1..75: mol_type = other DNA
tggcgggacttgcttcgtgttgggtagacggaatgccgtttgccgaatctgttcgtttcgcacagggatgttcgt

SEQ ID NO: 430006 - DNA, 75 bp, synthetic construct
  source 1..75: mol_type = other DNA
aaaagactgatgccgcggcggcggaaaaaatcagcaccggtcagtcagccggaaccagacccgaagagccgctca

SEQ ID NO: 430007 - DNA, 75 bp, synthetic construct
  source 1..75: mol_type = other DNA
gttcagtgggagcagaaattcgcccgtcacgtaaatcacgtcagggcgcaggctaaaccagtcagcaagggggta

SEQ ID NO: 430008 - DNA, 75 bp, synthetic construct
  source 1..75: mol_type = other DNA
cacccagatgaactcaaaagccgatgatgacgtccgtaaagagcttaatgccattgctgacgtatcagccggccg

SEQ ID NO: 430009 - DNA, 75 bp, synthetic construct
  source 1..75: mol_type = other DNA
gacccggctcgcggtaaaaataaatctgagtgcgcttatggaggaaagaacggagaccgtcacccgtcgccgtcg

SEQ ID NO: 430010 - DNA, 75 bp, synthetic construct
  source 1..75: mol_type = other DNA
gagggcaatggatggtttattggttcaatacatgacaccgaagatggcccggtttgtgtatggctgagaaataag

SEQ ID NO: 430011 - DNA, 75 bp, synthetic construct
  source 1..75: mol_type = other DNA
ttctccatctggaacatattcagcctgtccgcaatttattaatcacactgcaggaaaaactcgccaccccggcag

SEQ ID NO: 430012 - DNA, 75 bp, synthetic construct
  source 1..75: mol_type = other DNA
cacccagatgaactccaaagccgatgacgatgtccgtaaagagcttaatgccattgctgacgtatcagccggccg

SEQ ID NO: 430013 - DNA, 75 bp, synthetic construct
  source 1..75: mol_type = other DNA
cacccagatgaactctaaagccgatgaagacgtccgtaaagagcttaatgccattgctgacgtatcagccggccg

SEQ ID NO: 430014 - DNA, 75 bp, synthetic construct
  source 1..75: mol_type = other DNA
tttctttgttgaagacgatggacgtctttatgaggatggtcactcttatgaatcccaaacaggttgtatccctgc

SEQ ID NO: 430015 - DNA, 75 bp, synthetic construct
  source 1..75: mol_type = other DNA
actggatcaacaaccctgacagcctgttaagcactgatactggctatagattacgtcatgttaatggccgtatgg

SEQ ID NO: 430016 - DNA, 75 bp, synthetic construct
  source 1..75: mol_type = other DNA
aaaccggggaattactgacgaaggtctgtgcctcactggaggaggagctgaacgactatttcagaagcggtaaac

SEQ ID NO: 430017 - DNA, 75 bp, synthetic construct
  source 1..75: mol_type = other DNA
ctgaggaatttgacgcctggatgaaggaaaataatcttcagtggactattcgcagtatggatgaagatcatttta

SEQ ID NO: 430018 - DNA, 75 bp, synthetic construct
  source 1..75: mol_type = other DNA
ggaaaataatcttcaatggaccatcagaactatggatgaagatgattttaatctggacgcagatggtcccgatat

SEQ ID NO: 430019 - DNA, 75 bp, synthetic construct
  source 1..75: mol_type = other DNA
atccggttgcagatgaccccgatatttccacctgggaaccggaacgaccagagggcgaaggctggtttattggct

SEQ ID NO: 430020 - DNA, 75 bp, synthetic construct
  source 1..75: mol_type = other DNA
gaatacgtctgtaaagacagtgaactggcaactgaaggggcgacagacctgtgggaaggctcacttatcgatcaa

SEQ ID NO: 430021 - DNA, 75 bp, synthetic construct
  source 1..75: mol_type = other DNA
agtatgcagcccgccggtgaaggtttactgcaacagaagtacgaacagcttaaagcgaagttgcaggctgaaggt

SEQ ID NO: 430022 - DNA, 75 bp, synthetic construct
  source 1..75: mol_type = other DNA
ccaacattacgctgtatgaaccgcgcggcgattatcaaattattgtcgaaagtatgcagcccgccggtgaaggtt

SEQ ID NO: 430023 - DNA, 75 bp, synthetic construct
  source 1..75: mol_type = other DNA
ctgatacagcggacacgttcgagaaaaaagtgtcggcttttgttggttccggtatttccgtgcagcctttaggac

SEQ ID NO: 430024 - DNA, 75 bp, synthetic construct
  source 1..75: mol_type = other DNA
ggcaccgcatcacgagcagttcaggaaattcgggcagcacgtgagcagtgggaacgtgaaaacggatttatcagc

SEQ ID NO: 430025 - DNA, 75 bp, synthetic construct
  source 1..75: mol_type = other DNA
tcactgttccaggcaatgtctggcatggtgcacagctttacgcagttcgtgttggtgcgtatcggtatgggaatt

SEQ ID NO: 430026 - DNA, 75 bp, synthetic construct
  source 1..75: mol_type = other DNA
ccgtgttttcactcgcttacgggattgcgcaacttccttgcggcccactattggatcgtaaaggcccacgcctga

SEQ ID NO: 430027 - DNA, 75 bp, synthetic construct
  source 1..75: mol_type = other DNA
ttttatgaccttttcgtatgccggggtttctgcttttctggcgctttatgcacgcgaacttaacctgatgtcggc

SEQ ID NO: 430028 - DNA, 75 bp, synthetic construct
  source 1..75: mol_type = other DNA
tcaggcaaggccatttatctgacctcctacccactggacacggcaaaacaaaaatctgcacagtgttacaagacg

SEQ ID NO: 430029 - DNA, 75 bp, synthetic construct
  source 1..75: mol_type = other DNA
accgtgcgcttcatgagttacggaaaaacggaacccttcctgttgatgaagcctgggtcgatgattttgtcaggg

SEQ ID NO: 430030 - DNA, 75 bp, synthetic construct
  source 1..75: mol_type = other DNA
acgtgccgaaccgggcaaaaatgccattgctcataccgttgatcgcaacggcttatggcacgcgttgacgccgca

SEQ ID NO: 430031 - DNA, 75 bp, synthetic construct
  source 1..75: mol_type = other DNA
ctgcaaaccccgcacatgaaagcatatagcgaagccgtaaaaggtgacgtgctggagatgaatattcgtattctg

SEQ ID NO: 430032 - DNA, 75 bp, synthetic construct
  source 1..75: mol_type = other DNA
tgaactggcctgagtctgtaaaagaactgtcagtaaagattgcagcgtttgttggctcaggtatttctgttcagc

SEQ ID NO: 430033 - DNA, 75 bp, synthetic construct
  source 1..75: mol_type = other DNA
actggaaaccaaaattgttcgtgatcgttctcatgcaaagaaaatcggcgatgaacttattatcgatatagagca

SEQ ID NO: 430034 - DNA, 75 bp, synthetic construct
  source 1..75: mol_type = other DNA
atgtccttgttcgataaacacaataaacttgatcatgaaattgccagaaaggaaggttccgacggtcgagggtac

SEQ ID NO: 430035 - DNA, 75 bp, synthetic construct
  source 1..75: mol_type = other DNA
aatacaggaaagatccttgttttcagaatagggcggcaagaaacgcaatgttggttgaatctctggctaacatgt

SEQ ID NO: 430036 - DNA, 75 bp, synthetic construct
  source 1..75: mol_type = other DNA
gtcactactgacatctggagcgccagcggcaacacgaagctgatagagaaaggcactaccgcatcattactttac

SEQ ID NO: 430037 - DNA, 75 bp, synthetic construct
  source 1..75: mol_type = other DNA
ttattcgccgtgatgattcagccaccacacagaacccgataaaaacccggctgcaggaaatgacgctgacaccag

SEQ ID NO: 430038 - DNA, 75 bp, synthetic construct
  source 1..75: mol_type = other DNA
aacgtgaggctgaattacaagcattacaggacgatgaaaaggagaactcattacaaccagcagtaaacaaactga

SEQ ID NO: 430039 - DNA, 75 bp, synthetic construct
  source 1..75: mol_type = other DNA
tagacgatcggatcctggcactgcaatcacaggggatcttcaccgatcctcagtcatatattacttacgcgaccg

SEQ ID NO: 430040 - DNA, 75 bp, synthetic construct
  source 1..75: mol_type = other DNA
aaccttcgaagctattcagtattacctgctgaaagcctctaatgagctggcgaaagagcaaggcgcgtgcccgtg

SEQ ID NO: 430041 - DNA, 75 bp, synthetic construct
  source 1..75: mol_type = other DNA
cttgctcaccgcctacaaattcggggtcaaaacgctgtattatcagaacacccgtgacggtgcagaagacgcaca

SEQ ID NO: 430042 - DNA, 75 bp, synthetic construct
  source 1..75: mol_type = other DNA
cagagcctgacattatcctgggctttcctccatgcgacgatctcgctgtgtcaggcgctcgctggttcgttgata

SEQ ID NO: 430043 - DNA, 75 bp, synthetic construct
  source 1..75: mol_type = other DNA
cgaatattgaatacgttaacgtatggattgacagccatttcctggtaatgttctcacctgaattgtctgtttatc

SEQ ID NO: 430044 - DNA, 75 bp, synthetic construct
  source 1..75: mol_type = other DNA
cacaagagaaaagttggctctatctgttatctaaatacagcgccaaccccgttcaggcattggcgaattatacgg

SEQ ID NO: 430045 - DNA, 75 bp, synthetic construct
  source 1..75: mol_type = other DNA
aaacgccaccggaaaaagtacaacaaaacttcagtcgtgcgctggatgtggcctatggggggagcagctctgctt

SEQ ID NO: 430046 - DNA, 75 bp, synthetic construct
  source 1..75: mol_type = other DNA
ggaaaacgaactgaaacgccagaacgtcagcaatccccgtgaacttgcccgtaaacaggccgttgccctgtcctg

SEQ ID NO: 430047 - DNA, 75 bp, synthetic construct
  source 1..75: mol_type = other DNA
atcgtctgtcacaaccgcagatttacaagattattgcccgccagagaaaacttcattcacggcgacatcagcccg

SEQ ID NO: 430048 - DNA, 75 bp, synthetic construct
  source 1..75: mol_type = other DNA
tgtcccagccgcagatctaccagattattgcccgccagagaaagctgcatacacggcgtcatcagcctgatctgt

SEQ ID NO: 430049 - DNA, 75 bp, synthetic construct
  source 1..75: mol_type = other DNA
tgatctcgaagtgcgccccggcgagatcgtcggtctggctggcttgctgggatccggacgtaccgaaaccgccga

SEQ ID NO: 430050 - DNA, 75 bp, synthetic construct
  source 1..75: mol_type = other DNA
tactgggcatcggcttttgcccggaagacaggaaaactgatggcatcatcgccgcagcctcagtgcgggaaaata

SEQ ID NO: 430051 - DNA, 75 bp, synthetic construct
  source 1..75: mol_type = other DNA
atgcgacgcagttgtgtcttatctggcgcacgctttacaacgggggaaactatgacgaccgaccaacaccaggaa

SEQ ID NO: 430052 - DNA, 75 bp, synthetic construct
  source 1..75: mol_type = other DNA
gtataaaaaccagggtgacataatcactattatggtcggggaagacattgatttttctgatatctatgagttaaa

SEQ ID NO: 430053 - DNA, 75 bp, synthetic construct
  source 1..75: mol_type = other DNA
tgtataaaacgggcacgttcaatcatggtcagggagccgtgtttatcgctgctacgaagcttagaacacgtaagg

SEQ ID NO: 430054 - DNA, 75 bp, synthetic construct
  source 1..75: mol_type = other DNA
gtgctcgctggacagacgatttatttctgatctggctggcaagctggtctgtacgattaatgaggacgtatacag

SEQ ID NO: 430055 - DNA, 75 bp, synthetic construct
  source 1..75: mol_type = other DNA
gaataaacaaaaggcgctgcactggttgaatctgagctgtatggaaggatttgataccggttgtgaagagtttga

SEQ ID NO: 430056 - DNA, 75 bp, synthetic construct
  source 1..75: mol_type = other DNA
atgaattgcgacgtagtatccacaccaagccggcgttatccggtgaggcgcaatgttgcgggggctttatccctg

SEQ ID NO: 430057 - DNA, 75 bp, synthetic construct
  source 1..75: mol_type = other DNA
ccacacaaaattactggaacagggaactaaggcttttggtcgttaccagaccggaacgctgaatcatggacaggg

SEQ ID NO: 430058 - DNA, 75 bp, synthetic construct
  source 1..75: mol_type = other DNA
ctcctgaaaactgggaagggagggtaatgttacaaagatatctcgaattaaaaatgaaagatcatcttagtttgc

SEQ ID NO: 430059 - DNA, 75 bp, synthetic construct
  source 1..75: mol_type = other DNA
cgttattacgaaggtgatttgaatgttctaaccgaccccggtatttacagtgttacaggaaaggcgacaaacggt

SEQ ID NO: 430060 - DNA, 75 bp, synthetic construct
  source 1..75: mol_type = other DNA
tttcagtaattgtaggttttggtttttctgctggagtgcatatttatattacgtggggaaaaatcatcaactacg

SEQ ID NO: 430061 - DNA, 75 bp, synthetic construct
  source 1..75: mol_type = other DNA
tgtctgctcaggcatacggcccccccgtgacccagcctggatacgtcgatatgtatgtcctgtcgcgaaccggcg

SEQ ID NO: 430062 - DNA, 75 bp, synthetic construct
  source 1..75: mol_type = other DNA
ctggtgaactgtccggcaatgcggcgacagcaacaaagctgaaaacagcccgtaaaattaataacgtttcgtttg

SEQ ID NO: 430063 - DNA, 75 bp, synthetic construct
  source 1..75: mol_type = other DNA
ggctgccgccactgtccccggcgggaaaaaagtaaacctgtctgcaatggccgtgggtgacggtaatggcaaatt

SEQ ID NO: 430064 - DNA, 75 bp, synthetic construct
  source 1..75: mol_type = other DNA
ggactgactgcctcatgggatgcagagaatccacaatgggaggactggattgctgttgggtatcagtccacggga

SEQ ID NO: 430065 - DNA, 75 bp, synthetic construct
  source 1..75: mol_type = other DNA
tcggtcatgtattttgccgaccacggcctggaacgtgaccctacgaagaagaacgtctattttcatggaggcagg

SEQ ID NO: 430066 - DNA, 75 bp, synthetic construct
  source 1..75: mol_type = other DNA
caataattaccttattaatgcgtggatgggggtaacaaagccggaacagccgcaaacgcttgaggaagtgattgc

SEQ ID NO: 430067 - DNA, 75 bp, synthetic construct
  source 1..75: mol_type = other DNA
atggttacgctttggggaaattatgaggggatctctcagacctacgtgttgattgtgggggagtctgtacgtgtc

SEQ ID NO: 430068 - DNA, 75 bp, synthetic construct
  source 1..75: mol_type = other DNA
gtgagatttaccgttctgccggttttcccgatgtggccgtggtcggcattctggaagacggtattccgtgggaaa

SEQ ID NO: 430069 - DNA, 75 bp, synthetic construct
  source 1..75: mol_type = other DNA
tattttccgcttgtcaatttgcttataaagatgcaaaaaataaaaaagcgttcagtccatatatactagcgtcgc

SEQ ID NO: 430070 - DNA, 75 bp, synthetic construct
  source 1..75: mol_type = other DNA
gtgccgtattttcaattatcagtcagggatacaggtattgatacctacgtgttgattgtgggggagtctgtacgt

SEQ ID NO: 430071 - DNA, 75 bp, synthetic construct
  source 1..75: mol_type = other DNA
caggcgaactgtccggcaatgcggctacagctacaaagctgaaaacggcaaggacaattaacggcgtgaaatttg

SEQ ID NO: 430072 - DNA, 75 bp, synthetic construct
  source 1..75: mol_type = other DNA
atgaaaattcgcataatgctatttatattaatgatgatggttatgccagtgagctatgcggcatgttatggcgtg

SEQ ID NO: 430073 - DNA, 75 bp, synthetic construct
  source 1..75: mol_type = other DNA
tcactcgcggattattttcaaacgatgaaattacattgatatatttctcagaatattcggtgatgctgccaactt

SEQ ID NO: 430074 - DNA, 75 bp, synthetic construct
  source 1..75: mol_type = other DNA
gtactcgcgaaacggttggcagtaacgcgtcattccactgccacaacggcaacggatatagctccaatatagacc

SEQ ID NO: 430075 - DNA, 75 bp, synthetic construct
  source 1..75: mol_type = other DNA
tgaatgatgatatagccaaaaggtcattgttttcattgcaagttcaaatagccgaaaaaattcggaggatgacca

SEQ ID NO: 430076 - DNA, 75 bp, synthetic construct
  source 1..75: mol_type = other DNA
actaaatcagtaagttggcagcatcacccggcatgttatagtgagttatctgttcagcacaatttggttgttcag

SEQ ID NO: 430077 - DNA, 75 bp, synthetic construct
  source 1..75: mol_type = other DNA
atgattaatggtgttgcaacattatccagtgcttcatcatcgacacgcgggagtgccgcagtacaatttctactg

SEQ ID NO: 430078 - DNA, 75 bp, synthetic construct
  source 1..75: mol_type = other DNA
attgcactgcgtatgtggcctacaaaaaaagtagctggaacggcaacgatgtttactggcttcaacacggtggat

SEQ ID NO: 430079 - DNA, 75 bp, synthetic construct
  source 1..75: mol_type = other DNA
tgaaggaagttgtcccgccgcccagttccgcgttaattataagaacggcggtattttttatcgttctgctcgtga

SEQ ID NO: 430080 - DNA, 75 bp, synthetic construct
  source 1..75: mol_type = other DNA
tttgcttcaggaaaaacaggagacaccgttgcgaatgataaagccgttgggtggagctggagtagcggagcctat

SEQ ID NO: 430081 - DNA, 75 bp, synthetic construct
  source 1..75: mol_type = other DNA
gcgctcatgtttacacgctggaagaagcccaaaaagcctggaattgtgggcgagatatagatcagcctgtttgtg

SEQ ID NO: 430082 - DNA, 75 bp, synthetic construct
  source 1..75: mol_type = other DNA
cattttccattgctgattcagcaaagcgccggacgttcaatatcaataactttaaccgcagaacaatggttcagg

SEQ ID NO: 430083 - DNA, 75 bp, synthetic construct
  source 1..75: mol_type = other DNA
aaaaagtagctggaacggcaacgatgtttactggcttcaacacggtggattgccaacagatgacttcagtaaagc

SEQ ID NO: 430084 - DNA, 75 bp, synthetic construct
  source 1..75: mol_type = other DNA
ggggcataaacaggaagcggcgcggctacttggctggggccgcaacaccctgacgcgtaagttaaaagagctggg

SEQ ID NO: 430085 - DNA, 75 bp, synthetic construct
  source 1..75: mol_type = other DNA
ctggtcgctcatgctctgcatcgccatagcccgcgagccaaagcgccgtttatcgcgctgaatatggcggcaata

SEQ ID NO: 430086 - DNA, 75 bp, synthetic construct
  source 1..75: mol_type = other DNA
acggcccaacgaccgatatcatcggcgaagcgccagccatgcaggacgtgttccggattatcggtcggctttcgc

SEQ ID NO: 430087 - DNA, 75 bp, synthetic construct
  source 1..75: mol_type = other DNA
gacgaattatggaaaaccttcggcacgcatccagaagggttaaatcaggcggaagtggaatctgcccgcgaaaaa

SEQ ID NO: 430088 - DNA, 75 bp, synthetic construct
  source 1..75: mol_type = other DNA
gcgtaaaggtctgggtatcggtggcaccaaagacggcaccgaagaaccgtggtacgtcgtcgataaagacgtcga

SEQ ID NO: 430089 - DNA, 75 bp, synthetic construct
  source 1..75: mol_type = other DNA
gaacaacattctgattgttgcgcagggtcatgaacacccacgtctgatgtctgtcggattgattgcccagcaact

SEQ ID NO: 430090 - DNA, 75 bp, synthetic construct
  source 1..75: mol_type = other DNA
gaaaaccgtgggttcctaccgttccgtgctggagctgctgaatattccacatgcaaaattcattatggattgcgt

SEQ ID NO: 430091 - DNA, 75 bp, synthetic construct
  source 1..75: mol_type = other DNA
tcatcaatgtggcacaccgtgcgacagccataccaactgcaaaaatgatggttgccacctgctgttcattcagtg

SEQ ID NO: 430092 - DNA, 75 bp, synthetic construct
  source 1..75: mol_type = other DNA
ccggtactgattaaaaaacgcgagcaggaaaaaggcctggatcgcagcaaaatggtggcgttctctaactatttc

SEQ ID NO: 430093 - DNA, 75 bp, synthetic construct
  source 1..75: mol_type = other DNA
ccggcttattagcgatagggattatctgtacccgtgccaattatggcgcgctggaaaaagctggtattgtggcaa

SEQ ID NO: 430094 - DNA, 75 bp, synthetic construct
  source 1..75: mol_type = other DNA
tatctgttcgccggattgctggtggttatgattatgcgaatgctggcagaaatggcggttgccacgcccgacacc

SEQ ID NO: 430095 - DNA, 75 bp, synthetic construct
  source 1..75: mol_type = other DNA
ttttgggtactggttatcccactggaagccaacatcgccgccatgatcctgcactcgtgggttccaggcattccc

SEQ ID NO: 430096 - DNA, 75 bp, synthetic construct
  source 1..75: mol_type = other DNA
tgacccgctatctcggcatcggcgactacgaaagctggtcagaggccgacaaacaggcgttcctgatccgcgaac

SEQ ID NO: 430097 - DNA, 75 bp, synthetic construct
  source 1..75: mol_type = other DNA
tcctcgccgttgaacagcagttgccgctgaacgggcaaaatggcgcctccgataccatgctgcgcgccagtgcct

SEQ ID NO: 430098 - DNA, 75 bp, synthetic construct
  source 1..75: mol_type = other DNA
ctgtttacctctttctcagggagtttagtctccaggatttccggggcggttcaaggagatgcccgacttgagcgc

SEQ ID NO: 430099 - DNA, 75 bp, synthetic construct
  source 1..75: mol_type = other DNA
cgttattggcgcaacgcttccggagctgttaaaagagggtcagtacgacgcggcgcaaaaactgctcgccaccct

SEQ ID NO: 430100 - DNA, 75 bp, synthetic construct
  source 1..75: mol_type = other DNA
cgtcatgcggatattgtggaaacaatgctctatgtggccgagaaacgtcgagaaatttctgatggaggaatcgag

SEQ ID NO: 430101 - DNA, 75 bp, synthetic construct
  source 1..75: mol_type = other DNA
gatgaacaacgaggatctgcttgccgccgccaataccgcccaggcagcaggaaatggcgcggctcgcgatcgctg

SEQ ID NO: 430102 - DNA, 75 bp, synthetic construct
  source 1..75: mol_type = other DNA
tctttttcctcgccgtcgaacagcagttgccgctgaacgggcaaaatggcgcatccgataccatgctgcgcgcca

SEQ ID NO: 430103 - DNA, 75 bp, synthetic construct
  source 1..75: mol_type = other DNA
gcgtcgagtcactgcgcgctattccgtggatttttgcctggacacaaaaccgcctgatgctccccgcctggctgg

SEQ ID NO: 430104 - DNA, 75 bp, synthetic construct
  source 1..75: mol_type = other DNA
aagctggtcagaagccgacaaacaggcgttcctgatccgcgaactgaactccaaacgtccgcttctaccacgcaa

SEQ ID NO: 430105 - DNA, 75 bp, synthetic construct
  source 1..75: mol_type = other DNA
caaactgccgttgggttcacgtccggcaaaacgtcgcccgaccggtggcgtcgaatcactgcgcgcaattccgtg

SEQ ID NO: 430106 - DNA, 75 bp, synthetic construct
  source 1..75: mol_type = other DNA
ccattggccgcggtggcgcaccagcacatgcagcactgctttcgcaaccgccgggaagcctgaaaggcggcctgc

SEQ ID NO: 430107 - DNA, 75 bp, synthetic construct
  source 1..75: mol_type = other DNA
ccggaagtgatcgcccgtaccctgcgtaaactaaaaaaccagccagaccttagcgaagaaactatcaaaaaagcg

SEQ ID NO: 430108 - DNA, 75 bp, synthetic construct
  source 1..75: mol_type = other DNA
atccgcgaactgaactccaaacgtccgcttctaccgcgcaactggcaaccaagcgccgaaacgcgcgaagtgctc

SEQ ID NO: 430109 - DNA, 75 bp, synthetic construct
  source 1..75: mol_type = other DNA
ttaggtagcgatccgaaaaccggtaaacaattgccgtgcccggctgaactgctgcgtttaactattccacgtgcg

SEQ ID NO: 430110 - DNA, 75 bp, synthetic construct
  source 1..75: mol_type = other DNA
caagctatgacactttttaataactcaggtttacgagaaagtattgaaaaacgtatttttgaggatcgggttcca

SEQ ID NO: 430111 - DNA, 75 bp, synthetic construct
  source 1..75: mol_type = other DNA
ttggaaatatacaagcattccttaatgtatataagcgattaggtattaattcaggtattgctcattctatcgatg

SEQ ID NO: 430112 - DNA, 75 bp, synthetic construct
  source 1..75: mol_type = other DNA
ttcggccttctacgccgcaaagagatggaaaagcgcgccaccgaactgatggcatcttacggtttctccctcgac

SEQ ID NO: 430113 - DNA, 75 bp, synthetic construct
  source 1..75: mol_type = other DNA
gggtttgagttctacgccccgcaaaccatgcttaccagtgatggccgccgtctgctggtcggctggatgggcgtg

SEQ ID NO: 430114 - DNA, 75 bp, synthetic construct
  source 1..75: mol_type = other DNA
ggcgaccagcatgtcctgatttgctgcccgcagggcgtgcctcgtgagaaagagcgctatctcaacacctacccg

SEQ ID NO: 430115 - DNA, 75 bp, synthetic construct
  source 1..75: mol_type = other DNA
cattactgaaagattttaaagaagagtcttccttctattttttgcactcattctattacgaatgtgatgacgccg

SEQ ID NO: 430116 - DNA, 75 bp, synthetic construct
  source 1..75: mol_type = other DNA
tcaaacctgctgatagcggcacggcgttgatcaaaggcaaaccgcaaacgctacgctcgccacatcaggcttcgg

SEQ ID NO: 430117 - DNA, 75 bp, synthetic construct
  source 1..75: mol_type = other DNA
gctacagcgtgccgggcgaacattgttgagcgacaaacccgttgccgcgttcaaaaattacggcaaaaaaggaac

SEQ ID NO: 430118 - DNA, 75 bp, synthetic construct
  source 1..75: mol_type = other DNA
cagcttggcattcgcacaccttcaactgaacaaccgattgaatttctctccggtggcaatcagcaaaaagtgctg

SEQ ID NO: 430119 - DNA, 75 bp, synthetic construct
  source 1..75: mol_type = other DNA
gcgatcgcggcgtcagcctgatcttcgtcactcattttctcgatcaggtttatcaggttagcgatcggatcaccg

SEQ ID NO: 430120 - DNA, 75 bp, synthetic construct
  source 1..75: mol_type = other DNA
ccgcctgattgaaacgctgtgcgccgatggactggcgctgctggtgatctcctccgagctggaagagctggtggg

SEQ ID NO: 430121 - DNA, 75 bp, synthetic construct
  source 1..75: mol_type = other DNA
agcctgcgccgtggcgaaatcatggcgctgctcggtgaaaacggggcgggaaaatcgacgctaatcaaagcatta

SEQ ID NO: 430122 - DNA, 75 bp, synthetic construct
  source 1..75: mol_type = other DNA
gtccgcaggggattgcccgtgaggaagagtgctacctgaacacctacccggcagtatggatggcgggcgagtttg

SEQ ID NO: 430123 - DNA, 75 bp, synthetic construct
  source 1..75: mol_type = other DNA
ggcagaggcgctggaaaatcagggcaaatgggggcaggcggcagcacttcagcggcaacgactggcgctggctcc

SEQ ID NO: 430124 - DNA, 75 bp, synthetic construct
  source 1..75: mol_type = other DNA
gggctttggctacacggcgcgggcattacttgaacgacgtgttacttccaactggtttgtcggcacagcaattga

SEQ ID NO: 430125 - DNA, 75 bp, synthetic construct
  source 1..75: mol_type = other DNA
gtaacgacgagaaagatgactggctgaaacgcggcgtgcgcagcgatgcggcggacctctatcgccagcaggatc

SEQ ID NO: 430126 - DNA, 75 bp, synthetic construct
  source 1..75: mol_type = other DNA
ggcggtcagccggtttcactggcgaacatgaaagcgatgtacagtatcgcgaagaaatatgacattccggtggtg

SEQ ID NO: 430127 - DNA, 75 bp, synthetic construct
  source 1..75: mol_type = other DNA
cgcgcatccgcgacctcggcgaaaccaagctgtacgtgccgcagggcgtgcaagcctacccgacgttgcgcccgc

SEQ ID NO: 430128 - DNA, 75 bp, synthetic construct
  source 1..75: mol_type = other DNA
ggggcgtctggctcgtggtcgcattcacgcaccaaaaccatgccgcgttatccgctgatgaatctgatcccgacc

SEQ ID NO: 430129 - DNA, 75 bp, synthetic construct
  source 1..75: mol_type = other DNA
tagtcaagttggctcgaaaaaaaacatgtgaacatttactgagggcgaggaggaagtcgaaaaaattaaagacag

SEQ ID NO: 430130 - DNA, 75 bp, synthetic construct
  source 1..75: mol_type = other DNA
tttcgactctccctcaatgttggtatgtccattattgctatcgtgttatttcaatggtatgaacagctgggaatt

SEQ ID NO: 430131 - DNA, 75 bp, synthetic construct
  source 1..75: mol_type = other DNA
cgattttgcaggccgtaatgcagggccagccgcgcgcgctggccgatagccactatccgcgctggcaccatgcgc

SEQ ID NO: 430132 - DNA, 75 bp, synthetic construct
  source 1..75: mol_type = other DNA
atcttaatgacgatggtattcaactacagaggagaagccttgcagggcaagagaaactaactcgttactggcgag

SEQ ID NO: 430133 - DNA, 75 bp, synthetic construct
  source 1..75: mol_type = other DNA
atgccttcacaaatgcccgcgattttacaggcagtgatgaaaggtcagtccaaagcactggcagatgcccactat

SEQ ID NO: 430134 - DNA, 75 bp, synthetic construct
  source 1..75: mol_type = other DNA
aactttagatccgttagaacaaataaatattttattgaattcatttaaagagaattatcttagcattattcagga

SEQ ID NO: 430135 - DNA, 75 bp, synthetic construct
  source 1..75: mol_type = other DNA
gtacagtgtggcttttgtactcccggattgattatggccaccacggcaatgctggcaaaaccacgcgagaaacca

SEQ ID NO: 430136 - DNA, 75 bp, synthetic construct
  source 1..75: mol_type = other DNA
gcctgtacggtgctggttgacggcaccgcgatagacagttgtttatacctggcggcctgggctgaaggaaaagag

SEQ ID NO: 430137 - DNA, 75 bp, synthetic construct
  source 1..75: mol_type = other DNA
tattgctgggtaagatcagtgttcccgacggacgagtcagtaaaaaaagtggtgtggctggcaatccaggccgcg

SEQ ID NO: 430138 - DNA, 75 bp, synthetic construct
  source 1..75: mol_type = other DNA
gtcccagaaatggacagtgccattgaaggactggcgtatggcaatgagtcgctttattaccgagttcggtgaccg

SEQ ID NO: 430139 - DNA, 75 bp, synthetic construct
  source 1..75: mol_type = other DNA
aggcgatccgcaaggttatctacaccactaacgcaatcgaatcgctgaatagcgtcatcagacatgcgataaaga

SEQ ID NO: 430140 - DNA, 75 bp, synthetic construct
  source 1..75: mol_type = other DNA
gctatcctcagataagccgaagctggcaggcaaactggccgaatcttgccacgttcttcgcttatccaacggaca

SEQ ID NO: 430141 - DNA, 75 bp, synthetic construct
  source 1..75: mol_type = other DNA
caacccatgcgactgatgctgcaggctcagcgcgtgcagccagcacgtcagccggacaggccgcgacttcggctc

SEQ ID NO: 430142 - DNA, 75 bp, synthetic construct
  source 1..75: mol_type = other DNA
cggcggaatccgcggcaacgcgcgccgagacagcggcaaaacgggcagaggatattgcatccgccgtcgcgcttg

SEQ ID NO: 430143 - DNA, 75 bp, synthetic construct
  source 1..75: mol_type = other DNA
gcgttattctgttggtggaaggattcccgccgtcacatgccgggaccatcaccgtgtatgaagattcccgacccg

SEQ ID NO: 430144 - DNA, 75 bp, synthetic construct
  source 1..75: mol_type = other DNA
tgtttgtatctttatttgcattccaccctgcttatgcagtcggggcctatgacctgcaatgtatgcttgataacg

SEQ ID NO: 430145 - DNA, 75 bp, synthetic construct
  source 1..75: mol_type = other DNA
aacgtccgagacgaatgccaggtcttctgaaacggcagcggaacagagcgcctcagctgcggcagactctgagac

SEQ ID NO: 430146 - DNA, 75 bp, synthetic construct
  source 1..75: mol_type = other DNA
acgacgaatgccatcgagtcgctaaacagcgtgatccgccatgcgatcaaaaagcgtaaagtgttcccgacagac

SEQ ID NO: 430147 - DNA, 75 bp, synthetic construct
  source 1..75: mol_type = other DNA
atgaccaacattaactatcaggcactgcgtgaaaaggcagaaaaagcaacgtggggagactgggactcatataaa

SEQ ID NO: 430148 - DNA, 75 bp, synthetic construct
  source 1..75: mol_type = other DNA
tggacttccgtaactggctgaaggtgggcgcgaccctgcttggactgctgtttattatgtccagcgtcgtggtga

SEQ ID NO: 430149 - DNA, 75 bp, synthetic construct
  source 1..75: mol_type = other DNA
cagtcaggaagtgcagtatcaggttgatggtcaaacaaaaacacgcaaagtcgtagatccacactcatttcgcat

SEQ ID NO: 430150 - DNA, 75 bp, synthetic construct
  source 1..75: mol_type = other DNA
gaaaaaccagaaattgcacatgaaattgcccagcatctactggggcaaaaaaaattaccctcgcttgagtggtta

SEQ ID NO: 430151 - DNA, 75 bp, synthetic construct
  source 1..75: mol_type = other DNA
atccgttcgcattaacactgcttatacgtgtagccgggcatactaaacgctgtcacgatcggatgacgaaagcct

SEQ ID NO: 430152 - DNA, 75 bp, synthetic construct
  source 1..75: mol_type = other DNA
tgcagaactggaagcacgggaaataaaaccagccaaaggcgaagttcttgtcgttgtctctggttttactggttg

SEQ ID NO: 430153 - DNA, 75 bp, synthetic construct
  source 1..75: mol_type = other DNA
tttggtatgggagaagaggccgtcgcctttgccattatcatcgcaccgctaatggtccggctgggctatgacagt

SEQ ID NO: 430154 - DNA, 75 bp, synthetic construct
  source 1..75: mol_type = other DNA
atgcccgatacgttggtgattatcttttttgttgccattttaaccagtcttgccacctgggtagttccggtgggc

SEQ ID NO: 430155 - DNA, 75 bp, synthetic construct
  source 1..75: mol_type = other DNA
cacagaaatggacgatgccactgcgggactggcgtatggcaatgagccgctttattatcgagttcggtgaccgcc

SEQ ID NO: 430156 - DNA, 75 bp, synthetic construct
  source 1..75: mol_type = other DNA
taccgtgctggcgttccagtttggtgatggcttcagccacatcatttacccaacctcagcttcgttaatggcaac

SEQ ID NO: 430157 - DNA, 75 bp, synthetic construct
  source 1..75: mol_type = other DNA
gggtgcgaccctgcttggactgctatttattatgtccagcgtcgtggtgatcggcgctcagttgatgggctacca

SEQ ID NO: 430158 - DNA, 75 bp, synthetic construct
  source 1..75: mol_type = other DNA
ggcttcatcctttaccgaaggggcgcgaatgatgatcgcccctgccctgctggtgggtttcgccaaagggatttt

SEQ ID NO: 430159 - DNA, 75 bp, synthetic construct
  source 1..75: mol_type = other DNA
cttctgagacggcagcgggacagagcgcctcagctgcggcaggctcaaaaacagcggctgcatcatctgccagcg

SEQ ID NO: 430160 - DNA, 75 bp, synthetic construct
  source 1..75: mol_type = other DNA
atgaataacatacaaataagaaactatcagcctggcgattttcagcaactatgcgctattttccttcgagcggtt

SEQ ID NO: 430161 - DNA, 75 bp, synthetic construct
  source 1..75: mol_type = other DNA
ttttgaacgttatggttttcagacagttaagcagcaacgcgttgaatgtcggggagagtggtttattaattttta

SEQ ID NO: 430162 - DNA, 75 bp, synthetic construct
  source 1..75: mol_type = other DNA
atcccgtggccatcagataccgttccgtctggctatgccctgatgcaggggcagatttttgacaaatctgcatac

SEQ ID NO: 430163 - DNA, 75 bp, synthetic construct
  source 1..75: mol_type = other DNA
gccggtgcggcgaaaacgtcagaaacgaatgcggcagcgtcacaacaatcagcagccacttcagcacgggatgcg

SEQ ID NO: 430164 - DNA, 75 bp, synthetic construct
  source 1..75: mol_type = other DNA
gcggctgcattatctgccagtgcagcgtcaacaagtgccgggcaggcctcagccagtgccaccgccgccggaaaa

SEQ ID NO: 430165 - DNA, 75 bp, synthetic construct
  source 1..75: mol_type = other DNA
ggttggttttatttcccgcattgaacgtcatatcgatatgttatttgttgcccctgaatacccccgccgcggggt

SEQ ID NO: 430166 - DNA, 75 bp, synthetic construct
  source 1..75: mol_type = other DNA
gccgagacagcggcaaaacgggcagaggatattgcatccgccgtggcgcttgaggatgcgagcacgacgaaaaag

SEQ ID NO: 430167 - DNA, 75 bp, synthetic construct
  source 1..75: mol_type = other DNA
gaggcactgcgacgttttgaactgatggtggaagaggtggcgcgtaacgcgtccgcggtggcacagaacacggca

SEQ ID NO: 430168 - DNA, 75 bp, synthetic construct
  source 1..75: mol_type = other DNA
tccgagtcactggcggcaacgccaaaagccgttaaggccgcgtatgagctggctaacgggaaatacaccgcacag

SEQ ID NO: 430169 - DNA, 75 bp, synthetic construct
  source 1..75: mol_type = other DNA
agaatttctctggtgctattacgctctattacgactggaacaacgaagaagataaggcactggcaacacaatatg

SEQ ID NO: 430170 - DNA, 75 bp, synthetic construct
  source 1..75: mol_type = other DNA
gataaggcactggcaacacaatatggttttatttgtgatacccggcgttgtacatggatgctggacggtttgaca

SEQ ID NO: 430171 - DNA, 75 bp, synthetic construct
  source 1..75: mol_type = other DNA
ggcattttcgttgaccggatgtatcacctggggattggtttccaatactgcaagccgtccacatgccgagcaatg

SEQ ID NO: 430172 - DNA, 75 bp, synthetic construct
  source 1..75: mol_type = other DNA
tactgtcggtattggtgctcatacgcactccgttgcgattggctcacatggacacaccatcaccgttaacgctgc

SEQ ID NO: 430173 - DNA, 75 bp, synthetic construct
  source 1..75: mol_type = other DNA
ggtgcgcatacacataagctcgctattggttcgcacacacacaccattaccattgccgcttatggcaacgcggaa

SEQ ID NO: 430174 - DNA, 75 bp, synthetic construct
  source 1..75: mol_type = other DNA
tgatgcaggggcagacttttgacaaatctgcatacccaaaacttgcagcggcttatccgtcaggcgtgatccctg

SEQ ID NO: 430175 - DNA, 75 bp, synthetic construct
  source 1..75: mol_type = other DNA
gcacatgcacacactgttggtattggcgctcatacgcactctgttgcgattggttcacatggacataccatcacc

SEQ ID NO: 430176 - DNA, 75 bp, synthetic construct
  source 1..75: mol_type = other DNA
aggtggtgtatcctttgatggttcagccgatatagatttgcctggtgtgaatacaaaaggtaatcaagacactac

SEQ ID NO: 430177 - DNA, 75 bp, synthetic construct
  source 1..75: mol_type = other DNA
tcaaaagaggcggcaaaatcatcagaaacgagcgcagcctcgagcgccagtagttccgcttcctcggcaacggcg

SEQ ID NO: 430178 - DNA, 75 bp, synthetic construct
  source 1..75: mol_type = other DNA
ctgaaacggcagcggaacagagtgcctcagctgcggcaggctcaaaaacagcggctgcgtcgtctgccagtgcag

SEQ ID NO: 430179 - DNA, 75 bp, synthetic construct
  source 1..75: mol_type = other DNA
tattatcaacgtattcagacacagtcagcaggtgctcatacccactcgctgtctggtactgcagcaagttctggc

SEQ ID NO: 430180 - DNA, 75 bp, synthetic construct
  source 1..75: mol_type = other DNA
gcagcgaggtctgcttccgcagcgaagacatccgaaacgaacgcgaaagcgtcggaaaccagcgcagaatcctca

SEQ ID NO: 430181 - DNA, 75 bp, synthetic construct
  source 1..75: mol_type = other DNA
acatgcacatactgtcggtattggtgctcatacgcactccgttgcgattggttcacatggacacaccatcaccgt

SEQ ID NO: 430182 - DNA, 75 bp, synthetic construct
  source 1..75: mol_type = other DNA
gcatcaacaaaggccacagaagcatcaaaaagtgctgccgctgcagagtcctcaaaaagcgcggcggccaccagt

SEQ ID NO: 430183 - DNA, 75 bp, synthetic construct
  source 1..75: mol_type = other DNA
tctttatccgtcctggcggcgtgttttatgtcgcgggagataaagtcggcatcgttcgtctggatgccttcaaaa

SEQ ID NO: 430184 - DNA, 75 bp, synthetic construct
  source 1..75: mol_type = other DNA
gagtggaaaggtaagcattgtacactcgaggaggccagacaaactgggactggctacacagctggaaaatcatca

SEQ ID NO: 430185 - DNA, 75 bp, synthetic construct
  source 1..75: mol_type = other DNA
atgattgcgcactctcagatccggcgctgaccgtacaggcgtatatcgttaatcctcaaacagagcgggtgaaaa

SEQ ID NO: 430186 - DNA, 75 bp, synthetic construct
  source 1..75: mol_type = other DNA
atgctctgctggcggatattaatagtcagggtcaggtgcagatggcgatgaacggcggcatctatgatgaaagct

SEQ ID NO: 430187 - DNA, 75 bp, synthetic construct
  source 1..75: mol_type = other DNA
tatatgaaaggcggagcactcccgtggcaacgctatccttttgttaccatgatttccgtcgagcggaaaagttag

SEQ ID NO: 430188 - DNA, 75 bp, synthetic construct
  source 1..75: mol_type = other DNA
agcgtggggaactttacatgctctgctggcggatatgaatagtcagggtcaggtgcagatggcgataaacggcgg

SEQ ID NO: 430189 - DNA, 75 bp, synthetic construct
  source 1..75: mol_type = other DNA
cggctgccttgaggaactggcgtttagccgccagtcttgcgcgctttctggttacgacgagttgcatatttcccc

SEQ ID NO: 430190 - DNA, 75 bp, synthetic construct
  source 1..75: mol_type = other DNA
acgcagggtgaaggcgggctgaagcgggtggtgaaaaaggaacacgcggacggcagcgtcacgcagagtcagttt

SEQ ID NO: 430191 - DNA, 75 bp, synthetic construct
  source 1..75: mol_type = other DNA
tcatgatttttatacagaatcaaaagtttctgacatactagaggatagtccagacgagtcatatgattgcagcga

SEQ ID NO: 430192 - DNA, 75 bp, synthetic construct
  source 1..75: mol_type = other DNA
aagaccgcgcgccggtggcgctgaaaggggccgcgctgacgcgccgcccctttcattacgcggacgttctgatgg

SEQ ID NO: 430193 - DNA, 75 bp, synthetic construct
  source 1..75: mol_type = other DNA
tttttggaactaaagcaaaggttgcgcgcgctttagatgtatcgcaagtggctgttactcgatggggagcaattg

SEQ ID NO: 430194 - DNA, 75 bp, synthetic construct
  source 1..75: mol_type = other DNA
aacatcttcatctctgcgtttccgaccaacacggtgcgatgcttggcggtcatatgatgcccggctgtaccgtgc

SEQ ID NO: 430195 - DNA, 75 bp, synthetic construct
  source 1..75: mol_type = other DNA
attaataaacatgggaacgccgtgtttttgttgagccagcaggcaacaaatttttatgattttgcctgttatgcc

SEQ ID NO: 430196 - DNA, 75 bp, synthetic construct
  source 1..75: mol_type = other DNA
acctgtttaaacgcagccccgtaaaccggcatgcggtactgaaagaaatggccggagacccggaattacagaaat

SEQ ID NO: 430197 - DNA, 75 bp, synthetic construct
  source 1..75: mol_type = other DNA
gagaacgcccgcctgatggatgagaccgtcacggccattgaacgggcagagcaggaaaaaaatgcgctgacgcag

SEQ ID NO: 430198 - DNA, 75 bp, synthetic construct
  source 1..75: mol_type = other DNA
atgtctgacaacaccatccctgaatatctgcaacccgcactggcacaactggaaaaggccagagccgctcatctt

SEQ ID NO: 430199 - DNA, 75 bp, synthetic construct
  source 1..75: mol_type = other DNA
tgcggctattgcactgtggcctgtaggccgtcgtgtggtttctgtggaaaccgctcgtgctgcgcgtgaagcgaa

SEQ ID NO: 430200 - DNA, 75 bp, synthetic construct
  source 1..75: mol_type = other DNA
catcagctctacattccgcatattttcagctacctgaatgaagatattgattttgtgctgaatgagctagaaaga

SEQ ID NO: 430201 - DNA, 75 bp, synthetic construct
  source 1..75: mol_type = other DNA
ggcgattatcacactcacggtttttactctgacgataaaggaaataaagtaacaaaagaaaatgatgtttatgat

SEQ ID NO: 430202 - DNA, 75 bp, synthetic construct
  source 1..75: mol_type = other DNA
atctgtttgctaaagctaaattgaatggtatcccttccatagcgtggccagaaaaaaaaataattttcagcacat

SEQ ID NO: 430203 - DNA, 75 bp, synthetic construct
  source 1..75: mol_type = other DNA
ccaacaccaccggccatcagggctacgtcgcaccggaaaaggctgtcatgcagcaagacgtgcaagaaactcagg

SEQ ID NO: 430204 - DNA, 75 bp, synthetic construct
  source 1..75: mol_type = other DNA
ccgtggtgctgaattttgaacgtgaacgcctgaaaggggcgtgtgacagcacggccaccgcctaccggaaggcac

SEQ ID NO: 430205 - DNA, 75 bp, synthetic construct
  source 1..75: mol_type = other DNA
gaccactttgcctttcatcctattgtcgatcccttatcgcggcggataatcgcttttgaagccattgtgcaaaaa

SEQ ID NO: 430206 - DNA, 75 bp, synthetic construct
  source 1..75: mol_type = other DNA
atcaaatataaacgaccactttgcctttcatcctattgtcgaccctttatcgcggcggataatcgcttttgaagc

SEQ ID NO: 430207 - DNA, 75 bp, synthetic construct
  source 1..75: mol_type = other DNA
ggatccacggcactataatattgttgagctgctgtgcgattacgcgcctgctcgccgttttggcaaagcgggaat

SEQ ID NO: 430208 - DNA, 75 bp, synthetic construct
  source 1..75: mol_type = other DNA
caaaagatagcatggcatataaacaattagggaatgctgtaagcgtaccagtcattaaaaatatttttcttgata

SEQ ID NO: 430209 - DNA, 75 bp, synthetic construct
  source 1..75: mol_type = other DNA
aaagcggcgctgtcggcgagtgttaacgtagtcggttcttatacttacaccgatgcggaatacaccaccgatact

SEQ ID NO: 430210 - DNA, 75 bp, synthetic construct
  source 1..75: mol_type = other DNA
cttacttccagaacgagccggaaaccggttattacggctggttgccgaaagagggaaccgttgagccgctgccga

SEQ ID NO: 430211 - DNA, 75 bp, synthetic construct
  source 1..75: mol_type = other DNA
tgtagttactggtgccgtgtataatctcactaaaaccaacaacctgatggcggaccctgagggttccttcttctc

SEQ ID NO: 430212 - DNA, 75 bp, synthetic construct
  source 1..75: mol_type = other DNA
ccgatacgccgattcaaaaagtgccacagtctatttctgttgtgaccgccgaagagatggcgctgcatcagccga

SEQ ID NO: 430213 - DNA, 75 bp, synthetic construct
  source 1..75: mol_type = other DNA
cctgttcgatcgtgaatacgtcgccagctgctttaacacctatggctgcttctggggcgcagaacgtcaggtcgt

SEQ ID NO: 430214 - DNA, 75 bp, synthetic construct
  source 1..75: mol_type = other DNA
gcgtatgcgtaatgacatcgactcctggttcggatatgccggttcagttgcaccatctgatatctataatttaga

SEQ ID NO: 430215 - DNA, 75 bp, synthetic construct
  source 1..75: mol_type = other DNA
tgtcgaaaaagtggttatcgacgagtcggtaattgatggtcaaagcaaaccgttgctgatttatggtaagccgga

SEQ ID NO: 430216 - DNA, 75 bp, synthetic construct
  source 1..75: mol_type = other DNA
tgtggaaaaagtggttattgacgagtcggttattgaagggcaaagcaagccactgctgatttatggcaagccgga

SEQ ID NO: 430217 - DNA, 75 bp, synthetic construct
  source 1..75: mol_type = other DNA
atggaaatttactggacgcttaaagctcaggatgacctggaacgtatctaccgttttgcccttcagtacagccgc

SEQ ID NO: 430218 - DNA, 75 bp, synthetic construct
  source 1..75: mol_type = other DNA
cctgtttgataatggtgtaacaccttacttcagctatagcgaatcgtttgaaccttcttcgcaagttgggaagga

SEQ ID NO: 430219 - DNA, 75 bp, synthetic construct
  source 1..75: mol_type = other DNA
gctgccaggcatcagtccttcgctctcgcggcagaggaattgtcgctgagccccagtgcggtaagtcaccgtatc

SEQ ID NO: 430220 - DNA, 75 bp, synthetic construct
  source 1..75: mol_type = other DNA
tcggaaggctctaaattttttggttttgacatggataacgaattcatcagtggttttgatgtaggggcatgggga

SEQ ID NO: 430221 - DNA, 75 bp, synthetic construct
  source 1..75: mol_type = other DNA
atgcacaggcagcggttgaaccgaaagaagacactatcaccgttaccgctgcacctgcgccgcaagaaagcgcat

SEQ ID NO: 430222 - DNA, 75 bp, synthetic construct
  source 1..75: mol_type = other DNA
gagcgtgaagtttctcgacagcaccgctgactacccgcaacagccgggcgtggtgctgatcaaagtgccgaaaac

SEQ ID NO: 430223 - DNA, 75 bp, synthetic construct
  source 1..75: mol_type = other DNA
cgaaaacactggcgttgctggaacaacaactgcgcgcgctgcgcaaagtggtcacgccggatacacgtattattg

SEQ ID NO: 430224 - DNA, 75 bp, synthetic construct
  source 1..75: mol_type = other DNA
cggcgtggagcctttccgctttaatgctgtgctctgcaacccgccgtttcaccagcaacatgcgctgaccgataa

SEQ ID NO: 430225 - DNA, 75 bp, synthetic construct
  source 1..75: mol_type = other DNA
gttgtcgtgaaccagaagaatggggaggatatttaggcattgatactctgttatttaatgatatccatacgaaat

SEQ ID NO: 430226 - DNA, 75 bp, synthetic construct
  source 1..75: mol_type = other DNA
tcaaatttttctacagagtgctgtcgcgaaccagaagaatggggagggtatttaggtattgatactatgttattt

SEQ ID NO: 430227 - DNA, 75 bp, synthetic construct
  source 1..75: mol_type = other DNA
ctttgcagggaagcgggggttaacagacgggcggctgttcagggaaatgcagcggtttcttgacgtcactgacca

SEQ ID NO: 430228 - DNA, 75 bp, synthetic construct
  source 1..75: mol_type = other DNA
cccgcaccggtctggatatcggcgcgcgcttctttatgcagcatctgccagaaaatctcgaaggggagattgttg

SEQ ID NO: 430229 - DNA, 75 bp, synthetic construct
  source 1..75: mol_type = other DNA
aactgcaaaacttctctgttgatacccagttgcagagcaagtttgccactggcgatatcgaccacaccctgctga

SEQ ID NO: 430230 - DNA, 75 bp, synthetic construct
  source 1..75: mol_type = other DNA
tacttcagctatagcgaatcgtttgaaccttcttctcaggtcgggaaggatggtaatattttcgcaccgtctaaa

SEQ ID NO: 430231 - DNA, 75 bp, synthetic construct
  source 1..75: mol_type = other DNA
atgcttttcatcctgcaaactcaacgttttccggcgacggatgacgtaaacccactacaggcgtgggaagcggcg

SEQ ID NO: 430232 - DNA, 75 bp, synthetic construct
  source 1..75: mol_type = other DNA
tgctgtgctctgcaacccgccgtttcaccaacaacatgcgctgaccgataacgtcgcctgggagatgttccacca

SEQ ID NO: 430233 - DNA, 75 bp, synthetic construct
  source 1..75: mol_type = other DNA
acgctggaactgttcgaaaaagtgctcggcccgaccaccaccacgctggcatggaaaaaagcgcgcctgattaat

SEQ ID NO: 430234 - DNA, 75 bp, synthetic construct
  source 1..75: mol_type = other DNA
atggtgagtcactacgaaaacggcgttgaagtatcctgcgaacgtctgcgtgatgattgctgtttcggcacactg

SEQ ID NO: 430235 - DNA, 75 bp, synthetic construct
  source 1..75: mol_type = other DNA
tcctttgaaggcgcgtcagcagttcttttctgacattaataataatgtttcaaaaccatctgcagcaattaatat

SEQ ID NO: 430236 - DNA, 75 bp, synthetic construct
  source 1..75: mol_type = other DNA
aaaagttttatcaatatttagtcaacgcttacgagaaaaaggaaccatttattgttccaccattggtcggaaatt

SEQ ID NO: 430237 - DNA, 75 bp, synthetic construct
  source 1..75: mol_type = other DNA
gatctcaaacttgccagtgaggaaaaaatccggtcgcgaatatctcattttatcgacgttatgggagacttaaca

SEQ ID NO: 430238 - DNA, 75 bp, synthetic construct
  source 1..75: mol_type = other DNA
gtagagaatggacgcgtagtaagtaattatcacctgccggatggtgcaattgccggaagcgttgaagcattgctg

SEQ ID NO: 430239 - DNA, 75 bp, synthetic construct
  source 1..75: mol_type = other DNA
atgcataattcggctatttctgaacttaacagcattcagtttgatgagaaatttaccgggcagctactggtcaat

SEQ ID NO: 430240 - DNA, 75 bp, synthetic construct
  source 1..75: mol_type = other DNA
gttgttaccatcgagctacctgaacggtcagcgctggaacgacgagaagccagaaaccattcaaccacaatccaa

SEQ ID NO: 430241 - DNA, 75 bp, synthetic construct
  source 1..75: mol_type = other DNA
agaagccagaaactattcaaccacaatccaaaccatcatccgcaatcaccgtatcgaaaactggctacgtgtttt

SEQ ID NO: 430242 - DNA, 75 bp, synthetic construct
  source 1..75: mol_type = other DNA
aggctattacttactcaactcatgagatccatttagaaaaaagctcaaagaaaagtgcaaaaaatttggttttaa

SEQ ID NO: 430243 - DNA, 75 bp, synthetic construct
  source 1..75: mol_type = other DNA
agtgggaaagactggttgcggaatgttcaagacgtggcaattcaacgttctttccatccacgcatgatccgcgcc

SEQ ID NO: 430244 - DNA, 75 bp, synthetic construct
  source 1..75: mol_type = other DNA
atgatagttgatacccgctgccgagctgaaagctctatcaatattatttctgtttctggcggaaaggatagcctt

SEQ ID NO: 430245 - DNA, 75 bp, synthetic construct
  source 1..75: mol_type = other DNA
cagacaatgaaatatctggattatctggaaaaacggcttggcccaattaaaagggtcagggctgatttttcctgc

SEQ ID NO: 430246 - DNA, 75 bp, synthetic construct
  source 1..75: mol_type = other DNA
ttaaaggttatcgtggttatgcgtcaaaatggttcaatgaactttattttggcaagaagcttggattagaccgta

SEQ ID NO: 430247 - DNA, 75 bp, synthetic construct
  source 1..75: mol_type = other DNA
catcgccagcacggcctgcaatcaatgccgcgcctgcgagtgatgctcaatgaaaaagaatctgcgccgcagctc

SEQ ID NO: 430248 - DNA, 75 bp, synthetic construct
  source 1..75: mol_type = other DNA
ggataacaccgatatcgcccgcgtcagcaaacgtaagcgtgagctgacttttaacacggactttggcgatctcac

SEQ ID NO: 430249 - DNA, 75 bp, synthetic construct
  source 1..75: mol_type = other DNA
catcacccgcgttgatggggccgtgcagttgaatgaaagcctgtgcgtaagctgcaaactgtgcggcatcgcctg

SEQ ID NO: 430250 - DNA, 75 bp, synthetic construct
  source 1..75: mol_type = other DNA
ctatatagaagatgatgattttgatatggtttcacaggaaattcttttaaatggttcttttgataagtggagtaa

SEQ ID NO: 430251 - DNA, 75 bp, synthetic construct
  source 1..75: mol_type = other DNA
cgcggggcattgcggttacctggaatgacgagcagcgtagcgaactgatcgctgccgcgaacagcgtcaaaagtc

SEQ ID NO: 430252 - DNA, 75 bp, synthetic construct
  source 1..75: mol_type = other DNA
gtcagcacattgcttgactgggtgccgggcattcgcgcgatcgccgtcaaatgtgatctttgtagctttgatgaa

SEQ ID NO: 430253 - DNA, 75 bp, synthetic construct
  source 1..75: mol_type = other DNA
gttggatttacccggggtgacgctgaatgcaagttctttgttcatcaacaacgtgcaggctgaaaaactgcgtag

SEQ ID NO: 430254 - DNA, 75 bp, synthetic construct
  source 1..75: mol_type = other DNA
tgtgggcgggcgcatcaatgagctttgccagctttatctggcggacattcgcgtggataaaaacggtgttgccta

SEQ ID NO: 430255 - DNA, 75 bp, synthetic construct
  source 1..75: mol_type = other DNA
gcttaaacacaatttgcctgagatagctccgtttaatgttgaggtaggactgaaggcgatgaaagatggggttcg

SEQ ID NO: 430256 - DNA, 75 bp, synthetic construct
  source 1..75: mol_type = other DNA
caggtattcgcgcgatcgccgtcaaatgtgacctttgcagttttgatgaacaaggtccggcctgcgtgcggatgt

SEQ ID NO: 430257 - DNA, 75 bp, synthetic construct
  source 1..75: mol_type = other DNA
caaaagcgccgacagcggcgcttcctgcggccgctactatcaacccgtattgtaatccgatgcatgcaagcatga

SEQ ID NO: 430258 - DNA, 75 bp, synthetic construct
  source 1..75: mol_type = other DNA
aagagtcgctggctggcggcgataaatcattaaagacggtgaatgcaatccgtcaagttccaattcatccgcgac

SEQ ID NO: 430259 - DNA, 75 bp, synthetic construct
  source 1..75: mol_type = other DNA
caggtgaattagcttttgttattacaaaagctggtgctgagttctatttaaaaaaattatcacgtctttctacct

SEQ ID NO: 430260 - DNA, 75 bp, synthetic construct
  source 1..75: mol_type = other DNA
gcgatgttcggaaatgaagggctacggttatcagagaaagctgtacgcagagttatggtggaggaacagcttgcc

SEQ ID NO: 430261 - DNA, 75 bp, synthetic construct
  source 1..75: mol_type = other DNA
atgctgacagatatatttaacagtaattaccagtgttatggctatcgtcgcctgcatgcgatgctcaggcatgag

SEQ ID NO: 430262 - DNA, 75 bp, synthetic construct
  source 1..75: mol_type = other DNA
gctggatgacgaacaggccgcgattaaagccgaaagctgcgatgactgcggcacttacctgaagattctttatca

SEQ ID NO: 430263 - DNA, 75 bp, synthetic construct
  source 1..75: mol_type = other DNA
aacattcagatggtggaagagatggcaatgggcgaaaacgacaccaaagcccgtgcggcggtttataaacgtacc

SEQ ID NO: 430264 - DNA, 75 bp, synthetic construct
  source 1..75: mol_type = other DNA
tagactttggcacgctgcttgaaaacccattgcgcattgtcattttgctgcttggtttcctcatcatcaaaatcg

SEQ ID NO: 430265 - DNA, 75 bp, synthetic construct
  source 1..75: mol_type = other DNA
gtactggaaccagagtgggcgaagtcgctgacgctggcggtggcattgtcgatggcggcaacgccgattctgttg

SEQ ID NO: 430266 - DNA, 75 bp, synthetic construct
  source 1..75: mol_type = other DNA
atcattctgattgctatttcctgccgataagagatagccggcaaaatcttgttggggttgaaataataacccatt

SEQ ID NO: 430267 - DNA, 75 bp, synthetic construct
  source 1..75: mol_type = other DNA
attgatacgacagaaatattggcacagattacccccttcgatttccatgctctccagggatgcctgtggcctgcc

SEQ ID NO: 430268 - DNA, 75 bp, synthetic construct
  source 1..75: mol_type = other DNA
aatgagcggtccggcgctggccgtgattgagaatctggagaaggcatcaacccaggagctggaagatatggccag

SEQ ID NO: 430269 - DNA, 75 bp, synthetic construct
  source 1..75: mol_type = other DNA
ggatattcacgttctgccgcgtgataagcactggcaaaagctgctgatggcgctgattgctgagctgaaacctga

SEQ ID NO: 430270 - DNA, 75 bp, synthetic construct
  source 1..75: mol_type = other DNA
tactggacgcgcgaatggagcaagaaggctacgcccgtagttccattaacccgttcctgtttccgggtgaagggg

SEQ ID NO: 430271 - DNA, 75 bp, synthetic construct
  source 1..75: mol_type = other DNA
gtctgccggtaagcgaagtggatattgtttgcacacttcctctgacagagtattacgacaggaataaccaaccca

SEQ ID NO: 430272 - DNA, 75 bp, synthetic construct
  source 1..75: mol_type = other DNA
aagtttaggtctggggccgtatgaagcgcgagaacgtgccgatgtgttccgccgctttaatattcagatggtgga

SEQ ID NO: 430273 - DNA, 75 bp, synthetic construct
  source 1..75: mol_type = other DNA
tgattgtgctcggcctgttcccggctgtgagcggttttgtgcagcatattccggagccggtacttggcggcgcta

SEQ ID NO: 430274 - DNA, 75 bp, synthetic construct
  source 1..75: mol_type = other DNA
ccgctgattttgcagtttgcccctgaatggctgaaaacctgctctcctccgggatcgccgcgggcggtattactg

SEQ ID NO: 430275 - DNA, 75 bp, synthetic construct
  source 1..75: mol_type = other DNA
ctggtctttatgatcacttcgctggaaactattggcgatatcacggcgacgtctgacgtttccgaacagcctgta

SEQ ID NO: 430276 - DNA, 75 bp, synthetic construct
  source 1..75: mol_type = other DNA
atgctcaatcaagaaattaatatcaatgtaaaaagcgtcataacgccagcgaaaacgataatgggagaagttttt

SEQ ID NO: 430277 - DNA, 75 bp, synthetic construct
  source 1..75: mol_type = other DNA
ctacaatcgtcagcgtcgtcactctcgtctggggaatatctccccggcagccttcagggaaaaatatcatcagat

SEQ ID NO: 430278 - DNA, 75 bp, synthetic construct
  source 1..75: mol_type = other DNA
gaaaacatcaatgtcgcgtaaaggtaactgttacgacaacgctccgatggaaagcttctggggaacgctgaaaaa

SEQ ID NO: 430279 - DNA, 75 bp, synthetic construct
  source 1..75: mol_type = other DNA
taaaacatattaccaatatattagtctatgtagataaccgattttacatagatggaaattgttttgatgaaaaaa

SEQ ID NO: 430280 - DNA, 75 bp, synthetic construct
  source 1..75: mol_type = other DNA
ctgaggaccatcgcgacgtttgatggtaaagccctgaaagacgaccgactccgtaccatcgctacctttgacggt

SEQ ID NO: 430281 - DNA, 75 bp, synthetic construct
  source 1..75: mol_type = other DNA
tgctgctcggtttcctcatcatcaaaatcgccatgctgtggctgattgcccgaccgttgcaggtgccaaataaac

SEQ ID NO: 430282 - DNA, 75 bp, synthetic construct
  source 1..75: mol_type = other DNA
gttggctttgtcgtggcgctgatgttaatcgtgctgggcctgttcccggcagtgagcggttttgtgcaacatatt

SEQ ID NO: 430283 - DNA, 75 bp, synthetic construct
  source 1..75: mol_type = other DNA
catataacgttaaacacataacaccaaaaaaaatagagaaagcagtaaagaatttacttcattatcaccgtgtta

SEQ ID NO: 430284 - DNA, 75 bp, synthetic construct
  source 1..75: mol_type = other DNA
cgaattgcttcgttgttcgccacattacacgccattggcattgagtcagatgatggtgtggagctcctgattcat

SEQ ID NO: 430285 - DNA, 75 bp, synthetic construct
  source 1..75: mol_type = other DNA
cagcgtcgtcactctcgtctggggaatatctccccggcagccttcagggaaaaatatcatcagatgactgcttaa

SEQ ID NO: 430286 - DNA, 75 bp, synthetic construct
  source 1..75: mol_type = other DNA
acgtcttcgtaaggagctaaggctacgctgtaagcagaaacgcaagttcagagcgactacgaactcgaaccacaa

SEQ ID NO: 430287 - DNA, 75 bp, synthetic construct
  source 1..75: mol_type = other DNA
aactggaaccattcctcaagcaaatgaaagcgattgacgaactggttaaaggcttcgaagagctggataccagca

SEQ ID NO: 430288 - DNA, 75 bp, synthetic construct
  source 1..75: mol_type = other DNA
cgaataacgccgatgccattcttggcctgacggaagtggatattgccgcaggcgacaaagccgcggcgcgcagtc

SEQ ID NO: 430289 - DNA, 75 bp, synthetic construct
  source 1..75: mol_type = other DNA
caacgtcgtcactctcgtctggggaatatctccccggcagccttcagggaaaaatatcatcagatggctgcttaa

SEQ ID NO: 430290 - DNA, 75 bp, synthetic construct
  source 1..75: mol_type = other DNA
atggcgacaacaatttccattgaagcgatgtgtcaggtatttggtgtatccaggagcggttattacaactgggta

SEQ ID NO: 430291 - DNA, 75 bp, synthetic construct
  source 1..75: mol_type = other DNA
cgcagcgtcgtgcagcctatcgacaacaaggattgtggggagacgcttcgctggtcgactactggcggcagactg

SEQ ID NO: 430292 - DNA, 75 bp, synthetic construct
  source 1..75: mol_type = other DNA
actgccgcgcacagcatccggtaaaatacaaaaatttctgttaaggaaagatattattcggcgattaactcagga

SEQ ID NO: 430293 - DNA, 75 bp, synthetic construct
  source 1..75: mol_type = other DNA
tctcgcctgcctgaaaaccggtgcggtctccgtgccgctattgccttcctggcgagaagcggaactgatctgggt

SEQ ID NO: 430294 - DNA, 75 bp, synthetic construct
  source 1..75: mol_type = other DNA
taattcgccggtgattttcgacgttacccacgcactgcaatgtcgcgatccatttggcgcagcttccggcggtcg

SEQ ID NO: 430295 - DNA, 75 bp, synthetic construct
  source 1..75: mol_type = other DNA
gcggacctgacgtatgttgccacacaggagggatggttgtacctcgctggcatcaaagatgtttatacgtgcgaa

SEQ ID NO: 430296 - DNA, 75 bp, synthetic construct
  source 1..75: mol_type = other DNA
ggggtttctgcatggcgtaacagcgccgtttttgattggcgcccgcagcgtgttgttagatatttttaccccgga

SEQ ID NO: 430297 - DNA, 75 bp, synthetic construct
  source 1..75: mol_type = other DNA
tgaccagttaaccggtaaaaatgtcgaagataactggcgcgtgcgctggatgacgggctattactataaggtcat

SEQ ID NO: 430298 - DNA, 75 bp, synthetic construct
  source 1..75: mol_type = other DNA
gcagcgatgcggcggacctctatcgccagcaggatcttaacgtcaccctcgagcacgattactggggttcgagcg

SEQ ID NO: 430299 - DNA, 75 bp, synthetic construct
  source 1..75: mol_type = other DNA
gtggtcgcattcacgcaccaaaaccatgccgcgttatccgctgatgaatctgatcccgaccgactggcaggaaga

SEQ ID NO: 430300 - DNA, 75 bp, synthetic construct
  source 1..75: mol_type = other DNA
gaagataactggcgcgtgcgctggatgacgggctattactataaggtcatcaaccagaacaatcgccgcgtcaca

SEQ ID NO: 430301 - DNA, 75 bp, synthetic construct
  source 1..75: mol_type = other DNA
gattgtggcgaaaggccgtgttcaggcatttatcgctaccctcgtgatgatgttgttactgcgcggcgtaacgat

SEQ ID NO: 430302 - DNA, 75 bp, synthetic construct
  source 1..75: mol_type = other DNA
gtttataccaacggtagcccagtgaataccggctttactgagaacgccgatctgtttggctggtttggtattggt

SEQ ID NO: 430303 - DNA, 75 bp, synthetic construct
  source 1..75: mol_type = other DNA
gtaggttctctgttggcgctgaccggcgcagttgctgcatctatcgtcggcattgaagtcaatgcgctggtggct

SEQ ID NO: 430304 - DNA, 75 bp, synthetic construct
  source 1..75: mol_type = other DNA
gcgcccagtggaacggcaacattcaggaactggtgaatcgcctgcaaagcgatcaggtactggaaacggctaatc

SEQ ID NO: 430305 - DNA, 75 bp, synthetic construct
  source 1..75: mol_type = other DNA
ctcgatctttagtgatggcgatagcgtagctgctgcgcaatcgcaactggcagaacagcaaaaacagctggccga

SEQ ID NO: 430306 - DNA, 75 bp, synthetic construct
  source 1..75: mol_type = other DNA
cgttattccgccgccggatggcagggtgacatggatttaccgccgcagccgctgataccttacgccgactggtaa

SEQ ID NO: 430307 - DNA, 75 bp, synthetic construct
  source 1..75: mol_type = other DNA
cgtctggcacagcaggcagaggcactggaaaaccagggcaaatgggcgcaggcggcagcacttcagcggcaacga

SEQ ID NO: 430308 - DNA, 75 bp, synthetic construct
  source 1..75: mol_type = other DNA
gcagtttctccactaatgccgatggcaaatgggatgacaactggggtacctgtacgttgcacgactgtagtggca

SEQ ID NO: 430309 - DNA, 75 bp, synthetic construct
  source 1..75: mol_type = other DNA
caaccagaataatcgccgtgtgaccattggtcttaacaatatgatctggcattacgacaaagacctgagtggcta

SEQ ID NO: 430310 - DNA, 75 bp, synthetic construct
  source 1..75: mol_type = other DNA
ctcattaagtcagattatcgccgacaatactcctctaaccacggcgataacggtccacggcgatgaattagccgc

SEQ ID NO: 430311 - DNA, 75 bp, synthetic construct
  source 1..75: mol_type = other DNA
ccttacaaaatttgtcgaacgacgagctgctgcccgttgcgcgtgcgtttagtcagtttctgaacctggccaaca

SEQ ID NO: 430312 - DNA, 75 bp, synthetic construct
  source 1..75: mol_type = other DNA
ctgatgctccccgcctggctgggtgcaggtacggcgctgcaaaaagtggtcgaagatggcaaacagagcgagctg

SEQ ID NO: 430313 - DNA, 75 bp, synthetic construct
  source 1..75: mol_type = other DNA
gaacaactggaagagaacctcggctacaaactgcccgtcgaatttgttccggtccgttttacctcgtggatgggc

SEQ ID NO: 430314 - DNA, 75 bp, synthetic construct
  source 1..75: mol_type = other DNA
gtagtaatgtctgtatgctcggcaaagtgctgggagaaaccatcaaggatgcgttgggagaacacattcttgaac

SEQ ID NO: 430315 - DNA, 75 bp, synthetic construct
  source 1..75: mol_type = other DNA
aaaaccagaagggctgctgacacaaaacgaagaactgtgggaaccgctctacgcttgctaccagtcaacttcagg

SEQ ID NO: 430316 - DNA, 75 bp, synthetic construct
  source 1..75: mol_type = other DNA
ctccattgccgcctacgtgatctcgatggcgaaaacgccgtccgacgtgctggctgtccacctgctgctgaaaga

SEQ ID NO: 430317 - DNA, 75 bp, synthetic construct
  source 1..75: mol_type = other DNA
gggacctcgcgttttgcgtacagagacaactgcgctccccgccattaccgcgctacaagtacgatttggcgattt

SEQ ID NO: 430318 - DNA, 75 bp, synthetic construct
  source 1..75: mol_type = other DNA
ggaaggtcagctcgacgatcgtgaatccccgttgcatattcatctcggtcaggtgatgtcgcgcggtgaaaaaat

SEQ ID NO: 430319 - DNA, 75 bp, synthetic construct
  source 1..75: mol_type = other DNA
ggtgcgcagaacaggatgaaggactgaaactgaatcttcatccgcgcgccagtaacagtatcaacacgttgccat

SEQ ID NO: 430320 - DNA, 75 bp, synthetic construct
  source 1..75: mol_type = other DNA
tgaaaggcgaagaactgccaaaaccagaagggctgctgacacaaaacgaagaactgtgggaaccgctctacgctt

SEQ ID NO: 430321 - DNA, 75 bp, synthetic construct
  source 1..75: mol_type = other DNA
caaatcttcacgcgctggcaatgatgctaaccgccaggagttactcaccaccttacaaaatttgtcgaacgacga

SEQ ID NO: 430322 - DNA, 75 bp, synthetic construct
  source 1..75: mol_type = other DNA
ttcacgccctatggcgttgcggcattattaacacattatgggtcgatcacggtgtttatggtacttggtgtcggt

SEQ ID NO: 430323 - DNA, 75 bp, synthetic construct
  source 1..75: mol_type = other DNA
aaacaggcgttcctgatccgcgaactgaactccaaacgccctcttatgccgcgtaactggcaaccgagcgccgaa

SEQ ID NO: 430324 - DNA, 75 bp, synthetic construct
  source 1..75: mol_type = other DNA
caaccaggttaatctgaagtttgaagaagctaaacctcatctggaagaccagctggcaaaatcaatcgccaatat

SEQ ID NO: 430325 - DNA, 75 bp, synthetic construct
  source 1..75: mol_type = other DNA
aggagctaaggctacgctgtaagcagaaacgcaagttcagagcgactacgaactcgaaccacaatctgccagttg

SEQ ID NO: 430326 - DNA, 75 bp, synthetic construct
  source 1..75: mol_type = other DNA
tggcaagagttacatcaggcaatgcgccagaatgggcttgagttacgccagaaaggaaatggattcgttattact

SEQ ID NO: 430327 - DNA, 75 bp, synthetic construct
  source 1..75: mol_type = other DNA
taaaatacaaaagtttttgttaagaaaagatattatgcggcgattaacgcaggatgtctgtgaagagattgaata

SEQ ID NO: 430328 - DNA, 75 bp, synthetic construct
  source 1..75: mol_type = other DNA
ctcaggagccagcgcccacctgccgggctaatccaccactctgatcgaggttcacagtactgcgcatacgattac

SEQ ID NO: 430329 - DNA, 75 bp, synthetic construct
  source 1..75: mol_type = other DNA
ttatggcgctcaggagccagcgcccccctgccgtgctaatccaccactccgatcgaggttcacagtactgtgcat

SEQ ID NO: 430330 - DNA, 75 bp, synthetic construct
  source 1..75: mol_type = other DNA
aaccttccccggaggccattaagcagcgttttggtccggctgcgcacgtcaaaaggcccggagatcgcccgcccc

SEQ ID NO: 430331 - DNA, 75 bp, synthetic construct
  source 1..75: mol_type = other DNA
tttcttgggtggattaagagggagtgtgcagagcagcttaaaagcgcggccagctggcaggaattgcatcaagcc

SEQ ID NO: 430332 - DNA, 75 bp, synthetic construct
  source 1..75: mol_type = other DNA
aaacacgtgaagtgcttgatacctgtcaggtcattgccgaagcgccacaaggttcgattgctgcctatgtgatct

SEQ ID NO: 430333 - DNA, 75 bp, synthetic construct
  source 1..75: mol_type = other DNA
ttaagctgggtgaaaacggaatgtgcagagcagttgttaaatgcccacagctggcaagaattgcatcaagcgatg

SEQ ID NO: 430334 - DNA, 75 bp, synthetic construct
  source 1..75: mol_type = other DNA
agtttcagaacgagaacatcgtaagcccaacgttgcgcgacctggacgccagccgccgcccttcgcaaaaaaccg

SEQ ID NO: 430335 - DNA, 75 bp, synthetic construct
  source 1..75: mol_type = other DNA
gtttgtcggcccttacgcaaccagagatcggattgaaaactttatccgaatgaatgaggaaaaagacaatgagca

SEQ ID NO: 430336 - DNA, 75 bp, synthetic construct
  source 1..75: mol_type = other DNA
gaaattttttcacatttacgtcatcgctatgcgccgggcgtgacgcgtaatacggaatcatggttctgtcttgca

SEQ ID NO: 430337 - DNA, 75 bp, synthetic construct
  source 1..75: mol_type = other DNA
aagcgtcccgtttcgatcttagtggtcatctacgcacaagatacgaaacgggtgctgatgttgcagcggcgtgac

SEQ ID NO: 430338 - DNA, 75 bp, synthetic construct
  source 1..75: mol_type = other DNA
ctacaagtggcttgatgcgcccgcagcagcggcgctcactaagtcgtggagcaaccggcaggcgattgaagagta

SEQ ID NO: 430339 - DNA, 75 bp, synthetic construct
  source 1..75: mol_type = other DNA
cgcccttgtggaacagggaatgaagtattgctgccggatggcgctgcacgcagaggcacagcgccaccgggtatg

SEQ ID NO: 430340 - DNA, 75 bp, synthetic construct
  source 1..75: mol_type = other DNA
atgttggctgggtatcagacatatagaccaggtgctcctaagcagcatagcaatccgaagatggcccggtatttc

SEQ ID NO: 430341 - DNA, 75 bp, synthetic construct
  source 1..75: mol_type = other DNA
atgactaaatttggaaagctggaagctcatttgctaactcgtaactaccgccatgatgtgcatccatatagacag

SEQ ID NO: 430342 - DNA, 75 bp, synthetic construct
  source 1..75: mol_type = other DNA
gtacggggatgcgcctgttcctccggcaacattggcccatggtcatctgccgattaaaggtgccgatggtgtgtt

SEQ ID NO: 430343 - DNA, 75 bp, synthetic construct
  source 1..75: mol_type = other DNA
atcaccgagatcaaagtggagatgttcaatcatcagggggcattagctaacctgacggcagcgatcaatacgacc

SEQ ID NO: 430344 - DNA, 75 bp, synthetic construct
  source 1..75: mol_type = other DNA
tcaaccatcagggcgcactggcaaacctgacagcagcgatcaacaccactaattccaatattcaaagtctgaata

SEQ ID NO: 430345 - DNA, 75 bp, synthetic construct
  source 1..75: mol_type = other DNA
gtaacttactcttagtaaataccggtggtgattcatacctagtggatcgcagccaaacaccaccagtaaatgggg

SEQ ID NO: 430346 - DNA, 75 bp, synthetic construct
  source 1..75: mol_type = other DNA
ctctactaccgttcatgcgctggctctgcatacttataccattaaagagtgggaaggattgcaggataccatctt

SEQ ID NO: 430347 - DNA, 75 bp, synthetic construct
  source 1..75: mol_type = other DNA
actgcattgacgtatattcaggccacaaaatctataaaagcaacctcgtcaccagttatcgcaataaatataacc

SEQ ID NO: 430348 - DNA, 75 bp, synthetic construct
  source 1..75: mol_type = other DNA
tctggtgatgttattgataatattaaagtttttccaacactggctgaatctttacacgatgtcgactttactgtc

SEQ ID NO: 430349 - DNA, 75 bp, synthetic construct
  source 1..75: mol_type = other DNA
cacaagaccccattgggctggcggggggatggaacctgtataattacccactgaatccgataataaggatggatc

SEQ ID NO: 430350 - DNA, 75 bp, synthetic construct
  source 1..75: mol_type = other DNA
acggcacattatttattcgcgcttctgcggcagtgggagccagaacagaattaagtctggaagagtggctggcgt

SEQ ID NO: 430351 - DNA, 75 bp, synthetic construct
  source 1..75: mol_type = other DNA
tcttccagctttggcattcaggcggcagtcagcctgcatctggtgaaccagatctgcccgaatatcccggtgatt

SEQ ID NO: 430352 - DNA, 75 bp, synthetic construct
  source 1..75: mol_type = other DNA
ccgttcaactcaccagactcaacttatcccgactgggcgaacaatcgctggattgttggtggaacagggaccatc

SEQ ID NO: 430353 - DNA, 75 bp, synthetic construct
  source 1..75: mol_type = other DNA
atcgagaatcttgctctgagtagtgataatggacgcattcgcgtcagtgatttgccggaacatctgtttaccgag

SEQ ID NO: 430354 - DNA, 75 bp, synthetic construct
  source 1..75: mol_type = other DNA
tcattgataatggccggctgattgtggagccgcacagacgcccgcagtattcactggctgagctgttggcacagt

SEQ ID NO: 430355 - DNA, 75 bp, synthetic construct
  source 1..75: mol_type = other DNA
caccggtactatgcgttgcacagtaaaaaccccgctatcgccagaccgacatcccgtgcaccgtcaaggcgctgg

SEQ ID NO: 430356 - DNA, 75 bp, synthetic construct
  source 1..75: mol_type = other DNA
caacaacgtatcgggcgtttagaacagcgtgataccgcaatgttgcatcgtttgctgcatgatattgaaaaaaat

SEQ ID NO: 430357 - DNA, 75 bp, synthetic construct
  source 1..75: mol_type = other DNA
ctccagccagagcagaaaatattggtgcagcggcgcgggcaatgaaaacgatgggatttagcgaactgcgtattg

SEQ ID NO: 430358 - DNA, 75 bp, synthetic construct
  source 1..75: mol_type = other DNA
taattttgccagctatgtatttaaagatagtgggttaatacagacatcatcaatttttttggatacaaattttgc

SEQ ID NO: 430359 - DNA, 75 bp, synthetic construct
  source 1..75: mol_type = other DNA
cggtaaactgtgggagcagggtgttgaggggattgagaagtacaacgagatcaacaaagtcgaaccgatgaaccg

SEQ ID NO: 430360 - DNA, 75 bp, synthetic construct
  source 1..75: mol_type = other DNA
gcgtaaaggtctgggtatcggtggcaccaaagaaggcaccgaagaaccgtggtatgtggtggacaaagacgtcga

SEQ ID NO: 430361 - DNA, 75 bp, synthetic construct
  source 1..75: mol_type = other DNA
caacatgcgcacgctgggctcacttcgcccggacaaacgtcgccgcatcgcccgtgaaactctcgaaatttatag

SEQ ID NO: 430362 - DNA, 75 bp, synthetic construct
  source 1..75: mol_type = other DNA
tggcagcaggagccttacgaacaactggcggtaattgccaacgttgcgacctccgttgcgcacgaaggccgtgct

SEQ ID NO: 430363 - DNA, 75 bp, synthetic construct
  source 1..75: mol_type = other DNA
aagttaacccggcaactggacttctcatgttagatgatacaattgatgtgggggggaatgcctggggtagtgatg

SEQ ID NO: 430364 - DNA, 75 bp, synthetic construct
  source 1..75: mol_type = other DNA
cggtctttgctttatcgggggcagttttcacatgtgttttttcttataaagtgcgaaaactatatcctgacgatt

SEQ ID NO: 430365 - DNA, 75 bp, synthetic construct
  source 1..75: mol_type = other DNA
cgggctgatggcaatggaattatttaccccggcacgcgatgtgttggcgcagcgcaccctcggttgggtcgcgcg

SEQ ID NO: 430366 - DNA, 75 bp, synthetic construct
  source 1..75: mol_type = other DNA
gcatggcgggcgcgacgctggcgctggctatttcccggttaagtcacggggcgttgccggtacatttgattgaag

SEQ ID NO: 430367 - DNA, 75 bp, synthetic construct
  source 1..75: mol_type = other DNA
gcgctggcggcgggtacctgtcagcaactggcgcgcatcggcgtctggcaatctctggcggattgcgcaactgcc

SEQ ID NO: 430368 - DNA, 75 bp, synthetic construct
  source 1..75: mol_type = other DNA
atggtctggtttactgctgacatctttattgagtaccagcgcactcgcagacaatatcggcaccagcgcagaaga

SEQ ID NO: 430369 - DNA, 75 bp, synthetic construct
  source 1..75: mol_type = other DNA
agctgaaaggcacgatcggaagccgtttgatgaacgagcggaagaaagagaagcgcgtcctggagctcgaacatg

SEQ ID NO: 430370 - DNA, 75 bp, synthetic construct
  source 1..75: mol_type = other DNA
ctggcagagctgcgagcagcaacagtaacgattgaaacaccacagttcgattttccgataatcggcggcttgatc

SEQ ID NO: 430371 - DNA, 75 bp, synthetic construct
  source 1..75: mol_type = other DNA
taaaaacgtttaactggaaagatgacaggctacgtatgtggcctggttgtaaatctggtgtgcagataacagcat

SEQ ID NO: 430372 - DNA, 75 bp, synthetic construct
  source 1..75: mol_type = other DNA
tagccggttgatgaatgagcggaagaaagagaagcgcgttcttgagctcgagcatgagcacatcatgcaggtgac

SEQ ID NO: 430373 - DNA, 75 bp, synthetic construct
  source 1..75: mol_type = other DNA
gcgctcggttacgccttgtgggatagcggtgatatcgcacagtcgcgggaaatgctcgaacaggcgcataaaggg

SEQ ID NO: 430374 - DNA, 75 bp, synthetic construct
  source 1..75: mol_type = other DNA
ggctggcgactggggcaaattacccacgccggtaaacgcagtgcttatccgctggcgttaacccgcgccgccaaa

SEQ ID NO: 430375 - DNA, 75 bp, synthetic construct
  source 1..75: mol_type = other DNA
aaccaaacaccaccagtaaatggtacgtggttagtggacatcgacgggataaaaagcattgtaaaattgacacga

SEQ ID NO: 430376 - DNA, 75 bp, synthetic construct
  source 1..75: mol_type = other DNA
tcggtgcggcctttggtgccgggctgattgccgggccggctatcggcggactggcggggggtatctcaccgcatc

SEQ ID NO: 430377 - DNA, 75 bp, synthetic construct
  source 1..75: mol_type = other DNA
ccatctctaaagacaagcgtttcatcatgggaaaaaattatttcaggttttaaagcctatatattcagatacagt

SEQ ID NO: 430378 - DNA, 75 bp, synthetic construct
  source 1..75: mol_type = other DNA
ctcccgggaaacaaattagtagtgcatcaggatgattcatcgtttgagtgcggcctggatgacattgaggtagta

SEQ ID NO: 430379 - DNA, 75 bp, synthetic construct
  source 1..75: mol_type = other DNA
aaaaagcattgttaaattgactcgacttccgggaaacaaattagtagtgcatcaggatgattcatcgtttgagtg

SEQ ID NO: 430380 - DNA, 75 bp, synthetic construct
  source 1..75: mol_type = other DNA
tttcctgcagagtgggtgattcagtgcgccttggaaacaggagtttctttactgtggctaaccaccggacagggg

SEQ ID NO: 430381 - DNA, 75 bp, synthetic construct
  source 1..75: mol_type = other DNA
taaaaacgtttaactggaaagatgacaggcctcgtatatggccaagttgtaaattcggtgtacaggcaacagcat

SEQ ID NO: 430382 - DNA, 75 bp, synthetic construct
  source 1..75: mol_type = other DNA
atgctggtggtattcggtctgattttctatttcatgatcctgcgtccacagcagaagcgcaccaaagaacacaaa

SEQ ID NO: 430383 - DNA, 75 bp, synthetic construct
  source 1..75: mol_type = other DNA
taaaaacgtttaactggaaagatgacaaaccgcgtatatggccgagttgcaagtttggtgtgcaggcaacagtat

SEQ ID NO: 430384 - DNA, 75 bp, synthetic construct
  source 1..75: mol_type = other DNA
aaagcatggtgctggcggccagctttaaaacgccgcgtcaggcgctggactgtttactggcaggatgtgaatcca

SEQ ID NO: 430385 - DNA, 75 bp, synthetic construct
  source 1..75: mol_type = other DNA
ataataccgtaaggagtggtcttaattctttcactgacggggtgattattcgtgatacaaaggtattgatcacgc

SEQ ID NO: 430386 - DNA, 75 bp, synthetic construct
  source 1..75: mol_type = other DNA
atttgaatctggttcagttatatccttgccatttgaaaatgattcggccacatcttcgttattggagaataatga

SEQ ID NO: 430387 - DNA, 75 bp, synthetic construct
  source 1..75: mol_type = other DNA
cattgtgatggtgctgaaaaatctcgatgccgcagaagcgaaaaaacaactggatcaatacaatggctttattcg

SEQ ID NO: 430388 - DNA, 75 bp, synthetic construct
  source 1..75: mol_type = other DNA
tggtggttggtattgccgccagtggacgcacgccatatgtgattgccgggttggaatacgcgcgccagttgggtt

SEQ ID NO: 430389 - DNA, 75 bp, synthetic construct
  source 1..75: mol_type = other DNA
tggtggttggtattgcggccagcggacgcacgccgtatgtgattgccggactggaatacgcacgccagctcggct

SEQ ID NO: 430390 - DNA, 75 bp, synthetic construct
  source 1..75: mol_type = other DNA
gagtaccgcaaaatcggcccgtttgtggctgatatttatcagtggcaaagtctggatgatttttacaacgaatac

SEQ ID NO: 430391 - DNA, 75 bp, synthetic construct
  source 1..75: mol_type = other DNA
ctctcctccgggatcgccgcgggcggtattactgccatcgtgctgaatctgattttcccaccagaaaaacagtaa

SEQ ID NO: 430392 - DNA, 75 bp, synthetic construct
  source 1..75: mol_type = other DNA
gctgagtttgctattacgccggtggttggggctgaagtggtcaccggttcttcgcggatgaaagcaggcacggcg

SEQ ID NO: 430393 - DNA, 75 bp, synthetic construct
  source 1..75: mol_type = other DNA
gtttaacgaaaccacttacgcgaaagggatcctgccgatcgatacctataagaaagatctggataccatcgctaa

SEQ ID NO: 430394 - DNA, 75 bp, synthetic construct
  source 1..75: mol_type = other DNA
cttgcaagcgcaactgtaaaacggccattgtgatggtactgaaaaatctcgatgccgatgaagctaaaaaatgcc

SEQ ID NO: 430395 - DNA, 75 bp, synthetic construct
  source 1..75: mol_type = other DNA
ttcccgatcagattggcgatgctatggccatctttccagttattcgggcgcttgaattgcataaaattaagcatc

SEQ ID NO: 430396 - DNA, 75 bp, synthetic construct
  source 1..75: mol_type = other DNA
gccgtacagtgggaatttcctgtaatccggggagcgctgtttcaactaccgcagagtttgctattacgccggtag

SEQ ID NO: 430397 - DNA, 75 bp, synthetic construct
  source 1..75: mol_type = other DNA
cgtgcgggtatcggtatcaacgccgggcgtattcgtgcgctgggtagcccgattcgcggtggcgaagcgttccac

SEQ ID NO: 430398 - DNA, 75 bp, synthetic construct
  source 1..75: mol_type = other DNA
atttccagacagcggtgaaatcctgctctcagggcggtgtgcgtggcggtgcggcaacgctgttctacccgatgt

SEQ ID NO: 430399 - DNA, 75 bp, synthetic construct
  source 1..75: mol_type = other DNA
tcgattatcacagccgctataaactcgtctttctggcccattcccagcccgagtaccgcaaacttggcccgtttg

SEQ ID NO: 430400 - DNA, 75 bp, synthetic construct
  source 1..75: mol_type = other DNA
tttggcgccgccaatatgttctacgatccggctgacagagacgacctttgtctcgaggcactgttgcaaagttag

SEQ ID NO: 430401 - DNA, 75 bp, synthetic construct
  source 1..75: mol_type = other DNA
tctggtcggtgaagtgggctttggcgccgccaatatgttctacgatccggctgacagagacgacctttgtctcga

SEQ ID NO: 430402 - DNA, 75 bp, synthetic construct
  source 1..75: mol_type = other DNA
ctcgtttggaaagtttcattgccagacgggactcctgcaatcgtcaagggattgaaacctataaaagacattgct

SEQ ID NO: 430403 - DNA, 75 bp, synthetic construct
  source 1..75: mol_type = other DNA
cccggtaaagcccgcgcagaatacggcgaacagcgtcaatattgcccggtctgtggttctatgccggtgtccagt

SEQ ID NO: 430404 - DNA, 75 bp, synthetic construct
  source 1..75: mol_type = other DNA
actactggctgatcgcctttgttacgccgaccggcggtatcaggcatgtcatcaccaggtatagcaacaagagac

SEQ ID NO: 430405 - DNA, 75 bp, synthetic construct
  source 1..75: mol_type = other DNA
tgatgcagccagagacgatttaacttactccggcacggcatcgactatagcaacaaaacatgccgaactggattt

SEQ ID NO: 430406 - DNA, 75 bp, synthetic construct
  source 1..75: mol_type = other DNA
ggccattgttattctttttgcctctatcattatggtttatggtggcgggttattaacactggacacatttgattc

SEQ ID NO: 430407 - DNA, 75 bp, synthetic construct
  source 1..75: mol_type = other DNA
ggtacaagtggattgtattggtggtttgtattcttgcctattcatcaggaaacctggtgcgctggaattatacgg

SEQ ID NO: 430408 - DNA, 75 bp, synthetic construct
  source 1..75: mol_type = other DNA
cgccaacgcgtcattgttttgctttctcatcccgccaatcggcgcgatcatacaaacgttttgatgcacgttcag

SEQ ID NO: 430409 - DNA, 75 bp, synthetic construct
  source 1..75: mol_type = other DNA
gctcgaccaggcgtacgcttatgggtgcctttccgcagcttggaacgcggatggagaagaggagcaacgcgatct

SEQ ID NO: 430410 - DNA, 75 bp, synthetic construct
  source 1..75: mol_type = other DNA
atctgaggaacccctgccttctgcccttctcccgatccgggatcgctttgcagctttgtttcagcgggcgcgcga

SEQ ID NO: 430411 - DNA, 75 bp, synthetic construct
  source 1..75: mol_type = other DNA
ggaaaatcactggcttttcccgtgaaatcagcccggcatatcgtcagaagctgctttctcttggcatgttacctg

SEQ ID NO: 430412 - DNA, 75 bp, synthetic construct
  source 1..75: mol_type = other DNA
ctgcatgcggcgctattggcagcagcgcaacgcggggtaaaagcggaagtcttgctggatggctacggttcgccg

SEQ ID NO: 430413 - DNA, 75 bp, synthetic construct
  source 1..75: mol_type = other DNA
cgatcaactcatgcaaataatttgtgatattgcagagaataatggtcaggcaaaatcctttattattaataaata

SEQ ID NO: 430414 - DNA, 75 bp, synthetic construct
  source 1..75: mol_type = other DNA
taacgtcgaaagtttgcatctggagttaagcgaagacgtgttggcagaaattgaagcggtgcatcaggtttatac

SEQ ID NO: 430415 - DNA, 75 bp, synthetic construct
  source 1..75: mol_type = other DNA
gggcattaaccttatcgacgttgccgaaatgtacccagtgccgccgcgccccgaaacgcaagggttaaccgaaac

SEQ ID NO: 430416 - DNA, 75 bp, synthetic construct
  source 1..75: mol_type = other DNA
cggaaaacttccagctcttcctggttgagcatccgctggttcgccacttaacccgccgtctgatttggggcgttt

SEQ ID NO: 430417 - DNA, 75 bp, synthetic construct
  source 1..75: mol_type = other DNA
acctgcccaaaccgaacaaaagcgatgatgaatcgcggtcgaacgatgcggttaaccgctacaaattgctgaaaa

SEQ ID NO: 430418 - DNA, 75 bp, synthetic construct
  source 1..75: mol_type = other DNA
atggctaaactgaacaagaaacaacttgctttactcaaggaaatgcctgcagaacaactcatgcaaataatttgt

SEQ ID NO: 430419 - DNA, 75 bp, synthetic construct
  source 1..75: mol_type = other DNA
attttgattccgctggctgtctggaatgcggcacctgcagggtgctgtgcggcaacaccattctcgaacagtggt

SEQ ID NO: 430420 - DNA, 75 bp, synthetic construct
  source 1..75: mol_type = other DNA
gtggctgttggttttttgattgtcggtctggcgctgaccatgctctaccggagcagtgaggacagcaacaacaac

SEQ ID NO: 430421 - DNA, 75 bp, synthetic construct
  source 1..75: mol_type = other DNA
acagtaatcttggctcacacagaggatcatttactggtcgcaatacgggaagcggtacgctgtttgtttacgcca

SEQ ID NO: 430422 - DNA, 75 bp, synthetic construct
  source 1..75: mol_type = other DNA
tgcatttggcgtaatgcgctacctgcatctggcggacaaacacgatctgccgcgtattgtcaccattcagaaccc

SEQ ID NO: 430423 - DNA, 75 bp, synthetic construct
  source 1..75: mol_type = other DNA
caacatcgaaagtttgcatctggagttaagcgaagacgtattggctgaaattgaagcggtgcatcaggtttatac

SEQ ID NO: 430424 - DNA, 75 bp, synthetic construct
  source 1..75: mol_type = other DNA
ctcgatctttatcaggtgcactggccacagcgcccgactaactgcttcggcaagctcggttatagctggacggat

SEQ ID NO: 430425 - DNA, 75 bp, synthetic construct
  source 1..75: mol_type = other DNA
agcgccctcctccacctcggtgaaatgctccgcttccctcaggaagaggctctgtatccgggattattgcaggtg

SEQ ID NO: 430426 - DNA, 75 bp, synthetic construct
  source 1..75: mol_type = other DNA
cgctggtcgttaatcatggaaatcgatgaaggctttgcggtaggcatgtcgccagccgaactcagcgctgagcag

SEQ ID NO: 430427 - DNA, 75 bp, synthetic construct
  source 1..75: mol_type = other DNA
gacctgcccaaaccgaacaaaagcgatgatgaaacgcgggcgaacgatgcggttaaccgctacaaattgctgaaa

SEQ ID NO: 430428 - DNA, 75 bp, synthetic construct
  source 1..75: mol_type = other DNA
gccatctatctgtcagcagtacacgacacccggccaccaaagccggtggtgtacatgtgttgtcttctggccata

SEQ ID NO: 430429 - DNA, 75 bp, synthetic construct
  source 1..75: mol_type = other DNA
ggttttacggttgcagatattggttggccagccgtcggtgctgctgcatgggtggcaccttttgccgcattagtg

SEQ ID NO: 430430 - DNA, 75 bp, synthetic construct
  source 1..75: mol_type = other DNA
tgtgctgatggaaggtcttaacccaatagggaaaagtgccaaagaaatcatgcaaaaacagatgggtaaagatgc

SEQ ID NO: 430431 - DNA, 75 bp, synthetic construct
  source 1..75: mol_type = other DNA
aactgaaattcaaagcattacaggagcgggcaaaagaaaaaattgccgacattgccgagagccgcgaactcacgg

SEQ ID NO: 430432 - DNA, 75 bp, synthetic construct
  source 1..75: mol_type = other DNA
ggcctcggggctgtggtaaaacaacggtcggaatggcccttgccgattcgcttaaccgtcggtttgtcgataccg

SEQ ID NO: 430433 - DNA, 75 bp, synthetic construct
  source 1..75: mol_type = other DNA
ggctgggggagtaattcaacacaggaagcgcagttctccgtactcgatgccatcaccgccagcgagctaattaac

SEQ ID NO: 430434 - DNA, 75 bp, synthetic construct
  source 1..75: mol_type = other DNA
ttcgccacttaacccgccgtctgatttggggcgtttatagcgccgacaaccagctactggcctgtttccgggtag

SEQ ID NO: 430435 - DNA, 75 bp, synthetic construct
  source 1..75: mol_type = other DNA
ccttggtgatgtattcctgatagcaggaattgcaatgtggacacagccacaacacacgccgctgctaatcaccgc

SEQ ID NO: 430436 - DNA, 75 bp, synthetic construct
  source 1..75: mol_type = other DNA
ggggcagcgttcaggtacagcctggaggagctcacatacagcctcctcaacgcatcactctggttcggcatgaca

SEQ ID NO: 430437 - DNA, 75 bp, synthetic construct
  source 1..75: mol_type = other DNA
attcctttccattctgacgggattattaactgtaatgacgctgacggatattgctgtctgtcggcttccccggat

SEQ ID NO: 430438 - DNA, 75 bp, synthetic construct
  source 1..75: mol_type = other DNA
aagagttcgccagcaggcttgcgctagcctgtgaaaatgctggctttgaacaacacggaaggcaggcagaaattg

SEQ ID NO: 430439 - DNA, 75 bp, synthetic construct
  source 1..75: mol_type = other DNA
gatgatgaggacgaaaccgaagatgccggaacggatggttttgacctttcattgctgaaatttaatgacagcggc

SEQ ID NO: 430440 - DNA, 75 bp, synthetic construct
  source 1..75: mol_type = other DNA
gctatcctgaatgcaagacaacattcccggacaaagacggcaagccggatatggaagcaaaatccagatcagaag

SEQ ID NO: 430441 - DNA, 75 bp, synthetic construct
  source 1..75: mol_type = other DNA
aaagggctgaaaattgttcgtcagagcctgccgtacggcaccgccagtggtacgcacggtctgtacttctgcgcc

SEQ ID NO: 430442 - DNA, 75 bp, synthetic construct
  source 1..75: mol_type = other DNA
ttatggtcatatgctggaactttacgacccgcaggattatgacgagaagtattcaaactggcgtttcagtgattt

SEQ ID NO: 430443 - DNA, 75 bp, synthetic construct
  source 1..75: mol_type = other DNA
gtactggatgcgagtttaaaatatgggctgaggtggcaggtaaaaaactcacacaaaaccaggttgaaacattaa

SEQ ID NO: 430444 - DNA, 75 bp, synthetic construct
  source 1..75: mol_type = other DNA
tgagacgacgcttactgttcaccagaaagtttcatccattttcttccacccaagttgcggaagaaccactttttt

SEQ ID NO: 430445 - DNA, 75 bp, synthetic construct
  source 1..75: mol_type = other DNA
cgctgccgcttaacctttccacgcttcagcagctatgcgcaaagcgatttggttattctgcaaaagatacgctcg

SEQ ID NO: 430446 - DNA, 75 bp, synthetic construct
  source 1..75: mol_type = other DNA
cgatcagatagacgagaaaaaacgcctgatctccgaagctcaggccgcgcatattgccgggcgggttacgggtaa

SEQ ID NO: 430447 - DNA, 75 bp, synthetic construct
  source 1..75: mol_type = other DNA
tcttatcgataaagcagacactatcgttcattcaggtgaccccgacgatgaaggatgtttgctggttgatgaaat

SEQ ID NO: 430448 - DNA, 75 bp, synthetic construct
  source 1..75: mol_type = other DNA
gctttcgtcctaaacagcacacgttatgtttttgatgaaaaaagagagaatatctctgtacaggttgataaccag

SEQ ID NO: 430449 - DNA, 75 bp, synthetic construct
  source 1..75: mol_type = other DNA
atttactggctgatatctctcatgaacaactggaggaactatttaacgctggctttagtctggctaaaaaagggg

SEQ ID NO: 430450 - DNA, 75 bp, synthetic construct
  source 1..75: mol_type = other DNA
gggaaaggcgtaactgcaaccgttctactttatcaggctatccttttaggtgaggctgtttttgtagaagatcca

SEQ ID NO: 430451 - DNA, 75 bp, synthetic construct
  source 1..75: mol_type = other DNA
aggccgcagatttttatcgtatagctgatcgccgcgcagccagaaatgtagccgcaattcataaaacaggaatga

SEQ ID NO: 430452 - DNA, 75 bp, synthetic construct
  source 1..75: mol_type = other DNA
gcagaaattgctgttacgcatcccgattatgggttcactgatgcggggacaaaaactcacgcagatttttacgat

SEQ ID NO: 430453 - DNA, 75 bp, synthetic construct
  source 1..75: mol_type = other DNA
cactcgattacattgatttaaagaaaggggtttttataggtttaaacaaagatgaccagccgcaatacataacca

SEQ ID NO: 430454 - DNA, 75 bp, synthetic construct
  source 1..75: mol_type = other DNA
actattcaggggttgagctacttttttaagtcactcgacaacaacatactgtttagagttcctctatggatcatg

SEQ ID NO: 430455 - DNA, 75 bp, synthetic construct
  source 1..75: mol_type = other DNA
tataaatatcagaaaaacatggaaaagatctcccaggcacaacgtgaagagttgaagagtttcgccttcgatttg

SEQ ID NO: 430456 - DNA, 75 bp, synthetic construct
  source 1..75: mol_type = other DNA
gaatcacgatttcttttccggctctggctcctcttatgtaatgggaaaagcggtcgaaacagaagatgaagactg

SEQ ID NO: 430457 - DNA, 75 bp, synthetic construct
  source 1..75: mol_type = other DNA
gttgaagagtttcgccttcgatttgttgctggaactctatgacaacgagttgcaatacaccgatgagctgtacgc

SEQ ID NO: 430458 - DNA, 75 bp, synthetic construct
  source 1..75: mol_type = other DNA
tttcccctgatattgccgcatcggcggcaccggtgaaaatcgcactggattttgacgaggatgataaaccatcca

SEQ ID NO: 430459 - DNA, 75 bp, synthetic construct
  source 1..75: mol_type = other DNA
taaaggactggcagaaacaacacgcggatattatcggcaccacaggagccggtaaaggggttgctgctggtatat

SEQ ID NO: 430460 - DNA, 75 bp, synthetic construct
  source 1..75: mol_type = other DNA
tgaccgaaaagccgcccgtatggccgcgcaatttgtcagtgataacccatcggcaactctccgtgatatttataa

SEQ ID NO: 430461 - DNA, 75 bp, synthetic construct
  source 1..75: mol_type = other DNA
gaagaagacaatgcgcaggatgaggaagtacaaaccggctttgatttatctatgctacaggtcaatgatgatggt

SEQ ID NO: 430462 - DNA, 75 bp, synthetic construct
  source 1..75: mol_type = other DNA
ctacaacctccccccggtcacaacctgtagctgctgcgacacctgaatcactcaatatcagctgtgaagtgacgt

SEQ ID NO: 430463 - DNA, 75 bp, synthetic construct
  source 1..75: mol_type = other DNA
atggttgaactctcgcatcgaccagagatctccgtagcgcaactcgctcgtgagcatgggatcaacgataatttg

SEQ ID NO: 430464 - DNA, 75 bp, synthetic construct
  source 1..75: mol_type = other DNA
tgaaaacgtgctggtacttaatcgcacctatgctaatcggagtaacgccgaacgggcagcgaaaatgcagtggga

SEQ ID NO: 430465 - DNA, 75 bp, synthetic construct
  source 1..75: mol_type = other DNA
gttgcgtcattctcgctacaactagcggaaggtcgggcggatctctacacggaaatgcctgtgaaggtcagcggc

SEQ ID NO: 430466 - DNA, 75 bp, synthetic construct
  source 1..75: mol_type = other DNA
caccgctttaccttggcagatcgcggagcctatacgggcgtaattgccagttggttgcatacccgcgaacccgcg

SEQ ID NO: 430467 - DNA, 75 bp, synthetic construct
  source 1..75: mol_type = other DNA
aatggaccattaccaccctgacacataccgtcagcccggataacggttttacgaccagtctggagcttgaagtga

SEQ ID NO: 430468 - DNA, 75 bp, synthetic construct
  source 1..75: mol_type = other DNA
tgtcactctgagtgataacagcaggcgcattgatgtggatatcaaccttgataaccaggctgacgatcatcgtct

SEQ ID NO: 430469 - DNA, 75 bp, synthetic construct
  source 1..75: mol_type = other DNA
attacgttgttgcgtggtgtgggattactgggaaaagaagatttacttttaaggccagggcgtccttcaggaatt

SEQ ID NO: 430470 - DNA, 75 bp, synthetic construct
  source 1..75: mol_type = other DNA
cgccggttccggtatggaatatgctcaactatgctgtcttacaggaagggcgtaacggcatagccgtttttagcg

SEQ ID NO: 430471 - DNA, 75 bp, synthetic construct
  source 1..75: mol_type = other DNA
gatctggagctggacgacgccgacgggctgatcgccctgccgcgacgtggggcagtgattcagctggcgctgggc

SEQ ID NO: 430472 - DNA, 75 bp, synthetic construct
  source 1..75: mol_type = other DNA
acacttgatgccgaagatgttgtccctacaacctccccccggtcacaacctgtagctgctgcgacacctgaatca

SEQ ID NO: 430473 - DNA, 75 bp, synthetic construct
  source 1..75: mol_type = other DNA
caatgcgagattattcatgaggcctggcagagcagggctgttatccgctatgacatggcggtgccgcgtaatcta

SEQ ID NO: 430474 - DNA, 75 bp, synthetic construct
  source 1..75: mol_type = other DNA
ccgtgaaaaatcgtggcacaagaccacagttggggaagtggtgaaggaaatagctgtgcggcacaaactgaagat

SEQ ID NO: 430475 - DNA, 75 bp, synthetic construct
  source 1..75: mol_type = other DNA
tggggaataagcaatttggcatctacatgattaataattcaaggacagccaatggtaccgatggtcaggcgtaca

SEQ ID NO: 430476 - DNA, 75 bp, synthetic construct
  source 1..75: mol_type = other DNA
aacaactggcaaacatggaatttccagtgcccttcaggtcatgtactgtctggtataaatgttcaggatacaggg

SEQ ID NO: 430477 - DNA, 75 bp, synthetic construct
  source 1..75: mol_type = other DNA
gtaatctgtttttcacccctgcggggatcaaagaagagaatatccagaagctcactattgataactaccgcgagc

SEQ ID NO: 430478 - DNA, 75 bp, synthetic construct
  source 1..75: mol_type = other DNA
tctgatcagtgatctccaacagaaagggcttaacatctcttctaacgcgataccctgccctgcgtgtggtaatgg

SEQ ID NO: 430479 - DNA, 75 bp, synthetic construct
  source 1..75: mol_type = other DNA
tgccgacgctatcggcgcgacgttaccagagctggcgaccgcgaccgctggcatggataaaacgcaaaaacataa

SEQ ID NO: 430480 - DNA, 75 bp, synthetic construct
  source 1..75: mol_type = other DNA
gccttacctcctgaagtcataaaaccgaatatttcagcgttatgggctgaaaagcaggcgcagataaaatcggga

SEQ ID NO: 430481 - DNA, 75 bp, synthetic construct
  source 1..75: mol_type = other DNA
tgatggggctgacgttgacggataaccggggctttgaagcagaccagcttgatctggaactggacgacgccgacg

SEQ ID NO: 430482 - DNA, 75 bp, synthetic construct
  source 1..75: mol_type = other DNA
attttcgggaaacgctgaatccccgccgtgaaaagtcgtggcacaagaccacggtcggggaagtggtgaaggaaa

SEQ ID NO: 430483 - DNA, 75 bp, synthetic construct
  source 1..75: mol_type = other DNA
ctgattttcgggaaacgctgaatccccgccgtgaaaaatcgtggcataagaccaccgtcggggaagtggtgcagg

SEQ ID NO: 430484 - DNA, 75 bp, synthetic construct
  source 1..75: mol_type = other DNA
tgaacacactggcgcaccggaccgcctgaacatccgggcgcgaagtgctgattttcgggaaacgctgaatacccg

SEQ ID NO: 430485 - DNA, 75 bp, synthetic construct
  source 1..75: mol_type = other DNA
ccgcgaaaaatcgtggcacaagaccactgtcggggaagtggtgaaggaaatagccgcacgtcacaagctgaagat

SEQ ID NO: 430486 - DNA, 75 bp, synthetic construct
  source 1..75: mol_type = other DNA
cctggcagatcgcggagcctatacgggcgtaattgccagttggttgcatacccgcgaacccgcgaacccgcgaag

SEQ ID NO: 430487 - DNA, 75 bp, synthetic construct
  source 1..75: mol_type = other DNA
aagtggcagtatttacaggtaagggatggagccatgaagaagaccatcgcaatgagactgtttactcaatcgaaa

SEQ ID NO: 430488 - DNA, 75 bp, synthetic construct
  source 1..75: mol_type = other DNA
agcgccgcagtagacgcggcagaagcacagcgccagttgctgattgatgctgcaatggcttccattagtctgact

SEQ ID NO: 430489 - DNA, 75 bp, synthetic construct
  source 1..75: mol_type = other DNA
atgaaacctgtttttgatgaaaatgggctggctacagtgccgggtgatatgcgttgttattattatgatgcagta

SEQ ID NO: 430490 - DNA, 75 bp, synthetic construct
  source 1..75: mol_type = other DNA
cacaacgtcagtcactgattgatactgtaatggcttccattagtctgattcaactgaaattgcaggccggacgga

SEQ ID NO: 430491 - DNA, 75 bp, synthetic construct
  source 1..75: mol_type = other DNA
tatgcccgcctgttcaactggtattgacccgggcgaaaacattctgggaagagtggcagtatttacaggtaaggg

SEQ ID NO: 430492 - DNA, 75 bp, synthetic construct
  source 1..75: mol_type = other DNA
aactgacgcaggcagaaacaacccggcttaacgctgtgctggattacattgacgcggtgacggcaacagatacca

SEQ ID NO: 430493 - DNA, 75 bp, synthetic construct
  source 1..75: mol_type = other DNA
tgtcgtcggggtcccggttccggatgcgaccggcgggcgtctggaaattctctgtcggctgggaggggaaaaatg

SEQ ID NO: 430494 - DNA, 75 bp, synthetic construct
  source 1..75: mol_type = other DNA
ggtgttaacccgtaatgctgccggagaaatgacggaagagtgggtgtcatgcgggaaaattcatgcggatatccg

SEQ ID NO: 430495 - DNA, 75 bp, synthetic construct
  source 1..75: mol_type = other DNA
cggaaatccgcatctgggtacgtggtccgtcaggccgggaaattacggcggcgtcgcgacttcatgtgctgagtg

SEQ ID NO: 430496 - DNA, 75 bp, synthetic construct
  source 1..75: mol_type = other DNA
atggactggctacagtgccgggcgatatgcgttgtttttattatgatgcagtaacgtatgaatatacgggctggt

SEQ ID NO: 430497 - DNA, 75 bp, synthetic construct
  source 1..75: mol_type = other DNA
cctgattccggttacgatcggtaatattatcggcggtggtttgttggttgggttgacatactgggtcatttacct

SEQ ID NO: 430498 - DNA, 75 bp, synthetic construct
  source 1..75: mol_type = other DNA
ctgtcggttctgcaccggaaaatttttctcacctgaccgtgatgaacttcatcactgataacctgattccggtta

SEQ ID NO: 430499 - DNA, 75 bp, synthetic construct
  source 1..75: mol_type = other DNA
cctatatgggtggcgcatacgtgttgatcagcgacaccgacggtaaaatcattaaagcctacgacggtgagattt

SEQ ID NO: 430500 - DNA, 75 bp, synthetic construct
  source 1..75: mol_type = other DNA
agccgctgcgcgttgtgttccgcgacgcgggctttaagaacagtgcggtcaagatcaatgtcgagcagattttca

SEQ ID NO: 430501 - DNA, 75 bp, synthetic construct
  source 1..75: mol_type = other DNA
acgccgtcaacgaacagatcaacagtacaattgaagatgcgattgctcgtgcccggggtgaaattccgcgtggcg

SEQ ID NO: 430502 - DNA, 75 bp, synthetic construct
  source 1..75: mol_type = other DNA
acaaagccaaattcgacctgttcgtcgacaatatcaagcctgaccgcacgcctgaggatctgctgttccaggtaa

SEQ ID NO: 430503 - DNA, 75 bp, synthetic construct
  source 1..75: mol_type = other DNA
ctattgcagcaaatagcttagatggttcgtctcgaagattcgtcatgattcaacttccagaggagattaatgaga

SEQ ID NO: 430504 - DNA, 75 bp, synthetic construct
  source 1..75: mol_type = other DNA
cgtgatgacggctttgaatctgatgcagtaaaaatcaatgctgagcagattttcaagcaagtgtcgccacatact

SEQ ID NO: 430505 - DNA, 75 bp, synthetic construct
  source 1..75: mol_type = other DNA
aaccccgaaacaagcgggcgctttcactcagactggctgtccatgatgtattcgagactaaagttatcgcgcaac

SEQ ID NO: 430506 - DNA, 75 bp, synthetic construct
  source 1..75: mol_type = other DNA
gagaaagctcttgaaatgcacaaaatgatcccgcactctgagcttgcgattatacctgacgccaatcatgcattg

SEQ ID NO: 430507 - DNA, 75 bp, synthetic construct
  source 1..75: mol_type = other DNA
acttaacgctgtgctggattacattgacgcggtggcggcaacagataccagcaccgcgcctgatgtcatctggcc

SEQ ID NO: 430508 - DNA, 75 bp, synthetic construct
  source 1..75: mol_type = other DNA
atgaatatattaatactggcgtaagtatgcccgcctgttccactggtattgacccgggcgaatacattccgggaa

SEQ ID NO: 430509 - DNA, 75 bp, synthetic construct
  source 1..75: mol_type = other DNA
tattttagcgggtatcacgacacgaatgccatttgcccctatacatccatcggcaatgttgttaataatggccac

SEQ ID NO: 430510 - DNA, 75 bp, synthetic construct
  source 1..75: mol_type = other DNA
atgctgtcatactgtgttattcaggaatttaccgcaaactgtcgaaaaatatcacaaaattgttattccactgcc

SEQ ID NO: 430511 - DNA, 75 bp, synthetic construct
  source 1..75: mol_type = other DNA
atggctaggccataaacctgaaaatatcataaaggccatgaatgcaatgctggagcgcgacgacatttcagaaag

SEQ ID NO: 430512 - DNA, 75 bp, synthetic construct
  source 1..75: mol_type = other DNA
gatcaccgcgcgtctgggtccggtgccggtcagccgtatcgaacagatccgccgcgaaatcatgggcatcgcccg

SEQ ID NO: 430513 - DNA, 75 bp, synthetic construct
  source 1..75: mol_type = other DNA
atggctggcatatcccaaacgtgctggtggtaattcaaaatctgcagccttcaaagcctggaaagcccgtttgaa

SEQ ID NO: 430514 - DNA, 75 bp, synthetic construct
  source 1..75: mol_type = other DNA
agacgcgaggacccgtacttcaaagccagttacgacaacgtggactacagccagatcccggcaggattcaggggg

SEQ ID NO: 430515 - DNA, 75 bp, synthetic construct
  source 1..75: mol_type = other DNA
tgttggtgcatctgctgatgagtctgtgcgagttcgttcaaaccgatcggaatactctccggagtttgagcaggc

SEQ ID NO: 430516 - DNA, 75 bp, synthetic construct
  source 1..75: mol_type = other DNA
tcacgcatggttccgtaaacaggatcgcgacaaaaacattctggccgggcggcaaatcctggacgacgaactgga

SEQ ID NO: 430517 - DNA, 75 bp, synthetic construct
  source 1..75: mol_type = other DNA
gtgctgggccgcgtgctgggtaaactcaaccaggtgccggatgttatcgacgcgcgtcggttgcacgggagttag

SEQ ID NO: 430518 - DNA, 75 bp, synthetic construct
  source 1..75: mol_type = other DNA
gtgcgagttcgttcaaaccgaccggaatactctccggagtttgagcaggcatggctggcataccccaaacgtgct

SEQ ID NO: 430519 - DNA, 75 bp, synthetic construct
  source 1..75: mol_type = other DNA
cgctttctgaagggctggctctgctggcggaacagcatcccagtaagcaatggcaagcgttgctgcaatcgctgg

SEQ ID NO: 430520 - DNA, 75 bp, synthetic construct
  source 1..75: mol_type = other DNA
gtagttgtagcaatgctgcattttgttctacccgagtttgccgctatctataaaacctttaacaccccgctaccg

SEQ ID NO: 430521 - DNA, 75 bp, synthetic construct
  source 1..75: mol_type = other DNA
catgctggataatctcgcccctcatcaccgggataatacgtttgcgctggcagataatcttgccgccttgctgga

SEQ ID NO: 430522 - DNA, 75 bp, synthetic construct
  source 1..75: mol_type = other DNA
aaaaaaagtcaccaggaaaggtgaaaaaggtaactcaagtaatatctatcttcttcatcttgatggtgcaggaga

SEQ ID NO: 430523 - DNA, 75 bp, synthetic construct
  source 1..75: mol_type = other DNA
ataattttaatcataagctaaattatctgaaacagcatgctgaatgggacagatttactgttgccttttttggtg

SEQ ID NO: 430524 - DNA, 75 bp, synthetic construct
  source 1..75: mol_type = other DNA
caaaactgcatgttgataatgaagacggaaaaaaacagcttaacgtaatgatggagcaactgcagacattacaga

SEQ ID NO: 430525 - DNA, 75 bp, synthetic construct
  source 1..75: mol_type = other DNA
aaagagtgcaccaatatctacgcgccgctggcgaaccgtcttgggattgggcaactgaaatgggagctggaagat

SEQ ID NO: 430526 - DNA, 75 bp, synthetic construct
  source 1..75: mol_type = other DNA
aaaatagaacacaaggaaaaactcattgcagaaacacttcattataatccgcatccagaggaaatattggatata

SEQ ID NO: 430527 - DNA, 75 bp, synthetic construct
  source 1..75: mol_type = other DNA
gatattttttgcctttcctataaagaaagctttaaatttggagccatatacgatctaaacagaacagttaaaatt

SEQ ID NO: 430528 - DNA, 75 bp, synthetic construct
  source 1..75: mol_type = other DNA
cgaaagaaggtggagatgcttttcgcccacctcaaacggatcatgaaactcgaccgtttacgactgcgtggccta

SEQ ID NO: 430529 - DNA, 75 bp, synthetic construct
  source 1..75: mol_type = other DNA
aaaacgaaattctctatcgggtggcgaaactcaacgacgttaaccgcgacgtggtggatgaactggacaggctga

SEQ ID NO: 430530 - DNA, 75 bp, synthetic construct
  source 1..75: mol_type = other DNA
cgatggaagactgggcggtagcgctgaaaggcaccgaagccctgttgcgccgttccatttacgcggtgatgccaa

SEQ ID NO: 430531 - DNA, 75 bp, synthetic construct
  source 1..75: mol_type = other DNA
cgatgatgcggtgtcggtgatgcggaaggcccgcacggtgacagaggcggtactgcttctgcttgctgatgccgg

SEQ ID NO: 430532 - DNA, 75 bp, synthetic construct
  source 1..75: mol_type = other DNA
atgcccacgagcggtttatgacgttgctggagccgtggctggataaactgcctggcgtagtgttgcactgtttta

SEQ ID NO: 430533 - DNA, 75 bp, synthetic construct
  source 1..75: mol_type = other DNA
tctacgccggaagagcaggaacgtgcttttgttgcccagctacgtattgccgcagaattaaacatgccggtattt

SEQ ID NO: 430534 - DNA, 75 bp, synthetic construct
  source 1..75: mol_type = other DNA
ggtggtccgtgtaatagccaatgatcgcagtgggttattgcgtgatatcaccactatcctcgctaacgagaaggt

SEQ ID NO: 430535 - DNA, 75 bp, synthetic construct
  source 1..75: mol_type = other DNA
gtggatcacttttcatccgtcgttgacaccggacaaagccatttaacccgcgagctgccagccattctggaggat

SEQ ID NO: 430536 - DNA, 75 bp, synthetic construct
  source 1..75: mol_type = other DNA
gcgtgcgtggcgcgtggaatttatatcggcattaccggttgggtttgcgatgaacgacgcgggctggagctgcgg

SEQ ID NO: 430537 - DNA, 75 bp, synthetic construct
  source 1..75: mol_type = other DNA
gattccggcggagaaattgctgatcgaaactgatgcgccgtatttgctcccgcgcgatctcacgccgaagccatc

SEQ ID NO: 430538 - DNA, 75 bp, synthetic construct
  source 1..75: mol_type = other DNA
cataatggcgaccgcgaaggaatgctggtatgccttaatttgtcacgagtcgaagtattaaatcagcgttattta

SEQ ID NO: 430539 - DNA, 75 bp, synthetic construct
  source 1..75: mol_type = other DNA
cataatggtgaccgcgaaggaatgcgggtatgccttaatttgtccagagtcgaagtattaaatcagcgttatttc

SEQ ID NO: 430540 - DNA, 75 bp, synthetic construct
  source 1..75: mol_type = other DNA
ctattacaacggcgatatctacccggtcattaataacgctactgttaacggcgtgatttctacctactatctgga

SEQ ID NO: 430541 - DNA, 75 bp, synthetic construct
  source 1..75: mol_type = other DNA
tgccagccagacggatttatatccctaaaagcaacggcaaactgcgaccactggatatccccgcgttgcgggatc

SEQ ID NO: 430542 - DNA, 75 bp, synthetic construct
  source 1..75: mol_type = other DNA
atgcgggtatgccttaatttgtcccgagtcgaagtattaaatcagcgttatttccttgggccatgtccattctga

SEQ ID NO: 430543 - DNA, 75 bp, synthetic construct
  source 1..75: mol_type = other DNA
agagcaagttacagaggcgcatgtacacgcagcaggcgttaatgtatcgccagaagggagatcgtgaaggtgttc

SEQ ID NO: 430544 - DNA, 75 bp, synthetic construct
  source 1..75: mol_type = other DNA
atgaaaaacagtaaggtattttaccgcagcgcattagcgacagctattgttatggctctttctgcaccagcattc

SEQ ID NO: 430545 - DNA, 75 bp, synthetic construct
  source 1..75: mol_type = other DNA
cctgccggaaaaaacgctgaaatttttacgcaataatcagccacaggtaatggtgattgattgcagccacccgcc

SEQ ID NO: 430546 - DNA, 75 bp, synthetic construct
  source 1..75: mol_type = other DNA
catgagtcatatagaagctggtaaggttgcaaccacagttgcggttaactggcaagaccgtgcatttttcagact

SEQ ID NO: 430547 - DNA, 75 bp, synthetic construct
  source 1..75: mol_type = other DNA
gggatttcttttatctgaaaaggacagaatacatgattaacaatattgcaaatcagtcttcgtttccggctgcaa

SEQ ID NO: 430548 - DNA, 75 bp, synthetic construct
  source 1..75: mol_type = other DNA
taataataaacaaacaatttatgcctctgcttcggcacaaggcacaaggcacaggttcagcaacgcaaaatttaa

SEQ ID NO: 430549 - DNA, 75 bp, synthetic construct
  source 1..75: mol_type = other DNA
aatgttgtgattaatgctacagactccaccatcacagctcaaggtgaaggcacctatgtccggactgcaatggtc

SEQ ID NO: 430550 - DNA, 75 bp, synthetic construct
  source 1..75: mol_type = other DNA
ttgataatcataatcagtgaaatgcaacgcaagcttgccacatggacagcaaccgccccgtcccgacggattaca

SEQ ID NO: 430551 - DNA, 75 bp, synthetic construct
  source 1..75: mol_type = other DNA
ttctgcctttcctgtcgtggccggttgattttgcagacagatgctcagggggcgtggtttgagcatgatttacat

SEQ ID NO: 430552 - DNA, 75 bp, synthetic construct
  source 1..75: mol_type = other DNA
tgcttatccataagcgcgaaaacagtgatacctacgctgtcgcgatcaccaatggcagccaggactatcacgacg

SEQ ID NO: 430553 - DNA, 75 bp, synthetic construct
  source 1..75: mol_type = other DNA
gtagctgaattaagcaaagcaaaggatcacgcatatgggctggtcgacacatacgactggcaacgtcagcgtctc

SEQ ID NO: 430554 - DNA, 75 bp, synthetic construct
  source 1..75: mol_type = other DNA
atgattgaagatggcgtgtacgcagcaacagtagtcgacaggctgttttaccgcgtggaaggtgatgatattcgt

SEQ ID NO: 430555 - DNA, 75 bp, synthetic construct
  source 1..75: mol_type = other DNA
tagcgccaatcattaagacgacgcgagaaacaattaaaatatttcttgatgctggtgaactggtaaaggctagcg

SEQ ID NO: 430556 - DNA, 75 bp, synthetic construct
  source 1..75: mol_type = other DNA
cgcggctgagcgccgattatccggtggcggtgatctccgggcttaatgcctcgctgctgctggaggcgctggaca

SEQ ID NO: 430557 - DNA, 75 bp, synthetic construct
  source 1..75: mol_type = other DNA
cgatgatgacttttctttcacaccaaagaagaaagtagttagtgaaaataagaagcaaaggattaagcctaaaat

SEQ ID NO: 430558 - DNA, 75 bp, synthetic construct
  source 1..75: mol_type = other DNA
ctctgtgattcacatgaatgtgattctcttggtattgaagaggctattaaagaggctgttaaaacatctgactta

SEQ ID NO: 430559 - DNA, 75 bp, synthetic construct
  source 1..75: mol_type = other DNA
aagccattaagagggtagagaagaaaaagagattcgagcttgcaagacaaaagaacaaagtatcgggtttagacc

SEQ ID NO: 430560 - DNA, 75 bp, synthetic construct
  source 1..75: mol_type = other DNA
agcggctgttttagtcattagctcgccagaggttaacttagcaccatcagtcattcagataaaaaacttagttaa

SEQ ID NO: 430561 - DNA, 75 bp, synthetic construct
  source 1..75: mol_type = other DNA
ttttattggctgctatttgtttgacagtggcatgtaaagagcaattgtatacaggattaacagaaaaagaagcta

SEQ ID NO: 430562 - DNA, 75 bp, synthetic construct
  source 1..75: mol_type = other DNA
ctctgtgattcacatgaatgtgattctcttgatattgaagaggctattaaagagactgttaaaacatctgactta

SEQ ID NO: 430563 - DNA, 75 bp, synthetic construct
  source 1..75: mol_type = other DNA
gacttcattctgttcacaagcgaattatccgcgatgtttagctcgctggtggaggccattggcggtgaagcagag

SEQ ID NO: 430564 - DNA, 75 bp, synthetic construct
  source 1..75: mol_type = other DNA
gcaccggcggcgcacagggcgttccggcatggggctgcgagtgcgtggcctgcgccagagcgcgacgctcaccgc

SEQ ID NO: 430565 - DNA, 75 bp, synthetic construct
  source 1..75: mol_type = other DNA
gttgcagcaaaattagctggtacgaaaaaaatagtgcatacggttcacggcttcgcatttccttcaaccgaaaac

SEQ ID NO: 430566 - DNA, 75 bp, synthetic construct
  source 1..75: mol_type = other DNA
tgtctggcggtcaactgaaattaaattcacaacgcagacctataacatcggaaaaaatattcgtaatttcagact

SEQ ID NO: 430567 - DNA, 75 bp, synthetic construct
  source 1..75: mol_type = other DNA
gtaccacctgttgcgtgagtacgtgaatacgctggagaaagaaagccagaaccgcatttatcgtgccattgatta

SEQ ID NO: 430568 - DNA, 75 bp, synthetic construct
  source 1..75: mol_type = other DNA
agtatcgccgccagccatgcagcggcgtagtgaagtttaacgaggcgatcaccctgatcgacgccgggctgcacg

SEQ ID NO: 430569 - DNA, 75 bp, synthetic construct
  source 1..75: mol_type = other DNA
cgcagtatcgccgccagccatgcagcggcgtagtgaagtttaacgacgcaatcaccctgatcgacgccgggctgc

SEQ ID NO: 430570 - DNA, 75 bp, synthetic construct
  source 1..75: mol_type = other DNA
caggccagtcagctggtgcagtatctttccacttttttccgcaaaaacttaaagcggccttcggagtttgttact

SEQ ID NO: 430571 - DNA, 75 bp, synthetic construct
  source 1..75: mol_type = other DNA
caacgaagtgccttaccgttgttctctgcacccgcagtgcaagttaggttcaacgctggttattccattgcgtgg

SEQ ID NO: 430572 - DNA, 75 bp, synthetic construct
  source 1..75: mol_type = other DNA
ggttcgggttgcacatcgacgattcgattgctaatacgcgggcgattggcgcggtgatgggcggcttactcggcg

SEQ ID NO: 430573 - DNA, 75 bp, synthetic construct
  source 1..75: mol_type = other DNA
taatggaatactttgcttcattatgttcatcagtgattatcgtaatgaatgagaatgatgagaaaatagccagaa

SEQ ID NO: 430574 - DNA, 75 bp, synthetic construct
  source 1..75: mol_type = other DNA
ttaacaaaacttcaggttttctttttaacaatgatgatgctaaagatcttgctaagaatataaaatatatttttg

SEQ ID NO: 430575 - DNA, 75 bp, synthetic construct
  source 1..75: mol_type = other DNA
acttcggcttacatatcgatgattccattgccaatacacgcgccatcggtgcagtgatgggggggctattgggtg

SEQ ID NO: 430576 - DNA, 75 bp, synthetic construct
  source 1..75: mol_type = other DNA
acgggctgcgcatccgtctccagcagtgggcgcagggcggggagtttggctgggtgtttgataatgacgtggaca

SEQ ID NO: 430577 - DNA, 75 bp, synthetic construct
  source 1..75: mol_type = other DNA
acagaggggctgaattatgtatcagaatgcttggtggggaatattacaccgtaaaaagcggtgagccgacaggat

SEQ ID NO: 430578 - DNA, 75 bp, synthetic construct
  source 1..75: mol_type = other DNA
tgacctgggcattattccggcattgtcaaccatgtcattgccagcggcatattttgcccagcttccggcggtttt

SEQ ID NO: 430579 - DNA, 75 bp, synthetic construct
  source 1..75: mol_type = other DNA
ggttactcaattgcaggaactggaaaaggcaaaaaatgatattgtgtccggtgatatatcctttggttactacca

SEQ ID NO: 430580 - DNA, 75 bp, synthetic construct
  source 1..75: mol_type = other DNA
ggctaaagctggttggacctccgttcttggtgacaacctcacccatgaataccagggttttctgctaatacagca

SEQ ID NO: 430581 - DNA, 75 bp, synthetic construct
  source 1..75: mol_type = other DNA
ctgttgcttaccgcgcttggcaccattgaacatcgcgtcaaggggctggagttgggggcggatgactacctggtg

SEQ ID NO: 430582 - DNA, 75 bp, synthetic construct
  source 1..75: mol_type = other DNA
tggtcgatctcgtcagccgcaaagtcacccgcagcggcacgcgcatcactttgaccagtaaagagtttactctgc

SEQ ID NO: 430583 - DNA, 75 bp, synthetic construct
  source 1..75: mol_type = other DNA
cttacttcccgtcgaatttctggtgatgaaatccctcaccagaaatgaaccaatgcggttcaatctgattgccgt

SEQ ID NO: 430584 - DNA, 75 bp, synthetic construct
  source 1..75: mol_type = other DNA
catcatggtgtattccccgtcgctggaaagcctggttgctgatacgaatgaaatcagtaacgcgctgaacaacat

SEQ ID NO: 430585 - DNA, 75 bp, synthetic construct
  source 1..75: mol_type = other DNA
ggtctgctatcgcccgtttgtcagccttgaaaaagcagaacgcaaacggatgaaagacagccagaaactaaagga

SEQ ID NO: 430586 - DNA, 75 bp, synthetic construct
  source 1..75: mol_type = other DNA
tctctggcgctcttgataaatttacctgtaaacttcttggtatgtatgaggagaacggaaaggtattttcttctc

SEQ ID NO: 430587 - DNA, 75 bp, synthetic construct
  source 1..75: mol_type = other DNA
accacatttttaacctttactttcttaagctgaaaatgctcggaaactcagtgtgtaatcgtttttttggcgcac

SEQ ID NO: 430588 - DNA, 75 bp, synthetic construct
  source 1..75: mol_type = other DNA
atacaaaaatattattcacctttcagcggaaacatatactctgtaattatcaggtcagggatatctgtaattaca

SEQ ID NO: 430589 - DNA, 75 bp, synthetic construct
  source 1..75: mol_type = other DNA
cagataatggtggggcgtgcagggcagctgcaaggctggccgggttctcgagtgaccggtatttccacccctgta

SEQ ID NO: 430590 - DNA, 75 bp, synthetic construct
  source 1..75: mol_type = other DNA
atgttgaatgtagctattgaaaaccagaacgggtggaattatagtgtacctgcacctcataaaacgggtgccggg

SEQ ID NO: 430591 - DNA, 75 bp, synthetic construct
  source 1..75: mol_type = other DNA
aatgtaccagatcaccaaaaacggcttcgtttttttggtgatggggttcaccggcaaaaaagccgccgcgttcaa

SEQ ID NO: 430592 - DNA, 75 bp, synthetic construct
  source 1..75: mol_type = other DNA
aagtggagcagaacgacaaactggaatggctgatccgcaaagacggctgtatgcactgttccgatccaggctgtc

SEQ ID NO: 430593 - DNA, 75 bp, synthetic construct
  source 1..75: mol_type = other DNA
cgtctcaccacccttatggtcgtggaaaaccttggtggtgagttatttaaactgactatcgaggctgtcattatg

SEQ ID NO: 430594 - DNA, 75 bp, synthetic construct
  source 1..75: mol_type = other DNA
gataccttccagttttatctggagaaacaaggctggactcttgtaaaccggagcgcaattaaaaatatgactgtg

SEQ ID NO: 430595 - DNA, 75 bp, synthetic construct
  source 1..75: mol_type = other DNA
gattgaaaatttaagtctggcgatctgcacacctactccctttacgctcaccgccgatagtgtgcaatggatcga

SEQ ID NO: 430596 - DNA, 75 bp, synthetic construct
  source 1..75: mol_type = other DNA
gacgatatcgccctgctgttgagcgatgaaggcgaagtcggctgcgatatcgaagtgattcgcccgcgcgccaac

SEQ ID NO: 430597 - DNA, 75 bp, synthetic construct
  source 1..75: mol_type = other DNA
tcccgatcttcaccctggaagggcaggaagggcgtctgtttggcccgctggcgttcaccaaaacctatgcgatgg

SEQ ID NO: 430598 - DNA, 75 bp, synthetic construct
  source 1..75: mol_type = other DNA
gctactatccctaccctttctcaccctgacgtaaccatcgaaaatggtcgcgctgtcactacgtctgttgcggtt

SEQ ID NO: 430599 - DNA, 75 bp, synthetic construct
  source 1..75: mol_type = other DNA
gttcagcgttatgcgcctgaaatggaaaaacggctgcgctggtactggtactggcgtaacccttccgatctttgc

SEQ ID NO: 430600 - DNA, 75 bp, synthetic construct
  source 1..75: mol_type = other DNA
actgactatcgaggctgccatcatggctactatccataccctttctcaccctgacgtaaccatcgaaaatggacg

SEQ ID NO: 430601 - DNA, 75 bp, synthetic construct
  source 1..75: mol_type = other DNA
agggatgcggtagagcggcagatgagtcaccaggagcgtagctctgtgcgagccgcttacatccataaggcggaa

SEQ ID NO: 430602 - DNA, 75 bp, synthetic construct
  source 1..75: mol_type = other DNA
tcaccccgcatatgcactgggatcgggagtggtatttcaccaccgaagagtcacgcattctgctggtcaataata

SEQ ID NO: 430603 - DNA, 75 bp, synthetic construct
  source 1..75: mol_type = other DNA
cggcagctatgtgtttgtgcagcgttgggagcacaacctgaagcagctcaatcggatgagcgttcacgatcaaga

SEQ ID NO: 430604 - DNA, 75 bp, synthetic construct
  source 1..75: mol_type = other DNA
ctggcctaatcgatcggcaaatcgttcattacggtaattacgatccctttatggagtttgatattcagatcaacc

SEQ ID NO: 430605 - DNA, 75 bp, synthetic construct
  source 1..75: mol_type = other DNA
ataaccaggccgatgatcaccgtattcgtgtattgattcccacgccttttaacacagatgttgttcttgcggata

SEQ ID NO: 430606 - DNA, 75 bp, synthetic construct
  source 1..75: mol_type = other DNA
ttttgattatcaccacggcttgctggagaagatgtggaaagaaattttaaaaaaccacgcccatgacagcatcgg

SEQ ID NO: 430607 - DNA, 75 bp, synthetic construct
  source 1..75: mol_type = other DNA
gctagaaaatttaagccttgcgatctgcacccccaccccctttacgctcaccgccgagagtgtgcaatggatcga

SEQ ID NO: 430608 - DNA, 75 bp, synthetic construct
  source 1..75: mol_type = other DNA
ttctgctgctggcctctatttcgtggctggtcacgctcacccagcctttattcagcatccgtgatttcaccttca

SEQ ID NO: 430609 - DNA, 75 bp, synthetic construct
  source 1..75: mol_type = other DNA
gctttgatgggtggcaggaagtttatcagcatgagtctggcacgcttggctgcacgatgaaatttggtgtttata

SEQ ID NO: 430610 - DNA, 75 bp, synthetic construct
  source 1..75: mol_type = other DNA
tattctgccacaggcgttgaagctggtaattcctgggctggtaaataccatcatcgcactcttcaaagataccag

SEQ ID NO: 430611 - DNA, 75 bp, synthetic construct
  source 1..75: mol_type = other DNA
atgattgaatggattattcgtcgctcggtggcgaaccgttttctggtgctgatgggcgcgttgtttctgagcatc

SEQ ID NO: 430612 - DNA, 75 bp, synthetic construct
  source 1..75: mol_type = other DNA
atgaagctgttagcgttacatttgatattgagaaggaaactttatttctgacattgttgctttccagagagttaa

SEQ ID NO: 430613 - DNA, 75 bp, synthetic construct
  source 1..75: mol_type = other DNA
aatttaacgctaagttaaatgaaaacacatggtggtcacgatttgtaaatagtcagtttgtgcagatgcacgcta

SEQ ID NO: 430614 - DNA, 75 bp, synthetic construct
  source 1..75: mol_type = other DNA
aactggcgtagtaaaggcgtcgatgtggtggcctatgctaaccaggatttggtctattccgatctggatgcaggc

SEQ ID NO: 430615 - DNA, 75 bp, synthetic construct
  source 1..75: mol_type = other DNA
tgatgattcccagcaatgttatgcacaggtaaaagttaaagatatttggcgagtaatagagtctctggatatgtt

SEQ ID NO: 430616 - DNA, 75 bp, synthetic construct
  source 1..75: mol_type = other DNA
catgcagctcgatgttgcggccacgcgccagtgctttatggcgcaactgggccagcctctgaccacctggaaaga

SEQ ID NO: 430617 - DNA, 75 bp, synthetic construct
  source 1..75: mol_type = other DNA
cctgattcttcataccttatggggactggtcgactgggggccatttcataactatgcagcaccacgatacaacct

SEQ ID NO: 430618 - DNA, 75 bp, synthetic construct
  source 1..75: mol_type = other DNA
ctcactgaaagcgaaaaaaatcgacgccattatttcgtcgctttccattaccgataaacgtcagcaggagattgc

SEQ ID NO: 430619 - DNA, 75 bp, synthetic construct
  source 1..75: mol_type = other DNA
ggagagctgcgtcaggacggtacctacgacaagatggcgaaaaagtattttgactttaatgtctacggtgactga

SEQ ID NO: 430620 - DNA, 75 bp, synthetic construct
  source 1..75: mol_type = other DNA
gaaaaccatttattgagacgacgcgagaaaacattaaaatcatgcttgataatggtgatttggtgaaggttagcg

SEQ ID NO: 430621 - DNA, 75 bp, synthetic construct
  source 1..75: mol_type = other DNA
caagcaacctgctggtaaagacttcgcctttgctggctcatcagtgaaagacaaaaaatacttcggtgacggcac

SEQ ID NO: 430622 - DNA, 75 bp, synthetic construct
  source 1..75: mol_type = other DNA
tgtatgccgcggattctcgtttgattgcagctaaaggttcaccgatccaaccaacgctggattcgctgaaaggta

SEQ ID NO: 430623 - DNA, 75 bp, synthetic construct
  source 1..75: mol_type = other DNA
atgaagaagtcgattctcgctctgtctttgttagtcggtctctccacagcggcttccagctatgcggcgctaccg

SEQ ID NO: 430624 - DNA, 75 bp, synthetic construct
  source 1..75: mol_type = other DNA
ttcttactgccagctcagttgctccggtattttttaccttagcttttctttcatgtatatcaaaacactataaat

SEQ ID NO: 430625 - DNA, 75 bp, synthetic construct
  source 1..75: mol_type = other DNA
gattaatctgcgttatccacaaagctggcgcgacagcccgcaggcgctgcgacagctaccgattctgacgccgat

SEQ ID NO: 430626 - DNA, 75 bp, synthetic construct
  source 1..75: mol_type = other DNA
tgggccggaaatgcgccggggtattgcggagctgaacggcgaaggcgaagtggcggggggggtcgttatcctgcg

SEQ ID NO: 430627 - DNA, 75 bp, synthetic construct
  source 1..75: mol_type = other DNA
accgatccgtactgggcgcgctcgcgggtgctggagtacctcaaccaggtgcagggtaagctgcctgcgggtgtc

SEQ ID NO: 430628 - DNA, 75 bp, synthetic construct
  source 1..75: mol_type = other DNA
tcgccgccgaatttggcgtggtgatgctgatgtatttacgtcacgccatagaggccgagccgtcgttgaataatc

SEQ ID NO: 430629 - DNA, 75 bp, synthetic construct
  source 1..75: mol_type = other DNA
aggcgacctgttgtatatgccatcgacgctgccgggatttccgcagcagaggcggcgagtatgctgcaaaaaacc

SEQ ID NO: 430630 - DNA, 75 bp, synthetic construct
  source 1..75: mol_type = other DNA
cgacggtatttctaccaataccaacgtagactggccccctgaatctccagacaaccaatatcacttaaataagtg

SEQ ID NO: 430631 - DNA, 75 bp, synthetic construct
  source 1..75: mol_type = other DNA
ctgccgcttttacagggcgcatcggatgctgccggttttatggcgcggatggataccgttctgcagatgtacgga

SEQ ID NO: 430632 - DNA, 75 bp, synthetic construct
  source 1..75: mol_type = other DNA
ctaccgcttctccagcggacaaggaaataaccaattacttcttaacctatttatttcctttaatcagtggtccag

SEQ ID NO: 430633 - DNA, 75 bp, synthetic construct
  source 1..75: mol_type = other DNA
cacgatctggccgatttacgctcattgcaggactggtttctcaaatatgagctgaaaaccatccctgacgttgcg

SEQ ID NO: 430634 - DNA, 75 bp, synthetic construct
  source 1..75: mol_type = other DNA
ggacaaaatcatcgaagagctggataacaccgtgcggctgccggggctggcgaatctgtgggtgccgccaatccg

SEQ ID NO: 430635 - DNA, 75 bp, synthetic construct
  source 1..75: mol_type = other DNA
tttgtggctcgctgttgcttcagtgttttctggtgcgggaatgattatgttctactggttgctccatgcatcaga

SEQ ID NO: 430636 - DNA, 75 bp, synthetic construct
  source 1..75: mol_type = other DNA
ttccatcaattgtcttattcctgaagcggatgaacgggcgaaaattaatcagattatttttgaagaactgtgtct

SEQ ID NO: 430637 - DNA, 75 bp, synthetic construct
  source 1..75: mol_type = other DNA
aaattacccctaacacaatggcctacgttagctatgccgattcgctggagcagggcggtaccgcaccgacggatg

SEQ ID NO: 430638 - DNA, 75 bp, synthetic construct
  source 1..75: mol_type = other DNA
atgtatcacccggatgcgatagatgagcagggcgatggcaaaatccgcaccggcgggccgcgataccgctccagc

SEQ ID NO: 430639 - DNA, 75 bp, synthetic construct
  source 1..75: mol_type = other DNA
tccagactcccgaagatatttgtgtacagttaaaaaaaatgacacatcctgtcacaataagaacaacagatattg

SEQ ID NO: 430640 - DNA, 75 bp, synthetic construct
  source 1..75: mol_type = other DNA
gtctggtgcctgaagcggatgagcgggcgaaaattaatcagattatttttgaagagctgtgtctggggcaattta

SEQ ID NO: 430641 - DNA, 75 bp, synthetic construct
  source 1..75: mol_type = other DNA
acccgtgttggaatgacgcgcgtggcgctgctgggaacgcgctacaccatggaacaggatttttatcgtggacgg

SEQ ID NO: 430642 - DNA, 75 bp, synthetic construct
  source 1..75: mol_type = other DNA
agttaaagaactaaaaaatcacattccaatagaagaatacagaaatgaatatcgtaaactgcgttccgatgatat

SEQ ID NO: 430643 - DNA, 75 bp, synthetic construct
  source 1..75: mol_type = other DNA
atcgtaaactacgttccgatgatattccattggttaaagctcagaaatttaagtctgcccataccgaacttcgca

SEQ ID NO: 430644 - DNA, 75 bp, synthetic construct
  source 1..75: mol_type = other DNA
gtcgataaacgcggcgtaccggttaacactattctggtgtctgcgctggttacggcattgtgcgtactgattaac

SEQ ID NO: 430645 - DNA, 75 bp, synthetic construct
  source 1..75: mol_type = other DNA
aaatcggcacataccgaacttctgagattagacaggaagaaaaagtcactactcgaaaaatttattgaagaactc

SEQ ID NO: 430646 - DNA, 75 bp, synthetic construct
  source 1..75: mol_type = other DNA
atggtgatattggtccacgcgagcttgggatactctatttctctgatgctttcggttctcctggtagctttgttc

SEQ ID NO: 430647 - DNA, 75 bp, synthetic construct
  source 1..75: mol_type = other DNA
gagttgtgggatcgtccaatgagtcgcagccttcgcgtttatggtggtataacgaaagcagcaaatcagcaagtc

SEQ ID NO: 430648 - DNA, 75 bp, synthetic construct
  source 1..75: mol_type = other DNA
tgatatagcggaaaatctgataccccagttatacagagactacccggatatcgtatgggctggtcgttctaatac

SEQ ID NO: 430649 - DNA, 75 bp, synthetic construct
  source 1..75: mol_type = other DNA
aagccgaaaccctggcgaaactgtttatcgacaacttcgataaatacactgacaccccagcgggtgctgcgctgg

SEQ ID NO: 430650 - DNA, 75 bp, synthetic construct
  source 1..75: mol_type = other DNA
gcgggtcacgcaacgaaagttatcttcctgaccgcagacgcctttggtgtgctgccgccggtttctcgtctgact

SEQ ID NO: 430651 - DNA, 75 bp, synthetic construct
  source 1..75: mol_type = other DNA
tgaatgccataaagagacaggagatcattgacgccgaccatcagcgcctcagaaacctcatctggccggaggatg

SEQ ID NO: 430652 - DNA, 75 bp, synthetic construct
  source 1..75: mol_type = other DNA
aaaagataagtatatcgtccgtgacgataccactcgcgataccttctggtgggcagacaaaggcaaaggtaagaa

SEQ ID NO: 430653 - DNA, 75 bp, synthetic construct
  source 1..75: mol_type = other DNA
gtcgaaagaagcggaacctgaaatctacaacgctatccgtcgtgatgcgctgctggaaaacgtcaccgtgcgtga

SEQ ID NO: 430654 - DNA, 75 bp, synthetic construct
  source 1..75: mol_type = other DNA
ggataatgcagaaaccttcactctgccgatgtttaaccctggcgatcccaaccgaactgccgggcgtagacacga

SEQ ID NO: 430655 - DNA, 75 bp, synthetic construct
  source 1..75: mol_type = other DNA
tgcaaccgactttacagcaggaagtaattctggcacgtatggaacaaatccttgccagtcgggctttaaccgatg

SEQ ID NO: 430656 - DNA, 75 bp, synthetic construct
  source 1..75: mol_type = other DNA
ctaagtctgggggatttggacagcgccacggcactgttcaaactggcggttgccaacaacgttcataactttgtt

SEQ ID NO: 430657 - DNA, 75 bp, synthetic construct
  source 1..75: mol_type = other DNA
aggtacaaccgtctcacatgttcagcgattgcatcattcgttaatcgcagctggtttggaaagtaacctcactgt

SEQ ID NO: 430658 - DNA, 75 bp, synthetic construct
  source 1..75: mol_type = other DNA
gggcagcgtgcctgcaaaatccgcacggtattctctgctgcgcccgtggcggtcagcgctcacatattgtgcaac

SEQ ID NO: 430659 - DNA, 75 bp, synthetic construct
  source 1..75: mol_type = other DNA
caggagtattgcgaatacctgcatcacggactttcggcgattaagcgtcggctggggctacagcgctataacgaa

SEQ ID NO: 430660 - DNA, 75 bp, synthetic construct
  source 1..75: mol_type = other DNA
tctggaagggctggcgcgtcatcgcggttcggcgtttggtcgcaccttacaaccacaacttagccaggcgagttt

SEQ ID NO: 430661 - DNA, 75 bp, synthetic construct
  source 1..75: mol_type = other DNA
gcgatttcggtttacctgatcccggtatggctggttgtgttaggtatcagctatctgtttaaagagaaaacggca

SEQ ID NO: 430662 - DNA, 75 bp, synthetic construct
  source 1..75: mol_type = other DNA
gaatctgcaaaatatcaccactatggcagagcaacatcagggaatcattcaggcgactgttaataacgaactgta

SEQ ID NO: 430663 - DNA, 75 bp, synthetic construct
  source 1..75: mol_type = other DNA
atgaaatacagttagcgaacatgcttgcggacgatagctggaaaagtgagacggtgctgttctccgtgcaggatt

SEQ ID NO: 430664 - DNA, 75 bp, synthetic construct
  source 1..75: mol_type = other DNA
cagaggaagaagagcgtttactggatgatgtcagcgtgatggtggacgtaacttccacagaaattcggaatattg

SEQ ID NO: 430665 - DNA, 75 bp, synthetic construct
  source 1..75: mol_type = other DNA
gtgatactgaaaagtcaatttggtgttcgccgcaagaaattatggctgctgatggtatgcctggatctgttgctg

SEQ ID NO: 430666 - DNA, 75 bp, synthetic construct
  source 1..75: mol_type = other DNA
cgcggcgaacgataccaacacctcttacgccagcagctataccacatgggatttgggaacgcgttacaccacgaa

SEQ ID NO: 430667 - DNA, 75 bp, synthetic construct
  source 1..75: mol_type = other DNA
ataatactgaaaagtcaatttggtgttcgccgcaagaaattatggctgctgatggtatgcctggatctgttgctg

SEQ ID NO: 430668 - DNA, 75 bp, synthetic construct
  source 1..75: mol_type = other DNA
tcagcaattttcatcctgaccgactggctgaccttatcgccttcaacaaaattgcccctgcggtgaaccagattg

SEQ ID NO: 430669 - DNA, 75 bp, synthetic construct
  source 1..75: mol_type = other DNA
ataaaaaacaagtcaaagcagataaaaaccctcttttttctggaaatgtagatgcacagaaaattagagatgtag

SEQ ID NO: 430670 - DNA, 75 bp, synthetic construct
  source 1..75: mol_type = other DNA
tgataagatatgtgaaagcttaacaaaacttgccttaaaaaaattagatcatcatatggttagtgacatggattt

SEQ ID NO: 430671 - DNA, 75 bp, synthetic construct
  source 1..75: mol_type = other DNA
taacgcctggctgaaagataaaagttaccagattgtcgacattacccacgctatccaaaagcgcgtcgatacctg

SEQ ID NO: 430672 - DNA, 75 bp, synthetic construct
  source 1..75: mol_type = other DNA
cgaactctttgtaacgaccaaactttggctacaggataccaattacgaaggcgctaaagcacagttcgaacgatc

SEQ ID NO: 430673 - DNA, 75 bp, synthetic construct
  source 1..75: mol_type = other DNA
cgtggtattcagccggaagcctgggcaccgtttgctgagggtaaaaatggcctgttccagcatcccgtgttaacg

SEQ ID NO: 430674 - DNA, 75 bp, synthetic construct
  source 1..75: mol_type = other DNA
ctcttgtatttaatgaacagaaactttacagctttataggattttcacagcaaagtattcagacgttgatgatgc

SEQ ID NO: 430675 - DNA, 75 bp, synthetic construct
  source 1..75: mol_type = other DNA
agaaatagacctttttgaagccacagaatattatcgttcgccacgaggctgtgcacctaatggggtaaatcgttc

SEQ ID NO: 430676 - DNA, 75 bp, synthetic construct
  source 1..75: mol_type = other DNA
ttatcaggcgaaacaagctttagaaattttgtaaataaaacatgttctcatttgattattacccttgctaattca

SEQ ID NO: 430677 - DNA, 75 bp, synthetic construct
  source 1..75: mol_type = other DNA
aattgccaagtgaattaaatattcagacagatatcagtaatatgacacacgatgaaatggcagctaaatggatgg

SEQ ID NO: 430678 - DNA, 75 bp, synthetic construct
  source 1..75: mol_type = other DNA
tacggcattgtgcgtactgattaactaccttgcaccggaatccgcattcggactgttaatggcgctggtggtatc

SEQ ID NO: 430679 - DNA, 75 bp, synthetic construct
  source 1..75: mol_type = other DNA
ggtgccgccctggcaaaagctggctttatcgtcattgcttttgatgccagttttcagggaagcagcggtggggaa

SEQ ID NO: 430680 - DNA, 75 bp, synthetic construct
  source 1..75: mol_type = other DNA
gaatattatcgttcgccacgaggctgtgcacctaatggggtaaatcgttcgctattctcacatcagactgttgcc

SEQ ID NO: 430681 - DNA, 75 bp, synthetic construct
  source 1..75: mol_type = other DNA
ccatgacacacgatgaaatggtagaaaaaatgttgtctaaccccgcagtaaaagcagaatacgacgccatcgccg

SEQ ID NO: 430682 - DNA, 75 bp, synthetic construct
  source 1..75: mol_type = other DNA
tattggacatccgttatggaatgcttacgagagccgctgtatcagttgtggtcgttgcaccaccggctgccccac

SEQ ID NO: 430683 - DNA, 75 bp, synthetic construct
  source 1..75: mol_type = other DNA
aacgcgcgcgggcgcacggtgggttttccgtggctgcgtaccgcactgatgtccgctgtctgcgtgctggtgata

SEQ ID NO: 430684 - DNA, 75 bp, synthetic construct
  source 1..75: mol_type = other DNA
accctccctgaaaaaatctgtcagtccccccaaagagttcgcgacattattatcaatcatccgctctgggatgag

SEQ ID NO: 430685 - DNA, 75 bp, synthetic construct
  source 1..75: mol_type = other DNA
atggcggttaaaattacgcctgaagagttcagtctgttaatccggcgactgagcacaaaatggcgtgtactggcg

SEQ ID NO: 430686 - DNA, 75 bp, synthetic construct
  source 1..75: mol_type = other DNA
cagtacattaaattctcacgtattatcaataaaatgactgccgctgtccggcaggcactctccggggaggcataa

SEQ ID NO: 430687 - DNA, 75 bp, synthetic construct
  source 1..75: mol_type = other DNA
ctcggcggtgatccactctattctggttattcttgccctgctggtactggcaccgctgctctcctggctgccgct

SEQ ID NO: 430688 - DNA, 75 bp, synthetic construct
  source 1..75: mol_type = other DNA
aaacaggggctaagctcgccattccgctgacgctaacgattgacgcgctcaatatctcattggccgatacactac

SEQ ID NO: 430689 - DNA, 75 bp, synthetic construct
  source 1..75: mol_type = other DNA
aatactggggcagctttgccggttttgcctccggctggaactactgggttctgtacgttttagttgccatggcag

SEQ ID NO: 430690 - DNA, 75 bp, synthetic construct
  source 1..75: mol_type = other DNA
catcgataacggtactgaagggtctgcggtacgtgttggtctgggtactcagttcagcttcaccaagaacttcag

SEQ ID NO: 430691 - DNA, 75 bp, synthetic construct
  source 1..75: mol_type = other DNA
tcaggatgttaacggtatcatggtcggtgttgataccaaaattgacggtaacaacgctaagtggatcgtcggtgc

SEQ ID NO: 430692 - DNA, 75 bp, synthetic construct
  source 1..75: mol_type = other DNA
catgctgctgtgcatgtcgctgaccgtgctgtttgatatggttattgccatcagcgtggggatcgtgctggcatc

SEQ ID NO: 430693 - DNA, 75 bp, synthetic construct
  source 1..75: mol_type = other DNA
tctttggcgcttcatatctccaccgccgggtccgctgcaaagttattcgcccatgactcgtgttggcgcaaaggc

SEQ ID NO: 430694 - DNA, 75 bp, synthetic construct
  source 1..75: mol_type = other DNA
ggttgcggaagccgaagcgaagcagggcgaggcgaaagatgcgctgacgaaagcccaggcagacaatgcgatcaa

SEQ ID NO: 430695 - DNA, 75 bp, synthetic construct
  source 1..75: mol_type = other DNA
tcggcaccggtattaaaagcagaggatgatggttctgtttctgttgagctgccgggtgatgccaataaaggcgat

SEQ ID NO: 430696 - DNA, 75 bp, synthetic construct
  source 1..75: mol_type = other DNA
cggattcctgccgcacggcttcaccgggctggtgatgatgatggcgattattatgttctcgtttggtggtctgga

SEQ ID NO: 430697 - DNA, 75 bp, synthetic construct
  source 1..75: mol_type = other DNA
ttagcaacctgtgggatcagggtggtttcctgccgcacggcttcaccgggctggtgatgatgatggcgattatca

SEQ ID NO: 430698 - DNA, 75 bp, synthetic construct
  source 1..75: mol_type = other DNA
tacggcattgtgcgtgctgattaactaccttgcaccggaatccgcattcggactgttaatggcactggtggtatc

SEQ ID NO: 430699 - DNA, 75 bp, synthetic construct
  source 1..75: mol_type = other DNA
tgggataccaccaaaacttctctgattgatactctgagcatcaacagtggttcaactgttaatgttgctgattca

SEQ ID NO: 430700 - DNA, 75 bp, synthetic construct
  source 1..75: mol_type = other DNA
ataacgctattccttcggtgaaagaagtggcgaactttgtcaccaaatccaaccttgaagatggcgtggcgtttg

SEQ ID NO: 430701 - DNA, 75 bp, synthetic construct
  source 1..75: mol_type = other DNA
ttcggtgaaagaagcagcgaattttgtcaccaaatccaaccttgaagatggcgtcgcgtttgctattgagaagta

SEQ ID NO: 430702 - DNA, 75 bp, synthetic construct
  source 1..75: mol_type = other DNA
gccgactcgttgaatttcccgcaggatgcgctgattctgggtggtgatcatctgcgaccaaaatcgctggtcgat

SEQ ID NO: 430703 - DNA, 75 bp, synthetic construct
  source 1..75: mol_type = other DNA
catggttcgctgtgcgaaatacggatgagcttctggggagcggagtttgcggcgttcttacagtgtaagcagtaa

SEQ ID NO: 430704 - DNA, 75 bp, synthetic construct
  source 1..75: mol_type = other DNA
cacaactacctgaaagaactgcatatggaacagccgggcgactactgcattacttacaatggcgcgctggtgcag

SEQ ID NO: 430705 - DNA, 75 bp, synthetic construct
  source 1..75: mol_type = other DNA
gacgggtcgcccttatgcaggcgttcacaactacctgaaagagctgcatatggaacagccgggcgactactgcat

SEQ ID NO: 430706 - DNA, 75 bp, synthetic construct
  source 1..75: mol_type = other DNA
agccgttattgcacatcctgatgctgataacgccatgcagactactgcaacattcgataactccacgctgatggg

SEQ ID NO: 430707 - DNA, 75 bp, synthetic construct
  source 1..75: mol_type = other DNA
gcaatgaactctgatggtcacctgactattaacggtaacggcgataacgacaacactgcttctatcgaagctggt

SEQ ID NO: 430708 - DNA, 75 bp, synthetic construct
  source 1..75: mol_type = other DNA
atctgtccatcactaataactctcatgtagcaggtattacgctgactcagggttatgagtgggaagatattgacg

SEQ ID NO: 430709 - DNA, 75 bp, synthetic construct
  source 1..75: mol_type = other DNA
tggaccagccactgtatgtacagttttaccgctacgtcagcgacctgtttcatggtgacctgggaacatccattc

SEQ ID NO: 430710 - DNA, 75 bp, synthetic construct
  source 1..75: mol_type = other DNA
ataccggctttttgtccagcgggtttactgagacaaacagcgaggggcagcggttacaggcatatgtagttcgaa

SEQ ID NO: 430711 - DNA, 75 bp, synthetic construct
  source 1..75: mol_type = other DNA
attagcgtgaatgccagcaataaccctgcatatggaaaaacagcctttatcagctttgctgtacctgcaggtact

SEQ ID NO: 430712 - DNA, 75 bp, synthetic construct
  source 1..75: mol_type = other DNA
ctgatactaacaacgtcgtgacaccgggttcagtttttgctcgaggtgtaatgactatcaaagcaagtgcacctg

SEQ ID NO: 430713 - DNA, 75 bp, synthetic construct
  source 1..75: mol_type = other DNA
tatccggcctcaagaggtctgcgggctgaacagatgagggaactgctgaacggccactacataatccacaggaaa

SEQ ID NO: 430714 - DNA, 75 bp, synthetic construct
  source 1..75: mol_type = other DNA
cctggacagactggtacataactcacaccgggtggtccttcagggagagtcactgaggaaaaatcccccggtagt

SEQ ID NO: 430715 - DNA, 75 bp, synthetic construct
  source 1..75: mol_type = other DNA
ggggaaaactgtcgtgtggcccggttgagaaaaaatgctggcctgaaaaaatatcaggcaactctggaagggctg

SEQ ID NO: 430716 - DNA, 75 bp, synthetic construct
  source 1..75: mol_type = other DNA
accgatagtgctgattggcggttgtaccggcagcggtaaaacgctgttagtgcagcaacagccgaacggtgttga

SEQ ID NO: 430717 - DNA, 75 bp, synthetic construct
  source 1..75: mol_type = other DNA
gcataaactggtggcgggtgaaattcgtcagcagcgcatggacgcctggcgggcagcgtgcctgcaaaatccgca

SEQ ID NO: 430718 - DNA, 75 bp, synthetic construct
  source 1..75: mol_type = other DNA
atgcagatcggatagcagaagagatcgaaacggcagaacacattaagaagttacgtgacatgcgcaggaaagaga

SEQ ID NO: 430719 - DNA, 75 bp, synthetic construct
  source 1..75: mol_type = other DNA
tatgcagaaaaaagagaacatacttggtttgatttttttaggaatttggctgtattgaagggggggagtttgttt

SEQ ID NO: 430720 - DNA, 75 bp, synthetic construct
  source 1..75: mol_type = other DNA
aaaccctattctttttcagtggtttgaagcaaggccagagcgatacgaaaaaggagaagtaccaatattgaatac

SEQ ID NO: 430721 - DNA, 75 bp, synthetic construct
  source 1..75: mol_type = other DNA
gaagaaagcaggtgaaggggcgaaagttatcgaattgcagggcatcgccggtacatccgctgctcgcgaacgtgg

SEQ ID NO: 430722 - DNA, 75 bp, synthetic construct
  source 1..75: mol_type = other DNA
gaacaatattttgaaataatgggaaagcctactactgatactccatgggcaactctagcagaaaactatcataaa

SEQ ID NO: 430723 - DNA, 75 bp, synthetic construct
  source 1..75: mol_type = other DNA
ataatacaaagaatcacggtatttcattcggggaggggtgtatctatcttgatatggatatgatacttacaggta

SEQ ID NO: 430724 - DNA, 75 bp, synthetic construct
  source 1..75: mol_type = other DNA
atgaacgatggaacggactatcgcgcgatactcatcgccgatacacctattatcgatgtccgcgcgcccgttgaa

SEQ ID NO: 430725 - DNA, 75 bp, synthetic construct
  source 1..75: mol_type = other DNA
gacgcaaggcaacagtgtcagcgtggatgtgcagaacgcacagcttgacggaacacaggctgccagagacatcct

SEQ ID NO: 430726 - DNA, 75 bp, synthetic construct
  source 1..75: mol_type = other DNA
cacgattcgccagaacagtgtcaccaacagtggcacgctcaccgggatagccgcgctgacgcttgccgcccgtat

SEQ ID NO: 430727 - DNA, 75 bp, synthetic construct
  source 1..75: mol_type = other DNA
tccgactgaaaagggagccacccggaaatttctgactggcacaacacgcgtcgatgttggtgcaacagggggggg

SEQ ID NO: 430728 - DNA, 75 bp, synthetic construct
  source 1..75: mol_type = other DNA
agtaccagtgctctgactaaaacaatttctctgggggaagcgtcagcagcagctttagcaaatggtggtcagtca

SEQ ID NO: 430729 - DNA, 75 bp, synthetic construct
  source 1..75: mol_type = other DNA
atgcccgcgagggcgatatcatactgagcagtgccggaaaactggtcctgaagaacagccttgccggcggcaata

SEQ ID NO: 430730 - DNA, 75 bp, synthetic construct
  source 1..75: mol_type = other DNA
gcggcccgcgatatcgtgactgtcgccagtgacacgctgacaacacagggacagataaccgccgggcagaatctc

SEQ ID NO: 430731 - DNA, 75 bp, synthetic construct
  source 1..75: mol_type = other DNA
gaaggcgagcacattcgccagcgcgcccactatgtcgatattatttttgggccgcaaacgctgcaccgtctgccg

SEQ ID NO: 430732 - DNA, 75 bp, synthetic construct
  source 1..75: mol_type = other DNA
tttgggccgcaaacgctgcaccgtctgccggagatgatcaactccgtgcgcggcgaccgcagcccggttgtagat

SEQ ID NO: 430733 - DNA, 75 bp, synthetic construct
  source 1..75: mol_type = other DNA
caggaatattgcgaatacctgcatcacggactttcggctattaagcgtcggctggggttacagcgctataacgaa

SEQ ID NO: 430734 - DNA, 75 bp, synthetic construct
  source 1..75: mol_type = other DNA
gttgaccagtaccggcgatatcatgagccagggtgacaccacgctgaacgcagccaccacggacaaccggggcag

SEQ ID NO: 430735 - DNA, 75 bp, synthetic construct
  source 1..75: mol_type = other DNA
ggcagaacatgtatcgccagcatgttccgctttaatcatgactttgaacctgtgaataaagctgatgcagatcgg

SEQ ID NO: 430736 - DNA, 75 bp, synthetic construct
  source 1..75: mol_type = other DNA
atggcctcaaagcagcaaatttcaacatcgtccaactggggtgtaaaaatgttcagaatcatttttcctaacacc

SEQ ID NO: 430737 - DNA, 75 bp, synthetic construct
  source 1..75: mol_type = other DNA
atgaagcgtgattatattcctgatgccggtgatattgtatggatggattttaatccgcaagccgggcatgaacaa

SEQ ID NO: 430738 - DNA, 75 bp, synthetic construct
  source 1..75: mol_type = other DNA
caaggaaagtatttctgcaccttgctgagttattttatgtaatgagaataaatacgctgaaggaaacgcgtcctg

SEQ ID NO: 430739 - DNA, 75 bp, synthetic construct
  source 1..75: mol_type = other DNA
tgcggtcctgcggcaaattctggatatctggctggcaccattaaaggcgtttcgtgaagatttcgccccgctggc

SEQ ID NO: 430740 - DNA, 75 bp, synthetic construct
  source 1..75: mol_type = other DNA
agtcaggtggcggatatcgcgcggacgcagggggaactgaatgcgttgaaggctgcgcaggataaatacggacct

SEQ ID NO: 430741 - DNA, 75 bp, synthetic construct
  source 1..75: mol_type = other DNA
ttaataaaataattgtaattataaagttaaatatcggtaatttgtatttaataaatacgatcgatattgttactt

SEQ ID NO: 430742 - DNA, 75 bp, synthetic construct
  source 1..75: mol_type = other DNA
ttttacttcctgctgcaatggccaaagtggccgaagaggcgggggtctataaagcaacgaaaaatccgcttaaga

SEQ ID NO: 430743 - DNA, 75 bp, synthetic construct
  source 1..75: mol_type = other DNA
agtataatggcaaaaaatctgagcattgcttgtggcaaaaatcaagatataacattcaatgaatatttttcattc

SEQ ID NO: 430744 - DNA, 75 bp, synthetic construct
  source 1..75: mol_type = other DNA
cagctgcaacagttactaatgatattgctatatttgcggatcatcttgaatcttttttgtctgaaaactgggtag

SEQ ID NO: 430745 - DNA, 75 bp, synthetic construct
  source 1..75: mol_type = other DNA
ttatttcctcacaatatcttgatggcgacaacccttcgcagcaggtactggaagagcttcaaaccgaactcgcgg

SEQ ID NO: 430746 - DNA, 75 bp, synthetic construct
  source 1..75: mol_type = other DNA
atgacgcaaggtgcagtgaaaacaacgggtaaacgttcgcgcgcagtcagtgcgaagaaaaaagcgattcttagc

SEQ ID NO: 430747 - DNA, 75 bp, synthetic construct
  source 1..75: mol_type = other DNA
gagtggaccggcaatcctgatattgataacgccatcatcatgctcgaccgcatagatacggcggaaagttgcgat

SEQ ID NO: 430748 - DNA, 75 bp, synthetic construct
  source 1..75: mol_type = other DNA
caggcagcgtggtttgtaaaagcatcactggagcagaatgcactatcgggcaactctcggcttattcctggtgaa

SEQ ID NO: 430749 - DNA, 75 bp, synthetic construct
  source 1..75: mol_type = other DNA
cagcgagttgtcagagttgaaggctctaatggctgttgaaaaacagacaggtcagaaaatcagtgcggagtcact

SEQ ID NO: 430750 - DNA, 75 bp, synthetic construct
  source 1..75: mol_type = other DNA
atccgccagcaggattacgcagccatttccgccggagtgatggtgtgtggttcactggtcattattgttaacgtg

SEQ ID NO: 430751 - DNA, 75 bp, synthetic construct
  source 1..75: mol_type = other DNA
ccaatgctcttggcaacacgccactcgggagctctgtttcggaagcaatcaccgggctgttgggtaagttggggg

SEQ ID NO: 430752 - DNA, 75 bp, synthetic construct
  source 1..75: mol_type = other DNA
taagagaaaaatacccctggctggtccctgttcatgccgatggtgtggttggaggcaagaaagaattcaccttgc

SEQ ID NO: 430753 - DNA, 75 bp, synthetic construct
  source 1..75: mol_type = other DNA
tactgcgtgatgccgctgctgctcatcttgagcagcagctcagaatatttattcgtcttcctccggacagtccgc

SEQ ID NO: 430754 - DNA, 75 bp, synthetic construct
  source 1..75: mol_type = other DNA
gtcagagaacaatatccctggctggtccctgttcatgctgacggaaaaataggcggaaaagcagatttcatgcgg

SEQ ID NO: 430755 - DNA, 75 bp, synthetic construct
  source 1..75: mol_type = other DNA
ttttattattgatcgtgaccttgttcctgctgacttttgttggcttcagtttgagctatttcacgccacatgcgc

SEQ ID NO: 430756 - DNA, 75 bp, synthetic construct
  source 1..75: mol_type = other DNA
tcagttgcttggcgacgttgtatttgacagcacctggaacgctaactttgacgcgacgggtcacctgattgacaa

SEQ ID NO: 430757 - DNA, 75 bp, synthetic construct
  source 1..75: mol_type = other DNA
gggcatccccccctttctgctttccacctcattgctggctgttctagcccaacgactagttcgcacgctgtgtcc

SEQ ID NO: 430758 - DNA, 75 bp, synthetic construct
  source 1..75: mol_type = other DNA
ttcgttactgatttcacgcattaaagtcatggcccggttggatattgccgaaaaacgcgttccccaagatggccg

SEQ ID NO: 430759 - DNA, 75 bp, synthetic construct
  source 1..75: mol_type = other DNA
gttctgaacaacggttctgattgggaaaccacgaaaacttccctgatcgataccctggcgatcaacagcggttct

SEQ ID NO: 430760 - DNA, 75 bp, synthetic construct
  source 1..75: mol_type = other DNA
cctcgtcaacgatcgtaccaacgacaccagcaaagctaactacggttatggtgttattgcgatgaactctgatgg

SEQ ID NO: 430761 - DNA, 75 bp, synthetic construct
  source 1..75: mol_type = other DNA
ttatggtacagatactggtaatacattgaacatcagcaactcaattgttcatggtatggttacatctgaccaaat

SEQ ID NO: 430762 - DNA, 75 bp, synthetic construct
  source 1..75: mol_type = other DNA
ccgctgaaagaattaaataatcccaagcatgacagttacgcaattagtgaaaagagtcacggcagagaagaaacc

SEQ ID NO: 430763 - DNA, 75 bp, synthetic construct
  source 1..75: mol_type = other DNA
gaaccgtggtttgcagcgctacattgccgacagtaacagtgctctgttaggactacagccggaagactggctgga

SEQ ID NO: 430764 - DNA, 75 bp, synthetic construct
  source 1..75: mol_type = other DNA
ctgcgcggtctgtatcaggatcgcgaactggcgaagcaagggctgctggatgcactgcataaatatggttgtctg

SEQ ID NO: 430765 - DNA, 75 bp, synthetic construct
  source 1..75: mol_type = other DNA
tatagcccgtcttctcgccgctggctgaatgtggtttatatcgacgttaacgccgtcgaagatttccatcttagc

SEQ ID NO: 430766 - DNA, 75 bp, synthetic construct
  source 1..75: mol_type = other DNA
tggcgagacggcagatcagggcgcgtatgttcactatccggtggatgatctgctctcgattctggcactcgaaag

SEQ ID NO: 430767 - DNA, 75 bp, synthetic construct
  source 1..75: mol_type = other DNA
tggcactcgaaagtaaacgtcatcgctgtatggtgattggtgaagatctcggtaccgtaccggtagagattgtcg

SEQ ID NO: 430768 - DNA, 75 bp, synthetic construct
  source 1..75: mol_type = other DNA
tttgccgatgatggcgtgaacaagttgctgaaggatttggacagacggcgcagagctgcagcgaagaagaagtag

SEQ ID NO: 430769 - DNA, 75 bp, synthetic construct
  source 1..75: mol_type = other DNA
caagagtggggcgatagatgcaataaaaagcaccgcctcatctgcacttactacaggtatctcctttgcttttaa

SEQ ID NO: 430770 - DNA, 75 bp, synthetic construct
  source 1..75: mol_type = other DNA
ttatcaaaaatataaaaagaaaagttaaatcccgaggttccaggcctcccgtaaaaacactcacaagggaacata

SEQ ID NO: 430771 - DNA, 75 bp, synthetic construct
  source 1..75: mol_type = other DNA
caattttgacaccactaaaaacctctttattgaaggcgataaccttgatgcattgaaactgctacaagaggcata

SEQ ID NO: 430772 - DNA, 75 bp, synthetic construct
  source 1..75: mol_type = other DNA
aatggacccgcatatcatcaccgcgcgtgcctatgaaccgtttatcgagctgttgcgtgccaatatgcaaaactg

SEQ ID NO: 430773 - DNA, 75 bp, synthetic construct
  source 1..75: mol_type = other DNA
ctacatgcccagcaagtgaaagaggacgaaatgcgctggggctggcctgcatggccagagatgtatcagaacgtg

SEQ ID NO: 430774 - DNA, 75 bp, synthetic construct
  source 1..75: mol_type = other DNA
gggtgaacaaacgcacgggcgaagaggaagatgtgccggaagggattgatccgggctggaactacaatcccggta

SEQ ID NO: 430775 - DNA, 75 bp, synthetic construct
  source 1..75: mol_type = other DNA
tttataccagcggcaaaaaaatgccgatggtggtggagggcagcggtgaatttagctggctgctgactaccgaag

SEQ ID NO: 430776 - DNA, 75 bp, synthetic construct
  source 1..75: mol_type = other DNA
tcatccgccaccgcaggaccgttatacccgcattcatctccccggtaatcccacatacaggtgttcgccagcatg

SEQ ID NO: 430777 - DNA, 75 bp, synthetic construct
  source 1..75: mol_type = other DNA
agtgccacaatctccccctgcatctctgcccgcagccagtcttccggtgcaatacgaaaatacgcctcaggctct

SEQ ID NO: 430778 - DNA, 75 bp, synthetic construct
  source 1..75: mol_type = other DNA
acagaagaacaggctgcagctcaaaaacttaaaaatcaggtaaccgaaggtaagctcatcgattcagacttctgc

SEQ ID NO: 430779 - DNA, 75 bp, synthetic construct
  source 1..75: mol_type = other DNA
gcgtttctaattttttcttttttaacaattgtgcaattaggatatgatctatttatttctaatgtgcatcctgag

SEQ ID NO: 430780 - DNA, 75 bp, synthetic construct
  source 1..75: mol_type = other DNA
caaaacccggtcgtggaagaaacgtggtgggagaatttacttgcagcactgaccgaactccgggaacgccgtcag

SEQ ID NO: 430781 - DNA, 75 bp, synthetic construct
  source 1..75: mol_type = other DNA
ttccccttccggcgttctcaccacgaagccgcacgactccgctggtgcacatcgccgggcgtgcgccaatatatt

SEQ ID NO: 430782 - DNA, 75 bp, synthetic construct
  source 1..75: mol_type = other DNA
atcttgaccatctgaaaacccttattgctaagggggcaaatcagtgtgcgcgggcaggggataaattaccggatt

SEQ ID NO: 430783 - DNA, 75 bp, synthetic construct
  source 1..75: mol_type = other DNA
ggcaactggatctggatgcctggcgcgatttttacatatcgtatctgagaagaagtaaaaacgatgtgcctgatg

SEQ ID NO: 430784 - DNA, 75 bp, synthetic construct
  source 1..75: mol_type = other DNA
ttgcgcggtctgtatcaggatcgcgaactggcgaagcaagggttactggatgcactgcataaacatggttgcctg

SEQ ID NO: 430785 - DNA, 75 bp, synthetic construct
  source 1..75: mol_type = other DNA
aaaaggcgcgaatcagtgcgcgcgggcaggggataaattacctgagttactcgatgaatatatccagactacagc

SEQ ID NO: 430786 - DNA, 75 bp, synthetic construct
  source 1..75: mol_type = other DNA
atggcctttttattgaataaaagcgatatggcctcctccatcggtatatccgttcaggcatttgataaatggggc

SEQ ID NO: 430787 - DNA, 75 bp, synthetic construct
  source 1..75: mol_type = other DNA
agaagtaaaaacgatgtgcctgatggtgatagcgaagacgactatgaggagaaattgcttattgccagatgggaa

SEQ ID NO: 430788 - DNA, 75 bp, synthetic construct
  source 1..75: mol_type = other DNA
cacgctttatatcgaagcgaatcagcctggcaacgtgattgcggcaaaaagtgacgctgaagggatactggaaaa

SEQ ID NO: 430789 - DNA, 75 bp, synthetic construct
  source 1..75: mol_type = other DNA
tggctgaagacatggcggataatctgctgcgtttctacatgcgcaaaattgccgataacatgccacagagtgatg

SEQ ID NO: 430790 - DNA, 75 bp, synthetic construct
  source 1..75: mol_type = other DNA
attcgccatgcccgtgagatcgatccaggcttaatcgatcggcaaatcgttcattacggtaattacgatcccttt

SEQ ID NO: 430791 - DNA, 75 bp, synthetic construct
  source 1..75: mol_type = other DNA
gagtgaagaggatcgttttgaagcgttgaaagagtactatccgcaagcgaaaaaagaggactggcgtttgtggca

SEQ ID NO: 430792 - DNA, 75 bp, synthetic construct
  source 1..75: mol_type = other DNA
atgaaagcggtatctcgcgttcacatcaccccgcatatgcactgggatcgagagtggtatttcaccaccgaagag

SEQ ID NO: 430793 - DNA, 75 bp, synthetic construct
  source 1..75: mol_type = other DNA
ctgcaactggtagataaagacagcggtgtgcgctatgaccgggtattgcaaattgaagaaagctctgatgatggt

SEQ ID NO: 430794 - DNA, 75 bp, synthetic construct
  source 1..75: mol_type = other DNA
catcacccccctcgaactgacaagccgagaaaaaacgaaggtggttgatgccctcagagtcacgtttccattagc

SEQ ID NO: 430795 - DNA, 75 bp, synthetic construct
  source 1..75: mol_type = other DNA
tggaaacggttgtcaactacctgaaagatgttggtattgcccggtttgaagtcgacgcctctaattacgacccgg

SEQ ID NO: 430796 - DNA, 75 bp, synthetic construct
  source 1..75: mol_type = other DNA
ggccagcggcttgcccggctggtatatcgttttatgttatgcgctacccaatgcgttgatcccctcgattaccgt

SEQ ID NO: 430797 - DNA, 75 bp, synthetic construct
  source 1..75: mol_type = other DNA
caccgctgctctcctggctgccgctttccgccatggcagccctgctgttgatggtggcgtggaacatgagtgaag

SEQ ID NO: 430798 - DNA, 75 bp, synthetic construct
  source 1..75: mol_type = other DNA
gagaatgcaattctggagaaggcgagtgaattgataaaaaaagacatgggcatcaaccccctcgaactgacaagc

SEQ ID NO: 430799 - DNA, 75 bp, synthetic construct
  source 1..75: mol_type = other DNA
ggtctacgtctcgccgatcgtcgattgcttcgatgggctggtggtggcctggaatatcggcaccagcccggatgc

SEQ ID NO: 430800 - DNA, 75 bp, synthetic construct
  source 1..75: mol_type = other DNA
gttctgggcgcaccaggttgagcgcggcgtgctgcgtactccgcgttcatttatcaataccgttccgcatatgag

SEQ ID NO: 430801 - DNA, 75 bp, synthetic construct
  source 1..75: mol_type = other DNA
gatgcggccattggggtcgtaacgcttggggttctggttttctggccgcgcctgggcattcgtttaccgggccat

SEQ ID NO: 430802 - DNA, 75 bp, synthetic construct
  source 1..75: mol_type = other DNA
cttgctggaaagaaaaatataccgctgcacgctttacccgtgacctgatagccgggataaccgtcgggattattg

SEQ ID NO: 430803 - DNA, 75 bp, synthetic construct
  source 1..75: mol_type = other DNA
gcgaatagtgagctggtcggccaggggctggggaatatcattgccccattctttggcggtattaccgctacagcc

SEQ ID NO: 430804 - DNA, 75 bp, synthetic construct
  source 1..75: mol_type = other DNA
catctattgatgaggtgaaaaaactctcggatgggatattattatcaataactaatgcggttggtacaacgtatt

SEQ ID NO: 430805 - DNA, 75 bp, synthetic construct
  source 1..75: mol_type = other DNA
aacgtaaaggtgcatatcatactctgaaagaacagcatttaatcgataagacaacctatgaatctttagtgttat

SEQ ID NO: 430806 - DNA, 75 bp, synthetic construct
  source 1..75: mol_type = other DNA
actttgccttattataaacgatttcttttagaaaatgattttcacagagggttaggaagtgcatttggccattgg

SEQ ID NO: 430807 - DNA, 75 bp, synthetic construct
  source 1..75: mol_type = other DNA
gctgaaatacgacaagccgcaggcagcagatagtacgccgaaaccgcagttgaaaccgcaacccgttcaaaaaga

SEQ ID NO: 430808 - DNA, 75 bp, synthetic construct
  source 1..75: mol_type = other DNA
gcgtccgaggagcaggaaactgatgtattgttgattggcggcggcattatgagcgccacattggggacttattta

SEQ ID NO: 430809 - DNA, 75 bp, synthetic construct
  source 1..75: mol_type = other DNA
cctgaaatatgataagccgcaggcggcagatagcacgccgaaagcgcagttgaaaccgcaaccagtacaaaaaga

SEQ ID NO: 430810 - DNA, 75 bp, synthetic construct
  source 1..75: mol_type = other DNA
atgcaaacccaatatgccttaaaacaggcaggattaactctgcctgttactaaagaatttcagcagcatattact

SEQ ID NO: 430811 - DNA, 75 bp, synthetic construct
  source 1..75: mol_type = other DNA
aacaaaaccatctggggcggaaacgagtgggtcgatgattccccaacccgaagtgatatcgaaaaaagggacaag

SEQ ID NO: 430812 - DNA, 75 bp, synthetic construct
  source 1..75: mol_type = other DNA
cctgaaatatgacaagccgcaggcggcagacagcacgccgaaaccgcaggtaaaaccgcaacctgtacagaaaga

SEQ ID NO: 430813 - DNA, 75 bp, synthetic construct
  source 1..75: mol_type = other DNA
ctgactaccctcgaatctggtggcatgcaagagaaggcgcaattttccccaataaagcagatattgaacatgcga

SEQ ID NO: 430814 - DNA, 75 bp, synthetic construct
  source 1..75: mol_type = other DNA
agtctaactacggttacggtattgttgctatgaactctgatggtcacctgactatcaatggtaacggcgacgtag

SEQ ID NO: 430815 - DNA, 75 bp, synthetic construct
  source 1..75: mol_type = other DNA
aacgaccgtacgtgggatacttccaagtctaactacggttacggtattgttgctatgaactctgatggtcacctg

SEQ ID NO: 430816 - DNA, 75 bp, synthetic construct
  source 1..75: mol_type = other DNA
aggatcacagactccgctggaagaaagtgatggcttcttcggtaaatctgctgaaccaagtgattacgctggtaa

SEQ ID NO: 430817 - DNA, 75 bp, synthetic construct
  source 1..75: mol_type = other DNA
tggtaatcgatatcgaaagcaatggcttaccacatcataatccatcaaatcatgttgatatctttgatataatcc

SEQ ID NO: 430818 - DNA, 75 bp, synthetic construct
  source 1..75: mol_type = other DNA
ctggtggcatgcgcgggaaggagcactcttccccaataaagcggatattgaacatgcaacgggggctgatatacg

SEQ ID NO: 430819 - DNA, 75 bp, synthetic construct
  source 1..75: mol_type = other DNA
gggtaagctacttcggtggtaacttcaacggcgacaacggcaccatcaactatgatcaggatgttaacggcatca

SEQ ID NO: 430820 - DNA, 75 bp, synthetic construct
  source 1..75: mol_type = other DNA
aacagtgccgcaagtggcagaaggcagccagagaacgagcgatcgctcggcaacgggagaagttggctgatccgg

SEQ ID NO: 430821 - DNA, 75 bp, synthetic construct
  source 1..75: mol_type = other DNA
catgcgggaatggccacagcgtgacggtgtgactgccggtttctggcaggctaacggcccgacgctgctggcgta

SEQ ID NO: 430822 - DNA, 75 bp, synthetic construct
  source 1..75: mol_type = other DNA
atgttggcgcaaccgcaacatatggagcccgcctggttcagtcgtacgctcatgcgggaatggccacagcgtgac

SEQ ID NO: 430823 - DNA, 75 bp, synthetic construct
  source 1..75: mol_type = other DNA
tatcatcagtgggacaacaacatcaatgtgtctaattccactgtaacttcaggatcacagactccgctggaagaa

SEQ ID NO: 430824 - DNA, 75 bp, synthetic construct
  source 1..75: mol_type = other DNA
gtacgatggtgacgtattcactctgaacgtatccaattccaccattgatgatgactatgaagctctttacttcac

SEQ ID NO: 430825 - DNA, 75 bp, synthetic construct
  source 1..75: mol_type = other DNA
ggcagcctgagttcacagataaaacactctccaggaaacccggggcggttcatactttcaacgcaaacttctatc

SEQ ID NO: 430826 - DNA, 75 bp, synthetic construct
  source 1..75: mol_type = other DNA
cgcacattttaagtgggatttagataatcctcgaaccaaatatgccgttcttaccaatgcggcagcgaatgcggt

SEQ ID NO: 430827 - DNA, 75 bp, synthetic construct
  source 1..75: mol_type = other DNA
tggtaatcgatatcgaaagcaatagcttaccacatcataatccatcaaattatgttgatacctttgatataatcc

SEQ ID NO: 430828 - DNA, 75 bp, synthetic construct
  source 1..75: mol_type = other DNA
catactgatgatggctcagggaacaggaatggtggtttcctttctggcaaaccggagtctggttgctgaagtaca

SEQ ID NO: 430829 - DNA, 75 bp, synthetic construct
  source 1..75: mol_type = other DNA
gctgggaggcgttgccggagacagtgcagcaattacctgtccggctacagccttcccgcacaggtcataactggc

SEQ ID NO: 430830 - DNA, 75 bp, synthetic construct
  source 1..75: mol_type = other DNA
gccatacagtataatacccccggattaaagccagacactattttatggtgggcaggtactactcttggactggct

SEQ ID NO: 430831 - DNA, 75 bp, synthetic construct
  source 1..75: mol_type = other DNA
ggaagtatttgcctgccaaacgtagccatttacgcggcaggataccggaaatcaaaacaactgacggcgaggtaa

SEQ ID NO: 430832 - DNA, 75 bp, synthetic construct
  source 1..75: mol_type = other DNA
atgtggtcatcgatatcgaaagcaatggctcaccacatcataacccatcaaattatgttgatacctttgatataa

SEQ ID NO: 430833 - DNA, 75 bp, synthetic construct
  source 1..75: mol_type = other DNA
ttagataaccctaatactaaatatgccgttcttaccaatgctgccgcaaatgcgcttggtgctttagggggattt

SEQ ID NO: 430834 - DNA, 75 bp, synthetic construct
  source 1..75: mol_type = other DNA
tgaaaatagatggaagcttgttggagaaacgcctcttactcctgatgggccaaaagcaaattacacggaggagtg

SEQ ID NO: 430835 - DNA, 75 bp, synthetic construct
  source 1..75: mol_type = other DNA
atggtggcatgcaagagaaggtgccatcttccctaataaagaagatattgcccgtgcaacaggggctgatatacg

SEQ ID NO: 430836 - DNA, 75 bp, synthetic construct
  source 1..75: mol_type = other DNA
cgtattatgcctccgggattattactcatcctcagtggaagctgacggctgatgaagagctggtcagccagagca

SEQ ID NO: 430837 - DNA, 75 bp, synthetic construct
  source 1..75: mol_type = other DNA
tgtggtggagccattatccgtattactccgtccataccgtcagttgttgctggcgggtattgttttcagtccggc

SEQ ID NO: 430838 - DNA, 75 bp, synthetic construct
  source 1..75: mol_type = other DNA
gttgtgagcgccttggctggcgtctgccgctgtatgtctggtcactgcaggagagtccggatgagcgagggcgta

SEQ ID NO: 430839 - DNA, 75 bp, synthetic construct
  source 1..75: mol_type = other DNA
ctgatggcctgccgggtattactatcgatcgtttcggtaattttctggtgctgcaactgctgagtgctggcgcag

SEQ ID NO: 430840 - DNA, 75 bp, synthetic construct
  source 1..75: mol_type = other DNA
ctggatattgcacggcagaacgttgagctgaacaaactggatctgagcaaggctgagtttgtccgtgatgacgtc

SEQ ID NO: 430841 - DNA, 75 bp, synthetic construct
  source 1..75: mol_type = other DNA
tgtggacctggctggatgagtcgccactggcgggaacgtcacgcgcaggtgacagcgttagatctctcgccgcca

SEQ ID NO: 430842 - DNA, 75 bp, synthetic construct
  source 1..75: mol_type = other DNA
cgatttgatctatacaaaaagagatgattatcccttaagtgatgaaatggaaaacgtggtttcctttgaatttag

SEQ ID NO: 430843 - DNA, 75 bp, synthetic construct
  source 1..75: mol_type = other DNA
caacttcctgtcatgggcggcagacctctaaatcgtgttcaggctctggcgaagatcgcagaactcaaagctaag

SEQ ID NO: 430844 - DNA, 75 bp, synthetic construct
  source 1..75: mol_type = other DNA
cacaaaaatgattgtgataaagagctaatagagataattgatcttggttgtgatcttgaaaatattgaatcatta

SEQ ID NO: 430845 - DNA, 75 bp, synthetic construct
  source 1..75: mol_type = other DNA
cgaccattcctgccatcacccgggcagtttgttgcctggtgccgggaagaagcatccgttaacactgggctgcca

SEQ ID NO: 430846 - DNA, 75 bp, synthetic construct
  source 1..75: mol_type = other DNA
ctgaaaggcatcggtgccacgcatcttcatgaagggcgcgacccgcgaatattaacgcgttcgcagttgcagcga

SEQ ID NO: 430847 - DNA, 75 bp, synthetic construct
  source 1..75: mol_type = other DNA
agtttcagatttatgttccagctccggctgtcattgacgccgatacggtcattgccagtgtgatcgacgagtgtt

SEQ ID NO: 430848 - DNA, 75 bp, synthetic construct
  source 1..75: mol_type = other DNA
tgtatgccacttttaaatatgaattaattttagaagaaaaactatatctctctattcgtaccaaagtattaatgg

SEQ ID NO: 430849 - DNA, 75 bp, synthetic construct
  source 1..75: mol_type = other DNA
agcgtctgccgcagcatgaggataaactgatgactatcgcagaacgtcttgagcaaaaaggtcgccaggaaggca

SEQ ID NO: 430850 - DNA, 75 bp, synthetic construct
  source 1..75: mol_type = other DNA
gccagcttcagaaaatggggatgacgccggagcagattaagcaggctaccgggctttccgatgacgaactgaaga

SEQ ID NO: 430851 - DNA, 75 bp, synthetic construct
  source 1..75: mol_type = other DNA
tggagccgtcactcagatcgccgccaggaacgaaggcatcacaccgcccttccttatttgttcgctgccgcaggt

SEQ ID NO: 430852 - DNA, 75 bp, synthetic construct
  source 1..75: mol_type = other DNA
gagaaaccagtgatccgcatggaggcacaccttagtgacgcacatacccgggtttttgagctgacattcatcagc

SEQ ID NO: 430853 - DNA, 75 bp, synthetic construct
  source 1..75: mol_type = other DNA
ccgtcggcagaatcgaccattcctgccatcacccgggcagtttgttgcctggtgccgggaagaagcatccgttaa

SEQ ID NO: 430854 - DNA, 75 bp, synthetic construct
  source 1..75: mol_type = other DNA
ccgcttaatcgtgttcaggctctggcgaagatcgcagaaatcaaagcgaagtttgggctgaaaggagcaagtgta

SEQ ID NO: 430855 - DNA, 75 bp, synthetic construct
  source 1..75: mol_type = other DNA
gaatacaggagagagttatgtatcccgtcgaccttcatatgcataccgttgccagcacacatgcatatagcacat

SEQ ID NO: 430856 - DNA, 75 bp, synthetic construct
  source 1..75: mol_type = other DNA
tggatgtttttaatcgtgaacccttaccgcctgaaagtccgctctggcaacatccacgcgtgacgataacaccac

SEQ ID NO: 430857 - DNA, 75 bp, synthetic construct
  source 1..75: mol_type = other DNA
ggatggctggaatttgcggaacgggaatgaagcctgacgacctgatcggtgcatgggcttgtagcgcgtgtcacg

SEQ ID NO: 430858 - DNA, 75 bp, synthetic construct
  source 1..75: mol_type = other DNA
cgctggttggcagtaacattccggccggtttaaccatcaacgcccattttaatggcatggtgatggcagtgcgtc

SEQ ID NO: 430859 - DNA, 75 bp, synthetic construct
  source 1..75: mol_type = other DNA
atggctgacattctgctgctcgataatatcgactcttttacttacaacctggcagatcagttgcgcagcaatggg

SEQ ID NO: 430860 - DNA, 75 bp, synthetic construct
  source 1..75: mol_type = other DNA
ataaatacgtagataaatttatgggaattctactttcaggcattttacagtctctgaaagagggagcaataacta

SEQ ID NO: 430861 - DNA, 75 bp, synthetic construct
  source 1..75: mol_type = other DNA
cgttttcgctaggttttgcggcggggatcatgttcataagcgctaacttaagggttgtggtattacgcctgatat

SEQ ID NO: 430862 - DNA, 75 bp, synthetic construct
  source 1..75: mol_type = other DNA
gtgtgccgagcgaagctggttgtatgcctgaactgcttacccgcctgcgcggtaagctgcctattattggcattt

SEQ ID NO: 430863 - DNA, 75 bp, synthetic construct
  source 1..75: mol_type = other DNA
ctcggcgctgttgctggcggcgtgatagggcatcagtttggtggtggtcgtggtaaagatgtcgccactgttgtg

SEQ ID NO: 430864 - DNA, 75 bp, synthetic construct
  source 1..75: mol_type = other DNA
gggattattcaggcgggttattccgtcgagcaacagcgcgaagtgtttgagtttgtcgccagcagcgactacttc

SEQ ID NO: 430865 - DNA, 75 bp, synthetic construct
  source 1..75: mol_type = other DNA
cagcatgtcaggtcgcctgctaaatcgctggggcaaaattaagaagccacagctgctggccagaattgaacgcct

SEQ ID NO: 430866 - DNA, 75 bp, synthetic construct
  source 1..75: mol_type = other DNA
cgattttatctatacaaaaagagatgattatcccttaagtgatgaaagggaaaataaagtctcttttaaatttac

SEQ ID NO: 430867 - DNA, 75 bp, synthetic construct
  source 1..75: mol_type = other DNA
gggcgtagcggcagtggccagtctgaacgtgtttgaacgtggcccgcaatacgctcaggttgtttctgcaatccc

SEQ ID NO: 430868 - DNA, 75 bp, synthetic construct
  source 1..75: mol_type = other DNA
cgccaggaatgtcgtaatgtcacggtgacccatcgccgtccggtacaggatgaaaaccgtattaccggttctgtt

SEQ ID NO: 430869 - DNA, 75 bp, synthetic construct
  source 1..75: mol_type = other DNA
ggcaaaagctgatgccgttaaagaagcctatattaatgcctttaactggatgtccgctgaactccgtaagttcag

SEQ ID NO: 430870 - DNA, 75 bp, synthetic construct
  source 1..75: mol_type = other DNA
actttcgccagttagttaccgcagcagaaggtcaaccggtaactgacaccttccagattgccagggcatttggta

SEQ ID NO: 430871 - DNA, 75 bp, synthetic construct
  source 1..75: mol_type = other DNA
gcaacagcatcaacatttctactgccagtgcttttgtcgctgcggcctgtggactgaaagtggcgaaacacggta

SEQ ID NO: 430872 - DNA, 75 bp, synthetic construct
  source 1..75: mol_type = other DNA
cattcaactggatgtacgccatgcttcaggttggtcatcgtcaatttgaagaagagagaaatgccgtaatgctgg

SEQ ID NO: 430873 - DNA, 75 bp, synthetic construct
  source 1..75: mol_type = other DNA
aattgcttgcaaagctgaaacgcctggagagacagggacagtttttattaccgggattcgataaggggattcaag

SEQ ID NO: 430874 - DNA, 75 bp, synthetic construct
  source 1..75: mol_type = other DNA
ctgtcatcaatgctgtcggtaatgtaggttcagcagtcagtccattacttatcggtattttgaaagatgcaaccg

SEQ ID NO: 430875 - DNA, 75 bp, synthetic construct
  source 1..75: mol_type = other DNA
gcaaacccgaagaaatccgctttcagtgcctggaaggccagattacgcgagggggtgccaccagaggccatgctg

SEQ ID NO: 430876 - DNA, 75 bp, synthetic construct
  source 1..75: mol_type = other DNA
gtggtgctgacccgtggggatgtgcgtcacatagcccgggactggagtctgacagacgatgagctggaaaccgtc

SEQ ID NO: 430877 - DNA, 75 bp, synthetic construct
  source 1..75: mol_type = other DNA
ggtatcagcgcagccggataccgtgattcaggatacggctgaactggtcacggttgtggcactggtgacgctgca

SEQ ID NO: 430878 - DNA, 75 bp, synthetic construct
  source 1..75: mol_type = other DNA
gagccggcggtttggctaaaggtctagagttggcaggatttcagcatgtaggatttgttgagttaaacaagcatg

SEQ ID NO: 430879 - DNA, 75 bp, synthetic construct
  source 1..75: mol_type = other DNA
tcacgacgttgttcgtgagctgatggaagaaaagcgcgccagccgtcaggtgacagtcccggcggtgatgctgga

SEQ ID NO: 430880 - DNA, 75 bp, synthetic construct
  source 1..75: mol_type = other DNA
atatgattaggtatgaggatgggactgttcgttattttacggtttatgaagggaagcttcttcagacttttcctc

SEQ ID NO: 430881 - DNA, 75 bp, synthetic construct
  source 1..75: mol_type = other DNA
tgacacggatgacgctgccggtcaggatacccctctcagaccggaaaatgcgctgaccggacatgaaaatgaggt

SEQ ID NO: 430882 - DNA, 75 bp, synthetic construct
  source 1..75: mol_type = other DNA
tgacacggatgacgctgtcggtctggacacccctctcagcccggaaaatgtgctgaccgggcatgaaaatgaggt

SEQ ID NO: 430883 - DNA, 75 bp, synthetic construct
  source 1..75: mol_type = other DNA
gtggtatcagcgcagccggataccgtgattgatacggctgctctggtcacggtcgtggcactggtgacgctgcat

SEQ ID NO: 430884 - DNA, 75 bp, synthetic construct
  source 1..75: mol_type = other DNA
gggccagagatatgaaaaataagatatgggaacagggcggcaacgttcgcaaattaatgttgcttgtgcaccttg

SEQ ID NO: 430885 - DNA, 75 bp, synthetic construct
  source 1..75: mol_type = other DNA
acgtgccggacagtgaatgcgtttttgccgtggtgctgacccgtggggatgtgcgccacatagcccaggactgga

SEQ ID NO: 430886 - DNA, 75 bp, synthetic construct
  source 1..75: mol_type = other DNA
gcgggcaattactgactctggtgaatcgttgctgaccatcctcaacgatattctcgattattcggctatcgaagc

SEQ ID NO: 430887 - DNA, 75 bp, synthetic construct
  source 1..75: mol_type = other DNA
ctttgcgcactgattctgatcctctggcgcgtggtttatcgctcagtcacgcgtccacttgccgaacaaacgcag

SEQ ID NO: 430888 - DNA, 75 bp, synthetic construct
  source 1..75: mol_type = other DNA
acagcggctgcgggattgatcccgcgaaactggcagaaatcttccagccatttgttcaggtaagtggcaaacgtg

SEQ ID NO: 430889 - DNA, 75 bp, synthetic construct
  source 1..75: mol_type = other DNA
gattggctttagcgcccatgtcattgacgaaacgctgcgccagcgtaccagttcactatttcgcgggattatccc

SEQ ID NO: 430890 - DNA, 75 bp, synthetic construct
  source 1..75: mol_type = other DNA
acgtttgctgttaattgaagataacccgctaacccaacgaattaccgtcgagatgctgaacaccagtggggcgca

SEQ ID NO: 430891 - DNA, 75 bp, synthetic construct
  source 1..75: mol_type = other DNA
gcaggaaccattagctgcgactctgccgcgcgaagaaattacgcatagcatcaaggccctggaacagtggctgaa

SEQ ID NO: 430892 - DNA, 75 bp, synthetic construct
  source 1..75: mol_type = other DNA
atggcgctgttaaccctgaccagtaccctggtgggatggtacaacctgcgctttatcagccaagtggaaaaagac

SEQ ID NO: 430893 - DNA, 75 bp, synthetic construct
  source 1..75: mol_type = other DNA
gaagaaaagcgtgccagccgtcaggtgacagttccggcggtgatgctggaaaaagtgatggcgctggcaggcagt

SEQ ID NO: 430894 - DNA, 75 bp, synthetic construct
  source 1..75: mol_type = other DNA
tgtatatggcgcatgtgacagagttgtttccgatattgtcaatgaactgatggaggaaaagcgcgtaaaccgcct

SEQ ID NO: 430895 - DNA, 75 bp, synthetic construct
  source 1..75: mol_type = other DNA
caggctttagaaacactgcaaaatagtgaaccgtttgctgccgcactggtggattttgatctgccggatatcgac

SEQ ID NO: 430896 - DNA, 75 bp, synthetic construct
  source 1..75: mol_type = other DNA
gcgggcaattaccgactctggcgaatcgttgctgaccatcctcaacgatattctcgattattcggctatcgaagc

SEQ ID NO: 430897 - DNA, 75 bp, synthetic construct
  source 1..75: mol_type = other DNA
gcgcagaacctgaccagtgccgataacgaaaagatgtggcaggcgcaggggcgaatgctcaccgcacaaagcctg

SEQ ID NO: 430898 - DNA, 75 bp, synthetic construct
  source 1..75: mol_type = other DNA
tgaagcgcaactggccgctcgcctgctgcaatttgaagaaaccctcacggtggttgcccgtgaaggtacaccgca

SEQ ID NO: 430899 - DNA, 75 bp, synthetic construct
  source 1..75: mol_type = other DNA
acatgcagtatgcttacacgcgtgtattgtccgtgttccgtaaagcagaaattgacgaagagcaactggctgcag

SEQ ID NO: 430900 - DNA, 75 bp, synthetic construct
  source 1..75: mol_type = other DNA
gtgcggtgaaatatgcggatctctccaaaaaccgcactaccgactacatcttcgactgggacaacatgctggcgt

SEQ ID NO: 430901 - DNA, 75 bp, synthetic construct
  source 1..75: mol_type = other DNA
ttcaaaaacaaggaaggcgaaccgatgggcgtgatcattcagaagaaagatggtggctatctctacaccaccact

SEQ ID NO: 430902 - DNA, 75 bp, synthetic construct
  source 1..75: mol_type = other DNA
agaaaacgaagaagtgcgtaacagccgtctgaaactggcacaactgacggcgaagacgctgaagctgggtctgga

SEQ ID NO: 430903 - DNA, 75 bp, synthetic construct
  source 1..75: mol_type = other DNA
gcacgccgtctggtggcagaaaagaacccggatatgccagccgacgagctggaaaaactggctaatgcggttggt

SEQ ID NO: 430904 - DNA, 75 bp, synthetic construct
  source 1..75: mol_type = other DNA
ccgtttcgctggaatacgcgtttgagtggcaggatcacgacgaaggcgacagtgataaattccattatgcaggtg

SEQ ID NO: 430905 - DNA, 75 bp, synthetic construct
  source 1..75: mol_type = other DNA
ccactttcaggaactgggcgtaacaggattagaatggcattttattggcccgttgcagtctaataaaagccgcct

SEQ ID NO: 430906 - DNA, 75 bp, synthetic construct
  source 1..75: mol_type = other DNA
agcagattacagttcttttcaactatctgcttaatggcagcgaacatgtaacggttgaatttttgcagacgctgg

SEQ ID NO: 430907 - DNA, 75 bp, synthetic construct
  source 1..75: mol_type = other DNA
actggcagctcgcctgctgcagtttgaagaaaccctcaccgtggttgcccgtgaaggcacgccgcatgtgatgtg

SEQ ID NO: 430908 - DNA, 75 bp, synthetic construct
  source 1..75: mol_type = other DNA
atgggtaaaacgaacgactggctggactttgatcaactggcggaagaaaaagtgcgtgacgcgctaaaaccgcca

SEQ ID NO: 430909 - DNA, 75 bp, synthetic construct
  source 1..75: mol_type = other DNA
gcgtttgagtggcaggatcacgatgaaggcgacagcgataaattccattatgcaggtgtcggtgtgaattacgcg

SEQ ID NO: 430910 - DNA, 75 bp, synthetic construct
  source 1..75: mol_type = other DNA
ttcccgttcctgtttatcaccatcgcctgtggcgcggtgtctggcttccatgcactgatctcttccggcactaca

SEQ ID NO: 430911 - DNA, 75 bp, synthetic construct
  source 1..75: mol_type = other DNA
atgattgacccacgcacacctgagggccgcatgactctccgttaccgtggctaccggactgaagtcctcctcaga

SEQ ID NO: 430912 - DNA, 75 bp, synthetic construct
  source 1..75: mol_type = other DNA
cctgtggcgcggtgtctggcttccatgcgctgatctcttctgggaccacgccgaagatgctggcgaacgaaggac

SEQ ID NO: 430913 - DNA, 75 bp, synthetic construct
  source 1..75: mol_type = other DNA
tggcactgttctcgattaagacggcactggcggcattgaaagagccgaagccaacggcgaaagaaacgccgtatg

SEQ ID NO: 430914 - DNA, 75 bp, synthetic construct
  source 1..75: mol_type = other DNA
gtacgatatcaaaggtctggtacttagcccgtttggtaacgcctcctttgctggggtgtatcgcgagaaacagga

SEQ ID NO: 430915 - DNA, 75 bp, synthetic construct
  source 1..75: mol_type = other DNA
gtggtcaggcaatcgccgcgcctgaatccccccccgcatgctgatatccgcgacagcggttttgtctattgcgtc

SEQ ID NO: 430916 - DNA, 75 bp, synthetic construct
  source 1..75: mol_type = other DNA
taaataatccggcggtccgccatgcgctggcactggcaattaataaccagcgcctgatgcaatccatctattatg

SEQ ID NO: 430917 - DNA, 75 bp, synthetic construct
  source 1..75: mol_type = other DNA
ctcagcccggaaaatgcgctgaccggacatgaaaatgaggtggtatcagcgcagccggataccgtgactgatacg

SEQ ID NO: 430918 - DNA, 75 bp, synthetic construct
  source 1..75: mol_type = other DNA
aggttaaaacccgtactgccgaacagaatgcacgtattgcggcttttgaagctgaacgtcgtcgtgaagcagagt

SEQ ID NO: 430919 - DNA, 75 bp, synthetic construct
  source 1..75: mol_type = other DNA
acaacccgtggcataacgttaatggcagcaacttcccctacttcgacagcctgcaatttgccgataacgtgaaaa

SEQ ID NO: 430920 - DNA, 75 bp, synthetic construct
  source 1..75: mol_type = other DNA
tgccgtgatggagcaggttgtagaatggcaaaaccggcgaatggcaatgagccgctttattatcgagttcggtga

SEQ ID NO: 430921 - DNA, 75 bp, synthetic construct
  source 1..75: mol_type = other DNA
cgatacggcagagcaatttgctaaaggcgtgcagttgcataacgaaaaagatctcactaagccggcggtgctgga

SEQ ID NO: 430922 - DNA, 75 bp, synthetic construct
  source 1..75: mol_type = other DNA
cgatacggcagagcagtttgctaaaggcgtgcagttacataacgaaaaagatctcactaagcctgctgtgctgga

SEQ ID NO: 430923 - DNA, 75 bp, synthetic construct
  source 1..75: mol_type = other DNA
aactggccaaaaacctcaaaacccctgaagacctcagtcagtttgatcggctgctgaaaaagctcagcgttgaag

SEQ ID NO: 430924 - DNA, 75 bp, synthetic construct
  source 1..75: mol_type = other DNA
cgaggggggctcttgcctcccgcggcccgacatgcaaaaaaatgacgacaggtaacctgccccaaacactcaaaa

SEQ ID NO: 430925 - DNA, 75 bp, synthetic construct
  source 1..75: mol_type = other DNA
caaaacccctgaagacctcagccagtttgaccgtctactgaaaaagatcagcgttgaagccgctctcaatgcaga

SEQ ID NO: 430926 - DNA, 75 bp, synthetic construct
  source 1..75: mol_type = other DNA
agcaactcggcgttagccgtgctattgccgggcgtgaaatccgcggcaatcgtgtcaccgtcgatggcgaaattg

SEQ ID NO: 430927 - DNA, 75 bp, synthetic construct
  source 1..75: mol_type = other DNA
atggacgaaaaacagttacaggctctggctaacgaactgtccaaaaacctcaaaacccctgaagacctcagtcag

SEQ ID NO: 430928 - DNA, 75 bp, synthetic construct
  source 1..75: mol_type = other DNA
tcgataattttcaagggaatgctgttgtaaattatatagacaaaaaattcccattcactcgtataatagaacata

SEQ ID NO: 430929 - DNA, 75 bp, synthetic construct
  source 1..75: mol_type = other DNA
catcgtgaacgtattggcggcattacgctggatgctgatttagcacccggtgaatatcgtccgttaactgaagaa

SEQ ID NO: 430930 - DNA, 75 bp, synthetic construct
  source 1..75: mol_type = other DNA
atcaggtgaaacgtatgttcgccgccgtgggtaaccatgtggttgagctgcatcgtgaacgtattggcggcatta

SEQ ID NO: 430931 - DNA, 75 bp, synthetic construct
  source 1..75: mol_type = other DNA
gtggaaactgcacgccgcagggcgtctggatatcgataccaccggtctggtactaatgacagatgatggtcagtg

SEQ ID NO: 430932 - DNA, 75 bp, synthetic construct
  source 1..75: mol_type = other DNA
tccagactaggagctaactcccgcaacggttattccacaaagaccgttatcacaggcgacggtccactggaactg

SEQ ID NO: 430933 - DNA, 75 bp, synthetic construct
  source 1..75: mol_type = other DNA
gttcacctggtgtacggccacggcggcgatctgcttaaacagacgctaaaagatgacaacctgaactgggtgctt

SEQ ID NO: 430934 - DNA, 75 bp, synthetic construct
  source 1..75: mol_type = other DNA
cggcaccggttgcgtgattaaaaacagcgtgattggcgatgattgcgaaattagcccgtataccgttgtggaaga

SEQ ID NO: 430935 - DNA, 75 bp, synthetic construct
  source 1..75: mol_type = other DNA
aactggctatgcacggccagacccacgttaacaaaatctacgacccggcagcaggttccggttcgctgttgttgc

SEQ ID NO: 430936 - DNA, 75 bp, synthetic construct
  source 1..75: mol_type = other DNA
cactggccccgaacctgttcttcggtaccaccattgccgtgaatattctggtgctgtcaaaacacaaaaccgata

SEQ ID NO: 430937 - DNA, 75 bp, synthetic construct
  source 1..75: mol_type = other DNA
gaattacctgtctgcgaaaggccgtgccgcgattgtctgtttccccggcattttctaccgtggcggagctgagca

SEQ ID NO: 430938 - DNA, 75 bp, synthetic construct
  source 1..75: mol_type = other DNA
gttcacctggtgtacggtcacggcggcgatctgcttaaacaggcgctgaaagacgacaacctgaactgggtgctt

SEQ ID NO: 430939 - DNA, 75 bp, synthetic construct
  source 1..75: mol_type = other DNA
tgcgtaatggtgaaacacgcgagcgtgaagtgacgattggcgcacgtaacgataccgatgttgagattgtcaaag

SEQ ID NO: 430940 - DNA, 75 bp, synthetic construct
  source 1..75: mol_type = other DNA
ggtaaagaaaaatcagacctgtattaccgggatggataaccagatcctctcgttgtatgccaaagggatgacccc

SEQ ID NO: 430941 - DNA, 75 bp, synthetic construct
  source 1..75: mol_type = other DNA
aaatcagacccgtattaccgggatggataaccagatcctctcgttgtatgccaaagggatgaccacccgtgagat

SEQ ID NO: 430942 - DNA, 75 bp, synthetic construct
  source 1..75: mol_type = other DNA
aattggcaatgcacgggcagacccacgttaacaaaatctacgacccggcagcaggttccggttcgctgttgttgc

SEQ ID NO: 430943 - DNA, 75 bp, synthetic construct
  source 1..75: mol_type = other DNA
tattcatggtttccgggcgagtgaaatttgtcgattgaggatttcggatattgatcttaaggcaaagtgggtgat

SEQ ID NO: 430944 - DNA, 75 bp, synthetic construct
  source 1..75: mol_type = other DNA
acggcagggattcaatatcgctacgcagataataaactgggtgaagccttcctccaggatggcattatttattca

SEQ ID NO: 430945 - DNA, 75 bp, synthetic construct
  source 1..75: mol_type = other DNA
gaagaaatattgggattctattgcaaagaaaattatttatacagggcctattgataagttttattgctataaatt

SEQ ID NO: 430946 - DNA, 75 bp, synthetic construct
  source 1..75: mol_type = other DNA
tataacaatcttgcaaaaaatgatgaaagaattgtttttggtggtagacttgctgaatatagatactatgatatg

SEQ ID NO: 430947 - DNA, 75 bp, synthetic construct
  source 1..75: mol_type = other DNA
ccgctgccggtggcgcgttatcactcgctggttggcagtaacattccggccggtttaaccatcaacgcccatttt

SEQ ID NO: 430948 - DNA, 75 bp, synthetic construct
  source 1..75: mol_type = other DNA
gcctcggtcatcaggcgattgtcgaggcttacggcggttatgtcggccaggcgggggaaatactccacggcaaag

SEQ ID NO: 430949 - DNA, 75 bp, synthetic construct
  source 1..75: mol_type = other DNA
ttctggtgatgatgcttatcgatcttggcgcatttgtcggcacccagggcgcaaataaatttggtaaagataccc

SEQ ID NO: 430950 - DNA, 75 bp, synthetic construct
  source 1..75: mol_type = other DNA
taacttacctttcaatatgaataccttttatcagttatgggggacaaaaactccttctgaagctcaagataaaat

SEQ ID NO: 430951 - DNA, 75 bp, synthetic construct
  source 1..75: mol_type = other DNA
atcacaaaagcttaagttagaacgtgaaccattaaatctggaagagcaggctctttcgctagttggcactgatat

SEQ ID NO: 430952 - DNA, 75 bp, synthetic construct
  source 1..75: mol_type = other DNA
ccgaaatatcacaccggattccgccacgcgatgccggttcgtcagcaactgaaaacccgcactctgttcaacgtg

SEQ ID NO: 430953 - DNA, 75 bp, synthetic construct
  source 1..75: mol_type = other DNA
atccgccgctggcgttaattggtgtttatagtccggaactggtgctgccgatagccgaaaccttgcgcgtgctgg

SEQ ID NO: 430954 - DNA, 75 bp, synthetic construct
  source 1..75: mol_type = other DNA
ccgtttcttcacggcagatggcgaaacagctcggcattagccagtcgagcatagtgaaatttgcccaaaaactcg

SEQ ID NO: 430955 - DNA, 75 bp, synthetic construct
  source 1..75: mol_type = other DNA
ggtatcaacgcgcggcggtggtgcacagcggcgggatggatgaagtttcattacacgcgccgacaatcgttgccg

SEQ ID NO: 430956 - DNA, 75 bp, synthetic construct
  source 1..75: mol_type = other DNA
aaaccgtgacattttaacacgcttgttacaaggtaaaggcgacgccgcccatgaagcagccgtcgcggcgaatgt

SEQ ID NO: 430957 - DNA, 75 bp, synthetic construct
  source 1..75: mol_type = other DNA
gcctcggacatcaggcgattgtcgaagcttacgggggctatgtcggtcaggcgggcgaaattcttcacggtaaag

SEQ ID NO: 430958 - DNA, 75 bp, synthetic construct
  source 1..75: mol_type = other DNA
acccagggcgcaaataaatttggtaaagataccctggacgtaaagtataagtctgagaataaatcaagccattaa

SEQ ID NO: 430959 - DNA, 75 bp, synthetic construct
  source 1..75: mol_type = other DNA
gtgaataaccgcctgcaactctcccgtctggagcgcgtttaccagtccgaacaggctgaaaaactgctgttagca

SEQ ID NO: 430960 - DNA, 75 bp, synthetic construct
  source 1..75: mol_type = other DNA
gcgaaaggccgtccggagcgcgaatatttgcaaactggcgatgcggtggatagctggaaagtcattgtcgttgaa

SEQ ID NO: 430961 - DNA, 75 bp, synthetic construct
  source 1..75: mol_type = other DNA
gaccagaggtgctcagctatcagcagcagtttgaacattttatggcggtgagcggtaaacatcgctggttgattc

SEQ ID NO: 430962 - DNA, 75 bp, synthetic construct
  source 1..75: mol_type = other DNA
tggcgaagctgactaacaataacgctcagggcgaatactacatcaccgatattattgcgctggcgtatcaggaag

SEQ ID NO: 430963 - DNA, 75 bp, synthetic construct
  source 1..75: mol_type = other DNA
actgtgacgcgtaatgtcggcgaaaacgccctggcgatcagccgtgtgccgcagactcaaaaagaaggctggcgt

SEQ ID NO: 430964 - DNA, 75 bp, synthetic construct
  source 1..75: mol_type = other DNA
ccgacgagcagcgtcagattcaggagatcaacaccggcattctgattgccaacggcgcagatatgaaacgctggc

SEQ ID NO: 430965 - DNA, 75 bp, synthetic construct
  source 1..75: mol_type = other DNA
tgatactgtctattttctggtgcacagcatgggagaaggcggtgattttatcgctcaggagcgccaggtggctct

SEQ ID NO: 430966 - DNA, 75 bp, synthetic construct
  source 1..75: mol_type = other DNA
tttacatacgataataattatttctcagataaattccaaggtatacctgtgggcggatatacaaaacttgtagaa

SEQ ID NO: 430967 - DNA, 75 bp, synthetic construct
  source 1..75: mol_type = other DNA
aggcaatatctctagtcggttatgatatttatgaaaaattgataaaaggctatactgaaaaacagtggggcagaa

SEQ ID NO: 430968 - DNA, 75 bp, synthetic construct
  source 1..75: mol_type = other DNA
tcagttcgttgcaggccccgccacatgagcagtcggaccatctgcgtgcccgtcaggctacggcggacattcttc

SEQ ID NO: 430969 - DNA, 75 bp, synthetic construct
  source 1..75: mol_type = other DNA
gcagtttgaacattttatgagcgtgagcggcaaacaccgcgggttaatccccatccctttccccacccgctggat

SEQ ID NO: 430970 - DNA, 75 bp, synthetic construct
  source 1..75: mol_type = other DNA
acttccgtaccgcccaccaccgccagggcgttgattcaggggctgaaacacgatctgctggcggatgacaccgcg

SEQ ID NO: 430971 - DNA, 75 bp, synthetic construct
  source 1..75: mol_type = other DNA
atatcgaaggtcagaaagaactgctgggtatgtggctggccgaaaatgaaggggcgaagttctggctcaatgtgc

SEQ ID NO: 430972 - DNA, 75 bp, synthetic construct
  source 1..75: mol_type = other DNA
acaccactaacgcaatcgaatcgctgaatagcgtcatcagacatgcgataaagaaacggaaagtgttcccgacag

SEQ ID NO: 430973 - DNA, 75 bp, synthetic construct
  source 1..75: mol_type = other DNA
tggctaacgaactggccaaaaatctcaaaacccctgaagatctcagtcagtttgatcgcctgctcaagaaaatca

SEQ ID NO: 430974 - DNA, 75 bp, synthetic construct
  source 1..75: mol_type = other DNA
ctgtattgtggttaaggttcgtcacggcgggagtgtcattaacaaagcggtgttcctcgcgcggggcatcaatac

SEQ ID NO: 430975 - DNA, 75 bp, synthetic construct
  source 1..75: mol_type = other DNA
gaccgttatcacaggcgacggtccactggaactgcgtactccgcgcgatcgtgacggtaccttcgaaccacaaat

SEQ ID NO: 430976 - DNA, 75 bp, synthetic construct
  source 1..75: mol_type = other DNA
gaaaagaatgctcgtaagaacggttcaaatgctcgtaacggttattccagtaagaccgtgctgagcgatgatggt

SEQ ID NO: 430977 - DNA, 75 bp, synthetic construct
  source 1..75: mol_type = other DNA
ccagatattcgcaaggcaatctacacgacgaatgccatcgagtcgctgaacagcgttatccgtacagccatcaaa

SEQ ID NO: 430978 - DNA, 75 bp, synthetic construct
  source 1..75: mol_type = other DNA
cgacggaagaagccgcgctgatggcgctggatacgttcgcgggagtctgggacgataaatatccgcaaatcagca

SEQ ID NO: 430979 - DNA, 75 bp, synthetic construct
  source 1..75: mol_type = other DNA
ccgaccactggatgctgtttaccccattgtttatctagactgtatcgtcctgaaagttcggcaggacagtcgcgt

SEQ ID NO: 430980 - DNA, 75 bp, synthetic construct
  source 1..75: mol_type = other DNA
cgacgaatgccatcgagtcgctaaacagcgtgatccgccatgcgatcaaaaagcgtaaagtgttcccgacagacg

SEQ ID NO: 430981 - DNA, 75 bp, synthetic construct
  source 1..75: mol_type = other DNA
gcttcccggatgccatcaacgcagtatatccgaaggcccgcatccagttatgcatcgtgcatatggtgcgcaaca

SEQ ID NO: 430982 - DNA, 75 bp, synthetic construct
  source 1..75: mol_type = other DNA
gcctgaaaggcttcccggaagcgataaatagcgtgtacccgcagacgcatattcagctctgcatcatccatatgg

SEQ ID NO: 430983 - DNA, 75 bp, synthetic construct
  source 1..75: mol_type = other DNA
cgcaagtggcttttatgtatacccgttcagtccttcatgggatgcggagctacagcagctactgaatgaaggcat

SEQ ID NO: 430984 - DNA, 75 bp, synthetic construct
  source 1..75: mol_type = other DNA
ttcggcggaacggtgatttccggtaatacgcgtatcaccggcaccagcgtgctgtggggagaggtttacgcaacg

SEQ ID NO: 430985 - DNA, 75 bp, synthetic construct
  source 1..75: mol_type = other DNA
atgcgcaaatatcgtctaagtgaagaacagcgagcctttagttatcaggaagatggcactaaaaaaagtgtgtta

SEQ ID NO: 430986 - DNA, 75 bp, synthetic construct
  source 1..75: mol_type = other DNA
gtggctgattgttaccgtctgcattctgcacatactcaaagcaaaaaaagcattattaatattatccatgcattg

SEQ ID NO: 430987 - DNA, 75 bp, synthetic construct
  source 1..75: mol_type = other DNA
ataaaacaagaaaagagattgcagatgctgaaattgattatgcagacaaaatatctaaagtcgtatctgaaatag

SEQ ID NO: 430988 - DNA, 75 bp, synthetic construct
  source 1..75: mol_type = other DNA
tcaggcgcaaatttatggcgatgccgtcgtccgccatgcttttattgagcatcgtgccgaagtttttgattttgc

SEQ ID NO: 430989 - DNA, 75 bp, synthetic construct
  source 1..75: mol_type = other DNA
catcccccagcgacgccatggctaaaaaggtagaatcgtatctgaataatggcaggctaaaggtgaacaccgaca

SEQ ID NO: 430990 - DNA, 75 bp, synthetic construct
  source 1..75: mol_type = other DNA
acagggattcagtatcgttatgcggatgacaaactgggcgaagatttttaccaggatgcgataatctactccatc

SEQ ID NO: 430991 - DNA, 75 bp, synthetic construct
  source 1..75: mol_type = other DNA
atgacaactcaaatctctgttgaaaccatatccccgctcatccataaccagattcctgttatcaccaccgaactt

SEQ ID NO: 430992 - DNA, 75 bp, synthetic construct
  source 1..75: mol_type = other DNA
gagtgacaatcttcctgcatcttttgatggaatcaccagctatcagatggattatgcccgcctgggaacaactat

SEQ ID NO: 430993 - DNA, 75 bp, synthetic construct
  source 1..75: mol_type = other DNA
gtgaatattgccggtgagtggtggaacgatgctgttaaacagtttgagtgtggaaatctcgccatgctgattatg

SEQ ID NO: 430994 - DNA, 75 bp, synthetic construct
  source 1..75: mol_type = other DNA
catctaaaggaactctctggtgttgcgaccacaggtgacaccatctctaaaaagatggaaagctacctgggaaat

SEQ ID NO: 430995 - DNA, 75 bp, synthetic construct
  source 1..75: mol_type = other DNA
ggttacgccaggaaaatcctgcgttttaatgatgaggcttgctcatcattgatgttcagtaatcttcagggcgtg

SEQ ID NO: 430996 - DNA, 75 bp, synthetic construct
  source 1..75: mol_type = other DNA
cgttaacaaaatctacgacccggcagcgggttccggctcactgttgttgcaggcgaaaaaacagtttgataacca

SEQ ID NO: 430997 - DNA, 75 bp, synthetic construct
  source 1..75: mol_type = other DNA
atattcccaataagccgctgtttatccaaaacgtcggtttgcaggaaacggtaaatcaggcttctggcgcattac

SEQ ID NO: 430998 - DNA, 75 bp, synthetic construct
  source 1..75: mol_type = other DNA
aggctaaaaaacagtttgatgaccatatcatcgaagaaggtttttttggtcaggagatcaaccatacgacctata

SEQ ID NO: 430999 - DNA, 75 bp, synthetic construct
  source 1..75: mol_type = other DNA
caacaaacatcagattgacctgtttggcgatgcctatgaattccttatttctaactatgccgcaaatgccggtaa

SEQ ID NO: 431000 - DNA, 75 bp, synthetic construct
  source 1..75: mol_type = other DNA
aacaatatcctgaccgatggtcatatcgaacagattatgcaggtctttgccagcaaagcggatactgaccatctg

SEQ ID NO: 431001 - DNA, 75 bp, synthetic construct
  source 1..75: mol_type = other DNA
ctgagctgaatgctgagctgaaaaccacggtcagcaaaatcgaccagttgcgcaaagatattgatgcgattgtgg

SEQ ID NO: 431002 - DNA, 75 bp, synthetic construct
  source 1..75: mol_type = other DNA
gacggatgggattttaaacagtacgttctgggcgcgcttttctaccgttttatcagcgaaaatttttccagctat

SEQ ID NO: 431003 - DNA, 75 bp, synthetic construct
  source 1..75: mol_type = other DNA
ttgaacagattatgcaggtctttgccagcaaaacagacgttgaccatttggcgaaaaccgtacctcaagaaacag

SEQ ID NO: 431004 - DNA, 75 bp, synthetic construct
  source 1..75: mol_type = other DNA
ttgatacaaccagtaaccggctgggcagtaccgttaaagagaaaaatattcggctcgcggcggtactgaaaggcg

SEQ ID NO: 431005 - DNA, 75 bp, synthetic construct
  source 1..75: mol_type = other DNA
ccaaagttcagtttattgacgccagcgaactgttcaaaaaagagactaacaacaatatcctgaccgatgcccata

SEQ ID NO: 431006 - DNA, 75 bp, synthetic construct
  source 1..75: mol_type = other DNA
gatactcgcgaaattatcgatatcgctgagttgaatgcagagctgaaaaccacggtcagcaaaatcgaccagttg

SEQ ID NO: 431007 - DNA, 75 bp, synthetic construct
  source 1..75: mol_type = other DNA
caccgtcggcaaaatcgatcagttacgtaaggacatcgactcaattgtggctgagattgaaggtgacgaggtaca

SEQ ID NO: 431008 - DNA, 75 bp, synthetic construct
  source 1..75: mol_type = other DNA
gcacaacatcaactacgacaagtttgatatcaagctgggcaatacgctgactgaaccgcacttcagagataaaaa

SEQ ID NO: 431009 - DNA, 75 bp, synthetic construct
  source 1..75: mol_type = other DNA
ttaatgatgaggcctgctcatcattaatgttcagtaatcttcagggcgtgttaactatcggtgcttcagatgaat

SEQ ID NO: 431010 - DNA, 75 bp, synthetic construct
  source 1..75: mol_type = other DNA
ggtaaacaaggtggtcagttctatacaccaaaatccattgtaagcctgcttgttaacatgcttgaaccttataaa

SEQ ID NO: 431011 - DNA, 75 bp, synthetic construct
  source 1..75: mol_type = other DNA
ccttaagtatatttctgattcttttgaatctcattatgagttgctgaaggctggtgaaggcgagttcgcaggcgc

SEQ ID NO: 431012 - DNA, 75 bp, synthetic construct
  source 1..75: mol_type = other DNA
aatgttgaagtctcaggaagttgatttaattgttaccacccaccgacctgataactttaagtctttgaatcttcg

SEQ ID NO: 431013 - DNA, 75 bp, synthetic construct
  source 1..75: mol_type = other DNA
agtggagtagatggcttaccgccgctacctgataccgaatatttgctgtgctatgacccgtccagtaataatgag

SEQ ID NO: 431014 - DNA, 75 bp, synthetic construct
  source 1..75: mol_type = other DNA
ctatgatccgtcctgcgacaatgagttggcgcaggtgatataccaggccatggagagttatcacaacccgtggca

SEQ ID NO: 431015 - DNA, 75 bp, synthetic construct
  source 1..75: mol_type = other DNA
acctgcaaaactgttcctgaacacccagatccctgccgcattatggtttatgcgtcgcgatcgtgaaaatagcag

SEQ ID NO: 431016 - DNA, 75 bp, synthetic construct
  source 1..75: mol_type = other DNA
gttttacgacccttaaagcggagtttgaagcccaactggaagaagaagcacgtcttaataaagctatcgctgata

SEQ ID NO: 431017 - DNA, 75 bp, synthetic construct
  source 1..75: mol_type = other DNA
cgaactattcaaaaaagagaccaacaacaatatcctgaccgatgcccatatcgaacagattatgcaggtatttgc

SEQ ID NO: 431018 - DNA, 75 bp, synthetic construct
  source 1..75: mol_type = other DNA
ggcaaacaaggcggtcagttctatacgcctaaatccattgttagcctgttggtaaacatgcttgagccctataag

SEQ ID NO: 431019 - DNA, 75 bp, synthetic construct
  source 1..75: mol_type = other DNA
atgtgattgactgtatcgtaaatttacctgcaaaactgttcctgaacacccagatccctgcggcgttatggttta

SEQ ID NO: 431020 - DNA, 75 bp, synthetic construct
  source 1..75: mol_type = other DNA
gggtaatatcgacgatatttctatctatggtcaggaatccaaccaaacaacatggcgtctggcaaagatgaacct

SEQ ID NO: 431021 - DNA, 75 bp, synthetic construct
  source 1..75: mol_type = other DNA
tatccgtgtgagtgttcacaatgccggtggtcagggtgccgatacgcttgaaggtatccgcattgttgaaataac

SEQ ID NO: 431022 - DNA, 75 bp, synthetic construct
  source 1..75: mol_type = other DNA
ggcatagccgttcgccagttgctgtttactttgttggcaaccgcattgatcgtcccctatttcaaacgctcgtcg

SEQ ID NO: 431023 - DNA, 75 bp, synthetic construct
  source 1..75: mol_type = other DNA
agtacgacgctggcgttgttgctgtataccgctgcgttatcttctccgcaaacatttcaaacgctcggcggacaa

SEQ ID NO: 431024 - DNA, 75 bp, synthetic construct
  source 1..75: mol_type = other DNA
caacgctggcaatagctatttcgaccgtgttatcaataccagtttcccaggcatggacaccaccaaccactatca

SEQ ID NO: 431025 - DNA, 75 bp, synthetic construct
  source 1..75: mol_type = other DNA
cgctggtatgagccgcccgtcagctttgacggactggcgcgcaccttccgcgccgccgtgcatcacagttccccg

SEQ ID NO: 431026 - DNA, 75 bp, synthetic construct
  source 1..75: mol_type = other DNA
gtgtgccaccgcaaatgatggggattatgccaaataatgtcggggggtttggggatgtggaaaaagcgagtttag

SEQ ID NO: 431027 - DNA, 75 bp, synthetic construct
  source 1..75: mol_type = other DNA
attaatttcaaccattccagcgaagattttatcctggcggcagatatcgttggcaaaggcgaggttaaccaagcg

SEQ ID NO: 431028 - DNA, 75 bp, synthetic construct
  source 1..75: mol_type = other DNA
tgagtcactgcgttctgcgatgcgtgattcaaagggactcgggaattttaaaaacctgtttttctacgcaccgaa

SEQ ID NO: 431029 - DNA, 75 bp, synthetic construct
  source 1..75: mol_type = other DNA
agggataatgaaattagaaaacaatactcatctgacgattaataatgcatcgccttatgaacacaatatttattt

SEQ ID NO: 431030 - DNA, 75 bp, synthetic construct
  source 1..75: mol_type = other DNA
agcgcactgaattcggcatggctaaatgaatccgccaccctgtttcgtcgcaagtattaccagaatggcgcgcac

SEQ ID NO: 431031 - DNA, 75 bp, synthetic construct
  source 1..75: mol_type = other DNA
ggagaatgtcgggtcactaggagatattgaaaaagtggcaaaggtctttgtccgcaatgaactcactccattaca

SEQ ID NO: 431032 - DNA, 75 bp, synthetic construct
  source 1..75: mol_type = other DNA
taaaaatcaaatttcagccgaagctttcagctttggtgatcccattcctgtactggaccgccgcgaactgctgga

SEQ ID NO: 431033 - DNA, 75 bp, synthetic construct
  source 1..75: mol_type = other DNA
aataatggccgctggttcgagccaccggtcagctttaacgggctggcaaaaagcctgcgtgccgccgttcaccac

SEQ ID NO: 431034 - DNA, 75 bp, synthetic construct
  source 1..75: mol_type = other DNA
atgggaaagagtaagaaaaaccgcactgcggcgacgaatcagatccagcataaaaaccaaacttcagccgaagca

SEQ ID NO: 431035 - DNA, 75 bp, synthetic construct
  source 1..75: mol_type = other DNA
atcccgttacaggacaggattcgggaaataaacggctggctcggtcaggaggtcatccgctttaaaaactactca

SEQ ID NO: 431036 - DNA, 75 bp, synthetic construct
  source 1..75: mol_type = other DNA
cgctggtatgagccgccagtaagctttgacggactggcgcgcacctttcgcgccgctgtgcaccacagctcaccg

SEQ ID NO: 431037 - DNA, 75 bp, synthetic construct
  source 1..75: mol_type = other DNA
gaacaccccagcataaggctgccatcaggcgtattgttaattcgatgcctgaaagcaatggcgggcgtgaatcct

SEQ ID NO: 431038 - DNA, 75 bp, synthetic construct
  source 1..75: mol_type = other DNA
aagatgacttttttaatatcaagaaggtaagtgcagaagacctgatgagtgcgcacagggtaccaccacaaatga

SEQ ID NO: 431039 - DNA, 75 bp, synthetic construct
  source 1..75: mol_type = other DNA
tcgaggaaggtgtttactggtacatatcgagctttaacaacccccaccagttcgcacccggctcggtgtttcact

SEQ ID NO: 431040 - DNA, 75 bp, synthetic construct
  source 1..75: mol_type = other DNA
gaaaacatggttaagtcgaaaggccgcaacaactttaaaaatctgtttctctatgccccgcaggggaaagctgac

SEQ ID NO: 431041 - DNA, 75 bp, synthetic construct
  source 1..75: mol_type = other DNA
tcagactggaaacctcaccggcaaaatatacccgccgtggcgtggaggaggatgtttactggtgggtgccgtcct

SEQ ID NO: 431042 - DNA, 75 bp, synthetic construct
  source 1..75: mol_type = other DNA
gtgtttcacctgctggagccggatattaatcaggagctgtacggcctgccggaatatctcagcgcccttaactct

SEQ ID NO: 431043 - DNA, 75 bp, synthetic construct
  source 1..75: mol_type = other DNA
cagaaccgcctgtgacaccggagccacctgttacgccatctgttccacaaccagaacgaaaacatctgtatcgcc

SEQ ID NO: 431044 - DNA, 75 bp, synthetic construct
  source 1..75: mol_type = other DNA
ctccgtaacgcgatgaaaagcgccaaaggtccaggcaacttccgcaacctgtttatgtactcgcctaacggcaaa

SEQ ID NO: 431045 - DNA, 75 bp, synthetic construct
  source 1..75: mol_type = other DNA
gctttcccagcaggatttcagccgctttgtgctggattttctggtatttggtaatgcatttctggaaaagcgtta

SEQ ID NO: 431046 - DNA, 75 bp, synthetic construct
  source 1..75: mol_type = other DNA
ttactggtgggtgccatccttcaacgagccgacacctttcgcgcccggctccgtgtttcacctgctggagccgga

SEQ ID NO: 431047 - DNA, 75 bp, synthetic construct
  source 1..75: mol_type = other DNA
gctggcactggcgattaataaccagcgcctgatgcaatccatctattatggtacggctgaaacggcagcctctat

SEQ ID NO: 431048 - DNA, 75 bp, synthetic construct
  source 1..75: mol_type = other DNA
aatacgaacaaggcgctatctcgcttgcacgtatgaatagccaaatgaaacgcctacaacaacaacaacgtaaga

SEQ ID NO: 431049 - DNA, 75 bp, synthetic construct
  source 1..75: mol_type = other DNA
ttcttaactaagaaagatttaaaagactttgctgataatccggctggtctggttagtaaagctgtcaatggaatg

SEQ ID NO: 431050 - DNA, 75 bp, synthetic construct
  source 1..75: mol_type = other DNA
cgtcgcgatgtcccgtttcaaaaaaccgactggtttacgcctactcgcaaaatgaatgctgatgatgtggtgttt

SEQ ID NO: 431051 - DNA, 75 bp, synthetic construct
  source 1..75: mol_type = other DNA
acccgcgcttgcgtttaacgctgcgtcctgggatgaacgtcgcctatctggcatttaacaccgccaaaccgccgc

SEQ ID NO: 431052 - DNA, 75 bp, synthetic construct
  source 1..75: mol_type = other DNA
tatccggttgggcgacggacagtaatgacccggacagcttcttccgtccattacttagctgcgcggcaatccact

SEQ ID NO: 431053 - DNA, 75 bp, synthetic construct
  source 1..75: mol_type = other DNA
cagacctcgtcgtctgattgtctggccacgcagagcactggcagtctggggagggctgaaatttatcaggcggcg

SEQ ID NO: 431054 - DNA, 75 bp, synthetic construct
  source 1..75: mol_type = other DNA
ttcctgatcaatataaaggcgctggcaccggaacaactaagccagataacagcaattccctgtttaacactatta

SEQ ID NO: 431055 - DNA, 75 bp, synthetic construct
  source 1..75: mol_type = other DNA
atgctattcagaaaaatttaggtgatgcaccgccattaagcaatgaaggaatgaaacagaatctttctaatctcg

SEQ ID NO: 431056 - DNA, 75 bp, synthetic construct
  source 1..75: mol_type = other DNA
aatacgaacaaggcgctatctcgcttgcacgtatgaatagccagatgaaacgcctacaacagcaacaacgtaaga

SEQ ID NO: 431057 - DNA, 75 bp, synthetic construct
  source 1..75: mol_type = other DNA
tgctggcgtgatggctgttagcaaagcgtcggagtttgttagtaacagtttcgctaacgcagagacacaaggaga

SEQ ID NO: 431058 - DNA, 75 bp, synthetic construct
  source 1..75: mol_type = other DNA
ctatcagtgcaatgcaccgcctctctgtagcggaacaatacaaagctattgcacaggctagagagatagcaaaac

SEQ ID NO: 431059 - DNA, 75 bp, synthetic construct
  source 1..75: mol_type = other DNA
gttgaaggcgttggggctggaaaatttaacgctgaaactgtgggtgccaacacgctcgcaagcgtggaaccccag

SEQ ID NO: 431060 - DNA, 75 bp, synthetic construct
  source 1..75: mol_type = other DNA
agaaaaaatcacagcatggtcatgtaataaacctgtttccgtccgttcggtttcttcgtcgacacttaatacagg

SEQ ID NO: 431061 - DNA, 75 bp, synthetic construct
  source 1..75: mol_type = other DNA
ggaactggacggggagaaaattaccgcatggtcatgcaataagcctgtttcttcccgttcatcctttccgtcttc

SEQ ID NO: 431062 - DNA, 75 bp, synthetic construct
  source 1..75: mol_type = other DNA
atggtggtgcctcccggtgagcagaccatatctttcagtgcccctggatgttctcccgtttccagcaccattttt

SEQ ID NO: 431063 - DNA, 75 bp, synthetic construct
  source 1..75: mol_type = other DNA
gctgttccgccgcaagtattacgaaaatggcgctcatgccggatatatcatgtacgtcaccgattgcgtattacc

SEQ ID NO: 431064 - DNA, 75 bp, synthetic construct
  source 1..75: mol_type = other DNA
cggtagcgacctggagtacctcttacaccaccatgatgatggtgctaactgcacttatcggtggcggcatgttgg

SEQ ID NO: 431065 - DNA, 75 bp, synthetic construct
  source 1..75: mol_type = other DNA
gtaaacgtattggcgtccagcagggttcggtatttgaaagttatgccaacaaatactggcgcaacgcgggcgttg

SEQ ID NO: 431066 - DNA, 75 bp, synthetic construct
  source 1..75: mol_type = other DNA
gctaaagttggcaactcactgattggtttgatgttcgtgggtttcgctgcccgactggcgacgctgcaatcctga

SEQ ID NO: 431067 - DNA, 75 bp, synthetic construct
  source 1..75: mol_type = other DNA
ccaaaaagaaactggcaaaagtaggcaactcgctgatcggtctgatgtttgtcggttttgctgcacggctggcaa

SEQ ID NO: 431068 - DNA, 75 bp, synthetic construct
  source 1..75: mol_type = other DNA
gtacgatatcaaagggctggttcttagcccatttggtaacgcctccttcgctggcgtataccgcgaaaagcaaga

SEQ ID NO: 431069 - DNA, 75 bp, synthetic construct
  source 1..75: mol_type = other DNA
cagtgggatccagaccggaggaccagatagtctttcacaacgtgaccgccaggcctttgccgcggagctggagaa

SEQ ID NO: 431070 - DNA, 75 bp, synthetic construct
  source 1..75: mol_type = other DNA
gcgattttatggataccttacgtgccagtgggatccagaccgggggaccagatagcctttcacaacgtgaccgcc

SEQ ID NO: 431071 - DNA, 75 bp, synthetic construct
  source 1..75: mol_type = other DNA
attactggacctatctggcgggagccatttttatcgtgttggtacctgggccaaatacgctgtttgtgctgaaaa

SEQ ID NO: 431072 - DNA, 75 bp, synthetic construct
  source 1..75: mol_type = other DNA
ctaccgggcatcatggtcggcctcctgaccgtatggatgaactggacaactttctgcctgaagacaaagctgccg

SEQ ID NO: 431073 - DNA, 75 bp, synthetic construct
  source 1..75: mol_type = other DNA
gcagtgccatgcgtaacagtgcatatgtctatcccgatcatggacgaatctggctgacgcagcgtgtactgcgtg

SEQ ID NO: 431074 - DNA, 75 bp, synthetic construct
  source 1..75: mol_type = other DNA
attacagcggcatatccgcgatattaatggtcagttaaagcgtgacggaaaagacgagcgttcccctcctgaatt

SEQ ID NO: 431075 - DNA, 75 bp, synthetic construct
  source 1..75: mol_type = other DNA
ttgcgtattccctactatcgcccgctcgaaccgctacaaccgggctttttgcccggccgtgccgagcagcatctc

SEQ ID NO: 431076 - DNA, 75 bp, synthetic construct
  source 1..75: mol_type = other DNA
gatccacgcctgtgacgcttatatgtcgtgcattcttgaagggctgatcgagcggcaggcgcgtggcggaaacag

SEQ ID NO: 431077 - DNA, 75 bp, synthetic construct
  source 1..75: mol_type = other DNA
gttactggttgtggcatcattatttaattgaatgtgaagagttgcttccttcatcttcactctctttgcgcaaac

SEQ ID NO: 431078 - DNA, 75 bp, synthetic construct
  source 1..75: mol_type = other DNA
gcgatgagattattgtcagcgtggcagaacaccacgccaacctcgtcccctggctgatggtcgcccaacaaactg

SEQ ID NO: 431079 - DNA, 75 bp, synthetic construct
  source 1..75: mol_type = other DNA
ccatcagaacgttctcagctttacaggcttctggatgacaatggtaggcaaaacgcacgagcagccatagttcag

SEQ ID NO: 431080 - DNA, 75 bp, synthetic construct
  source 1..75: mol_type = other DNA
gaggatgaacgtgcttataattttaaaaaagcaagagatcttgaaatcggacgttgggggttaacattacttagt

SEQ ID NO: 431081 - DNA, 75 bp, synthetic construct
  source 1..75: mol_type = other DNA
gcaaatcagaactgctggaagcgatgtcaccctggctgggtggcggcaaaatgattcacgaagtgagttttgacg

SEQ ID NO: 431082 - DNA, 75 bp, synthetic construct
  source 1..75: mol_type = other DNA
gccctgcgggccgggcagcattgcgctcagccgctactggcagaattaggcgtaaccggcacactgcgcgcctct

SEQ ID NO: 431083 - DNA, 75 bp, synthetic construct
  source 1..75: mol_type = other DNA
ctatagccttagcgccggaaacgtccatcgcagccagtttgccgaagcccaacgtctgaccgcacgttatgaggc

SEQ ID NO: 431084 - DNA, 75 bp, synthetic construct
  source 1..75: mol_type = other DNA
acgcagacctcatgatgggcgacagattaattggcgaagcaccggaatataccctggagcaatggctgcgttgcg

SEQ ID NO: 431085 - DNA, 75 bp, synthetic construct
  source 1..75: mol_type = other DNA
tgcaggtcacggttcgtctgccgcataaatttctctgctacatcgtcttttccatcttctgcatcatgggcacct

SEQ ID NO: 431086 - DNA, 75 bp, synthetic construct
  source 1..75: mol_type = other DNA
acagcggcaagatccggagatggcaaacgtgattttagccaccgatgacgaaagctgcgggtattcagcttcgga

SEQ ID NO: 431087 - DNA, 75 bp, synthetic construct
  source 1..75: mol_type = other DNA
gctcaatttttcgcctggttgttgtgctggcacgatattggaaaatttgcccgctcttttcagcaactttacctg

SEQ ID NO: 431088 - DNA, 75 bp, synthetic construct
  source 1..75: mol_type = other DNA
tatattgctggataaacgcgccatgtttgagaaatatacctcggcgttttcggcaacggcgctaaaagtggctgc

SEQ ID NO: 431089 - DNA, 75 bp, synthetic construct
  source 1..75: mol_type = other DNA
agggttactcggcggtctggttcacagcattctgatccatcgtggccgtaccgataaggtttttaacccgattac

SEQ ID NO: 431090 - DNA, 75 bp, synthetic construct
  source 1..75: mol_type = other DNA
tgcggtgcgtctggtgagtaatattgctgcaccaatgatggtcaccaataccgtcggcgcggcgctgtttatgcg

SEQ ID NO: 431091 - DNA, 75 bp, synthetic construct
  source 1..75: mol_type = other DNA
atgcgtaaatatcctttaagtttactgaaggataaaaatattgtgactttctttgatttctggggaaaaacccga

SEQ ID NO: 431092 - DNA, 75 bp, synthetic construct
  source 1..75: mol_type = other DNA
agtatcaacgtctgtggcaaccttctgccggaaagccgcaaaccgtcaccgtcagcgaactggccgaacgctgtt

SEQ ID NO: 431093 - DNA, 75 bp, synthetic construct
  source 1..75: mol_type = other DNA
gtggcaaccttccgccggaaagccgcaaaccgtcaccatcagcgaactggccgaacgctgtttttgcagcgaacg

SEQ ID NO: 431094 - DNA, 75 bp, synthetic construct
  source 1..75: mol_type = other DNA
gcgcaagaaagaattacgaaaagatctctcattcaacgctgggctactggctgtggcatcattatttaagtgaat

SEQ ID NO: 431095 - DNA, 75 bp, synthetic construct
  source 1..75: mol_type = other DNA
agggtttgttttttggcctgccaacaatggcaacggccaatgccatgtacgatcggctggtcaaaacctggcttg

SEQ ID NO: 431096 - DNA, 75 bp, synthetic construct
  source 1..75: mol_type = other DNA
gcagcgcgacaaacttgttaccgcctttgcgcgtggcacagagggccagcaagaagctccattgctggaaaaaga

SEQ ID NO: 431097 - DNA, 75 bp, synthetic construct
  source 1..75: mol_type = other DNA
gctacacaccgcaaaaccgcagtaaagataacggtcgcgtggtagtcgaaggtgtcggcaacctgatgcaccata

SEQ ID NO: 431098 - DNA, 75 bp, synthetic construct
  source 1..75: mol_type = other DNA
gcagatattgtggcgttaatctggcttttgaccaatcgacgtttacgcgcttgttttaatgaagaaaaagaataa

SEQ ID NO: 431099 - DNA, 75 bp, synthetic construct
  source 1..75: mol_type = other DNA
tgtggctgaacggtgaatccgttagcggtatcggtctggcgctggtagtggcggatattgtggcgttaatctggc

SEQ ID NO: 431100 - DNA, 75 bp, synthetic construct
  source 1..75: mol_type = other DNA
aaacgttcgccagctgactccggcaatcctcgctgtcctgccgattgaataccgcaatcgtctgctaccagaaga

SEQ ID NO: 431101 - DNA, 75 bp, synthetic construct
  source 1..75: mol_type = other DNA
ggaacagtcagaacgagtgtaatgctgctgttaaggctttcaaatccattaaggccactaaaaaacacggtatct

SEQ ID NO: 431102 - DNA, 75 bp, synthetic construct
  source 1..75: mol_type = other DNA
ctctggttgcgtcagagcagataaagcagcatcactcggaagccttcgctgcaagaaggcagaagaagtcgagcg

SEQ ID NO: 431103 - DNA, 75 bp, synthetic construct
  source 1..75: mol_type = other DNA
ggaagtatttgcctgccaaacgtagctctttacgcggcaggctaccggaaatcaaaacaactgacggcgagatga

SEQ ID NO: 431104 - DNA, 75 bp, synthetic construct
  source 1..75: mol_type = other DNA
tcaacgagccgacagccttcgcgcccggctccgtgtttcacctgctggagccggatattaatcaggagctgtacg

SEQ ID NO: 431105 - DNA, 75 bp, synthetic construct
  source 1..75: mol_type = other DNA
attgagaaagtggcaaaggtctttgtccgcaatgagcttatcccgctacaggacaggattcgggaaataaacggc

SEQ ID NO: 431106 - DNA, 75 bp, synthetic construct
  source 1..75: mol_type = other DNA
aaatctgttgcgcggtctggatacttacggctgtgccacctcgctgattcctgctgaccctaccgcagcaccggc

SEQ ID NO: 431107 - DNA, 75 bp, synthetic construct
  source 1..75: mol_type = other DNA
atttgcccctatatttccagacacctgttatcacttaacccattactggcctgctgccgcagatattcccgtggc

SEQ ID NO: 431108 - DNA, 75 bp, synthetic construct
  source 1..75: mol_type = other DNA
agtgaaggtattgtatcgatgtttcgtgtggacccagatctggctggtccattgatggcgatggttactaccatg

SEQ ID NO: 431109 - DNA, 75 bp, synthetic construct
  source 1..75: mol_type = other DNA
ctcgcagactgggccgaacggtgcgagtcagtcataccgctatgtcgatttcaacaaacgatggaaggcggccta

SEQ ID NO: 431110 - DNA, 75 bp, synthetic construct
  source 1..75: mol_type = other DNA
ttctttcagcaacgcttgttacttcatctggtgcgctcgctgctaacgcgcttgcaccatttgaaggggtttcct

SEQ ID NO: 431111 - DNA, 75 bp, synthetic construct
  source 1..75: mol_type = other DNA
attacgtcgcgaacccgaaaccgaacggttatcagtctattcacaccgtggtgctggggccgggcggtaaaaccg

SEQ ID NO: 431112 - DNA, 75 bp, synthetic construct
  source 1..75: mol_type = other DNA
cttgctaatgcgctggcgtttacaccagcgggcagggctggaacggtgcttggtgccataggaaaatcagcagct

SEQ ID NO: 431113 - DNA, 75 bp, synthetic construct
  source 1..75: mol_type = other DNA
atgaaactgctgattgtcgaagatgaaaagaaaaccggagaatacttgaccaaagggttaaccgaagccggtttt

SEQ ID NO: 431114 - DNA, 75 bp, synthetic construct
  source 1..75: mol_type = other DNA
gctatacgccgcaaaaccgcagtaaagataacggtcgcgtggtggtagaaggtgtcggcaacctgatgcaccaca

SEQ ID NO: 431115 - DNA, 75 bp, synthetic construct
  source 1..75: mol_type = other DNA
atgtcggacaccgctgcatcggggcaaaaattggcgggcgcatcgtgccgttcacctaccagttgcagatgggcg

SEQ ID NO: 431116 - DNA, 75 bp, synthetic construct
  source 1..75: mol_type = other DNA
taacctgcaagtgctggggcgcgtgctgggtaaactcaatcaggtgccagatgttatcgatgcaagacgactgca

SEQ ID NO: 431117 - DNA, 75 bp, synthetic construct
  source 1..75: mol_type = other DNA
aagatctggctaaacatacgttattacacgatgcgtcccggcgtgactggcagacatatactcgccagttggggt

SEQ ID NO: 431118 - DNA, 75 bp, synthetic construct
  source 1..75: mol_type = other DNA
actgggtgcggacgattatctggttaaaccctttgcgtttgccgaactgctcgcccgggtgagaacccttctgag

SEQ ID NO: 431119 - DNA, 75 bp, synthetic construct
  source 1..75: mol_type = other DNA
cctaaccttatatggtttctcgaccctgatcgtatcaatagtttcatttgcaagtacctggaggaaaataaactg

SEQ ID NO: 431120 - DNA, 75 bp, synthetic construct
  source 1..75: mol_type = other DNA
aaaatagacaatgattacgagccgaagcttatccagacggtacggggcgtgggctacatgcttgaggtccctgat

SEQ ID NO: 431121 - DNA, 75 bp, synthetic construct
  source 1..75: mol_type = other DNA
tcgcccgggtaagaaccctcctcaggcggggaaacacgatgatcacggaaagccagcttaaagtggctgacctct

SEQ ID NO: 431122 - DNA, 75 bp, synthetic construct
  source 1..75: mol_type = other DNA
aagccctttgcgtttgctgaactgctcgcccgggtaagaaccctcctcaggcggggaaacacgatgatcacggaa

SEQ ID NO: 431123 - DNA, 75 bp, synthetic construct
  source 1..75: mol_type = other DNA
gacactatgactgcctggacctgttaacgctgcccgacgattacctgccgcgcactaactatattccagcatgtg

SEQ ID NO: 431124 - DNA, 75 bp, synthetic construct
  source 1..75: mol_type = other DNA
caacggcggcgtgaaaatgcagagtgacctggagagcggcgaccggatcaccatccatagtcatcagttcagcgt

SEQ ID NO: 431125 - DNA, 75 bp, synthetic construct
  source 1..75: mol_type = other DNA
aaaacgaattttactctaaccactatttgggtgaggttttcaccagtgatatccgcgatgtgctggaaccctgga

SEQ ID NO: 431126 - DNA, 75 bp, synthetic construct
  source 1..75: mol_type = other DNA
taacagcgcctaccagaagctgcgttgggtaatggactactggtgcgcgctgtggttctggccgatcgacaaagc

SEQ ID NO: 431127 - DNA, 75 bp, synthetic construct
  source 1..75: mol_type = other DNA
aatcagcatatgcttttcccaattggtcacagggttaaattcagcattaatatttatacggcttcacagaatcaa

SEQ ID NO: 431128 - DNA, 75 bp, synthetic construct
  source 1..75: mol_type = other DNA
cagctggcgcaaagagtttattaaaagctttgccgggcatgagattgctgatgtgcagcgtatcagcgaaaaggt

SEQ ID NO: 431129 - DNA, 75 bp, synthetic construct
  source 1..75: mol_type = other DNA
gtgaagtgatcgccagcctcaatcaacgcgatacgccgctgacgttaccgctggacattcgcggcactgcttttc

SEQ ID NO: 431130 - DNA, 75 bp, synthetic construct
  source 1..75: mol_type = other DNA
atgttcgggctgcatttttaggacttgagtctgatttgaaagagaaacaaacaaaacgtattacactggttttga

SEQ ID NO: 431131 - DNA, 75 bp, synthetic construct
  source 1..75: mol_type = other DNA
cgccctgatttctgtattggtcattataaggttgatgagatcattgattttactgaacctggtgatgctatggga

SEQ ID NO: 431132 - DNA, 75 bp, synthetic construct
  source 1..75: mol_type = other DNA
ttccatccatatttttcttctctggtttttcatttgcaacaacacaacctcttgtcacaataggagaacttgaag

SEQ ID NO: 431133 - DNA, 75 bp, synthetic construct
  source 1..75: mol_type = other DNA
gacctgagtaccgtagaaaaggaaaccatcgatactatatccggtaacgtgcgtcgtgcctttataggtctgtat

SEQ ID NO: 431134 - DNA, 75 bp, synthetic construct
  source 1..75: mol_type = other DNA
acctccggcgtgcgaacgtgacacgatctcaatcacgatccgtaaaccgtcaaaaattcaaattccgcatcaggc

SEQ ID NO: 431135 - DNA, 75 bp, synthetic construct
  source 1..75: mol_type = other DNA
acaccccggaagtgctgacccgctcactggttaaatatgccctgaaagaactgtttaaagagcaaattgatccga

SEQ ID NO: 431136 - DNA, 75 bp, synthetic construct
  source 1..75: mol_type = other DNA
tcgtccggcgattttatggaacgatacccgcagtgcacttgagtgtgcggagctggaagagatagcaccggagct

SEQ ID NO: 431137 - DNA, 75 bp, synthetic construct
  source 1..75: mol_type = other DNA
aaagtggaatggcaggaagccggcgtgctgggtgattacgagccggagtttgtgctacgtaagctgagtgcatcg

SEQ ID NO: 431138 - DNA, 75 bp, synthetic construct
  source 1..75: mol_type = other DNA
aactctgcccgacgactatttgccgcgcactaactatattccggcatgtgatgcacaggagtatgcaaagcgcac

SEQ ID NO: 431139 - DNA, 75 bp, synthetic construct
  source 1..75: mol_type = other DNA
catcggaagttaaggcgctggtcattgatgaaaacaatgaaatagtcgccacacatagcgcgccgctgactattc

SEQ ID NO: 431140 - DNA, 75 bp, synthetic construct
  source 1..75: mol_type = other DNA
acaaatgtaatcgaacccctacgcaatggagatactaaaggccaaatacaaaaagcaacactacgtaagttagaa

SEQ ID NO: 431141 - DNA, 75 bp, synthetic construct
  source 1..75: mol_type = other DNA
aattcccgttgcagtagtacagcaaacattatcacaatacttctatcaattaagacaagtattaagaagtattcc

SEQ ID NO: 431142 - DNA, 75 bp, synthetic construct
  source 1..75: mol_type = other DNA
cagtacgaagcggatacctggtacgatcaaaacggtcgcattatctttaccccaagcaaagggctggtgggcgtt

SEQ ID NO: 431143 - DNA, 75 bp, synthetic construct
  source 1..75: mol_type = other DNA
agcggcctggcgcagcgagtatgaaggctgtgaagggatgcaaaacttcctgaatgcgcagcagaactacccggt

SEQ ID NO: 431144 - DNA, 75 bp, synthetic construct
  source 1..75: mol_type = other DNA
aagtatgtgaactgagtagtgactttgactacgttgacccaatatttttagcggaggattatttccctcgaacaa

SEQ ID NO: 431145 - DNA, 75 bp, synthetic construct
  source 1..75: mol_type = other DNA
agtcactgaagttgcggagcacaccactggcgatctgtttgccgaagacggcctgctgcgagaagagtcttcgct

SEQ ID NO: 431146 - DNA, 75 bp, synthetic construct
  source 1..75: mol_type = other DNA
ctacaccccagacttcaacacccagcgttggagccgcgatctcccgctgctgccccaggatttcttcgccaatct

SEQ ID NO: 431147 - DNA, 75 bp, synthetic construct
  source 1..75: mol_type = other DNA
ggcgcaaaaccgtctgctacgttttgattttgaagagattttaagtcgtcgtgaaacggatacgctgaaagcgac

SEQ ID NO: 431148 - DNA, 75 bp, synthetic construct
  source 1..75: mol_type = other DNA
aataaaaacttccgccagtcgttgtttgccgcgcaagatgcgcaaagcatcctgacgctgctggaaacggaatta

SEQ ID NO: 431149 - DNA, 75 bp, synthetic construct
  source 1..75: mol_type = other DNA
ggagcgagaacggaggcgacggtgacgcattcgtcagggaagaacgcgaagcgatggacgttgtgttgcaggcgc

SEQ ID NO: 431150 - DNA, 75 bp, synthetic construct
  source 1..75: mol_type = other DNA
gtggggatgtgcgtcacatagcccaggacggaacctgtcacgatgagctgaaaccgtcatgcagcggctggacga

SEQ ID NO: 431151 - DNA, 75 bp, synthetic construct
  source 1..75: mol_type = other DNA
atgaaattacgtgattcgctggctgaaaataaatccatccgcctgcaggccgaagcaaatacctggcaggaagcg

SEQ ID NO: 431152 - DNA, 75 bp, synthetic construct
  source 1..75: mol_type = other DNA
atgcagcggctggacgatgcatttgaaaatggagcaaatgacagagttgttaacgaaattgtaaatgaactgatg

SEQ ID NO: 431153 - DNA, 75 bp, synthetic construct
  source 1..75: mol_type = other DNA
tcatgcagcggctggacgatgcttttgtatatggcgcatgtgacagagttgtttccgatattgtcaatgaactga

SEQ ID NO: 431154 - DNA, 75 bp, synthetic construct
  source 1..75: mol_type = other DNA
cacaggtccgggacaaaatctcagcggctgcaacgcgttgcggccgttctccagaagaaattacgctgcttgcag

SEQ ID NO: 431155 - DNA, 75 bp, synthetic construct
  source 1..75: mol_type = other DNA
acagtgaaatcagcaatcacctgcaaactctcgcccaaaataacatcgcccagttcgcgcagtttagtagcgaag

SEQ ID NO: 431156 - DNA, 75 bp, synthetic construct
  source 1..75: mol_type = other DNA
cctgttattgctggggatagtttctctttgcgcactgattctgatcctctggcgcgtggtttatcgctcagtcac

SEQ ID NO: 431157 - DNA, 75 bp, synthetic construct
  source 1..75: mol_type = other DNA
atctcccgttcgttacgtcagcaaggcgaactggtggggcagcgtttgcaactgcgccagcaacagcaacaactc

SEQ ID NO: 431158 - DNA, 75 bp, synthetic construct
  source 1..75: mol_type = other DNA
gtcagacgatgagctggaaaccgtcatgcagcggctggacgatgcctttgaatatggtgcggatgtcagcgttgt

SEQ ID NO: 431159 - DNA, 75 bp, synthetic construct
  source 1..75: mol_type = other DNA
acgatttgatcgaacaagatcagcgtcaggccgcagaaagtgcactcgatcggctgattgatatcgatcttgagt

SEQ ID NO: 431160 - DNA, 75 bp, synthetic construct
  source 1..75: mol_type = other DNA
ggcattacccttgcccgacaactggtacagcaatatccgtcgctggttttgattggctttagcgcccatgtcatc

SEQ ID NO: 431161 - DNA, 75 bp, synthetic construct
  source 1..75: mol_type = other DNA
atcaggcgctacgtgagatagcaaaacaggcaacacagggcgaatgggtcgcatttatttcgccgggcaaacacg

SEQ ID NO: 431162 - DNA, 75 bp, synthetic construct
  source 1..75: mol_type = other DNA
caatgcccgtttgttggccggtccgaccggtggagcagtagcattaatcaattatctgaatgagacgtgtcgatg

SEQ ID NO: 431163 - DNA, 75 bp, synthetic construct
  source 1..75: mol_type = other DNA
ccgattattcagtgctgttattgattgctgaaaacagggtctccataccagaaaatttctctcatcctgatggcg

SEQ ID NO: 431164 - DNA, 75 bp, synthetic construct
  source 1..75: mol_type = other DNA
tttttatgtattcttttgtgctttcaagattatggcgtaagaaaattgcaatacgattattgttgtatattcaag

SEQ ID NO: 431165 - DNA, 75 bp, synthetic construct
  source 1..75: mol_type = other DNA
agctgagtatgagtagcccgcgcattccggcggtgaaaagccagcttcgtcaactggatagcgaggcgtgtcggg

SEQ ID NO: 431166 - DNA, 75 bp, synthetic construct
  source 1..75: mol_type = other DNA
gattaaagcgtgctcatctttggttaacgatgcccgtgccgagctggtaattcttggggtgaaaaatgaatatca

SEQ ID NO: 431167 - DNA, 75 bp, synthetic construct
  source 1..75: mol_type = other DNA
tttgatcggctgctgaaaaagctcagcgttgaagccgctatcaatgcagagatgacacaccaaccatcctgggta

SEQ ID NO: 431168 - DNA, 75 bp, synthetic construct
  source 1..75: mol_type = other DNA
tcaaataggctctctgacgtggtgaagtataaaaatacgggggataatttagggggggctggcgggttttataga

SEQ ID NO: 431169 - DNA, 75 bp, synthetic construct
  source 1..75: mol_type = other DNA
agggggacattacggaatcctcatggggaacctgaggcgcgatggggattacttcaacctgtccagccttgtgga

SEQ ID NO: 431170 - DNA, 75 bp, synthetic construct
  source 1..75: mol_type = other DNA
gccaacaggaacgcgtgactcaattagctaataggcacgtatatcactacaacgcagtgagcaatgttagcggca

SEQ ID NO: 431171 - DNA, 75 bp, synthetic construct
  source 1..75: mol_type = other DNA
ttctttttgactggaaaaaaaaatataaacagaatattttcagcttatttggattctaaagagttaactaactct

SEQ ID NO: 431172 - DNA, 75 bp, synthetic construct
  source 1..75: mol_type = other DNA
cattgcttataactattatgtatatattgaaatcaatgttaactggaaatgtaaaagccgctaggatatgttttg

SEQ ID NO: 431173 - DNA, 75 bp, synthetic construct
  source 1..75: mol_type = other DNA
tcgtattgggattaggatatgcattgtcgtgtgtattgaaatgcaatttttctcaacttcccgttatatggcgtg

SEQ ID NO: 431174 - DNA, 75 bp, synthetic construct
  source 1..75: mol_type = other DNA
gacaaacattcagcggtggcctttctggtgaactatccggcaatgcttctacagctgcaaaattaaaaactgcca

SEQ ID NO: 431175 - DNA, 75 bp, synthetic construct
  source 1..75: mol_type = other DNA
cttacgtccgcatacaaggatgcggaaaaaccacatacaggtgaggggaaaaccaccaggcctgtacgtggaaaa

SEQ ID NO: 431176 - DNA, 75 bp, synthetic construct
  source 1..75: mol_type = other DNA
agcattctgaaaggaggctatgtcatagacgcgattgatcctaaagatggtatcaacatctcccgcccagacgaa

SEQ ID NO: 431177 - DNA, 75 bp, synthetic construct
  source 1..75: mol_type = other DNA
gaaaataaccactgtggatgaattaatacaattcatggctgaacaatctacatattgtgcgtgtgagctaaaaaa

SEQ ID NO: 431178 - DNA, 75 bp, synthetic construct
  source 1..75: mol_type = other DNA
ctccgtggatgaactgacaaaattaacgacagaagtcaccagctattgcgctgatgaatttaagaaactgaacga

SEQ ID NO: 431179 - DNA, 75 bp, synthetic construct
  source 1..75: mol_type = other DNA
cccgctttgtgctgcatggggcgagcgatgtgccggatgagtatgttcgtcgcaccattgggccaggcgtctgca

SEQ ID NO: 431180 - DNA, 75 bp, synthetic construct
  source 1..75: mol_type = other DNA
agcaactggatattgatttctatgctttctctggtcacaaactgtatggcccgacgggtatcggcgtgctgtatg

SEQ ID NO: 431181 - DNA, 75 bp, synthetic construct
  source 1..75: mol_type = other DNA
atgaacgtttttaatcccgcgcagtttcgcgcccagtttcccgcacttcaggatgcgggcgtctatctcgacagc

SEQ ID NO: 431182 - DNA, 75 bp, synthetic construct
  source 1..75: mol_type = other DNA
cgccttcatcgctgagccgtctgtactgcgtaaagcggcccgtgcagtaaaacaggaggcccgccatgcagatta

SEQ ID NO: 431183 - DNA, 75 bp, synthetic construct
  source 1..75: mol_type = other DNA
gagtagctctgacaagaatgcgaaagccaaactatctacagaagttattgaatatataaacgatcctcgtaatgg

SEQ ID NO: 431184 - DNA, 75 bp, synthetic construct
  source 1..75: mol_type = other DNA
attgatgctgatttaggtgctggtgagttgcaatcagtgaaggcggctatttctgcgaaagcaaataacttgaca

SEQ ID NO: 431185 - DNA, 75 bp, synthetic construct
  source 1..75: mol_type = other DNA
atttgcaaacggtgaaagcagctatttcagctaaagcgaataatttgacaacgacggtcaataatagccagcttg

SEQ ID NO: 431186 - DNA, 75 bp, synthetic construct
  source 1..75: mol_type = other DNA
ttaataactggctaaagattgcggttatgaaaaacggtgaattatcgcttgctgacattaagcgcgataaagaaa

SEQ ID NO: 431187 - DNA, 75 bp, synthetic construct
  source 1..75: mol_type = other DNA
attggttaacgccgtaatgaaaacaatcaactggctgatgaaaaacgacgagaagacggatgatcctacccacgt

SEQ ID NO: 431188 - DNA, 75 bp, synthetic construct
  source 1..75: mol_type = other DNA
agcgggagtattggcggcggtgctgcggctgttatgctgggtggcttaggcgctggcgctacgtatatggctatg

SEQ ID NO: 431189 - DNA, 75 bp, synthetic construct
  source 1..75: mol_type = other DNA
aggagaattaatccaacgtgcaaggcttggtggagttgattacaacttacttaataatcttgagcgttgggcata

SEQ ID NO: 431190 - DNA, 75 bp, synthetic construct
  source 1..75: mol_type = other DNA
tccccttactattaattctgacacatcaagattaagcgattatgtggattttacagcgagagcaagtcgggatag

SEQ ID NO: 431191 - DNA, 75 bp, synthetic construct
  source 1..75: mol_type = other DNA
acactattaaaggctggtttacgccagaagaaacggtaggcggggcgcaggctgtaaatcaatacactctcgaag

SEQ ID NO: 431192 - DNA, 75 bp, synthetic construct
  source 1..75: mol_type = other DNA
ggcgaacaaggtaaacgtaagtatctggatcagatgaaagatgtgcgtgaacgtgcaaccaaatcttatgatgaa

SEQ ID NO: 431193 - DNA, 75 bp, synthetic construct
  source 1..75: mol_type = other DNA
ggcgctctggtccctgccccgctggaccggccggatacggcagtttttcgatcaccttcccccctggagtatgta

SEQ ID NO: 431194 - DNA, 75 bp, synthetic construct
  source 1..75: mol_type = other DNA
cccgcgcaattgccaaaggcatgctctacctgagcctgctgatttcggtcgtcatggtcttcggctgtctgggca

SEQ ID NO: 431195 - DNA, 75 bp, synthetic construct
  source 1..75: mol_type = other DNA
tatcgcaccggaaggtgaacagcgctataacatggttattcccggtaattactttgaagcagaggtcagtgccga

SEQ ID NO: 431196 - DNA, 75 bp, synthetic construct
  source 1..75: mol_type = other DNA
ttaatggcaatcgtaacgctcacgctaaagcctatgcacctgttaagggtagcgggagtattggcggcggtgctg

SEQ ID NO: 431197 - DNA, 75 bp, synthetic construct
  source 1..75: mol_type = other DNA
gctgtaaatcaatacagtctcgaaggacaaaacattgcaaatctgaaacagagtgcagcacaacaagctttcaag

SEQ ID NO: 431198 - DNA, 75 bp, synthetic construct
  source 1..75: mol_type = other DNA
gtcgtcatggtcttcggctgtctgggcattatggccagcagcatgatggccctgcgcgaccttgtgaacatgtaa

SEQ ID NO: 431199 - DNA, 75 bp, synthetic construct
  source 1..75: mol_type = other DNA
taaggtggtgctggaccccagggcactgcagggaaactttgtgaccgccacgttccagcatcgctggctgggacc

SEQ ID NO: 431200 - DNA, 75 bp, synthetic construct
  source 1..75: mol_type = other DNA
ctcgccaacagattgaagaagtaaatactcgcttacagagcacaatggtgtttcgcgcgagcattcgtcaccagg

SEQ ID NO: 431201 - DNA, 75 bp, synthetic construct
  source 1..75: mol_type = other DNA
tgtctggcgctgtatcacgaaacgccgcgcctctccaacgtttcgcaatcgcaaaatgacctgatgacccgcgat

SEQ ID NO: 431202 - DNA, 75 bp, synthetic construct
  source 1..75: mol_type = other DNA
ggatctggtcagccataaaacgcgtattgactcgctgttccttgatgaaggttttggcacgctggatagcgaaac

SEQ ID NO: 431203 - DNA, 75 bp, synthetic construct
  source 1..75: mol_type = other DNA
gcagcaaattgctcaaatgacgcagcaggttgaggactggggatatctgaattcgctaataggttccaaagaggg

SEQ ID NO: 431204 - DNA, 75 bp, synthetic construct
  source 1..75: mol_type = other DNA
cagcttgccgacgtcaaaaccatttgcgagcaggaagagcgcatcaaaacgctggaagcacagcgcgcacagtta

SEQ ID NO: 431205 - DNA, 75 bp, synthetic construct
  source 1..75: mol_type = other DNA
ttctcccaacaaaccagcgatcgcgagcatctgcggcaatggcagcaacagttaacccatgcagagcaaaaactt

SEQ ID NO: 431206 - DNA, 75 bp, synthetic construct
  source 1..75: mol_type = other DNA
accatcaatcatttttttcacagcctctcctgatggctcaggtattatcttttgactttctcgctcttcattata

SEQ ID NO: 431207 - DNA, 75 bp, synthetic construct
  source 1..75: mol_type = other DNA
tggttttgcgccgggcgatcagcttgatggcgactatgtaaacgccgttacccgtgaaggctttaaaattgccca

SEQ ID NO: 431208 - DNA, 75 bp, synthetic construct
  source 1..75: mol_type = other DNA
tgcaagagagtggaacggctattgaacaatgttcgctggtggggggaggggcgagaagtccgttctgggcgcaac

SEQ ID NO: 431209 - DNA, 75 bp, synthetic construct
  source 1..75: mol_type = other DNA
gttgaggactggggatatctgaattcgctaataggttccaaagagggcgataaattccgcaagtttgcccaaggg

SEQ ID NO: 431210 - DNA, 75 bp, synthetic construct
  source 1..75: mol_type = other DNA
cactccttcacctaaaaatgaacttacttcaatttaccatgacctgcaggtaacggatgaacccagggaaatggt

SEQ ID NO: 431211 - DNA, 75 bp, synthetic construct
  source 1..75: mol_type = other DNA
gctggattgactccctgctcagaggctgaatgggatcactctctgctgaagaaataccaagatttgtataatcct

SEQ ID NO: 431212 - DNA, 75 bp, synthetic construct
  source 1..75: mol_type = other DNA
aaaaacttaatgcgcttgcggcgatcacgttgacgttaaccgccgatgaagttgctagcgccctggcgcaacatg

SEQ ID NO: 431213 - DNA, 75 bp, synthetic construct
  source 1..75: mol_type = other DNA
tcgttctgcagtgcgatgttgcagaagatgccagcatcgacaccatgttcgctgaactggggaaagtttggccga

SEQ ID NO: 431214 - DNA, 75 bp, synthetic construct
  source 1..75: mol_type = other DNA
atggcgcactggatatgaccaaaggttccgccagtgatctggagtcttttgataatatttatgctatctataatt

SEQ ID NO: 431215 - DNA, 75 bp, synthetic construct
  source 1..75: mol_type = other DNA
cgcagtttctatgcgaaaaaaccgattaccaaaccagaagaccttaaagggctgaaaattcgtgttcaaccaagt

SEQ ID NO: 431216 - DNA, 75 bp, synthetic construct
  source 1..75: mol_type = other DNA
ccgggacaggatgacggtacgcaggcccgtcgtcagccggttcggtacagtgctcccctgccggtgttactgacc

SEQ ID NO: 431217 - DNA, 75 bp, synthetic construct
  source 1..75: mol_type = other DNA
tgatccccgggcccttcaggggcgttttgtggcggcgactttccagcatcgctggctgggtgctgccggtacgcc

SEQ ID NO: 431218 - DNA, 75 bp, synthetic construct
  source 1..75: mol_type = other DNA
gggctcatatattaaaagttgcagcaacaaatcactggcaagaaggaacagatgaaatgttgccggattaccggg

SEQ ID NO: 431219 - DNA, 75 bp, synthetic construct
  source 1..75: mol_type = other DNA
tactcaacaatggcaagccgtcacggccagcctcaatatcaccttgcagccacaggacgatattcaaccgtggct

SEQ ID NO: 431220 - DNA, 75 bp, synthetic construct
  source 1..75: mol_type = other DNA
ccgtttgccagcaacgggctgtttgcgattaccggcccgactggcgcggggaaaaccactctgctcgacgccatc

SEQ ID NO: 431221 - DNA, 75 bp, synthetic construct
  source 1..75: mol_type = other DNA
aattaacggcgacattaaccggactggattacggacgtttcacccgttcgatgctgctttcgcagggccaatttg

SEQ ID NO: 431222 - DNA, 75 bp, synthetic construct
  source 1..75: mol_type = other DNA
ccgaagttgccgctgcgcaggcacaacatgccgaacaacgtccgctgcgtcagcgcctgatcgcactatatgggc

SEQ ID NO: 431223 - DNA, 75 bp, synthetic construct
  source 1..75: mol_type = other DNA
cagcgcctggttgcgctgcacgggcagatactccctcagcaaaaacggctggcgcagctacaagccgctattcag

SEQ ID NO: 431224 - DNA, 75 bp, synthetic construct
  source 1..75: mol_type = other DNA
cgcgccgtcgtcaacaaacgctgcaacaggcactggcagaggaagaaaaagcgcaaccccaactggcggcactcc

SEQ ID NO: 431225 - DNA, 75 bp, synthetic construct
  source 1..75: mol_type = other DNA
cttttttgaacgttatggttttcagacagttaagcagcaacgcgttgaatgtcggggagagtggtttattaattt

SEQ ID NO: 431226 - DNA, 75 bp, synthetic construct
  source 1..75: mol_type = other DNA
ttggcgtgacggcgctggtgccgtacatggatgtgtggacgcataaaccggtgcagtactatcacgggaaacatc

SEQ ID NO: 431227 - DNA, 75 bp, synthetic construct
  source 1..75: mol_type = other DNA
ggcagaagagaaacatcagtgcggtgaactggaaaagtcacaccaccagctggtggcctcatatgcatcactgaa

SEQ ID NO: 431228 - DNA, 75 bp, synthetic construct
  source 1..75: mol_type = other DNA
aacattatcaggggccgtatcgtccgaaagatgatggctatgaggcgaagggcagggtactgaaacagcatgtga

SEQ ID NO: 431229 - DNA, 75 bp, synthetic construct
  source 1..75: mol_type = other DNA
cgggcgattggggtagaactggaagctgacagatttattcagaccaccgaagaggtggaaaaactgagcaaaaca

SEQ ID NO: 431230 - DNA, 75 bp, synthetic construct
  source 1..75: mol_type = other DNA
aaatgtcagatgaagatgaatatcggactttggccccggtaaacgtttgggataatttccgttttacttacttca

SEQ ID NO: 431231 - DNA, 75 bp, synthetic construct
  source 1..75: mol_type = other DNA
cgcccgggagacctggttgcagatttcttcatggggtctggctcaaccataaaagcggctatgtcgctgggacgt

SEQ ID NO: 431232 - DNA, 75 bp, synthetic construct
  source 1..75: mol_type = other DNA
ggaaatggtcagttcgccgcagtggctgaagtcaccgttactgaagcgggcgctgccagggtaaacggaggtaat

SEQ ID NO: 431233 - DNA, 75 bp, synthetic construct
  source 1..75: mol_type = other DNA
aatgcgttggcgtctgtggtttcccacaggctgagtctaatgcacggaaaaaacttgaggatctggtttgcggtc

SEQ ID NO: 431234 - DNA, 75 bp, synthetic construct
  source 1..75: mol_type = other DNA
cgtccgggtgacctggtggcggattttttcatgggttctggctcaaccataaaagcagctatggcgctcgggcgt

SEQ ID NO: 431235 - DNA, 75 bp, synthetic construct
  source 1..75: mol_type = other DNA
gtggcaaaagggaaaacaaccaccctgacggtttcttttgagccggaaagtgcaaccgacaagacgttcagagcg

SEQ ID NO: 431236 - DNA, 75 bp, synthetic construct
  source 1..75: mol_type = other DNA
taaagaggatgtttacgaaaggaaaagcacagagctaaagcagcacattatgacgccgctgattgattacttccg

SEQ ID NO: 431237 - DNA, 75 bp, synthetic construct
  source 1..75: mol_type = other DNA
gttgtgagctaatcaacgctgattgcctggaatttatccagaccttaccggaaaactctgtcgatctgatagtca

SEQ ID NO: 431238 - DNA, 75 bp, synthetic construct
  source 1..75: mol_type = other DNA
aacattatcagggaccgtatcgcccgaaagatgatggctatgaggcgaagggcagggcactgaaacagcatgtga

SEQ ID NO: 431239 - DNA, 75 bp, synthetic construct
  source 1..75: mol_type = other DNA
aatcatatcatctgggcgaagccgtccggacgctggaacgggtgcaacaaggaaagcctgcgtgcgtatttcccg

SEQ ID NO: 431240 - DNA, 75 bp, synthetic construct
  source 1..75: mol_type = other DNA
gtattttggcgtgacggcgcaggtgccgtacacggatgtgtggacgcacaaacccgtacagttctatcccgggaa

SEQ ID NO: 431241 - DNA, 75 bp, synthetic construct
  source 1..75: mol_type = other DNA
cgggtggcagaagagaagcatcagcggggtgaactggaaaagccccaccaccagctgctggagacgtatacttca

SEQ ID NO: 431242 - DNA, 75 bp, synthetic construct
  source 1..75: mol_type = other DNA
ataatgctcctatcgatcataagactggggatagctttgttagtggagttaaagtaggtagtgggaatggatata

SEQ ID NO: 431243 - DNA, 75 bp, synthetic construct
  source 1..75: mol_type = other DNA
ggcgttgagctggagactgagcgttttgagcagacggtcagggaagtacaggatttagtcagtcagaacggatga

SEQ ID NO: 431244 - DNA, 75 bp, synthetic construct
  source 1..75: mol_type = other DNA
acgtccaggcaaatagctgacgctaccggaaagaaaaatatggcgtctcactggttcggtaccagtcagtggcaa

SEQ ID NO: 431245 - DNA, 75 bp, synthetic construct
  source 1..75: mol_type = other DNA
gtgttgagcttatcaacgctgactgcctgcaatacctcgcaaccctcccagataacaccatcgaccttattgtta

SEQ ID NO: 431246 - DNA, 75 bp, synthetic construct
  source 1..75: mol_type = other DNA
cctgtgaaaaaccggcggagatgctgcggcagataatttgtgcgagcagccgtcctggtgacatggtggcggatt

SEQ ID NO: 431247 - DNA, 75 bp, synthetic construct
  source 1..75: mol_type = other DNA
atgttttttatcgctttgctgatttttcacatgttacctttccaggtacaacagcggttacattgtctggtgaca

SEQ ID NO: 431248 - DNA, 75 bp, synthetic construct
  source 1..75: mol_type = other DNA
ctaccgaacgaaagcgattatctgaaattacaggcgctgtttgcccgggtggcagaagagaagcatcagcggggt

SEQ ID NO: 431249 - DNA, 75 bp, synthetic construct
  source 1..75: mol_type = other DNA
aacgtgggcaaaccttctgtagcggaagaacgcagcaaaattacgccggtcactgcgattaaggtgacgccgaca

SEQ ID NO: 431250 - DNA, 75 bp, synthetic construct
  source 1..75: mol_type = other DNA
aagtgaccaacgtgggtaaaccttctgtggcggaagaacgcagcgaaattacgccggtcactgcgattaaggtga

SEQ ID NO: 431251 - DNA, 75 bp, synthetic construct
  source 1..75: mol_type = other DNA
gcctttgcggctccgttgtcagatactgactggctgcgtcttgcgatggtgaaggatttacagccgggcgaaatg

SEQ ID NO: 431252 - DNA, 75 bp, synthetic construct
  source 1..75: mol_type = other DNA
gccaccaacgggcaatgtggcaaagggtcagaatatcaccctgaccgtggctgttcagccggaaggggcgacgga

SEQ ID NO: 431253 - DNA, 75 bp, synthetic construct
  source 1..75: mol_type = other DNA
atggcaacaccaaatcccctggagccggtaaaaggtgccggtaccactctgtgggtttacaacggcaaggctgat

SEQ ID NO: 431254 - DNA, 75 bp, synthetic construct
  source 1..75: mol_type = other DNA
gacgccgacatccggtacggtggcaaaagggaaaacaaccaccctgacggtttcttttgagccggaaagtgcaac

SEQ ID NO: 431255 - DNA, 75 bp, synthetic construct
  source 1..75: mol_type = other DNA
gacattcagggcgatttccgccgatccatcaaaagccaccattagcgtgaaagatatgacgattactgtgacggg

SEQ ID NO: 431256 - DNA, 75 bp, synthetic construct
  source 1..75: mol_type = other DNA
agtgaccaacgtgggcaaaccttccgtggcggaagaacgcagcaaaattacgccggtcactgcaattaaggtgac

SEQ ID NO: 431257 - DNA, 75 bp, synthetic construct
  source 1..75: mol_type = other DNA
acggcggagtcctacgacgataactatctggacgatgatgatgctgactgggtttccaccggacagggccagaaa

SEQ ID NO: 431258 - DNA, 75 bp, synthetic construct
  source 1..75: mol_type = other DNA
atgccaacacctaatcctcttgagccggtaaaaggctcaggcaccacactctggctttattccgggcagggtgac

SEQ ID NO: 431259 - DNA, 75 bp, synthetic construct
  source 1..75: mol_type = other DNA
ccgtacagccggatacggcatcggacaaaaccttccgggtgtcatctgatcacaataatgtggcgacggtgaccg

SEQ ID NO: 431260 - DNA, 75 bp, synthetic construct
  source 1..75: mol_type = other DNA
tgaaagggaacacgatcaccgtgaaaggtgttgcggcaggtaaagcgcagatccctgtggttaccggcaatggtg

SEQ ID NO: 431261 - DNA, 75 bp, synthetic construct
  source 1..75: mol_type = other DNA
atggcaacaccaaatccccttgagccggtaaaaggtgccggtaccaccctgtgggcttacaacggcaagggtgac

SEQ ID NO: 431262 - DNA, 75 bp, synthetic construct
  source 1..75: mol_type = other DNA
aatctcgcgatacctttattcgtctgctgaacgccaccccgaacggtgtgatccgcaactccgacgtggcaaaag

SEQ ID NO: 431263 - DNA, 75 bp, synthetic construct
  source 1..75: mol_type = other DNA
cagattatccacgcgggcctggaatgtggtctgtttaaaaaaccgtatccggaaatggacatggtttctatcggg

SEQ ID NO: 431264 - DNA, 75 bp, synthetic construct
  source 1..75: mol_type = other DNA
accgctgagtcctatgacgacagttatctcgatgatgaagatgcggactgggccgcgaccggacaggggcagaaa

SEQ ID NO: 431265 - DNA, 75 bp, synthetic construct
  source 1..75: mol_type = other DNA
atgccattgcccgggcggaagacgtggtgttgtgcctgtccgggatgagcggggctgttcgtccggatactgata

SEQ ID NO: 431266 - DNA, 75 bp, synthetic construct
  source 1..75: mol_type = other DNA
ggtcagaatatcaccctgactgtggccgttcagccggaaggggcgacggataaaaccttccgcgccacgtcagcg

SEQ ID NO: 431267 - DNA, 75 bp, synthetic construct
  source 1..75: mol_type = other DNA
accgacatccggtacggtggcaaaagggaaaacaaccaccctgacggtttcttttgagccggaaagtgcaaccga

SEQ ID NO: 431268 - DNA, 75 bp, synthetic construct
  source 1..75: mol_type = other DNA
atgtcaacaccaaatccccttgcgccggtaaaaggtgccggtaccactctgtgggtttataccggtcagggtgat

SEQ ID NO: 431269 - DNA, 75 bp, synthetic construct
  source 1..75: mol_type = other DNA
aaattcactgcctgatccgttctctgatcgacagcggtaaagactacgtggtgagcatgctggattcgctgggta

SEQ ID NO: 431270 - DNA, 75 bp, synthetic construct
  source 1..75: mol_type = other DNA
caaaatttgttctattcctcacccgtcctatcatgaagagcaactcgctgaatacattgttggttgggcaaaaga

SEQ ID NO: 431271 - DNA, 75 bp, synthetic construct
  source 1..75: mol_type = other DNA
tacggatgtgtggacgcacaaacccgtacagtactatcccgggaaacatccgtgcgaaaaaccggcagaaatgct

SEQ ID NO: 431272 - DNA, 75 bp, synthetic construct
  source 1..75: mol_type = other DNA
tcttcatggggtcgggttcgacagtcaaagccgcgatggcgctggggcgtcgtgcaactggcgttgagctggaga

SEQ ID NO: 431273 - DNA, 75 bp, synthetic construct
  source 1..75: mol_type = other DNA
aaaagcagcactttcgctggggcgtcgtgcggttggcgtggaactggaagaagagagatttaatcagactgtaag

SEQ ID NO: 431274 - DNA, 75 bp, synthetic construct
  source 1..75: mol_type = other DNA
gatggcgctggggcgtcgtgcaactggcgttgagctggagactgaacgttttgagcagacggtcagggaagttca

SEQ ID NO: 431275 - DNA, 75 bp, synthetic construct
  source 1..75: mol_type = other DNA
cgtccgggtgacctggttgcagatttttttatgggctcaggttcaacggtaaaagccgcactggcgctcgggcgt

SEQ ID NO: 431276 - DNA, 75 bp, synthetic construct
  source 1..75: mol_type = other DNA
cacataaaccggtgcagttctatcccgggaaacatccgtgcgaaaaaccggcagaaatgctgcagcagataatca

SEQ ID NO: 431277 - DNA, 75 bp, synthetic construct
  source 1..75: mol_type = other DNA
ccggcaaataatcaatgccagtagtcgacctggtgatctggttgctgatttttttatgggatccggttccacaat

SEQ ID NO: 431278 - DNA, 75 bp, synthetic construct
  source 1..75: mol_type = other DNA
acgtcaaaacagatagcggaagccaccggaaagaaaaacatggcttcgcactggtttggtgccagtcagtggcag

SEQ ID NO: 431279 - DNA, 75 bp, synthetic construct
  source 1..75: mol_type = other DNA
ccggacgctggaacgggtgcaacaaggaaagcctgcgggcgtatttccccgccacagagcgcattctgttcgcgg

SEQ ID NO: 431280 - DNA, 75 bp, synthetic construct
  source 1..75: mol_type = other DNA
cattatcaggggccgtatcgtccgaaagatgccgggtatgcggcgaagggcagtgcactgaaacagcatgtgatg

SEQ ID NO: 431281 - DNA, 75 bp, synthetic construct
  source 1..75: mol_type = other DNA
tgggatccggttccacaataaaagcagcaatggcgctggggcgtcgggccttaggtgttgagcttgagtcagagc

SEQ ID NO: 431282 - DNA, 75 bp, synthetic construct
  source 1..75: mol_type = other DNA
tggccccgctgattgcttactttcgttatgcgcgcgctgccctggggataacggcaaaacagattgctgctgtca

SEQ ID NO: 431283 - DNA, 75 bp, synthetic construct
  source 1..75: mol_type = other DNA
actgaaccggcagtatgcggaactgcagagtgaatataagcatctgcggcggtattttggcgtgacggcgcaggt

SEQ ID NO: 431284 - DNA, 75 bp, synthetic construct
  source 1..75: mol_type = other DNA
ccggaaagaaaaacatggcttcgcactggtttggtaccagtcagtggcagttaccgaatgaggccgattacagta

SEQ ID NO: 431285 - DNA, 75 bp, synthetic construct
  source 1..75: mol_type = other DNA
aacattatcaggggccataccagctcaaaagtgacggttatgcagcaaaggggcgcgagcttaagcagtatgtca

SEQ ID NO: 431286 - DNA, 75 bp, synthetic construct
  source 1..75: mol_type = other DNA
taccgatgtgtggacgcataaaccggtgcagttctatcccgggaaacatccgtgcgaaaaccggcagaaatgctg

SEQ ID NO: 431287 - DNA, 75 bp, synthetic construct
  source 1..75: mol_type = other DNA
tctgttgacctgatagtcacggacccgccgtactttaaagtgaagcctgagggctgggataaccagtggaagggc

SEQ ID NO: 431288 - DNA, 75 bp, synthetic construct
  source 1..75: mol_type = other DNA
gtgcagtactatcccgggaaacatccgtgcgaaaaaccggcagaaatgttgcagcagataatcagcgcaagcagt

SEQ ID NO: 431289 - DNA, 75 bp, synthetic construct
  source 1..75: mol_type = other DNA
aacattatcaggggccgtatcgcccgaaagatgatggctgtgaggcgaagggcagggcactgaaacagcatgtga

SEQ ID NO: 431290 - DNA, 75 bp, synthetic construct
  source 1..75: mol_type = other DNA
gttgcgtgaacatttcaacgtgcttaaccatatcatctgggcgaagccgtccggacgctggaacgggtgcaggaa

SEQ ID NO: 431291 - DNA, 75 bp, synthetic construct
  source 1..75: mol_type = other DNA
cagttctggcgggtgttaaaacctgccggaagcctttacctgttctgtgggcatcgcctggcatctgatattgag

SEQ ID NO: 431292 - DNA, 75 bp, synthetic construct
  source 1..75: mol_type = other DNA
gataattaccaccagcagtcgtccgggagatctggttgcagattttttcatggggtcgggttcgacggtcaaagc

SEQ ID NO: 431293 - DNA, 75 bp, synthetic construct
  source 1..75: mol_type = other DNA
tgcagttctatcccgggaacatccgtgcgaaaaccggcagaaatgctgcagcagataatcagcgctagcagtcgt

SEQ ID NO: 431294 - DNA, 75 bp, synthetic construct
  source 1..75: mol_type = other DNA
atgccgggtatgaggcgaagggcagggcactgaaacagcatgtgatggccccgctgatttcttactttcgtgatg

SEQ ID NO: 431295 - DNA, 75 bp, synthetic construct
  source 1..75: mol_type = other DNA
gggtgacctggttgcagatttcttcatggggtcgggttcgacagtcaaagccgcgatggcgctggggcgtcgtgc

SEQ ID NO: 431296 - DNA, 75 bp, synthetic construct
  source 1..75: mol_type = other DNA
caaatctttgcggcgttatttttctgtatcggctgctgttccgtatacggatgtctggatgtataagcctgtaca

SEQ ID NO: 431297 - DNA, 75 bp, synthetic construct
  source 1..75: mol_type = other DNA
gttcagttctacccgggtaaacatccgtgtgagaaacctgcggatatgctccggcaaataatcaatgccagtagt

SEQ ID NO: 431298 - DNA, 75 bp, synthetic construct
  source 1..75: mol_type = other DNA
ctggttcagtgccagtcagtggcagttaccgaacgaaagcgattatctgaaattacaggtgctgtttgcccgggt

SEQ ID NO: 431299 - DNA, 75 bp, synthetic construct
  source 1..75: mol_type = other DNA
cgtgcaactggcgttgagctggggactgaacgttttgagcagacggtcagagaagttcaggatttagtcagtcag

SEQ ID NO: 431300 - DNA, 75 bp, synthetic construct
  source 1..75: mol_type = other DNA
cctgcattttattcagtccctgcctgatgattccattgacctgattgttaccgatccgccttacttcaaggtgaa

SEQ ID NO: 431301 - DNA, 75 bp, synthetic construct
  source 1..75: mol_type = other DNA
aaaacatcagcgcggggaactggaaaagccacaccaccagctggtcagcacatacagtgaactgaaccggcaata

SEQ ID NO: 431302 - DNA, 75 bp, synthetic construct
  source 1..75: mol_type = other DNA
tggggataactttgctagtggagttaaagtaggtagtgggtatggatataaaccgtttgttgttggcacgccttc

SEQ ID NO: 431303 - DNA, 75 bp, synthetic construct
  source 1..75: mol_type = other DNA
gaaaattctgttgacctgatagtcacggacccgccgtactttaaagtgaagcccgagggctgggataaccagtgg

SEQ ID NO: 431304 - DNA, 75 bp, synthetic construct
  source 1..75: mol_type = other DNA
gaactggaaaagccacaccaccagctggtcagcgcatacagtgaactgaaccgtcaatacgccagcctgctggaa

SEQ ID NO: 431305 - DNA, 75 bp, synthetic construct
  source 1..75: mol_type = other DNA
aaaagcggcactggcgctcgggcgtcgtgcgattggcgttgaactggagacaggacgttttgagcagacagtcag

SEQ ID NO: 431306 - DNA, 75 bp, synthetic construct
  source 1..75: mol_type = other DNA
gtacagtactatcccgggaaacatccgtgcgaaaaaccggcagaaatgctgcggcagataatcagtgcgagcagt

SEQ ID NO: 431307 - DNA, 75 bp, synthetic construct
  source 1..75: mol_type = other DNA
actggtttggtaccagtcagtggcagttaccgaacgagggtaattacaacaaattgcaggcgttgtttgcgcgtg

SEQ ID NO: 431308 - DNA, 75 bp, synthetic construct
  source 1..75: mol_type = other DNA
aaagtgaagcctgagggctgggataaccagtggaagggcgacgatgattacctgaagtggctggaccagtgtctg

SEQ ID NO: 431309 - DNA, 75 bp, synthetic construct
  source 1..75: mol_type = other DNA
ggctggaccactgtctggcccagttctggcgggtgttgaaacctgccggaagcctttacctgttctgtgggcatc

SEQ ID NO: 431310 - DNA, 75 bp, synthetic construct
  source 1..75: mol_type = other DNA
aagggcgacgatgattacctgaaatggctggaccagtgtctggctcagttctggcgggtactgaagcctgccgga

SEQ ID NO: 431311 - DNA, 75 bp, synthetic construct
  source 1..75: mol_type = other DNA
tggccccgctgatttcttactttcgtgatgcgcgagaatctctggggataacatcaaaacagatagcggaagcca

SEQ ID NO: 431312 - DNA, 75 bp, synthetic construct
  source 1..75: mol_type = other DNA
tgcgcgtgttgcagcagaaaaacatcagcgcggtgaactggaaaagccacaccaccagctggtcagcacatacag

SEQ ID NO: 431313 - DNA, 75 bp, synthetic construct
  source 1..75: mol_type = other DNA
gaaaactctgtcgatctgatagtcacagacccgccatactttaaagtgaagcccgagggctgggataatcagtgg

SEQ ID NO: 431314 - DNA, 75 bp, synthetic construct
  source 1..75: mol_type = other DNA
atacagtgagctgaaccggcagtatatggaactgctgagtgaatataaaaatttgcggcggtatttcggtgtgac

SEQ ID NO: 431315 - DNA, 75 bp, synthetic construct
  source 1..75: mol_type = other DNA
ccggaaagaaaaacatggtgtcgcactggtttggtgcccgccagtggcagttaccgaacgaggatgattacagaa

SEQ ID NO: 431316 - DNA, 75 bp, synthetic construct
  source 1..75: mol_type = other DNA
gtgttgatttaatcaacgctgattgcctgcattttattcagtccctgcctgataactccattgatctgattgtta

SEQ ID NO: 431317 - DNA, 75 bp, synthetic construct
  source 1..75: mol_type = other DNA
aaccacattatctgggcgaagccgtccggacgctggaacgggtgcaacaaggaaagcctgcgggcgtatttcccg

SEQ ID NO: 431318 - DNA, 75 bp, synthetic construct
  source 1..75: mol_type = other DNA
agtctttacctgttctgtggtcatcgcctggcatctgacaccgaaatcatgatgcgtgaacgctttaatgtgctg

SEQ ID NO: 431319 - DNA, 75 bp, synthetic construct
  source 1..75: mol_type = other DNA
acggcaaaacagatagtggatgccacaggaagaaaaaccatggtgtcgcactggttcagtgccagtcagtggcag

SEQ ID NO: 431320 - DNA, 75 bp, synthetic construct
  source 1..75: mol_type = other DNA
cgtgcaactggcgttgagctggagactgaacgttttgagcagacggtcagggaagttcaggatttagtcagtcag

SEQ ID NO: 431321 - DNA, 75 bp, synthetic construct
  source 1..75: mol_type = other DNA
gcctggcatctgatatcgaaatcatgatgcgtcagcgctttaatgtgctgaaccacattatctgggcgaagccgt

SEQ ID NO: 431322 - DNA, 75 bp, synthetic construct
  source 1..75: mol_type = other DNA
caagaaccacggttaatgatgataaccaacggccaggttgaaagcggtatggatgataaacatctgggaattctg

SEQ ID NO: 431323 - DNA, 75 bp, synthetic construct
  source 1..75: mol_type = other DNA
tggaaaatctgccgcgtaacgatcagggcaaagtggatttcgacaaagacttctttggtaaagagtctttcctga

SEQ ID NO: 431324 - DNA, 75 bp, synthetic construct
  source 1..75: mol_type = other DNA
ttctttaacgagcagggattcttctgggtttcaacgccactgattaccgcatctgataccgaaggcgctggcgaa

SEQ ID NO: 431325 - DNA, 75 bp, synthetic construct
  source 1..75: mol_type = other DNA
attcatcgtctttgctacattttttaactacacaacgcgcctttattatgcgttaaaatttgcagtggcgatggc

SEQ ID NO: 431326 - DNA, 75 bp, synthetic construct
  source 1..75: mol_type = other DNA
tttgcagtggcgatgactattgccaatatgggttatcaggctttatgtttgtatatcgataatagctttgcgatt

SEQ ID NO: 431327 - DNA, 75 bp, synthetic construct
  source 1..75: mol_type = other DNA
cgattaccagaatatcgccgctctgggcagggctgattggtgtctgtacgtttattgccgcgttgttattgacga

SEQ ID NO: 431328 - DNA, 75 bp, synthetic construct
  source 1..75: mol_type = other DNA
ccgcacagcgccaatcgaccgccagtggtttccgatgccgcccctgatttcgtgaaaaccgtaaccgctgcgatg

SEQ ID NO: 431329 - DNA, 75 bp, synthetic construct
  source 1..75: mol_type = other DNA
gcgtgccatttattcatttctttgatggtttccgcacgtcccacgaaatcaataaaattgtcccgctggccgatg

SEQ ID NO: 431330 - DNA, 75 bp, synthetic construct
  source 1..75: mol_type = other DNA
aatcggccaccggtggtttccgatgcagcgcctgatttcgttaaaaccgtcaccgctgcaatgctcgccggactt

SEQ ID NO: 431331 - DNA, 75 bp, synthetic construct
  source 1..75: mol_type = other DNA
gcggttctcgaagaacgtgctgacgatatgaaattcttcgctgaacgcgtggataaagatgcagtttcacgtctg

SEQ ID NO: 431332 - DNA, 75 bp, synthetic construct
  source 1..75: mol_type = other DNA
atgtctagtccacgtcagtatggcctcttaccgtgcaaattgcaaggaggaggagtaaaccatgaaactaccggg

SEQ ID NO: 431333 - DNA, 75 bp, synthetic construct
  source 1..75: mol_type = other DNA
atccctcgcgtggttgaaatgcagtccgaagcgggcgctatcgcaacggtgcatggcgctttgcaaacaggcgcg

SEQ ID NO: 431334 - DNA, 75 bp, synthetic construct
  source 1..75: mol_type = other DNA
cgattgccagaatatcgccgctctgggcggtgctgattggtgtctgtacgttttttgccgcgctgttatggccga

SEQ ID NO: 431335 - DNA, 75 bp, synthetic construct
  source 1..75: mol_type = other DNA
cgttgaggcatttcaggcgtttcatcgcccgcgcgtggaagccttgctggatgccagggccgatctgctggcctg

SEQ ID NO: 431336 - DNA, 75 bp, synthetic construct
  source 1..75: mol_type = other DNA
ataaggtcagcgataaacgctcacctaaagaaatcgctgaatggctcttaatgttgatggggcaggagcttcgtg

SEQ ID NO: 431337 - DNA, 75 bp, synthetic construct
  source 1..75: mol_type = other DNA
tccgcgaaattattaaagacgtcggcgtggcgattatcggccagaccagctcactggctccggcggataaacgtt

SEQ ID NO: 431338 - DNA, 75 bp, synthetic construct
  source 1..75: mol_type = other DNA
tggcagcagtttgcatggcagagagcagaacactgccagcggcgcagcaggggtaaggccggacatcaaccacgc

SEQ ID NO: 431339 - DNA, 75 bp, synthetic construct
  source 1..75: mol_type = other DNA
acgggctgcctgtatagctccccggacagactggcagctgtttgcccggaaaagggctgaacactgccaccggcg

SEQ ID NO: 431340 - DNA, 75 bp, synthetic construct
  source 1..75: mol_type = other DNA
gggacgctcaggtctggcgttaccagcgcaccggaaaccgggccgtcagtctggaactcaggggattctggaagg

SEQ ID NO: 431341 - DNA, 75 bp, synthetic construct
  source 1..75: mol_type = other DNA
gcgcaccaccgcgctgctcaccgacatgaatcaggtactggcctccagtgcaggtaacgcggttgaagttcgtga

SEQ ID NO: 431342 - DNA, 75 bp, synthetic construct
  source 1..75: mol_type = other DNA
cactgcctcgatcctggcgaagaaactggcggaaggtctggatgcgctggtgatggacgtgaaagtgggtagcgg

SEQ ID NO: 431343 - DNA, 75 bp, synthetic construct
  source 1..75: mol_type = other DNA
tttcagaattcgaaactaccgaacaagaaaacagttacaacgaatggttacgcgctaaagtggcgtcaagccttg

SEQ ID NO: 431344 - DNA, 75 bp, synthetic construct
  source 1..75: mol_type = other DNA
acgatggcgctgtgcgtggagatgcttacctccggcaaactggcgaaagatgacgccgaagcgcgcgcgaaattg

SEQ ID NO: 431345 - DNA, 75 bp, synthetic construct
  source 1..75: mol_type = other DNA
ggctccggcggataaacgtttctacgcgacccgtgatattaccgcaaccgtggactccatcccgctgatcactgc

SEQ ID NO: 431346 - DNA, 75 bp, synthetic construct
  source 1..75: mol_type = other DNA
atggacgtgaaagtgggtagcggcgcgtttatgccgacctacgaactctctgaagcccttgccgaagcgattgtt

SEQ ID NO: 431347 - DNA, 75 bp, synthetic construct
  source 1..75: mol_type = other DNA
gcaaccggtaaatccgcacagtgcgaatcggccaccggtggtttccgatgcagcgcctgatttcgttaaaaccgt

SEQ ID NO: 431348 - DNA, 75 bp, synthetic construct
  source 1..75: mol_type = other DNA
aaattaactggtcgtactgataaaattgatgcagctgttggtgacattgatggtcgtgtcactaataacacgcaa

SEQ ID NO: 431349 - DNA, 75 bp, synthetic construct
  source 1..75: mol_type = other DNA
caatgagccatgcagaaaacgcactgactaacagtgaatgtttgaggcaaatatttcttatctggcttaatggtt

SEQ ID NO: 431350 - DNA, 75 bp, synthetic construct
  source 1..75: mol_type = other DNA
tggacagttaaaatcagagaagagttctctgattttctgaaaactgtagaagcgcttcgtaatgagtatggtgaa

SEQ ID NO: 431351 - DNA, 75 bp, synthetic construct
  source 1..75: mol_type = other DNA
aatacccgtacgctgcagcaacattcagcacgtctggacagccagcagcgccagattaatgaaaaccacaaggaa

SEQ ID NO: 431352 - DNA, 75 bp, synthetic construct
  source 1..75: mol_type = other DNA
tttgatggtgctacaaatacggcttatataaagtgggggaaggacggaagtatagtatcgcagaggggggaaaag

SEQ ID NO: 431353 - DNA, 75 bp, synthetic construct
  source 1..75: mol_type = other DNA
ttttatctgcggcagttttttcagtgctgtttgttccttgtgtatcgtttgcacaggatgctacggggtattatt

SEQ ID NO: 431354 - DNA, 75 bp, synthetic construct
  source 1..75: mol_type = other DNA
gcttaaccgcaccagtgcctcactggaacagttgcttgatacggccaacgtagaaaacgtcgatctgatcctgac

SEQ ID NO: 431355 - DNA, 75 bp, synthetic construct
  source 1..75: mol_type = other DNA
aaaacgaatgtcgtttcaccaatctatctcttaaaaaagcctactgcatacatggctgaaatagataaccgaagg

SEQ ID NO: 431356 - DNA, 75 bp, synthetic construct
  source 1..75: mol_type = other DNA
cggtacttatggcaagctccgcaggtgttttcattctggcttataaagtcaaaacgaatgtcgtttcaccaatct
